United States Patent Application Publication US 2004/0214272 A1 - sequence listing, part 35

SEQ ID NO: 145053 - DNA, 624 bp, Zea mays
  unsure (1)..(624): unsure at all n locations
  Clone ID: MRT4577_63772C.1
accggtaccggncttcccgggctcgttgacatttctcaaacactttcccaccagaaacctgggcattgcgggctacatcagacaacatgggaatcatccaattcctcaacctctacaaagaattcaaagacacagtccaagaaaatcctctttggggagacgagatcgaaatgcatcttataaacatcgatccacaaacaaaaattcccagagtgcaacccaacacagaatacctctttgagtccttaaaatctgatgatttcgttatccaccctgaattcggtgcttggatgctcgaaactgttccattacaaccttatgacttgagtggaaaccccaatatccctcttaacaatttcagagctcgcagaagtacaattaattccctttgccgtaacggtgatgttctatacgcaggtaccgcattcccattgatgggagttgaagactactttatccccagagaaggagaagatgcagatacttcccaaaggaatccattacagattgatttaatgaatcgacatccaagattcccaacgatggcagcaaacgcaagagaaagaagaggagaagatctgtgtatgcttgcgccaattttcgttgatgaaaagacatcaatgc

SEQ ID NO: 145054 - DNA, 619 bp, Zea mays
  Clone ID: MRT4577_63773C.1
aaacggaaacgggcttttttcgttccaaataagcccaggggaaagggaagggggccagttttatggccttttcccccgactacaaaaataattgtaaaaaaaaaaacaaataatgcccagtttttttcattcaaaaagttgaaaaactggggaaaaaaaaagctttcttcaaaccccaaaccaaaaccaacatttaaggggaaacattgaatggtcccaggcccaataacttaactgaccaaacaacaagacggggggaattagttaaactggggctttgttttgacgaggacagtaaaaatgttaccaaatccctgcattaaaaaaatctgatgcttgataggctgatagcccaacaaactttataaggcccaacagctgtttttgtcactgctaaatttgactccctttgaataggttcaacttgccctgctcctaaatttttttaaaaaatattttcccgggggccatcgtttttccattaaattccatcatccgcttttcccgggtaataattttcggggtcgttttcgctagccgtttcccactcaaagtcgtaagcatcctggccaaacccgttgttagcatttccttcacagtgtacccccccgtgcttaaa

SEQ ID NO: 145055 - DNA, 719 bp, Zea mays
  Clone ID: MRT4577_63774C.1
aattcctctgggtggtgcgagctcctctcggcgacaacccggagagggagttcggcgacaaggctgacccggacctgcaggcgctcctgcccgaagggttcctggagaggaccagagggcgcggccttgtcgtcaagctatgggcgccgcaggtggcggtgctccggcacaaggcgacgggcgcgttcgtgacgcactgtgggtggaactctgtgctggagggggtcatggccggcgtgcccatgctctgctggccgttgtatgcggagcagaagatgaacaaggtgctcatggtggaggagctacggatcggcgtggagcttgctgggtggcaccagcatgggttggtgaaggccgaagagctggaggccaaggtgaggctggtcataaaggccgaggaaggggagcagcttagggcgcgtgagagcacacaaaaaggccccggacatggtctggaaggatggtggatcgtcgcgtgtatcgttttgccagttcttgtcggacgtggtcaacgttagcccggatcggacactcggttgatgcatatgcatcggtcggattgtgaggagttaaaatttaatcttaaaaagccttggtcatttccttatttttaatattttgctctaattagcttcttccgccgtctgcgaaatgatcaattgatctaggggtgctagtgttgtgtcgcatgggcggccaaatgagatatacataggcgc

SEQ ID NO: 145056 - DNA, 635 bp, Zea mays
  unsure (1)..(635): unsure at all n locations
  Clone ID: MRT4577_63775C.1
aaaaaaaatacgattccgatctcccgtgccttacctcctcccgcaacaacgcgcagctccaccggccccgagcccccgacgtggctctacctcgtcgcctcgtcgctgcgctggctcggcggcacagcgccggggccgcctcctctacggccacatcacctcccctccaaggctgaggaggacacatggtggagggcgaggaagcggtcctcgtcgcaggggagcgcgatggggtccgaggctgccaggaagccctactcctccacctgacgcagcagatccgggaacgccggatggctgaggtgcgccaccagcaccatgatctacctctgtcggttctgcacggggcaatccgactccctttgctcatgttgtcacccacaaggccacaacccacaacaaacaggtacacgttcccagagtagctaaaaatttgtttacatattagcagagatgatatcagatcaagaaagaaactgaagatatntattgatcaagaaagaaactgaacttgaaaataatgcttcgacttagcagagccttgggaaatgggtccagacaacccggggtgttctcaagagctcatgcaaaggtgtaaatcttactgcgagnaatggtagccaagcttgaaggag

SEQ ID NO: 145057 - DNA, 857 bp, Zea mays
  Clone ID: MRT4577_63776C.1
aagtcataattcgtcagctaacgcaatgccggacctcagtggctcctccaccccttccttccttcgtcttggcatcagccagccgaccgggttggttcctgcctccttcggctccccgccacaactgcgcgtccggtaccttgagaacaaccggttgtctggacccattcccaaggctctgctaagtcgaagcattattttcaagttcagttttgatcaataatatcttcagtttctttcttgatctgatatcatctctgctaatatgtaaacaaattttcagctactctgggaacgtgtaccttggaacagcagggaagcaaaagaagaagcatgtcatcatcattatattatatctgctctccacagggaaacacttccgttccacggaaacgaaggcacctgtttgttgtgggttgtggccttgtgggtgacaacatgagcaaagggagtcggattgccccgtgcagaaccgacagaggtagatcatggtgctggtggcgcacctcagccatccggcgttcccggatctgctgcgtcaggtggaggagtagggcttcctggcagcctcggaccccatcgcgctcccctgcgacgaggaccgcttcctcgccctccaccatgtgtcctcctcagccttggaggggaggtgatgtggccgtagaggaggcggccccggcgctgtgccgccgagccagcgcagcgacgaggcgacgaggtagagccacgtcgggggctcggggccggtggagctgcgcgttgttgcgggaggaggtaaggcacgggagatcggaatctgagaggcgagaggtcgggagtttgtgcctcgggccgaattggacgcctcgtgccgaatt

SEQ ID NO: 145058 - DNA, 275 bp, Zea mays
  Clone ID: MRT4577_63777C.1
ctrktaaaaacatcagktkctctcaagctcgtattaggatagcaacaaaagkbgsttaatargtgktcaagattaggcagcactacahkcaaaggtgcacaacacatarcactmgsttgtacacartaaaattcttctctsgtacacatcavgrrraaraacaaaactcctggggtctcttatttaaccaaggtcasgggctataaygtagtcctcktckkcggtrgcytcrrtcctbggccttcttggtcttgstgaccccggcggtccgcgcc

SEQ ID NO: 145059 - DNA, 246 bp, Zea mays
  Clone ID: MRT4577_63778C.1
gcctcaccaagatttgagagcaccgccgaccctcggaagatcaaccgctgttcatcatggatagaggaggcgtggcgggggcgcacgcgtccggggagggtgcgtctagagcctgcagccaccgtagcgaaatctccaatcttgatgatgcgcggggcgaagattgccgctgccgtccttagggtctagcaccgagattgccgggtgctgacccttctccctatcgacacgccatccatttcctcg

SEQ ID NO: 145060 - DNA, 480 bp, Zea mays
  Clone ID: MRT4577_63779C.1
gggacaaggtggggaatagcccaaggtcgcctttaaaaagaaacaccctttcgccacaagggggaaagggcccaaacaaaagcatgccttggtttttcaagccccggaaaaatgggcgaattggggggtcaacccggccattttgccggtttaaattttttttgaaggaacaaaaggcccccccattttgccgaaccctgggtttaccccggaatttccgacccggacccggaaggggaccaacttttcctataaggaggcggattaaaacctgggggaaacaagggcaaaagtggttcccgggggaaaatggtattccctcacaatttcacacaaaataacaacccgaaacataaaagggaaaacccggggggcccaaagagggagcctacccacaataattggggtgggcccaccggccccttttcaaatgggaaaaccggtgggccaacttcattaattaattcgccaaccccccgg

SEQ ID NO: 145061 - DNA, 381 bp, Zea mays
  unsure (1)..(381): unsure at all n locations
  Clone ID: MRT4577_6377C.1
aaaaaaaccccccaaaaaagggggcccccaacccccccccaaaaacctttccccgggcccccccccggggggggggggaccccccccccccccggtttttaacaagggcccccccccttttttttagccccaaagggccccgggaatttccccccccccaccccggggggggggggggtttaagaaaccaaattnnnnccccccccccttttccccccctctttcgccttctttccccttggggcacccctgtcggtgccaccgccccccatgccgcgctccttcaccttcttgccgtaagacgatgggcctcgagaccaggtgcggccactaacgcacgcgacggggcgctgttgccgatggaactccgccctagaggcg

SEQ ID NO: 145062 - DNA, 456 bp, Zea mays
  Clone ID: MRT4577_63780C.1
acatgggagctgcaagtattggtggaagtataaaaggattggttaaaaaagtttttgaacttgaaacaatataaacaaaaagctttgagcaacttaaaaaaattacttcccctatgtcaccataaccaaatcactgcacataatttattccaaaaggacaaaaagaggcctaattattgggctaaaaaccagaaaaaagggatgcaaaaaaccctaaaaaaaccagttggatttttttaaaaaaaccttccaaccaattaccccgattgccttttacctttgccttttggggatttttgttaccagctgcaaaattttgttaacggttttttgcaatttggtcaaggtttgcagggtaattgggctgctaattgccataattttgggcaggcaaagcaaaacggtttttggcccaaacaaaaacctgtgggggaaaaacaattgcacctcccgccc

SEQ ID NO: 145063 - DNA, 259 bp, Zea mays
  Clone ID: MRT4577_63781C.1
tctagatcgcgagcggccgtcctttttttttttttttgcgccctgaacatttattcaaaaaccgttttttttccccaagcgatatcccttgcgagtcaataactgaaatccccttgaaaaaaactagggtatggtaaaaatgattaaccgtccctgcggcatgtcccaaaacccggttttgcagctctaggaactctcccatttcaattccctgttttaaaggccttacctgttgtcctaggaacctaacattcccccc

SEQ ID NO: 145064 - DNA, 178 bp, Zea mays
  Clone ID: MRT4577_63782C.1
cagcatatgtctcagaggcccacggtttctcactcctcttccatagcctgcggccttcactctcatctcctggtctccagtgagatgaaccctagctccaattggtccctttaatcaattacctcttaattagtaattacttaagatcaattagcctttcactcttccacacaacata

SEQ ID NO: 145065 - DNA, 380 bp, Zea mays
  Clone ID: MRT4577_63783C.1
caccaaaaaaaaggggaaaacctatgtatacagccaggttttcttgggatctccaacgggggcccgggttttcactatgaaaaccccccaggggcccccctgggaggttatttacctacggctatgggcaatatgaaccccggccccgcatagggggcaggatgcgtgcccaaggaaccaattgtcgatgccccggacggggaatatgtgttggcactgggggagggccctcacaaatgggtgggctccaaaatcctgcgggccaactgagcaacagctgctatcagttcccttggcacaattggttggagcactggaccttatttttgggatcctataaataaaagcccttgaatgcctcctgtctggcagtttaaaaa

SEQ ID NO: 145066 - DNA, 372 bp, Zea mays
  Clone ID: MRT4577_63784C.1
gcacccctttcaagggtatccttgctgctgatgagtgaactggcaccattggcaagctgccaacacaccatcactgtcgagaacgtggacgagaaccaagcggccctccgtgagcatatgaagcgctgccctggtaccctccaatacataagcggtgagatgctatccaaggtgaccctccaccagaagaccaaggatggcaaaacaactgtcgctgtactaaaagaagcagacgtcctgcctggcatcaaggaaaacaggtgcaccattgaggttgttgcccctacaaggagaccaccacccactgccactatgacctcacctagcgcggaactaagtactacgaggccggagcccgctcagccaagcagc

SEQ ID NO: 145067 - DNA, 398 bp, Zea mays
  unsure (1)..(398): unsure at all n locations
  Clone ID: MRT4577_63785C.1
tacgcctgcagtactcttccttaattcccgaggggaggcactcnttcttctcattcttttcattctccacttccctctctttatcacacatccacttaccaagagaggggtgcctacatgaggaggggaggctttcctctttctaccctactaactactatcatggttccttcacaccccctacttaatccttctagcatcccactcgtccacttactaatgcttgaatgaaattcaaacgttatttcttcaccctctacacctattactcattacagacctctttcactacaaattcttcaacgaaaaacttatcttcactacgccattctaattttccaacttatatacggttgacatcatcaacatccttatctctatgaacactattattacac

SEQ ID NO: 145068 - DNA, 166 bp, Zea mays
  Clone ID: MRT4577_63786C.1
tcgtccggtgcgcctggcaaacccacggaagctatcccgacccgctgccgctggcgctgacgctgcccctcgccctggtcgcgctgctcctgccggccgtccgtggtgccgcggagactccgtagtgcacgacggtgcacgcggtgtcgggcttcgcggtgcggct

SEQ ID NO: 145069 - DNA, 314 bp, Zea mays
  Clone ID: MRT4577_63787C.1
taatttgtctccacaccacctcaccaaaaacgggatcatgtacatgttaaccaaaactaacaaacacccctctccattggttgcaataatatcaactctatcctcatacctaacgcaatctcatcgcttcgtcccacccccgtggcagacaaaaaaacctctcctccatacagcaagaaacgacataataaaactgcccacacagaaaaaaaaaatgccgactcggaaagaataaattcctaatcacaggcacatgaatacttctacaaagattagaagggcaactacttcaaacaatttaaaatgttcaaggt

SEQ ID NO: 145070 - DNA, 515 bp, Zea mays
  Clone ID: MRT4577_63788C.1
gaaaacaaatttgctgttcaggagtacaataagggaggtagttttctacaaagcaaaatcctcaacccagacaacagcattgacttaaaatacagatcattttgctggctagaacctttttaaagctcacacgggaggctcccaattttctggcgattggataggcaaaaggttaccatgtgcaggacggctgctaacttccctaacctcctatatgtgcagggggactttacatttataatggccacgaaatgtccaggtgtcaatttgatcaggggaaaccttcctgtatacctaaaaccttgatcgcacctttataagaacataaccttttgattcccaggaaacaaatgagattgcctgtccctccacgcttgaacggacaaccctttgaaccttgtacaaacaagtacaagttgattttagcatacaatagggcattacattgaggacacgctgactgggatttcctctggcaactaaaaatgtaggcgccaaaagtctcttggggactt

SEQ ID NO: 145071 - DNA, 398 bp, Zea mays
  Clone ID: MRT4577_63789C.1
tggatggtgtttggtggtagttttttttttatttttttcagtttttgggttttgggacatcagaacattttccattacaagaaaaaaaatacattggcccaaacaacgggctacagaatcagactgaaccaccataaggccaaaagaagccatgggatgggattaacagaaaggatgcacaatggggttttcagatctctttcttaaatttcggtcaccagccttgaaggcgttatatacccccttttatttacaacccaatcccgaacaatgtgtaacgactctgaaaggaccactcatttaggggaggttgttacaaaaattaaaggtgaccaggcgaagtggggaaacacaaggagcaggcttaccaactttggacttttggggatggaagctaa

SEQ ID NO: 145072 - DNA, 848 bp, Zea mays
  Clone ID: MRT4577_6378C.1
ggacctcaggcggcgggtacctcacaagcaccgccacacagccggacaccaacctgtggtcgcgacgccacccggccgtataaatccacgccgccccgtcgccgccggatcctgccagtgccagcacaccacggcccacgggtttcccctgtcggagagaggacgccttttggtgctgtccctgtacttctcctttcgaaaggatctctctgcgcgccggggcggcgatggcggcggcgccggcgcccctgccggcgcccgtcgcagactggtgggagcgcgtcaacggctcgccggcgtggcaggacgggatcttctgggccctcgccgtcctctacggtgccatcgctaccgcctcattcgtaagcgtctcgtcttcttctgtgaatatagctctacatggacgcctgccagtagagaaagatgcgtgctttcgtgcctctgtgctgaattatttacccagacgtgataccgtcgaaggaataagcaggcgcccgttgatgccttcatcatgccatcgcaggagaataagcattagtatctttctctatacttgtggttgacatgcagatgctggctgttaaaataataaattgagtatttgaaaaacggaagaagaaaaaaatgatcgtactgtgccatgcagatccaagttgccaggatacagtgcagagtccctgaatatggatggacaacccaaaaggtcttccagttcctgaatttcgtggtcaatggggccaggtgctctatctttgctttccgtcgccaagtgcaacaagtgaaccctccggtttggacgccttaactttgtcctgtaatgtaaatgataattccaatttgatcgacct

SEQ ID NO: 145073 - DNA, 134 bp, Zea mays
  unsure (1)..(134): unsure at all n locations
  Clone ID: MRT4577_63790C.1
gggacctcgagccgccggnctggctccagatctcaccggggaccctacccgagcatcagccatggcgatcgcggngcgcgtcctgcgccgtttctcgcgtcacctgtactcttcggtcgctcgctctctctgct

SEQ ID NO: 145074 - DNA, 293 bp, Zea mays
  Clone ID: MRT4577_63791C.1
tcgtggacgcgtggggtccaggcaggcgtacttagacgagcacctgatgtgcgagatcgaaggacagaatgtcagtgccgccgccatcagacggtcacgacggcagtgttagggcgcaccacgagagcttccccgagttaaagcctgaggagggtggtggtctcataaaggactctgatgaacctggtactcttgcaccaactggtcttttcgttggaggtacaaagtacatcggtgatccaaggagaacctggattttgtcttcccaaggaaagaagggcacctggggggcc

SEQ ID NO: 145075 - DNA, 444 bp, Zea mays
  Clone ID: MRT4577_63792C.1
cctcctttttttttttaactctaaaacaaaatggggggggtttttggagaccgatgggggtgattgacccgaccgatacatgattcttttgacataaacactgatatacatgtatccgggaccgtcactagcaccttacgtattactaatggcacacatatacatacgacgaaccactcttgatcgctgatgcatcaaaaggcgaggaccaagcgcttgttggttccggccggtgcgtacgacggagccgtcagcatcgagggtcttggccataagcttgggcgcctggggggtgtttatctccacacgcatgctctccggcttctccaccttgatgtaccccgtgggagcggtgatggtctgctccttcctatcaccgtcggtttcgatgccttcggtgcctgagacaatgctcagccaggtgttgttgccgtccaccagacg

SEQ ID NO: 145076 - DNA, 521 bp, Zea mays
  unsure (1)..(521): unsure at all n locations
  Clone ID: MRT4577_63793C.1
gaaacttcgaacctgtgagctatcatacctgtaaatcttagcaacgctcacaaacccacctccattgcgagaccgcgcaacccaccctataacacgcactaccgtactccggcccggacccacgcccggaggacggctgggggcggagcagcgcgggagccgcccctcagtgtgggatacatacgaaccagcaaggcgatggcggccacgtcaccccgcatgcaccaagtcagtgaactccttgcggacacacgggtgacacctgcactggggatcggggaccacgtctccttcgggatcctcctactgcgggtaccatcgtgcttcgagaccgcatcactgcgaaccgactggggaatgacgcgaatcccggagagctcaaggagccggcgctgcttgcatcacgaagatgcatgagctctggtgcgactgctcctccagcacctagatcccncatcacctcagggagctcctcgctgctgggactccgatcctcacttttgtcaagctgacagaaagcc

SEQ ID NO: 145077 - DNA, 563 bp, Zea mays
  Clone ID: MRT4577_63794C.1
gccccctctcgagttttttttttttttttttttttttttttttttttttttttttttttttttttttttttttttttttttttccccaagaagggatttccctaaaaaagggggcccaaaaaccggaaaacgggggatggttttaaaccccgggggtggttttaacaaaatggggaaccctaaaaaaaataccgggttacctttttcccaaccccgggccccttaaggccctaaaaattaacaagaacaattggccaaggggtcccggggctggccccaaaacccaaaaattaccacccccccggcccatttttggggccaaaaaggggcccgggccttggctccaagggtttaaaattccccctaccccttcccccattaggggctttataaaagggggttggacgaaagccaaccagggggtaacccaggggccggggagcaaaaaccttttctcccccaacagggaggctttggaaaccccctttttgggtggggccgggggcccaaaaaaacaaaaaaaggggcttggtggtcttggtttccacacctggggggcgggg

SEQ ID NO: 145078 - DNA, 2212 bp, Zea mays
  unsure (1)..(2212): unsure at all n locations
  Clone ID: MRT4577_63795C.1
cattgggtacctcggggccgctcgaggccgcaccggggtcccaccgttcagtggacgtaagaaagccacccggatcctgcgctctccttccctctccacttccgtttccggattcttgcgtttccaagtccgatacaaaccagctgtgccgcgccgcgcgagcacgtccggcgccggtgcggcaggcgaaatccgagaacactcctcccccgcgcccccgcaccgcgcatggccgcagctagccgcagatagagagaggcgcaggcgagggcgtgcagatccagatccggtgggcgggaaggacttgatcgcccccaccaccatggccggcgcggtgtcggcgctcttcctgctggacatgaagggccgcgttctcgtctggcgcgactaccgcggcgatgtctccgcgctccaggccgagcgcttcttcaccaagctcctcgacaaggagggcgattcggaagtgcactcgcctgtggtctacgacgacgctggcgtcacttacatgttcatccagcacaacaatgtcttcctcctcaccgccgctcgccagaactgtaacgcggccagcatcctcctcttcctccaccgtgtaatagatgtgtttaagcactacttcgaggagctggaagaggagtcgctcagagataacttcgtcgttgtgtatgagttgctcgatgagatgatggattttgggtacccacaatacacggaggcgaagatcctaagtgagttcatcaagacagatgcgtacaggatggaggtcacacagcgtccacccatggccgtgacaaatgctgtgtcatggaggagcgaggggatccgttacaagaagaatgaagtcttcttggatgtagtggagagtgttaacattctagttaacagcaatgggcagattgtgagatcagatgtggttggggcactgaagatgcgaacatatttgagtggaatgcctgagtgcaaactcggcttgaatgatagggttcttttggaggctcaaggcagagcaactaaaggcaaagcgatagaccttgatgatatcaaatttcatcagtgtgtacgtttggctagatttgagaatgatagaactatatcgttcatacctcctgatggatcttttgatctaatgacatacaggcttagcactcaggtaaaacctcttatctgggtcgaagcacagattgagaaacattctagaagccgtatagaactcatggtgaaggcaaggagtcagttcaaggaaagaagcacagcaacaaatgttgaaattgaagtgcctgttccttcagatgccacaaacccaaatataagaacttcaatgggttctgctgcatatgctcctgagagagatgcaatggtctggaaagtaaaatcattccctggtggcaaggaatacatgtgcagagcagaatttagtcttcctagcataacagcggaagaaggggccccagaaaagaaggcaccaatacgagtgaaatttgagataccatatttcaccgtatcaggtattcaggtccgttatctgaagataattgaaaagagtggttaccaggcactcccctgggttagatatatcacgatggctggcgaatatgagctgagacttatatgagttttctcttttctggctgatggaagacatttatgaagctgcaagatacatatttgctcgagacagcaaccgtatgacatttgaatgttagcctggacgtcttctgccgaccacacaaggttttccccctgggggcttgttcatcttgttaggctcaccttaccttggttattgtacgttacccatcaagtatagtttttgaaaaaaagagaggataattttaattttcatctctcttgtattattattgatttatttttgtgggtaccaaacttggatttgtttcatctgatcgagttcacaaaaacactgccattactgggtgatggttctgaactgcaggttgaaacaattgtgccctttactgtaaatgtcgtcgtcttgtatccaggcaaaagaaaggaaacctaccgagacctattatgacatcaataatttcaacttttttttgttttaaaaatttcttttattgtctcttcctgatcaactacggatatgctttattggaatagcataccacttcatttgtttctattgcctctctttatttgatgtagattagggatcgaaatatatgaaaattnctgaattgaaactcga

SEQ ID NO: 145079 - DNA, 365 bp, Zea mays
  Clone ID: MRT4577_63796C.1
ggggggttcattttaaaccgtttatcatatctcttggacttgaggtttgttttgtccgaaaaaaaagcccggcaaaacccgtaaaaaaaaaccggggccgggggcaaaaaatgtggggagcccaaaaacacccaaaccaaaggggggccaaaaaagtttgggggaaaaaaattgggggggccttaaaacccacacacgggcccgaaaaaaacccagcggggggggttgataaaaccacaccccctccaaaaattctaaaagagcgggggcccccctttaaaaaagtggttgcgggcaaaaaaggcatttaaccaggaccccggcccaaggagcgcttcaaccggggggctgacgggaacccaaga

SEQ ID NO: 145080 - DNA, 496 bp, Zea mays
  Clone ID: MRT4577_63797C.1
atttcaggagaccacgccgcatcccacatccaacgccaccgccgccgccgccccgccccgccgtcgcgggcgtcatgctccacctacggcaccgcgtcctctctcgtctcctctccgccgctccccatccttccacctccatactcctccctttccagcgcttcctctccgccgccgcatccgccatttcgccgaaccctagcttcgccgtcgaggagtacctcgtctccacctgcggcctcacccgtgcccaggcactcaaggcctccgccaagctctcccacctcaagtgccccaccaaccccgacgccgtgctcgccttcctcgccggcctcggcctctccggcgctgatgtcgcggccgtcgtcgccaaggacccgcggttcctctgcgccggcgtggagagaaccctgaccccaatcgtcgccgggctcaccggcgtcggcctgtcacaagatgagattgcgcgcctcgtctcgctcgcccccgcccaatt

SEQ ID NO: 145081 - DNA, 1990 bp, Zea mays
  Clone ID: MRT4577_63798C.1
ggacagcatccaggtcccaccgttcagttggacgtaagaaagacacccggatcctgcgctctcctcaccctctccacttccgtttccggatcccgtttccagctccgatccaacccagcatctgtaccgcgccgcgcgagcacgtccggcgccggtgcggcaggcgaaatccgagagcactcctcccccgctacgccgcaccgcccatggccgcagctagccgcagatagagagaggcgcaggcgagggcgtgcagatccagatccggtgggcgggaaggacttgatcgcccccaccaccatggccggcgcggtgtcggcgctcttcctgctggacatgaagggccgcgttctcgtctggcgcgactaccgcggcgatgtctccgcgctccaggccgagcgcttcttcaccaagctcctcgacaaggagggcgattcggaagtgcactcgcctgtggtctacgacgacgctggcgtcacttacatgttcatccagcacaacaatgtcttcctcctcaccgccgctcgccagaactgtaacgcggccagcatcctcctcttcctccaccgtgtaatagatgtgtttaagcactacttcgaggagctggaggaagagtcgctcagagataacttcgtcgttgtgtatgagttgctcgatgagatgatggattttgggtacccacaatacacggaggcgaagatattgagtgagttcatcaagacagatgcatacaggatggaggtcacacagcgtccacccatggccgtgacaaatgctgtgtcatggaggagcgaggggatccggtacaagaagaatgaagtcttcttggatgtagtggagagtgttaacattctagttaacagcaatggccagattgtgagatcagatgtggttggggcactgaagatgcgaacatatttgagtggaatgccggagtgcaaacttggcttgaatgatagggttcttttggaggctcaaggcagagcaactaaaggcaaagcgatagacctcgatgatatcaaatttcatcagtgtgtacgtttggctagatttgagaatgatagaactatatcgttcatacctcctgatggatcttttgatctaatgacatacaggcttagcactcaggtaaaacctcttatctgggtcgaagcacagattgagaaacattctagaagccgtatagaactcatggtgaaggcaaggagtcagtttaaagaaagaagcacagcaacgaatgttgaaattgaagtgcctgttccttcagatgccacaaacccaaatataagaacttcaatggggtctgctgcatatgctcctgagagagatgcaatggtttggaaaataaaatcattccctggtggcaaggaatacatgtgcagagcagaatttagtcttcctagcataacagcggaagaaggggccccagaaaagaaggcgccgatacgggtgaaatttgagataccatatttcaccgtatcaggtattcaggtccgttatctgaagataattgaaaagagtggttatcaggcactcccctgggttagatatatcacaatggctggtgaatatgagctgagacttatatgagttctctcttctctggctgccggacgacttttgaagctgcaggacactaaagatacatatttgctatcgacacagcgaacagttttcatttggatgttggcctggaagtcttctgccgaccatacccctccccgtggtggggcttgctgttcatcttgttaggctcaccttaccctggttattgtaagttaccaatcaagtacagttttggaggaaaggatattcagttttcagttcacttgtattgttattgatttattttgtgggtaccaaactagatttgtttcgttctgtattacacggaaaacatgggctgatttgagttcaacaaaacattgccacatctggcgatgattctggggtgcgggttgaaaaaaaaaaaaaaaaaagcggccggagg

SEQ ID NO: 145082 - DNA, 196 bp, Zea mays
  Clone ID: MRT4577_63799C.1
ttggaagaaccacgcgtacgaaaaaaaacaatgcaattaacattcatatttttacatttgaactccaaacaaaacttaaagaaaccaaagcacaattcacatataaatacattctccccccactttcaaactaccagacttaattatacttaccttcaacggtttcctttttttatctcatgaccataaataattt

SEQ ID NO: 145083 - DNA, 438 bp, Zea mays
  Clone ID: MRT4577_6379C.1
gttgagtcatgcagtaggcgcaaaataaataatagtcttccgcagatataaattttacgggtaccaggattacacgcttaaaattattatttgtgttcgatatggggaaaggagacgattcaacggctttttaactgttgtagcttgggtatgtttaatttggttacccggaactataaatttttattgaattgttactggtctgttgtcaccattctgattagttttccaccattcttagtgattggtaactgaaatgtgccctacgacttcagtgaagttattgttatcatacttaatgcacatcataagttaataatgacaatcccttgtagtgaaggcatatgttactatgttgttgtttgtatcaagggtcatttggagttaaatatttttttataaccacagtaatgaccaaaataatttctatatcaactt

SEQ ID NO: 145084 - DNA, 438 bp, Zea mays
  unsure (1)..(438): unsure at all n locations
  Clone ID: MRT4577_637C.1
atagaagtgatccccaatcgtcccccaagccgcaggtgctgtgcgtgcttaccatgtgtgtgtggggcgaanntgagaannccgtgagccgcccgtccgatgactgaataaccccatggccantttgtccttttggtagcccccttagatgtcagtaaagccctcaggtgaagctatngtggaatggagaattggagcagaccagccgtagccgcatagtccattaccgatagaccataggtcctgccgcccgacatagaatgcgttaccgaaggaccatgaaggggccacttaaacttggctggtggaagatgacccgatgaagaatctttcctaaaatatctttttcaatattttctttcaactccaaagagacgagaatagaaaaaaaatcatccctcagtgtatgattatatttcattaggaattttttccctc

SEQ ID NO: 145085 - DNA, 587 bp, Zea mays
  Clone ID: MRT4577_63800C.1
cggggacctctttccgcgggctcccttcgtcactttcactattcccagattcttaccctcctgcttccctttttacaccatgcaggacctggcggagaccatggctggccgcatcatacacaacccagcgaggtcgacaagacactgtggaggacagacggccactagcccacctccgaagtgtctcccctgacaccaccgagcgccatcatactttgctgccaaacaactggagcacagtcccacgctagctgactacaatctccatatgagctacaccctccaccttgtgcatggtctgctggcatgatggacatcttcgcaaagaccctgtccgattctagtatcagcctcggggcgcactcctctgacgccgttgacaacgacgaggccaacacccacgactacgacggcttcgctccatactaccagctggtcctcttcgctgcgaactcgtcttgacgacaacgcgcacgcgttcctgactacaacgtgcatagcgacagcaccctccacttggtgctgctcctcaggcgcagggatgcaaatcttcgtgaacatcctgaacggcaacattatcaacctcg

SEQ ID NO: 145086 - DNA, 770 bp, Zea mays
  unsure (1)..(770): unsure at all n locations
  Clone ID: MRT4577_63801C.1
gtcgttcatttcgttcttctttctgtatccatccactttcaatctcttggaagtggcagctgtggacaagcctaaattacacatgtgggaaacaggaataatgcgtattaccagacatccacagatggttggtcaggtaatttggtgccttgctcatacactatggattggcaactcagttgccgtagcggcctctgtcggacttatcagccaccatctctttggtgcttggaatggtgacaggaggctgttgtcacgctatggtgaagccttcgaagtactgaagaagagaacaagtgttatgcccttcgctgcgatcatcgatggacggcagaaactgcccaaagattatcacaaggagttctttcggttaccatatgtagcaatcacaatgttaaccttgggtgcatactttgctcatccattgatgcaagcatccagctaccaacttccctggtagtgctataaacctatatacatatatgctcagtgctggaactgaaaaaacatgaccagatcaaaaagaagagaaatatgtgctcctttggtatacatagttgaatgcataatcttatgtgtacaaatgtacaattatttatattattaacggaactttttgtatatggcattggtcaaaacttttatctatgatataccacaaaaaaattcataaaataaaaaaacataaaaatttaaaaaaaaaaaaaactcggagatcttattttcgncttttatngcgatattatggctgtatcgtctcatccaacgtt

SEQ ID NO: 145087 - DNA, 811 bp, Zea mays
  unsure (1)..(811): unsure at all n locations
  Clone ID: MRT4577_63802C.1
ctgggttatatttttactgcctgaggcccaagctggagtttgctcgattttacagttcgcggcgccaatggcaaaatgggaaccggttttggagtacaaccagatggtgtggttcctcgcacgggagggggtgataccggtgccgacgcggcagagtttgaagcaagccccaacccgaatcaagtttgcggtatagttgccaaactcccttccaaaactgtggacatcgcatccttcatcagcgaagccgtaaactcaggcttgccctcagtgttttccaatggttctattcccttaactgtgtttcaagtgaatcggattggaggaggtcccatgacctgcgaatacagcgccgacgcaacgggtcattcatggcaaccgatggatatgacactcaatatgctaggaaactttggtattcaatcccaacaaaacaccaagatgaccgtagtaaccaccttacgagccggaagcagatttaccggaggccccaaccaagacatggcgctggttcgatgccgtgcaggaaccaacggaatctgtggtggctgctttgctgtgcaaatgagcggccaagtagtggatgctacacaaggcggttcttcccgagccgctgctagcgcacccttacagctcacctcccaacaaatgtcaagcgnttgtggcgaaggtaatggaccttgccaaaaaaaataacatggttggctcttaggcgccttgggccctccggcacgcggtctcgnccacctatggtatctgaaggcctaccgtttgttcgagttcatttaactctaccgcatacttttttctc

SEQ ID NO: 145088 - DNA, 342 bp, Zea mays
  Clone ID: MRT4577_63803C.1
gttacaaaaataagggccgagcacaaaagggggggggtttttttaatgaaggccattgacaaaaatgaaggaggtgacccttttttttttctttaaatttttttgaaccggggggaaaaggggtgccaaataaaaagaaaataatagggtgttttaacacttaaaggaaaaaataggattaacagagtgaaaaattgtccgaaaagaggagtttggcgatctcacaagatcaaaatagccatttgttttcattttttcccagtttaaaaaaaaaaaaggccttttttaaattggcaatcctcaccccaaccgaatcattgaagagtgtttgaacaaaaacgg

SEQ ID NO: 145089 - DNA, 425 bp, Zea mays
  Clone ID: MRT4577_63804C.1
atcattggttttttatggttctgattactttagttgttttttacatttatttatgggggaaaaaaaaaaacatttttggtgttgggggaaaaaaggaaaaaacacgcgcgggggagaaggaggccacccagccaaaaggataacgggcagaggcggggatgccttggggccgggagtaaacaaacctgaaaagattaggccagtgggcacttggaaaaaaagagaaaaggggggaaccgagagagaaacgaagaaggataaacctttagacaagagacaagccccaggggtaaaaagaaaaaactggggggcgcagggagagaactaaataatattaatagggcggtgcgtagtggccgctccccagccgggaaacaaaccctgccatctgcaacaataacaagggaaacacgcggggagaggga

SEQ ID NO: 145090 - DNA, 300 bp, Zea mays
  Clone ID: MRT4577_63805C.1
ggaaagcagtcacgcctgcaggccacgggtgcggaatccccggggcgcccctcgcgatcgacagaggagagaggcggtgatcataggagcaactagcggtaggatttgcgatcaggcagccccatggaggacgggagagtcagaggaggacgaggactcgacaaggaagagccgagaggggaaggtgagcgacaccagcaagcccggggagacagtcaccatgagcgtgcccgggagcaagcgccaggacctacaccgcaccggtggacgacaccaaggaggacgagatcgaccccgagc

SEQ ID NO: 145091 - DNA, 239 bp, Zea mays
  unsure (1)..(239): unsure at all n locations
  Clone ID: MRT4577_63806C.1
gatcttnatgcccaaatcctcttcttgttccttaagccccctcgtgctttttcggggtctctgcttggatacgagggactgacaacttccccggatgattttggattataagattatcttaacatgcctcatgatttttacagcttccgtcaacctcacatgcaccacggaatgaaggttgtccttcgtatgttcataggacctatctgttctagcttttattgaggcggcaatgtaat

SEQ ID NO: 145092 - DNA, 283 bp, Zea mays
  Clone ID: MRT4577_63807C.1
caggagtttgcccaggatgtgggccgcacgttcaagcaattcaacaagttaactgaggacaaggcagacgtgcagtccatcatcggcctgcagcgcttcttcgagacgcgcatgaacgaggccttcggtgacaccaagttctctgctgtgctggtggcacccccgccgatgagcctgcctggtgctggcctgagttcccaggagctgtctgactgccctggtgatggcccctgaggctggagctcccatggccagcccagcctggctctgttctctgtcctgt

SEQ ID NO: 145093 - DNA, 411 bp, Zea mays
  Clone ID: MRT4577_63808C.1
ggggggggaaaaaaaaaattccatggggggccatgggatatccgggggggaacccccatttttttttaatttccagccaaaaatttttacaagggggggggatttaggaaaaaggggcatttccccccagttttttggggggacaccgggattttccaaggaaaaaaaaattggtttttttttttaggaagggggggggggaccccaaatgaaaccgggggtttgaacgaaacaaactttgggcccaaattggggggtttcctggggcccccgggggccaggttaaaacgggggggccttaaattggccggcgtaaagggcttgcaaaaaaggggggaaaattttccaaggagcctggagttaatttttggaaaaaaagggggggggaccaccttttattggacccaaaaa

SEQ ID NO: 145094 - DNA, 312 bp, Zea mays
  Clone ID: MRT4577_63809C.1
gtacatgtcttgatgttagtaattagtagagtatctgaaactgcccattcccgatgtcataacggaaaaaatccttatatgaatatgactgtaagctgaaatcgaataacaaaagtagctcaaatatacaaatggtgacctgtattttcatgttctgctaggtatgacgaattggctagcaagagcaatgttgaatacattgctggaggagccactcaaaactctatcagggttgcccaatggatgcttcaaattcctggtgcatcaagttacataggttgcatcgggaaggataagtttggtgaggagatg

SEQ ID NO: 145095 - DNA, 795 bp, Zea mays
  unsure (1)..(795): unsure at all n locations
  Clone ID: MRT4577_6380C.1
gcacaccacggcccacgggtttcccctgtcggagagaggacgccttttggtgctgtccctgtacttctcctttcgaaaggatctctctgcgcgccggggcggcgatggcggcggcgccggcgcccctgccggcgcccgtcgcagactggtgggagcgcgtcaacggctcgccggcgtggcaggacgggatcttctggaccctcgccgtcctctacggtgccattgctaccgcctcattcatccaagttgccaggatacagtgcagagtccctgaatatggatggacaacccaaaaggtcttccagttcctgaatttcgtggtcaatggggccaggtgctctatctttgctttccgtcgccaagtgcaacaagtgaaccctccgatctttcagcaggttattcttgatcttcctggccttgcattcttcactacctatgcactgttagcgcttttctgggccgagatactttaccaagcacgtggaataatgactgatcgacttagatcaggtttctacatcattaattgtgttgttatgcattgcagggttttctgtggttgtggctgtggtggaatccaaatcattctatgctagtcacttctaagtattcattgcaggtctttcttttttcctgccttgggttttctgatctatgggagaaggcttttcatcatgctngaatattttcctattgagtcaaaagggaggcaacaaggctgagagaagtcggcagagttgccaccatatgtttctgttgtttctcgcacgatgcataatgatgtgcttcaatgca

SEQ ID NO: 145096 - DNA, 221 bp, Zea mays
  Clone ID: MRT4577_63810C.1
gatcatagaaaaataaaaggggttatgaaagactgtgcatggcagggcatacaacggttaataatgatggcgcaacaaggactagaatgaatttacatttgattggttttttgtacgatcacactcagtttaattcaaaggacaagggttcgggagttacgaactttgggtgacactgccacctaaactggacacggtaggcagaagcccaggcttaacct

SEQ ID NO: 145097 - DNA, 931 bp, Zea mays
  unsure (1)..(931): unsure at all n locations
  Clone ID: MRT4577_63811C.1
gtctctcgctgcgccgtgccgtgccatgctgtctccgctgtccgctctcagtagtgctgcggctgccgctcacgcagtcgtcgccggggacggagagatgcgggttgctgatggcggcggcggtggcggtgctggtgagactggggcggggctccgcggcggcgtcggcggcggggccgtggtggaggacgggcacggggaggcaagcggcgggtgctcggcgagtcgcgggagcagcgcgcgcggatcgtctggcggcgactcgcctttaaccaggttcgtgcgccggggtggtcgactggggacgatggatccggagcgggacgagatgctgacttcctcgtcctcctacgcttctgcaggttccacggagccacaagaggaggaggaggagggcgccggggcattagaagcggccaaggacaacaagcgggtacatggtgcacgaccccaggggcagaccaagaatgcagccccctgtttcactcgagaacgccaggaccagcggcatcatcggttgggagctgttcttttccaaggccccacgcgcacgcccacgcgtccgccctcgcgtgggttcggctgccctggtgttgccagatcctcgacgcattctccggggttcccggccaccggtgtcgcggtggtgaacaaggggatgggcgtatcgtatccgtcacacagtangccggacgtgctgtctagtccggggacgccgagctgcaatcggcgtgggatggcaggcgttggctaccagcagggtcctcgttcagaaagagtgatcccgccttggaccggccatacaagccattctgggagcggcatggtgttaccttacagcactgggactgggaggacgctgccatcgaaatgggaggatgcagagaggtggatcttcagccccaaccccaccccaacaatgcactcggga

SEQ ID NO: 145098 - DNA, 263 bp, Zea mays
  Clone ID: MRT4577_63812C.1
gcgaaaaaacaactccctttcaattgcattattattgatttggtcttggacaaaatacattggtcccccaattacctcaagggtgaaaccaaaaagggggggctgcaacatactatcaaatccctccatccaaaaaattttgtaccttcagttacaggacacaccgaggtattattttcagtcctacgacgacaacaacaacaacaacgggggacacaagaaatagctcccacatctattatgaccccatttatacaaaaatc

SEQ ID NO: 145099 - DNA, 356 bp, Zea mays
  Clone ID: MRT4577_63813C.1
aacactaaaacggaaggaatcatatttgattcggcgaatatagactattctttcaatgtaatcattgttagacgaactctcaatgcttttcaaaacatcattatacccaacatacctctatataaaaataatatataatcaacgcctgaaaatcagtctatttaacccaacacatgcaaccaaaacttaaccattatatatttaaacatcatttacaacattgaccaaatctaattagtacacaatcaattgacttactcattaaaccatcaaaaaaaaacgcgtatttaacctagatctactaatgcttctaacacttataacaatcctactccttgcttgttctagagcatatt

SEQ ID NO: 145100 - DNA, 612 bp, Zea mays
  unsure (1)..(612): unsure at all n locations
  Clone ID: MRT4577_63814C.1
aaaccccgcgccgcctccggcttccttcccctggaagcctcctcccctctcgcgccgctccaaaaacttgctccaactcccggcacgcgcacccaaagccaaaacccctcgcgtcgtcggccgtcgcgcacgcttccctccatcgtgcgtctgcgccgtcacgttttccgcgatgccccgccccagttcacgcgccaaggcggcatcacggccaggaggcggtggncgtcgcctcncagagaacccctgcggcaccctcgctaagctgacatgatcgcagaattgatcgctgacccccagaagaggaacgggtcgaggtatgcgtgcatcacaaagtacgtgcaggtgaagcatggcgacaaggtctgcaccatcttgggcaaggacctcactgtgcagctaaagaaggtcgctgacgacgataagttgacgagggtgaacaactccttcaagctgccggccaccgacgccaagcccaaggncgctaagcctcacgcacccaaggtcgcgtactagaccaagtcttcgccgaaggggaaggacaagaccgctgcgaagcccaaggcggcgtcgacacaacccaaggccaaggccaaggtcaagtctgtcgct

SEQ ID NO: 145101 - DNA, 423 bp, Zea mays
  Clone ID: MRT4577_63815C.1
aaaaacaaaaaccccttttttaataaaagggggcctcaccgtcttgggggggccaatttttttaagactccctacccctttaaaagggtcaaaaagaatacccccattgggttctcattgggaaatcccggggcggggtagccaactagatttcccccttgggcccccccccccaggggcttggggggcgaagaattttacatctacatgggggcccccactgggctcaactaagcgggggttcactggtttttccacaacaaattgaccaagggtgggcccaagggattgggggactttagccactttgaattttttgttcggacccctgtcctttgaaaaaccaatgcccccggggggccactgggggcttgtgattttaggccccatgacgggggctagcaaaaaaatttcttgaaaggg

SEQ ID NO: 145102 - DNA, 234 bp, Zea mays
  Clone ID: MRT4577_63816C.1
aaaaaaaacaaccccaggggcccccttttttttttttgggacccccccccgtttcttaaagcctccccccttcgaatttcgtaaggacccacactttcccccagggaagcgtccattccccccttttaaaggggtttttaacccaaaataccccaagcaaacaccccagttgtggggggccccacttttttttcacaaaaccattgtcccattgtcctttaaaaaacccccagg

SEQ ID NO: 145103 - DNA, 606 bp, Zea mays
  Clone ID: MRT4577_63817C.1
gcaaatagccctatatgatattatatcaacgaatgcgccaatatttaatatacatcctattgctacataaaatacaatttattatgcagtcacctgcaattctacatagattaaccaccccggtagcctaggggctacataatcacagctacttccaatgatggggatgacagaaaaatagcagcatgaccacgcctcatcttgtagtcacccaaaaaaaaacctcgaactactgaaaaagagacggttatacacactgatgactgatgacagcaagcaagaggaagacaaccttcaaagaaaaaaaacacagaaccgcagctactctctagatccagcaaatatttgcggcacctccacttttcttctcttgttctccccgccgctttccttctcctgttctccattgacctcagggagaggcaggtaatttatgcatctcagagagaggcggataattcatacggcatggatcctcattatgtttcttcgttatcctcatccctgatatccacaatttcttctcggcagtacagtgcatttagctcttgctgcaactgaacatgttttagcttagctgcaattaattcatcagtcagtattatc

SEQ ID NO: 145104 - DNA, 157 bp, Zea mays
  Clone ID: MRT4577_63818C.1
atcatcttgcctttaatgtttggggtcctacacaaactattagcgcatttcagtatcctcttaccccgttgtttttaagtgttggattgctaaagcaagacttttgtcttcgagaatgtaagtcaaccaagtgttatctatgttgtaaaaatggata

SEQ ID NO: 145105 - DNA, 691 bp, Zea mays
  Clone ID: MRT4577_63819C.1
gatagtacttccagtggcttgttcctgtgaacaagctagatgctactccaaatgatataccagtagggaaagtggtatcttgtgactcgagcaatgatgaggcaatggatgacaatgatggcattatcttggaagatgatgacaactctagggcgctagttgtgtatggacaaaaacaagaaatgtgtctcacggttcttccggttgttccttccgggtcacaccacaagcaatctcgggaccatgatatagatgctcgaagcaaagttaggaagttgctccagttattccaggcgacataccgaaagcttacacaagttgaggaacaaggtaaacgcaaagttggaaggattgacattgaagcagctaaggcactaaagaacgaccctatttataaaaagcttggggctgttgtgggaaattttcccggtgtcgaagttggcgatgaatttcattttagagttgagctgtccataattggtctccatggcccacttcaagcaggtattgccacttctaaggtgaatggtatcaatgttgctataagtatcgttgcctctggtggctatcctgatgaatatcaagctcagatgaactaatatacactggttccggagggaaggctggtgggaataaagaggagatgatcaaaagcttgagccggggtaatcttgccttgaagaatgcattg

SEQ ID NO: 145106 - DNA, 871 bp, Zea mays
  Clone ID: MRT4577_6381C.1
ggccctttccactactctctggtggcggttgcacgagggtggttcgtttctgatctctgagagtccgccccccctataccccgcttgggctcccctaaaccctaaccccgaccgccgcgcgccagctactcccgtttcgtcctcgcggtattcgcggcgttttctcccactgctcgaaccgcgccgacgagcgacgacaagagctgctctattcttcaaaacaaatggcgaccgttccagttaacccaaaaccttttctgaacaacctgacaggaaagcctgttattgtcaaactcaagtggggtatggagtacaagggttatcttgcttctgtggactcatatatgaatctccagcttgccaacactgaggagtacattgatggtcaattctctggaaacctgggagagattctgatcaggtgcaacaacgtcatgtatctccgaggcgttccagaggatgcagagatagaggatgcagagtgagaagatgcgatcaatgttagattgataaatgtaatatggttctgacatctatgttcgaatatgccggtgacaagtagatctatcggatcgctttgttctcttgagtgatgaaacatgatggcgtcgggccaagggtgaagctgctttcagttagactatgctgtcattctgctgaatgtatatcagatttcttgaacaattcttcttgcctcattgcctactatcacggattaagttatatcagggaaaaatgaccggctcttttttttcccgttttgagaaaaaaatggtctccgttgaaactgcattgttgtagattatatatatatatatactgcgttgaggctcgaagcgatactgacgtgcaaatcgttcgtctgacttgc

SEQ ID NO: 145107 - DNA, 696 bp, Zea mays
  Clone ID: MRT4577_63820C.1
atccacctgcactactaattctactgctgtttgctttctcacctgttgtgtccatccaagcattcaaggatggcgcctaagccagcccagaagaagcccatggagaatgtcgtggcggcggaagcaaccaagccagccaaggagaatgccgcggttgcagaagcatccaagtctgccgagaagaaggcctcgtctggggagacacccagtaccgggacatcgtcgcggccagcacttaggaattccttcgtcaacgacgtctttgagagggtcgcctcataacatggagcgcgacgtcgtttccttcccccacatgatcaatcatgtcctcgtgttgatttcttagagtgtatcgactatcaagtaataatgcatggcatctacttatttaaaaaaaaaaaaaaaaaaaaaaagcgcccactctccagtctccagttccttccttcctccgtccctctccacccgctccccacttcgcctccctccggtccctttctttctccgcctttctccccctttcgccgtcccgtagagcggcggcgccggccggcctcggatccgccccgccgcgggggatgatggacttcgacggcggcattggcgatcagagtgagatgtgggactggcagagtcaagagtttgatttgcagaaggatctgttaccagttccatctaccctcctgtgggctgaagcaa

SEQ ID NO: 145108 - DNA, 661 bp, Zea mays
  Clone ID: MRT4577_63821C.1
acacagatgaagttgctaaatccaagcaatcaactgtctccacaaaaacaaaaaagtgtaaggaaattcaatttcagaaacttctgagattgccagatgggtgtcatcctgattttgataatgatcatatgtgttctgtaaataatcatgacctgcttcctgaaatgagtactccaagtgctgaccttcatctacttcctgagacaggagtggaaaacatgaggacacctaaaagtagttttcacgctgaacttaagcgtgagctgtcaaagctaaatacggtgttaaagctaccagataatgtactttttctggccaaccagtccctcgaatatcttttaaataatcatttagttgtgcgggagccacggagcatactgcatgcgttcaacatagccttgtgttggcgtgctgcttcttttctgaaatacactgagttggatcatcgagaatcacttgcccttgcttcagatggattgaattatgaatgcaatgaggctccatcataggcaggcttataggtttgtagtatcgttaggacgggcatcttactataacaatataagacacattttgtatatataacacatgtgcatatataagttatcgagatattatatgtttctgttgcaacgcacgagcactgacctataaaagtata

SEQ ID NO: 145109 - DNA, 799 bp, Zea mays
  Clone ID: MRT4577_63822C.1
gccggccgggtccaatagttgttaagattgaacctaatattgtggtgaatggagctagaattgtgtaagtgtgagttgtaatccacaacccttttctcggagtgtataatatttttgggaggacttttttctgcttaatgaaatgacacacagctctcatgcattgttaaaaaaatatcatataattttgttgtagattgagtcaagatatgagtgataactttttgaatggttgtctagttattttttattaaacgaataagtttgtacaattgcaacaaagtatgcaaaattaatttactgtgtaacattagattctttatggatgattagtttattgaatgaatgatacaacgatctactttacaccgatctcgctcctccacgagcccgcgcatgccgaggccgatcttcttttatggccaccgtgccccgcatcggaggtgccttaccctccgccgcgcccgtggactggacgatgacttcgagtagaggcggcggtggctgcaacaatagctgcgatctacggtccacgcgacagcgacagaggccgaggggtcgcttgtacatcggcggaacctgttgctggaggagcttgcgtgtgaggtggggctctcgccgaccggtggctctaggtgccgctgcccaaggtctggagtgtccgtgtcttcgcatgtattggtgctgcctgatcgccgctcaatcgagcgctagctaagcggtcttcatcgtggtcctcggtccacacgacggcagcagaggctgaagggtcgctgctgcaccggcagaaactatcact

SEQ ID NO: 145110 - DNA, 342 bp, Zea mays
  Clone ID: MRT4577_63823C.1
aaaagaagctgggccctttttggcttttttgggccccgaggcgggggcccagtgggccccttcctttcacggggattccaaatgggggttggtgaacggggtaaacggtgtttttcttcttaaaggtgggggcaaaagtttcccctaacagaccccccaagggtgtttaactcccaatggggtaccgccttattccttcaaattgggaaagttaaggggcttttttagggggccttataagcattctgtaaacgtttgccaaaaggccctgtttttcccccaaaagtttttttggaacaggattcagctgcccttttgatggggttgccaaagccaaacaac

SEQ ID NO: 145111 - DNA, 2331 bp, Zea mays
  Clone ID: MRT4577_63824C.1
gttttcgatttccttcctacgcgtctcgcgttggcagcgcgatccttcggagccgacgaatcccaccactgcccgcgccgcctccgcagacgacgcaactgacagtcaccgacgcgacgcggctcgcctcctccgcccttctgttcagcctcctcgcccgcgatggctccgggcaccgacgccggctacggccagtgggcggcggcgtgccccccgctgcggcggaacctgcagctgctttcgcccgacgaggttgagctagcaaaaatgctgttgaatgaaggccagattcacctgttcgaacactggcctgaaccaggtgtcgatgatgacaataaaagaggcttctttgatcaggttcgccgacttaattcaagctatcctggaggtctggtatcttacatccagaatgccaaaaaacttcttgcggattcaaaggaaggcaaaaacccatatgatggtttcaccccttctgtgccttcaggggaggttttgacttttggcaatgacaattttgtttcactggaaacagctgggataaaagaagcctgcaatgctgcatttgttcttgtagccggagggcttggcgaaaggcttggctacaaaggaattaaggtagcacttccccgggaaacaactactggaaaatgtttccttcaacactatatagagtctatcctggcttttcaagaggccagctgcaaaatggttgatgaggggtgccaaacaaagattccatttgttattatgacttctgatgatacaaatgcgctaactatcaagcttttagagtcaaactcctacttcggaatggaaccatctcaagtgaaaatactaaagcaggaaaaagtagcgtgtctagctgacaatgatgcaaggcttgcattagacccaagtgacaagtacaaaattcagacaaagccacatgggcatggagatgttcattctcttctttattcaagtggcttgcttgaacaatggaagactgaaggacggaagtgggttctctttttccaggatacaaatggattgcttttcaatgcaataccatcagcattaggtgtcagtgccaccaagggttacaatgtaaattctctcgctgttcctaggaaagccaaggaagcaattggaggaattaccaaacttactcatgtcgatggtagaacaatggtcatcaacgtagagtacaatcagcttgatccactccttcgtgcaactggacatcctgatggagattcaaattgcgagacaggctattctccatatcctggaaatataaaccagttgatactggagcttggaccatatattgaggagctcaagaaaacacatggcgccatttctgaatttgtaaatcccaagtatactgattcgaccaagacagcatttaaatcatccactcgtctagaatgcatgatgcaagactatccaaagacgttgcctccctcagcaaaagttggattcacagtgatggatacatggcttgcttacgctcctgtgaagaataatcccgaagacgcagctaaagttccaaagggcaacccttatcatagtgcaacatccggagagatggcaatttacagggcgaacagccttattctgagaaaggctggtgctcagatagctgatcctgttgttcacaccttcaacggacaagaggtagaggtttggccacgcgtaacctggagcccacggtggggtctcaccttcaagagtgtcaaggagaaagtgcacgggaactcttcagtttctcagaggtcagctttggtcatcaatggtcagaacgtcttccttgaaggcctctcgttggacggcactcttgttgtcaacgccgcggatgaagcagaggttaaacttaccggtcatatacagaataaaggctggactatccagcatgtcgactacaaggacgcctcggagaaggaagagatcaggatccgcggatttaagttggagaagattgagcagctagaggtgaactacacggagccaggaaaccatagcttgagtgcatgaaacaaaacattcttggttgacccgactagcttcctaccgattgggaatagttcgcattgcctcccagattctgggaggccattgccagcataagttgaagctgttgtattttagttcaaaattaaactagtggatgacaaatatttaagaatggaggtagtaataaggagccaagtgcttcaccaatcattccaaattcaatattctttatgtatatacgtactatttcatagccaaacgttttctcctcacctgtgtaatcggagttgattatttatctgggatctgatgttcatgttacaattttgaattttt

SEQ ID NO: 145112 - DNA, 493 bp, Zea mays
  Clone ID: MRT4577_63825C.1
gcgcgatccttcggagccgacgaatcccaccaggccaccacgcccgcgccgccttcgcagacgacgcaactgacagtcaccgacgcgacgcgggtcgcctcctccgcccttctgttcagccccccgctgcggcggaacctgcagctgctttcgcccgacgaggttgagctagcaaaaatgctgttgaatgaaggccagattcacctgttcgaacactggcctgaaccaggtgtcgatgatgacaataaaagaggcttctttgatcaggttcgccgacttaattcaagctatcctggaggtctggtatcttacatccagaatgccaaaaaacttcttgcggattcaaaggcaggcaaaaacccatatgaaggtttctccccttctgtgccttcaggggaggttttgacttttggcaatgacaattttgtttcactggaagcagctgggataaaagaagcctgcaatgctgcatttgttcttgtagccggagggc

SEQ ID NO: 145113 - DNA, 2926 bp, Zea mays
  Clone ID: MRT4577_63826C.1
aattcggcacgaggcatcggcacacggtgcctcactctcccactcccactcactcacacactgtctcgctcgctcgcttgctcacccaccaatggcgagtcctcctcgctacccgttccccgtcctcctcctcggcctcgcgctggtggcgttgatggcgccggcgctactgcgagcagatggcggcgccgaggaggaggaggaggcgcggaagacgtacatcttccgcgtggaccacagcgccaagccgtccgtgttccccacccacgcgcactggtacgcctccgccgcgttcgcctcggcggcaccgggggcaaccccgctgcggccgctccacgtctacggcaccgtcttccacggcttctccgcgtccgtgccggcgtcccgcgccgaggagctgcggcgccacccggccgtgctcgccgcgttcgaggaccgcgcccgcccgcttcacaccacccggtcgccgcagttcatgggcctccgcgcgcgcctcggcctctggtccctcgcggactacggctccgacgtcatcgtcggggtgctcgacaccggcgtctggcccgagcgccgcagcctgtccgacaggaacctgccgcccgtccccgcgcgctggcgcggcggctgcgacgccggccccggcttcccggcctcgtcctgcaacaggaagctcgtcggcgcgcgcttcttctcgcagggccacgccgcgcgcttcggcgcctcggccgccgcgtccaacggctccgtcgagttcatgtcgccccgcgacgcggacggccacggcacgcacacggccaccaccgccgcgggcagcgtcgcgtacggcgccagcatggagggctacgcgcccggggtcgccaagggcgtcgcgcccaaggccagggtggccgcgtacaaggtctgctggaagggcgccggctgcatggactccgacatcctcgcgggcttcgaccgcgccgtcgctgacggcgtcgacgtcatctccgtctcgatcggcggcggcagcggcgtcacggctccgttctacctcgacccgatcgcgatcggcgcgtacggagccgtctcccggggggtgttcgtggccacctccgctggaaacgaagggccggcctccatgtcggtgaccaacctcgccccgtggcttgccaccgttggcgccggcaccatcgaccgtaatttcccggctgaaatcgtgctgggcgacggccgacgcttgtccggcgtgtcgctgtactccggcaagcctcttaccaactcatcgctgcctctgtactaccccgggaggactggcgggctctccgcttcgctgtgcatggagaactccatcgacccttcactggtgaaaggcaagatcgtcgtctgcgaccgcggcagcagcccgcgcgtggccaagggaatggtcgtcaaggaagctggtggcgcggcgatggtccttactaacggggaggccaacggcgagggactggttggagacgcccacgtcctccctgcttgcgcggtgggcgagaaggagggcgacgcggtcaaagcgtatgccgcgaacgcctccagcccgatggcgacaatcagcttcgggggcacggtcgtcggcgtcaagccggcacccgtggtggcctccttctcggcgcgtggacccaacgggctcgtcccggagattctcaagccggacttcatcgcaccgggcgtcaacatcctcgccgcgtggacgggcgccacgggtccgaccggcctggagggcgatacccgccgcacggagttcaacatcctgtccgggacgtccatggcgtgcccgcacgccagcggcgccgccgcgctgctccggtccgcgcaccccgggtggtcgccggcggcgatacggtccgcgctgatgactacggccatcgtgacggacaaccgcggcgggcccgtgggcgacgaggcagagcccgggcgcggcgcgacgccgttcgactacggcgccggccacatcaccctgggcaaggccctggaccccggcctggtctacgacgccggggaggacgactacgtcgcgttcatgtgcagcatcgggtacgagccgaacgcgatcgaggtggtcacgcacaagcccgtggcgtgccccgcgacggcgagcggggccaaggccagcggcagcccctcgggctccgacctcaactacccgtccatctccgtggtgctccgcggcggcaaccagtccaggacggtgacccgcacggtcaccaacgtcggcgcccaagcttcggcaacgtacactgcgcgcgtgcagatggcgtctagcggcggcgtgaccgtatccgtgaagccgcagcagctcgtcttctcccctggcgccaagaagcagagcttcgcggtgacggtgactgcgccgtctgctcaggacgcagcggcgccggtgtacgggttcctcgtctggtcggacggtggcgggcacgacgtgcggagccccattgtggtgacgtggctgcagcccatgtgactgtcaggtggggacaactctacggcctctgtggagcctgccctggctgggactgccgataaagatggcagcaggagtcaaggcgcagtggccagtgggccagtaacggtaaagtcgtgcggtcgggactgcgccattaaaggtgggtcctgcacgctcgctctgcagaattgattaaccgggcgtgctgtaacagtatgggcttatccgagtatagtgactactggtagtgacagtggtgtgtgaaaaactgatactctggtgtttctacttgcttgactgtgtatggaggcaacagtacttgcttgccactggcggacaggacacaggagcaacggaaagaaatggagcaacaggacaaagctatgaaaaacgagtactgctagctttggtatttctatgtggattatctgaatagttttatcgtccacttgcattctctcccgcata

SEQ ID NO: 145114 - DNA, 2505 bp, Zea mays
  Clone ID: MRT4577_63827C.1
gccggccgtggtccgggtatacatatccacataccctaattctcggaaccctaaaggatcctatttaaagaaaggaaaccgttttcgatttccttcctacgcgtctcgcgttggcagcgcgatccttcggagccgacgaatcccaccaggccaccactgcccgcgccgccttcgcagacgacgcaactgacagtcaccgacgcgacgcggctcgcctcctccgcccttctgttcagcctcctcgcccgcgatggctccgggcgccgacgccggctacggccagtgggcggcggcgtgccccccgctgcggcggaacctgcagctgctttcgcccgacgaggttgagctagcaaaaatgctgttgaatgaaggccagattcacctgttcgaacactggcctgaaccaggtgtcgatgatgacaataaaagaggcttctttgatcaggttcgccgacttaattcaagctatcctggaggtctggtatcttacatccagaatgccaaaaaacttcttgcggattcaaaggaaggcaaaaacccatatgatggtttcaccccttctgtgccttcaggggaggttttgacttttggcaatgacaattttgtttcactggaaacagctgggataaaagaagcctgcaatgctgcatttgttcttgtagccggagggcttggcgaaaggcttggctacaaaggaattaaggtagcacttccccgggaaacaactactggaaaatgtttccttcaacactatatagagtctatcctggctttacaagaggccagctgcaaaacggttgatgatgggtgccaaaaaaagattccatttgtcattatgacttctgatgatacaaatgcactaactatcaagcttttggagtcaaactcttactttggaatggaaccatctcaagtgaaattgctaaagcaggaaaaagtagcttgtctagctgacaatgatgcaaggcttgcattagacccaagtgacaagtacaaaattcagacaaagccacatgggcatggagatgttcattctcttctttattcaagtggcttgcttgagcaatggaagagtgaagggcggaagtgggttctctttttccaggatacaaatggattgcttttcaatgcaattccgtctgcattaggtgtcagtgccaccaagggttacaatgtaaattctctcgcagttcctaggaaagccaaggaagcaattggaggaattaccaaacttactcatgttgatggtagaacaatggtcatcaacgtagagtacaatcagcttgatccactccttcgtgcaactggacatcctgatggagattcaaattgcgagacaggctattctccatatcctggaaatataaaccagttgatactggagcttggaccatatattgaggagctcaagaaaacacatggcgccatttctgaatttgtaaatcccaagtatactgattcgaccaagacagcatttaaatcatccactcgtctagaatgcatgatgcaagactatccaaagacgttgcctccctcagcaaaagttggattcacggtgatggatacatggcttgcttacgctcctgtgaagaataatcccgaagacgcagctaaagttccaaagggcaacccttatcatagtgcaacatccggagagatggcaatttacagggcgaacagccttattttgagaaaggctggtgctcagatagctgatcctgttgttcacaccttcaacggacaagaggtagaggtctggccacgcgtaacctggagcccacggtggggtctcaccttcgagagtgtcaaggagtgaatgcacgggaactagtcagtttctcagaagtcatctttgtccatcaatggacagatcgtcttccttgaaggcctctcgttggacggcactcttgttgtcaacgccgtcgatgaagcagaggttaaacttaccggtcatatacaaaataaaggctggactatccagcatgtcgactacaaggacaccgcggagaaggaagagatcaggatccgcggatttaagttggagaagattgagcagctagaggtgaactacacggagccaggaaaccatagcttgagtgcatgaaacaaaacattcttggttgacccgactagcttcctaccgattgggaatagttcgcattgcctcccagattctgggaggccattgccagcataagttgaagctgttcttctccttgccaaagaattgtactccctcagttgcattttagttcaaaattaaactagtggacaacaaatatttaagaatggtggtagtaataaggagccaaatatttaagaatggaggtagtaataaggaagccaagtgcttcaccaatcattccaaattcaatattctttatgtatatccgtactatttcatagccaaacgttttctcctcaccagtgtaatcggagttgattatttatctgggatctgatgttcatgttacaatttttaatttttgaaaggcccctagggcc

SEQ ID NO: 145115 - DNA, 311 bp, Zea mays
  Clone ID: MRT4577_63828C.1
cggacgcgtggacggacgcatgggcggggaggtgtacgaggacgaccgttaccggacgtggggtggctccttcgccctgaccgtccgggaccccggggactcatggatcaccgcgctcagcaaccaccttggctggctaagtgccacctacgccgtggtcatgttccaatcgctccacgtcgggaaaggcgccttggacagggacgacacctgggtgggcaggatcgacagggcgcccgagcacgactgcggctgcgtactaatgagggcagtcagcggcgaggcgttccgctataccagatgcgtcgtca

SEQ ID NO: 145116 - DNA, 632 bp, Zea mays
  Clone ID: MRT4577_63829C.1
gtcaacgccatcgatgaagcagaggttaaacttaccggtcatatacagaataaaggctggactatccagcatgtcgactacaaggacacctcggagaaggaagagatcaggatccgcggatttaagttggagaagattgagcagctagaggtgaactacacggagccaggaaaccatagcttgagtgcatgaaacaaaacattcttggttgacccgactagcttcctaccgattgggaatagttcgcattgcctcccagattctgggaggccattgccagcataagttgaagctgttcttctccttgccaaagaattgtactccctcagttgcattttagttcaaaattaaactagtggacaacaaatatttaagaatggtggtagtaataaggagccaaatatttaagaatggaggtagtaataaggagccaaatatttaagaatggaggtagtaataaggaagccaagtgcttcaccaatcattccaaattcaatattctttatgtatacccgtactatttcatagccaaacgttttctcctcaccagtgtaatcggagttgattatttatctgggatctgatgttcatgttacaatttttaatttttgaattttgtgtgtgtattagtt

SEQ ID NO: 145117 - DNA, 283 bp, Zea mays
  Clone ID: MRT4577_6382C.1
ggaccagtttcatgcgccgtgcggcagtgtgaaatgcacaggtctctacctctcccccgttttctcgcttactaatggaccgttacaccacatagaacaatgagaaaccacacatgcccaactcgacagaaaggcacacacacaacataatgcacgagtattatattgtgttttataccagccgtatatacaacggttcggcggcagcatccttggctatcttccttctccacagtaatataccacgtgattggttggtaggtggtcgcgtccatacaggcca

SEQ ID NO: 145118 - DNA, 255 bp, Zea mays
  Clone ID: MRT4577_63830C.1
cgtgcggcaggctgcaaggccactgcgaggctctgctctcagtctcacaggaactctgcctacggggggagggcgagcgtctgtccctccacgtctaccccacaaggaccgtttccgtggctctgtaccatacggacaggttccatgtggacaccaccggtaatggctactacacacctcacatggacgccttccggatgttattggatctggagtaaaaccgtctaggacgataaaacctatccatgtgttcca

SEQ ID NO: 145119 - DNA, 685 bp, Zea mays
  Clone ID: MRT4577_63831C.1
ctgaatgattggtgaagcacttggctccttattactacctccattcttaaatatttggctccttattactacctccattcttaaatatttgttgtccactagtttaattttgaactaaaatgcaactgagggagtacaattctttggcaaggagaagaacagcttcaacttatgctggcaatggcctcccagaatctgggaggcaatgcgaactattcccaatcggtaggaaactagtcgggtcaaccaagaatgttttgtttcatgcactcaagctatggtttcctggctccgtgtagttcacctctagctgctcaatcttctccaacttaaatccgcggatcctgatctcttccttctccgaggtgtccttgtagtcgacatgctggatagtccagcctttattctctgcttcatcgacggcgttgacaacaagagtgccgtccaacgagaggccttcaaggaagacgttctgaccattgatgaccaaagctgacctctgagaaactgaagagttcccgtgcactttctccttgacactcttgaaggtgagaccccaccgtgggctccaggttacgcgtggccaaacctctacctcttgtccgttgaaaggtgtgaacaacagggtcagctatctgagcaccagcctttctcaaaataagaactgtcgccctgtaaattgcca

SEQ ID NO: 145120 - DNA, 2274 bp, Zea mays
  Clone ID: MRT4577_63832C.1
cattggtacctcgagccggccggaaacggtttgcactgcctggcccgtgcggccgtgcccatatcccccgcggaaggacgacgacgcaactggcagtcaccgacgcgacgcgggtcgtctcctcagccctcctgttcagcctcctcgccagcgatggcttcgggcgccgacgccgcggcgctggtgacctccggcgccgacgagtgggcagcggcgtgtccgccgctgcggcggaacctgcagctgctcgcgcctgacgaggttgagctagcaaaaatgctgttgaatgagggccagattcacctatttgaacactggcctgaaccaggcattgatgacgacaagaaaagaggcttctttgatcaggttcgccggcttaattcaagctatcctggaggtctggtatcttacatcaagaatgccaaaaaaacttcttgcagattcaaaggcaggaaaaaacccatatgatggtttcaccccttctgtgccttcaggggaaattttgaacttcggcgatgacaattttgtttcactggaagcagctgggataaaagaagcccacaatgctgcatttgttcttgtagctggagggcttggtgaaaggcttggttacaaaggaattaaggtagcacttccccgggaaacaacaactggaaaatgtttcattcaacattatatagagtctatcctggttttacaagaggccagctgcaaaacggttgatgatgggtgccaaaaaaaagattccatttgtcattatgacttctgatgatacaaatgcactaactatcaagcttttggagtcaaactcttactttggaatggaaccatctcaagtgaaattgctaaagcaggaaaaagtagcttgtctagctgacaatgatgcaaggcttgcattagacccaagtgacaagtacaaaattcagacaaagccacatgggcatggagatgttcattctcttctttattcaagtggcttgcttgagcaatggaagagtgaagggcggaagtgggttctctttttccaggatacaaatggattgcttttcaatgcaattccgtctgctttaggtgtcagtgccaccaagggttacaatgtaaattctctcgcagttcctaggaaggctaaggaagcaattggaggaattaccaaacttactcatgttgatggtagaacaatggtcatcaatgtagagtacaatcagcttgatccactccttcgtgcaactggttatcctgatggagatacaaattctgagacaggctattctccataccctggaaatataaaccagttgatactggagcttggaccatacattgaggagctaaagaaaacgcatggtgccatttctgaatttgtaaatcccaagtatactgattcgaccaagacatcatttaaatcatccactcgtctagagtgcatgatgcaagactatccaaagacgttgccaccctcaacaaaagttggattcacggtgatggatacatggcttgcttatgctcctgtgaagaataatcctgaagacgcggctaaagttccaaaaggcaatccttatcatagtgcaacctcaggagagatggcaatttacagggcaaacagccttattttgagaaaggctggtgcgcagatagctgaccctgtcgttgataccttcaacgggcaagaggtagaggtctggccacgcgtaacctggagtccacggtggggtctcaccttccagagcgtcaaggagaaagtgcatggcagctgttcagtttctcagaggtcagctttggtcatcgatggccggagtgtcttcctcgacggactttcattggacggcacccttattgtcaatgctgtggatggtgcagaggttaaagttactggtcatgtagaaaataagggctggactatccggcatgtggactacaaggacacctcggagaaggaagaggtcaggatccgtgggttcaagttcaacaagtctgagcagctagaggtgaactacaccgagccaggaaagcatagcttgagtgcgtgaaaagaaaacactcttgacttgcatgcttgacctgactagcttcgtaccaaaatggaaatagctcacatctgggtcgcctcccagattctgggagggaggccaatgccagcgtagctgaaaccgttcttctccttcccccacgtacaacaaggagcaaagtgcttcaccaagcactcaacattctttatgtatatcttgtacagaactcctcttcagtgcaatcagagttcattgtttgtttgggatc

SEQ ID NO: 145121 - DNA, 367 bp, Zea mays
  unsure (1)..(367): unsure at all n locations
  Clone ID: MRT4577_63833C.1
agcgtccgnaaaaaaaaaaaaaaaaaaaaaaaaaaaaaaaaaaaaaaaaaaaaaaaaaaaaaaaaaaaaaaaaaaaaaaaaaaaaaaaaaaaaaaaaaaaaaaaaaaaaaaaaaaaaaagggggggcccttttaaagaatcaaagtttacttacccgtccttgcaacgaattagtttttctttggggtccccaaattgaagggcatgggccgcagtttaaaaacgccgggacgggaaaaaccctggggtaccccaactaaatccctttgcaaaaaatccccttttcgcaaggtggctaaaaagcaaaaaggcccgccccattcgcctttccaaaaattggggcaacctaaatggaaaagggaacccc

SEQ ID NO: 145122 - DNA, 393 bp, Zea mays
  Clone ID: MRT4577_63834C.1
cggccgcgggcagcgcgccccgcgcccggagctgctgcgaccgagccggggaccggcgcggccgcctcgtgtcgttcgcgtgatcccgcgaagtctggcacggacctcgcctccgctcttgtggaggggaaaagcggaggaggaagagggagccaagcggtcaagccgggtcggccgatcgcctcccaccaaaataccctggagtgcccattcgcaagcaacacccagaaaaggcgacaagtgcccacgtctggagagcgatggttgtgcggcggctgggcggcacggggcgcgcgctgctcacgctcccgaacatgcggaggcgggcgtccaactcctgggccgccgtctgggacacctgcttttgcaccaatcaagtgttgcgagagccac

SEQ ID NO: 145123 - DNA, 152 bp, Zea mays
  Clone ID: MRT4577_63835C.1
aaatgcaatacttcagccaagtccagagcatttcccgaagtatcaagagcaaccacctgccattccagactgcttcagcccacattgtgttgatcatctgcatcgtagtttcaatggtcctcaattgtcggcaattcattgggctgcaacac

SEQ ID NO: 145124 - DNA, 392 bp, Zea mays
  Clone ID: MRT4577_63836C.1
ggaacccaatctctgcaatgaaggcacatcggggggggaataccccctggtgggttgccctttctatggctacgggaggcatctgatctcccaggggcaggctgcacccccagggagtctaggaacagcccaagcaaggaatcaaacggaaataattccccttgttggggacaaaaagcaaaaaaaggtttaacaatggggctaggccttcttttcacttgttgaaaaaagaattatatatgtacccggccgtccgtgtggggggagggtattaaactggaacttcgcccaagcatggtttcctccttccttttgggacccttttcgccagcctccgaatgggaacttgaattaacccccccccacgaggattgggcttggctgctggggct

SEQ ID NO: 145125 - DNA, 1061 bp, Zea mays
  unsure (1)..(1061): unsure at all n locations
  Clone ID: MRT4577_63837C.1
accctcgaggccggccgggaccacgntctgtcgcgcgcatccgccccgcaccgcccgcggtcgaccctcccccacataccgccggcagcctgcggccgaactctccgccgcaccgcccgcgggagggagcgcggcatccttccatcctccgccctccttccatcctcgcggatcccgcgctccctccctcgctcctcaccttcccagctgcgaacaatccgagccccgtcaacgcccccgcaatccccgtcagccaccgtgccccatcaacgggagttgcgaccacaaagcacccaagcccgcgcccaccctcctcccagcgctccaccatcggcgccccttccctggcgagatggacggcatctgcgccgtgcccctcggagatccccttccatcttcgaggccgagagagaagtggacggcaatccattccaacggcgccctccattccttacgcgatccattccatcccgaaatccgcggcaccgctcacccatcggagctgcttccgttgatgatgtcgccgtccacacgtcatcccccatctgcgtcgtgtccattccttacacggcgaggaccaccttcggcgccccctccctggcgagatccaagggggctgcgctgtgtcccttccatacacgacgaggaccaccatcggcgccccttccttggcgtgatggacagcatctgcgccgtgttctctagaggcagtcacggccgtggatccctactacccccactgccaccccgaggacgcttccaagcagctgaccttcactgagttctttgacaacgctcctcagcgcttctattttgcgcggacgagactcaatgcttcctcctccgtgccgccactactccgcccgttccctagcgacgatagcgggttagggtttctgtacctggagccaccacctnctctgtcgtgtcctctgccgcctccaccttatggttggtgctcaggccttcgggacttctgtcggcatcgcgcacccaccagcatgtcaatgactctgtctacatgtcaacatggtctaattcgtgaggcangtgtgtggatc

SEQ ID NO: 145126 - DNA, 290 bp, Zea mays
  Clone ID: MRT4577_63838C.1
cctgatgcaagattggagagtgaattgtgatgcccagcttcgtattctggtcttgtagcgttagtggaagaaaaggacaatcaaatgcagaagatagagaaagaaattaaggaactaaaggtatggcgtgatttcgtaggccgagttcctcatggacatcgtcagcaacgaagagatggcgctcatcgacaccgctaggagaagaaacttatcagtgatgggtctttataaccaaacaattttatgagcttaaaatgactttcttagcctcttttatacttagcacatgc

SEQ ID NO: 145127 - DNA, 143 bp, Zea mays
  Clone ID: MRT4577_63839C.1
tcgcttcaataaacaaaggcctctgcatctatgggctgcttgtgccaaagcagaataaaacagagttgggccttttgagcgctttttacatcacaacagaattttgtctgtgccgacagcgactgtaggagctcctcccccgg

SEQ ID NO: 145128 - DNA, 436 bp, Zea mays
  Clone ID: MRT4577_6383C.1
cattaccacccaaagagatgaaaaaaaataccccactcaaacccggggggggggaaacctaccaagccaggaaacaacccaccggctggatgaaaaaataaaaaaaccacccccggcggcggggccaaggggggggttccagccccccgggggggggcccccgggggggcgggctcggggccccgcgggggggcggcagggggagaccaggggcccgcgcgaagggggtaaccgggcccaattccaccccccaccggggccttaggttacaaaaaaatacccccggggcccaatgagggggggaacaaacgtcaaacgcggggggcccactgggggggttccagaagggaaacctgccgggcctgctggggtaaaaaaaccgccaacacaccgggaaaggcgccctgccaaaagggcgaaataaaaccgcctcccc

SEQ ID NO: 145129 - DNA, 442 bp, Zea mays
  Clone ID: MRT4577_63840C.1
cttttcacgattagagatatcactgctctttaccatccattggctttaagatttttcttgaggcgcactcattatagatcagatgtgaaccattctgatcaagcacttgagattgcatctgatcgtgtctattacatttatcagatcctgaatacttcctttgtcaaagctttcacttgtctgaaggaagacgtcggccttctgcttctccatcaccatcgttatcatgcaacctgctggaatgccacagcgggacaggagcatggggatgagcaggcgcaagatgatagcaagtggcgccggatcccgacgttcgacgactggaacctgcgggacgacatgcccgtcacccaatacttgcaagcagggacttcttcatcattgtgccgccgacagagaaggacgacgacgaggatctgttcaaggtgcccctgtgttccct

SEQ ID NO: 145130 - DNA, 274 bp, Zea mays
  Clone ID: MRT4577_63841C.1
tgtagttccttatcaaaacatttttttttcatacatagcagatgctacatatcaaaaatggttctggagaagctgactgcagaagcaaagacaaagctgcaactcaaattatctgctccctggcatgacaagcagggcatcaagaccttttaatctctgcttgccttcactaatcaaaaaccttatattgttgctcgtcatcacaatggcgagatccctcaaactcagcccttgcagtgtgactaaactgatcttgagcatgtaccggggcttg

SEQ ID NO: 145131 - DNA, 325 bp, Zea mays
  unsure (1)..(325): unsure at all n locations
  Clone ID: MRT4577_63842C.1
aaaaaaaaccaaanaagacccataccaataccatacccaaactgccatgcgtgagaatagatagacagaaagaacaggaaccaaccaacacaagacacaacaagctgcatccgcggcaggcattttttatcgcgccattggtgtcgnnccccaccaccattaccaccttataaacactttatttancccacntcactcccanaccncaccnnacaantccacncaacantcacttctanctacctaccnnnctacctaccacacacacacacananananaccccantaaccctancntacttaacancaaaatcccntntcata

SEQ ID NO: 145132 - DNA, 328 bp, Zea mays
  Clone ID: MRT4577_63843C.1
ggaacaaaatggttgtttgattgtaaacaacaacaacaacaacaggggggccttttaactccccacaaaaatgtttttgggcaagcttttaaaatgtaccccaccaaacccctgccttggatgcgatttcagtttttacagccgcagctgggggctttacaaactttcgaagacccccttcacacttgttagggggggggggccaagcgatccctgggtgacgtttttaactttttgatcggcctgacttggaaggctttttaagcttccaagcaaccgatgagttttttaggagcgtggccgggggcccggtacttggaaaccattt

SEQ ID NO: 145133 - DNA, 126 bp, Zea mays
  Clone ID: MRT4577_63844C.1
tcttacacttgtccggacacgtgctcttactttcctcaccagattcctcttctcgttaagcgctggttatatcacctcctttgcactttcaacctacttcccctcctattcaaactccccacctta

SEQ ID NO: 145134 - DNA, 1259 bp, Zea mays
  Clone ID: MRT4577_63845C.1
gatctctctccccccggccccgagcgcaccagattcacaccgcgcccgcataggtgcgtgtgcctgcggaagctggttgctgctcgcgctactagctgtttcgcgcggtgatcaacaatccggccgcgggagcggagctaggaggccgagagacacaatgaacatgttcgatgggatggagagtgctgggtacggtggcggcgctgggccgatgggcggggtggtgctgtcgcgggaccccaagccgcggctgcggtggacgcccgacctgcacgagcgcttcgtcgaggccgtcaccaagctcggcggggccgacaaggcgacgcccaagtcagtgctgcggctgatgggaatgaaagggctcaccttgtaccacttgaagagtcacctccagaaatacaggcttggaaagcagaccaagaaagacacgggtttggacgccggcagagtggcattcgcggcgcagggcatcaatttctccacaccagtacctcctcctagcattccatctacggccagtgataatacgggagaaacgccacttgcagatgcgctgaagtaccagattgaagtccaaaggaaattgcacgagcagctcgaggttcagaagaagctgcagatgcggatcgaggcgcaaggcaaatacttgcagacgatactcgagaaggcccagagcaacctctcgtaccacgcgactggagccgcaaacctagaagcaaccaggtcgcagctgacggacttcaacctcgcgctctcaggcttcatggacaacgtgacccaggcgtgcgagcagaacaacggcgagctggtgaaagccatgtccgaggacggtctcagagcgaacaatctagactttcagccgtaccatggagttcatgacggggacgatgtcaagtgcgctacggacgaagggttgctacttctggacctgaacatcagaggcgggtacggtcatcggatttcgacggatctgaagatgaatcaacacatgcggtgaaaagttcagtagaaagaaaggcgaggacagtagtttaatcttgggtaacccatcaatctaagagaagaggtgcccttgtgtttgtgagaaattctttcggccatcttgattcctaacgatgcttctttatggtgatggtcagcgtattgcttatgtaaaatttggtgagaggctccgaataagggtaactaatcttatacaagatctttatatatacttggatttgtatggatctagggtacgaagtgaaagcatttgtcat

SEQ ID NO: 145135 - DNA, 376 bp, Zea mays
  Clone ID: MRT4577_63846C.1
ccggccgggacagttcccgccccagcctccaggtcctagctccggcctccgccgccgtctctcacctccgctccccttccctgcccccatggcgaaggccgacgcccgtagccgaggccgggccgcctctcacgtccccactcccacatgggcgcagcgcacggaggccctgacccacgtcctgacccacccgtcccacgcgccgtcgctccactcgcagctcttcctcgcctcccgcgtcccgtgcccgccgcggggcctcggctccaccacgtcgtacccgccgttcctctgccccggcgcctcgctcctccgctgggctctcgcctccgtgttcctcccggcgggagcggaggggcccgctgacggtgcggcc

SEQ ID NO: 145136 - DNA, 309 bp, Zea mays
  Clone ID: MRT4577_63847C.1
gctacccgatcccaaggacggatcattttaaaggaaactgccaaaatcaagtgccgtgcgattgattgactttggtagtgcagcataccatcaccaggatcgcagtttcattgtgtgtaccacacactattgcgcccttgaagatatttagggacatggatggagctatacatgtgatatctggagtgctgggtgcatactcgttgagctttgctcgggcgagacactgcatcatactcacgataacttggcacaccttgcaatgatggatagaggtctaggtcctcttgcactgtacatgctggaaag

SEQ ID NO: 145137 - DNA, 343 bp, Zea mays
  Clone ID: MRT4577_63848C.1
acctttgacgcgcgcggggagccggacgcggaggggcgcaactacaaccacaagacgtgccacacgacccaggagcaccagaacagccacaaggacggccgacccgaccagggctgccccaagcggcggtggcgggcccgcggaagcgagcagccgagcaccgagccgaagcagatcccgcaagacgcacgcgggaagtcgcaggcccaagagggggacacgctggcgcacgaaccacaagcaagacgggaactggccccaggaccacgaaggcgaatgggaacgaacctggcgggcaagccccacggaccagaaccaaggaggaccactaaccggggggaca

SEQ ID NO: 145138 - DNA, 215 bp, Zea mays
  unsure (1)..(215): unsure at all n locations
  Clone ID: MRT4577_63849C.1
tttatttttcaatccaggtgtacacatccgtgggttagccatacaacagaggactttccacccactatcanctttcacacactgattttgttgtcctgctttacaatttaaccttccatcacatgcgcctcctttccctagtcatattgctcctaacctacaccaacctcaacaagcttttgtatccatgtcatctcatttcttaactgttttcc

SEQ ID NO: 145139 - DNA, 331 bp, Zea mays
  Clone ID: MRT4577_6384C.1
ctaggttactcaacagaccacaccaccaggcactcggctcaagacagcaccgtcggccaccagccaccagccaccgagctgtatcgtcggaacagcgccgattatctagcactagcagaggtacgagaccaatgagaccttccacggctggcgctctggccgccgtggccctcgtcgcgacgctcttgatgagcgtaggagccacccctgagacgatgcgcgcggcggcggcggaccacgaccggctcgtgaactacagcttctgcgtgcctgggctgcgccaccaccataacacatccagacgccttcacctgatgcctggccacagaac

SEQ ID NO: 145140 - DNA, 257 bp, Zea mays
  Clone ID: MRT4577_63850C.1
gtctgatgcaagttcttgtgtggattagcgtaccacagcacatctcaaccccgtggcgacggggagtggtaagaatcaacgctctccaagtgtaaagaacaggtgcccggacacatgggttctgggagtgataggggctaagccactagcgcatggatagacctggtctaggctgacagtgtcctttaattaatgtcctgacaacatttcattaggctcttagcacctgctgttacaagcaagaacttgaacagggc

SEQ ID NO: 145141 - DNA, 367 bp, Zea mays
  Clone ID: MRT4577_63851C.1
gcacgcgtgcggagctcggaattcggctcgggggtgtcacatttatgcataaagactcggctggacggcgcgaccgtgtgactccgacagggaacaacccccatctcattaaggacttgctctgttgacgggcacagtcaggaggatcgcatgcttggcttggtctctttgaatagatggagctgatgtgcatcttttgtcgaacactgaaacatctatgatgttgctgtctgatcctctctggataaggagggcacctggccaggactatattcgttatagagtcacaagacagaacctatgctagacccaagaggaagggggaatgcgctgtggcaatctgcgaacggggagtatgatatctgct

SEQ ID NO: 145142 - DNA, 410 bp, Zea mays
  Clone ID: MRT4577_63853C.1
caaccattcagcttacaacgccagttctgcttctgataagtcatgacagataaagctgattcatatctgagccttgatttgtgtcatgttctgacaaactcataattaggatcatgcattttttcttgctccaaaccttacatcccgttggccactgaagtcaacccaatgtttcgaggctacaatcggctccaactacatgcttgtcaggtgacttttttctgggatggagctcatatttgcaggtgattgattcatcttggggctgagattgaaatagggtatttcagtgattcaaaataattcttggtgtacatcatcattagttttgtattgttttatttacacagtattcggtggtttattaaattcagatatggcacatatgataatgatcagagtggtttctg

SEQ ID NO: 145143 - DNA, 247 bp, Zea mays
  unsure (1)..(247): unsure at all n locations
  Clone ID: MRT4577_63855C.1
cccttcctttaatanttttttactacacaacccttagaaattgggcaattcaattcacttatttctgaaattccacaaacgaattcacttgtttctgacagaacccctcattgcacaccccagagtacctaggagagcaagcgagcctcagccatgagtgggaaaccacatgaaactagaaagagtttccaggtccaacagtgcgcctgggccgccagggcccggtcgagcagctcctgaggcaccg

SEQ ID NO: 145144 - DNA, 852 bp, Zea mays
  Clone ID: MRT4577_63856C.1
tttttttttgttcagaaaccactctgatcattatcatatgtgccatatctgaatttaataaaccaccgaatactgtgtaaataaaacaatacaaaactaatgatgatgtacaccaagaattattttgaatcactgaaataccctatttcaatctcagccccaagatgaatcaatcacctgcaaatatgagctccatcccagaaaaaagtcaggactcgtcttgcgagcgcagcagctactagtgggtactacctgacaagcatgtagttggagccgattgtagcctcgaaacattgggttgacttcacaggcgcaagggatgtatgggttggagctagagaaaaaacacgaccatggtagcatctgaaactctagttcacaaaagttgctcttcatcgctctcgtctaactgaaccacaaaaaatcagtttatgataccgcctgctataagcagaaaatgtagttggagccgattgtagcctcgaaacattgggttgacttcagtggccaacgggatgtaaggtttggagcaagaaaaaatgcatgatcctaattatgagtttgtcagaacatgacacaaatcaaggctcagatatgaatcagctttatctgtcatgacttatcagaagcagaactggcgttgtaagctgaatggttgcaggaaggcagttgggatttataggcacatacaagccaaacacacatcaacagaagaaattctgcaaagcgtctaagcaaagtgaggaatgtgggacatggggatgcacacactgttcgagaagacagggaatgcatgataacttattccaagcctgctattggcaacgtaaagcgctgaatgagctacagaaa

SEQ ID NO: 145145 - DNA, 507 bp, Zea mays
  Clone ID: MRT4577_63858C.1
gcaccactcgtgcgcccacgcgtgctcagccgcgtgcgctgtcgttatctattactgcgttaagcaactactgggacggatctagcgaggctgaacgacaaagatgcactcaagcacgagcgcgggaatgtcatctttctactaaattgggatgcgtagaaaatgacgaatatggaaataaagtggattatgttttgagcatagaacattggatacaagactaccaggggggcgccggtatggacgtaccaagataacaaacgcgcatttactagaacctagtttatcaatggcggaaccaaagatgaaacatgcgacagtgcttaaacaaacagaaccatgatagaaccctggaactacctacattatgctaataaataccaatagtcctaaaagaggcatctccaacattccaaataagatctcaccatgcttccttgcgaacgaaggcgaacatgtaatgattggagagagccggcctgtatcaaaaactgaaacgctcaatgt

SEQ ID NO: 145146 - DNA, 625 bp, Zea mays
  Clone ID: MRT4577_63859C.1
ttgttaccatatgggcttccgcctggagataaccttggactgtgagcccatacggcagacaagagcctgattcccaatgaactccgtactctttagacccctctgttgctgcgccacaggtcacgcctacgacaggactctccttctgcgagtcgatcgttaccaaacatcttggcccagcacctacaatgacgagggctatccaaacttgctgtctactgtcagcaacaacagattcttccattcaaccaactagctgcattgaactctgcttcttatttacaacaacaacaactaccattcagccagctatctgctgcctacccccagcaatttcttccattcaaccaactgacagctttgaactctcctgcttatttacagcagcaacaactactaccattcagccagctagctggtgtgagccctgctaccttcttgacacaaccacaattgttgccgttctaccagcacgctgcgcctaacgctggcaccctcttacaactgcaacaattgctgccattcaaccaacttgctttgacaaacccaacagcattctaccaacaacccatcatttggtggggccctcttttagatttcttatgagttataggtcaataataaa

SEQ ID NO: 145147 - DNA, 334 bp, Zea mays
  Clone ID: MRT4577_6385C.1
cacacaagcacagcctgaggcgctataaaaacctttacaccaaaatgattcctggccaacacgtaccagaattgggttctcccagggaaagcaacacatgatttacacccgaatttataatatgccctaatgtgaatgccataaaagtgggatcagaaggacaaaataatctatgtgtctcggcctacagctgctatcacatgtcatggattcctgtggcagaaaccccaaaaaagttaaaaccagtgcttgcacaatggcctaacaaacaaccccaaccctaaagaatcctggaataacaatgaggggcaagtccacctcatcaccttgaatc

SEQ ID NO: 145148 - DNA, 288 bp, Zea mays
  Clone ID: MRT4577_63861C.1
ctttaataattttttttttttttttttttttttttgtttttttttaaaagaaggggagcctttactaaaaactcacttgttagttttttacattagaaggaagaaaaataaataaaccaaaataattaacatcatgtttattatcatacatacctaattagataatcttggaactttcacttgaccatcaaatgaatcgtgtccatattttccataaaaataaacttcgcctatctcccgatgcatttgaacttttaagtctcactttttaaaaaaataccttttttt

SEQ ID NO: 145149 - DNA, 253 bp, Zea mays
  Clone ID: MRT4577_63863C.1
gaaggagctgaccataaacctgtcgctcgagctctctagcgccttcttcagcaagaaggctctgctcagcgccatttaccgagaggccgtgttcacgtactctgaggacgcagtcagcgccagtctgtccctgatccagaagctgcacgcagtgctgttggaccaccccctcagcagcatggacacggagcgggagccctacgagtactacaagatcaccatgttcgagtgaaagctccagcgcggtgctgcc

SEQ ID NO: 145150 - DNA, 362 bp, Zea mays
  Clone ID: MRT4577_63864C.1
gaaacctggctgcctagtctgagcagcagcagctcgttacatgcaaccaactgtctggagtgaactctgatgcttatgcgcaacatcaactaccattcagtcagctagctgctgcctacacgcagcaatatcttccatacaaccaactggcaccattgaactctgatgctgatttacaacagcaacaactaccaccattcagccagctagctgatgtgagccctattgcctacttgacacagcaacatttgttgccggtctacctgcacgctgcgcctaacgctggcaccatcttacaactgctacaattgctgccattcaaccaacttgctatgacaaacccaacagcgttctaccaacaa

SEQ ID NO: 145151 - DNA, 292 bp, Zea mays
  Clone ID: MRT4577_63867C.1
gttgttgcattttcgcttgttccccgtgttgctagttgcatctcaacacaacctcagagattttttttttcttctgttcgcttggctggcagcgcatcgtccggtcatcttgtggccccagtgccagtggccactggtggctacagcgtatgtttctgtggctgcacagaaagcaggcaatgatatagcagtatggtaatctgattgatggctggcttcattttcgacagaattccaaccaaatgggcaggcaccgatctctagcacggacaagcaaatcccagcacaggtg

SEQ ID NO: 145152 - DNA, 837 bp, Zea mays
  unsure (1)..(837): unsure at all n locations
  Clone ID: MRT4577_63869C.1
attctgcccccccctgattttggagcgaggtcactccggatccgcgagcttttcccctggatggacgaggactacctgcgcagctgcttcacccgctcgcccgagcttgtgacagcagtgataacgcggaacaaggagaccaagcaatctgagggtttcggttatcttaccttttctgaccatgccactgctggccaaatcctccagagctacaatggccagaagatgcctaatgctgacagggatttcagcctcagctggtccactatgctggtcctgatgatgattgtgccatatatgttgggggattgggctttgatgttacagacttcatgctacaccacgtgttcaagaatcgctatccatcagttaagagggcaaaagttatatgggatttttttgctagacgctcaaaaggctatgggtttgttgtgtttggagatgtcaatgaacgcacacaagcaatgactgaaatgaatggagcatactgttcttctaggcctatgcgtatcggacctgctaccttcaagagtgattttcgtacacaagggacatattctgattctaaccagagcaatagcagactttttgttggtcaacttgattcatgtgtgactgatgaggatctagataaagccttcagtccttatggagagcttactgtcaaggtaatagaggggaagaactgtggcttcgtcacatattcgagcagggcatcagctgtggaggctatgacaattctaaatggaagccagctgngagataatatcataacagttaactgggctcgtcctgctcctaagagcaggaccaatggaatggtgtggactatggaca

SEQ ID NO: 145153 - DNA, 320 bp, Zea mays
  Clone ID: MRT4577_6386C.1
gaggggaaccggagacgaagaaccaaccccctctcctcggacgacggcgactccccggtacatggccttcactcgcccagatggaggatctgtatgtattctaaatctcatgcaggggcgaaagctgtgggctattcaccataccgtggggattactgactatgcccagtatcaaatcggtgagcttgctggtcgggcacctaccagaaggtggcatcaggggatcccaggcaactatctttcgttctggtgagagtgcgaatggatcccccgaaatctattcacccccgactggagaggtggctcaatcgcactagaaa

SEQ ID NO: 145154 - DNA, 595 bp, Zea mays
  Clone ID: MRT4577_63870C.1
cccggggaaaaaaaaaaaaaaaaaaaaaaaaaaaaaaaaaaaaaaaaaaaaaaaaaaaaaaaaaaaaaaaaaaaaaaaaaaaaaaaaaaaaaaataaaaaaaaaaaaaataacatatattttggaatgaccacttttttgggcccctttggtggtccccgctctttccctccccttgggccgccgtctttttgtgggtccccttttggggtctccccgggcccgtttccttttgcccgccctttgcggggttcccccctgggtggccccctggtgtttccccctccttgcccccccccctttttgcccccctttttcccccgccggggtgtgcccggccaaatgggccccccccctctgtttgtgccattcctgtcgcggcgtttggttgggttttttgggccggccccctctcctgcgccttttcaccccgcgttctccccttttgttaccctcccctttcccccttccctttgccgtgccccgggggcccttttttcggttttttttggttgctttccggggctttcccggggggttcctctttgggggtttcctttgggggccccttttagggtcttggtggacctttttcc

SEQ ID NO: 145155 - DNA, 722 bp, Zea mays
  Clone ID: MRT4577_63871C.1
atcccaggatgagaagtgggggcaaattatgaatctcggttggagatgctctgaccgcgccgccggaacccttccgcacgcagtagctcctcctcagcccgtctgcttgactggcgcggagtggagggcagatccatccgggctgacgattctaggggcttcgaggatgaggagctgggctaatcgcccccactcatcccttctcgcctctttcctcgcggcctcttggcttctcgtggccgcatcgcctcaggaattgcatgaagcatctggatccaggattcttcatcacacaaagtcacacacacatgaggtgcattgttcaagggaacggagccgtgcagcttggaaagctgttgatgagtacttgatgccctttgtggaaaaggagaaatatgaactcccaagcaagtgtaggcttcgtcctgaaaacgacatgtttcgggaacaagagcaacataagatccattttgatgtgaacgagtggcgttgtggcttctgcaagaaatcctttcgagcagaaaaatttatcgatcagcattttgcaaaccggcacagtaatctgttggataatagtcaaggaaggtgcttggcagatctttgtggagcacttcactgtgatctgacaatggagttcaagaaaccaaagagtaaatgcaatgctgctgcagctgcaaggaaccgtcatctttgtgagagccttgcagacagttgctttcctg

SEQ ID NO: 145156 - DNA, 159 bp, Zea mays
  Clone ID: MRT4577_63872C.1
atggagttgcagaaaagtgctaagaggtctttgcagcaagctttaccagaagtgaaaaacaagtaccctttacctatcattgatgaattgctagatgaattacatggggtggtttggtttaccagtctagacctttgtgccgggtatcatcaaatttga

SEQ ID NO: 145157 - DNA, 591 bp, Zea mays
  Clone ID: MRT4577_63873C.1
tttgctcctcttttagtttttatactccatatgggatgggggggggaaggagtaatgttttgttgttgcttattggccttatcaaacattatataatattgaaagttgtttgtcagttgatgtctcaaattggtagcaagatcttgggatgattcaagatcgcttatgaactaatattgaggagaaggtgcaggtggcttggacaaatatatcatgaattcgatacatctatttcatacatacctttttcttgaaatcttgttgtttatgatttcttaccaggcgtgtgacaaacttcaatgaaataacctgtcactttctgcactgcattcaggtgcatatggagctcacagggttaaaggttgatggaaactacatatccaacttggtcttgagtgtttttcatgacccatctgtcatggaccaggagcatggactgcacatcaaagatgtcatagatcgtctcaaactaccagatgatgtagtcagtgcggccatccaaggtcatgttgatgtgggcaacatttacaacacaattgatgacttccactacaaatctgtccggaatggatgaccacgttgcaagtccac

SEQ ID NO: 145158 - DNA, 1616 bp, Zea mays
  unsure (1)..(1616): unsure at all n locations
  Clone ID: MRT4577_63874C.1
gcacgagcgcgtatgtatacctcgacgcccttccccacggccgggagcggcaaggcggcaaccgttctcccgcgtcccgcactcccgccccttttccttttgctccttccttcctcgggaagcctagggcttaggctttaagcgccgcgatgtacggcggcggcggcggcggcgggcactacgacggaggcagcggtggcgccgggaacgctaacgcgctcttcggcggcgggggcttcatgccctcacagtccacggtggtcccggagaacagcggcctctctaagggtcggagcgcgcagacgctgctcccgctcaccgtgaaacagaccatggacgcggcgcaaaccagcggtgacaggtctaatttcgccatcaacggcgttgaggtgtctacgattaggcttgttggacgcatgctaggtaaggttgagcgtgtcacagatgttgtattcactcttgatgatggtactggcaagatagatgtgaatcgctgggaaaatgaggcttccgatgctaaggagatggctgatgctaataacgagaactatgtcatagtcattggcggtttgaaaggttttcaaggaaagcgccatgtagttgcctatgctgtgcggcgtgtgacaaacttcaatgaaataacctgtcactttctgcactgcattcaggtgcatatggagctcacagggttaaagatctattcttcagctgcaacatatggaggagtagcccatgccccatcacagccaaatccggttgatggaaactacatatccaacttggtcttgagtgtttttcatgacccatctgtcatggaccaggagcatggactgcacatcaaagatgtcatagatcgtctcaaactaccagatgatgtagtcagtgcggccatccaaggtcatgttgatgtgggcaacatttacaacacaattgatgacttccactacaaatctgtccggaatggatgaccacgttgcaagtccagcgttcaggctccgtgtaggtatggagccgtttcaaggaagaagaaatgtaaaccctcttcaggatcgcctatattttgcagataggcttcatggtcaacagcttagcatatcggtttaggtgtgtattgctctcatatgtaatgatacataagatgtgagtagactaggtctacctgcaggacatcagtccgttcctacggaaatttgttatgaacgttttacattctaagacctatataaccgtgaagcacgcaaatcaagaatagaaccgccaaaaaaatggcagagggacattgagtaagacttcctgaaacgaactgactacacggacgaagatttgttcaccagaacggccgcgggccctcgaacacaagttatcattagccatgctggtggatctggataaagctcgctgattgtttcttggaactccttgatgttctcattaagccgccctcctttacctttctttactttgtcgcacttggtgcacacaaatgtcaatccaatctgaaacagtaacatcgtttttttaccaataagcacatanatatagtgagaatgcaattagagagctgcacaatgtacagaagcttttacaagatgaaaagatatagagaacaattttta

SEQ ID NO: 145159 - DNA, 626 bp, Zea mays
  unsure (1)..(626): unsure at all n locations
  Clone ID: MRT4577_63875C.1
ccggccggggctgtgagtgactcggtcgcatcttccccattctccatcgnacccaccggcggcggcgcaagtgaagcgaagaggaaaggaagctacgagatgtcggcgaccactgcagcggtgcccttctggcggccggcggggatgacctacatcggctactccacatctgcgctgcgctggtcccgaacttgcctcaagaagccctcaagtctgagggcgcgtcccccgaaaaaggtccatttccccatttccaaagggaccggatgggcaagcagggaaaaacccactgggcccccaaaaaaacgggaagaaaaaagggggtgggggccccgggggaaaaaaaaccccttcccccacaaaaaaatttttaaaagccccttttaaaaaattttttggggaaattttgatatttaaaaaggggcccttgggtttttaaaaaaaaaagggggggaaaaaaaaaaaaaaactcttttttttggaaaaaaagggggcttttttttaaaaaaaaaaggggggggggggggttttttcctcgggccctaaaaaaagagggggggtgccccccccccccccctccaaaaaaaaaaaagagggggggggtgggcgcaattataaaggggggg

SEQ ID NO: 145160 - DNA, 568 bp, Zea mays
  Clone ID: MRT4577_63876C.1
cattgggtacctcgaggccggccgggagcaaaacgagcaataatcgggagcaaggttgcaaaccctaaaaacccgcacgggctcaccgcccctccggcctccgccgcgtgctcgtcccaaaccctgtcgccggcagccatggcgacgggcttccgctccttcactcgcccggacggcgccgccttcctccggcccactgccaggcgaagcccctccgcttcccttccccgcaccctcgctcctgaccctagggcttcggacatggcgcggtgcatggatctggcgcggactcatgcaaccgctgcacagcgacgtctcggatggcccggctgacgtcgcgtctgagagcggaggcgtaccgggacatgccgcatgagacaggactcagtgtccctcgatagatgaaaggaactgctccagatggcagtaacatcagcagcatacaactgtaagacttggacaacagaataatcattcttgttaaacggtgtacgttgtctatttagtggccactttttgctatgcgctaacgacgcatagattgacctcataccataatacatacctg

SEQ ID NO: 145161 - DNA, 590 bp, Zea mays
  Clone ID: MRT4577_63877C.1
ccaaacgtttaccattttttttgcttgcacccgaagatctaggacggaggttgcttcaactcactgtattctaaatgcaaatgctaaacataattgctacacaatctatgaacatatgttcaagcccagttggatccagacgctcgagtatgccaacacaccttatcaagaaaaaccttatcatccttctctgatgaatgccgtggaatagattgctgactaaacacgatccttgcgcctcatgagttaaatgtgatacacatgaccttatctagaagctcatcttaagtcgcctaaaatgtggactgcttggtatcccaagaagtgccgtttgttgaggaacgcatagaccgcgaacatgttgataaatgtatctgtcatcgagacgattgaactgaaccaactggaggaacttgacggcatatttctcttgctatcctcaactcgagaagctggttcatgaccggtcgctattatcatgactgactgtgttagattgcagttgctaacagcacccattctatccagtcgatacacccattatggaattgaattacctgtcaaccttttgctgatattctcacagaaat

SEQ ID NO: 145162 - DNA, 298 bp, Zea mays
  Clone ID: MRT4577_63878C.1
tgcggctggccattctgggcggttcctagttaggtttctgttcccagctaagctgcagacctctattttctcctctgtgcaatgggaataacaacagtgtatctccatatgctgtctttaggattaacggaataatccgttgttgagcttattggcactgtgcctggtacacagcagccatctactctgctgggcactcactgatgaaggtgggggtcaagggaaggaaagggctttgaactccaggacaatagccacctttttcctgttcctcacagggaacccagtttggccagtg

SEQ ID NO: 145163 - DNA, 177 bp, Zea mays
  Clone ID: MRT4577_63879C.1
ttgattgatctcataccaggtgcataacatagtgtaaactaactgcacaccttacatatgatgcggtcagcaaaaatatgggatatttaacgagtgccggggaatagcccttggcggtcagaaccttgttagatgggaaaaccctcttacaggccgcattacattatgaatcgagag

SEQ ID NO: 145164 - DNA, 240 bp, Zea mays
  Clone ID: MRT4577_6387C.1
cagacgctgggtcgcaccacgcgtcgccaccacgcgtccgcggagacatagtacctgggcgtgcatgcctcaggacctgcaagttctgcgagcacacagatgtggcctgggatcagtggcagcgcaaggtagtggacagcatgctcggctggaccttacgctggaccggacgtccggctccgagttccagtccaagagctagtacctgttcggcaaggtcggcgtgcagatcaagctggt

SEQ ID NO: 145165 - DNA, 181 bp, Zea mays
  Clone ID: MRT4577_63880C.1
aaaataagcagaaacatgggattaaaaataaaaaaaacaaaaaaaaaaaatttcaaaaaccaacagcaaattattaagtcaacagtggagtacagcagtcaaatacctgagtggccctaggtggcttgggctaatacacttaggatcgatggttgtgacgcctgtgagagaagggaggggg

SEQ ID NO: 145166 - DNA, 226 bp, Zea mays
  Clone ID: MRT4577_63881C.1
aatgctgagttggaggagagagaagaggataatctggctgtaaacttacagccagctgaaacataagagaaccaaaaagcttgtgagagagataagtaggccaaacattttaataatgaagagccaactattatacaaacgggctaaaaggtcagtccttgcagcagccagcaaccggctacattattagccttgttcttagatgtatctaagaatttcagtaaca

SEQ ID NO: 145167 - DNA, 619 bp, Zea mays
  Clone ID: MRT4577_63882C.1
atatttgatcatctcagagatacagctgccttcacactgcgcctacctctgcctcatcagaacatgtccgcccattgctcctaattcccgccggcgctccatcccgtaacgcgacaccaatgagggagcgcatttcgatccacatctgtcatcccggaatccaggtcagaaactcgaggtgggagatggactgccttgagcatggcattcaagctgactgtcagatgcccggtgacaagaccatagggggaggtgatgatgctttcaacaccttcttcacacgagactggtgctgggaagcacgcgccccggggtgctcttgatgatcttgaacccactgatatccatgatgagaggactggaaactaccggcagctcttccaccctgagcaggttatcaacgggaaagaggatgccgccaacaactttgcccgtggacactacggcattggctaagagattgatgacctatgccttgatcgcatcacgaagcttgcggacaactgcactggtctccagggattcctcgtgttcaacgctgtagccgggggaacacgttctggacttgggtacgtcctcgtagagggcctgtatgatgagtacaagaagaaggccaagc

SEQ ID NO: 145168 - DNA, 289 bp, Zea mays
  Clone ID: MRT4577_63883C.1
ttaaagggacatgacaaaggtcacatgacattggtagggcgcataatatatttcaaggttccaggcaactatggggaaaggtggaacccaaaacaagatcaacagtttttagcagactttcagtcacaccaaaggtgcccctacagattattttctatcaacttgggacccggaccaagcaccattctttaaagaaagaggggacagcttgggacataatgtagatgttgattcatagcaaggaccttactaccaatctaggggtttttattcttaagggggccctttg

SEQ ID NO: 145169 - DNA, 452 bp, Zea mays
  Clone ID: MRT4577_63884C.1
cgggttttgccaacttcatttcaactggactctaaacttgtcgatggtggagttcccagccacatcctgttgatatcatctttattctccatggcagctagtggcttaaagcggacgcctcggtacttgcacaactatggccacttttggcagggcttctctccaccggcttgtactatggcttcacattttttataagtcgtaccaaatagcaatttaatagatggttttggtaacaatcactccttccttttctattagagttgaagccaacaaaatggcgttcacatctttggcttgtggtcttttgcaaaaacatcctcccaccaccatgaaatgaatgtggatgccaaagagggggatgaaatagaacttctatttctcgcactaatgtaggcctctaatttaacctcttaaacaaaacctatgtggataaccaaataagctctagc

SEQ ID NO: 145170 - DNA, 1672 bp, Zea mays
  Clone ID: MRT4577_63885C.1
cggctcgcccgcgccggcccgcgctcgaggctgcgcgagctccatccgagtcagagtcttcgcgtccaagccgcccgactgtgcctcctcaacggcgagcaccgcgcaccgagagcgcagctgcgagggtggtgtccgctgcgacgtctctgcccgcctctccgccacccctcctctggtccaagtccccccaccgcagcggccaccactccatccgagtctcttcgactccaagccgttccgctccccctgttccgcgcgacgccgatgcaccccaagctgccgcgggccgcgcgcaggctcctctgctgcggcggggccgccgcgtccccggaggaggacctgtctgacgaaggaaggcgatcgttgaggtgggtgttctcattgagagagcttcgatcagcaacaaacagcttcaattacgataacaagatcggagaagggccacttgggagtgtgtactggggacaagtctgggatggttctcagattgctgtcaagaggttaaataacgcaaagaacggcacagaagccgaatttgcttcagaagtcgagatactgggaagaataagacacaaaaacctcctgagcttccgtggatactgtgcggacggacccgagcgcgttctggtgtatgacttcatggcaaactcaagcctgtatgcgcatctccatggaccgcattccgcggagtgtctcctcgactggcggaggcgagcgtctatcgccatgggcaccgctcgggctctcttgtaccttcatcgccacgcaacgcctaagataatccacggaagcgtcaaggccaccaacgtgctgctggattcagacttccgggcgcacgctggcgatttcggtctggcaaggcttattcccgacgacggaacggaccacgcaaagatagccagcagcgagagccagcgaggctaccttgctcccgagtacgccgccatgttcggcaaaccaactgcaggctgcgatgtatacagcttcgggatcatactgctggagcttgcgagcggcagaaggccagtcgagaagtcgggttctggcaaggcttgtggaatccgaagctgggtgctcccgctcgcaaggcagggcaggtacgacgagattgcggactcgaagctgggcgacaagttctctggacctgagctgagaaggatggtgttggtcggtctagcgtgcacacgttcagaacctgaaaagagacccacgatgcttcaagtcgtgccgttgctgaaaggcgagtcgaaagaaacgcttgttaagcttgaaagggaggagttgttgttcagcccagactcgacgacggtgagttcgcagggaacaccgaccccagatgggagcacggactctgcgccgccgaagaaagatcaagaactggttggggcgtgagttgcgatatattgctgttctaggcgattgtagagtgcgtatttgtggtattgatgattggtctgtgcggtttgacgtgaatgggaattgtataggcattgtttttttttctatgttttttttctgtcctttttgagggagtaaggaagagccggcgggctggactgagatactccccttgtcctaattttgagaaatcaggcccaagcggtctctgttgctttgcaggttcttcaaagcgtatgcttcgtccaaaaaaaaaaaaaaaaaagcggcc

SEQ ID NO: 145171 - DNA, 1026 bp, Zea mays
  Clone ID: MRT4577_63886C.1
ttctgccctagtgtagtgatggtggtgaacgttgtggtggttactccgtgtaaccaacccccatcaccagctccagcaggatttgccccgcacggcaagcagcggcgtgggctgccgaatccccaacccaacctgcgtcggcgcgtgggaatggcgagaaaaaggcggcgaacaggtcactcacgcacaccgaaagcgcagctgcgaggctggtctccgctgttacgtctctgcccgcctctcccccacccctcctctggtccaagtccccccaccgcagcggccaccactccatccgagtctcttcgactccaagccgttccgctccccctgttccgcgcgacgccgatgcaccccaagctgccgcgggccgcgcgcaggctcctctgctgcggcggggccgccgcgtccccggaggaggacctgtctgacgaaggaaggcgatcgttgaggtgggtgttctcattgagagagcttcgatcagcaacaaacagcttcaattacgataacaagatcggagaagggccacttgggagtgtgtactggggacaagtctgggatggttctcagattgctgtcaagaggttaaataacgcaaagaacggcacagaagccgaatttgcttcagaagtcgagatactgggaagaataagacacaaaaacctcctgagcttccgtggatactgtgcggacggacccgagcgcgttctggtgtatgacttcatggcaaactcaagcctgtatgcgcatctccatggaccgcattccgcggagtgtctcctcgactggcggaggcgagcgtctatcgccatgggcaccgctcgggctctcttgtcagtgaacaacaactaaccgttatctatttatctttgttcgtagcagaataacattgataattcacgcactgttgctttcgttagccaccaccggcagatctaaataactcgagtactttctcacaggtaccttcatcgccacgcaacgcctaagatatccacggaagcgtcaggccaccaacgtgctgct

SEQ ID NO: 145172 - DNA, 405 bp, Zea mays
  Clone ID: MRT4577_63887C.1
ggccgcccttttttttttttttttttttttttttttaatttttttttttttcccccaagcgtttttattaatgggagcccacatcccccttgggagaagcgggaaatcatccacaaatccaaccaaatgtttagaaacataaaaaaaatagtccccactatatctacagttgcaacatataaccacatttgtcttcctaaggtaaatcttccccctaaaagttacttttttttccctaaaaatttaacctactatattctttaattgttaacctaaataatgctcaaacattttctctttatcttcttcaaaactatcatcaatattaaatatcctcctccttttcttaatttttaacacaaaactttgctttctcttttaactttattcctttcaattttaaaa

SEQ ID NO: 145173 - DNA, 1089 bp, Zea mays
  Clone ID: MRT4577_63889C.1
ccggccgtcgaaaggggaaaaatgagttaaacccaaatcgacaccaaacccactccaggaacacccgcctccgccgccgccgccgccatcgccggcggccactacaagcgcggcgtccggagacagtactgcgctaccaacccctagagcctggattctgatgagccctccatggcctgtcatatctgtcccctcttcaatctccgactcttgctgctgctcggcgcggttctcgggaacggcggcctcggccggggcggcggagcggaggcttcagatcgggcggacccggacccgtactcgatcctgatgtggcacgactactcgccgccgtcgcccccgctcccgcccccggacccgccgtcgccgacggcgacatgtgagggggacctccacgggaagggtgacttccacacgcgctgcgaggtctccgaggaagtggagctggacggcgacgtctacatcacggggaacggcagcctcgtgctcctctctggcgcctccctgacctgcgagaagtacgggtgcgttatatccgccaatttctcaggcgaggtgcgcctcagccgcggcgtccgcgtcacagccggcagggtctcgctggttgccaccaacatcacggtcgccgacacggtcgtcgtgaataccaccgcgctcgctggtgatccgccagaccggaccagtggcgttcccacggggacgcacggcgacggtggcgggcacggtggtcgtggcgccagctgcttcgtcaaggaagggcagacgcaggaggattcatggggcggcgatgcctatgcatggtctgacctcgaacacccctggagctacgggagcaaagggggctcgaccagcgttgagaaggactatggtggtgacggtggtggcatcgtgtggctgtttgctgaggacctggtcatgaatggcacagttctcgccaacggtggggatagcaatgagaagggtggtggtggttctggagggagcatctttataagggctgcatcgatgtgagtgtttgtggaatgattttttgttcttctttctttatgctaagtgaattgagatatgggaatgcaagcttagttaatc

SEQ ID NO: 145174 - DNA, 191 bp, Zea mays
  Clone ID: MRT4577_63890C.1
tgttatagaacagaaacacacaagtttgctaccaaggacattatctagctatttttgtggtgatggaaataaagttgtaatacctaagaaactttaaacactatatatatctttctatccaaaaaaaaaaaaaaataaaaaaaaaaaaaaaaaattcccggctgcctccttagagaatccaagtttactta

SEQ ID NO: 145175 - DNA, 837 bp, Zea mays
  unsure (1)..(837): unsure at all n locations
  Clone ID: MRT4577_63891C.1
attattggaacctataactcaataagaaatctataaagagtggcccaccaccaatggatgtggttggttgggtaggaatgcctgttggggtttggtcataagcaaggttgngttgatatgggcagcaattggttggcatgttgtaaggaggggtgcccagcggttagggcccagcgtgctggtagaacgcaaaattgtggttgggtcaagaaggtagcagggctcacacccagctagctggctgaatggtagtagttgttgctgctgtaaataagcagggagaggtcaaaggctgcagttggttgaatggaagaaattgctgggggtaggcagcagatagctggctgaatggtagttgttgttgttgcaaataagaagcagagttcaatgcagctaggttggttgaatggaagaaactgttgttgctgagagtaggcagcaaggtttgctagcacaagttgttgtagttgttgtgccctgatgttttgtgccaataaatgcaccaaaggtacctgctgtaatagggctgatgattgttgtaggaacaagggtgatcaaaggtaacatgccagctgcgattgcctgttggatcctgtagggttgaagaattgggtttctcacatacccaatacaccgttgtgtgataggcacggggaaaaaaggtaagccataggagcatgtgagctgtgtggcctcaatggtctctgtaacagctcatacatcaagaacaaggagctaggtagactaaatgttcttacctagccattggtggagcactattgtgctttatcgaacgagtaggtcgaccgtgtaatagccggcccggttcacgcaggc

SEQ ID NO: 145176 - DNA, 816 bp, Zea mays
  Clone ID: MRT4577_63893C.1
caacacgtggaccccaagacctgtagatgccttatgctccttgcggctggatgcaagtgtggcctacacgcaacgcattttgccacagtgctgacaaacttctatagcgtccattcttcccccatacctctgaccagcggcgtcttaagagcgagaaaacccaaatgtctccatccctacagcgatgccaacaggcaatacgcagcagcgcatcgtctacgcatgtatcgaccctacgcctcctccagacaaccgacagccctattacaagaggtacctttggtccatttggtggcacaaaacatcagggcacaacaactacaacaacttgagctagcaaaccttgctgcatactctcagcaacatcggattcttccattcaaccaactggctgcattgaactctgctgcttatttgcaacaacaactaccattcagccagctagctgctgcctacccccagcaatttcttccattcaaccaactagcagtattgaactctgctgcttatttacagcagcaacaactactaccattcagccagctagctgatgagagccctgctgccttcttgacacaacaacagttgttgccgttctacctacacgctatgcctaacgctggcacccttttacaactggaacaattgctgccattcaaccaactagctttgacaaacccacgcagggtctacccacaacccatcattggggggggccccttttcgaaagggtatgaggtatagggccaaaatgaaaagcctttggggaaagggtgggggcctcccacaacaaaaaaagacaacttctagattttt

SEQ ID NO: 145177 - DNA, 898 bp, Zea mays
  Clone ID: MRT4577_63897C.1
cacgcctgcgtgtaccgggccgctatagcacggtcgacctacgcgttcgtacatagaaagcacattatgatccaacggaggccgccaaatattatgacaacttatgcttcgagctattactgaaaggactgctacagcgacgctctcaccacaggatggcgtctgaagctacaatactgttggttttgccaaagcacgtttgaccaatggcggctattgtatgagaaaacacaaggctccaaccctacgggaaccaacatgcaataacagctgcaattgtacctgtatcaccattgtatcctgcaacaatacataagtacctattacaacaggtacctttggtgcatgtattgaacaaaacatcagggcacaacaactacaacaacttgtgctagcaaaccttgctgcctactctcagcaacagcagtttctgccattgaaccaactaggttcattgaactctgcttattatttgcaacaacaacaactaccattcagcagctacctgctgcctacccccagcaatttcttccattcaaccaactagcagcattgaactctcctgcttatttacagcagcaacaactactaccattcagtcagctagctggtgtgagccctgctaccttcttgacacaaccacagttgttaccgttttaccagcacgttgcgcctaacgccggcacccttttacaactgcaacaattgcagccattcaaccaacttgctttgacaaaaccagcagtgttctaccaacaacccatcattggtggtgccctcttttagatttcttatgagatatagttcaataataaagttttttatttgatgtatgtggcttcccagaaataatagaagtacagttatgaaaaaaaaaaaaaaaaaaagaaagcttgcc

SEQ ID NO: 145178 - DNA, 535 bp, Zea mays
  Clone ID: MRT4577_63898C.1
actactcataaccattgcagaactcattaactttaaacaacagaactaagccccgctgcttttaagacaaatgaatacagaaaaaatccgtcaccactaatcacaaaactcaaaccaagacgcccataataaactcagatccaaacaacatttctgcaaaacatctataatgcataaactgtctattcaaaccaaactctacaagctgagccgatggcgctatccaaactcaaaacttgaactctacatcttgctgaaagccacaacggccaatctctgtgacgtacctcattgatgagctcttgcgtacggtgtcactcaattagagaggacacggacacaagagtcggcgacaatctgtaacatgatacaacatattcctgttgccatatccaacaggcacaagctttaatgcttcccaagtaaaaccctccatatggacactggggacagactcctccagcttatatatatcagtctcatacatccatgattagacatccataacgacggaggatttaccactttctttctt

SEQ ID NO: 145179 - DNA, 223 bp, Zea mays
  unsure (1)..(223): unsure at all n locations
  Clone ID: MRT4577_63899C.1
caagttcgaagnacagggtgggagtgggatttttgctcganaagnagtgaaaatggctgattgcgaggaggcttcaaatcctggctaacaagtactctccttngaggnatgttaccagctaaactcgtgactggtaataagccagatttcatttagcgctgatggtaagtgtttcaccaatnaagccatgggggttagcttgggggcctatncanccctagct

SEQ ID NO: 145180 - DNA, 112 bp, Zea mays
  Clone ID: MRT4577_6389C.1
tactgcttggcgttcttcaccaacggatccaagggggctggtctaaatcctgacgaggcttcaaatcgcttaaagaccaatgcctgactaccacacctacatatagttggga

SEQ ID NO: 145181 - DNA, 1824 bp, Zea mays
  Clone ID: MRT4577_638C.1
cgggggacccacgcgtccgcggacgcgtgggttttatttcaacttctgctgttatgtctttctataatcttttaaagggaggctcacttgctctatattcttcaaagctgctagccatgtgcatcatctttattgggtcttgacacccctaagctgctcattttgtagtgtgaacatggggccacttggaaagcatgataaactaattagcatcggtctcttccgtctcggaggtgggagagagcgatcagcggcgtcgccgggtggatccaaagcgcgcgagaaaatgcagggcggatccagcggcatcgtgtatggtggcctcaagtaccaggcgcggtgtatcgccgacatacgcgcggacgccggctcgaccaccttcctcgccggcaccctcagcctcaaggaggagaacgaggtgcacctgatccggttttcgccggcggagagcgagctggtgtgcgatggcctcttctaccaccccaacgagatttgggacctcaaatcatgccccttcgatcacagggttttctccacagtctacacgtctggtgagggctatggtgcatcagtttggaagatcccggagctcaatgggcaatcaaactcaccacaacttgagcagctctttgagcttagtgggcatacgggcaagattagacgtgtgatctggtggccacttggaaagcatgataaactaattagcattgatgaccgaaatatttttctttggaacatagacacgtcaaaaaaaatagctaaggtgatctcacagggatcaactgacatgcttccaaatttacgtggtggagcttgggatccacacaatcataatttagttgctgcaatatctgattcatcacttcagctgtgggatctacgttctatggaaaaatcaactgcaattgaacatgcacatatacgggatgtggattataaccccaagaagcaaaacattgttgcaacagcagaagaggaatttggaattcgcttgtgggatctcagaatgcttaagtatcctctaaaagatctccctgggcactcacattggacatgggctgttcggcacaatcctgcgtatgatgagctccttctgagtgctggaacagattcaactgtaaatttatggttggctaaagttagcagtgacgatcctgaatctgatagcccttctgctttatccaataggcaagaagtaccattactcaactcatatactgactatgaagacagcatctatggtattgcatggagctcccatgatccatcattattcgcttctttgtcatatgatggaagggttgtcttggaatcagtcaagccctacttgcagagaaaatgaaccttgtctagttttctaaattgtaaggtgcaaaatatggtttcttgtttcctttatcttgtccttattattactgaagttacctcatgtcctaataaactgttctcttcctgctacatgtgggcttgtttgttcatattggaagctgagtagctttgccttgccattctgtagcctcttaacaagcatttatgtgatgattcggtttactgttgtagcaatggcagaaaaatggataacaagattgttacagaaatcaatttttaggatgttgtatatttgaagtgtccatgaaaaggtcttgtgttatatgatgaggtggggttgaactcaatttgtaaaaccgttcagaatttcagattagtaggattagtttttttttacttttctgtttcgcattcagaatttcgttctttgcaggtagcattgagcgaatttggtaaaaccattcagattaacgagaataagttattttatgatct

SEQ ID NO: 145182 - DNA, 856 bp, Zea mays
  Clone ID: MRT4577_63900C.1
agaaacgtttatctatgtgtaacgtataaacctcataaagtaaatctcaaaagagggcaccaccaatgatgggttgttggtagaacgctgctgggtttgtcaaagcaagttggttgaatggcagcaattgttgcagttgtaagagggtgccagcgttaggcgcagcgtgctggtagaacggcaacaactgtggttgtatcaagaaggtagcagggctcacaccagctagctggctgaatggtagtagttgttgctgctgtaaataagcaggagagttcaatgctgccagttggttgaatggaagaaattgctgggggtaggcagcaggtagctggctgaatggtagttgttgttgttgcaaataataagcagagttcaatgcagctagttggttgaatggaagaaactgctgttgctgagagtacgcagtaaggtttgctagcacaagctgttgtagttgttgtgccctgatgttgtgtgccaataaatgcaccaaaggtagctcatgtaataggcatcatgaatgttggatggtctagggttatctacgttcttaatccagctgtcagttgcctgttgttatcctgtagggttgcagccttgcgttgtcaccctcttacagactgcgctggtgatgcgcattcagccagcatgctccgccccgccccctagcgttattccggcaacccgtcattggtggtgccctcttttagatttcctatgagcaatagttcactaataaagttgtttgcctgatgtttgtggcttcccgagccataagatgagtccagttgttgataaaaaaacgcacgcctcggtcgaccgctctagagaagcccggctcctgcaggcgtgc

SEQ ID NO: 145183 - DNA, 303 bp, Zea mays
  Clone ID: MRT4577_63902C.1
ggccgccgggtgctggatttgtcttaggtggcgggcgggacgccgagggcgatgggcatgcgctggatcacggggagcgttgcagccctgtgctccctggtagggattttttggctcttggcatttgtagaagcgggctatgccgcctatttttagagctattcggcaggctcatgactgctgctttatgactctgggcagctgaagtcggtcgggacgtgcgagcgcacatacgtgtcttcgagctccctgcgccgcgaagaggcggccatgccgtacctgcccgcgcgtcaagggcgatct

SEQ ID NO: 145184 - DNA, 954 bp, Zea mays
  Clone ID: MRT4577_63903C.1
atggcagatgtagaggctgggaagtttaaatgtgaatgcaaacagtgggagcacacaggcctattttgtgtgcatcttatccaaacattcatgcacattcagctagaaaggatacctaagaaatacattttacatcgttacacatactcagctaggcaagatgtggtattttcaagagatgacagggaaatgagtggaaaggatggagaaacaaaatcatataggcagaaaatgatgcttaaaaaggcaatgaaggtggtaaaccatgctagtatgtcaaaggcagggagtgataaggccttggacacaatggataaactattggagatgcttgggcgtttggagccagatataggatgtgatgatgctggtggtgcaagtactagagagggcaaccatggcgaagaggatgccgttggaaacgatgaaggtgaacatgtatcgcaatgtgataacgaggagcatgtgacagtacattcactgcaacaggatggaagcagaaatattgatgcacatcatcaatctgagttgcaaatgacgcttgttggaaatgatgattgtgaagggacacaatatggggatgttagaaagagactggaatatgatgtagatggcataagcttagtgcgcccaaataatgcaaggccaaagggaaggacgatcaaaactagtgagcaaagagttgtgaaactggatgcgaaaggagaaaagaagaagactcgaaagtgccaaaaatgtggcattgctgatggacacaacagtcgcacctgcctgtctgtggaggaaaatagggttaaattggctagccttgctgatagaaaaagaggacgaccgcctgggtctagaaacaagaattcaacaatggccccccagtggaatgagacattcacatcaaagaagcataaactggttgattctagagaacatggatccgatgacgataatttgacatga

SEQ ID NO: 145185 - DNA, 290 bp, Zea mays
  Clone ID: MRT4577_63904C.1
ccctcgtttccggctgaaccggccgtccgacgcctccgcgttcgcggcatcggaagctccagcgaccagctgctcgttcagccggtcgtccctggacacggcggcggctgtgcagacgccggcgccgccgagcgccagcccgctggacccgtcccggttccacaaggcctccaacagggagatccggcgcgccgccatcacccgcgggcggcggctcaaggtgtgcacgtgcccgtagccggaccaccagcaccgtcgtcgtcgatagcgcctgtcgctgtgggcgccct

SEQ ID NO: 145186 - DNA, 302 bp, Zea mays
  Clone ID: MRT4577_63905C.1
tcgtctcggctctgaggtagactgaacgcagcttgctcgatcggccgtactcgactggtcgcaagaagttctcggagggtagcaagggccagtctagcagctcgatcgtgcgcacctcggacgtcggcggcacgactgactggggcctgcaccaatggctacgaatcgttcaagcatttgtctcgcacgatcgacacccttgagtggtcatcgcgccgtcacccggccgtggcacctcgacatgcctgtgtcctcgtaatcatccagagcgcttggccgtcaatcctcctcgccaaggttca

SEQ ID NO: 145187 - DNA, 575 bp, Zea mays
  Clone ID: MRT4577_63906C.1
cgtgaacttcacgacctacgccgcgccgtcgcagagggcaccgtcacgcggtacatccctagtatttcgtgctaatcagcggcaacacattcggacgcgtgggcgctggggacgacagtgtttcagatttattaaaccagtctacactggccgattctaaagatctcgacggcgttccccaggcaacgatatctttaggccgacttttgagagtttgttgggctgacggatagcaagaatttaaagactataagaagaatcaaggatttgaagactacatgaagaagcagctcgaggagttggagagatggtacctctcgcactttacggtggattgccatcagttgggccgtcaagaagaaggaagtggatgtcatctccataaaggatttcacactttttggctcgacgtcgtttgtgccccaggtggcctaccgacctcgggcatcatcttcacctctattcaactctatgtcgtctagagccgtcttgggtggcctgccaacctccaagacgatcataggatcttacccctcccgagggcaagaatcatgtagtcaaaaaaaaaaaaaaaa

SEQ ID NO: 145188 - DNA, 488 bp, Zea mays
  unsure (1)..(488): unsure at all n locations
  Clone ID: MRT4577_63907C.1
gcctcctcgtccgcctccaagcgcccccgccgcaactcctcttcctcctcctctgcgccgccgcgccagcagccaccgatggaaccctcgccctcctcccgccgccgctcccgcgccgccgccgccgacaagggcaaggaccccgaccccgcctgctgcgaccacccttccccacccgcccctgacgatgacgccgacgtcaccttcccccagcccttcacctccgccagcaccgccctccagggcctcctccgcaggctcggcgccggcctcgacgacctctctcccatcctcctcctcagcgccctcctccgccacgtccggtcacctcaagaggatcctcgccggcctgcaggcgcacggngacgagtcgcgccagctccagtccctcatgcagctctgcgagatgctctccatcggcaccgaggactcgctcgncggcttcccggtcgatgcttttgtnccaatcctcgtcgggatgcttggcc

SEQ ID NO: 145189 - DNA, 374 bp, Zea mays
  Clone ID: MRT4577_63908C.1
agaaaggggagttgaaaacccacatttaatattctgctaggctttataccagctattctgccgagtggactgctacatgtgtagaaccctcactcagagggcttttgggttggaacataaaacaaccgccactgactgctttaacgcttactcccaaaccgatcggttcggcctgaataattgtcgaggagccccatatttggaacgtgtcatttttatacgtgcctgcacacctttctcgaggcatcatccaaaaagtatttcgggtaccagggtgctgacagaagccgcctgcacgggaaccacatgaggcagatgtaacggcagagcccgattgaggtgtcctccaggtcctcccagtaagtgagcttcat

SEQ ID NO: 145190 - DNA, 1974 bp, Zea mays
  Clone ID: MRT4577_63909C.1
gtgcctgctgactgcctccctttggccgccttgcctgccacgcccacgcgcaatcagaagcaggccaccaccccaccctcccaaacggctataattacgcgggtgccctcgagcccggccggggcatcgcatagcagcaattccctcccccccgctccggcccctcgcaccgtttccctttccccgccgctcctccgaagccaccaccgcgccccgccccgcgagggcacgaaagaggaggaacgcggccaccggcggcgagggttcgggctcttgctcccgacggtttgcaacccgggagggagccgaccgtgcgcgcgcattgggcccgcgcgggggaagcggcaggcgcgtgccgtttttatttagcccgctccgctccgcgcccggcggctgcggggtgtggtgctcctgctgattttcttctcggcgccatggaggccggctactgcaaccgcaagaagaccgacggcatctgcgacggcgtctgcgacagcgagcttggttcaaagtcagtcctgagcatgtcgaggctgaagtgcgcgctgcggacattcgatctgagggttctcttgattctgctgatcggtgtgccaatcctgctcttcgccatctacgtgcacggccagaaggtgacctacttcctccggccgatctgggagaagcccccaaagcccttcaaagtactcccccactactaccacgagaacgtctcgatggccaacctctgcaagctgcacggatggagagtcagggagaccccgcgccgcgtcttcgacgccgtgctcttcagcaacgagctcgacatccttgacatccgctggcacgagctgagcccctacgtgtcggagttcgtgctgctggagtccaactcgaccttcaccggcataaggaaggacctccacttcagggagaaccggcagcggttcggcttcgccgagtcgcggctgacctacggcaccataggcgggaggttcgtgaagggagagaacccgttcgtggaggagtcgtaccagagggtcgccctcgaccagctgatcaagatcgcgggcatcgcggacgacgacctgctgatcatgtcggacgtggacgagatcccgagcgggcacaccgtgaacctcctgagatggtgcgacgacgtccccgaggtactccacctccagctccggaactacctctactcgttcgagttcctgctcgacgacaggagctggcgggcctcggtgcacaggtacagggccgggaggacgaggtacgcgcacttccggcagacggacgacctcctggccgattccgggtggcactgcagcttctgcttccgccgcatagacgacttcgtcttcaagatgaaggcctacagccacgtggaccggatcaggttcgggtacttcctgaacccgaggaggatccagcacgtgatctgcgagggggccgatctcttcgacatgctccccgaggagtacacgttccaggagatcatcgccaagctggggcctatcccgagcacgttctccgctgtccatctccccgcctatctgctggagcacaacgagcggtacaggtaccttctcccgggcaactgcgttagagagagtggctagtagctaaggctgtaaggcagctagctgtgttgctgtctgcatcgccatggcctgaggcgcaccgacgtcgctcgcggatgcatgcatgcgtggaggagcgccctgccgttgccggggttgttgtatctggatatacgactggctgggctgacttatatatttagatgatgaatgaatggtcgcttgaccgctgctggttcagttcgtatgagattttgtaccatggaaggccttcacagcagcatagcatgcttggtcgctgcttccttgttgttttgcaggcctgggtttttattcattgcttccatgattgatgtatgtatgaatgaactcaaactatttgtaggtgtcataccgagcgacattcatcccc

SEQ ID NO: 145191 - DNA, 153 bp, Zea mays
  Clone ID: MRT4577_6390C.1
agcggacgcgtgggctgctgatccgcctgtcatccccctacttgttccaagatgcaatcatgcggggcccaaactcctcgggccctcggccgacatgattgcctcacacgctatcaagagtcgcctccacctacttccaagaggaagaggccg

SEQ ID NO: 145192 - DNA, 421 bp, Zea mays
  Clone ID: MRT4577_63910C.1
ccggccggggacaacgggacggagttcaagaactctcaaattgaaggcttccttgaggaggagggcatcaagcatgagttctcttctccatacacgccacaacaaaatggtgtagtggagaggaagaatcgaaccctattggacatggcaaggaccatgcgatttgttttacaccctctctcgcggacttgtttatatttctaacgctaacccggcttgtagttgtgtttatatttgtaaatttcagtttcgccctattcacccccctctaggcgactatcagattcataaaagcaagagaaaggttatgagcaatgtcatcattttgggggcctggtgtttatggattcaccgcaacaaggcaatcttcaatggagagaacccttcgctgggcaaaaaaaaaaaaaaaaaacccgcggcc

SEQ ID NO: 145193 - DNA, 786 bp, Zea mays
  unsure (1)..(786): unsure at all n locations
  Clone ID: MRT4577_63911C.1
gccgttccctcagtccgcccccctcactctcgcctactccctccgcgcccgccggcgagcggatccgccgccgccgccgtctgaccatgaagcagctccaccgccagtccagcctcagcaagcagcaccgcccgcaccaccgctcctctctctcccgctcccttgcctcctacctcctccgcgagcaccgcctcctcttcgtcctcctcggcttcctcctcgcctcctccttcttcctcctctaccccgccctcgccccgcaccccatctctctctcctcctccgcctacgccgccaccaccacttctgccatcagaaacccccgcgtcttctccttctccaccgccaacgcgtcgccgcgccgcctccccgtcggcgtccgcaagaagcccctgcgggtggtcgtcaccgggggcgccggcttcgtcggcagccacctcgtcgacaagctcctcgcccgcggggacagcgtcatcgttatcgacaacttcttcacgggccgcaaggaaaacgtcgcgcaccacctcgctaaccctcgcttcgagctcatccgccacgatgtcgtcgagcccatcctcctcgaggtcgaccagatctaccacctcgcctgccccgcctcccccgtccactacaaattcaacccaatcaagaccatcaagacaaatgtgatggggacgttgaacatgctgngactggcgaagagggtcggtgcccggttcttgctcaccagtaccagtgaggtgtacggtgatcctctagagcaccctcagaaggagagttactggg

SEQ ID NO: 145194 - DNA, 525 bp, Zea mays
  Clone ID: MRT4577_63912C.1
agatcatcgccaagctggggcctatcccgagcacgttctccgctgtccatctccccgcctatctgctggagcacaacgagcggtacaggtaccttctcccgggcaactgcgttagagagagtggctagtagctaaggctgtaaaggcagctagctgtgttgctgtctgcatcgccatggcctgaggcgcaccgacgtcgctcgcggatgcatgcatgcgtggaggagcgccctgccgttgccggggttgttgtatctggatatacgactggctgggctgacttatatttagatgatgaatgaatggtcgcttgactgctgctggttcagttcgtatgagattttgtaccatggaaggccttgacagcagcatagcatgcttggtcgctgcttccttgttgttttgcagaggagctcagcagtgtgtgtacctaccgcctgggtttttattcattgcttccatgattgatgtatgtatgaatgaactcacaaactatttgtaggtgtcataccgagcgacattcac

SEQ ID NO: 145195 - DNA, 1017 bp, Zea mays
  Clone ID: MRT4577_63913C.1
gtacacccccggctcgccgggctcttcggccagccagtcactgccacgcccacgcgcaatcagaagcaggccaccaccccaccctcccaaacggctataattacgcggttgccggaatcctcttgtcccgcatcgcataccagcaattccctccccccgctccggcccctcgcaccgtttccctttccccgccgctcctccgaagccaccaccgtgccccgccccgcgagggcacgaaagaggaggaacgcggccaccgccggcgagggttcgggctccgctcccgacggtttgcaacccgggagggagccgaccgtgcgcgcgcattgggcccgcgcgggggaagcggcaggcgcgtgccgtttttatttagcccgctccgctccgcgcccggcggctgcggggtgtggtgctcctgctgattttcttctcggcgccatggaggccggctactgcaaccgcaagaagaccgacggcatctgcgacggcgtctgcgacagcgagcttggttcaaagtcagtcctgagcatgtcgaggctgaagtgcgcgctgcggacattcgatctgagggttctcttgattctgctgatcggtgtgccaatcctgctcttcgccatctacgtgcacggccagaaggtgacctacttcctccggccgatctgggagaagcccccgaagcccttcaaagtactcccccactactaccacgagaacgtctcgatggccaacctctgcaagctgcacggatggagagtcagggagaccccgcgccgcgtcttcgacgccgtgctcttcagcaacgagctcgacatccttgacatccgctggcacgagctgagcccctacgtctcagagttcgtgctgctggagtccaactcgaccttcaccggcataaggaaggacctccacttcagggagaaccggcagcggttcggcttcgccgagtcgcggctgacctacggcaccatatgcgggaggttcgtgaagggagagaacccgttcgtggaggagtcgtac

SEQ ID NO: 145196 - DNA, 457 bp, Zea mays
  Clone ID: MRT4577_63914C.1
tccttctccttttttctttctgcgaaacggaccaaccggcgcaccactgtacaatacaccattccattcaggttcagggatatctagttagcttgcgaagcactctgcctacctcgaccagttagctagcatgttaccactataatctctagctactgctctcctctgcttcccattgggggggagaacattcttcaatctcgagcttcttttttatgtacatctgactgtgtgtatggaactgaagaaccagagtagtttgcgttcttcagatgtcgacggtggtcatgggggtggatcttgagtgccacaagtgctacaagaagatcaggaaggtcctctgcaaggtccaagacaaggtgagcatcaggaccatctcctacgacgagaagaacaacacggtgacggtgtccgggcccttcgacgccgaggaggtcgccgacaggctcaccgccga

SEQ ID NO: 145197 - DNA, 313 bp, Zea mays
  Clone ID: MRT4577_63915C.1
gggtattatttgtcatttttttattgtggatgatcgatagggggacaaggttaaaaaaagggaaacaggccgccacgggggagcaaacagggaagggaaaacaacgggaaacgaaaagaacgctgaaaacgacaaagaacggcaaggggcacaaaacaaaagcccatggcaccgcaagggggtcgaggcacgagaacgagacaccaaccaaaaaaacggaacctaaaggggggctgagaaaaatacggaacattgctgaggccaaccgaaaggaccccccgaccaggtacccaagccagataccagtgaacgc

SEQ ID NO: 145198 - DNA, 384 bp, Zea mays
  Clone ID: MRT4577_63916C.1
aaaacatacaattataatgcaagcgggtgttttgaccgaaacttatgctgtacggacccaaaccctggttaaagacacacaacacggcccatcccatggttacacgacgtccttgaacaagaccttgtagatgtggtcttcaaccgttcgagcttagcaatgagcgacctaatacaagctactaaccacatggagaaacctgtgactggtcactgggtccatactgatgtgggttctgaaaacgcaccgcgccatattttgcatttccagatccacacgggggcgatctggtgcgaactccacactcgccgaggcatggttgtttccatttgcagcgcctgaaacaagcttgctgcataccgaggacctgagctgcttgcgctg

SEQ ID NO: 145199 - DNA, 155 bp, Zea mays
  Clone ID: MRT4577_63917C.1
acggtcatggagccgggtgcaggtggcagcaagacggtagcagctgttgcccaagcagaggggaaaacattgaacgtacggcagcccgctaaggcctggcggacccagacagagcggggttgatatctacaaaggggggaagggagggccgcacc

SEQ ID NO: 145200 - DNA, 1810 bp, Zea mays
  Clone ID: MRT4577_63918C.1
ggccgcttttttttttttttttttagtcaaaaaatatagtgctcgtatagatagtcgaagtcagtcacagtgtcacaacagaatataccagatctaccaccattcgcagcatgggaaatgcggcggaattgcggaaatcatcattccatctccattccgagcagcacaaaaggcatcggaacggcaagtccaggacacatgcaccaaaaggaaaacacatcacgcagcaaacgcggacattacagcaactgcatacacgcgaaaatattcgaacaaaagaatacgaacctccttcactgaccatcacaaacacctataaaaatcggttaagtagctaatatgcccccgtggaaccggtgctgtttttccacctcgtccagagcaggacttccagggtgacgatggtgatcagaaggacggccaggttgaaaccgtagccgatcttccaagagttgcctgctccgccgaccttgatcccgagcacaatgttgatggctgcaaagaagagggcgagcctgccgacccagtggtggtaccagttccagaacttgcggtacttggagtccttgttgggcctcaggaaaatcgccaggatctgcaaaatggcaagcacgagcacgaatatgccaaggcccctgtgcgcggggacgtcggcctggatcttgctgtacaaggatactccagccacgacgccggctaggcccaggatgaaccccacgaactggatgccggcgtggaggtagaaccacagagggtcccatctcctgcagtaccttgcgacgatggcgccgatcggcagtagcacgccccaggcgaacaggttgagcgccccatgggtccttttcagaccttccgggaaggatgacgagcctgatgagctgcctgtggtgaaatcgaatacgatggaggtcttatcctggtgctcggcgaggcggtcgttgacggggatggcggagccgacggcgaggagcacgttctggcgcctgagcggctcggtgaagctgagctggaaggcgaggtagatcttggcctgctgcacgagcacggtgggcttgtggttgtcgctggagacgaggaagccctggtccgcgaccacctgggagggggtcttgccccgcagcgagaacggcttgatgtgcgggagccccgtcttgccgatccaccccaccatggcgctggagtccaccatgaggccgttcttggagaaccccatccccacccaccccgtgctgtacatggtcgacagcaccacccgcagcacgttgtccttgtcctgcgcgtaccggagcacgaagttgttccagacgggggcgcaggcgagccccgagaagttgccggcgagctgagccggcagctcgtcgtcgcagctctgcgccatcaccgccggagcgaggacggcgagcgcgacgagcagcgtgccgacggacgcgccccccattaccatcttcccgagaaggacacggccgtcgacgccgacgcgggagaaccagtacagcctacgctacgcctccgtatcaactgcgatgtgccaaccaccgcccactactgctagtagcttttactgaaccgagctgcgtgggagttgggtacgtgctggtggctgtgtgggcatctgcgacctggatgcagcttatgatattgtcattggcatgttgctagtgacggtgagctgttcttacgagaagggagaatctcctgcgagcaagcgtccctagtcgctagatctagaacaagccaaaggatccatgtgtgtgcaccgtgcacgcgctaccctccctatggatctttcttgggttgtgctagccatgtt

SEQ ID NO: 145201 - DNA, 1092 bp, Zea mays
  Clone ID: MRT4577_63919C.1
tcgttgacggggatggcggacccgacggcgaggagcacgttctggcgcctgagcggctcggtgaagctgagctggaaggcgaggtagatcttggcctgctgcacgagcacggtgggcttgtggttgtcgctggagacgaggaagccctggtccgcgaccacctgggagggggtcttgccccgcagcgagaacggcttgatgtgcgggagccccgtcttgccgatccaccccaccatggcgctggagtccaccatgaggccgttcttggagaaccccatcccccacccaccccgtgctgtacatggtcgacagcaccacccgcagcacgttgtccttgtcctgcgcgtactgcggtccagtccagggaatagcagaggagtttcagcgagagcaagtgggagcgcgggtcgccacggatctagcgcccggcggcaaggatctcgcgaatcgtagcaatggcgagaggtactacatacccggagcacgaagttgttccagacgggggcgcaggcgagccccgagaagttgccggcgagctgggccggcagctcgtcgtcgcagctctgcgccatcaccgccggagcgaggacggcgagcacgacgagcagcgtgccgacggacgcgccccccattaccatcttcccgagaaggacacggccgtcgacgccgacgcgggagaaccagtacagcctacgctacgcctccgtatcaactgcgatgtgccaaccaccgcccactactgatagtagcttttactgaaccgagctgcgtgggagttgggtacgtgctggtggctgtgtgggcatctgcgacctggatgcagcttatgatattgtcattggcatgttgctagtgacggtgagctgttcttacgagaatggagaatctcctgcgagcaagcgtcccgagatctagaacaagccaaagggatccatggtgtgtgcaccgtgcacacgctaccctccctatggatctttcttgggttgtgctatccttgttgtccatcacaccgagtgatcctcgttaaacgtacaaagttatctgttaaacatagaatgtttacatatgaaaaaaaaaaaaaaaaaagcggcc

SEQ ID NO: 145202 - DNA, 342 bp, Zea mays
  Clone ID: MRT4577_6391C.1
gggggcagaaccctcacgggatctactctcgcagccgggaggggttgatccgtacggcgatctgggccctccgggcggcgcccgggcctgggaggcttttccttacccgccgcacgggcggagatgctctcactccaacagcaagccggctgtgctgtcgccgaccgcagacatgcgcgccaccacgcaccgtaagcgacggtgctcggaggaggcgcggactggctagtggtcgggggtccgcgccgacctgcaggagcgcgccaggaatgccaccgacgtcacgcgttgctacttcttccgtccgtggtgctcgatgacagggcgggccagactgagccc

SEQ ID NO: 145203 - DNA, 635 bp, Zea mays
  unsure (1)..(635): unsure at all n locations
  Clone ID: MRT4577_63920C.1
gccgcctttcactctgagagaaaatagtcgtggggttctctgcttcgtgagcacagtcattcgaacgaacatttggaagctgcgtgtgcaattcattgtgatctactatgcctctcaaatcagagaaccgtagctcagacaaatggcaaacaactgaagaatgcacttctgctctgacgtcccaatcaccaaaccatccttctcctgaaagaaacaaacacaccgtacttgttttgcaggcagctcatcaggctcgtcatccttcccggaaggtctgaaaaggacccatggggcgctcaacctgttcgcctggggcgtgctactgccgatcggcgccatcgtcgcaaggtactgcaggagatgggaccctctgtggttctacctccacgccggcatccagttcgtggggttcatcctgggcctagccggcgtcgtggctggagtatccttgtacagcaagatccaggccgacgtccccgcgcacaggggccttggcatattcgtgctcgtgcttgccattttgcagatcctggcgattntcctgaggcccaacaaggactccaagtaccgcaagttctggaactggtaccaccactgggtcggcaggctcgccctcttctttgcagccatcaaca

SEQ ID NO: 145204 - DNA, 227 bp, Zea mays
  Clone ID: MRT4577_63921C.1
ggatacccgggccgacccactcgttcggactgactgagcagtgtttgggggatatttatcgggtcttgatcctgcaagaaaggggggccatgttcgagcggcaagcatgccaacggccactgcggtccggatcgtggtcctgatgcttcttgccgcccgctttccgctcacagaaggtaaatcgtgcacgaacgcgtatccggggattgaccttgcacacggagcgc

SEQ ID NO: 145205 - DNA, 3111 bp, Zea mays
  Clone ID: MRT4577_63922C.1
gccggcagcgacgtcatcgtcctcggcacctcccgcggctggctcgtccgccacgacttctccttcgaggacgcccacgatctcgacctcgggagcggccgttctggcgaccactcggtgcaccgagtgttcctggatcccggcggcaagcactgcgtcgccacggtagtccaccccggcggcgcagagacgtactaccaccacgcaaggtggccgcgacccaagctcctcccccgcctccggggcctccttgtcaatgcggtcgcctggaaaattcggcacgaggcggaagcatcaaccaaggaggttatcctgggtactgagagcggccaaatctttgagatggccgtggacgaggctgacaaaagggagaagtatgtgaagccactcttcgagctcactgagcaaagagaaggcatcaaggacctgcagatggagactgctgtggttggaaattccacaagatactatgtgatggccgtcactccgacacgactttactcttttactggcattggttcactagaaactgtttttgctagttattctgatcgggccatacactttatggagctcccaggagagatacctaatagtgaactacatttctttatcaaacaaagaagggctaaacactttggatggctttctggatctggaatctatcatggtgaactgaattttggagcacaacacagctctaccagtggagatgagaactttgtggagaacaagggtttttttgactattcaaaattgggggattccggaattaaaccaaggtcatttgcattgtctgaattccattttctgcttctgattggggacaagattaaggtagtgaacagaataagtcagcagatggtggaggaacttgtagttgatgatacacctgaaacttcaagaggaataattggcctctgtagtgatccatctacaggacttttctatgcatatgatgaaagttctatattccaggtttccacttcagacgagggttgtgacatgtggcaagtttacttggatatgaatcattatgctgctgctttatcccattgccgtaatcctttccagcgtgatcaagtctacctagttcaggctgatgctgcatttgctgcaaaagagtattacatagcagcatccttctatgcaaagataaattacatcctgtcgtttgaggagatcagcctgaaatttatatcaataggtgagcaggatgctctcagaactttcttattgagaaggctcgataacctcaccaaagaggacaagatgcagattacgatgatctcaacttgggctactgagctgtacttagacaagattaatcgcctcctattggaggataccactgtcaccattataaattcagtagcagagcctaatagctctgaatatcgttcgatagtaaatgaattccgtgcttttcttagtgacagcaaagatgtattagatgaagcaacaacaatgaaactactggaaagttacggaagagtggatgagcttgtgtactttgccggtttgaaggagcagtatgaaattgtagttcatcattacattcagcaaggagaagcaagaaaagcattggaagtgcttcaacggcgcaatgttcctgtagaccttgtgtataaatttgctccagatttgatcatgttagatgcttatgagactgttgaatcatggatgatggcgagaaacaggttgaatccagggaaactcataccagcaatgatgcgttatgtgagcgaaccacatgcaaagaatgaaacacatgaagttatcaaatacttggaattttgtgtgaaagatttgaacaatgtggaccctggagtgcataatctgttgctatctctatatgccaagaaggaggatgaatcccagcttttgcaatttctcgacacaaaatttggtaaaggacaaacaaatggccctgacttcttttacgatccaaagtatgctctccgcctatgtcttcaagagaagagaatgcgtgcttgtgttcgtatttatagcatgatgtccatgcatgcggaagctgtggcacttgctttgaaggtggatttggaacttgcaaaggcagaagctgacaaagtagaagacgatgaagagcttaggaagaagctgtggcttaaggttgctaaacatgtcatcgagcaagagaaaggtgtcaagagagagaatataaagaaagcaatagaattcctttcggagaccaataacttgttaaagattgaggatatcttaccattcttcccagacttcgtattgattgacgatttcaaagaggaaatatgcaaatctctgaaggactacaacagccagattgagcagctcaagcaggagatggatgatgccacacgtggggcagataatatcagaagtgatattggtgccctcgctcagagatatacagtaattgaccgtgagcaggattgtggggtttgccggcgcaaaatattgactgttggagggttgcaccaggtagggagaagctatacatctgttggacacatggcccccttttatgtgtttccctgtggacatgccttccatgcaaattgcttgattggacatgtgactcgttgcagtaaccaggtgcaagctgagagaatattggaccttcagaaacggcttagcttgatggacaggaaagcagcaaaagacaatggggcaagtgttaatggcgaacctattacgagcacaaccccagttgataagctgagatcacagttggatgatgctgtagcaagcgagtgccccttctgcggtgatttgatgatcaaggagatttcacagccgttcattctcccccaagagtcggatgaaaaggcatcatgggaaatcaaacctcaaccaacgcctcaaaagattctcccgatgaccatgtctatttgatgctacggacagtacagcctaagatggatttggttttaaatttttatattgtttttgacttttgacactccttttgaccatgttttaatcctttttatgttgtggtatatggtattcaatatcctactgctgttgggttatcttgttttatatttacccaacttgtaaccctagaacaatgtagtcatcaatcgcttaccttgtggttgtggttct

SEQ ID NO: 145206 - DNA, 1151 bp, Zea mays
  Clone ID: MRT4577_63924C.1
gccggccgggctgcatcgcacatattattgagaccaactagtaacatagaaagcacaatagtgtaccaacaatggcagccaaaatattttgcctccttatgctccttggtctttctgcaagtgctgctacggcgaccattttcccgcaatgctcgcaagctcctatagcttcccttcttcccccgtacctctcaccagcggtgtcttcggtatgtgaaaacccaattcttcaaccctacaggatccaacaggcaatcgcagctggcatcttacctttatcacccttgttcctccaacaatcatcagccctattacatcagttacctttggtgcatttattggcacaaaacatcagggcacaacaactacaacaacttgtgctagcaaaccttgctgcctactctcagcaacagcagtttcttccattcaaccaactagctgcattgaactctgcttcttatttgcaacaacaacaactaccattcagccagctacctgctggcacgagcttcagaatcattcgtcctcgtcaactcgtgctcagctcatccttcccttccttcggcaaattcatactaatcttctgatccagagccgggtgttggcacagatcaggcggccgccatggcggatcagttcgcggattcggcgaacaacgtgatcatcgaggaggtgaacaagggcctgaacccaggaatggtggttctgctcgtggttgccagcttcctgctgctcttcttcgccgggaactacgcgctgtatgtgtacgcgcagaagacgctcccgccgaagaagaagaagccggtctccaagaagaagctgaagagggaaaagctgaagcagggggtctccgcgccaggggagtgaacagacagggatgccgccgatcggcccgtcctgagcccgccccctatttacatgattgtcgaagaaaaaagatacacctgctggagccgcggtgttcgtagtaattttgttctgtagatgctttttgttgtcttcgatggtagtgcatttgtattggacaccttgtttcagcaactgatgaatctttagcctaaaccgagctactcttttgttcctgtaaactacaagtaattcaaacgacgctggtgatggtgaacctgagtaaaaaaaaaaaaaaaaaaaaa

SEQ ID NO: 145207 - DNA, 503 bp, Zea mays
  Clone ID: MRT4577_63925C.1
tcggcgcgacaggatactgagcatgctaaggttgtgcctgaaggaggaggatgtggatttgttagaagaactgttcgtgaaggaaggcatcatcttcgatgccagttccgtcgtggacatcgactcggtgttccgggacactgcaagcgaggagatctcgttgctgatgcaagccgtcgaggagctcaaagaaactgtggaagaggttgcctcacggacgagaacgaaaagctaagacgcagcctccaagtcgcacaggagatgaccactcaggcccagctcgccgccgccgccgccgtcgctggagctgcccggagccgtactctgcttgatttcgtgccggcagtcctcttccggccatttgggtttgtaccagagtgacgacagggtcaatgcccattgtcctgtgaggctgtgaagaaccatacacttgggatatagtagatcacgaccatggtggtacacagtatataatagttgcaatacagataccgacagcaacg

SEQ ID NO: 145208 - DNA, 427 bp, Zea mays
  Clone ID: MRT4577_63928C.1
ggaagcaggatattcagttttgcatatcccgaaattttgaaggggcccaaaagggttatccccccccaggtggggccccatctttatggggaaaattccatccccttcttccccgccaaaaaaaagacaggaatattttatccccatgggggaacagccaatctgggcaacggcataccccggacatttcatttgccctagttttcgggaatgggatcaaaaccctgggggtcttaaaggggaactggagctatagcagcccccacaacaggggccccaaataacccgacacccaaggctgggaagttcactaaaaaggcccctgggccatatttggggaaacccgagctctcgaggaaagggagcttttaaaaaaagccgagttctgcattagccagggctaaaatgtaaacaaagagcccaaaaa

SEQ ID NO: 145209 - DNA, 355 bp, Zea mays
  Clone ID: MRT4577_6392C.1
ctctatacatctcagaggaagtccagtttaagattcggcatggaaacactcttttgaaccgttgaagggatctgttcctctgagatgtatgagagtaatttgtagttatacaagattgcaatgacatgctggaagattaacatagacatgtacggatataacgaaagattaacatgtgctggaagcagtttcatacatacttgtgttgcagctgtatttaagagaatgagagatacaaaatcttttgagctaaattccatgacacaagtaacataagccccccggaacctaaaactttacctggattagggttcttcccctttaataaaaagatggtcacccttttgaacttgcc

SEQ ID NO: 145210 - DNA, 527 bp, Zea mays
  unsure (1)..(527): unsure at all n locations
  Clone ID: MRT4577_63930C.1
tttgaccataccaacagggatggcttatttatttgtcgcgacgttacaatcccaaagggcaaactaaccgaagcataacaaaaacaaacaaatggaacccattttggtacaaaggttggccttcttaaggttaagtgcaatggaaactttcttgacaccatgattatttgtgacaaagaataggacgcacttatttcttgaagtgggtctcgatgtgtttgcaaatagttggatcacagagtcactgccattcagcaccagtggaacaccgggcccataagcactccattccttgaatgattcccaaagatcttcgagtcataaagaaagttgtgaatccataacaacaacacctngtcacatccttaggcttgtctgcagtggaaaaaaattgaagctagtcagcaacacaaaatcaagccggttctctaaaacaggaatgatatttcaaccaaagaataaaaattgtcacgaataaagatatagtagtacaacattattactgatacatgataagaacaacaaca

SEQ ID NO: 145211 - DNA, 171 bp, Zea mays
  Clone ID: MRT4577_63931C.1
ctttttccttatctgaggctacctggggattataggcagcaagacccttgactcccagaaatgctgagggtccctcttccaggggagttccctggggagcaagagtagaagggttattcccaagggtcctgtggtcagggtccttctttgtccctggcatgctgtcagtcc

SEQ ID NO: 145212 - DNA, 940 bp, Zea mays
  Clone ID: MRT4577_63932C.1
caatgactgcaccaaagatagggctggtgattgttgacacaacaagggcgatcaatgtctgatagcttgctgagattgcttgatgaaccctatatggttgaagagctgaactctcacatactggacctatcatggatggaaagtgtcagggaaaaaggcaagctatatatcctctaaccatagacgcaaaattctggtataaccgacacatctgtaaagatctcagaacagaaggagggataacaccatctacctcattgaatgtctatagttgctgctgctgtaaataatcaatagagttcaatgctgtcagttgtatgaatggaacaaattgctgtgggtaggcagcacgcagctggctgaatggtagttgttgctgttgcaaataagaagcagagttcaatgcagctagttggttgaatggaagaaactgctgttgctgagagtaggcagcaaggtttgctagcgcaagttgttgtagttgttgtgccctgatgttttgtgcctaataaatgcaccaaaggtaacttctgtaatagggctgatgattgttggagtaacaagggtgataaaggtaagatgccagctgtgattgcctgttggatcctgtagggttgaagaattgggttttctactataccgaagacaccgttggtgagaggtacgggggaagaagggaagctataggagctttctagcatttcgggaaaatggtcaccgtagcagctcttgcagaaagaccaagcagcataaggaggcaagaatattttgtgctgccaaatgatggtacactcattgtgctttatatgatgctagttggtatcacccacgcgtccgcccacgcgtctcgcccacgcgtccgcgaacgcgtgggtcgcgcccgctatacaggatccgagctctgcgggcgcgcccgctttccttatagttagtcgtatat

SEQ ID NO: 145213 - DNA, 297 bp, Zea mays
  Clone ID: MRT4577_63933C.1
ctccgtgctctctctccctacgctggggagcggatcaccctggctccagcttcccacatcgatgctccttgccctgtcgttcccatcggctgggcgctttgcgtctaggaaaaaccaccgcaccagctcgcgcgctccctacccggccgtgcgtccctgctccctcgccacctggtgcatgcgcgcggctttctacacgccggacaacacttgtgcttggcccctgcgctgaaccctgctcagcttctctagtgccggccgccgctccaagtcctctactcgccgacgccatggaca

SEQ ID NO: 145214 - DNA, 363 bp, Zea mays
  Clone ID: MRT4577_63934C.1
cccacgcgtccggccagatttactaactctttgactttgaaggccacaatggggcaactggtggttaccacggacatggatggtcaagtagaacccacttgactttgctatgtccacatttatcgtatcggctctacatttacgtctgtattatcgcttttatgattggatgatgatgctattcttgatagatgttacacgattttggaggcgcttagcctccctttgatattcattcttgttaggagatactgcaatacattgctatcatatgtgttatatactgtgattacaatgcaacagtctaggttgtatcaaacaaatacttataatgctggccaactctaaagcattgtgaagtgt

SEQ ID NO: 145215 - DNA, 806 bp, Zea mays
  Clone ID: MRT4577_63937C.1
ccaactagcaacataaaaaggcccaatattgtcccaccattgccggttaaaaaatttggcctgctaatcctcctgggcctttctgcaagtcctgttacggcaaccattttccaacaatgctaacaagctcctatagcttcccttcttcccccgtacctttcaccaacggtgtcttcggatgtgaaacccattcttaacctcagaccacaggcatccactgcatctaccttatcacccttgttcctccaacaatcatcagccctattacagcagttacctttggcgcatttatgggcacgaaactccagggcgcagcaactacaacaacttgtgctagcaagccttgctgcctactctcagcaacagcagtttcttccattcaaccaactagctgcattgacctctgcttcttatttgcaacaacaacaactaccattcagccagctacctgttgcctacccccagcaatttcttccattcaaccaactggcagcattgaactctcctgcttatttgcagcagcaacaactaccaccattcagccagctagctggtgtgagccctgctaccttcttggcacggccgcagttgttgccgttctaccagcccgctgcgcctagcgctggccccctcttacaactgctacaattgctgcctttcaaccaacgtgctttggcagacccatcagcgttctcccaacttacccatcattgttggtgcctcttttggaaagcatatgagaaaaaaaacaaaaaaaaattctaaaaaaaaaaaaaaaaaaaaaaaaaagaaagcttgtgcactcg

SEQ ID NO: 145216 - DNA, 742 bp, Zea mays
  Clone ID: MRT4577_63938C.1
atcggagaaaatcccaatcaatatattggttatttctaggaaacacatgccgctttgggggccccattttcggggccatctcatatggaatctaaaagagggcccccccaacgggggggggctgccacaacaaggggggggtcatcaaagagaactgggtggatggcagcaattggtgctgctggaggaaggcaacccccaaggggttagccaccgctgggggattaagtaactggtggcgctgttggaggtccccagcaaagttcgacacaatcagttggttgaatggaaacagctgttgcaagtaggcagcagggtttgccacaactagctggttgaatggaaaaaactgctgttgctgaaagtaggcaacaaggtttgctagcacaagttgttgtagttgttgggccctgatgttttgggccaataaatgcaccaaagggaactgctgtaatagggctgatgattgttggaggaacaagggtgataaaggtaagatgcaagttgcgattgcctgttggatcatatagggttgaaaaattgggttttcacacacagtagacgccgctggtaagaggtacgggggaagaaggtaagatataggagcttgtgagcgttgtggtgaagatggtcgccgtagcagcacttgcagaaagcaacgaggagcatcaccgcaccctcaatgttttggctggcgattgttggtagaattagtgggcgtttatatgttgagtagttggac

SEQ ID NO: 145217 - DNA, 574 bp, Zea mays
  unsure (1)..(574): unsure at all n locations
  Clone ID: MRT4577_63939C.1
naaaaaaaaaaaaaaaaaaaaaaaaaaaaaaaaaaaaaaaaaaaaaaaaaaaaaaaaaaaaaaaaaaaaaaaaaaaaaaaaaaaaaaaaaaaaaaaaaaagcccccccctcccggggcctttttaaccttataaaaggccgtgggggtggaattttgtttttttgggaaattttgggggaattttccccttaaaggtggggaaacaaaggtgggggaaaaatttttggcgaagttttttaaggggcccccgtttaaaaacccgccccattttttaaaaaagtttttttttttttgggggggccttggtttggcccccccttacaattttttttttttgggaaaaggggaccttaatattacttgggcctgggaaaggtttctttgaaaaaacaaatttgaaaaattttttttaaaaaaaaaaaatttttaccccaaaattatttcccaaaaaaattgtttttttctttgggaaaaaaaaaaaaaggggtttttttttgaaccccttccttttgaaacaaggggtttaaactttgggaatttttttgggaagggcccaatttaaaaaccttcttt

SEQ ID NO: 145218 - DNA, 153 bp, Zea mays
  unsure (1)..(153): unsure at all n locations
  Clone ID: MRT4577_6393C.1
ccacgcgtncggaattttctgggtttgcccagaagagaacaattctaagtgtggcaaataacagcagtcccacacgtggctggacgatcacagggtttttcccaagcgggagtacccaaggggcaaaacaagacctaaggaggccaagggtac

SEQ ID NO: 145219 - DNA, 395 bp, Zea mays
  Clone ID: MRT4577_63940C.1
tctttttttttttttttttttttttttttgggttttttttatttttagaggggtaaaaaacctccttttgaaaacctgaatcataactgcggggttttggttcctcaaaaaggaacccaaacctgttgatgaattaagcctcccatttatttgggggggccatcgagaaaaggggtgtttaaaagaatttaagggctaatttttcaagaattcccttattggacccagagcaaaaaatccttttcagcctggaaacacctgggggaaactgactggagtaaccctcctgattttgaaggggggcaccgaagaacatctcttttgaaaacaaggtgttgccagccctggtaaaaaggttctcaacctggtccgggaagattggtattaaccggggg

SEQ ID NO: 145220 - DNA, 524 bp, Zea mays
  unsure (1)..(524): unsure at all n locations
  Clone ID: MRT4577_63941C.1
ggttcctcatagnaaggttattcccaataaatataacgttgccactaatttcccgttgctgataaccttatcagcagagtacatagcaatagcctcattatagatgaaatcttggggggagatcctatgcactactcaatgagaatgggaaattttgtgctgcccaccagccatagcactcatttgcttgaataatttttgggttttcgtactctctgactctttcgcgtgtccacagctacagacatattatttgcagtgtttcggtagcccacgcctgtctctttatttttattctttggccttttgatttggtcctctatagaggaagggctcccaggtttcttatttggttttgaccctctcttgtttacaaactttacacctttggctggagattcaacaacatctttaatcggctctgaacgtgattcttctatcccctcgaccttcacaaattgtcaaacttcgtcaacagctgcccaattatctataagtacatcatcaatactctctctgtacat

SEQ ID NO: 145221 - DNA, 427 bp, Zea mays
  Clone ID: MRT4577_63942C.1
ggtcatggcaatagtggaggaattcatgtcgttacagaatagcgacagtggcaaggagaaatttcaagatgatgaagagatcgtggagactgagaacgtggcatcggtttccagcacgtcaaagctggcagttgcaaagctgatcgatggatatcttgctgaggttgccaaggatcccaaccttcctcttccgaagctgaccgcgcttgctgaaatggtgtcttccctaccccggccaacgcatgacggcctctaccgtgccattgacatgtatctgaaggagcaccccagcctgtcgaagagcgagaagaagaaactatgcgggctgatggactgcaagcagctgtcgcaggatgcgtgtatgcacgccgtgcagaacgagcgtctccccttgcgtgtggtcgtgcaagttctctttttcgagcag

SEQ ID NO: 145222 - DNA, 577 bp, Zea mays
  Clone ID: MRT4577_63943C.1
ccgggctcgagttttttttttttttttttatttctttggccggagcttacatcagcatgacctcagcgatgatgtcaacatgcaagcaaaccaaggtgtgcgcaatggtgctcttggatcgctgacctatggaccgcccttggctggtcgtcttcaaaatcgatcctcaccacaatcgaacgcatggagggctcaacgactgcgatcctgtttgttcctattcttgcgctgagcgacaggtgatcccttcgcggccgctcgggatgttgccttggtgtagacgctgatgccatctcgtctccgccatgcggggccgcgggtagctcgtgcatgtggcctcgactcctccacagctacgctggcaattcgaagacaccggatttgggagccgaaccgagggccgccgccgagggaacccagcgatggaagcgcagtgcgccgtagcccagtcccatcacgtcgttgttgccactccttgttgccgggacacgcgcggggtgttggccaccacgtcccgtgctccaacctcgcgtcgaactcggcctctgcgctcagcatcctatcactggccgacgca

SEQ ID NO: 145223 - DNA, 212 bp, Zea mays
  Clone ID: MRT4577_63944C.1
gaaaccaaccaaacccggggtttaaaattggtttttggggattaaaatcccttctaattaaaattaaataaaaagggattgaatcccctttaaatccttttaatttaaccctaacccaaccaaaccctaaaaggatggaattattcattcatacgatggagagaccattaaaccagcaagtaattctattcctgaaaggaattcaatagggg

SEQ ID NO: 145224 - DNA, 352 bp, Zea mays
  unsure (1)..(352): unsure at all n locations
  Clone ID: MRT4577_63945C.1
gtaagtgggaaaatgaaatagaactaaaggagagagtgttgggggaaaaaaaaaggaacggaaaaatatataggggcgcaggggggggggggggggagtgtngcgtgggtcacactatttcaccggggtgaacaaagcgaaaaaaaagagagagggcgccctgcactgggggaaaaggaaaaaggaacagaacatccacaaagagaaccgcccggggacacgacaaagccaaactagctgcaaaactgcggaggggagggcccgctcgcttcccgacattacctcttccctgagggaggaaaaattgcgtctgctatctcccccgggcggggctgcggaggggcccaacaac

SEQ ID NO: 145225 - DNA, 216 bp, Zea mays
  Clone ID: MRT4577_63946C.1
atccacaacgcggcacgacaggggaaaacctccaagtgcaaccgcacctcaccagggcaagggggaaacaaaggaactactccccatggggggcgcacgggaggccaccacaaccgggaccggaggaggcgggatccctaccactggacaaacggggactgacggcggggaaaaaaaaagcgttaggacccagccagcctgccgcggtatcccgta

SEQ ID NO: 145226 - DNA, 424 bp, Zea mays
  Clone ID: MRT4577_63947C.1
aaacttcaattatgggcaggcaggcaaccccttaaatttaaattttaacccaaaggcgggctaagttaaaatccttacccgacccaaaacccaggggggaggggactaaacaaaaaagccacaaggggctttgcaaacggggggttacttaaacgggcccccgggcggaaaacacactagctagctcacagggcctaatatttatgacaaacaataccaaaggaaaccaccccggggagggaaaaggaagccccccccatttactagcccatatcctagtaataaacaagacgggcgggatattatacatatatagctaaaaaccaaaaattcgaatgcgtgagggttgctgtgggaaaaaaacaggggccgaataaccagccccggtttttgaaggggagggccctgaaaaaaaccacgggga

SEQ ID NO: 145227 - DNA, 229 bp, Zea mays
  Clone ID: MRT4577_63948C.1
gtttcgcgcctgctgcaggaaggttcttcagccagtttctagcatactttttaacgcaccagatggctgtggccttgtttcggttgctaggtgcaattttgaagacaatggttgtagccaatacatttggcatgtttgcaatgcttcttatcttcctgttcgcagggattctcctacccagacaggacattaaacattggtggatttgggcctactggtcatctcccat

SEQ ID NO: 145228 - DNA, 586 bp, Zea mays
  unsure (1)..(586): unsure at all n locations
  Clone ID: MRT4577_63949C.1
attgggtacctcgaggccggccgggagttgactatcgcgaggtggccaggaaggaaaagtagctgcggcaagcggcatggggtcgcccaaggcggccaagagcatggtgaagcagcgcatctggcgtcaccggctcgtcgcgccgttcgctgccgttctcatcacggccgtcgtcgtattctccggcctgttcgcgcaggacccaagtgagtttattgggactcgtagccacctcggagttcactgccgtgaatgtgggtaacaccctgccagtgcgcgataagtcggaatccacaggtaatcgaatctatgtggctcaaaacctgttctcttgtcttgtttattcatggctggaatggagctcgctggaatgaggtcttgtcaaagcaagaaaattcttttttttgttccgttttagggcttgttcggttattcctatcgcatgtggattggatgggattgaaaaaaaatatgaaagattttgacttgttcgggattgaaacccactcaatcccaccccatccacatggattgagagcaaacgaacaagccctttagtggngggagtttggattttcccaatccg

SEQ ID NO: 145229 - DNA, 426 bp, Zea mays
  Clone ID: MRT4577_6394C.1
gcgcccagcagtaggcagcttgcgatcgtgggctgagccaaaccaacttatgagttgacttagcatcgagccttctttacctcgttgggtgggcgagctgagttcggttagctagcttgaatggtttccgcctcagttgttggcacaaagacacatgtttgaagtatctttatgggtgctctaaagacgcatctcatagaagacatactctaaagttgtatcttatagaagaaatttttcgggtgtttggtgtagctctagaggctagaactaatatttgctatatgaactttgggtctaaacttggcctatgaagatgtccatgtagcttggggaaaagagctatatgatagtaatcgaacggtaacttgcaaaaaaagataaagaagtatatgtgctagctggctacagaagcagctcctacat

SEQ ID NO: 145230 - DNA, 175 bp, Zea mays
  Clone ID: MRT4577_63950C.1
accacgcgtccgcttcaggaacatcaaaaccattgctgaaggcgctctctctgaaaccactcgagtgcagccatatgccgtgactttcgttacgcacacggccgataagctgcacgtggtccgcgacatcgtcggttcttcagtggcattccagtcactgcatctcgacgtgcct

SEQ ID NO: 145231 - DNA, 798 bp, Zea mays
  unsure (1)..(798): unsure at all n locations
  Clone ID: MRT4577_63952C.1
caaaatgtgctagcaaaccttggtgcatactctcagcggcatcggtttcttccgttcanccngctgggtgcattgagctctgctgcttatttgcaacaacaattnccattcagccagctagttgctgcctacccccagcaatttcttccattcaaccagctagcagcattgggctctgctgcttatttacagcagcagcagctnctnccattcagccagctagctgatgtgagccctgctgccttcttgacccaacaacagttgttgccgttctacctgcacgctatgcctaacgctggcaccctcttacaactgcaacaattgctgccattcaaccaacttgctttggcaaactcaacagtgttctaccaacaacccatcattggtggaaacctcttttagattgcttatgagttatagttcaataatgaagttttttggatgatgtttgtggcgtcccagaaataagaaagtacatttctaaaaaaaaaaaacaaaaaaaaaaaaaaaaaaaaaaaaaaaaaaaaaaaaaaaaggaaaaaaaaaaaataaaaaacaacaaaacacaaaaaaacacacacaaaaactacttaagaacaagacaacttgaaaaaaaatatacccggcggggcgggctgcatcatactcaatgcgtctagtccccgaccgcagacccttaaacgttctttgtgtgcaccacctaaaaccataacctggtgtgtataaaaaaaagagacacgtgaaaacctcccttcttccccaaatactgcatgtccaacacaaccccccttattgcgc

SEQ ID NO: 145232 - DNA, 840 bp, Zea mays
  Clone ID: MRT4577_63953C.1
gcgagccagcgtgcgagaactatcaacataataaagcgcaatagtgtgccaacaatgggagacaaaatattgggcgtccttatgcgccttgggctttctgggagtgctggtacggggaccattttccctaaatgcgcgcaagcgcctatagcttcccttcttccccgggtgactcttacaccagcggggtcttctgtatgtgaaaacccaattcttcaaccctacaggatccaacaggcaatcacagctggcatcttacctttatcagccttggtcctccaacaatcatcagccctattacatcagtgacctttggtgcatttattggcacaaaacatcagggcacaacaactacaacaacttgtgctagcgaaccttgctgcctactctcagcaacagcagtttcttccattcaaccaactaggttcattgaactctgcttcttatttgcaacaacaacaactaccattcagccagctacctgctgcctacccccagcaatttcttccattcaaccaactagcagcattgaactctcctgcttatttacagcaagcaacaactagctaccattcaagccagctaagctggttgtgaacccatgactacctttcttgacacaacgcacagtgtgttgccgtttctaccaagcactgttgcgcgctaacgcgtaggcacccctctttacaagctgcaaccaaattgctgctcattcagaccaaacttgctgttgacaaaacccacgcagatgttcgtaccagacaacccactcattggtgggtgccctcttttcagattttcttatgagtgtatagttcaaataataaagttttttatctg

SEQ ID NO: 145233 - DNA, 890 bp, Zea mays
  unsure (1)..(890): unsure at all n locations
  Clone ID: MRT4577_63954C.1
cctcgaggccggccgggccgggagatcccccgcccacgaccacacgcagcaagcagcagccgcgcgctcgcctaggactaccgactacgagtagtgctcagctagcctccatcctcagcgcgcgagtggctgctgcgcattcctctctttatccgtctctgtgcttgtttaatttgtgttcgttcgtgagtaggcggccggcacatatggcagcgcagctcaacatcgagacgggggtgcccatcaacgagatagagccgctcgtcatcttcaacgtcctcttcttcttcatcgccgccatcaaccccggcaatggcaggttcatcatcggcgaggaagaggaataggctgctggcctcggacatgagtcgtgtgcgtttacttttacctgtgactgtgagtgatcgatcgattgctgtgtatcaattactcgtgatgagacctcgaaggtagggtgtcgcgttgggttgtctgcttgtagaaacaagagcttatatataaattactactagctaaaaaaaaaaaaaaaaaaaaaaaaaaaaaaaaagaaaaaaaaaaaaaaaaaaaaaaaaaaaaaaaaaaaaggggcggccgtttcgtcgacgaggaggtcaccggcctcgacaaggccgtcatccaacccggcaagggcttccggggcgccctcggcctcagggagggaggaccgttgttcgggttcaccaagtcaaacgagctgttcgtggggcggatggcccanctgggcgtggccttctccatcatcggcgagatcatcacggggaagggcgcgctggcccatttaaacatggaaacgggggtgcccatcaacgagatagagccgttcgtaatcttcaacgtcctcttcttcttcatcgccgccatcaaccccg

SEQ ID NO: 145234 - DNA, 268 bp, Zea mays
  Clone ID: MRT4577_63955C.1
ggcaagggagatgcctgtgaccacgatgatgacaacgatggcattcctgatgacaaggacaactgcagactcgtgcccaatcccgaccagaaggactctgacggcgatggtcgaggtgattcctgcaaagatgattttgaccatgacagtgtgccagacatcgatgacatctgtcctgagaatgttgacatcagtgagaccgacttccgccgattccagatgattcctctggaccccaaagggacatcccaaaatgaccctaactggg

SEQ ID NO: 145235 - DNA, 300 bp, Zea mays
  Clone ID: MRT4577_63956C.1
atggagacaccaaagagcaagaaggaggagatcaacctcgtcaaggaaggagagaagtcaaaatcgatcttcaaaggcattaccacccgacaaggagttctttttcaccgccaatcggcctctggagaacgtcggggtggtgcgcgtgccctaatcccacgggattatatcctggacttcaagggatttcctcgccgtggggaaatcatcgccgcggagccgctggacgtcaacgccgagaagcttcgctacgcgattggaggtgaccagggcttggctgagttcgctggtgtgtgctga

SEQ ID NO: 145236 - DNA, 774 bp, Zea mays
  unsure (1)..(774): unsure at all n locations
  Clone ID: MRT4577_63958C.1
ggccgcttcgaggnccggcccgggccagcgaaaaaaaaaaaaaaaaaaaaaaaaaaaaaaaaaaaaaaaaaagggcatcccttgcccagctgaacctcgagacgggcatccccatctacgaggcggagcctctcctcctgttcttcatcctcttcaccctccttggcgccatcggcgctctcggggaccgcggccgcttcgtcgacgaggaggtcaccggcctcgacaaggccgtcatccaacctggcaagggcttccgcggcgccctcggcctcagcgagggagggccgctgttcgggttcaccaagtcgaacgagctgttcgtggggcggatggcgcagctgggcgtggccttctccatcatcggcgagatcatcacggggaagggcgcgctggcgcagctcaacatcgagacgggggtgcccatcaacgagatagagccgctcgtcatcttcaacgtcctcttcttcttcatcgccgccatcaaccccggcaatggcaggttcatcatcggcgaggaagaggaataggctgctggcctcggacatgagtcgtgtgcgtttacttttacctgtgactgtgagtgatcgatcgattgctgtgtatcaattactcgtgatgagacctcgaaggtagggtgtcgcgttgggttgtctgcttgtagaaacaagagcttatatataaattactactagctaatatgccatggttgaaaaaaaaaaaggtacttcactttgttttataaaaaatgttttattataatttggggcggcc

SEQ ID NO: 145237 - DNA, 550 bp, Zea mays
  Clone ID: MRT4577_6395C.1
aaaaaaaaaaaaaaaaaaaaatttaaaatttttattttttttttttttttttttttttttttatattttttttttaaaatttaggagcgtcttggggtggcccccgggaaccccccagagaccccgaaacgggacccgggagccgaaagggggagggcagaaagaagggggaaaaagaaaggagaaaacaggccccagggaaaaaggggccgggaggaaaaatcccaaaaccaaggcaacccaaagacaaaacggaaaaacaaagggggcaaaacggaggggggaaacagaaaaaaagggaaaaacgaaaaggcagcgggaaaaagggaaaaaacagtgcgccagcgggaaaagccaaaaggcaaaaacaccgggagaaagggccattgaacggggggccccgaaagagattcattcccacaaaaggatggccccaagaaagggggggcatgcacacgggggcccccgggggggcccggagaaaaaaaaacaagaaggtccccccaaggggggaaaaacccctaaaaggggcaaaaaaagggggaaaaac

SEQ ID NO: 145238 - DNA, 1177 bp, Zea mays
  unsure (1)..(1177): unsure at all n locations
  Clone ID: MRT4577_63960C.1
tttcctcgaggnnccggccggaaaaaaaaaaaagacccccgcccacgaccacacgcaggcagcaagcagcagccgcgcgctcgcctaggactaccgactacgagtagtgctcagccctccatcctcagcgcgcgagtggctgctgcgcattcctctctttatccgtctctgtgcttgtttagtttgtgttcgtgagtaggcggccggcacatatggcagcgcagtccattgtggcggccacccgcggctaccgctgccgtcgtcgtcatcctcgtcagctggctacaggcactccaagtccgtctccgtgaagacgctcgccctgttcggcaaatccaaggtcaagaccgcgccgtcgaagaaggctgctgcgcccaagcccaagccgaaggtcgaggatggtatcttcggcacgtccggcgggatcggtttcaccaaggagaacgagctgttcgtcggccgcgttgccatgcttggctttgccgcatcgctacttggagaggccattaccgggaagggcatccttgcccagctgaacctggagacgggcatccccatctacgaggcggagcccctcctcctgttcttcatcctcttcaccctccttggcgccatcgtcgctctgggggaccccggccgcttcgtcgacgaggaggtcaccggcctcgacaaggccgtcatccaacccggcaagggcttccgcggcgccctcggcctcagcgaagggccgctgttcgggttcacgtcgaacgagctgtcctgggcgtggcttccatcggcgcaccgcgctggcgcactcacgagatcgagccgctcgtcatcttcaacgtcctcttttttttcgtcgccgccatcaaccctggcaacggcaggttcatcatcggcgaggacgaagagtaggctgatgctgctgtcctcgaacctgatgagtgatgagtagtactgtgcgcttgggttacctgtgctgtgttgatcgatcagtgcgtctcgcagtgcgtgtgcgtacgtgctttgttgtgtattagtaagcgtgatgagacctcgaaaggtagggtgtcgtgttgagttgtcttgtagaaacaagagcttactcgtattgtagcttcaaatgcatgaccgtacacctgtcaaacatggacgaatcccgtcaaaaaaaaaaaacatggacgaatcccgt

SEQ ID NO: 145239 - DNA, 1449 bp, Zea mays
  Clone ID: MRT4577_63962C.1
gggtacctcgaggccggccggctccactagtccacttggcgccactccagcttcacgcgctgcccgcgtctgtgattcccattcataagagctggccacgcagccgcggggcaagagacccccgcccacgaccacacgcagcaagcagcagccgcgcgctcgcctaggactaccgactacgagtagtgctcagctagcctccatcctcagcgcgcgagtggctgctgcgcattcctctctttatccgtctctgtgcttgtttaatttgtgttcgtgagtaggcggccggcacatatggcagcgcagtccatgctcatgtcgaccagcgtcaacggcggccgcgcgctgccgtctcttcaggccgtccggccggctccatacccgcggctaccgctgccgtcgtcgtcatcctcgtcagctggctacaggcactccaagtccgtctccgtgaagacgctcgccctgttcggcaaatccaaggtcaagaccgcgccggcgaagaaggctgctgcgcccaagcccaagccgaaggttgaggatggtatcttcggcacgtccggcgggatcggtttcaccaaggagaacgagctgttcgtcggccgcgttgccatgcttggctttgccgcatcgctacttggagaggccattaccgggaagggcatccttgcccagctgaacctggagacgggcatccccatctacgaggcggagcccctcctcctgttcttcatcctcttcaccctccttggcgccatcggcgctctcggggaccgcggccgcttcgtcgacgaggaggtcaccggcctcgacaaggccgtcatccaacccggcaagggcttccgcggcgccctcggcctcagcgagggagggccgctgttcgggttcaccaagtcgaacgagctgttcgtggggcggatggcgcagctgggcgtggccttctccatcatcggcgagatcatcacggggaagggcgcgctggcgcagctcaacatcgagacgggggtgcccatcaacgagatagagccgctcgtcatcttcaacgtcctcttcttcttcatcgccgccatcaaccccggcaatggcaggttcatcatcggcgaggaagaggaataggctgctggctgctgctgctggcctcggacatgagtcgtgtgcgtttacttttacctgtgactgtgcgtctcggtgcgcgcgcgtaagtgctttgctgtgtatcaattactcgtgatgagacctcgaaggtagggtgtcgcgttgggttgtctgcttgtagaaacaagagcttatatataaattactactagctaatatgccatggttgaaaaaaaaaaaaaaaaaaggcccctagcctaatatcccatggttgcaaaagaaaaaaaaaaaaaaaaacatcgtgcaaaaagacgggggtgcccatcaacgagatagagccgctcgtcatcttcaacg

SEQ ID NO: 145240 - DNA, 2421 bp, Zea mays
  Clone ID: MRT4577_63963C.1
cgcagtcctcctccactaccagagcatgcgcgttgcccccgcgacccgaaccgccgccgccgctcaccctccgagcgccttcctgctcctcctcggttgcgcgtccctcgcgatcggaggagcagccatggccggccacgtcctcggcggcgtgaaggagaacccagccgcggccaacagcgccgagtccgacgggctcggccgcttcgccgtcgacgagcacaacaggcgcgagaacgcgctgctggagttcgtgcgcgtggtggaggccaaggagcaggtggtggccggcacgctgcaccacctcacgctcgaggccgtcgaggccgggaggaagaagctctacgaggccaaggtctgggtcaagccatggctcgacttcaaggagctccaggaattcagccacaagggggacgccaccgccttcaccaacgccgacctcggcgccaaggaaggtggacatgagcctggttggcgtgaggttccagtagatgatcctgtggtcaaagatgctgcacaccatgctgtgaaatcgatccaagagaggtccaattccctgtttccctacgaacttctcgagatccttcgtgcccatgcacaggttgcggaagactttgcaaaatttgacattctgatgaaactgaagagaggcagcaaggaggagaagatcaaagcagaggtccataagagcctggaaggggcctttgtgctaaaccagcatcagccggcggagcatgatgagtcgagcagccagtgaactgacgtaactgtgtgagctgtagtagtaacgtacttcgtgttactgttacgtagaataaggagaaaacgaccaatccggttttatctggatgtcatgtatggtcgacgatcgttgctggcttggcttccgaacgcagcaggcatactggtgctggaagacggtacctgctgtcgcacttgccgttataataggcattggaacttgtcgatttcgggagctgatctgtttgtaccgtattgtttatttataatatgatggatcgtatgttgataaaaaaaaaaacggcacgaggcaacatagaaagcacaatagtgtaccaacaatggcagccaaaatattttgcttccttatgctccttggtctttctgcaagtgctgctaccgcaaccattttcccacaatgctcacaagctcctatagcttcctttcttcccccatacctctcaccagcggtgtcttcagtatgtgaaaacccaattcttcaaccctacaggatccaacaggcaatcgcagcaggcatcttacctttatcacccttgttcctccaacaatcatcagccctattacagcagttacctttggtgcatttgttggcacaaaacatcagggcacaacaactacaacaacttgtgctaggaaaccttgctggctactctcagcaacagcagtttcttcaatgcagccagttggttgaatggaagaaactgttgttgctgagagtaggcagcaaggtttgctagcacaagttgttgtagttgttgtgccctgatgttttgtgccaacaaatgcaccaaaggtaactgctgtaatagggctgacggttgttggaggaacaagggtgataaaggtaagatgccttatgctccttggtctttctgcaagtgttgctaccgcaaccattttcccacaatgctcacaagctcctatagcttcccttcttcccccatacctctcaccagcggtgtcttcaatgtgtgaaaccccaattgttcaaccctacaggatccaacaggcaatcgcaacaggcatcttaccattatcacccttgttcctccaacaaccgtcagccctattacagcagttacctttggtccatttggtggcacaaaacatcagggcacaacaactacaacaacttgtgctagcaaaccttgctgcatactctcagcaacatcagtttcttccattcaaccaactggctgcattgaactctgctgcttatttgcaacaacagttgttgccgttctacctgcacgctatgcctaacgctggcaccctcttacaactgcaacaattgctgccattcaaccaacttgctttgacaaacccaacagtgttctaccaacaacccatcattggtggtgccctcttttagattgcttatgagttatagttcaataatgaagttttttggatgatgtttgtggcgtcccagaaataagaaagtacatttctagattcaaaaaaaaaaaaaaaaaaaaaaaaacttgaacctagcccgggcggacagatagaaagggctatttccaacacactggcagaacgaacttgtggatccaaagctaaaaaccaagcttgaaaaaaaaatggaaaataaatgaaaaactgtgtgaaactggcccgggggcccttttaaaggggacattccagccccctgggtgg

SEQ ID NO: 145241 - DNA, 1199 bp, Zea mays
  Clone ID: MRT4577_63964C.1
aaaaaaaaaaaaaaaaaaaaaaaaaaaaaaaaacagactgacccccgcccacgaccacacgcagcaagcaagcagcagccgcgcgctcgcctaggactaccgactacgagtagtgctcagccctccatcctcagcgcgcgagtggctgctgcgcattcctctctttatctgtctctgtgcttgtttaatttgtgttcgtgagtaggcggccggcacatatggcagcgcagtccatgctcatgtcgtcgtcatcctcgtcaggctacaggcactccaagtccgtctccgtgaagacgctcgccctgttcggcaaatccaaggtcaagaccgcgccggcgaagaaggctgctgcgcccaagcccaagccgaaggttgaggatggtatcttcggcacgtccggcgggatcggtttcaccaaggagaacgagctgttcgtcggccgcgttgccatgcttggctttgccgcatcgctacttggagaggccattaccgggaagggcatccttgcccagctgaacctcgagacgggcatccccatctacgaggcggagcctctcctcctgttcttcatcctcttcaccctccttggcgccatcggcgctctcggggaccgcggccgcttcgttgacgaggaggtcaccggcctcgacaaggccgtcatccaacccggcaagggcttccgcggcgccctcggcctcagcgagggagggccgccgttcgggttcaccaagtcgaacgagctgttcgtggggcggatggcgcagctgggcgtggccttctccatcatcggcgagatcatcacggggaagggcgcgctggcgcagctcaacatcgagacgggggtgcccatcaacgagatagagccgctcgtcatcttcaacgtcctcttcttcttcatcgccgccatcaaccccggcaatggcaggttcatcatcggcgaggaagaggaataggctgctggcctcggacatgagtcgtgtgcgtttacttttacctgtgactgtgagtgatcgatcggtgcgtctcggtgcgcgcgcgtaagtgctttgctgtgtgtatcaattactcgtgatgagacctcgaaggtagggtgtcgcgttgggttgtcttgtagaaacaagagcttatatataaattactactagctaatatgccatggttcatgattcaaaaaaaaaaaaaaaaaggcccctagggcc

SEQ ID NO: 145242 - DNA, 477 bp, Zea mays
  Clone ID: MRT4577_63965C.1
atttctgggcaagcgcccactcatcaccaccgaagactttattattgagctatcccttatttaaccctaaggaggcaccaccaatgatgggttggctggttaaactgctgcagcgttggtcataccacgttgattgaccggatgacattgttgccacttgtggagaggtgtgccagccgcaaggacgcaacgggccggcagcaccgacacacctggggttgaatcataggggactacggttaacaccagctagctggttgattggacctagttgctgctgctgactatgatcctgatagttcaatgctgccacttggttgaatggaagaaactgctggcggtccgcagcaagttgctggctgaaaggcacttgttagttgtggactctcctagttattttcagtgcagccagctgcttccatggaaccaactggtggtggtgagacttgctaccttgtttgttcagacacagttgtt

SEQ ID NO: 145243 - DNA, 826 bp, Zea mays
  unsure (1)..(826): unsure at all n locations
  Clone ID: MRT4577_63966C.1
cacgacagagatgccctttcctggggggccaaggtctatggagtatgctctgaggaattcgtcgtcgtatgcaaaggcgtactcgccggggtccacggccgccgcgtaccgtaacagcagcagcaccagcaccagcaactatgcaccggctaccacaagggcgttccaatccgtttctgccgacgcggccggagagggcggttgcaaggccacccgtctggagctccttggtcgcaagaagatgaacgacatctacggcgactggccggaacaggactgagagcgcgtaccatgcatcacctgctcgatcgaagctaccatgtctaccttcctgcctttgatcaccgtgatcgacaacatcagaagaataatgaactgaacatctgatgtttcgatttgaacttattgaacatattgtgcttgttctttgtttcctgctgaatccctgcctgtaatccgtctgatcagacctctgcattcctgccacatttctactttcaataatttgaagtgctgtgcgctttccttacaggctcctatagcttnccttcttcccccgtacctctcaccagtgttgtcttcagtatgtgaaaacccaattcttcaaccctacaggatccaacatgcaattgcatcaggcatcttacctttatcacccttgttcctccaacaatcatcagccctattacagcagttacctttggtgcatttattggcacaaaacatcagggcacaacaactcgtgctagcaaaccttgctgcctactctcagcaacatcagttacctttggtgcatttgttggcacaaaacattatggcacaacaa

SEQ ID NO: 145244 - DNA, 179 bp, Zea mays
  Clone ID: MRT4577_63968C.1
caccatgattcacctaacagagtggaaccctggctaatatatgcgtgacttgatgcaacacgtaacgctttttgccactgaactatgccttaacataggctgattactacgcatataatggacttgcatcactaacgctacatatatatgagttcagtcacatggagagcttgtatgac

SEQ ID NO: 145245 - DNA, 260 bp, Zea mays
  Clone ID: MRT4577_63969C.1
aagggttcagcccaatgcatctccgtgttaaccggcctccttatgaagacagtgatgccggtggtcgtcatgtggcagtgcaaggagcgccacttctaggtcaaggcctacatgtacttcgtaagataccgtagacgagattgtctaatcaccattgctgaagatcaagggttatcgttatcaataaaggtatctgcaaggatggtgatgatcataggtctaagactgctaaggatggacatgccataggccaatagctt

SEQ ID NO: 145246 - DNA, 384 bp, Zea mays
  Clone ID: MRT4577_6396C.1
taagctcggaattcggctcgagcaacgttcgcaacaaatttttcgcccccacagccagcggacacacaaagggggccatatgaagccccaaggggtttgcaaaccaaccacacaaaagcaatacatgcaccgcacgacaaccctggaactcataccaccccaccaacaagcacgcctccaacaagaagaaccaaaacaacccggaggaggtccaatccataacgcaagaaaccaacgccaacatacgcacctacggaacgacaacctccacctgctggctagccaccggaccattagacaataaacgctccaacacctaccacgacagaagaactaacgacaccaaagactgaccaatgcacttccaacagctgacccagaagc

SEQ ID NO: 145247 - DNA, 408 bp, Zea mays
  Clone ID: MRT4577_63971C.1
aaacgggggcaaccggtctaactttatcccaactggatcaaggtggggccaggccccccccggaaaaaaggaccaaggctaatatttttggcccgcccatgacaatttgcctcccccaaccaaaggccaaaaggggcccccggggggggggatccctcccaaaaagggcaagggtttacacacaagggctgggggccccgggcctcggcgaagacaacccgagaaacatcccgggccaccaaaaaaggcccggggggttcttaaaaaccccaactaccccgcgaaggaggaacacccaaggggggaggccccttgaaaaaccggcccaatatttaaagtctggggaaaggggcgggggacaggaggcaacagcaaagccaaaaacttggccatcatcggacccggggg

SEQ ID NO: 145248 - DNA, 178 bp, Zea mays
  Clone ID: MRT4577_63972C.1
gggatacgtataaaagcacatttccatggtaaggttacaattaattaaccggcgtgttatgtacaagtttcatggtagcacgctgtgtatttttgtacgcttggcaaacaggaagaactcagtaatgcatgcctcagctccaatgcaagaaacgcgtctagctagtactcgtcgtggc

SEQ ID NO: 145249 - DNA, 384 bp, Zea mays
  Clone ID: MRT4577_63973C.1
gattctcacttcagggcttgtttggttattcctatcccatgtccttaaagctattgattatgtgcatgaattgagtatgaggtgcctggccaaagcgagtgttctactgtacccaaaaactttaggtagttgtgttgtctttagtggttcagttcctctaagtaaatcattcgctcaaaaggtgtcatctgaagctagaaaggtgataacccaaagatatatgtgcttatgtttagaacttgatcttcttactcttatataacctaagtatgaactcttatttcagaccggtattatggtttactcttatataacctaagatcatatgtcctaccaaagcgaaaatagtttatgaagcataataattttgccaatactaaattc

SEQ ID NO: 145250 - DNA, 562 bp, Zea mays
  Clone ID: MRT4577_63974C.1
tcgctgggcgcgctggtgctccccgacacgcccaactcccttatcgcccgcgggttcaacgacgacgccaaggcggtgctggtgaagatccgcggcacggacgacgtgcaggacgagtacgacgacatggtggcggcgagcgaggaggcgaacgccatcgagcacccgtggcgcaacatcccggtgctgttcctgaccatcggcttcggcgacgacgcgtcgctgatggcggccgtcatcacggggctggtcaacatgttcgccaccgtggtgtccatcgtgtgcgtggaccgcctgggccggcgcgcgctgttcctgcagggcggcacgcagatgttcgtctcccagatcgtggtgggcacgctgatcgcgctccagttcggcaccgccggcgtgggcgagatgtcccgctccaacgcctggctgctggtgctcttcatctgcctctacgtcgccgggttcgcctggtcgtgggggccgctgggctggctcgtcccctcgaggtgttcgcgctggaggtccggtcggcggagcaaagcatcgtcgtgtgcgtcaacatgct

SEQ ID NO: 145251 - DNA, 2237 bp, Zea mays
  unsure (1)..(2237): unsure at all n locations
  Clone ID: MRT4577_63976C.1
gaagnnnnnnnnnnnnnnnnnnnnnnnnnnnnnnnnngaaccctcgaatannnnnnatgcagaagacttttttttttttttttttttttatttctttttttcagttttttataaaaggctggaacatttttgcttctataataaaaaaactgaagtaacactcatatgagctcagtcggtgtgatgaactgaaggaaagaaccctcgaatgaataatacatcggcactgcaataatacaccaggaaagaacaagcaaattccccatacgataccagcacagccgtgcaacccttccaaacgtgaactacaggcaccaaaaccttctacagaaccaaaccctaaataagacatgatgttccctgctctgaaaccttgcgtacgtgatacacaaagagaacaatcacagtcaaactagtcctcgtccatcccgccaccaggctgggcatctcttcttggacctcctgccggcttcgccataatgatctggtcaacccgcagcacggtgcatgcggcatcggcagaatattttagggcaaagaactttgtgacataaaggtcccatattttcaaggtcgtgatgtccttgcaggcaccttcctccaggtcaatgccaactttcacattgccactagcatgctcagcataaagagaggatattacatccattgcgctaagtccggcattttctgccagggttcttggaaccatttcaaagctttcagcaaatttcgcaacagcatactggtccaaccctgtttccttcaaagagaactccttcaatctctttgccagctctatttctgttgcagcagcaccaggaattatcctactgtccctgcacattgacttgtacgtattgacgccatcatcaacagctctttcaagatcatctagtatactgtcagtactgcctctcaagacaacagtagccactgaatttccaccttcttcgttcttgatgacaataacccgagtaccaccaatttcttccacggaaacagagtctgcgtaccctagttcatccgcattgggttggctaagtttcaaaattgcaacagccccagtagtacggcagaatcttctcagttcaaacttcgagctgattttcagaaccatcagcttgtaacgttcacaaaaatgtagcgccatgtcaccaactgcagctccactgacaataaccttggcacctgagtcagcaacagcttttataagctcctccaccttagcttcctcagtcttagcataattttctagctgctcagcggaatggatcaacactgttccctttgtttcggttgctgaggtatcgacaccaccagcaaatactgcaatctttgccttctccacccttttgatgctaccaacagcatcattttttagaaccatcccacggaccacagaagaattgtgcaaaccacctccaagcagcttagccactctaacattgtcgacattgaagtttgctggatttttggggcaaacttgaatgcaggcatcagccacaagagggcacattatatcctcctgaccaaactgcttgctcgcgacagcggatctcatcctcaacacaacgtcctccttgtttctcacatccatgttctctgagcctttctcaacaagatcctccaagatctcaattgtcttgttgatggctttagtgtagccaatgatgatctcacttggatgcaagcccatcctgatgagctcctcagccttctcaagcagttcaccggcaaacgatatggtgagattggccccatccccaatctcctcctgttgagccctgccagccagtaccagaatcttagcagcagggtgctgaacttcgagctcattcacaatggtggcagcatcgtttgtgacaaacagcttgtccaagtgattgataaccattttgttcattccgttcgggccgagagaggtgcgcgtaatggcggacagctcgcggcaggcgtcgatgttcttgagaacggcctcctcgagcccggagaggtggcggtggccttccttgagcatcgactggatcccgtagcccgccatcgagccgaaacccaccatagtcgtctccggctgggtgtagggtggtggatttccggcggaggacgacgccggcggcgaggcggatcggggggaaagtttaaaccctagtgactaatgagcgctgcttgcgagtgccgggggtggagcgggggggtcggggaagcccatcctcgagcctgccacgaggtacccaatg

SEQ ID NO: 145252 - DNA, 794 bp, Zea mays
  Clone ID: MRT4577_63977C.1
tctaacattgtcaacattaaagtttgcaggatttttggggcaaactgaaatgcaggcatcagccacaagagggcacagcatatcctcctggccaaactgcttgcttgcgacagcagatctcatcctcaacacaacatcctccttgtttcttacgtccatgttctctgagcctttctcaacaagatcctctaaaatttcaattgtcttgttgatggctttggtgtagccaatgatgatctcactcggatgcaagcccatcctgatgagctcctcagccttctcaagcagttcaccagcaaacgatatggtgagattggctccatccccaatctcctcctgttgagccttggcagccagtaccaggattttagcagccgggtgctgaacctcaagctcattcacgatggtggcagcatcgtttgtgacaaacagcttgtccaagtgattgataaccatcttgttcattccgttggggcccagggatgtgcgcgtgatggcggagagctcgcggcaggcgtcgatgttcttgagcacggcctcctcgagcccggagaggtggcggtggccttccttgagcatcgactggatcccatagcccgccatcgagccgagccccaccatcgtcgtctccggctgggtgtgggggcgttggtctggcggcaggcgacagcgccggaggcgaggcggatcggggggaaagtttaaaccctactagtgtccgctgctttgggagtgcgagtgccggggctggatgcggagtccggggaggggccccccgccgtcgagggacccaa

SEQ ID NO: 145253 - DNA, 853 bp, Zea mays
  Clone ID: MRT4577_63978C.1
gaccctccgggctcggccgggagacaccggccacctgacatcgccgcggaggtcggtgccactcccgatggctacactgtccctcgtccctatgtcccgctcgcatgccacatctagttcctgtagacgcagagcatcgtccctatttttataactttttcaaacggccatggccaactctggtgtcaccgcgttgggccacgtcctggtttgggcgctggtgttcgaggtcggcacggggagcgaaggctgtccagcgtgtacgagaggacatggactggattctccatggaggccttcagagaccttctccggttcaccaagctctccatcccgatcccgtcgacgatgatggtctggtgagacaactagcacctacatcttgaattgttgattggtcgtggacgtatggtggacaccgatatgatgatctgttgcggtgttgcctatgtatagcaatcttatctcatgcagcttggagtggtggtccttcgaactgcttttgtcatacttccctggtggagctgctggaatgaagtttctatcatacacccatgtgtcaccagtgttgagatgctttaggcgttgagttcacctgttagttgctttctcaccatctatttcagcctgttacacttttgtttatattgacttagagattggtaactacaggcagtgtctgtctagatatttgcgtgcagcttacctgccaaaccttgggatttgagagaatagattactacattagtgcagataaccatatatgatatatatagagagagagagcgtcatgggccatatacgactattgtagatgggccctcatacgcttagaaattacctctgtcaacgc

SEQ ID NO: 145254 - DNA, 149 bp, Zea mays
  Clone ID: MRT4577_63979C.1
gagctcacatgtcggtggccgccctttttttttttttttttggtttatttaagtgacgagggaactggggttcaatggtgggtgataataacttaacgggatgaactggggtacaaagtagggagaagttctttaatgttggggcgggc

SEQ ID NO: 145255 - DNA, 317 bp, Zea mays
  Clone ID: MRT4577_6397C.1
gtgtataggcgcactgatacactctccttctatctcatgttgtttctgtgggctctatccctaattatctgcacgatatgcaatcggtagcggaggccacgctccggaatcacacagcacagatagctcaataggccttgcatgacttgcttggtctgtataccaggcactacagatataacaggggcaaacgtactagtgacatgctaatggggacaataagcttgatgatgccggtgtgctacaacgtgtttgaccatatacatatataagatccttacacggggcgccttgatgtgtggctccagacgttctta

SEQ ID NO: 145256 - DNA, 377 bp, Zea mays
  Clone ID: MRT4577_63980C.1
aaccacgccatcttcctatccattccaaccgagcgagaagcacccgcggagatctatgcggaggggcgccatcatgggcgcatccaaaccggccttcgaccccctgctgcagctcgctaagtacagcatctgcctccacatgacctgacagatacctgaccatactgagacatccaacgacgataagaaggctgcaactcactccaagggccttacattcaagacattcttggtcaggctcatatgaatgcctaccaacaacattgttgtcatttttcatttgaaacgatcacctcaagcataagaactgacgaactacacacacgttttactaacctttttttgaaaagcctgtttaacccttttggtttcaccta

SEQ ID NO: 145257 - DNA, 160 bp, Zea mays
  Clone ID: MRT4577_63981C.1
cacataagaacactcgtttgtgacgctggcacacaagccggtagtctgcggcgatcggtcggtggacgatggacggatctcagctaagcaatctcgcctcgtattctccggcggcgacacacacgcgcccattatatgtagtgaaataagttccccatcc

SEQ ID NO: 145258 - DNA, 586 bp, Zea mays
  unsure (1)..(586): unsure at all n locations
  Clone ID: MRT4577_63982C.1
ccggccgggcttggaactntattcttanaaaaaaaaaaaaaaaaaaaaaaaaaaaaaaaaaaaaaaaaaaaaaaaaaaaaaaaaaaaagaaaaaaaaaaaaaaaaaaaaaaaaaaaaaaaaaaaaaaaaaaaaaaaaaaaaaaaaacctcgggccttggcggggccgccaaacactttatagttggacccccaagcccggggggggggggggttaccagggaagtgggaaaaaacaaagggttccccagggaaaaaaaggggggaaaaaaaaaaaccgccaaccccttctcaaaaaaggacgggaatgacatcagggccccatcggggttcagggggcccaacatgggaaaaactcccgggcccagaacacagggaaccagaattgcctctgagggtctaaaccacaaagtctttgaggttggccaagctgatcttcagggggacgaggatcgggtttacaggaaaatcaggctccgggctaaaaatgggcaaggaagaaatgtgctcacaaacttcgggggcatgaattttacccccgataagctcaaatctctagaaaaaaaggggaaaactttgtttgaaccc

SEQ ID NO: 145259 - DNA, 391 bp, Zea mays
  Clone ID: MRT4577_63983C.1
acccaagcgtccacccacgcgtccgcggacgcatggggagagacgacacagcagcttttttggtttccccttccctttcccctgcgcagtgatcactgggttctccgcgagcgaagcagaacactgcacgtcctacgtgaccgcgcggtgatctctgggggttccggacgttgtggtttcaataggtaggctaggggatgggaacaaccctggcgagttcaatccgatactgcaggagacagtcatggaagtatcgttcccggtactggtagagatgctagatttagtgcccttattgctgccgcatttggtgcagcagggcacgcgtgaattccattgaccactgttctttttgttagcggttcacaatcatgcgacgatgaattagtca

SEQ ID NO: 145260 - DNA, 492 bp, Zea mays
  Clone ID: MRT4577_63984C.1
atgggtagaggcaggaggggtcacggctggcctcactgtggcgataacaagcgcaagcgtaccccgagtcctccctcggaggactttggtgacttggagtactcggaggaggtatcctctgagtcaggccactcgcccgctctggcttctcccccggcatcacccgatgactcggatgattccatggggctttccaccgtgtctcgggcgtactggcgttccatcgagcgcggcgggctcggtgggtcagatgagtcgggggtatcctcggatgaggcagactccttcgactcttccaaggagtggagcggcgacgacggtgacgacgagggcgacgacagtggcgaaggcagtggtgagggcgacgacggcgatgaaggcggcagtgaaggcgacgatggcgatggcggtggcaaggacgacggtggcgacggcggcggcaagggcgacggtggcgacggcaaggccagtggcatatcgccgctggtctaa

SEQ ID NO: 145261 - DNA, 398 bp, Zea mays
  Clone ID: MRT4577_63985C.1
ctcttcatcctatctgaggagttggctgggacaaggatcttgccaagaagatttggtgctttggacctgagacgactggccccaacatggttgtcgacatgtgtaagggagtgcagtatctgaatgaaatcaaggactctgttgtggctgtgttccagtgggcatcgaaagaaggtgctttggctgaggagaacatgcgtggcatctgctttgaggtctgtgatgttgttctgcacactgatgctattcacaggggtggtggccaggtcatcccaacagccaggagggtcatttatgcttctcagctcactgctaagccaaggctgctggagcctgtgtacctggttgagatccaggccccggagaatgcacttggcggtatctatggtgttctgaat

SEQ ID NO: 145262 - DNA, 269 bp, Zea mays
  Clone ID: MRT4577_63986C.1
atatgatgggttggtggaagaacactgctaggggtcttatgagtcataggtcaatcataaagccttccgactgatgctcgcggcttcccagaaataagaaagcacacttctgcatagaaaagcaaaccctgaaaaaaccccggcgacacccaactgaaaccgaggacaaaaagcccccctcaagcaagggggcatcaaagcaaagaggcccgaatccaacagggcttcgccctgtggggcaccctgaatggcaaacggggacacccaac

SEQ ID NO: 145263 - DNA, 348 bp, Zea mays
  Clone ID: MRT4577_63987C.1
gtaggaacatacaaaagctaattaaattacagtaactgggggcttacttgaaataaactacatgaacagatcgttgcttagaagcaactagacctgaatgggcataaagggaaccaataggtactagtttagggcctgatgctcagtttattgcacgattcaaacctaatcaatggggtcggctactgcccatatggagatcaaaggcttctggtgaatgagtacatggcacttggctcacttgcagatacactgttggcaaggggcaattttttgaatggactaacacattcagatggtagtgcaacataattttataagatcgtaccgcaagatacttaaatgctc

SEQ ID NO: 145264 - DNA, 223 bp, Zea mays
  Clone ID: MRT4577_63988C.1
gccgtaccggtctcggattcccgggtcgactccacgcgtccgacttgaacggaggatttccggtctgaataatataaatgcacgcttgcaactatatccatggaataagaatgggcggccgatctaacggatccaagtttcagtactgcatgcatgcaacgacataaatattatatagagtaacctaaatgcaatccactgtccgtgattcaacaacatattc

SEQ ID NO: 145265 - DNA, 626 bp, Zea mays
  Clone ID: MRT4577_63989C.1
ggcgcgagagctgatcgtcagcgacgagatcaacctgatgctcgtcgcctccacgccggagacgaccaatccggtcaccaccacctgcgagaacgaggaggtaccctgtatctccaccgtcgcgccgtggcagccctggttcatcggccagcaggccaatccgggcgaccccgcgtcctggaagccgttcgacagctcgttccacttcttctggggactggaggacgtcatcgccgtcttcaccaacatgtgggcgcaggtggagaccaacaagtcggtcggcgggctcttcccgaacgatggcgacggcaatgcctggggcgaccccaatgtcggcttcccgccggtgctgacccagcagggctacaagctcgccgatcccggccgctaccagaacctgacggacgatttctccgcgcagatcaacgcgttcaagcaggcgaacgccgagatcatcaccggcgtcatgatcccgccggacttcaccacgttctggaaccaggccaagcagcagggcttcgtgcccaaggtcgcgtcgatcggcaaggcgatcctcttcccgcatgccgtcgaggcgctcggcaccgcaggccacaacctctcctccgaagtgtggtggtcgccca

SEQ ID NO: 145266 - DNA, 357 bp, Zea mays
  Clone ID: MRT4577_6398C.1
atataatgttttacacattccctaaaactatatcttatattccaaaaccatctcggaatttaacttattccaaataaacttcctaaaaataaaccacaaactgctcgaaaaaaaaaaccacccgtgggggttgtgggggcaaaacaggcaacctagtttcgacatcagcaacattttctattgatgggccacgtctatcccccagttcaaaagtttcaaacaaaacgtccaaagcttgaaaagccataccaagggagggcaaaacatgttggaccggaaaatctttaacctaaaaaaagttggctaaaaaaacaaagatgcccatttaaaccttataattttcccacaatttctttt

SEQ ID NO: 145267 - DNA, 575 bp, Zea mays
  unsure (1)..(575): unsure at all n locations
  Clone ID: MRT4577_63990C.1
cggtcccacattcccgggtccanacacgcgtccgcccacgcgtccgcgccgacaaccgaggtttcgacgttcctgcacgcgtgcgagggggaggcggtgacgaagctcaccaacgagaaggtggcctacttcaacgcgcccatctatctgcagaacaagacccagatcggcaaggttgaagagatcttcggccccatcaacgaatcctgcaccaccgcggcccgaaaaacaagctcaaaccttaaccaccgacgatgccagcacgatggcccgctacgaccccgccatcactatcttctcccccgacggccacatcttctaggtggagtacgctcttgaggccatccgcggcacgaacaccgttgtcctcggcgtcgagaagaagtccacacccaagctcgatgactccaggcgcaaagctatgttttcttttatttgggttgcaagaggaactagaaccataaatggggttgcctcggcgaaggcaccattcaagcttcacacttagntttctgtacggatgagaacaacatacgaggcaagtggtgaacggtgggcaaatatacgtggaatta

SEQ ID NO: 145268 - DNA, 144 bp, Zea mays
  Clone ID: MRT4577_63991C.1
cttgtgttggtttttttatttttgcgcctagaagttttccaatatctagaagcaacaatgcagtgaagaccacccttcataacgaggttcttattaacccaacggcaaataggggcggtcataaacagaaagacttacaacatg

SEQ ID NO: 145269 - DNA, 343 bp, Zea mays
  Clone ID: MRT4577_63992C.1
gcctgcctgtaacggtcctagattcacggatccacccagttgtccttcaggctgtatgcagcccgggatttttgggaacctcaatgagcggcggactttgtggacctgctgatgcatctgtccggcagtatctcggtcgatatctggatgtccacggagcttcagtatctgtacctccaacgaaaccagctggatggtcatgcaccatccaggttcttcgatctccagctgcgtcactgtttcacctcacggacaatcgcatcaccagaagagtcgcacgcgcattcataaagctctataagcactctaatctgtctctggagcacaacagtcttcatgggat

SEQ ID NO: 145270 - DNA, 359 bp, Zea mays
  Clone ID: MRT4577_63993C.1
atataaaacgaaagagttgtttcacgggcccctgaaatcgtttgctggggacaccatacatcaagtttctttcttattacatcactcgccgatagtgtgtgggcacggggtgacaattcacaaagactgacggtcataaaagaggcctaacttttgaggtaaaaatgagtgaacgcaggaaactaacctacaacctcacgtgtgaggtcagaatgcaggcacgttctctgttctaatggccatgttgcaagtcgagtagattgatgcggcagtggtttgcaccggccactcactctaagaaatatctgggttccttagcttccatagctaaaccataggtcctagcagatgaacttcac

SEQ ID NO: 145271 - DNA, 337 bp, Zea mays
  Clone ID: MRT4577_63995C.1
gataaaataagaacggtttcaaggggatgcagttttgcagggcacttgatattcttacagatcctaggccgccagaaagcattcaaacggcctgacggcaggcatgcatataaagctcgaaccaacactagggacaacaacgccgtggcacgtacattaattatataccacccccaggacatgcaattgatgcgcatgcatgccaagtggttgcagaccttgactgggggcatggtgactccgagcggccacgttctatgtttttcggctacgtagtctaattttccgggcccatcaaagcaaggtagctaggagggaacgctttccatgcccgatc

SEQ ID NO: 145272 - DNA, 1865 bp, Zea mays
  Clone ID: MRT4577_63996C.1
attggaccctcgagccggcgccggggattgcactgcaagcgcagatctcaattaggagtacacaacaagtggagttcgacggatgtgaattgcggcctttcttggttgccgtcttgctgctatggttgacttgcggtccctactcgtcgccggcgtcgtcctcctcgccggactggccgtcctcgtccacggcgccggggacgagcagttcgtctactcgggcttcaccggcgcgccgctcgcgctggacggcacggccaccatcacgccgtcggggctgctggagctcaccaacggcacggcgcagctcaagggccacgccgtgcacccggcgccgatgcggttccagcggacacccggcgggcccgtgcgctccttctcggcgtccttcgtgttcggcatcatcccgccctactccgacctcagcggccacggcatcgtcttcttcgtcggcagggacagcttcgcgaccgcgctgcccagccagtacctgggcttcctcaactccagcaacaacggcaacttcaccaaccacgtcttcggcgtcgagctcgacaactttgtgcggaggaaggatgtccagtgccgtgggcgagccgagcacggaggtgtgggcatcagaggaaagaggacacaggatatgacggatgcgatcataccagcactaaagcactggatcccatcagaactctgaagttaagcgtgcttgtgcgagagtaactaggatgggtcatgggtgacctcctaggaagtcctcgtgttgcattcctttttttggttttatttttgtttgtttttcgaacaccaaaccatagtaaaaatgggtgaccgtcctcgtgttaaattaccttttatttgttttaaggggcgttttaggcatttttcgagtactttgtgcggaggaaggatgttcagagccgtaggcgagccgagcacggaggtgtgggcataagaggaaggaggacgcaggatatgacgaatgcgatcataccagcactaaagcaccagatgccatcagaactccgaagttaagcgtgcttgggcgagagtagtactaggatggttgacctcctgtaaagtcctcgtgttgcattccatcgcacatattattgagaccaactagcaacatagaaagcacaatagtgtaccaacaatggcagccaaaatattttgcctccttatgctccttggtctttctgcaagtgctgctacggcgaccattttcccgcaatgctcgcaagctcctatagcttcccttcttcccccgtacctctcaccagcggtgtcttcggtatgtgaaaacccaattcttcaaccctacaggatccaacaggcaatcacagctggcatcttacctttatcacccttgttcctccaacaatcatcagccctattacatcagttacctttggtgcatttattggcacaaaacatcagggcacaacaactacaacaacttgtgctagcaaaccttgcggcgtccttcgtgttcggcatcatcccgccctactccgacctcagcggccacggcatcgtcttcttcgtcggcagggacagcttcgccaccgcgctgcccagccagtacctgggcttcctcaactccagcaacaacggcaacttcaccaaccacgtcttcggcgtcgagctcgacaccatccggagcaccgagttcgatgaccccaacgacaaccacgtcggcatcgacgtcaacagcctcacgtccgccaacgccagcaccgccggctactacgacgacagcaccggcgcgttccacaacctgaccctgatcagcgccaagcccatgcaggtctgggtggactacgacggcgagacggcgcaggtcaacgtgttcctggctcccctca

SEQ ID NO: 145273 - DNA, 950 bp, Zea mays
  Clone ID: MRT4577_63997C.1
gatcgcacatattattgagaccaactagcaacatagaaagcacaatatggtaccaacaatggcagctaaaatattttgcctccttatgctccttggtctttctgcaagtgctgctacggcgaccattttcccacaatgctcacaagctcctatagcttcccttcttcccccgtacctctcaccagcgatgtcttcagtatgtgaaaatccaattcttctaccctacaggatccaacaggcaatcgcagcaggcatcttacctttatcacccttgttcctccaacaatcatcagccctattacagcagttacctttggtgcatttattggcacaaaacatcagggcacaacaactacaacaactcgtgctagcaaaccttgctgcctactctcagcaacagcagttacctttggtgcatttgttggcacaaaacatcagggcacaacaactacaacaactcgtgctagcaaaccttgctgcctactctcagcaacaacagtttctgccattcaaccaactagctgcattgaactctgctgcttatttgcagcaacaacaactactaccattcagccagctagctgctgcctacccccggcaatttcttccattcaaccaactggcagcattgaactctcatgcttatgtacaacaacaacaactactaccattcagccagctagctgctgtgagccctgctgccttcttgacacagcaacatttgttgccgttctacctgcacactgcgcctaacgttggcaccctcttacaactgcaacaattgctgccattcgaccaacttgctttgacaaacccagcagtgttctaccaacaacccatcattggtggtgccctcttttagattgcttatgagttatagttcaataataaagttttttttgcagatatttgtggcttcccagaaataagaaagtacatttctagattct

SEQ ID NO: 145274 - DNA, 276 bp, Zea mays
  Clone ID: MRT4577_6399C.1
gggtccacggtcatcacgcctatgacctctgtgcatggcgacggtgtccaggacaatattccgcttccgttggacacgaagggcttcatgttccagcgcaccacctctccactaatggatgacaatatcttcgtcatgaacatcaacgaaacctcattcaacaccttccgcgccttcttatactacctctacaccggcttcatctccttctctccgttaacttcctcattccaattccctgaccaacttgacacatggtcgccaggccaaacaagc

SEQ ID NO: 145275 - DNA, 746 bp, Zea mays
  Clone ID: MRT4577_639C.1
ctgactatgaagacagcatctatggtattgcatggagctcccatgatccatcattattcgcttctttgtcctatgatggaagggttgtcttggaatcagtcaagccctccttgcagagaaaatgaatcttgctggtctaacttttggattgtaaggtgtaggatatgattcctcatttcctttatcttgtccttattgccaaagttatctcatgtcctaataaactgttctctgtccctgcagcctacaggcttgcttgttgtttatatttgatgcgttatagttttgccttatattctgtaccctcttgacaaccatttatgtgatgatgtgttttactgttgtagcaatggcagaaaaaacataataaggatgttgcagaaatcatcctgcttgacatcaggtcttcaaccctcttgattgaagccagcaatggctccaaaacactcagatctagcttcagttgagatattacagcacagttgagattgtcagcagtttcctttcctgtatcttcaaattttgttcactaggatttcatgttcagttgctagaaatttggctgtgaagatctgatctgtatgttaataactgttgcccatctgtctgaaatatttttccttacttgatttgtaggatgttgtatatttgaaaagtgtccataaaaagatcttgcgttgtatgatgaggtggagttggactgaatttgtaaaaccattcagaaattcagattaccaggattagtt

SEQ ID NO: 145276 - DNA, 664 bp, Zea mays
  Clone ID: MRT4577_63C.1
atctccccccggcgagcccacccccaagcacacgcagcgcccgcctccaccaccccacccctctctccgatctcaaggttggcggccggcggcaggatgaaggccaaggcgggctcccgcgccggcgactccaggctcgcggtgaagaagagcaaggccgagaaggaccccaacaagcccaagcggcccccgagcgccttcctcgtcttcatggacaccttcaggaaggagtacaaggagaagcaccccgacgtcaagcaggtctccgtgattggcaaggccggtggtgagaagtggaagtctctgagtgatgctgagaaggctccctatgctgccaaggccgagaagctcaaggccgagtacgccaagaagatcgacgcctacaacaacccgcaggcaggagaggcgtccggcgactctgacaagtccaagtccgaggtgaacgacgaggatgacggcagcgagggcgacgagtgaagcggcacgccaagcagccgcagcagggggagggggtctctggaacgtggccgttgctgctcattgctggtgtcactgatcgatgatggatgttcgctgctagtttagctccatggtagtccctccctctctttcaggttgctgctgctgatggcgatgatagaaatggtagctctagtcccatcta

SEQ ID NO: 145277 - DNA, 1704 bp, Zea mays
  Clone ID: MRT4577_64000C.1
cgggaaaagaaaaaaagtgcttaccctggactggtcaccggttgcggtgagctaactggctccggattataaaaccggtagcgccagccgccagagcgcgggggcactgcaagcgcagatctcaattaggagtacacaacaagtggagttcgacggatgtgaagtgaattgcggcctttcttggttgccgtcttgctgctatggttgacttgcggtccctactcgtcgccggcgtcgtcctcctcgccggactggccgtcctcctccctggcgccggggacgagcagttcgcctactcggtcttcaccggcgcgccgctcgcgctggacggtacggtcaccatcactgccgttttggctgggggccctcgccaacggcacggccgccagagcgcgattgcactgcaagcgcagatctcaattaggactacacaacaagtggagttcgacggatgtgaagtgaattgcggcctttcttggttgccgtcttgctgctatggttgacttgcggtccctactcgccgccggcgttgtcctcctcgccggcctggccgtcctcgtccacggcgccggggacgagcagttcgtctactcgggcttcaccggcgcgccgctcgcgctggacggcacggccgccatcacgccgtcggggctgctggagctcaccaacggcacggcgcagctcaagggccacgccgtgcacccggcgccgatgcggttccagcggacacccggcgggcccgtgcgctccttctcggcgtccttcgtgttcggcatcatcccgccctactccgacctcagcggccacggcatcgtcttcttcgtcggcagggacagcttcgccaccgcgctgcccagccagtatctgggcttcctcaactccagcaacaacggcaacttcaccaaccacgtcttcggcgtcgagctcgacaccatccggagcaccgagttcaatgaccccaacgacaaccacgtcggcatcgacgtcaacagcctcacgtccgccaacgccagcaacgccggctactacgacgacggcaccggcgcgttccacgacctgaccctgatcagagcgccaagccccgcccgggctgctcgtgctgcgcgtcgacgcgaacgtcgacttcgccaacgccagctacctgcgagagaggatctcgcggtggatcgacgacgaggaggagcgcaccaagagccagggcgagatgggcgtgcggtacgttgtcctcgacatgggtgccatcggtagcatcgacacgagcgggacgagcatgctggacgagctcaacaagtccttggacaggaggggaatgcagatcgtgctggcgaacccgggcagcgagatcatgaagaagctggacagctccaaggtgctggagcagatcggccacgagtgggtgttcccgacggtgggcgaggcggtggcgtcgtgcgactacgtgctgcactcgcacaagccgggaatggccaaggacagcgccgccgcccacgagagcatggtgtgacgagcaccgccacgccaaccgtatgtgtagtgtgctccggttccggtctgacgtaaccagtcgtcacgcggaccgagatgaattatgtatacacgtgtctcgagtattgtacacctgcaccgtcgcgggaaaaacgaattcagagaagaaaggatcccacccggttttttttggggaaaaaaaaaaaaaaaaaagcggcc

SEQ ID NO: 145278 - DNA, 778 bp, Zea mays
  Clone ID: MRT4577_64001C.1
tcccggaccggcctgggtcgggctcgacgccacgcgtaactgtgtcaacatatgaaagcacaactggtgcgccaacaatgtgcacgccaaaatgattatgcctgcctatagcgtccttggtcttctctgcgaacgtgactggtacgggggatccacttttggccgcgaatgtctcgacaggcgtcctataagcttaacctctgttcccgccgtggcctgctcacacagcgcgagtccttctgtgatgctgaaaagcccgaattcttcaacacctacagagatccaaccaggcactcacagagtggcatctctaccgtttatcaccgccagttccctccaacactcatatagcgcggattacatcagttacactttggtgcatttattggcacaaaacatcagggcacaacaactacaacaacttgtgctagcaaaccttgctgcctactctcagcaacagcagtttcttccattcaaccaactagctgcattgaactctgcttcttatttgcaacaacaacaactaccattcagccagctacctgctgcctacccccagcaatttcttccattcaaccaaattggcagcattgaactctcctgcttatttacagcagcaacaactactaacaattaacccactaacttgtggtaaccctggtaacttcttgatacaaccaccagtggtggccgtctaacaacacccttggcctaacgcttgcacccttttacaactggaacaattggtggcattcaaccaacttgctttgacaaaccc

SEQ ID NO: 145279 - DNA, 839 bp, Zea mays
  Clone ID: MRT4577_64002C.1
attatttgaaaaccactcgcaacaaacaaaaggacagtacactagcaacaatttaagaccaaagatagtgaagatttatgctattcttgccctccttactctttgagacaggcgttgcttccgcgacaatgattacacaatgctatcaacaatctcctttctccgataccagccacgagatttgaatacccaactatacaatcctacaggctacaagtggccaatgcaacaagcatcttacggacgttagcattgtccgtccaacaaccatatgccctattgcaacaaccaatcttaatgaatctatatctccaaagaatcgcagcacaacaactacaacaacagttgcttccaataatcaatcaagaagttgcagcaaaccttgctgcctactctcagcaacagcagtttcttccattcaaccaactaggttcattgaactctgcttcttatttgcaacaacaacaactaccattcagccagctacctgctgcctacccccagcaatttcttccattcaaccaactagcagcattgaactctcctgcttatttacagcagcaacaactactaccattcagccagctagctggtgtgagccctgctaccttcttgacacaaccacagttgttgccgttctaccagcacgttgcgcctaacgctggcaccctcttacaactgcaacaattgctgccattcaaccaacttgctttgacaaacccagcagtgttctaccaacaacccatcatttggtggtgccctcttttagatttcttttgaagttagtggttcaagtagaaagttttttgtctgggtttgggcttcccagaacttagaaa

SEQ ID NO: 145280 - DNA, 219 bp, Zea mays
  Clone ID: MRT4577_64003C.1
gctaacaaaggtgacaaatactatgacccaccgttggtttactatctgatacatttcagggctcattcgcacatacttagttggtattattggaagaaagcaagcccttgctgctgacctgggtatactgtgttttgggctaatccaaggggcactacctgcgccttagatctcttctggggccacggtctggcaccagtgctgctccgctccctatat

SEQ ID NO: 145281 - DNA, 288 bp, Zea mays
  Clone ID: MRT4577_64004C.1
ttttctcgttcgccccctcgtggtgctactgcagccacttcaagatcacgcggcggataaattgctgccaggagctgggggatgaactcgtccatatgcaggaacatctgaaacattcacggtggcgattgtaggctcaagtgcaatagcttcatcgctggttcttgcggcgagttaactgctagttgcatgcagttagagagtttcattaatgatgggatagaaggatacgttgttctgttgtccacttaaaggataccaactaccaaatatctgtaaggtacgaaa

SEQ ID NO: 145282 - DNA, 1236 bp, Zea mays
  Clone ID: MRT4577_64006C.1
atcgccatattatctgacaccaactagcatcatacaaagcccgatattgtgccaatacgggcaagccaaatatcttgtctattatgctccttgctctttctgcaagtgctgctacggtgagcatttacccgcactgctcacaagctcctatagcttcccttcttcccccatacctgtcaccagcgacgtctttagtatgagaaaatccaattcttgtaccctacaggatccaacaggcagtcgcagcaggcatattacctttatcacccttgctcctacaacaatcatcaggcctattacagcaattacctttggcgcattaattggcacaaaacatcagggcacaccaactacaacaactggtgctagcataccttgctgcctactctcagcaacagcacctacctttgctgcattcgttggcacaaaacatcagggcacaacaactacaacaactctagctagcaaaccttgctgactactctcagcaacaacaggttctgccattcaaccaactagctgcattgaactctgctgcttatttgcagcaacaacaactactaccattcagccagctagctgctgcctacccccggcaatttcttgcattcaaccaactggcagcattgaactctcatgcttatgtacaacaacaacaactactaccattcagccagctagctgctgtgagccctgctgccttcttgacacagcaacatttgttgccgttctacctgcacactgcgcctaacgttggcaccctcttacaactgcaacaattgctgccattcgaccaacttgctttgacaaacccagcagtgttctaccaacaacccatcattggtggtgccctcttttagattgcttatgagttatagttcaataataaagttttttttgctgatgaaaaaaaaaaaaaaaaaaaaaaagaaaaaaaaaaaaaaaaaaaacagagaaaaaaaaaaaaaaaaaaaggggaagaaaaaaaaaaaaaaaaaaaaaaaaaaaggtaccttgggccggaacccccctagggggaaattttgaaaatttcaataaaattgtggggccgttcgaccttgcttttaaaggcccaaattccccttaaagggagcggattaaaaattaatgggccggggtttaacaacgggggaatgggaaaaacctgggggttcccaaattaaatgcctttgaaaaaaatccccttttccccagtgggggtattaccaaaaaggc

SEQ ID NO: 145283 - DNA, 631 bp, Zea mays
  Clone ID: MRT4577_64007C.1
ccactcctcctcgggtcggtcctgcccggtcttccttcctcctacttttccccagcacaaacaaaagaaaaatggagttagccatggccgccgcctacacctcgcgcctgggcctgccccccgccgcgctcccgtacgacgacgcatccgtcgcctgcgccctcggccagctctactccaccaaggatccgttcgccctgccggtcagctgcctcctcccgcctcccgagctgccgccggccttcgggttgcccgccggcggcctcccccccgtctgctgctgcgccaaagccgcggcggcgcccgcgttcccgccctttccatgggcgcacgttccctcgccgcctgcgccgccgcgctgcgccatcacggagatcgacgagtcccgggaggtggagtcggaggacaacctctcccctcgctccgtcctcacgccctggaggaggccgacgcccgcctcggcgctgtctccgcctccgcctcttgtggtcgggggcaaacgggccttcgacccaagcagcgagaggacttctctcatgatctgcaatatccccaacggattcgtgaagtggaggatcatggcgattctggaccagcattgcgtccaggagaacgacaatcctggatggcg

SEQ ID NO: 145284 - DNA, 383 bp, Zea mays
  Clone ID: MRT4577_64008C.1
aattcggcacgaggggaaggaggccctttgctcgtcgccacatgacattggcaggcgagcccagggctcgagcagcatggtgtggcattgcagacccactcggagcggacactgccctgataactgggaccgagatgcgatgtacggacgaccaccatgctctggcacggggtcctagaccggctgacggggaagaacaaggaggcgcggaacgaggtaatgatccgcggcacggtgaggctggacaagaaggatgtgctggacgtcgtcgacttatacgcctagctcctcgacggagtacacaggatcctaggctgggaccagggcactcgccttccagttcgtgagggccaccgttgctcgaccctagctactagcagccg

SEQ ID NO: 145285 - DNA, 620 bp, Zea mays
  unsure (1)..(620): unsure at all n locations
  Clone ID: MRT4577_64009C.1
tggtccgcctgcggtacggtccgnatcccgggccccgctccctccaggccggcgtccggcagcttggcgaggcttcggcacggagcctacgcggctgcgtctgcgtctccgtggggacgatgaagtggagccgccatccgcgcccacgcgcgaccctggaaacgccacggcgactagcggccggggaatgggacgtggggagagcatatggtttctcttgttacagaaaactgccgcgacgagagagacaccgcgcgagacggccgccctcgaccgcctcaccggccaccgccctcgacctgggctccgcctccccaccgggaccggggcccatggagctggccgccccatctcccaccgccgccgtggcgattcctcccgtcggcagcgacatgcacttgggctccgagaggatgaagttcgcgcacgatggatctgaaccgcccgcaaaaatccagatgcattattcgaggatgaatcctaggattatgcggatgggtcatcgaaggtctgagcaagaaagaactgcaagatttacttcaggacggggccaaacttctgctgaaagctgctaatacgaaggaatcctagggtgagctttaagggcctgctgatgataa

SEQ ID NO: 145286 - DNA, 538 bp, Zea mays
  Clone ID: MRT4577_6400C.1
ttttcaaccctactcctggggctactgcttcaccaggagcgcggcgccacctccgactactgcacgccgagctcgcagtggccatgtgcgccgggcaagaagtacttcgggcgcgggcccatccagatctcatacaactacaactacgggccggcggggcaggccatcggcaccgacctgctcaacaacccggaccttgtggcgtcggacgcgaccgtgtcgtttaagacggcgttgtggttctggatgacgccgcaatcacccaagccttcgagccacgacgtgatcacgggccggtggagcccctcgggcgccgaccaggcggcggggagggtgcctgggtacggtgtgatcaccaacatcatcaacggtgggctcgagtgcgggcgcgggcaggacggccgtgtcgccgaccggatcgggttctacaagcgctactgcgacctccttggcgtcagctacggtgacaacctggactgctacaaccaaaggccgttcgcatagtcgatcgactatatgatgcgagaagacatgcaaa

SEQ ID NO: 145287 - DNA, 1113 bp, Zea mays
  Clone ID: MRT4577_64010C.1
taggggccttttttttttttttttttctttttttttttttttatagtatggtgtccgtggttcatgactttttactatctacgtacgtgtgtacatggtattattgtgatgatatcctggtgggctactgtttattcggtgccgtgcatgcgcacaccagtacacatgcatatgcatgcggctcggtcggctagagctcggcggtgaggccttccacctcgagctgaaacttctccatggcgtccttgggcaggcagatgggcacgacggtgccctcctcccccttgccgttctttgccctcgagaagtagttggtgacgccgaggagcggcccttcgccgcccttggccggcccgccgtagacggcctcgccccagccgaagtcgacgctcttgaacccggcgtggctgacgtccgacacgatgtacgtcctcgagaccgcgaacagcggccggcccgtgagcaccatgaggtccgcgacggacagcaggtagtcttttttttttttttttaagcacttaagttgtacctcaaattacatcatgaagtatacaataacttgatacataaagaaaaaaggaatataggacaacgagacactagataccgatacatgagttcagagagtcaccgcttccatatttctgtaatcaattgaacccacagcttgtagtcggaaatttacatgacaaagtttcatgcacgaaagacctctacttaacatgtaccataaggcatcgtgcgaagacctcaggcttccagtatagttcttatctgttcaggagagtgcttaaccaaagaccttgggtcaggataactgttattcggatccatgactgcgctgtaaatgagctcataagattctgctagagctcttgccaaaccattgcaggcatctgaacgtaaccttggaacctgcagttgctcaaattcaggcgaatgggaagcaaaagcacacgcgtagtacgctcgtcgtagcagtcaataaaagtttggccccctccccgtcatgaaataaaagtaaggaggttgcacgctttgtgtgcgtgcttggcaacgtcgtactgtatctcatgcatcgaataaatagatgttaatgaaaatcattggggc

SEQ ID NO: 145288 - DNA, 365 bp, Zea mays
  Clone ID: MRT4577_64011C.1
atctaatatgttggttttttttttatcgtttatgtcggggtcaaaccgcacgaagggagtgacacttctgtgcttgcataccatggccattggaactatcatcacgacaacatggggggaacttggacaaggaacctttgtggggaaaacaggatatggggcctactacaacaggctaagggcggcaacctgggtttttgttttggcaagagatatgcgcttccacctgcaagaaattgctgttgttgacaaagctgcccacttggaaggagaggtcgcgcccctgtagtttaatgttgcgtgagttgatcgaagccagtacctccatgcactcttggaggtcgggttcattcggcaggatcacc

SEQ ID NO: 145289 - DNA, 442 bp, Zea mays
  Clone ID: MRT4577_64012C.1
ctcgtccgctcttcctctcggttaagttcagtccactccgtcatcagacgcacataagaagaaacatattgccttacgctacgactattgttcatataacagcttacatgtactagattaagcgatatacactgatcatgtcctattgtgcaatgcggaacacgagtagcacttgcccccactttaactgctaaaggatggcttgaaatacatgcaaatgggcagggacagtcctaaagatgcaccgtgtctgacaatgaacaacactgaatccatgaccacagatcaggcgagaggagaccgaccctgcgaactgatgacagtacatacggtgcaccctactccaaaccaaagagttttctgccccagcgcaccttgccaaggcaaaagacccaccacatgttaatggaaaggccataatcatcgggatgaccatgaatct

SEQ ID NO: 145290 - DNA, 2645 bp, Zea mays
  Clone ID: MRT4577_64013C.1
tgggtacctcgaggccggccgggaacccggcacacggtctgcaccgcagaaactttgccttccccgcgtccggctactactgtcggggcgtcgacccatattcactcctctgccctctcagatcccgaactaccaaacccccttctcgccggcggaggaaggcgggggcggagaaaagagatcacgatcgctaatccgtgacggcagcggtcgggatggcggcggcgctagctccgggggtgtcccggaagttgaagaaggtgctggagacgcgtacggataacccggatctgctggcctcgctgggcgcgctctccactttctacgtccagaacaccccgcaggcgcgccgcaatctcaaatcctccattgagcagcgtgcacttgccatcaatcgccacttcctcgacgcctcgctccccgcccacaaggcgctggatcgcgtcgagggggaggtgcacgcgctgaacgactcctggaagaagatcgaggaagcattgaacagttgtagtgcaagtactggggacatcatcagtacaacagagaggttgcaacaggaacttgaagttatcactcagaggcaagaaattgtgtcatgcttcctgcgggattaccaactttcaaatgaagagataaatgcacttcgggaagaggagatagatgacaaattcttcaaagcattgctgcatgttcaagaaatacactcaaactgcaaggtcctgctgcgaacacaccaccagcgtgctggtttggagcttatggatatgatgtctgtgtaccaagaaggggcttacgaaagattatgcaggtgggttcaagctgaatgtaagaaattaggtgatactgacaatcctgaagtaagtgagcttttgaaaatggctgtttgctgcctgaaggaaagacctgttctgttcaagtattgtgcagaggaggttgccaacatgaggcaccatgccttattcaggcggtttataagtgctcttactagaggtggacctggagggttcccaagaccaatagaagtgcatgcccatgatcctcttcgctatgtaggcgaaatgctgggttggctacatcaggccctggcatctgaaagagagcttatagttgtcttgcttgatcctgatgcaatgactgacagtggtccaacttttcgacgtcagtctggtagagatggtgattcttccaaaggagaacctgatgtaacttctgtgcttgatagaatatttgaaggagcatgtcggccatttaaagttcgagttgagcaagttttgcagtcacagccaagcctgatagtttctttcaaacttagcaataccttggaattctattgttacacgatatcagaactgctgggtgaagacactgcgctgtgcaatacaatatggtcacttagagatgcagctcagcagacattcttcaatatcctgaagagtcgtggagagaagttattgcgatatcctccactagttgcagttgatctctctcctccaccagctgtaagagaaggaatttctttgctgcttgagctcatagatacctacaatagcatgatggttcctgcctctggaaaaagaccaaactttgaccctgttatttctgcattattggatccaataattcaggtgtgtgagcaagctgcagaggcacagaagtcaaaaggatcacttgcgcggcgtggtagaacaagctctgatcctagtggaaatagcagggattctatatcagttgatgctattctgtctaagaatttatctacgtcgattctgagtgccgaatcttcatccaaagtctacctcatcaactgcttgtcagctattcaggagccattgatgggccaggaggtcgctacaagctatgtaaacaacctgcgctctatgattgaagcacatatttgtgtccttgttgttcaataagttgacatttattcgatgaattgtggtacattaaaaaagttcccagccatcaaacagtatgttcacaaggctgattcaatgcatttgatagatggtatctaggaaccgcaacatatgcttgtggaattcctgcaggcattctatggtattgtgactggtaccgtaggtttcttgcctgaatttgagcaactgcagcttccaagtttacgttcagaggcctgcaaatggtttggcaagagctctagcagaactcttatgagctcatttacagcgcagtcatggatccgaataacagttatcctgacccaaggtctttggttaagcactctcctgaacagataagaactatactggaagcctgaggtcttcgcacgatgccttatggtgcatgttaagtagagctctttcgtgcatgaaactttgtcatgtaaatttccggctccaagcggtgggttcaagtgattactgaaatatggaagcggatgactctctgaactcatatatcggcatgtagtgtctctttgtcctaagttcccgttttttctttatgtatcaagttattgtatacttcatgatgtaatttgaggtgcaacttaagtgcttatccgtacaagtaagaacggatggaattgtaagctattacactactgctatttacagagaactgtttaataatgagacactggtcaaaaaaaaaaaaaaaagggggggggggggggggggggggag

SEQ ID NO: 145291 - DNA, 371 bp, Zea mays
  Clone ID: MRT4577_64014C.1
gtagctttttaacgccaacgttacgccgtgcctgtgggtgcggggcactattacggtgtcgggcgaccgcgaaccaatatactacatcgtcggcctcatcacgggccgggagaactaccttgaggagggccccgacggtgggaaggtgggcagccggcgaggcgtacaggatcggcggcatcgatcacgggatcttcgagctgtagccgaaggagggcctcgtcatggtcaaccgcaccgacgtgggctatggactggacttcaccgtgctctgggaggacaacaatctcgtcgaaatggccgaggtgacctccgtagtgttgtgcgaggtcatgaccgggaagcccgagttcaccgaccacctgacgcac

SEQ ID NO: 145292 - DNA, 262 bp, Zea mays
  Clone ID: MRT4577_64015C.1
cgcacgcgtccgcccacgcgttcgcccactcttactgtctagctgcttcatcctaaggggccctatataagtgtccatctgttgcatcctaaatccttcgctagttgcaacatgaacttctagccgaaagcatattcgtcgtcaaaaagggactccgagaggtccagaattaggtcctcggcggtgatctccgaaggtgccacattttccgactaagcccttgactgatatgggtcacacatcagtcccataagccgttcat

SEQ ID NO: 145293 - DNA, 371 bp, Zea mays
  Clone ID: MRT4577_64016C.1
aggacgcgtggtcggcgacggttataacctgggcatcgccgagcagagcggcatctccgggggcggcttctgcttcggcatgctcccggccacgctcgtcgggtacgaagtcaacgccgacattctgctcgatgtttactggaaccagctggacggcggatgcaagcccgtcgtaggagcacaagacgtggacgccgggcccaccgaagtcgtcgaggatgaggacgtcacgtgacaccgatactcgcacgccaccatgtggcaccttcttctgcgacacgcccagtcacagcaggtgccgatcggctactactacgcatggaatgaagacctcgtgaagccgcccaacggcgtgccacacacaaggaaag

SEQ ID NO: 145294 - DNA, 703 bp, Zea mays
  Clone ID: MRT4577_64017C.1
cgtttgctttcaaccatgaagtgtagctgtggattatgccattatggtcaaattgagctttgttatgtatagtgtgacaaatttgacttaacatgcatgtatacgtttgaatgctcctcttgttatgtgatactttatagtgttacacttcatcattgccttaatatttttgttgctaatttattgtagtattatttgaatgccaaattcaaggagacagggcacaacaacatatacttccctcgggactgacatgtgaaggtggaaagtgaagatcaaccaacctcaatgaatgcattagaactgatttcactaaacttggcactgaatctagacaatttgtttgaagcaaaggaggtcaatcataattctcctgtcttcttggccaattttaggggtttccaaatttcattaccttactgttgtttgaaatgcaatctaggaagtataaatatatagtgatattaattctggttaaaaaatgacagtattgtaaaagagagacaagattcacctcatggtgtcccccaaaagagataatcacaaagatcgaagaagctgaaaagctgcttcgctttgatgttcggaagaaaaaatacatggtatttgctactgaagcctgttatgtacaattttcctcctgttgttttccacacatggtgtaaaatccgacatgaatatctagaaagtataacttttactc

SEQ ID NO: 145295 - DNA, 220 bp, Zea mays
  Clone ID: MRT4577_64018C.1
taaaacaaatacaatcatctgttgaccaatgctctgataaaaggcacactgttggaacaaaaaggctttctgtgtcttgatttgcattttccgctcaggaatattgggtgcaattcgtctagcacccaaaaggttggatttccatccacgatcttctttgtctgaaagtaatagaacacatttttttgctgttgtcacttcaggatttggaacgatcgat

SEQ ID NO: 145296 - DNA, 796 bp, Zea mays
  Clone ID: MRT4577_64019C.1
tgggtacccagcgcaggagctcaccctcttcttcagctcccgcacgccatgcttcttcctggcggcgttccctccctgcttctctctccctctcgtgtcttcctcccagcgcacgcgccgcgccctggattcctctctctccctcgcgtcttcctccccctgccatggcgcccctctccgtggtgctttcccatggcgcgccccgagctcctcccagccatggagctcgtcggccgtgcagcttgcccagcccagccgctccttcctctgctcctccctgtttgccatcgctctagctcgcctggtcgccaaactccaagaacctatgctgctcgcctccctatgccgacgtcgtattctggtggccgcactccactcctgcacctccccttccatggctgccgctgcccccaagcctggggccttgtcgagctccctcagctcgcccccgaacacaacattatgccaaccttgccttggctccccagcgtcgctcgcccctgccgttcccaatcgagctcgccctgcttccgtgctcgtgcaacctgctggtgatccggccactcgccatcggctcccctgtccgatgcgtcgttagccaactcgctggccgacctcgctgtggtctggctcggtcgcgcgctcggctacttggttgccgaccgacgccgcccctggtgccgatccgggctgctggacatgcatcaaagctttctccatgtccgcgctatggtgttcaggctggctgttgttctgctactcaccgtagcgcccacagtctctgctcaccggtgct

SEQ ID NO: 145297 - DNA, 306 bp, Zea mays
  Clone ID: MRT4577_6401C.1
ccggagccccaaaggcggatgtgagccgcatcccctacacgactgcccgtagcgaatcggccctaaggaacagcaacgagggccgcgtcatgccgatgaacggagccatcgaccacaactacgctcggttccaggcccccaaatgacccattctctgcattaataactgtggcttcttcggcaacacggagaccatgaacatgtgctcttagtgccacacaggcgatgataactaatcaagatgaggccaagctggctgactactctatcgacagcatctggaacggaaacgacgccgtcatggag

SEQ ID NO: 145298 - DNA, 364 bp, Zea mays
  unsure (1)..(364): unsure at all n locations
  Clone ID: MRT4577_64020C.1
catttttgtttatttgttcacccatctagcggtggggggcaagaaacaatataccgtgaaggactcatccacaatgcaacaatggaacgtaangcacctgttgcttagtgtagtcccgcctcaccaattataacggcaggtgaacagggtcaatcacacaaattgttgaacagtggaaaaactaacccgagggacctggggctccctcaggtttgggtgactgcaacaggcgggattggggctcctctgtgggtccctagctgggtgggcgttacgcacctggttgctgctgatctggggtctgaggcgcaggaacttggttttttggcacaggcgagagttgcggcttaagaggtggcttagg

SEQ ID NO: 145299 - DNA, 587 bp, Zea mays
  unsure (1)..(587): unsure at all n locations
  Clone ID: MRT4577_64021C.1
ggccgccgtgggcggggattcgccctttcgagcgggcggccgggcaggtccccgcccctgcggtcgtaggtgccgatatattgagttgtcatgccaacgcgtgtgacttcatttttaacaatttaacaaggtttctcttattatctttnnnggggcnnngggggaacccggttttttgtttttattnnntggggggggggggggggtnaacactttattttgaaacttngggggggggcccctccggggggggccttcnaaaggggttataacgggggggggggggggggtctttgtgggggcggcccctggcccccttatgggggggggtntgggctttaagtggggcccctggggggggagntctttttcgggggggaaatacctctgggggtccccccctctgggggggcctttgtgggggaaaccccctcgtgtggcccccccggggggggggggcctctccngaagtgttccgggggggggggcccccccgcccccgcttttcccgccggaaattgtgggggggtgggcgggccccccccgggggggggtgggcccctacacccgcgggggggggggggggg

SEQ ID NO: 145300 - DNA, 3126 bp, Zea mays
  Clone ID: MRT4577_64022C.1
atgaccttggagcctcatcccttgcagccaggctggcgttcattggactccgagtctttcggtttcagaggcgaggatactattgagtccacttctttgcatgtgctgacgaccttctgtggctttcaccccttggagctatcaacccatcccattggcttgttccccgctgagaaggaggacaacccaatgtggaaggatcgagttgagcatgccaaggatgtgtgggctctctaccctggacggaccgctcacctgacggttcagtgcatgaatgccctgtatcgtctgcaggcattgcgaggtgaggcaatgtcccagctgatgggactagtggagtctaccaagatcaccctggataacagggaggaccttgtggtcgacttgtccactgagctggtggaaaaggatctccaggtgaagcagatggccacccaaatccaagagcttgaggatcaggtggaggccagggagaacaccatcgagcgtcccccagtagcagccacctatcaggagttcctcagtactcagccgtcgttgttcaccaggccggaagacccactcgacacggatgtgtggctcagggtggtgcccttgcagttgggtctgctttattgggactcttccgctgcaggatacggtgctgacgacactcaggagcccattggtctcgcccggctaacgacggattatggccttgacctgtaggagctgtccaatcatcccaattgcttgttctctgcggaaaaggtgggcgaacaaatgtggaaagatggagtggtggatcccatgcatgtgtgggctctttcactagcgcagactggtcacatggtggtgcaatgcacgaatgcctttaatcgcctatgtcagttcgtaggctatcatgctgacacggatgagaagaagagagacagaatcaggaggggcctcagtactaagctccgcgaccgtctcaacacagtcagggccaacaactacaatgagttagtcaacgtggccatctctcaggaggactgcatcacagcccgtcagacagaaaagaagactccgaggaacagcaaccagccacagcaacagtaccgtcagggcaatgacaacagtgcatcacacagttttatcagtgcaaaatttagtgccaaatgtcagttaccctttcaccacacgaatgggggcattatgatcgcaacaccaggaggcagggttgccacctatcagatcaacaggcatgtgccaataagattgggtagtttcatatttaaaaccaccctcctaatcatgggattggaaaacgtggatatcattttgggaactaacttgttatcgcgacatcatgctgtgattgatgtcgcaacaagagtcattgaaattcactcaccaatggatggagagatcaccttgtacctacctgaccaaggttgtacccgttcttttgccttcgccttaatagagtcacccgtagagaggattcccgtggtctgtgagtaccctgatgttttcccagatgaattgccagggatgccaccctatagagacttagagtttgcaatagagctgcagcccgaaactgcacctatatccaagagaccctataggatgcctccagcagaggccagcgatattccgaagatggctttctctaccaaatatggagtttatgagtacttggtgatgtcattcgggctgaccaacgtcctggcatatttcatgtatttgatgaactcagtatttatgccagagctggacaagtttgtggtggtcttcattgatgatatcttggtctactcaaataatgaagacaaacatgatgggatatcagttgatcctgagaaagtgcaagaggtgatggattggaagcttcctaccaccgtacgacagattcaaagcacggaattgatcaaggactatgatttggaagtgcattaccatcctggcaaggccaatgttgtggcagatgcattaagtcgaaaagcccagtgcaactgtgtaacgatggattctaagatcgccactatgtgtgacgagttgcgcaagctgaacatggaagttgtttcctcggaactcagcatggattttattgtgtgtttgcccaacacctcccggcaccacgattcaatttgggtcattgcggataggctaaccaagatagctcatttcttgccagtacataccacccacagggcagaaaagtatgcagaaatatatattgaccaaatagtgcgtttacatggaataccaaggactatcgtgtcagacagaggagcaccgttcgtagcacgtttctgggagcaactgcaagaatcacttggaacccatgtgataagaagctcagcataccatcctcaaactgacggccagacgaaaagagtaaatgggattcttgaggacatgttgagggcttgtgtgttacattatggtaaggaatgggataagtgcctttctctggcagaattctcttacaataatagctaccaatccagcttaaagatggcccctttcgaggccttgtatgggagaagatgtaggaccctgctaaattggtcacaagctagagagagggaaatatttggacctaacctagtacttgaagccgaggataaagtcagagtcattaagaagaacttggaagcttctcaggccaggcagaagagctaccatgataaaagaaggaagcctctacaattcgaagtgggggatcatgtatatctcaaagtgtcacccaccaaaggtgttcagagatttgggatcacgggcaaattagctcctcgctatattgggccctatgaggtcaaggagacttgtggacctgtagcataccagttgaagttgccacttcatatgtcagccattcatgatgtgttccacgtatctcagctaaggaagtgtgtgcgcttacccatggaagtgctacctgagcctacttgtcatatcaagagcaccccgtcaagatattggaccaaaaggaaaggtcaactcgagcaaggtcaattcgaatgtataagattcagtggagcaaccattcagaagaaacatgggaaacataggattttctgcgctctagcttccccgattttctacctaaaggaatcggtgcataacccaaaacaccaacccccacctgccctttga

SEQ ID NO: 145301 - DNA, 1217 bp, Zea mays
  Clone ID: MRT4577_64023C.1
acatcagacaaaaaactttattattgaactataactcataagaaatctaaaagagggcaccaccaatgatgggttgttggtagaacgctgctgggtttgtcaaagcaagttggttgaatggcagcaattgttgcagttgtaagagggtgccagcgttaggctcagcgtgctggtagaacggcaacaactgtggttgtatcaagaaggtagcagggctcacaccagctagctggctgaatggtagtagttgttgctgctgtaaataagcaggagagttcaatgatgccagttggttgaatgaaacaaattcatgggggtaggcagcaggtagctgggtgaatggtagttgttgttgttgcaaataagaagcagagttcaactgcagactagttggttgtaatggcaaccacccccctgtttctgagagtagacagcaaggtttgcgagcccaagttgatgtagttgatgagccataatgctatgaaccaattcttcaactctacaggatgccaacaggcaatcgcagctggcatcttacctttatcacccttgttcctccaacaatcatcagccctattacagcagttacctttggtgcatttattggcacaaaacatcagggcacaacaactacaacaacttgtgctagcaaaccttgctgcctactctcagcaacagcagtttcttccattctaccaactacctatctttgactgtgctctttattagattcatcatcagctatcattcagtcatctatctgctggctacccgcaggaagttcttccattcaaccaaatgacatgatcggactgtcgtgcttatggacagcattctgcaaatactaccatatatgcaggtagctggagcgagcctctatagcttcttgacacactacagtgagtgccgtactaccaactggctgcgcctaacgctggcaccctcttacaactgcatcaattgcccccactcaatcaacttgctttgaataacccattagccttctaccaacaacccatcattggcggtgccctcttttagattgctaatgagttatagttcaaaaatgaagttttttggataacccctccgccctccccagaaataagaaagaacatttctagattcttatgtgcttcaagcctccaaatgtggttgaaagatattttgctctaagaccgggagaaatgaggaataaatcaacgttgtggtgcgct

SEQ ID NO: 145302 - DNA, 599 bp, Zea mays
  Clone ID: MRT4577_64026C.1
gaacaaacaaaaggcactgctcacgccatagcaacaccaagctaccttcccagtcatcatccagagccagatgggaagctaactgcctaggcagctacagctgctgctgctgctgctgctgcaactagtaccatctgctccctgtccatgacaccgcccgcaccagcagtggaaccaccaactgcttctgctggccgacaacgaacgctactgccgggacgttcaacgttgccaccgatactacccgatctccaatgacaagccgcaaccgctgaaccaactgtacactatcatggtggactgcaactgcagacgctcctgctcgaccattgcgccctaaacatgagagtacgacaacaacgaggcgagctaataaatataataaccacgcgcacaaaatcagatactgttaaattcacctgaaattatccatgggatacacctcctgcactaacacctcccttgtatctgtctaaacatgatgcgcactttacgacggcaatacagaccgacatgaacctgctgggctccatccggatggatcactacatctatagacgaacgtgtacgtgcgcttactacatgtacctgcgcatcgt

SEQ ID NO: 145303 - DNA, 137 bp, Zea mays
  Clone ID: MRT4577_64027C.1
attctctctgcatcaattccgtgcttgattgcttgtcatggctgcgcggtcaatgtccaaatccgtacccaattcgaatcctcttctacctctgtgctgctgctgctcacagacccaggccaagtcgtctcctcttc

SEQ ID NO: 145304 - DNA, 270 bp, Zea mays
  Clone ID: MRT4577_64029C.1
gagctcactttgtcggcggccgccctttctttttttttttttttttttttttttttatttttttttctttttttttcttttttatcttttttttttttttccccaaggggaaaaccctatttgggtttttgatttatttaaaccggggaataacctcggtggctatgatatcggttactaacatgtaaaccctctctgttgggggcacagcattgcaaaattctttggaggacccatttttcccgattggagtgaatgcatttgaaaaca

SEQ ID NO: 145305 - DNA, 678 bp, Zea mays
  unsure (1)..(678): unsure at all n locations
  Clone ID: MRT4577_6402C.1
gggccggccgggactttgccatccaacttcggccatgcctccctaatctcaaattgctatacttgggaggcaacttgtttgaaggacaaattccagattctctaggctatgtttcaggtctagtacatttggatatgtcctacaataagttgactggcaaaatccatagcatatttggaaaacttttagggctatcttttttaaacctcgaggaaaatatgtttgaagcgagtgatagtgcaagttgggatttctttgttgacctgatagcgtgcagttccctgacggtgctttcattggctagcaataatctgnagggagctataccaaattccattgctaacctatccaccaacctcagaaatctactaatgagcgacaaccacctatccggagtagnccccccaagnattgggaaatngaatggnttaatcgaacttgaacttgatggcaacaattttaccggtacaattgaggattggatgccaaagttgacgagcctacaaaacttatatctcaatgacaacaactttgatggtataatcccaccttaattctattagtaaccttactcaattggcacttttggatgtttcaaataataaattcactggttcaataccacctagcatgggaacatttaacctctattcaatttgaccctaagcaacaacaatt

SEQ ID NO: 145306 - DNA, 722 bp, Zea mays
  unsure (1)..(722): unsure at all n locations
  Clone ID: MRT4577_64030C.1
gccggccggtccgggaaacctacacaacttacgacgnctttcccatttgcttcatccccgcctagacctcatctaacaccttcagatttatatcttgaggagaaatcgatgtccgaacccaagggtgaccctcggagattcccaagaacagggcgctccgaaagtatgtttaccgccgccgcgatgtacaggcacttcttgacatgcacaggcaccaccttgtccagcttttccccgcacgccccagaagaaggatccagaggtgtctgaataagaaacccatgcttctcctcaagaatgtgcgtaaggcttaataaagatagctcctgctagttgatacaaccgagccagtgaagacagatctaacgcaacttgttcattgtccctgagtatgattgcaacaattgatggggtctacaacacatcagagcttcaaccagcgtgagatcaagcctgagatgatcaggcactaccttgctgagatttgcttctcctacaagacgtgcaagaacagatcgcccagtatcggtgccacccactcctctcgttttattcctctgaaatgacctggtacccgacttcgaagtctaccaatagatcattggacagggacgatcagcttttctactcggtctggacaggatatatgaccaaaacgtgttggtctgttgcattccatctcaccaattcaatgtaatcattgcactaaaataaagctgctc

SEQ ID NO: 145307 - DNA, 1617 bp, Zea mays
  unsure (1)..(1617): unsure at all n locations
  Clone ID: MRT4577_64031C.1
ccagatcgcccgccggtggcttggctacttgcttgcttgctgagttgctgactaatggcggccattcctagcggagcgatagcccaagccggagctgagcgtccggcggcctgaacaggagaggcgagagagagagggtgcaggtaccagaagaatgggtccgccgccggaggggcggcggacgctggtgctggtgaacctggcgtccatcatggagcgcgccgacgaggcgctgctgccggcggtgtacccggagaggtggncgccccgctgcacgccacgcccatcgcggatcggggccctcacgtatgtaccggtccatcgtgcaggtcgcctgcctcccggcgtcgcgctagatggtgatactgcacagccgctcccccgtcctcgagctgatggcctgcctcaggggtgggacggcggagggagccccaccgccgtcccaaatcgcaaccaatcgccgagttgctcgtgttaaatagctcttcgcgtacgacacggcaagcgggctgcgagcctgcgacggcgactctctcatctgctcactgctctgcttctccactccgctccgctggcagcgcaggccatggcgacacaggcgctggggccctccctccgcctcctcctgctgctaccgctgctcgccgccgccgccgccgccgccgccgcgttgtctcacccagcgcacgagttctgcgcggtcgggggtgacgcctccggctgcggcggcggaggagacggcacgaggatcctgatcaagggcgggacggtggtcaacgcgcacctcgcggaggaggccgacgtctacatcgaggacggcgtcgtcgtcgccgtccgcccaaacatcccggttgatgttgataatgtcagggtaatcgacgcaacaggaaaatatgtcatgccaggtggaattgaccctcacacgcacctggagatggagttcatgggcaccgtgaccatagatgacttcttcagcggccatgctgcggcactggcgggtgggacgacgatgcatattgactttgtcattcccgtgaacggcaacttgactgcagggttggagtcctacaagcacaaagccgcaaaagctgccatggattatggctttcacatggccattacaaagtggaatgatgaggttgcaagggaaatggaagtgatggttaaagaacatgggataaattctttcaagtttttcatggcatataaaggctccttgatggtcactgatgacctcctcctgcaaggcctacggaaatgcaagtcgcttggtgcccttgctatggttcatgcagagaatcacggcaagcgggctgcgacggcgactttctcatctgctcctgctctgcttctccactccgctccgctggcagcgcaggccatggcgaacaggcgctggcgccctccctccgcctcctcctgctgctaccgctgctcgccgccgccgccgccgccgccgcgttgtctcacccagcgcacgagttctgcgcggtcgggggtgacgggtgatgctgttgcggaggcagcggatggattgacattgggataacggggtcgggacggtcatccaacgcgcacctcgcggaggaggccgacgtctacatcgaggacggcgtc

SEQ ID NO: 145308 - DNA, 1401 bp, Zea mays
  Clone ID: MRT4577_64033C.1
atagtgagtcgatattagaatcatctgaatcgtcaagggccattccatgtggcaacgagagaattgccttacgatccgatgcaattgaatctgtcactcgctcattatcatgggaggaggaggtgagctcaccgtcgcctttacttgactcgggaaacttaaccccaatctcaagcgtggacgacgatgaacttgaatgtgttgcctttgtacaaaagattgtatcatctgctgggctaggcgacctgcggttggatatggtcttcacaggctggtacttgcctgactgccctgtagaccctgcattgtgcgacaagctattggaccggaaggaggaggctgctaagtcgagggagcggaggtcgaaccaaaagcttcttttcgattacgtgaacatggcagtggtcgagattggccatgacaccttactatgcggtttcccctggaggcaggcgtgctccatcctgtcggaggagaccccctctcaagctttggcggggtggtctccacactagctgagggaagcctagcctgactcgtgggcgttcgcggggatttgaagatagcaacattaatggatctgaatcgtcaagaagcattccttgtagcaacgagagaattgccttacgatccgatgcaattgaatctgtcacgcgctcattatcatgggaggaggatatgagctcaccttcgcctttacttgattcgacaaacttaaccccaatctcaagcgtggacgacgatgaacttgaatgtgttgcctttgtacaaaagattgtatcatctgctgggctaggcgacctgcggttggatatggtcttcacaggctggtacttgcctgactgccctatagaccctgcattgtgcgacaagctattggaccggaaggaggaggctgctaagtcgagggagcggaggtcgaaccaaaagcttcttttcgattacgtgaacatggcagtggtcgagattggccatgacaccttactatgcgcctacccctggaggcagcagtgctccatggcctgggaggagaccctctctcaagctttggcggaggaagtgccacgccatatgagggattggctccatgggtcaggaaagtttgcaggaaacgagaacgacgacgccggaacgttgttggagagaatcatgcggcaggaggtggaagggagaggctgggtgaagtccatgagatgggagttggatgagatcacagagcagattgcaggaaaggtgctggatgaaatagtggtagaagcagtggatggtctcgggatttgttctccgtggccagaaatggccatggcaataccgaatctgtagtagtagcgattgctctgtgtatgagaaatgagaactgctcttaaaattattttgtgctggaaaaaaaaactctcgagc

SEQ ID NO: 145309 - DNA, 750 bp, Zea mays
  Clone ID: MRT4577_64034C.1
tgtgaagcgcgaggaggacgaaagggaccttggaatcttctcgctgcaccgaccgaccaaaccctaggcgttcggcgggcgtcaccactgctgctaattaagggtgcctcgcgtctccttggtgctccttgaggttttttctgtgtttttatatccttttttatattgcatgtttatttttttctttttgttgttttcttttgtgtttcttccctttactaagttgtcgttgttttctttttttttttttttatcttttttttttttgtgagttttttactgttttcaatttattttttcttcttttgtttttatctttttttattttacttttcttttcttttatttatttttgttttttttctctttttttttttatttttttcttatcttgctttgttctttttttttcttttatttaattttttttttcttttatatttttttttatttttttattagttttgtttgtttatttgttttattttttcttttgtggttttcttttattttttttttttatttttattttattttttttcattttattatttatcttttattttttttgtctttttgttttctaatatatttttgtttttcattttttatttattgtgtttccttttttatttttatgtttaattgattatattttttttgtttttttttttgtatatgggttttttattttatttttttttttattattatctttgtttctttctttttttttttttatcttttttt

SEQ ID NO: 145310 - DNA, 369 bp, Zea mays
  Clone ID: MRT4577_64036C.1
atttctttgggaggagatctctttttcatctatttttggttattttgttctctggttgtattgtttttgaatacagtttacttagattttattgctccactttttgataaatatgttccacttccggacagcaatttaaaatcgtgtattgaaaaacttacttcatctttgaagtatccattaagtcagatttatattgtggaaggatcaaaacgttcttcacattctaatgcctatttatatggtctttttaaccgtaaaaagattgtcttatacgatacactgatcgatagatccgtgttggatgtttccgaacttttctctaataaaaaatcaaccaaatcaaatgatactgcagcaaatgataac

SEQ ID NO: 145311 - DNA, 180 bp, Zea mays
  Clone ID: MRT4577_64037C.1
ggtaaacacacaaggcaggctgaatagcagaaaattaagagtcaatttggtgaagcgcactaaagagctcaaagtaaagcaagcacagcttgctaaggcaaagacagaagtagacatgaatccaaaccttattgaggtagcacttggtgtgagaactccaaaacaaaagcagaaggaaga

SEQ ID NO: 145312 - DNA, 681 bp, Zea mays
  Clone ID: MRT4577_64038C.1
cattgggtacctcgaggccggccgggagatcttttcttatattacgccgcctctctccgccttttccttctctcctcggcgatgtgtgatcctggcttcctgactcggtgcatcgcaatcgcgctagaggtacagtacattcgcctcctccccatcctttctccaatcgccgaacgaaggcccataacctaccagcctttcgaatctgattgagcactgaccttgtggaacatcacaatttgcctgctcatacaaacgaaaagaagcgagaccatttttcagagcctattagaatagaatgtttcgagttcccagagcagagagagtgcacaagctttaccaactcatatgtactggtcaatgcaccagcaccggacccaacactgttagtgactgtcacgcgggttgccgctaataaaactgctgtgactgacgacgatacccctgctcctcaacaaaacgagataccactgcgtggccaaggccacattcatgctcctgagcacgctagactgcgcgatcttcctctcctgacccatcttcactcgcctcggaaagtgggccaccatagataacttcctgcgctggtgattcatccccgacaacgcgctcatcagtgctgtcatcagctgcaccctcgtggtcatcgagttcctaatgtgacgaccaccggcattgctg

SEQ ID NO: 145313 - DNA, 851 bp, Zea mays
  unsure (1)..(851): unsure at all n locations
  Clone ID: MRT4577_64039C.1
ctgttttgtaaagcgaaccgctgggcggggctgggatctttcccccaaaagacctggggagggggtttctatgtatgcagatgatgtggcactcttcttacacccttcggcagcggatattgctataactctagatattttacatctatttggggaagcttcaggtctccncacaacgaacggagggtaatgtttatcccattcagtgtgggggtgtggagctggaaatggttcaggatcttctcccttgtggcatctcgacctttccgtgtaaatacctggggctgcctctgtccctgaaaaatctcaccaaggatcaggtgcagcctattgtggatagaattgctgatcagctgccaggctggaaagcagatttgatgacaagagcaggccgtaaagtgcaagttcagcatgtgcttaccggaatgcttatttatcttgctatggcagtaaatattccgtcttgggctattaaggccattgataaaattagaagaagtttcctttggagagggcgcaaggaggccagaggtggtcactgcctggtggcctggggcagagtctgtagacccctacagctgggcggtcttggcatttctagtcttaaagaacttatctgggccctgcgcatgagatggctttggctccaaaagactgagcctaaccgaccttggtgcagccttcccccnnacgttccggataaagcaagggctttcttctcgatggtgttgacttcaaaggttggtaatggggctaatactttgttctggactgataaatggattcatgggcagaaaattgcagatttggttcccccctatttgatatcattccgaaaaaacccccccaac

SEQ ID NO: 145314 - DNA, 310 bp, Zea mays
  Clone ID: MRT4577_6403C.1
gggggccctccggcagcccatggaactgggcgcggacgcgcctgctctacctgggctcacattgtgctgttcatcttctacctacccgaccggacaactcccctgaaagtaccggtggtacacctgctagctgtcttcggacccggacacattggacaagaaccgatagctttatgttgaccaactgctcctggagcttgctcttggcactctgaggctggcgtccctagcttctatgttcgattgccctctagctgtcataggtgtggtggttcaaagcgagtgccaggagttcatgcactgctacctc

SEQ ID NO: 145315 - DNA, 428 bp, Zea mays
  Clone ID: MRT4577_64040C.1
gacgtccggtccgattccctggtttacccacgctttcttaggctcctacaaatcctgttcgcaggggggactgttttagtcagcaccaccgctcacgagcaccatggtgaggcacccacctgcgcccgaagcagcgagcacatgctcgcggagatccaccgttgtgaggtgaccgaggacaggcacaacgaggactgggagagcctggtggcctcgcatgacgaactgctgacggctctagatccacacgatgataaggcctactaccgcggcaagatcgccgtaaaggctgagcatgatggttacaaacacaatgctctagcctcaagttgatgcggcgtacgcttacactaaagcggagaagaccaagtgccctcctgctgatatgatgttacatggcggagagaaagcctcatcttacaatatgg

SEQ ID NO: 145316 - DNA, 356 bp, Zea mays
  Clone ID: MRT4577_64041C.1
accccggaaaaggccttaaaaaaaaggacgggcttaaaaaaaaaaacggttccaaattgggggagacaaaacaccgggaaacctaaaaaaaccttgtttttgaaaccagggcttggaagggtgaacccgggaaaaactggaggggggcccaagggggccagaacaggaataaggggcccaaaacatttggcccaaaaaaggggaaaccttggcttttcgggaaaactaaaatttggccccaaacagaaaaaaaattttggggggggggagcggacaaacaaaaaaaatcccaaaacggtttcctattttttggccaaagcctttggatgggataaaaaggggggccctccgagccc

SEQ ID NO: 145317 - DNA, 454 bp, Zea mays
  Clone ID: MRT4577_64042C.1
atactatcaattttttgagataaaaataaaccaatatattgatgggtactaggaaacacatgccggaatgagggcaccataatagagaacattacatatgtaaactaaaagatggcaccacacaatgaagggttgctgactagacaagaaaggatctaacaaagagaaccggtcgtatggcaacaattgttgctgctgaaggaaggcagcgaccaatgggtaagccactgtcaatggaacaagcaaacagatgacgatgatgtaggaacgcaacagagtacgacatagttagatggctgaatggaagcagctgtcgcaagtaggcaacagggtttgccacagatagctgagtaagagctggaacaatctgttgcaacaattctagatgcaggaatgtaggggcataggacacagtgagcgggcaataagaaagcagttgttgctgtagaaggaa

SEQ ID NO: 145318 - DNA, 2840 bp, Zea mays
  Clone ID: MRT4577_64043C.1
aatcaagaccagaatatgtattgcgccgagtctgataaacctgcaagagctcgcacttcaaatttgaatgaagaacttggtcaagtccatactatactgtctgacaaaacagggacattaacatgcaattcaatggagttcttgaaatgttccattgctggtgttgcttatggaagtaggcctacagaagttgaaacgtgttatggagaaatagttgaaactaatggcagttttgggcgcaaggacactactgaattcaagagatcagtcaagggatttaatttcactgatagtcatttgatgaatggaagatgggccaaagaatgttctagggatgctatagaaatgtttttccgagtcttagctgtttgccatactgcgattcctgtggcagatggaaattctgctggtatgccttatgaagctgagtctcctgatgaagcagctcttgttacagctgcaagagagtttggctttgaattttatcataggacacaaacaactatatcagtgcatgagtacgatcctgtcgttggtggaaaggttgatagaacatataaactactcaacatcttagaattcagcagtgctcgtaagcgtatgtctgttattgtgaggacagaagagggtcggctatttctgttctgcaaaggagctgacagtgtaatattcgaaaggctctccaaggataatggaacagctcatctgaccaaaacaaagtgtcacattgatgagtattctgaggcaggtctccggaccctggcacttgcatattgtgaacttactgaagaacaatatgttgtatggaatcaggattactcgtctgccaagaattctgtacatactgatcatgttgcagctgttgagaaggtgtcagaagacattgagaaggatttggttcttttgggtgctactgctgtagaggatagattgcaaaatggggtccctgagtgtatttataaacttgcacaagctggaattaagatctggattttaactggagacaagttggagacagctgtaaacataggttacgcttgtaacctactgaggaaagagatggaggaaatttttatcacactggagaactcaagtacaagtgcttcagaggggtccagtggagaaggaaacaaaattgccacatttgaggaaattgatagaaaattaaaagatgctagaggaaagatttcccaaaaaggaacttcaacttcatttgctcttatcattgacggcaatgctctgacacatgctctcacgggcagccttaagaactcatttctggatctagcagtcaactgtgcatctattttatgttgtcgggtttcaccaaaacaaaaggcactggtcaccagattggttaaaattaggacaagtaaaactactttagctattggtgatggagcaaatgatgttggtatgctacaagaggctgacattggggttggaataagtggtgctgaaggaatgcaggctgttatggcgagtgactttgcaatagcacagtttcgttttttagagcgattacttcttgtgcatggtcattggtgttatcgtcggattgcagctatgatatgctattttttcttcaagaacatcacatttggctttacgcttttctggtttgaggctcatgctatgttctcagcacaacctgcgtacaatgattggttcatatctttctataatgttgccttcacatctcttcctgtcatcgccctcggtgtttttgacaaggatgtctcttcccatgtttgtcttgaggtcccttcattacatcaagatggcgttaataatgtattcttcagttggtcccgaatactcagttggatgttaaatgggatgtgctgttcaataattatttactttggttccctcaacgctattctggttcaggctgtccgacaggatggtcgcgttgctgggtttgatatccttggggtgaccatgtacacttgtgtagtgtggactgtgaactgccagcttgctctctacatcagctacttcacctggatacaacattttgtcatctggggcagcatactgatttggtacactttccttgtcatatatggtctattttccccagcaatatcaaccactgcatatcatgtttttgtggaagcttgtgcacctagccctttgtactggctatccactctaatgattgtggtgacagccttgatcccattctttgtctacaaaatatcgagaacactctattatccacagtatcatgatcaagttcagagggctaactcaaagaattggtagtgcctgttgtataagatgctactgaatgaggggatgtacagtcagtaatttggtttaacataccacatgctttgctttgtagatcatgatgcagaggtagtgtatataaacaaagttggctgtttaacagatcttgtatttacggtctatgcccacaaagttacagtttcaggttgtggcagtgcgtctgtcaaatatcagaacacaatggtgacttcgcagtcacgcgaaggaactgcaagcggcaaattgattctttggacctattaccccactaggacacgtttttcttcggggtgccatcatggaagcagattgcaattaggatttatatagaatgatgtatagcatgtcgataactcgaacatgacttcctcgatatatgtagtactgtcttccaaaaaatagcattcttgtagcatcaaacggccaaacctatgttcgtggaagcatagttaataccctttattgctccaatggtttgtacatagttgtatgaatatatgagatggatcttgatgttgtttaacatttgatatgaaatgaataaatgatatgatgttatctct

SEQ ID NO: 145319 - DNA, 406 bp, Zea mays
  Clone ID: MRT4577_64044C.1
cccagaccacagctcgacactcagtacagcttcatcagctaagagcttgcgaagcaggaggcagttcaagaagaagccgatggcggttgtgagcagcagatggacacaggctgaacccctgggccgagcccttcgttccttccggagcactgtaccgtggtctgcggactatggaagctatgccctatcacgacgtctaagactttatactcaagtcatagcgcctggctgtcgacttcatcgccttccgcaaccgcttgctgcaccagtacctgaccctatgtctattcgacaccgaggactaaccttacgaccacgtacacatctgtctaccttactacttaatctcactcacctaccactgccacaagtgcgatcggcaagacaccctcttcaagaatgctca

SEQ ID NO: 145320 - DNA, 203 bp, Zea mays
  Clone ID: MRT4577_64045C.1
gagccggccgggatcttgtcttgatcctctggtggcgggcctggcgtcgccatgctctccgcaccaccggccactcagcaggggggcggcctgtccgagttctccgggctaaggagctccgcgtcgctgcccatgcccgaatgccacctcgacacttatgtccgccgtctcctcaggacccacgcgggtcgcacgagcggcgg

SEQ ID NO: 145321 - DNA, 131 bp, Zea mays
  Clone ID: MRT4577_64046C.1
caccatactcacttccctgcaggctgctgctgactcacgccaatgaaaaaatcatttccatcgtccgtgcgagaaattcaacatatataatagtgcaagcaccggaaaataaaattctactgtgttctgag

SEQ ID NO: 145322 - DNA, 386 bp, Zea mays
  Clone ID: MRT4577_64047C.1
gccggccggtccggggaccttcgggtaccaagtttcgcctccccatgtttatcgccgaccgccttgttcgatactgtcgatacgcatcccgatcacctcgagggttccacggtctcgcacgccgcgtccacattccccccaatcgttcggaggtttcgagccaaatcacgactcggagaataagaacggttctatcgaccgctcgtaaggctcacacgacccatgagtgtcgacgctgtctccccaccaacgaaagatactgcaacatcggccggcagaatagcgagaccgcggccaattgtacggaattcagccctaaagttgcccgcgtgaaacgtcgtcacatgatttgcgctcgccaaaaaaaaaaaaaaaaaaggccccta

SEQ ID NO: 145323 - DNA, 307 bp, Zea mays
  Clone ID: MRT4577_64048C.1
actgaaaaaagcctgcagatgaacactgtactgagtgaaacgagtgcttggattttacagaaccaaatctaaggagaaactggcatggacgcatggagcagacttttagttacacaaaaacatcttataacagctcctgtcaccaaaaaagcactctgtatagggcgcaaaagaagcaactttttccagtttcaaaaactaaccggaacttaaagggcaagcgctgcatgttaccaacctatgggaggctgctcacctaattgcacgcgcaggtcaaaccgtatattggagtgtaaatcacgactca

SEQ ID NO: 145324 - DNA, 857 bp, Zea mays
  Clone ID: MRT4577_64049C.1
catcgagatgacgccaccctcctccggccgtctctcggccctcatccgccggtgcgcagcgagcggcgcgctctccccaggcgcgcagctccacgcgcaggccctggtcggcgggcgccttccggacaccaccctggacacagacctcgtcctgctctacagccgctgcggggcgctccaccgcgcccgcgaggtgttcgacggaatgccctctccgtccatgcacgcgtacaacgtcctcctcgcggcctcccctcccgaggcggccgtgaagctcgtctcccgcctcgtcgcctcgggcctgcgccccgacaggtactccgtccccgccgtgctccgcgcgtgcgccgagtcgcgcgacgcgctcctcggttccgtgctccacggtttcgccgtccggctcgggttgctggccaacgtcgtggtctccggcgcgctgctggacatgtacgctaagaccgggacgctgggtgacgcgggcagagtgttcgacgagatgccggagagagacgccgtcgcgtggaactgcatggttactgggtacgcgagggctgggaggtcagaggaaaccctggaactgtttcggaaggcgcagatcgagtccgcgggtatggcgagggatctgcgggccgtgccgagcgtgctgaatgtctgcgcagacgaagggcagctgatgaaagggagagagatccatggcaggatggcgcggtgccttgcttctagttcagataccgtggtggggaacgcgttgatagacatgtacggtaagtgtggccaggttgacggagcgcaggcggtgttcgcgagcatggagggagagaacgtggtgagctggtcgacgctgatatcttgctacg

SEQ ID NO: 145325 - DNA, 444 bp, Zea mays
  Clone ID: MRT4577_6404C.1
ggaaaaaaccggcccaggcctccccgggtttcaacacaaaccagcggggggcaaagaggccagggggggggggggggcagtcccaaagggaaaaaaaacccaaaaaaaccccccccggtttttttaattgggggggggttaattaaaaaaaaaaccaggcaacgacaaaaattcgaaaacgggggggggccaagccacaacaagaaatttaaacccaccacccccaaaaccctccatattccaagagacatccccccagaaaacggggggccaaccaccaatctaaaaaagggggaaccccctaccccgcccttgaaactttttattgggggccgaataaaggttttggcccggggttactgatcgaccggggaggcaggcgacccactgatcgaccggggaaggaggggaccaaacgggtagcgggtaaaaaccccggggaaa

SEQ ID NO: 145326 - DNA, 132 bp, Zea mays
  Clone ID: MRT4577_64050C.1
gtcggagtcagcgtctccgtcccaagcgtcggcggcggcggcgcaagagtcctagacaggcggctgcagcgatccccgcccgtggaggcactgcgggagcgctagcgcagtcaaaggctccaaaactctaca

SEQ ID NO: 145327 - DNA, 339 bp, Zea mays
  unsure (1)..(339): unsure at all n locations
  Clone ID: MRT4577_64051C.1
agcgtccgctcaacgtccgccagaatactccacgaagcatggttaaaggtcagggcttgtatgagcctttatatgtgccttcatagttgcttacataggagataacgcgctagacaggtgctggtaggttactgaaccgctgactataatcgcgtacatcggttaattcaactcaaaaagcatgccattgagcatgtaatttatggggtgatccaaatgctgtaccaaaaaatgggggatgaaaaagaggatactgganataggaactggattatgcaaaaagaaataatgcaaaagaaagatctcatgattataaagggtgcaataaaggatgcaccg

SEQ ID NO: 145328 - DNA, 1188 bp, Zea mays
  Clone ID: MRT4577_64052C.1
tctgatccaaataagttgtctgatatctttgaaaatcttggccgtagcaacagaaatgtctttggttactctggaaatacgagggatgatatgttgccactttcaagtacttccgaggaatctcgctttatgaaaatggagaacaataattcccggaaaacaggaagttctgttgctgctctcaaagaactttgcactgttgagggatataacttagtttttcaagcctgtccatcttcagcagatggtttagttgggaaagaatcttatgctcaggtacaagttggtggacaaattctaggcaaaggagttggattaacatgggaagaggccaagctccaggctgctgctgaggctcttggaactttaagatccatgctaggtcaacttggtcataaacgatctggctctccaaggtcattggcaccaaattttaacaagcggttcaagccagattttccaaggaccgtacaaagagttccttacggaacatattctaggatcgaaggtcatgttccttaagaggtctgcataaatgatgtgcctgggcgctaaacttcaaaactggatgaagctttgaactgtcaggtcttcacacattgaatgcaagccgtagattcctggcttatagttggcttccaaggctctcacaagctgccactggctgagagtaccgacgaatataaaatacgtacttcatctaagtaagcgccaagagattgaaggattaatggtggccataactttatgcagaatttcattgccatgatcttaccagtcacaagtgttaccccatgttgtcaacttggcataatcgttgacctggaagtttaacggttgaaccagggaccggcatgcagctccatttcttttttggtgtgtgtccatggatcaaagagcagcgccgtggttgggcatttttacccttcctttggtttaggtgaaagttggacctctgtagctcggagtcttagcaggtagccagtttttatttctgataagtttttaggcaagttgtaagttgtagcacaaaatcgatcacttgatagtattaacattgcattgatgtagacatgtagtcatctttgtagctgtactctaggcaagcaacacgaatccagtggcttacatcattcatttgtatgctgtagtcatcttgtaatatatggcccatttctttgcaaaagg

SEQ ID NO: 145329 - DNA, 437 bp, Zea mays
  Clone ID: MRT4577_64053C.1
ttgggtacctcgaggccggccgggattttgtttccttcacactcccgccgtatcttctttcattacggcaggggccagccagcttttatggcgatgtccgtctccagcctaacgctccaagccgtcttccgtcgttgaatcatcgagataagggacacggtctacgaacatgaacgaggtcgcctctcgcgcatcctggctcgcaaccttagatgctgctccgataacggtccactgatacaccaccggcgcggaatggggataccagacgccgaaacgctctcactctagcttatgtacgtgctggcgtctaggagctggaagaggaggtgactctgcctcttgaagaccctagtcagggttgtgacgtccacaggtcttcctgcgttacgatgcctcggcctgacattggaactgtctcgaatagggtaaagtta

SEQ ID NO: 145330 - DNA, 259 bp, Zea mays
  Clone ID: MRT4577_64054C.1
tgggttttttttgtaaacttagtggctattttttcctttcaccagggggaggtttaacaaaagccttcggccacaacaccacgcggggggggggcccctggaaccggaccgcaaaagcgggccaatgaaggggggcaaggaaccaacacaggccaaaagaaactaggcaaaagggggtccggaggggggacacaaaaccccagcagcaaaggagaaaccccaggggcgaaaacccaaccccggggtccacagaaagaaa

SEQ ID NO: 145331 - DNA, 351 bp, Zea mays
  unsure (1)..(351): unsure at all n locations
  Clone ID: MRT4577_64055C.1
gcccaaaacccgggtcgacccagcgttttttcaattctccccttcataaccatcctgtgcggtcgcctgtctggcgctgccctcactccccgttcttgctctggacctatatatgcccatggttccaatctgctcctggtttgacgggccatgcctttggtctcctctcttcttcacttatgtttcctctttggcggcgctctctcttgggggtggcccgctggttgcctcctttctttgtgcnnttttttttcgtttttcttaaccctcgggcctgtcgacttcttccttcttcattcttttgctctacgttttccttcttctcctttcctttttttcttggttttttta

SEQ ID NO: 145332 - DNA, 1013 bp, Zea mays
  Clone ID: MRT4577_64056C.1
cggccgggaaaaaaaaaaaaaaaaaaaaaaaaaaaaaaaaaaaaaaaaaagctcgagccgggccgggacgttaccctccttcatactttgggaccctcgaggccggccgggccttctttccctccccatcgcgcgagcgccacacccacacgaaggatcccgaagccgaagagaaccctaccgaggaggcagaaaatccgtaggcgcgcctcatacgattccgagatccgtgcctcttatcggcagccatgatgctgcgcgcggcgggcaggcgactcctcggcgtaggaggcggcgagccagcgcccgcggtcgctgctgctgtggcggcgagcaggagcagaggataccacgagcgggtggtggaccactacaacaacccgcgcaacgtggggtccttggacaaggacgacgcggacgtcggaacggggatcgtcggcgcgccggcgtgcggggacgtcatgaagctgcagatccgcgtcgacgaggggtccggcaggatcgtcgacgcgcgcttcaagaccttcggctgcggctccgccatcgcgtcctcctccgtcgcttccgaatgggtcaagggcaagcaagtagaggaagtggtagccatcaagaacaccgagattgcgaagcacctgtctcttccaccagtgaagctccactgcagcatgctcgctgaggacgcaatcaaggccgccgtgaaggattacgaggcaaagaaagggaagaagatggccaaggcagaggagcaggacaccccatccccgtaagagcgacagctagtaacctgaagcgagcagtactcgtataacggctaacgagcgaggtactcgtgtgtgcagtgtgcctaaagaagcatgtatgtaatgtaaagctaggtaataacgatgcttgggttttcatagaataagcgaacttgccgcagtgtttttttttaaaaatctgctctgcacatgaataaggtctgcccgttgctctttaaaaaaaaaaaaaaaaaaaaccccccccccgcggcc

SEQ ID NO: 145333 - DNA, 687 bp, Zea mays
  Clone ID: MRT4577_64057C.1
aagtacctggggagggaactttccctccccattcgcgtgagcgccacacccacacgaaggatcccgaagccgaagagaaccctaccgaggaggcagaaaatccgtaggcgcgcctcatacgattccgagatccgtgcctcttatcggcagccatgatgctgcgcgcggcgggcaggcgactcctcggcgtaggaggcggcgatccagcgcccgcggtcgctgctgctgtggcggcgagcaggagcagaggataccacgagcgggtggtggaccactacaacaacccgcgcaacgtggggtccttggacaaggacgacacggacgtcggaacggggatcgtcggcgcgccggcgtgcggggacgtcatgaagctgcagatccgcgtcgacgaggggtccggcaggatcgtcgacgcgcgcttcaagaccttcggctgcggctccgccatcgcgtcctcctccgtcggtgagcagagccagatccttgtcgcgtctcgctcgcgtcgcgcaggagtaggttgtcatgcaaattaaatttgatgactattattatctcaccaattatatcttcgctacggtgatagccataagaaagagaaaccgtaactgatcgtggtaattgtacagcaaaattacgatgggtcagtgttgattttggtgatttcggaccttcagctattggcgtagc

SEQ ID NO: 145334 - DNA, 804 bp, Zea mays
  Clone ID: MRT4577_64058C.1
ccggccgggactttccctccccattcgcgtgagcgccacacccacacgaaggatcccgaagccgaagtgaaccctaccgaggaggcagaaaatccgtaggcgcgcctcatacgattccgagatccgtgcctcttatcggcagccatgatgctgcgcgcgacgggcaggcgactcctcggcgtaggaggcggcgatccagcgcccgcggtcgctgctgctgtggccgcgagcaggagcagaggataccacgagcgggtggtggaccactacaacaacccgcgcaacgtggggtccttggacaaggacgacgcggacgtcggaacggggatcgtcggcgcgccggcgtgcggggacgtcatgaagctgcagatccgcgtcgacgaggggtccggtaggatcgtcgacgcgcgcttcaagaccttcggctgcggctccgccatcgcgtcctcctccgtcggtgctcaatggtcttctcattaggagtgatagagcagaagctgtatcaattccagttggaataattcctgcaagtggtggttgttgagaaaatgcctgctgtgccgcctcaaggtttcgtgtcactcacagcttcctgggggaaaaggcatgaacacccacaccacagatgggtgcatttgcatggaagatgtgtgttttttcctaacttcctaatgacattgacagtggaaggcgcaccttttcttggtatatatatgcatccagaaaccatgccatcttttgctgaagtctgagcacgaacttgtcggcgtcacgctatctatcctgctctcccctgactgacta

SEQ ID NO: 145335 - DNA, 301 bp, Zea mays
  unsure (1)..(301): unsure at all n locations
  Clone ID: MRT4577_64059C.1
cccacgcgnccgcccacgcggccgactagnncnagancgncagcaagcgcaccaggggagcagcgaagcncggagacggagagcngaagccngcaggcaagcggaagnncaacaccaaggaagaggagccagaacagnacnggcagaccgcgggggagagggagggggagaaccccangangacaccccngcccnacancancancnncggcagggccacccccnncgacaaccgcgccaacgccnncgccaaaggcnggaacaaggncccngngcgaagaccgnaacgcgancagccagc

SEQ ID NO: 145336 - DNA, 273 bp, Zea mays
  Clone ID: MRT4577_6405C.1
tacggatcaaggtccggatgaatcaatagaccagaataaaaccaaggcatcgccaatgtaccatggccatcattgatttcatcttggtttgctcaatcgtgtcatgaaaaaaaaaaaagaaaaaaaaaaaaaaaaaaaaaaaaaaaaaaaaaaaaaaaaaaaaaaaaaaaatggggacacgaacccaggtgctctaaaattagaacgaccagctgccaattcaaagcctatctcactgagcatctagaatcaatactacatgcgcaggataaa

SEQ ID NO: 145337 - DNA, 306 bp, Zea mays
  Clone ID: MRT4577_64060C.1
ggcaaaacagaaacccttatttttaaggaaacgggggaattgttcttttgcaatttcctttttaaaagccaagctccaaatttttaaaaaggaaccccgccatttaagggggccgatatacaaatttttacaaggggatttgaaaaacctacggaagggcttttttatttgcaaaaaaaaattcccattttgtttttgcaagaaaacaatatttttgaaaaattttaatgattgggctgggtaaacaattttcgggaaagaaaagatcaaaatattgggattggataaaaaaaatctttttgtttt

SEQ ID NO: 145338 - DNA, 582 bp, Zea mays
  Clone ID: MRT4577_64061C.1
ccggccgggcctggaacgctgcgccaaaacggcaaaaccctaccctgacctgaaccccaaacccgccgcgcctcctcctttctcgtactgcaattcgggactagccgccgccagtctcgatggggaagaggagcggcagcagtaggaaggacaagaacaaggtcattctcccaccggagctgccgccggaaatacacgacgatgaggtggatgtcagcgaggaagacatcgagttctatgccaccgacagcagtaacgttacacccttccgccacttcgacaagaagtccatcgacaggtatgtcgggagggttgccgggcgcgacgagggcgaggtcgagcgcctctacgaagagcgccagaagcggaaggccacagaatcgtcggggagaccccgcgaggatgatgattatttggaggtcgaccccgtcgacgcactccccaccaagacgctgcaaggggagctcgtctacaatagagctaagaaagcaaggtctgaagacaattccggcagtgttaagactaaagctcaagagaatggtgcaaatgccaagacaaatactaaaaaagatgaaccatatg

SEQ ID NO: 145339 - DNA, 581 bp, Zea mays
  Clone ID: MRT4577_64062C.1
gccaggcgttctgcaaggggtttttcaccacagttggcgggactcatgggaggggcaaaagcatatgtgggtgagatatttggtttcaagaacaagcgcttcgatagtccataccatcatcagcagcaagctcacccaagagctaacccggggacatagcacgagagctatgccgtgacacatgatgaaccacctacaacactgcacaccagagcaccaacctacaagatgaactacaggctgatgagaaaggagcactacaagacccactacctccggcatgggcacccgtgttacaatagctgggacggtcactgtcacccccaccagcagccggaccagcagctgtatcgcctgcagcagcacctgcagcactacacgcagcactatgcatgcccacagacattctacgagcctacctgcgagactacaaatgagatggtctatgacgcggaccacgaggtggacatgaagcggatcatggctgagatctacgctgacaactactgtgacacattctatgagcggtaccgaatgcggtacctcggctacttcatcggttaccactactgtaacaactg

SEQ ID NO: 145340 - DNA, 588 bp, Zea mays
  Clone ID: MRT4577_64063C.1
ttgggtccctcgaggccggccgggccggaatcctaagacgcgaccgacccaggaaggtactactccggtcaacgcagcggggggaacccaaatcccaaaccctagcacacgcatcatggcggagcagaagaagatccgatggggggagctggaggaggacgatggcggggacctcgatttcctcctcccgccccggggcgtggtcggaccctacgagaacggtctcaagaaggcatcgagtaccgcttcgactacgacggcgagaaggtccgtgtctcgaccaccacccgcgtgcgcaaactcgctcgggcgcgcctctcccgaagtgccatcgagggacgccagtggactaagtttgggtacgccctcaaggaggacgcgggctccaggatcaacatggcctccaccgaggagatgctcctcgagcgcccccgcgtcccagggatgactgctgaggagactactgcatctggtgatccgctggctatgatgagcaagggatgtgctgttctcgtgatttgcataacctgcgggaagaaggacgatccttgaacctctgagaggacggacaaggttgtggaaccaccg

SEQ ID NO: 145341 - DNA, 431 bp, Zea mays
  Clone ID: MRT4577_64064C.1
cgacgaaccatagggcgaattgtgtaccgggccgccccctttcgtttaaaacttaaaacactctaggggagtaatctagaaacatataaaattgttacatgtttggtctttataaatgcgatcctctactttctgtgggtacttatatagaggcactacgggatcacaaaatgcaaattgaatcattctagcaccttttgatataaatagaaatgcactgatgcagaggtaaaacatcttacaacttttgctgggaaactataaataatgggtcctttaccatcagttgtggattggcttctctaactgtcaaggcctaagattatatagttatattgatcacatgtgctttaatttctcggccagaatgaatccatggcgcaaatcatgtacagaggctgaaactctaattcttagttgaatgaacccga

SEQ ID NO: 145342 - DNA, 219 bp, Zea mays
  Clone ID: MRT4577_64065C.1
ccggaattgacggatggatccaggcttgctgtagcaagtaataaaatacgtgacacactatcctgtcaacaggtggaatggtttttgtgatgctcctagggattatctatttagtcgacacacgcttaccgggcaatactcagaggcgtatgcatcacatgatgggaattttgaaggataagctcacaaggtcatacctgatcgatttagaccaaatgc

SEQ ID NO: 145343 - DNA, 1694 bp, Zea mays
  Clone ID: MRT4577_64066C.1
caggtccctcctcctgcacacacccacagtgcacatatatagtaggagaatgatgatgatgaacaccagcgccgccatgtcgccagcaagtaccgacgtcgtcgtcgtcgacgacttctccctcggcgtcggcgtcggcgccatgcatcagccgtacgtcgtcggcttcgacgccgacgccggcatgggcatcatcatgcccagcgtcgtcgtcgataggccgctgctccagcagaacaccaacctattagaagagtacgacagtttcgacttcgccgccgccgcggggctgctactaccgttccaagaactacctgctggtctcctgccccccgcgaattacctgccgccgccaacgccaataagcatggccatggccatgtcgccgccgtcgctgctgctgacgacgctcccgggcgtgccagtgcctacggcggcggcggcggatgtcgtgtacggaggattgggcgggggcggcgcgggaggactgtcgttcgtcctgaagcgggaggccggcggcggcgggggaatgatcggcggcctgaacctcggacgccgcacctacttctcccccgccgccgtggaccggctactcggcggcggcggcctaggcgtgggcctcggcatgagcgtgctggggctcggggtcggcgccgccgcccaccagcagcagcagcagccaccgccgcggtgccaggccgagggctgcaaggccgacctctccgccgccaagcactaccaccgccgccacaaggtctgcgagttccacaccaaggccagcgccgtcgccgccgccggcaagcagcagcgcttctgccagcaatgcagcaggtttcatgtgcttgcagagtttgacgaggccaagaggagctgccggaagcggctcaccgagcacaaccgacgccgccgccggaagccgatcagcgaacagggtaatgaccactcgtcattgccgccgccgccgccaaagacagcggatacttgcatgaccacctcgtacaatgatgaccccaacagtgcgagcaacacggctgcagccaagtcggcggccatctcgcagaacggcggcgtcagctgcctcgacgtcctggacaacgagcagcgcggcggcagcggcgccgacggcgctatctctggccgcgccgcccccgccgctgcatcacgagaaggacgggagccaggactccgtgctatgatgcagcgccgggtccattggtccatggccggcggctggacgacgacgaatcgccgtttcatcacctcgctggtagtgatgcagacccagcagcagagcagcacggcggcaacgtcttgtcgtgctcgtcgatcggtgtcagatcagcagaacggcggctgcaacggtttctttgaggtggacttcatctaatgcgatgcagatgcacgtaaaaggagcagggaaaagcatatagctagcgtcgctagctgtgtattgtttctgagatgggaaggatgcatggcgtgaggaaagcaacaaaggctagggtttggttggttccactctagctaggggccttttctttttactgtggttagtacttgggctagctagctagtagtgctggccggacttctgttctattaattactagagggaaatgctggtgtagtatgtgtgtgttttccttttccctgttgctaacaatgtatatactattacgtgtaaaaaaaaaaaa

SEQ ID NO: 145344 - DNA, 233 bp, Zea mays
  unsure (1)..(233): unsure at all n locations
  Clone ID: MRT4577_64067C.1
caacaagnatatcaggaaggtccggtatttaaaacgccctgctaatgcaccctacctgttacaaatttattattattcaaaaccaccgccatgtggacaccacgtcgatgcagccttttggccccatcaaccaagctggagcagatgagatccagttgagggacgcctcctcactcccccccaaagagggcacgcataatatcctcataatctctaattgatctttggccaca

SEQ ID NO: 145345 - DNA, 1077 bp, Zea mays
  unsure (1)..(1077): unsure at all n locations
  Clone ID: MRT4577_64068C.1
gagtccacacggagacagatgtctgggaatatcgtcactcgggtgagtccacttccactcaacactccacagagtcaagaagatgactgggaacgagaacctcgtcgacggagtcgagaacgagagccaacaagacgcccacgtcgctgagcatgctgccggtggtactgctagtatacgtcgccatgaagtacacgaagctccgccgcctcgccgttaccgtcttcctaaggtgcggcgtgccttcggcggaccaccaccccctcctcctcatatcagcttccagtacaacagcgccgccaccatcgagaggatcccctacaaccttcagttcatcgtccctcgaaaccgaggccaaggccgcagccgtggcggagttctgccgcgcggcgggccagccgctcgcggaggtcagaggaaagatgcactcggtggcgggagccgctcgcgggagctacgccgccgacggcacgctcgtggacttggacgacggcgagttcgcggagatgatgttgctggacggatgcttcctgctgcagttcatggcctccgtgtgccggcgccgcgacgacgatccactcatctcgagaggcgaggtgcggagaagcatcaacgccatcgtgcgggacgtgatgctgctggagaaccagatcccctggcttgtgctcggctccctcatgcagctgatgccgccgcccgccgggcctgtcgtcaatgacttcctccttctcatggcctccgctttccacatcgtcggcgacatcagcaatgccaacagccaaaccgacctgcaggccgccggagaactagatcagccgccgccaccgcatctccttggccttttccatcgtcgtcagatggatatgggcgcggtgcgcacccagcagcaccagggcagcctcctccgcgtccccttccagctggcttccctgtccagcaccgcggtggagctcgctgagatgggcgtcaagctcgccccaagcaagacgaagacatttggggacatggccatgtccaagcggnggcgcggctggccccctcgcctctttcgcgagctcttcctgcgcccgctgtctt

SEQ ID NO: 145346 - DNA, 263 bp, Zea mays
  Clone ID: MRT4577_64069C.1
gggactctgcactcttacacctgtttaggcaccgtcttgttggaggactatacgatgtgttactatcgacacagtagtgtgccaatgcctggcatcatgcactgccgaccgatgggccatggccagcgccctaacctcaacgattcaagctgatggtgcaaatgcaaccgactgagctcacgcccaacatgattaagctctttgaaccgagtgcaccgttcgagtacataacctgcgctggagaagcacatattgcctgccta

SEQ ID NO: 145347 - DNA, 380 bp, Zea mays
  Clone ID: MRT4577_6406C.1
ggccttcaaatttttcgcttccttattgcggctgggtctttttgcaatgtgctggtatcgcaaccatcttcccacactgctgacaggctcgtatcgctcgctttcttgctccatacctctcaccagcggtgtcttcagcatgtgaaaacccacttcttcaaccctacagagatccaacatgcattcgcagcacgcatctcacctttatcacccttgttccttcaacaaccgtcagccctattacagcagtttcctttggtgcatttgttggcacaaaacatcaatgcactacaactacaacaacttgcgctaggaaaccttgctgcctactctcagcaacagcagtttcttccattcaaccaactggctgcattgaactc

SEQ ID NO: 145348 - DNA, 751 bp, Zea mays
  Clone ID: MRT4577_64070C.1
cggaccatgagtagcttgccaacgtgaatgtcgtcactcgggtgagtccactcgaggtcggcactccacagagtcaagaagatgactgggaacgagaacctcgtcgacggagtcgagaacgagagccaacaagacgcccacgtcgctgagcatgctgccggtggtactgctagtatacgtcgccatgaagtacacgaagctccgccgcctcgccgttaccgtcttcctaaggtgcggcgtgccttcggcggaccaccaccccctcctcctcatatcagcttccagtacaacagcgccgccaccatcgagaggatcccctacaaccttcagttcatcgtccctcgaaaccgtaacgtcatcgcgcccactgcagtggccataggtccctaccaccgtgccttaccccagctctcggggatgcaggaggccaaggccgcagccgtggcggagttctgccgcgcggcgggccagccgctcgcggcggtcagaggaaagatgcactcggtggcgggagccgctcgcgggagctacgccgccgacggcacgctcgtggacttggacgacggcgagttcgcggagatgatgttgctggacggatgcttcctgctgcagttcatggcctccgtgtgccggcgccgcgacgacgatccactcatctcgagaggcgaggtgcggagaaacatcaacgccatcgtgcgggacgtgatgctgctggagaacagatcccctggcttgtgctcagctccctcat

SEQ ID NO: 145349 - DNA, 364 bp, Zea mays
  Clone ID: MRT4577_64071C.1
aactcgccgtctgccttctgcgccttcatttcggcctctgtcccttgcaagttcaatctcacctccaaccatgggtaaagagaagtcccacatcaacattgtggttattggccacgttgactctggcaagtctatcaccacaggactcctgatctacatgcttggatgcattgtcaagcttttgatcgagatgttttgtgttggactcttttcgaatacgcacacgcccctttttaagttctcttaaatttcttttatattattattgtctttattgttgtattgtggatcttatttatatgatattttacttttttttttttattttccttatcttttttattttttacttttttctcttttt

SEQ ID NO: 145350 - DNA, 976 bp, Zea mays
  Clone ID: MRT4577_64072C.1
gctgtgcctgcggtcccgtgcgcttagcatcccctcgtcttcgcgggcacaggggatggctcgtcggaagcttgtgacctgccgacaaggtgctttcgaggaggggaatgcagcgagggataaggccgtgccgattccagataaagtgctccgtcattgcaagtacgccaatggcagggcgctagacctagagcccattgaaaagaacttcgccaacgagtctatgcaaatttctttcgaagaggagagtgacgatatggtgtgcgaaattagcgaaagcgtggtgcgggatgtggagaaggccgcaattgaattgcttgctgccagagctttcactgtctctgagcttaggaagaaactacgaagtaagaagtatccttttgatacaattgatgccgtgattgctaatttcaaatcaaggggtttgttgaatgatggttttaatgctgaatcattttcgcgatcccggtggctaacatcaacatggggtccaaggcgaataaaacaggcacttcaccaaaaaggtgtcccagaggcagaagtagatcaggcaacgagaagagtgttccaggatggcgacgactattgaaaggaagcaacgttcggcatgtccgaagcttccatggatcatctgtttgctcaggcgtccaaacagtggcagcgtgcgcaaagcttgaccctggagagccgacgtgcgcgcatggtgaggtggcttcagtaccgagggttcaactgggctgtgaccaatgccgttatcaggaagctggaggcttcagcaccctccaccctgactcttctgactagactaggtgtgtgtccgtgcgttgcaacgggtgtacgctgggatgagtatagacacatatctaatcggatcttatatttcctgggggggtctgtagaaagtttactcgaaagccaaatatgttaagacctgaacatgtgttacccttatgtcccatcagcatactgttcaaaa

SEQ ID NO: 145351 - DNA, 289 bp, Zea mays
  Clone ID: MRT4577_64073C.1
tctcgttcggacacatagggacagacgggggcattcgcatttcatatttagaggtgcaattcttggataacagaaagaccagcaactgcttacttcctgtcaccgggatgttctcattcacacaagaacgaaagatggggggtcgaacacgaccatatggggaagtaacccgatgaactggggcgcggcagcagcggagctggcggggagccacctggacgaggtgaagcgcatggtggaacaggaccggcagccggtggtgaagatcgagggcttcacgttccgcgtc

SEQ ID NO: 145352 - DNA, 1384 bp, Zea mays
  unsure (1)..(1384): unsure at all n locations
  Clone ID: MRT4577_64074C.1
tgggtacccctcgagggcccggcccggggtaatngtggcaaagaaaactgccgcaatgccgctctatatccttcggccgcgtcacgctagtagccggtatgcccctagggatgtccatggcggcgagccgccgcctcctccatctcctgccgcggctggagctgtgcctgcggtcccgtgcgcttagcatcccctcgtcttcgcgggcacaggggatggctcgttgccggcgcgagcctccgcgtcggaagcttgtgacctgccgacaaggtgcttttgaggaggggaatgcagcgagggataaggccgtgccgattccagataaagtgctccgtcattgcaagtacgccaatggcagggccctagacctagagcccattgaaaagaacttcgccaacgagtctatgcaattttctttcgaagaggagagtgacgatatggtgtgcgaaattagcgaaagcgtggtgcgggatgtggagaaggctgcaattgaattgcttgctgccagagctttcactgtctctgagcttaggaagaaactacgaagtaagaagtatccttttgatacaattgatgccgtgattgctgatttcaagtcaaggggtttgttgaatgatggtttttatgctgaatcattttcgcgatcccggtggctaacatcaacatggggtccaaggcgaataaaacaggcacttcaccaaaaaggtgtcccagaggcagaagtagatcaggcaacgagacgagtgttccaggatggcgacgactatggaaaggaggcaacgttcggcatgtccgaagcttccatggatcgtctgtttgctcaggcgtccaaacagtggcagcgtgggcaaagcttgaccctggagagccgacgtgcgcgcatggtgaggtggcttcagtaccgagggttcaactgggctgtgaccaatgccgttatcaggaagctggaggctcagcaccctccaccctgactcttctgactagatgaatggcaacaaacatatcaagttcaaactgagaagttcaggcggatgctgcctcgccttctgttcttgtgctctgtttttttagggaaactgtgaaacgaagtgtggacgaccatgttgatgggcaggtaacacagggaggaacaactgaacaagttcatacacgccgaggctttggctaacggtgagaaacataaacaaattaaaaaaaaaaaacatgtactacattggtatgctaacatttcaaaactggatttgacaagttgagtgttaagaaccaattagattagagttagtagtctcagctgacaaagtaggaactaggcattagaactaactgtctgtttaatcatatatgcataaatgtgcaagatcgatcaatggaacatcgttcattc

SEQ ID NO: 145353 - DNA, 390 bp, Zea mays
  Clone ID: MRT4577_64075C.1
gggtgccaccgccggacgggcatgggcggagcaccggtcaagggagcctgcctgccgaccgggaccactggtgctggtgggctggcctacaaaaagcaatgcctcctttaaaggccaaaacaaaagtccagggcacattgccgggtccactctgggggttctctcgaccgacagttttacacacatgtcggggggtcaagctcaacttaaccatattgggccgggcaggtccattctaacacgcccaaaaataaaccaaacatgggggaaaaaaaaaggatgcattacaaggaggagaaaatcacccttggatgggaaggctttcatcttggaaagccaggggcaaagcctgcttcaacttttaaaaagggcgggctctggtgtttcctc

SEQ ID NO: 145354 - DNA, 1482 bp, Zea mays
  Clone ID: MRT4577_64076C.1
ccacgcgtccgcagaaggcgctttcatttatcctatgtatgggcatgctgagctgcctcaagctttttgtcgctgtgctgcggttaagggtgccctatatgtgttgcggatgccagtggttgcacttcttatggatgaggaaaagaagcatttcttaggtgccagattggcatctggtcaggatattttgtgccagcaattgataattgacgcgtcttataagattcctaccttggatgtcccatttgatggttcagattcttggaaagttgtgaggggggtatgcataattagcaagtccgtgaaacagggatcatcaaatgttctggttattttccctccaaaatcgctagaagaacagcaggttgcagcggttcggcttcttcagttgagcagcaatctcgcagtatgccctcctgggatgtttatatcatatctgtctactccctgtaccgatgtctcagccggaaagcaatccataaaaaaagcaatagacactcttttcagtcctcaggcttcagatggttcagaaggccattttgaaaccaccaatgaaagcactgaggatgtgaagccaacactaatctggagctgtttgtatgttcaggagatcacacagggaacatctggttctttattgtcatgccccatgcctgatgaatacctggactacagaaacgtactgggatcaacaaaaaagttatttgcaagtatctatcctgatgaagagttcttgcctaaaaagtcagctcctgtatatgctgatgatgcctctgattctgcagagtaaaaccatctttctaaagggctttatcatttggttgaagaacgccgtcattcgaagatgcaggaaggcatcgttctctttctcgtggtgttccttgaagatcagagggcaaatgagcgtcgcaagggggagcctttgggtttgatgagcagatgtgctggatttccaatgtacaggtggccactggctggtcatattgcatttgtggggaacagttggagggagggatgtgcacatgtggtattcacgaaatgctatgtggacacattctggcgatgctcgcaaatgaccttgtattggctgcctggctggcaaaccttgttgtacacaggatcacagcaaatacgggatacatgctgaacgctcgatatgattccctagttaagacatttgaatgagacagggtagaagggtattcaattgaaaaaaaaaaaaaaaaacttctttctctgacttcagtccagctcgatacatgtggattaagatgaatactagaatacctaaacaaagcctggaggtaattaaactgttgcgtgtatttttggtagactaaagcggtgagattttggtcttcaccttgcagaattgggtacccttgcacgagcctatgtaatgtgtttttttatggattagtcttttttcgcaacagtttttttatttgttgatgatttatgaaacatcggtgttgcatctaa

SEQ ID NO: 145355 - DNA, 459 bp, Zea mays
  unsure (1)..(459): unsure at all n locations
  Clone ID: MRT4577_64077C.1
cgcggacggatttcttctcccaaccaccttgcaaacaagcgttgttagctctcgnggcgcaaccacaacttgtctgctttcgccgcccctacgccacctcctcnaatctagcctcgtcgattgcttccccagtttaatagatctacaaccttcacaacatattcacgaatacatctcaccctcagttcctgaccattctttatagccttctgaccaaaccattgcagatatgttataaagaagttgtgaatggttaaaggacaactacttttttaagaaggctgaaaaattttattcttcttttaggaaaacccattttcaaattatttatctttcaaacaccccaaataacttttaattaaaaaaagattgaactttccatatattaacttttattcgggaaaaaaaaaaaaatttttcttttaaaaatgtgttccaaactctttttttttttttatt

SEQ ID NO: 145356 - DNA, 355 bp, Zea mays
  Clone ID: MRT4577_64078C.1
ggcgtccgttttttcaagttccaaagggggccatcgcgttggcctggtaatcttgtccaaacttccgggaaagcgtccttttgatcagggaatgggccccccggcctagctggttggttgaaggcaccagccgaccaccaaacgatggcgcacgcggccaattaaacagcataaggttaaggcccggttgccgtcgttaagcgcccgggccaccgaaaacttgaaagcaagggaaatggtggccacgcgttccccggcttgttgggccgccgggtccttttccaagtcgtccaggcccaaggcgtccaggccgccggccacgttttacggcaggtcgttccggtggaatacggtc

SEQ ID NO: 145357 - DNA, 1421 bp, Zea mays
  unsure (1)..(1421): unsure at all n locations
  Clone ID: MRT4577_64079C.1
gactagccttcagccttctccagttctcctctcctcctcgttttttcccctcctcaacgcctggacggaactgaagccagccagcctgcccagccaaggtgaccggagacaagtaaaaatctcgccggtcttctcacagaccacaaacattgcgcttgctgcccagctataagtactcgccggactaggcggccaactcatcccatcccatttcatccatctcggagcagaggcaacgcaatccggcaaaaaggcgcttctttcttgccctgttcgggacaggacacagacacagagccaggagaaggaaccgccggaggctaagcttcttcgtcgtctttcctgggcgcgctcaagtggcgatggcatttgcggtctccgacgagctgctgggcaccttcgtgccgattgcggtgtactggctctactcggggctctacgtcgtcctggacgggctcgggatggacgactacaggctccatcccaagggggaggaggaggccaagaacatcgtttccaggtcgacggtcgtcaggggcgtccttgttcagcaggcgtttcaaatcgctgtctcccttcttctcttcacggttcttggtgatgagaatgaggctgcgaggaagcaacctccggctctggtgttggcattgcaatttatcgttgcaatgttcgtcatggacacatggcagtatttcatgcacagatacatgcacatcaacaagttcttgtacaagcacgtccactctaagcaccacactcttgtcgtcccctacgcttttggagctctgtacaaccaccccctggagggactcatcctggacaccatcggtggcgcgctctcgttcctcatctctggcatgaccccaaggactggcatattcttcttctcgttcgcgaccatcaagaccgtcgacgaccactgtggtctgtggcttcctgggaacatcctccatgtattcttcagcaacaacagcgcttaccatgacatccaccatcagctctacggcaacaagtacaacttctctcagcccttctttgtcatgtgggacaagatccttggaacatacatgccttacactctggagacccgcaagggaggtggtctcgaggcgcgcccggttaagctcaaccaagcacagcagaccaaggctgattgagcagtgtggtttctcctgtttatctactacttcccctgattttttccccttctgactgcatttgtactgtagaagtatttcctgtccatatagtaaaatcatttaggcaaatgccatgttgtacccaacagatatagcaaataaaacatcttgttaatggagatccaaaaaaaaaaaaaaaaaactcgagagtnnnnnnnnnnnnnnnnnnnnnnnnnnnnnnnnnnnnnnnnncggtgccgtaccaaatcaanccctggggct

SEQ ID NO: 145358 - DNA, 245 bp, Zea mays
  Clone ID: MRT4577_6407C.1
aatggaagcaacatcgggggcaggcgtacttattctcaataacccggtagcaatgcttcgcaatgaaacactgttacagcatgggcgtgtgtacaccacacaatacttcagaacagacacacataacacgattgcgggggcaactcttggcagatcacgggataagggcagcacactggcctgatgctgcgtcataagcaaaacttttttatatactaggcacccttgtcggctatccttgggcc

SEQ ID NO: 145359 - DNA, 156 bp, Zea mays
  unsure (1)..(156): unsure at all n locations
  Clone ID: MRT4577_64080C.1
aaagccacagnnnacaggctgattcgcttatcatctcggcaccataaggtcggcttcannagcttactagctcattctatctcccatcttatatcttatnttcaaacttcactttgtgaacgatgcggtctatagtgcaaaataagggtaaaaaaa

SEQ ID NO: 145360 - DNA, 346 bp, Zea mays
  unsure (1)..(346): unsure at all n locations
  Clone ID: MRT4577_64081C.1
gaaaaaaaaaaaaaaaaaaaaaaaaaaaaaaaaaaaaaaaaaaaacccctagccgcactgcgctcatttttgcatccccctcccgccgcgccgcctcaccgccgccggagaagatgggtcgcgtgatccgcgcgcagcgtaagggtgcggggtccgtgttcaagtcccacacccaccaccgaaggggccccgcccgtttccgttccctcgacttgggggggggcggcgggtacctaaagggcgtntgtaccgacttattccacaaccccgtccgtgttgcgcttttcgaaaaggtcactttcgtccacaattaatgaacaaatactcaaattttttttttttttta

SEQ ID NO: 145361 - DNA, 465 bp, Zea mays
  Clone ID: MRT4577_64082C.1
atgaccgccgtaaggactatagacccatacccttaccttgcggagcgcccactgcgccgcatggtgacaggtcagtctagccacctggagagactgcatcatcgcctgcacgaggagctggagcgccgacaccaggagcaggagcagcagggctcttcccccttgcctccgcaggaggtggagtctcggaggcagccttctcctgcacctcagccagagatgcctcctgcaccaccacagggcatctcggctgctggaggagaccctgacggagatggagacggtgacgacgactgtggcagtttgagccacatcacggagctctcagaggagcaggagacggagggatggatcgctaggcccatcacttgtgatgccgctcgtgggtgtcacttccacgacgctcttgacacttgcgtcgggtctttgaccgatacacttggtccattgagtaccgttgtgtag

SEQ ID NO: 145362 - DNA, 185 bp, Zea mays
  Clone ID: MRT4577_64083C.1
cgggccgacccacgcgaccgggaaccgagcaaggatacaattccaggcaatgaaaagccgacaaaaaccgcgggagcaccggccaacgaaacaggcctacccagggcagacgacgaacgagaaaagagagcaaggacaatctactgcacaaacaaagacaagaaggccacacaagcagaactaaa

SEQ ID NO: 145363 - DNA, 240 bp, Zea mays
  Clone ID: MRT4577_64084C.1
atgaccaccagttcgatggtggggagaagcaagccgggctacggcctctgccccgccctcagcttcaaggatcttcatcatccttgctggggcggagggcgagatgagccggagctctacctcccgcacgggtcggtgggccaccttctccttcagcattcaggggagagggcgctcaccggcctagcggagggggcggacttcgacaacgcggggctggtcggccgcgagcgtcgttag

SEQ ID NO: 145364 - DNA, 260 bp, Zea mays
  Clone ID: MRT4577_64085C.1
aaaatatattttattacaccttattcatttggatcgggcgcaataattcatcattccaaattgcttcatcaaattcatactaaaacaatacccatacaaactgaatagaaactcccctcctcacaacccctgacgaggaatccacatattctgcatccctggacgcctcttacaggaacttcctgtattaccgacctgcatcctcgtccttcatatggaattcacgtacaatccccttgtacaccaatatggcgacaccc

SEQ ID NO: 145365 - DNA, 285 bp, Zea mays
  Clone ID: MRT4577_64086C.1
cccaatcataatacatctacaaaaaacagcatctatttctatactacaaaaaatgctcgacaggtctggcagatccaccttaacgcctgcccaccctcacacgatgcaccttctacttcgtcctctaatgctcaaacaaaaacattaagacctacaacccctacactataaaaactccttcttacacccaacttctacgccaactgttagaaagggcaattccaacagacgacttacagttcaactacaactaccgcacaaacctttacatatactgcccaatct

SEQ ID NO: 145366 - DNA, 996 bp, Zea mays
  Clone ID: MRT4577_64088C.1
acttgcatccagcatgagagctgctgattatattaataaagaagtagcggtccggaccggactaaacaacagacgattggattgcgacatcaacgcgtcgacaccatacaattcaactcgttggttggaatgggatatcaacacggcaccacactcaccgccgacatagtgcccaaacaacacagacagcggcaactccacacgagagcacgcaaaactgctaagggtcatcattgtcaagcaacgatgcagagcatccagcaactccgacttcccaaagcagtcgacagacgaaacagacatacaacccgaagcgaaaggtatcgataggtcatcgttgccgggctaaggcacaaagcagctccgactttcaatcttgaccctccgccctgcctccggaatttgcctgaccttcgaaacaaactgggccacaaagaagggaggtccgtctcatgttatcgttgccgagccacatcccctgacatagtagctccgacttcatgatgcaaaaccccacctccacccgcataccaggcgccgagaagcgaagcaccagccgaaggcaaagccatggccgagacgaacttcagaagcgacgccttcagcaagggagtgacgtcaccgtgaacgccaccgtcgcctgttcgcgatggaccaggttttcacccaaggaagatagtgttggggatgcgatgccctcaacaggggaagcggcgcccatgccacggtccggcagatgacccgccggccgccgcggacgcagccatggccgtcaccacagacggcgcgcaggagcctagagccggcataatcgccccgccgccgccttcaccgttagccgcgcgagcatctggccggctagctccgacggcggcgaggtagagagaggtgggagaggaggtggcggcggctagggttggtgccacccgagctgggcgacgcaggggcctctgggtcgcgtctttctttcttcgtttcacacttgtccccggccgg

SEQ ID NO: 145367 - DNA, 343 bp, Zea mays
  Clone ID: MRT4577_64089C.1
aaaacccaaacctccggaaagaaaaacaaattttttccatacacgtttagttcgaaacataaaaactggatgaattttcatccacgatccaactttttaatataaaataagggtggcccaagaagtcacttagagcccagggtgctatcaatgggcttggtcgggaacctaaatcatccttttgaggagctcattgggggagttttcgggggtaccgggattaccgccctccaaaaagggggtcctttttttttttaggcctcccaggggggcctttaaattgaatggccacaggaaggtggtggccttcttgaagggggggccaacagttattattttggga

SEQ ID NO: 145368 - DNA, 460 bp, Zea mays
  Clone ID: MRT4577_6408C.1
aaagggtagggacattattaaaaggggggggaaaaaaaagggtaaacgggggggggaaacggggctacatccaaaaaggggggagcaggcctaggaggccaaacatattaccttaaagaagggatcccatgggcggttaaaaaattttgggggccttcgatacaaaaacaggacaaaggggttactagcgggggttatagttctacaatatagggaatcacgattatcaccggggaccaaagtctactcctttgagggggggactggggacacgggaaaaaccatggaaacaaccccccacttgtgggaaacgtgggaacccctgcaaattttggagaatccgttctccccccagttttcgccccacaagtttttgataaaccaaaaagggttgtccttcaggggaaggggggggaaaccagaaccccatttccaaaaggaaaaaccctgggcaaggggc

SEQ ID NO: 145369 - DNA, 293 bp, Zea mays
  Clone ID: MRT4577_64090C.1
ccgaggcgtacgaccaaggctacctgaccttgtgctatgtgacaccctacgagcgtggggtgactcgtaggacgggaggtgatggcgatggaccctgacgcgagtagataaagacttcgtggagcattactaccgaacgttcgacaccaaccgcgcggcgctggttgggctgtaccaggagacctccatgctcaccttcgagggccagaagttccagggcccgtccgccattgccggcaagctcggatctctccctttccaggcctgggagcattaaatcgtcacccgtggac

SEQ ID NO: 145370 - DNA, 1596 bp, Zea mays
  Clone ID: MRT4577_64091C.1
cctcgaggccggccggggtagtagcctcgtagggccaacatgaccgaactcaaaatgtgcagcccacctccaatcccgtagaagatagtgctgccctgccgaatgccgcccacctccaatcccgtagaagacaaagagagagggagagaactggacggcggcggcggcggagacgacgatgcagtggtacttggtggccgcgctcctcaccatcctcaccagctcccagggaatattgaccaccctttcccagagcaatggcaaatacaattatgattatgccacaattccttttttagctgagctcttcaagttatctgtctcaggcttcttcctctggaaggaatgccattcttcatctccaccaaggatgacaaaggaatggaggagcgtgcgactatatgttgttccttcagttatatacctcatccacaacaatgtccagtttgcgacattgacctatgttgacccatctacctatcagataatgggaaacttgaaaattgtcacgactgggattttgtttaggcttgtcctaaaaaggaagttgtccaatatacaatggatggcaattgttttattggctgttggtacaactacaagccaggttaaaggatgtggagattcaccatgtgattctcttttctcagcaccattggagggttacttgcttggaatactttctgcttgtctttcagctctagctggtgtgtacacagaatatttgatgaagaagaataatgatagtttgtactggcaaaatgtacaattatatacgtttggagttatctttaacatgggctggctaatttatggcgattttaaagctggatttgagctaggtccatggtggcagcgcctttttaatggttattcgatcacaacatggatggtagtgttcaatttaggatctactggtcttctagtatcatggttgatgaaatattctgacaatatagtcaaggtgtactcaacttcaatggcaatgcttttaacgatggttttatctatatatcttttcagtgtgaaagctacaattcagctcttcttgggcattatcatttgtataatttccctgcagatgtattttatgcctgtgcacatgcttattgagttgccacaaactttgcctgtaacatcaaagtaggttcatggcattgttagctaacccattgatcagctgagggtagggcactgttgattgagtggttaattgactatctgcagcccagctctatttgagtcatatatttggagatttatggttgtaatctcaacagctatggatatagacagctaggttagtttcatgttgcaggaaaggtgaatcaactgtcaagtgagcatgtaatgccaatacaaatggattgaaagttaacacctacatgccttccaatttttatccaggtaaaagatggaggctgattagttttgttgcctagggaaacgaaatccattcaaatgcaagttttcttaaaatagagcaaaactactcattcaccttgtatccacagttttgcattaatggagtcgatatggaactgacaagtacaatgagttatggcttcataaaaaaaaaaaaaacaattttgctcc

SEQ ID NO: 145371 - DNA, 1109 bp, Zea mays
  unsure (1)..(1109): unsure at all n locations
  Clone ID: MRT4577_64092C.1
gcgagtagagtctgtcgagggaggtggggttgataaacgagagaaaatcagacagaaaaatgagaagaagcatcaaagacagaaggagaggcgtgcccaagaattgcacgagcgttgtaagggttatcttatgtctagaaaattggaggcacttgcgcagaagcttgttgcgatgggtttctcagcagatcaagcaacgatggcccttatacagaatgagggttgcgttgaggagtctgttacctggctctgcaactttgatggcagtgaggaagctaagcaacaacttgcagctgatcaacagtccggtgttaacttgaagattgatatagctgatgagctttcaaagattgtgagcttggaggtaaaatataagtgtacaaagcaagaagttgaaagagcagttgtttcctgtgaaggtgatctagaaagggctgatgaggccttgaagacacacaagcaagaatcaactgcagtcccaccaaagcctgagggatctagtgactcaagtgccttgcctaacaagcagcaagttgtacttgcacagaaccctgcaagggctcaaacaaatggattttcatcagtaggatctcagcagacgagaagagaggaggagataagctataagcttttgatgaatggtagtggtccaaaggaacctgcaattaaaggttttcagccactggcaacaccgattaagccagatttggtccgtcagcaatttgttcaacctgagaagagacgtctcaatcccaactcgaatccatcagttccttctgtggcatcgtctcctttgcctgttgcagtgccacaagtgaagccagacatgcggcatgtggcagggaccaatgaggtgaaaagtttgatgcccaatggaagcttgcgagagtctgtgattgtaatgcagcgtcctcaatctgcaggtaccaaacagagcctaccatccactagccatagtatgtttgtgtcagaaccatctgcaagggattggtacttaaatggcgtgtcaggtgtggatatgatgttgaatgggggcttangtcatggactaaggaatatgagtttggacagtgctagttctgccaggtcgtttgggcatgcaaaccatc

SEQ ID NO: 145372 - DNA, 308 bp, Zea mays
  Clone ID: MRT4577_64093C.1
ggtgttctgtttgtttatggggtgttggggttcttttttggggttccaactgtgggttttttcaggggggggggggtgaaaacgtggggcatgggctttaaggggaagcttcgggcccttggaaaaggggcttctaagggctggtgggtacggtgcttcccttgggcgctgggtctttttcggagccttgggggtgggtaagggtggtataagcctttttttaggggaagggtggtttcaaacctcagtccgggggggcatttggtggggcattttttttggccttagggtgtttttggggacgttaa

SEQ ID NO: 145373 - DNA, 1425 bp, Zea mays
  Clone ID: MRT4577_64094C.1
cccacgcgtccgaccggagtggtccagtcgcaactgcaattaaagggtttcagcctttgccagcaccaactaagccagatttgggccgtcagcaatttgttcaacctgagaagagacgtctcaatcccaactcgattccatcagttccttctgtggcatcatctcctttgcctgttgcagtgccacaactgaagccagacatgcggcatgtggcaggaactaatgaggttaaaagttcgatgcccaatggaagcttgcgagagtcggtaattgtaatgcagcgtcctcaatctgcaggtaccaagcaaagcctaccatccactagccatagcatgtttgcgtcagaaccatctgcaagggattggtacttaaatggcgcatcaggtgtcaatatgatgttgaatgggggcttaggtcatggactaaggaatatgagcttggacagtgttagttctggcaggtcgtttgggcatgcaaaccatcaacaaagttttgtttctaatcctatagagttggctgccaatggttggggtggcacatggagttctggaggtacatcatcttcccgtcctgtggtgtcatcatttggggcgtttagagggtggagttcatccgagtcgtcccctgcattgcctcattctgattggagagccaatggggcagcaccttatgactacacctcagtagactggagcctggacacaacgttattgaacccagcagcaaagagcgagcggctgtcggacacatggtcaaccatgttcatgggtggcagatcaacaaggacacctgggaacctcagtggcgcaggcatagctgggttgcatgacagtaaccatccaatggatcctgctccatcacctcgtccatatgagtggcctactttctgcaggggaggatcttcctagttccccctaccatgtaggtaagaggacattgaataaaaaaagtaaaagctgccatttgtttcttttcttgttttggtctcaggtgcagttggttgaaaaagttttactttgtgtatcgaactgagcttgtgtaccttgactgttggctgagataagtcatctttctgtgaaatcgttgtgcatgaaaaatgaaggaagagaactgaatctatcttggctgaaatgcaggtaattgtttttattttacttgctataatagtaacttactaattctttctcacagttcggcttagctgccatgtgcattcttgcttcacggacagtgtttttactgcggtccttctgaaaaaaggcacacacgtttttctcttcttttctttacttggttgcttattaccaccgaaacttgtatatgtgtttcatcaaccttcaagagaagaggttaaaagaatattatcatgttttacattggcgtagtgtaacctgtgttttatccagaaaatgcaggagttttcct

SEQ ID NO: 145374 - DNA, 1580 bp, Zea mays
  Clone ID: MRT4577_64095C.1
gcacgagagaaaaaaaacatttgggtcgtcgagtttgggtccgaacaaaaaatgagcccaacggcaccaccgggaccgggaccgactggagacactgcttgcaattcggcacgcccgccgggccgccaggccgccactagggtttttcggagcctcgtcatcgtctccgaccccgtgtctccgaacaacatcgcgcggccgccgcctcctcccagtcgccatggtcaggctcaccgctgacctgatatggaagagcccgcacttcttcaacgccgtcaaggagcgcgagctcgacctccgaggcaacaagatcgccgtcatcgagaatgtcggagccaccgaggaccagtttgacacaattgacttgtcggataatgagattgtcaagcttgaaaacttcccatacttgaatcgtcttggcactctactagttaataataacagaatcacacgtatcaatcccaatcttggcgagtttttgccaaagctgcatacgctggtgctcacgaataatcgtctgacaaatcttgcagagattgatcccctggcatctcttccaaagctacaattccttagcttactggataatactgtaactaagcagccagattacaggctgtatgtgatccataaattgaagcatttgcgtttgctggatttcaagaaagtgaaacaacaggagagagttgcggcagcgaaaaagttccactcaaaggaagcagaggaagaggcaaagaaggtgcctgccaaaacgtttactcctggtctgcctgatgctcaggacatcacaatggagccacaaggtcctaaagtagttgctccaactcctgaacaaatcacagctatcaaggctgctattgcaaatgcccacactctcgaggaagctgcaaggctagaacaggtactaagcactggccaagttcctgctgaatttgcagtgcccaagcccgatgcaaacatggccgaagcttcagatggagccgagaagatggacacagatggtgagaaccaagagggcggtgaggctgatgggcagaaacaaggcgaaggaagcacaagcaccccaattcaggaggattgaaggcatggtgacatgggctgggtcatccattgtctgagttttaggtttgccagttttcgtgggggtgcaggaaagagctagagccttgttgccgcagaactccccctctatggatcgcatgtggatgctaacaacattcttgcttatttttgcagtagatggtactgagaacagaatcagatgttgtaaactatacatacagtcgtgcatgttgccgaatgaaccattgtttcggtcgtagcgcttgtgtcggtgcctgactgcagtctgcagagcgagatgtcgccctgccgcctatccttttctcggagtgctttattacaagtttgagtgatggaccctgttgagttgaggcggatgatcgtcatctattgctggatgtttcgtttttttaaaaaaaaaaaaaaaaaaaagggcggccgctcgccggacgcgtggaccattgtttcggtcgtagcgcttgtgtcggtgcctgacgtcggtctgcagagcgagatgt

SEQ ID NO: 145375 - DNA, 303 bp, Zea mays
  Clone ID: MRT4577_64096C.1
ctattttaaagccgagcacagaaggacgacgatgggttgttcacgccgaataccgatgcctgccgctggaggttgtgatatggcctacttgctacaaaggcgtacaatgtcctggtacgatgcggatggtatcaagcataatgcgactcttagagggcctaccgttgttcgtgcaagcggcgtaccgatgcctcaagtcggtggtggtcaagtgacctcatggcacctagaatgcctgaaaggcatgcatagaacatgagttgacatccatgaaatgattgcgccaaaaggggacacaggaaa

SEQ ID NO: 145376 - DNA, 725 bp, Zea mays
  Clone ID: MRT4577_64097C.1
cattgggtacctcgaggccggccgggaaaaaataaaaaaccgcctacaagacagcaacacagcgcaggcgccgtctcttgcatataacagtgtcgtgatccactgtgtcgcgtaacgccgtgaacgacgtatcaagaaagaacattaccagacgtatacagcgacacgtcgcacacccaccggccctatgacgtaccgcgaccacaacctacatgcatacccgcccacccggccacggcccctcatcgagcaaataccagactatcgtgaagacctcgatgtatcagacgaggaagacggattctaccaacgcgaagacgacttcttcctcccaccgaaggtccaggccgccatcctccgcacaaccgatcgcatcccccggagaatcaagcgccactgtgccgcatatattttcgtctttttcctggccattgccagttggtggacatactttggcccgcgtcgcgctgcatttgtccaggaactgcatctgatggaccacgcgccaaccatgagctacggcagccaggtgcgccccgagttcaagggcatgatccaggttacggacatggacgagcagcatttgcccaaggagaataagcgcctcatcttcatcggcgatgtccacggctgccgcgccgagctcgagcatctcctcaacaacgtcgcctttgaccagtcgcgcgaccacatcgtcatgacgggcgacatgatcgcaaagggcc

SEQ ID NO: 145377 - DNA, 1533 bp, Zea mays
  Clone ID: MRT4577_64098C.1
cggagcctcgtcattgtctccgaccccgtgtctccgaaaacatcgcgcggccgccgcctcctcccagtcgccatggtcaggctcaccgccgacctgatatggaagagccctcacttcttcaacgccgtcaaggagcgcgagctcgacctccgaggcaacaagatcgccgtcatcgagaatgtcggagccaccgaggaccagtttgacacaattgacttgtcggataatgagattgtcaagcttgaaaacttcccatacttgaatcgtcttggcactctactagttaataataacagaatcacacgtatcaatcccaatcttggcgagtttttgccaaagctgcatacgctggtgctcacgaataatcgtctgacaaatcttgcggagattgatcccctggcatctcttccaaagctacagttccttagcttactggataatactgtaactaagcagccagattacaggctgtatgtgatccataaattgaagcatttgcgtttgctggatttcaagaaagtgaaacaacaggtttgttcatttcctttggaatggctccaaaatatgttttgggatggaccccagaagtggggctgctggcagcaaaagagacaaacaagcaactcttttgactttggattttcacgaattagatgcattaacaccatggaatgctttggctgacatgttttccattatccagtctgcacatgttgcttttgtttctgattttcttgggagattttttttttgctttgtaggagagagttgcggcagcgaaaaagttccactcaaaggaagcagaggaagaggcaaagaaggtgcctgccaaaacgtttactcctggtctgcctgatgctcaggacatcacaatggagccacaaggtcctaaagtagttgctccaactcctgaacaaatcacagctatcaaggctgctattgcaaatgcccacactctcgaggaagctgcaaggctagaacaggtactaagcactggccaagttcctgctgaatttgcagtgcccaggcccgatgcaaacatggccgaagcttcagatggagccgagaagatggacacagatggtgagaaccaagagggcggtgaggctgatgggcagaaacaaggcgaaggaagcaccccaattcaggaggattgaaggcatggtgacatgggctgggtcatccattgtctgagttaggtttgccagttttcgtgggggtgcaggaaagagctagagccttgttgccgcagaactccccctctatggatcgcatgtggatgctaacaagattcttgcttatttttgcagtagatggtactgagaacagaatcagatgttgtaaactatacatacagtcgtgcatgttgccgaatggaccattgtttcggtcgtagcgcttgtgtcggtgcctgactgcagtctgcagagcgagatgtcgccctgccgcctatccttttctcggagtgctttattacaagtttgagtgatggaccctgttgagctgaggcggatgatcgtcatctattgctgg

SEQ ID NO: 145378 - DNA, 1157 bp, Zea mays
  Clone ID: MRT4577_64099C.1
attgacttgtcggataatgagattgtcaagcttgaaaacttccatacttgaatcgtcttggcactctactagttaataataacagaatcacacgtatcaatcccaatcttggcgagattgatcccctggcatctcttccaaagctacaattccttagcttactggataatactgtaactaagcagccagattacaggctgtatgtgatccataaattgaagcatttgcgtttgctggatttcaagaaagtgaaacaacaggtttgttcatttcctttggaatggctccaaaatatgttttgggatggaccccagaagtgctgggctgctggcagcaaaagagacaaacaagcaactcttttgactttggattttcacgaattagatgcattaacaccatggaatgctttgtctggcatgttttccattatccagtctgcaaatgttgcttttatttctgattttcttgggagattttttttttgctttgtaggagagagttgcggcagcgaaaaagttccactcaaaggaagcagaggaagaggcaaagaaggtgcctgccaaaacgtttactcctggtctgcctgatgctcaggacatcacaatggagccacaaggtcctaaagtagttgctccaactcctgaacaaatcacagctatcaagggtgctattgcaaatccccacactcttgaggaagctgcaaggctagaacaggtactaagcactgggcaagttcctgctgaatttgcagtgcccaagcccgatgcaaacatggccgaagcttccgatggagccgagaagatggacacagatggtgagaaccaagagggcggtgaggctgatgggcagaaacaaggcgaaggaagcaccccaattcaggaggattgaaggcatggtgacatgggctgggtcatccattgtctgagttaggtttgccagttttcgtgggggtgcaggaaagagctagagccttgttgccgcagaactcccctctatggatcgcatgcctagtatcgcgagtttttatgtatccttactgtggatgctaacaagattcttgcttatttttgcagtagatggtactgagaacagaatcagatgttgtaaacaatacatacaatcgtgcatgttgccgaatgaaccattgtttacgtcgt

SEQ ID NO: 145379 - DNA, 107 bp, Zea mays
  Clone ID: MRT4577_6409C.1
tccgaccggtcgaccgaatgttgcgcaccaatcccatcctcctagcaatcgaaggacctagcgagggttacgacggcggctatcggagatagatcgtgcgcattgcg

SEQ ID NO: 145380 - DNA, 3447 bp, Zea mays
  Clone ID: MRT4577_640C.1
aattcggcacgaggccctctctcctccccctcctcccagatcccgatccgcggctgcctccggcggatccagccgcttcctcccgccgcagatccgccgtggccgccatggagaagccatgctctctcctggtccacttcgacaagggctcggccgcgatggcgaacgagatcaaggcggatctggagggcagcgatggccccgccaaggccgacgccatgcgccgcgccatctcgctcctcctaaacggcgagacgctcccgcagctcttcatcaccatcgtccgctacgtgctcccctccgaggaccacaccgtgcagaagctcctcctcctctacctcgagatcatcgaccgccgggatccggccggccgcgccctgccggagatgatcctcatctgccagaacctccgcaacaacctgcagagtcccaacgagtacatccgcggcgtcacgctgcggttcctctgcaggctctccgagcccgaggtgctcgagccgctcgtgccgtccgtgcttgcgaacctcgagcacaggcaccacttcatcaggagacacgctgtctcctccgtatccgcgatctaccgcctcccgcatggggaccagctcatcccggacgcgccggagctcgtcgagcggttcctcgcatctgagcaggacgcgtccgcacggaggaacgcattcctcatgctctgtgcctgtgcacaggaccgcgctgtcgcctacctgctctcaaacgccgaccgggttgctgagtggcccgacctactgcagatggctgttgtggatctcatccgcaaggtctgccgatcccagaaccgtgccaacaagggaaggtatatcaccatcattacctcgctgctctccacgcccagcacagcggttgtttatgaatgtgctggcgcgctggtgtcactctcttcagcacccacggcagtgcgagccgctgccaacacctactgccagttgctctcttcgcagagtgacaacaatgtgaagctcattctactggatcgcctcaacgagctgcgcactttgcaccgggatgtcatggtgggggtggtaatggatgtgcttcgtgcactggccagccccaacttagatgtcaagagaaaggttcttgatttagttctcgatctgctcaccccgcgtaatgttgaggaggtggtgctttatctcaagaaggaggtggtcaagacgcaagctggagacctcgagaagggtggcgagtaccgtcagatgctggtgcaggccatccatgcctgtgctgttgagtactcagaggtggctgggtctgtagtacacctccttatggacttccttggagacaccaatgttgctgcagctgttgatgttgttctgtttgtacgtgagatcattgagaccaatccaaagctgcgtgtttccatgatccagaggctaattgatacattctaccagattcgagcatcccgggtctgctcatgtgctctctggattcttggggagtactccctctctctatcagaggttgaaagtgccattgctaccattaaacaatgtcttggggatctaccattctacactgtatctgatgaaggggaggcaactgattctgctaagccagccaaggcagtggtgaactctgtcactgtatcttccaggcggcctgttgttcttgcagatggcacttatgccacacaaagcgctgctactgagaccattttgactccatcagttgctcctgggtcattggcatcaaccctgaacctcagatcactcattctatcaggtgatttctttctggctgctgttgttgcatgtaccctggccaagcttgtgctgaggctggaagaagtgcagccatctaaggatgagtcaaacaaggcttgcactggagcattgctgatcatgacatcgattctgcagctgggccagtcttcttaccttccccacccaattgataatgattcatatgataggattgtgctgtgtgtgagattgctttgcaatactggtgatgatgtcaggaagatttggttgcagtcatgcagacagagctttgcgaaaatgcttgctgagaagcagttcagggagacagaggagatgaaggcaaaggcacagatctctcatgcccagccagatgatcttattgatttttaccacctgaagagcaggaagggcatgagccagcttgagttggaagatgaggtgcatgatgatttgaaggctgcaactggtgggtttaccaaggatgcagatgacgcaaacaagctcaaccgcattcttcaattgactgggttcagtgatcctgtgtatgctgaagcatttgtaacagttcaccattatgacattgtacttgatgttactgtaattaatcgcacaaaggagacacttcagaacttgtgcttggaattggctacaatgggagacctcaaacttgttgaccgccctcagaactacaccttggctcctgagtctagcaaacagatccgcgctaatatcaaggtttcatcaacagagactggagttatatttggcaacatagtttacgagacttcaaatgtgatggaacgatcagtggttgtcctaaatgatattcatatcgacatcatggattacatctcacctgctacctgtgctgatgttactttccggaacatgtgggcagaatttgaatgggaaaataaggtggcagtgaatactgtgattcaggatgagaaggaattcttgaatcacattatcaagtcaacaaacatgaagtgtctgacaccaccgtctgcactagacggagaatgtggtttccttgctgctaatctttatgcaaagagtgtgtttggtgaggatgctttggtgaacatcagcattgagaagcaacatgatggcaagctcagtggttacatccgaataaggagcaagacccagggaattgcactcagcttaggtgacaagattactctcaagcagaagggtggcagttaactttgacaagtgctgcagttgtatcatcatttttctcttttaggaaatccacgtgccagagataccagtgccgtggcattgaattgagtataaatgtttttttgtacaaaaggatcaaagaaacagataagacgacagttatgaggaagtcacggtgttagatccctgagcatgaagttctcggtcgaagatccatgttgctgtagtaacgatgctgttccaacttcctttgctgataaaatgacaatgtagaaatagttctgaagttcatgttgatttgtcgacaggtgggtcaattgtgatcctgtactattgttatgaatccctcttgttttgttttgatgttatatttgctcttattttaattttatggtcttgaaactcaaactcggaggttgtcaccttattttattttttattcttagtttattgctactacggtttgtatattatatatatatatatattacatagttagattttgttt

SEQ ID NO: 145381 - DNA, 2445 bp, Zea mays
  Clone ID: MRT4577_64100C.1
cctcgggctggccggggagcccacctgcagcctcagggtcaggggctcagggcaccagttcccatttcctcggcctccgcgccggccatggacgtcgatgacccctcaccgcgcgccggcggaggcagcggcgtggacccgccccgcatccggcggctggaggaatcggtggtgaaccgcatcgcggcgggggaggtgatccagcgcccgtcgtcggcggtcaaggagctcgtcgagaacagcctcgacgccggcgcgtccacagtctccgtcaccgtcaaggatggaggactcaagctcatacaggtttccgacgacggctacggcattcggtttgaggatttgccaatactgtgtgaaaggcatactacctcaaagttatctgcatatgaggatttacagaccataaaatctatgggctttagaggggaggccctggccagtatgacttatgttggccatgttactgtaacaacaataacagagggccaacttcatggctaccgtgtttgttataaagatggagtaatggagaacgagccaaaaccctgtgctgcagttaaaggaactcaaatcatggttgaaaatttattttacaatatggtagctcgtagaaaaacattgcagaactccaatgatgactacccaaagattgtagatttcattagtcgttttgcagtccatcacatcaatgtgaacttctcctgcagaaagcatggagccaatagagcagatgttcatagttcgagcacatcttctagactagatactattaggaatgtctatggggcttctgttgttcgtgatctgattgaaatagaagtttcagatgaggatgctggagatgcagtcttcaagatggatggttatatatcaaatgcaaattatgtggcaaagaaaatcatgatgatccttttcataaatgataggcttgtagagtgtactgctttaaaaagggcaattgaatttgtgtactctgcaacgttgccacaagcatccaaacccttcatatacatgtccatcaatcttccatcagaacatgtggatgtcaatatacacccaaccaaaaaaagaggttagcctcttgaatcaagaccgtattattgaaactataaagaataccattgaggaaaaactgaggaattgtaataccacaaggatattccaaactcaggcagtaaactcagcacttactcaagtttacacgcagaaggacaagggtactgaggtcaaaatggcccctggagtgaaatctcaaaaggctcctgtgagccaaatggtcagaactgatccacgcaatccatctggaagcttgcacgcttactggcatgggcaatcttcaaaacttgaaaataaatatgaccttgtttctgtaagaaatgttgtaagatcaaggaggaatccaaaggatgctggtgatttatctagccgtcatgagcttcttatggaaatagattctcactgccatcctggtcttttagaggttattaagaattgcacatatgttggcctggctgatgaagtttccgctttgatacaatacaatactcacttataccttgtcaatgttgtaaatgttagtaaagaactcatgtaccagcaagctctgtgccgttttggaaacttcaatgcgatccagcttagtgaaccagctcctcttcaggagctgctgctgatggcactgaaagatgatgaatcaatcggtgatgaaaatgacgaggagaaactggagattgcagaggcaaactcgaaaatactgaaagaaaacgctgagatgattaatgagtacttctctattcacgttgatcacgatgggaacttgaccaggcttccagttgtacttgatcagtacacccctgatatggaccgtctcccaaattttgttttgactatggggaatgatgttacctgggatgatgagaaagagtgcttcagaacggcagcagctgctattgggaacttctacgcactccatcctcccatccttccaaatccatcggggagtggtgttcaggtgtacaagaaaaataaagcttgcatggcgagtggtgaacatgttgatagtacagatgaagatgacattgatcacgaactacttgcggaagcagaaacagcatggtcccaacgtgagtggaccattcaacatgtcttgtttccatccatgcgacttttcctcaagcccccaaagtcaatggcaacagatggaacctttgttcagattgcctctctggagaaactttacaggatttttgagagatgttagcccacacttctaactacttacatgaagccaagaaagacaccctataacatgttttgcactgtacatattcgtgtagtgtcgcaaatgtttttttaatagttcattgacttatgagatggaagtataccatgagcatgctattgttttctccctctaattgagttgtctaatgatatctaaag

SEQ ID NO: 145382 - DNA, 364 bp, Zea mays
  Clone ID: MRT4577_64101C.1
gaataccacgacttgcttccttatagtctttctcccgtttgcgaggaatctccacaatttggagcctctcgcccttacagtaaagatcacaaagaaacacagaagtaaggatgggagagcaacacacacaagactcaagtcagcacacacacgcacacaagctaagacttgagctcgaaacgtagcacagtgagttcacaactcaaacgaagctcaaatcactaacacaattgatcaaatgcgcggaggcggagtctgggagtcttaggatgcttagtgaatgcttaggttacccctccatgcgcctaggggtcccttttatagccccaaggcagctaagagccgttggaggccaacttggaag

SEQ ID NO: 145383 - DNA, 216 bp, Zea mays
  Clone ID: MRT4577_64102C.1
ccactccacccaggatgggaatggtagggcgctccatgctttccagcgcaaaccatgtgctgttcacattggtggctttgctgtcgttgataaattcaacaccacgcactggactcaccggctccattctgggtgccagcgattcaaacgtttgaacatgtacgcggatcttctccttgcggatccccatgggtacaccacctaatgctgctgtct

SEQ ID NO: 145384 - DNA, 337 bp, Zea mays
  Clone ID: MRT4577_64103C.1
acgcgcgcgtcttatctggtgtaacaaaacaaaggaccgttaagccataaatagcaggtggaggatcatagctgcctaacaagcgcgataagtggctgcatgcttgatgtggacaatgcacgagagcgctggagctgtatatgaagacatgttacagctactggagaaggctctggatgacaactgttatcatggcctacgagctagcattgagtcagtgagaaatgaactgaagtcaatgcaccaagatcataggcacattggagatcttaagcacactgtataagctgtcaaaggactaaaacacgtatgaacaacaatcctatatgctgaactc

SEQ ID NO: 145385 - DNA, 428 bp, Zea mays
  Clone ID: MRT4577_64104C.1
atcataatcacttcatttttttgtatatctgcttgcaaactttaaccatgagcaattcaactccctgtcctgtctgaccctccattttacatgaatactgttaatatacaatgttgaccataattcattgacatgcactgaatgaagtgttaaaattctatccttgtacattatgcaaaaacatattataataactgataaatctttaactcctggctttcctaataaaggatccaactgatattaattttgaccatcaaagggatcttttttcaggtttgaaagcataagggaccgcactttctattaatacaataaatttagcctagaggtattgaaaaactggaaatcatgcaaggggggcatttttagaatccatagctccattagcttatttggcgcaacttgacgaactgcttgcttaaagt

SEQ ID NO: 145386 - DNA, 998 bp, Zea mays
  Clone ID: MRT4577_64105C.1
gcccgcttataaaaacggcgagccccgacgacgcctcccgccacacacagtacgtacaagcctcatcagctcgctagcatagcagcaaccagctatggactccaccaagttatccgcgctgctggcgctcgccatgctcgcgctctcctcgtcgccgctcgctctcgcgtgggagaaggcggagccggagtgccactcgtgcgagtccggctcgccgccctcgaccggcgtccccctgcccccaatcagcataccgtcagtcccactgccccctgtcagtataccgtcggtccccatcccaccggtcacccagctgcccccagtcgtcggactgccgccggtgacccttcctcccattccgatcatcggaggaagcccgccgaagaagggccaccggaaggcgtgcccgccgcctccgtctcccccgacgcccacgcccacgccggtcctcggacaagtgccccatcgacgcgctgaagctcggcgcgtgcgtggacattctcgggaacgaggtgcacatcggcgacgccaacgtcaagtgctgcccgctcgtgaagggcatcgccgggctctccgcggcggcgtgcctgtgcaccgccatcaaggccaaggtgctggacatttccgtctacgtgcccatcgcgctggaggtgctcgtcaactgcggctgcgaggtcccgccaggctacaaatgcacttaaacgactccattccatttcatcccatctcaccatgcgtgcacagcgaggtctccttttgccctcccgaatgcaaagtttgaaaggctcgtcgacggatttgggtctccttttgcccacccgaatgcaaagtttcgaaggctcgtcgacggattgggctcttcggctactgcattcttccttatttcattcttccttagtgtcttctcaaatgtcactttgtactttgtgtgaacctgtatcaaactttttttagttggattcgattattgtttgaagtgttaaattaaaaaaaaaaaa

SEQ ID NO: 145387 - DNA, 1023 bp, Zea mays
  Clone ID: MRT4577_64106C.1
cggtcgacccagcgtccgaggaggagggcaagtcgccgcctcccgcttttgtgttgcggagagtcgaagggatgaagaacgagcaggcgatttctgaggttctctgctggtctcgggatccctccgagcttaggagattggccctgaggaaggacgagatccacagcagccttcgtggtggctcctaccaccagatgaggaacggttccagggagttcatgagcaccctcgccaattacaagatccctatcgctgtggtcaccacacgcccacggaaggttattgaggaagccattgaagctgtaggcgtgcgcagcttcttcgatgcggttgtgacagcagaagacgtgtaccggggcaagcctgacccagaaatgttcctgtacgctgctcagcttctcagtttcatcccggagaggtgcatcgtgtttgggaactccaattcggcggtggaagctgcgcatgacgcacgtatgaagtgtgtcgcggtcgcaagcaagcacaagatctacgagcttagcgctgcagaccttgtggtgaagcaactagacgagctatccgtcgttgacttgaagaaccttgctgatattgagtccccggagtttggcatggaacctgaaccagagatggaggaggaggaggaggtgcccccaccatcgacgtctgtgggtatagatgatctattctggtaagagaccagattgtacatttgattgattcctctccagaacacagatgtattgttgtcaactgtcatagtgatcagaaagaagggcttatcatccttctgtaatcagtagaatgtgatatgtaaaaaatgttgtctagagctcacacactgtatatatatactcagaaagaaagctgggaactgaatatatgaatcagaacatttgaatctgcagttcctgaaacaatgtaacaccacaaggtttctgtcgccgaatcagtattccggatgctgattatattgttctctgcagtcttcttgccatatattgtgattgaaattgcacttggtgg

SEQ ID NO: 145388 - DNA, 1010 bp, Zea mays
  Clone ID: MRT4577_64107C.1
catttgctgcggccggccgggccggggccacacacacagtacgtacaagcctcatcagctcgctagcatagcagcaaccagcaatggactccaccaagttatccgcgctgctggcgctcgccatgctcgcgctctcctcgtcgccgctcgctcttgcgtgggagaaggcggagccggagtgcaactcgtgcgagtccggctcgccgccgtcgaccggcgtccccctgcccccgatcagcataccgtcagtccccctgcccccaatcagcataccgtcagtcccactgccccctgtcagtataccgtcggtccccatcccaccggtcaccgagctgcccccagtcgtcggactgccgccggtgacccttcctcccattccgatcatcggaggaagcccgccgaagaagggccaccggaaggcgtgcccgccgcctccgtctcccccgacgcccacgcccacgcccacgccgtcctcggacaagtgccccatcgacgcgctgaagctcggcgcgtgcgtggacattctcggggacgaggtgcacatcggcgacgccaacgtcaagtgctgcccgctcgtgaagggcatcgccgggctctccgcggcggcgtgcctgtgcaccgccatcaaggccaaggtgctggacatctccgtctacgtgcccatcgcgctggaggtgctcgtcaactgcggctgcgaggtcccgccaggctacaaatgcacttaaacgactccattccatttcatcccatctcaccatgcgtgcacagcgaggtctccttttgccctcccgaatgcaaagtttgaaaggctcgtcgacggatttgggtctccttttgcccacccgaatgcaaagtttcaaaaggctcgtcgacggattgggctcttcggctactgcattcttccttatttcatttgatttgctattcttgttgcatgtctggatatgcatctagtgtcttctcaatgtcactttgtactttgtgtgaacctgtatcaacttttttttgtt

SEQ ID NO: 145389 - DNA, 1244 bp, Zea mays
  Clone ID: MRT4577_64108C.1
ggtacccccctgggtgcctcgacggcggccgggccggggcccacacagtacgtacaagcctcatcagctcgctagcatagcagcaaccagctatggactccaccaagttatccgcgctgctggcgctcgccatgctcgcgctctcctcgtcgccgctcgctctcgcgtgggagaaggcggagccggagtgccactcgtgcgagtccggctcgccgccctcgaccggcgtccccctgcccccaatcagcataccgtcagtcccactgccccctgtcagtataccgtcggtccccatcccaccggtcacccagctgcccccagtcgtcggactgccgccggtgacccttcctcccattccgatcatcggaggaagcccgccgaagaagggccaccggaaggcgtgcccgccgcctccgtctcccccgacgcccacgcccacgcccacgccgtcctcggacaagtgccccatcgacgcgctgaagctcggcgcgtgcgtggacattctcgggaacgaggtgcacatcggcgacgccaacgtcaagtgctgcccgctcgtgaagggcatcgccgggctctccgcggcggcgtgcctgtgcaccgccatcaaggccaaggtgctggacatctccgtctacgtgcccatcgcgctggaggtgctcgtcaactgcggctgcgaggtcccgccaggctacaaatgcacttaaacgactccattccatttcatcccatctcaccatgcgtgcacagcgaggtctccttttgccctcccgaatgcaaagtttgaaaggctcgtcgacggatttgggtctccttttgcccacccgaatgcaaagtttcgaaaggctcgtcgacggattgggctcttcggctactgcattcttccttatttcatttgatttgctattcttgttgcatgtctgtatatgcatctagtgtcttctcaaatgtcactttgtactttgtgtgaacctgtatcaaacttttttttgttggattcgattattgtttgaagtgttaaattgaggcgcattgtcaccgtcatttaaaaaaaaaaaaaaaaaaaaaaaaaaaaaaatctccgtctacgtgcccatcgcgctcccggtgctcgtcaactgcggctgcgccgtcccgccaggctacaaatgcacgtgtgctgtgtggaaatggaaatggaaatggaatgggatggaatcgttcaagtgcatcccacgcgtccgcccacgcgtccgcccacgcgtccg

SEQ ID NO: 145390 - DNA, 794 bp, Zea mays
  Clone ID: MRT4577_64109C.1
ttgggaccctcgaggccggccgggattttccttctctgatatttcagcacaccaaacctctcgcctctcttccccaccctcataccaggcggctgcaagatccagtgacctccccacgacagtttcatcagaagaccaagatgcctccagggaagagatccacacggctcacccgaaaatccgaagaaattgacacaagatatgaagcgccaaatgaggtatagactgaaacagaagtacttcaatgggatatctgcaaatcaagtgaggactacatcgcctatttcaagcatgtctgacaatgagtggagaaagttggtggagaagttgtctgccccaaatcacaagaagcaagaaaaacataaggatgttgaaccaagtgcaatagatcttttcaaggagatgcattgcagcaagaagaaaggttgacatgaaagaaatggtagcagcaccagttcaggatggacaacaaccaaaatctcctgtagaagttgtttctaatgtgctaccgagctctagtgtgttcctacgcaatgttcgtctttagtccacctccaagaaaagctccacaatgacagtttatgcaaacgttcaaaaacttcgagatgaactggagaccgagaagcaagaaaaagatggccttcgggaagaagtggaaaccttgaaggctcaaagaacagcatctcaggagaccattgatagtatgaagaggtcgatggatgaaataacaccctcttcgtcactattagctacatcgagggccagtgcctccatctaagtctggttgacactat

SEQ ID NO: 145391 - DNA, 333 bp, Zea mays
  Clone ID: MRT4577_6410C.1
cccacgcgttcgcgccgtatacaaagtactcatacccaaggagatagtacacccgcacagtcggcgagtgcatctacgacaccaccgcctgcggatcctcaatcacaccaggcgtgacaggagggggagcctacgagagcgcgcggacgccggcgacaaagctctcctgcacaccagcgcttcgtggcgcggggcaggactacaccacggagccagcgcgagggatcgagtggtggtgtatagcattaggagtatctactaccacatctgagatgagatccaggactgcgacagtccactgccagcactcaattgttgcctcagcgttcaata

SEQ ID NO: 145392 - DNA, 279 bp, Zea mays
  Clone ID: MRT4577_64110C.1
tgtgactctcaccattcggcttcttatgcacggaaaggaagtaggaagcatcattgggaagaaaggggagtcggttaagaggatccgcgaggagagtggcgcgcggatcaacatctcggaggggaattgtccggagagaatcatcctctgaccggccccaccaaatccctctttaaggctttcgctatgatcatcgacaagctggaggaagatatcaacagctccatgaccaacagtaccgcggccagcaggcccccggtcaccctgaggctggtggtg

SEQ ID NO: 145393 - DNA, 1044 bp, Zea mays
  Clone ID: MRT4577_64112C.1
aacaacctttattttatgtgcatagttgaataatctatgaatgtgtaatgctgcaaatgaacacccataaccatttaaagaggtggttattacgtgtgcttgcctccattaatcagagatcatgtctcctaaataatttttattgtagtgttaatagttgactaacagttcatccaccaaactataatattttaggttgtagctacgttacctacaagtatcctaatcctccttatttgagcattgtgcagctcctcatgctctttctctaaaaagtccatttacatattcatcaagtactgaatagacagaacaataataacagataatgtatagcttgttgtttttctatttatgttttcgactctaacatctctatttatgtaatcgactctaacatctctctagcatttaaatatatgtatagcttgctaaagcatttagatatgcagtaatcgactctaacatctctgtttctgtttctgtataccaaagcacaatttaacatggaagaaatggtagcagcaccatttcaggatggacaacaaccaaaatctcctacagaagttgtttctaatgtgctactgggctccagtgtgttcctacacaatgttggtcttcagtctgccttcaagaaaagctccacaacaactgtttcggcaatggctcaacaacttcaggatgaactagagatcgagaagcaagaaaaagatggccttcaggaagaagtggaaaccttgaaggcttaagcacaagcatctcaggagaccactgatagtatgaagaggtcgatggaagaaaataacagcctccttcgtctactattaagcttcaatcgaggccaagtgcctccatcttaagtctggttgaccactataggacctgcagccttatggctgctatagtggctagcaacagtagctctagatttgaagttatcggatcattttaaattatgcttaatgtttaatactttgagttgaagttattggatttgttttggattttaagttaaaggatttgcagagttaaaaaaaaaaaaaa

SEQ ID NO: 145394 - DNA, 415 bp, Zea mays
  Clone ID: MRT4577_64113C.1
cccgggtcgaccagcgtccgcgcacgctccggcctccagccacccgcccgcgcgcggcgcaggatcacctcgcccgtacgcacttctgaaaagagggaagcagggcaacagctaaacggctgctgccgcgtggagcaccaacaagccccggacggccaaaccgagagtcgagccgagtacctaggacaacacgacggacctgggacacgacggcaaggacggagcctaacactggggcgaacgccccaagaccgccaagcacaacctgccggaccagaaccgacgtgcgcaagcccggcgtgacactcgtggaggacaagaggcaacaacggaaacaccgcccacggctgagggcaccaacaacagggaggggaacacatgggcgaccaaggacaaggtgaacaaagccaagtac

SEQ ID NO: 145395 - DNA, 442 bp, Zea mays
  Clone ID: MRT4577_64114C.1
ctcagcggcgggccccctctaccaggcggctgcaagatccattgacctccccacgacagtttcatcagaagaccaagatgcctccagggaagagatccacacggctcacccgaaaatccgaagaaattgacacaagatatgaagcgccaaatgaggtatagactgaaacagaagtacttcaatgggatatctgcaaatcaagtgaggactacatcacctatttcaagcatgtctgacaatgagtggagaaagttggtggagaagttgtctgccccaaatcacaaggtacttgccattgaccattctataaattacacaggtttctttgatctattggatatatcatattaggtcagcctgctagctactgcaaatctttgatctggaacaacaagctatattgtttggagctatatctgtaaaacaacaacctttgatcact

SEQ ID NO: 145396 - DNA, 660 bp, Zea mays
  unsure (1)..(660): unsure at all n locations
  Clone ID: MRT4577_64115C.1
ttaatatgccccaccatctgaatggtctgaggcgctgtattaccggtgacagctgcctgtgacaaaaccatattattgagttccgcggaatcatcagagttggctgattcgtcctgatctggcaccggaagcaactgccacaactcttccatcacatgtagttgtacaaaatcagcacaacgatgacctcgagaatactgaaggccacatttgtagcaaagacccctggctctgcgataagcatataacgatgtcagcttatcctctgtggtcgtagtagtgattcctcctgttgttttatccattagcttgggagcggcaacacttggcggaggtggcaggggcaagaggtgactttgccatgttcttggatgcaggaacatcgaacctccggtagtcacgcctcttgtcagccacctcttcctgcaattgagccaacacnaaagcagtatccaaatcctttggcctttgaaccataacaacagacttcacatcatcacgaagcccatctataaatctcatggtataataaagagggtcggatatagaatgataagcctttcactgatctaccactgagaaatcgtctacatatcagcactgtgagcctgctgatatgacactgctataagacggatgtgaccttcaacctttttatat

SEQ ID NO: 145397 - DNA, 1107 bp, Zea mays
  Clone ID: MRT4577_64116C.1
cgccgaacctctcgcctctcttccccaccctcataccaggcggctgcaagatccagtgacctccccacgacagtttcatcagaagatcaagatgcctccagggaagagatccacagagttcacccgaaaatccgaagatatgaagcgccaaatgaggtatagactgatacagaagtacttcaatgcgatatatgcaaatcaagtgaggactacattgcctatttcaagcatgtctgacaatgagtggagaaagttggtggagaagttgtctgccccaaatcacaaggaaagttgtgtgaagaacaaacttaatcgtgaaaaagtacagtatcaacaatgcacaggctctcaatccaacattgcacaggcttttatattgaagcaagaaaaatataaggatgttgaacctagtgtaattgatcttttcaaggagatgcattgcagcaagaagaaaggttttagtgaaaatgttcaaaaagctattgtaattgcttgttttgatttcatgtttgtattcacaacttgcaacttgtggtatactatactgatgaataacctttaaattttaaattagggtgacatggaagaaatggtagcagcaccagttcaggatggacaacaaccaaaatctcctgtagaagttgtttctaatgtgctatcgagctctagtgtgttcctacgcaatgttcatcttcagtccacctccaagaaaagctccacaatgaaagtttatgcaaacgttcaacaacttcgtgataaactggagaccgagaagcaagaaaaagatggccttcgggaagaagtggaaaccttgaaggctcaagaacaagcatctcaggagaccattgatagtatgaagaggtcgatggatgaaataacaacctccttcgtcaactattaagctacaatcgaggccaagtgcctccatcttaagtctggttgaccactataagacctgtagccttatggctgctatagtggctagttacaatagctctatacttgaagtcaaaggatcattttcaattatgcttgatgtttaatactttgagttgaagttattggatttgtttcggattttacgttaaaggatttgtagatatatgt

SEQ ID NO: 145398 - DNA, 1022 bp, Zea mays
  Clone ID: MRT4577_64117C.1
gggccgagccacgcgtccacccaagcgtccgcccacgcgtccgcccacgcgtccgtcattactaggataatatcatgaatgattttggcgagtcacaaatatatattgagaacctatacttaccccatttgtgtacaacttcaatttgaactcaattattcatatgttgtattatgttttatcacaactaatgtttagttatatgcaacattactcttataaaaatagtctgtgtctatacaattataattatttatatttgacactaattgtgtaagataaatcactgaagggaacaaaaggccagagccacgtattcaagctgctaagtttgcatgagagggaggtattcacgttttcacaatttaacatggaagaaatggtagcagcaccatttcaggatggacaacaaccaaaatctcctacagaagttgtttctaatgtgctactgggctccagtgtgttcctacacaatgttggttttcagtccgcctccaagaaaagctccacaacgactgttttctgcaaaggttcaacaacttcaggatgaactggagaccgagaagcaagaaaaagatggccttcgggaagaagtggaaaccttgaaggctcaagcacaagcatctcaggagaccattgatagtatgaagaggtcgatggaagaaaataacaacctccttcgtcaactattaagcttcaatcgaggccaagtgcctccatcttaagtctggttgaccactataggacctgcagccttatggctgctatagtggctggttacagtagttctagatttgaagttataggatcattttcaattatgcttaatgtttaatactttgagttgaagttattggatttgttttggattttaagttaaaggatttgcagatatatgttttaaagttatattattctcttctagatgaaatatttgtgtttaacaaagtcatatgatattttggttctgatgtgtaatattctatgatgatatgaatgcatatgatgtattccttgcgatg

SEQ ID NO: 145399 - DNA, 360 bp, Zea mays
  Clone ID: MRT4577_64118C.1
ctcgttttggtcgagcaagtttacaaaacgcgttaggtgctaatttttaatggtttaaaaaatcataatgttcttttaattgtcaatcgactgcatttttaaattgtttaaaaatgagttcattttttaactttatctcaaaacattatgaattttaataatgatcagcttttgtagctgtttcgttgtttattttgatgtgatataaactaaaaagaatgtttcttctcttctttctgtattctcttaatattttaacttttttgtggttattaatttcaacatttgtaaaaataatctcttttttaaatttccacttgtctaaattaattgcaaatactatgaaaacccaatttaacg

SEQ ID NO: 145400 - DNA, 183 bp, Zea mays
  Clone ID: MRT4577_64119C.1
cggctcgagcacacgttcacggtagcgagagtttatcgtcgtcggcggtgaagatggtgtcgctgaagctgcagaagcggcacgacgctagcgtcctcaaatgtgggaaaggccaagtctggcttgacgccaatgaagtcaccgagatctccatggctaacgcccgccagaacatccggaagt

SEQ ID NO: 145401 - DNA, 740 bp, Zea mays
  unsure (1)..(740): unsure at all n locations
  Clone ID: MRT4577_6411C.1
aattcggcacgaggggaaaaaacggaggaaacgagaaggccctcctgcctgccccttgcttcctcccgagtcccgtactcccgtggcggcggcggcggctgctcgacccgcccgcccggccgccatgtcgatctgcgggtaccactccccacgcttctccgaggatattacttggctcccgcaatggcttcagccgtatagcacgccggtggttggcgagcaccggaacaacagtaccgccgtttcatcgctttcttgccagaattgtgcgtttgtcgggcacccttcgcaggagcatcaggattgtcagaacgccactgatggttatagcggcttcatcttgcacttgtcaggagatgaggacacggtggttagttcaccggtcagcagcaatgtgctacctttctctttgcgtgtgtcttcagaaagtgccgcacaaccttccctagctgaaggcagtggcaatcctcagataccaaactctggtacgtgcaatggtctatccgagagcctctgtgcagatggtgaagaacaagaggtcaatgctgtctcccagaatcagtttgaggctaacgatcctcaggttgatatgccgacaaaagtggctcgcaaggagatcagtatacaacctgatacaatcagacatagaagacatggtttcaatggtggaaaggttgatgttcgaaagcttcgtantggtgatgtaaatgatgcgattgaactatcgattgctgcatctg

SEQ ID NO: 145402 - DNA, 119 bp, Zea mays
  Clone ID: MRT4577_64120C.1
tttattttacatggaaacataccttcccgagggtgactataatcttctttttggaactctggaacatggacacacaatcctcaactcccaaatgctttatcttcaacgcgtttcgctat

SEQ ID NO: 145403 - DNA, 427 bp, Zea mays
  Clone ID: MRT4577_64121C.1
gaggacacggtccaacatgggatcccaacaaagggaaattcccacaaaaacaggggccaggggccctggggacaaaaacaattataaatacaggaccccaaggcccacccccaggagagtttaatcgaaaaaggacacctgccgggcaaccaaaccgggtaaccttaaaacattacccatcgaagggacaaaaatttaaaaaggctccctggacaggccccaaaaacacatttacctatcgggggggaaacaccaccaaaagggcggggtcctgaagcccaggggagggggaagccccggaaaaaattaatttgggggagaattagggggagggggaaaaaaagggttttgttggaaaaaaggggcgggggggggtggccccatggtggggacaggggggggggaagcggtggcccggggggggggg

SEQ ID NO: 145404 - DNA, 163 bp, Zea mays
  Clone ID: MRT4577_64122C.1
acggaaaaaaaacaccaaaaaaaattaatataattcaacccatgattcccctctccctttgcacattttgatattttgcagggaaaatggaactggggaagggcatacccccaataggggattctaaccattgccattctaccccatccataatattggatat

SEQ ID NO: 145405 - DNA, 592 bp, Zea mays
  unsure (1)..(592): unsure at all n locations
  Clone ID: MRT4577_64123C.1
gccggcccggctgcgatatcaccgtaaagaaacaattgccttttgagaaatacactaagcaccgtcaacaacatctgccacttatacacggcaacagaccaacaacctttcaggatgctctccttcgtcaactacactcctcgacctcaccccgagcacaagaccaaggaacattgccgggttcactctaacccatcaaacgttcctctcgatatctccaacaatactccagccaccgaccccaagtctgccatcccacgatctgccgctccgcctgctccagcagcctgagtgagtagaccactagttcaatgcttgcacaacatatgtcttcgtgaaattcaacgtctgaggatagccgaggagtaaaatggtgtttgagtttttagggaaatcaatcggttgtaatagggtggacaaaatagcttatgaagctgagattacgattctcccaatggaactagctaccgagcactgtcatgatcaaaaagggaaaatatatcgccggggggtacattagctatccgggtagctggtttggccaattgatacactatnttaaatccaaaaaaaaaaaaaaaaaaggccccta

SEQ ID NO: 145406 - DNA, 190 bp, Zea mays
  Clone ID: MRT4577_64124C.1
tagcccttttgcatacccctttcctcgggctgcaccaacctcttcgggaacgtacaatcctaatgttcctccatgttggactctcccacgttttccatcgtggccctgcactgcttggcacaaggtttttgtttcctgatggtctcttcttttaccaaaaaatcattgacacaactagtgattttcctgg

SEQ ID NO: 145407 - DNA, 337 bp, Zea mays
  Clone ID: MRT4577_64125C.1
gctcttattctctacacatacatggggtgcgcgaatgtacaaccggtgccaatatcaaggagctcaggacttaataggaccctcgtcagatcttgtgcggccctaaaacggcctcaagcatcttcaggttactttgttaagtgcaatctaaccacatggatacaacacaagagcttcgacccgtgacatttactataaagatgaggccaccaagtgaaagcgcacttcttatgcttgatgagaggatgacatggactaagatcacagagtccatatttttttgcaaaaatggtcttatgggcatgcaagaggctcatgagaatgcaaaaaggattga

SEQ ID NO: 145408 - DNA, 425 bp, Zea mays
  Clone ID: MRT4577_64126C.1
cctaacatcctaatttttttgggttttgttttaaggattaaaaggaaaaaggagggaccaaaccccaggaaacccccggggcccccctttaaagaaaaaataaagcggggacaaacctttaaacggaaaaggggaaaaacccccgccccccctaaaagtttttaacacggccccccaggcttggggggcgccccccctttaccaaaaaaggggcgccgaaagataatcccctccaaggcgcggggagggccttcccgggccaatcatgaaaaacttgcccccgggcgggaaacccctgccgggggcacccgcccacccttgtttcccccaaaccgggggtttcccctttcaagaggccccaggcgctagccggggagggcccccaggcccccccctgttcaaggccccccggaaaaacacccccc

SEQ ID NO: 145409 - DNA, 256 bp, Zea mays
  Clone ID: MRT4577_64127C.1
tccgattttactagttctcgatctcacgagctcgtagtgacatgtagattattattatgcagtttattcttatgtttggtgtgatgttaattttgtatataacatgtttgtttgtattgctacgactagcagtgaggtcacgagaacctaaaaatcatcctggtacctagaatctcaagtcccaggcaagttatgcccttgaccacttttatacccaataatgttcttgattatcacttatcaatgcatgggtttg

SEQ ID NO: 145410 - DNA, 660 bp, Zea mays
  Clone ID: MRT4577_64128C.1
cacactctacaactatatcgatacagatctccttttccttcccttccccgcaactaccctctactgtctactgcacgctactactatttaagacacatcgactgagggatccggtactagaacaaagaggagagaacatcttggactagacacgaccgctgacagcaacatcaaataatgcctaggccacgaagcatgaagacctctacagatctatcaactctctgagaagcgaatagacacttgcaagtgctgtctaaacggaggatgataatgccagtggaggaggatggtctgatgctgatgacccgatctacttctgccacctccacgatagctttatggataaggatcgtcctcctgcagatgatcgaaacggcagatacgacgcacgccctggacacgtagactgactaacgattgcctgtctaacgcatgctcgggtgatcatgatgattggggtggatgatatactgtgcctgctaatagctccgctgaccgacttgccatcctcaggtttcaacgcaccagaacatgtcgttgaccgaccgtcgtatatcttctagccgattggagatatgctccataataggaggactgttgatcccgttccccccgcacatcttctatcgcttgtgtcgtctcatctaggatgtcagc

SEQ ID NO: 145411 - DNA, 279 bp, Zea mays
  Clone ID: MRT4577_64129C.1
aacccaagccctccaaacaggctggaagcgccaaatcttctggggctgggtcctgctgagttccgcacgccactcgttaactcatacgatcctcacttcattgaacttgatgtgctctccacacgctgttgatctcttttaggcgcatagtaatgaccagctatcagaactaagacccgacgctgacatgactgctgacgagcgcccaaccttatgtgcctcaatcataggagactccggctcccaagcccacggtccagaagataccgttacaagatt

SEQ ID NO: 145412 - DNA, 538 bp, Zea mays
  Clone ID: MRT4577_6412C.1
catcgagggcggggaacaaggcagcgtgctactcggagccagcagcggcgaaggcggcgtctcttggctcgccaacatggccaccggcgacgcgtccgccgcgggcgccccgctggtggcttcggctcggttcgtggtggcgacattgctctgcggcctccatttgcggcggcttctgctgtagtggtgatggagagggtagaggaaacccactcgtacgtagtagcactgtactgtaccttaccttacattgtagcagtgtctgtagatgattactatcaattgatgatgttgagttagtcgcaggattagacacttgtgtctgctagtactggttctggttctagttctagttctagagaagaaattaatgcatgcttgcgggtgggcattgattgattaagttaatcgccgtcgtgctatgttgtttgttgccactgtttgttcatgcgtggctcgaggttggcggggaacacgggcctggcatggtctcagagaagactgcctggaataaaaaacatacttgggtcctgtgttc

SEQ ID NO: 145413 - DNA, 251 bp, Zea mays
  Clone ID: MRT4577_64130C.1
ggtacgggcgacgtctgtgtaagcacttcgcaagcgaaagtacaggagcgcaagagcccagcaggcgccaagaaaagcaccgtccggctggtccgcgccagcgcaatatggtgacggcgatcgcggtggcgttggcggggctcgggatgcttgcgggcgtctcgattgccaacaggtctttttcgtcgttcgcgggcgccgcgctgtggaggctcggtgggggccccgcgctttttttgtgcggttgcgga

SEQ ID NO: 145414 - DNA, 382 bp, Zea mays
  Clone ID: MRT4577_64131C.1
cttatgcgtccgctttatttgcgtcacaaatggcctaccctgctcactcattcagcgcaatgcgaaagctctgagaggctacctgtatggcacaagctggtgcatccgcccagaagagctcacgagagggaacccaagaagactgacccagaccacctctgatgttctgatggcgtacgcactaggacttgtgcatagacaacaagagcacgaggctgagcatctggcactggatgtggggcatgctcgactaggatcatagtcggcgttctccaagctaccaatatgacacgggccgcatctgccccgccatcactgaggaccttgatagctcgggtctagaccaaggtgcgctctgacggttttacagggccgatgccaa

SEQ ID NO: 145415 - DNA, 236 bp, Zea mays
  unsure (1)..(236): unsure at all n locations
  Clone ID: MRT4577_64132C.1
nacacgcgtccgaaaaagatgcttgttttggccatccatttggacaagcaattgtagtgtcgtgtgtgtgcgactaccaattcccatttataccatggttcagcttggggtagtcctaggcagcattttcatacgctatacggtaatattcgctaccatacaggtaaccagacgattattcagtagcttggcactcataattgtttctcacatgactctgcactaggcaatgcaga

SEQ ID NO: 145416 - DNA, 282 bp, Zea mays
  unsure (1)..(282): unsure at all n locations
  Clone ID: MRT4577_64133C.1
caagctatccacagctccatcctccgcacagcgtcggcaccccatcatccgctgtctgacttacgcgagctcggcaagcaggacgacgccgtcggaccntcacgctcgggctctaagcgatggcgtcagtgtcttcccctcacagatctcggcagtcgactcgcgaactcgctgccggtccttgacgcaccagccggctactatgcgctgagctgattgtacattcgataaacagagcgaagggaacagatacaagaagtaccactgagttcatcttgattg

SEQ ID NO: 145417 - DNA, 896 bp, Zea mays
  unsure (1)..(896): unsure at all n locations
  Clone ID: MRT4577_64134C.1
cattgggtacctcgaggccggccgggctgttcgtgccaggccccccggccgtttccgggtttcggatacgcatttggctgttggctctccgatccttgctatagtagtagtagctacttccatctccagccgctcgagcgcgcgagccctgatccacgctagcttgagacacagagctagagctagagcgagctatctaatccacctacctccgaggcctagcgcttgcagctagctagtggccgtcttgttccgtccggcagcgcaggtcggcctggtcggcggtgctagctaagcgaaagcaagagagagaggtacggcgcggacggcgggtgggagttcaggtgatgccgccgccgttgcccatggggaggcagccgaggtggtggtggagtggcggctccggatccgcgcggacgctggccgtcggcgtcgcggtggtggttgccctcgtcgtctccctctgcttcgccttcatcggcggccgtcgtctcgcggggctactggtgggtggcggcacccccgcttcagattccggcgggaggaccatggcagcggcagcagcccatcccggcggtcaggtggcgacgaccgatgaggagatggtttacaccggacggcggcgcctgctgtcgggcggcccgggctcgcatccgccgcggtgcgcgtccaaatgcggcagctgcaacccatgctacccggtgcacgtgtccgtgccgccgggggtcctggtcaccacggagtactacccggaggcgtggcggtgcaagtgccggaaccagctctacatgccgtgaccgtcgtcacatgcagtggacgacgctcgtccaactggagacgaagacgaccaagggcgggcctggccgctgcccaagnccaatggctgcgagtcgcga

SEQ ID NO: 145418 - DNA, 213 bp, Zea mays
  Clone ID: MRT4577_64135C.1
aagagacagaggcctatacagcagtctggtaaatgcacattcagctgtccaaagagatgcggacagagggttcccagctgggttgtcagaaatgctggtacagagccctgggaccgacttataccttctctctgctcttccacgccacacgtgagctcaacgctacgttaatggtccgatagctcaaggtggtgttactgtacacattagttg

SEQ ID NO: 145419 - DNA, 193 bp, Zea mays
  Clone ID: MRT4577_64136C.1
cacccgttcgataaatgcccatcccattttgcacccggattttttatttattgtactactgaacattactggggtggtttcgctgcaaaagagtgttatatataaatagcaagaatgatattattatcatcatcttactcctcattctttttgtactaacagctgtcttttttatcccaatatcacaaaataa

SEQ ID NO: 145420 - DNA, 160 bp, Zea mays
  Clone ID: MRT4577_64137C.1
agtcggcacgaggccgctctgatgcacaggcggtggtgacggccaccgggaccgggtcccagcccccgctgccacaggcgtcggcggctcgcccccgggcgagcggagtaagaagcagcggacgcaggagccgtcctcaagctccagcgtggatggttag

SEQ ID NO: 145421 - DNA, 260 bp, Zea mays
  Clone ID: MRT4577_64138C.1
ggagcgttggcgccgtgcggactgtcttgaccaccaacagctactaaagaggggactgggcggctgacacgccgcaatggtcccgacacacgggggccagcaccagccgagtgaaaggaggggtgaacagacaggcccgcacgcctgatggcctggaacctgggccacctggccacgtctgggcaccgcctcggggtcgactatcagcatcagacagagaggagctaccagactctgcaggcaggcattggccacacggt

SEQ ID NO: 145422 - DNA, 1600 bp, Zea mays
  unsure (1)..(1600): unsure at all n locations
  Clone ID: MRT4577_64139C.1
cgggatggtctacaaccgtatgcgtactttatcagttaactgcccatgatctagcagtggtccaatgtttgtcctagactcctagggggaaaaaagatctgcactttgtgctgtgctgtttcttcttcttgttgttgttgtacgtagcgccgagatttcccagcaccgcttgcgatttagaaacccacagtttgttctttttcgtttaggggatggctgtacactgctgctgcttcttactaatgatagaaaggagaggtgaagttcgcagttgctgagatagacagatgatagaaggcaacgctagctaccgcgagggggaggaagatgagcaatcgggaaagcacggcatcaagcaagttgttgccttgtagttgtaggagtgtccttattgcgactttgtcaccctggtgacctgagcgctcccacgcggccatgtctgatgaattacggcggcccattcgctcccatcagcaaacacccacgaatggccaatcgttgcccagcagcagcgggcttcagtattcgtcaaccaaattgtcagagagagtccttttgcgccgcgcggatcgcatactanagaggaggttgagcggagtaggcggcggccagcaatgaaggtacagtgcgacgtgtgcacggccgaggcggcctccgtcttctgctgcgccgacgaggccgcgctgtgcgacgcatgcgaccgccgtgtccaccgcgccaacaagctcgcggggaagcaccgccgcttctccctcctgcacccgtgttcttcctcttcctcctccgccgcgcacaagccgccgctctgcgacatctgccaggagcggaggggcttcttgttctgcaaggaggacagggcgatcctgtgccgggagtgcgacgcgccggtgcacagcgccagcgacatgacgaggcggcacagccggttcctgctcaccggcgtgcgcctctcgtcagcgccggtggactctgcgggcccatccgaagaggaggagcaggagaacagccgcggcccctgcaacgacgaatcctgcagcagcggcagcggcgccggcggcgcgaccacggcgaccgccagcgacgggagcagcatctccgagtacctgaccaagacgctgcccgggtggcacgtcgaggacttcctcattgacgacgcgtccgctggcgacgtcggcgcctgctcggatggcctctatcagggacaaaatggacagatcagtggggtgctgcaagaagcttacctgccgtggacggagcgggagcaggtgcaaactgacgtcgcagacgagcgggccagctgggagcggtgggtgccacagatgcatgcggagttcggcggcggcggcaagcgacctagagcgtcgccttcgcctccctgttcgtactggtgattggtgaaaagttcgccgtcttcagcaagatgatttgtattgggctaattagtagagctactgtaggaacgaccgaaaaatgagccaaaaaagtaacggcctccatcgagctcgttttaaattattctctgcctaaagccaaactttcagaaaggagaacggtattttcctgttcgattaattaggtcgatttcgatcgaactcgttcc

SEQ ID NO: 145423 - DNA, 561 bp, Zea mays
  unsure (1)..(561): unsure at all n locations
  Clone ID: MRT4577_6413C.1
ggaaagctccgtctccattgggccgcggttcggcgcgcaagccaatctcatgagaggcacgcctcgcacgaggcacccaggagggcaggccccacccatccgcccggtcccatagaagaccttcgctgaggcatccctcacaaatattcctggcttccncgacattatactcttaccaagcaaggcngggggccatcgccttcctctgggagccgggggacgcgccggctcctcttctctcctggancccggcccaaagggggggacccccccgcccggggaaccacccccctttggctccggagctagttcggcgccaaaacatccatcttgcagccgggaggggcccccaaacctgaaagctggccttgcccccaaaacgacaagggcccccataaaccccgaccagggcccccaggggaaaaaccaacccccatgccccccccctgggcggggagggttgcctggaacccctgccggtcccaaaaaaccacggccttcctgtggtgggtgggcggccccccccaaacctccaagccatggggggacggcactttcttt

SEQ ID NO: 145424 - DNA, 212 bp, Zea mays
  Clone ID: MRT4577_64140C.1
atgcgcttgcatgcgaccttgtagttctggtattgggtgaccgaaattcatttaactgaccgggggtttacagctgccagactggaaaaacccaggcaccgcctaacttaaatatgtcgcatcacatctatctgtcgccagatgacgtaatagcgacaaggcccgaaccgactgaactacccaacataagcccaggctgaatggccaatggc

SEQ ID NO: 145425 - DNA, 1694 bp, Zea mays
  Clone ID: MRT4577_64141C.1
gtacatgactgcattctgtcacctcgctcccagtgtgtgtgtatatatatcgtcctccgacactattgtatctgcagttccttcggttgctaacatctctagccgagacatttgacttggacaatctgctcatctaccactccggcactcccacgccgggccgcgcggatcgcatcgagtttgagtggagtaggcggcgggcagcgaatcagcgatgaaggtgcagtgcgacgtgtgcgcggccgaggcggcctccgtcttctgctgtgccgacgaggccgcgctgtgcgacgcgtgcgacgaccgcgtccaccgcgccaacaagctcgcggggaagcaccgccgcttctccctcctccacccctgttcgtcctctgcgcacaagccgccgctctgcgacatctgccaggagcggagaggcttcttgttctgcaaggaggacagggcgatcctgtgccgggagtgcgacgcgccggtgcacagcgcgaacgacatgacgaggcggcacagccggttcctgctcaccggcgtgcgcctctcgtcggcgccggtggactctgctgacccatcagaaggggaggaggaggaggagcaggagaacagcagcaggcccggcaacggtgagtcctgcagcggcggcgccggcgctaccacggcgaccgctagcgacgggagcagcatctccgagtacctgaccaagaccctgcccgggtggcacgtcgaggatttcctcgttgacgacgcgtacgccagcgacgtcggcgcctgctcatcagacgggctttatcaggtcagttcagttcttccatgcgaatggaactgcaagctttcactgaggcgttcctgagaacgccaagaacattattaaacttgtgcattgcgccgccatttgcacacagagccacagcggccaatgcgccataccggtctcgccgccggcgccggccatctatcgcgtcgccattaatcacggggcaggctgttgccatgctcacacctgcaaggccgagttgctggaccagtctgtcaggataatatctcgtggagaccacctagatacgatacgatacgatctgatgcaagcgaacatcatgtgctaaaccaataaaacaatggaaaaggcaaaaattcattaatttcatgtgtggaaccatggtctcacttggcgtgtggtcatttaacttgcatttttagcagggacaacaagatggacagatcagcggggtgctgcaagaagcttacatgccgtggacggggcgggagctggtgcccgctgacgtcgcagacgagcgggccaactgggagcggtgggtgccgcagatgcacgcggagttcgccggcgacagcaagcggcccagagcgtcgccttcgcctccctgttcgtactggtgaaaagctcgccgttacccgttattagtagagttgatttactgggtaccgtaggaacgaagagaaatatgagccaaaaaaaatcatggaacggaccggtgtttctctgttggattattattgggtccatttcgatcgagctgctttaaggtgacgtttggttcataaaatgtaacgtaaataacaataataacgattgaccctcgagtgacagcggtaataagtttaaataggccgataccagtttttaatatgagatccgattacggttggaattaaacaaatatgatttaacgttatcagtt

SEQ ID NO: 145426 - DNA, 279 bp, Zea mays
  unsure (1)..(279): unsure at all n locations
  Clone ID: MRT4577_64142C.1
aacagaaacgcaaggatggccagaggtcctaagaagcacttgaagcgccttgctgcgccaaagcactggatgctcgataagctcggtggtacctgggctcnccgcccctcccagggtccccacaagcttagagagtgccttcctctcatcgtgcttctcagaaacagattgaagtacgcccttaccagacgcgaggtcgttcagatctgcgctcagcgtctcgtgaaggttgacggcaaggtccgcactgacatcaacttccccgctggtttccaggat

SEQ ID NO: 145427 - DNA, 750 bp, Zea mays
  Clone ID: MRT4577_64143C.1
agtgcggccatctcctgctccctccatggcacgccctcccccgccgtgagctcggcgcccagccccaactcccagtcgagcccttccccctggtctccatagcacgtgcgccctggagctcaccgtgcccagccaaactcttctgtgcgcgcgtctgctgcctctgctcggtccctgctgcgagctcgtcggcgttgcccctacttccatggctggtcgcgcccctgctcatcttcctcgtgtgcgcctgctccccatggatggctgccagcccttgttcctccatcggattgcgcttcggcccctcccatggcgcccggcggtcctcacctctgctcctctgcgccgccgttctctaggcccggcctcaagctccctcggcaccctctctcctcttctctccctcatcctcaacctccagccgtggagcttccccgccgcagcctagctccctctatccgttcccagccgcggagctcctgtgcgcgcgagttcctttggtggacgcgcgctggccgtgatccacctcaccccatcgcggcgctccagctcgctgcgcgccctgctccactatgtcgatccgcctatctccctgagctcacccctgtgctcggattttccgtctcgtccatggtgctctcctcagccgcaacttgccgagttccgcctttctccgctctccctgctcgcctaggttggatggggatccacctggtggcgtttgtggcagcgggggcttcctgcaggcgt

SEQ ID NO: 145428 - DNA, 1045 bp, Zea mays
  Clone ID: MRT4577_64144C.1
ctaaccgggccatgccacttgcatgctcccattaggccagtttaactcataatgaaaagtagcatgttctccagaagatatgcgatgttcatttacaagaactgcaacagcagatgtcatcaggggtaaaaacgctgttacaccaaagacaaatcttactccataagtatccacaagcgaaccgctgaagtaagcactcacaattcctccaaaggcagaagatccccaacagagcgactggagtgatccagatgtgctttgagattctccacgggctctctcaacaaccatagaatccactaccatcacttcgatgatttctaacaaaacatctgagaaggcaacagaaagtgagccaagaagaatagaggatgctgcactgtatttactgctcactactgtggccattaaactccatgaaagtgctccaagtaaccctgacagaaaaaggtacgacctccttcgatatccaaagagtggaatggaatcactgataaagccatagaggggcttgatcaaccacggcaaggatgagaaaccagataccactgcggtctcagctggatctagatggagatcatcttttaagtaaaagctcacagcaagccgtgcaagacccagaaccccttgcacaaaatagacaatggcaactgccatattatcaggggacagatccacgccaaacgccgtgaagtatcttggcccgagcttgctcttgcgcacatcatctgtgctaggctgccgccactcagagtgtctactacttgaatcatcctttgtcaagcccacttgatacctaggcatggcattcccaccgggccagtggtcggaggacgaggcggcggcgtcacggctatcgagctcgagggggcggcggacggcggcctcctcgtcgtacgcgtcacgtgcggccgagcccccggaggccatcccgagctaccagaagcccgcggggcgcggcgcggtctccggtgagaccttgagcgtttgagacttgagaggacgcggaggtggagcctgcggagcacaccgggccggagaagtt

SEQ ID NO: 145429 - DNA, 475 bp, Zea mays
  Clone ID: MRT4577_64145C.1
gacccgagtaagagtccttgcattcctctatataagctcccaacccttcggtgagagatttaaaattaatcatatatacagtcgaagcaacatctatatctacagttaacctgacctcaaaaagctttaaaattaatcatatagttacagtagccaataaacaaagcctcatctttgcatcatagcccatgattgcaactcatggttatgcttgaagcaaaattgtgaccttgtcttctggctcgattttcctgatgacgcatggctaacagtcgaagcaaccataacttcaagtgtgaacgagagctcatatgaccttaagttcaatccaagtttcagctgatccttgagctctgtaagattacccaaaatctgataaaatggagttgttcaacacaaagtcgaatagggggtctgtgtttgcccatgtaaaaccagacactgcaggaatgactgtaactcctccaggaaatct

SEQ ID NO: 145430 - DNA, 829 bp, Zea mays
  Clone ID: MRT4577_64146C.1
caaaggcagaagatccccaacagagtgactggagtgatccagatgtactatgagattctccacgggctctctcaacaaccatagaatccactacaacatctgagaaggcaacagaaagtgagccaagaagaatagagaatgctgcgctgtatttactgctcactactgtggccattaagctccatgaaagtgctccaagtaaccctgacagaaaaagatatgaccttcttcgatatccaaagagtggaatggaatcactgataaagccatagaggggcttgatcagccacggcaaggacgagaaaccagataccactgcagtctcagctggatctagatgaagatcatctttcaagtaaaagctcacagcaagccgtgcaagacctaaaaccccttgcacaaaatatacaatggcaactgccatattatcaggggacagatccaccccaaacgccgtgaaatatctcgaccccggcttgctcatgcgcacatcatctgtgctaggttgccgccactcctcagagtgtcgtctactacttgaatcaccctttgtcgagcccacctgatacctaggcatgacattcccgccgggccggtggtcggaggacgatgcggcgacgccacggccctcgagctcgagagggcggcggactgcggcctcctcgtcgtacgcgtcgcgtgcagcccaccccacggaggccatcccgcgctatccaaagcccgcggaccgcagcgcggtctccggtgagaccttgagagggcgcggaggtcggaggcgagacagtgcagagcacgggcgatgggccggagatttcccagcccggccggc

SEQ ID NO: 145431 - DNA, 1695 bp, Zea mays
  Clone ID: MRT4577_64147C.1
gccggccgattggggaactcgcagttgttcggcactcgcaccagccgcccagccggaaccggaagcggaaactgaagcgagggacccgggcaccggcgccggcacgattcactagatcgtaggcgcaggcgcgggtccgtctgtgacggacacggcggtggtggcgaggaggaggaggacttgaggagcgttggggtgagcgagcaaaccagatgcgctcggaatggggaagcccttcgatgtggagctcggcggcggcgcgggaggcctcgagatcgccggagccggaggcggtggcccatggggagggcgagtcttcggcgcgatcgggcgggcggtttcgttccggtgcgtcttcgtgctcctgctcgcggcaggggtgctcataccggtgctgttcctgctcgtgccctcgcaccagcaggggtacctctcagacgaccacgacgtgctcgctgctgaaatcaaagttggtttcactttggaaaagccagtgtcattccttacttctcacatagacaaactagggaatgacatatttgaagatattggtgtacctaatagcaaggtttccattgtttcaatgcaccccttaacctctaaatacttcacacatatcgtttttggtgttcttccttatccaaaagatgcttcaataagtttaccggctctaagtgtgctgagatcatccttaatagagatgatgctccagcaggtgaacctatccttaacaccatcactgtttgggcacccatcttctttcgagctattgagattccctggaggaattacagtaattcctgcacagtctggttttacatgggtgaacacagaccccctattcaactttatgttgaacaactccatttatcagattttgggtaatcttacagagctcaaggatcagctgaaacttggattgaacttaaggtcatacgagaaaatatattttcagttcaggaatgagattggttcttcagttgaagctccagcaactattgtggcatcagtattagatggaagcagcaatcttttaccagatagattgagacaactagctaagctaatcagagaacctgatgcgatgaatcttggacttaatcactctgtatttggtaaagtaaagggtgttcagctgtcatcgtacctgcaacacaaaatctctggtatctcctagcccatctccggcccatcgccatcacaatcaccttctcgcatgacatccttgtccttaccctgcatcaagtctccctcgtccagcttttagcccttgaagttatggttgcttcgactgttagccatgcgtcatcaggaaaatcgagccagaaggcaaggtcccaattttgcttcaagcataaccataagttgcaatcatgggctatgatgcaaaaataaggctttgtttattggctactgtaactatatgattaattttaaagctttttgaggtcaggttacctgtagatataaatgttgcttcgactgtatatatgattaattttaaatctctccccgaagggttgggagcttatatagaggaatgcaaggactcttactcgggtccacgttctgcaataatactttcttgtaacgtattgcccataaatccataatacaacatgcaacttctctgcaaaaaaaaaaaaaaaaaaaaaaaaaaaaaaaaagaaagggcggcaaccgaaaagtgagctc

SEQ ID NO: 145432 - DNA, 342 bp, Zea mays
  Clone ID: MRT4577_64148C.1
cggacgcgtgggcggacgcgtgggcaaaatactagtagtgcataatataatatagtaatccggtccataacaacgccggcaggacctgtcttcggtgacaatacagctttcatcataaactaaaaaggtcccggcgcaaaaactatttacaaaaatgcccgtcgtcgacgtcgtctgtcggaggagagcgtctctcagcttagtagtaccgaattttcctcgagcgacggctggagcggcatggcctgcatgggcgcctgcgcgtcgctgctgaaggactcgacggtgctgctggtgctgctccggcaaccggctgcggaaaggggcccgcccaaggggtaa

SEQ ID NO: 145433 - DNA, 195 bp, Zea mays
  Clone ID: MRT4577_64149C.1
ctgttgggttaataaaagtaaaaaaaaaaattgagaatattatacgcctttgagttttgtttaaaacccaaaaggtgtaacgtacaataaattgtatgcctaaaaaaaggatttttaaaccaggagttaatggtgacacttaaaaaaccaaaatgatgtaaaaaaggcttgcaaaatataaaaaccgttatttgt

SEQ ID NO: 145434 - DNA, 748 bp, Zea mays
  Clone ID: MRT4577_6414C.1
ggtaccctccaggcctgccgggggtggggcggctccgtgcaggagatgctcaccttcgcctccgcaacacgctcggggtgcccttcgtcgacccgtcccttatccgcgacgagcagcggaccgccgagagcaacctctggctgctgccgacgcccagcgtgttcggcaacaccacgctggtgctgtcgcgggcccacaaccgctcctactccgccaagaacatgacgcagttcctccgggacatcggcttcgaggaaggcgtggagccgtaccgcgcgcggatacggccgctcgtcgaggccctgccggagcccggcgtgcccctgacgtgcctcgtgggcaccggcgtcgacacggtggagagcctcgtgtacggcgaccgcggcttcgacgaggcccccgagaaggtggtctatggcgacggcgacgggacggtgaacctggccagcctcataggcccgatcaaggcgtggtcggactcgccggcgcaggtcgtcgaggtggtggagctgcccaaggtgtcgcattccggcatgctcagcgacaagagcgcgctggagcagatcataaggatcatcgattctatcaacctgaacgccacgagctatcatcattcctcttagaatgttttgctttagtagacaactaacgatgatttcttttcacttaaatcggcgacagcagctagttttttttatttggaaaaaagtttattgttttttctgtgaggattatcggcatttgcttt

SEQ ID NO: 145435 - DNA, 431 bp, Zea mays
  unsure (1)..(431): unsure at all n locations
  Clone ID: MRT4577_64150C.1
gccggccgggctgcgaaaatcccagacgccacgccacccatatacatacaaacacacgcacgcgcgcgcgcgcgcctcccgctgttccgcaaaacaaaggaaacgaaggagaggaggccatggcgccgagaacgtcagagaaaaccatggcaccggcggcgccaaggccaagaccaacttcccttacccctcgtgcgtgcccctctccgcagccggttgccggagcagcaacagcagcaccgtcgagtccttcagcagtgacgcgcaggcgcccatgcaggccatgccgctcccgccgtcgctcgagctggacctgttccaccgcgcggcggccgcggccacgggcacgggcgctgccgccgnacgcttccctttcggcagcatccccgttacgcacccgtactacttcttcgggcaggtcgcagccgcaa

SEQ ID NO: 145436 - DNA, 212 bp, Zea mays
  Clone ID: MRT4577_64151C.1
cgtccgaaataaaaacatttcggtctcatcttcttccacatccatcctccatcactccagctgggtggtctaggaccgacttagcgaatttcgaagcaagggactgaagaggaacctgaggaaggcgaaaatgatctaccggaactgggagctgttctcgtccacagtcgtcatttgggtcggcttcgccaccgtcagcctcgccgctatct

SEQ ID NO: 145437 - DNA, 746 bp, Zea mays
  unsure (1)..(746): unsure at all n locations
  Clone ID: MRT4577_64152C.1
ggcagcggccgtcgggccggtacgcggcggagatccgcgacccggcgaagaagagccgggtgtggctcggcacctacgacacggccgaggacgccgcgcgggcctacgacgccgccgcgcgcgagtaccgcggcgccaaggccaagaccaacttcccttacccctcgtgcgtgcccctctccgcagccggttgccggagcagcaacagcagcaccgtcgagtccttcagcagcgacgcgcaggcgcccatgcaggccatgccgctcccgccgtcgctcgagctggacctgttccgccgtacgcttccctttcggcagcatccccgttacgcacccgtactacttcttcgggcaggccgcagccgcagccgcggaagcagggtgccgtgtgctcaagctggcgccggcggtcaccgtggcgcagagcgactccgactgttcgtcggtagtggatctgtcgccgtcgccaccggccgctgtgtcggcgaggaagcccgccgcgttcgatctcgacctgaactgctcaccgccgacggaggcggaagcctagtcgtcgaagcttttaatgactgtctgtcttcttagttctttcttctcctttttctcgaggaaaattcggtactactaagctgagagacgctctcctccgacanacgacgtcgacgacgggcatttttgtaaatagtttttgcgccgggacctttttagtttatgatgaaagctgtattgtcaccgaagacaggtcct

SEQ ID NO: 145438 - DNA, 1389 bp, Zea mays
  Clone ID: MRT4577_64153C.1
ctggccggggctgcctgctgccgcgacagccaccgacgctggctgtctagcagtggctctgctcatgcgcacctacccggctatcccctcacctgagtcgcctcgcgcaattggtgcggactgcggagcaatccccgaatcctccattgattaggcccaagcttcctcctcgggtggcggcggcggcggttgcagctgctggagatggccttggcgagggcggctgcgctgccgctgctcttgctccccttcctcgccgtcacgacctgcctcgacgttccttcccatgggtgctattggactggttgccaaagcaaatggtttggagtctgtgctgctcgccacttcttggattctcagtcagatgattgtgacggtctttgtgtggagtcaaaaagccctccatgccttccactgcacacacatttctattgttgcaaaccaggaaccccaaaggtaacaaataagtgtgggcactgcaagagcaagctggattttggcaaagagtttatatgctgctcagattgctctgatccaaccattatggacaagaatagcaaactgggttactgcaaaagtggcgccgacttaacaatgcaattaaaactacaagaaacttttcgctgggttgctggcccatggatgacatgctcctctccatgtgatggtggtattcgatatcgtgatgttgcttgttatggaaatctggacgatgacacaatcaaacactaccctgtagatgatgctagctgttcagcagacaaaatgcctgcaagacaggaggcctgtaatcagcagagctgtagtgatcctgagatgacacagtcagtgaatcctaaggaaagtggaatgtctggttggttggtagtattggttgttatcctaggtctcagtgcagctgctggcattgcatttaccagctacacttactacgtgaggagaacctctgggacgagtggttttgtttatgtcatgatggaagcttattcttgaggattgagaggaacgatttcctgtaagtctgtgagcgactgtagaaaatctctggagttggagacaaccagcttgttcattctttggactttggtttgctgttttggtcgtcagaaatggttgtcgtctatttccgctgattcatgtgccgacgaggaactatcccgggtatagcctgggagtctagacaaaacaactgagtgtttctatggtacttgttagctgcaacttttcttcgagggcaattgaagttttgtttaggatagattccccccaaaaaaaaaaaaaaaaaaaaaaaaaaaaaaaaaaaaaaaaaaaaaaaaaaaaatgcctttgtcggatgcaataggctattcaaatttgaactaaaaaaaaaaaaaaaaaactcagacctcg

SEQ ID NO: 145439 - DNA, 392 bp, Zea mays
  Clone ID: MRT4577_64154C.1
tggcttccccagcggggcctacccgagcggggcgggaacattctccgctgatggctcttcgagcacttacttcaccgggacccgagtgaccccgataagcacctgttggcgaggcagaccgggctgcccaggaaccaggattacaactggttaagtaacgcccgtgtccggctctgggaggccatgatcgaagagaggtatcatcaggagtgcagacagctcggcggctcctctgccggcggagggggtcccgagtccggaaacgacccctccggtggcgacgactaggactgcccgaccaccaccggcgcagcgcaggtaccgcaacagcaacatcaccttggtacagtgcctggggagatgccccacaaggccgacccgggcgccgacag

SEQ ID NO: 145440 - DNA, 1173 bp, Zea mays
  Clone ID: MRT4577_64155C.1
cgggtcaacccacggatcaagtgagatccgccgcttgggcggacgcatgggccgaggccggccgggccgggaaaatcccagacgccacgccacccaacacatacaaacacacgcacgcgcgcgcgcgcgcctcccgctgttccgcaaaacaaaggaaacgaaggagaggaggccatggcgccgagaacgtcagagaaaaccatggcaccggcggcggccgctgccacggggctcgcgctcagcgtcggcggcggcggcggggccggcggcccgcactacagaggcgtgaggaagcggccgtggggccggtacgcggcggagatccgcgacccggcgaagaagagccgggtgtggctcggcacctacgacacggccgaggacgccgcgcgggcctacgacgccgccgcgcgcgagtaccgcggcgccaaggccaagaccaacttcccttacccctcgtgcgtgcccctctccgcagccggttgccggagcagcaacagcagcaccgtcgagtccttcagcagcgacgcgcaggcgcccatgcaggccatgccgctcccgccgtcgctcgagctggacctgttccaccgcgcggcggccgcggccacgggcacgggcgctgccgccgtacgcttccctttcggcagcatccccgttacgcacccgtactacttcttcgggcaggccgcagccgcagccgcggaagcagggtgccgtgtgctcaagctggcgccggcggtcaccgtggcgcagagcgactccgactgttcgtcggtagtggatctgtcgccgtcgccaccggccgctgtgtcggcgaggaagcccgccgcgttcgatctcgacctgaactgctcaccgccgacggaggcggaagcctagtcgtcgaagcttttaatgactgtctgtcttcttagttctttcttctcctttttctcgaggaaaattcggtactactaagctgagagacgctctcctccgacagacgacgtcgacgacgggcatttttgtaaatagtttttgcgccgggacctttttagtttatgatgaaagctgtattgtcaccgaagacaggtcctgccggcgttgttatggaccggattactatattatattatgcactactagtattttgatagccaaaaaaaaaaaaaaaaaaaaaaaaaactcgactcgtgc

SEQ ID NO: 145441 - DNA, 2207 bp, Zea mays
  unsure (1)..(2207): unsure at all n locations
  Clone ID: MRT4577_64156C.1
attgggtacctcgaggccggccgggccgggacacctatcctcacccaaacggtcggtcgacctcacacgtcccccggatccgacggccaacagtgcgcgtgacccctctccgccgccacctctgtacaaaatacccgccccaccaccacgccgaatccgccctctagtgactagttcacgtcagttgctgctccccccaccttctcctcctcctgctcctgccctcggtttctgatcagcgaacatgggaacccgcggcgtcgccctgctgctcctcgcggcggtgctgctcctccaggcgctcctccccgcgtcgtcggagggcctggtgcgggtcgcgctgaagaagctgcccgtcgaccagaacggccgcgtcgccgcgcgcctctccgccgaggagaggcagcgcctcctcctccgcggctccaacgctctgggctcaggcggcgacgacgactccgacgtcatcgcgctcaagaactacatgaacgcgcagtactttggggagatcggcgtcggctcgccgcagcagaagttcaccgtcatcttcgacaccggcagttccaacctctgggtgccgtcctccaagtgctacttctcgatcgcttgctacttccactcgcgctacaagtcagggcagtcaagcacttacaagaagaacggaaaacctgctgccatacgctatggaactggttccattgctggttttttcagtgaggatagcgttacattaggtgatctggttgtgaaggatcaggaatttattgaagctacaaaggagccagggcttaccttcatggttgcaaaatttgatggcattcttgggctaggctttcaagaaatctctgttgggaatgcaacaccagtgtggtataacatggtgaaacaaggtctcatcagcgaccctgttttctctttctggtttaaccgacatgctgatgaaggagaaggtggtgaaattgtgtttggtggaatggattctagccactacaagggtgatcacacgtttgtcccagtcactcggaagggatactggcagttcaacatgggtgatgtcctggttgatggaaagtccactgggttttgtgccggtggctgtgcagccatcgcagattctggaacttccttgcttgctggccccacagccataattactgaaatcaatgaaaagattggtgctgctggtgtagtcagccaagagtgcaagactgttgtttctcaatatggacagcagatcctagatcttttgctagctgagacacaaccagcgaagatctgttctcaggttggtctgtgcacttttgatggcacccatggtgtcagcgctggaattcggagcgtagtggatgatgaagctgggaaatcaaatggtggtctcaagagtgatccaatgtgcaatgcttgtgagatggctgtggtatggatgcagaaccaacttgcccagaacaagacacaggagctcatcctgaactacattaatcagctttgcgagcgtcttccgagtccgatgggagaatcagccgtggactgtggcagtcttgcgtccatgcctgacattgcgttcaccattggaggcaagaagttcaagctgaaaccagagcagtacattctgaaggttggtgaaggacaggctgcccagtgcatcagcggattcacagctatggatatcccaccaccccgtggccctctctggatcttgggtgatgttttcatgggagtctaccacaccgtcttcgactatggcaagctgagggttggcttcgcagagtcggcctagggagtagggatatggtttggcagcaacccgtccagaggcaaacgcgtaatttgtgtgtttatgcgaccggcgatgtgtgtatatatgctactacatgtttagtgatgctttccgagacctgagacaacgcccgtctgttttaacgtggcgcaagaataattctggttctggatgtattctccgtacacaaaggcgtgtctgatactctgatgcaatggtgaccatcttgcggttgcgggtttgaaaaaaaaaaaaaaaaaaaaaaaaaaaaaaaaaaaaaaaaaaaaaaaaaaaaaaaaaaaaaaaaaaaaaaaaaaaaaaaaaaaaaaaaaaaaaaaaaaaaaaaaaaaaaaaaaaaaaaaaaaaaaaaaaaaaaaaaggggggaanttttttaaaaatgggggaggggcctttttaaaaaaaccaatt

SEQ ID NO: 145442 - DNA, 225 bp, Zea mays
  Clone ID: MRT4577_64157C.1
accacaccgcgcggtgagaatggggcaaggcttccaggacgaggggtgattctaaaaactagtaaaggatgaggatgagcacgacggtgtcacagcccggaccatcattatatggccgaaagcttaaggaaatacccaaggggactcaaccttggataaaaccgctagccaaaaggctctccgatgagctagttgcctgcaggacagaccagatcgggaggactg

SEQ ID NO: 145443 - DNA, 589 bp, Zea mays
  Clone ID: MRT4577_64158C.1
cggggaatacgcaaaggcacgcactaggacagggccgcgtgcttgccccagggtccttgcctgactcgatcatgtcgtcgtatacccggatatgtcatccagcggactgtacctgaactggaaaccttcgtttaccagctggggtcgacgacaggcacactggtcaggctgctcacgccgctggccagacagcaggttgagctgagatgccgcactgagggtactagggcgcgaggaaacgtgctagctcagatacagccgggttgtggacgcagcaaatgtatctccccgccgccgagcccttcttggcaatgaacagcctggtgcggcagacgaagtagacgcggaccagcggcaggatcccagcggcgctctcgatggcgtgcaggacggggaacgcgacttctgcggcctatagaaggaagaggccgttgcggacgctggagcgagcggtcgtcgccgatgcgaagcccacgctgatggcacttgatacggtgacgaggccgatgccgtgctgctccacgaacctgttcacctccttctccatgatctccttgtacaccgggtacgctcagcgtcctggaagctt

SEQ ID NO: 145444 - DNA, 323 bp, Zea mays
  Clone ID: MRT4577_64159C.1
aaaaagaaatccctgggcatgaataaatcaatactttgaatccatttcacaatcccaaatccgaattgttttggcaagacctataaaaaccctggggggggttttaaaattcaaaaggggccccccctttgtttctgctagaagaaaatgggcttcttatggtaaagaacaaccttgaaagggggcccgtcaaatatggaaccgcatgggtttaaggcagaacaaaacacaaaaaccggttatacctaccccaactaattttggacaaacagtctaacctgacgggaaaacagtttatcacaactggggtgtataagaaatgc

SEQ ID NO: 145445 - DNA, 609 bp, Zea mays
  Clone ID: MRT4577_6415C.1
ttctcctccaccgccactattttctctctctccaaactcccgccatcatcagccaatctcgcccacgccatcaaaaccaaccaccatccttgcgttgctcccatcgccctcctccgagacctcataaaccacaaacactactcctttccacaacgatcacagcacaccatgcctcgcgaagagtaccaggtccccaccacctccggcggcgcctcagccggagccatgacccgtggtgcaaccggcggagagcgacacgacagccgtgccgtcatgacctacatctgcggcgactgcggcggcaacgtcacccttagcaaggatgcgctggttgcctgccctcactgcgctgggcgcgtgctctacaaggagcgcactaagcgaatggtgcaattcgaggctcgatagacgggcgagtggcaaggagaatattacattcgagacggcatgaggagatgaaagcaccaaaattgagaaaaacaacaaaatcatagatcacactcgaggagtttttgggatacaactagggataatcaaagagcacaaaggagtcagagaaacttattacttgggaaattttttttaaatctaactttgatattacttctt

SEQ ID NO: 145446 - DNA, 226 bp, Zea mays
  Clone ID: MRT4577_64160C.1
gcgccaactgatgctatttggcctgcttgctagtgccgatgcagctaccttcctgccacaaggctcgcaggctcctatagctccagttctaactcagctcgtttcaccaaaccctgctgcctactgggaacacctgattctataccactatctgactctgcaggcctttgcagctgacatactacatctatcaccgttgcttattccacagtcattagctctatta

SEQ ID NO: 145447 - DNA, 555 bp, Zea mays
  unsure (1)..(555): unsure at all n locations
  Clone ID: MRT4577_64161C.1
ttttttttttttttttttttttttttttttttttttttttttttttttttttttttttttttttttttttttttttttttttttttttttgggggccaaaaaaaatccaaaagtttaggggggggataaantgtaaaaatgaaccttttttccaataaaaaaaaaaatttttttgggggggggaaaaaaaatataaaagggggaaaggggaattttgtcctgaatttcaaaaaaaaaacgggagcttctaaaaaattggggggaaaaaataaaggggggcctcaaaccttgctcgaaatgggggggaaaaaacaaaaaaggccttaaaaaaaacccacaaaaatgggggaaaaacgcccctggatttaccaatgttctttggcaaggggagaaaatacaaaagtttagagtaaaatacaaaaggctttttgggggattggaaaataatttttttttgttgggaaaaaaaaaaagaagcaaaacagatgcgggtgaagctacaacatctcgttaacgagaataaacggggggaaaagggataaaattgtgagattt

SEQ ID NO: 145448 - DNA, 212 bp, Zea mays
  unsure (1)..(212): unsure at all n locations
  Clone ID: MRT4577_64162C.1
ttttattactatttctttttctttatgggcagacccagagccgacaatgagcacagcagcaggctgtgtagtataccagngcacaccagcaccggtcgcgcgggatgtaaaacataaaccaagtgctagtccttgtcagcgggcggatggtgttgatcccagaccagttgaaggaacccaacccaactaaatcttgggggggggcgaccaca

SEQ ID NO: 145449 - DNA, 235 bp, Zea mays
  Clone ID: MRT4577_64163C.1
ctatcgcaccaaagctcttttacgagcagctgctgctggaatttatgaacagtattgatcagcaaaggcatctccaagagctactgttgatgactatttagtagctcaattagccgatactttgaatcatgaagctccaacccctgcaatctttgatgaccttcaaagaaaggtatatgaatcgaagctacgagatgaacgatcatatacttccttcagacagaatgcactttat

SEQ ID NO: 145450 - DNA, 621 bp, Zea mays
  Clone ID: MRT4577_64164C.1
ctcgagccgcaaagagatcatatggaaaccataggtcccagatttagcatcaatatgggcaagaaaaactgtaatagtttttgacctggaggttgggatatgcaagaatgaggggttgtgcaatatgaagagtagggactgggacctttccttcaggcttcagcacccacgtgttgcacattatattttagggccagctaattgagggataagtaggttctgctaatcaagggaaaaaactacttttgaatttgatggctcctatgtattgaatttatcacttttgtggactcctcaatagtttcataattctacagctggatattttagcggttgagctatctaaaagagaataagagttgcttaggcaaaaaacagaggtaacaaaaattgcaggcccgctgaaactggtgagttcaaattcctagcaccaactctggacgttcaagctatgttttttgctggtatgagatgtgaccattataataccagtaagttagagggtgattgctttaaagatccagggccgagtgatctttacgcctactaatcatggtttcgtgataggtgacactgcattgtatgtctaccctgagttaatataagccattcctattattt

SEQ ID NO: 145451 - DNA, 861 bp, Zea mays
  Clone ID: MRT4577_64165C.1
atggatcaggtgaggctgtcattggaagattccccaaagccaccagatcggaggaggtcgtcgtcggacgatccacactatctcagtggcgtccggctcatcggagctgcaacagtccaaacagccggctataatgcgaagcaaacatccccaagggggctcgctgcagccccacgtacgtgtcccgaaggctcaaactctttcacaaacagtaaagtccaagtcccgacgaagtcagggacgcaatatcgcggggtcaagggtgccatgtgcaagcgaaggccatgccagattatagtggggctcaggctcaacctcatcaccattcgggcccatctgccagccttcgcaccagctgccttccaagggctaaactaccttgacgagcgaagccctctagcactgcagccccaggcctccccttggccacaaaattacagagagggcacatacataaagtacaacggcagcacagatccaacccagtacatcatgactaccaggcaacaagaaaaggaaaatattcgccactattacaaaaagtttctcctcttgaaatcacagttgcccttagttgatgaccaaattgccatccctaatgcaatcagtggcctttgtgcaggcgtcctatacagtcactgcacaagggatttgcatccaacctctaggagttgtattagcttttcgaaaaatatgctggatcagaagagctccaccgccgaaaagtcgagtcacagcggaagcccaaagagactctataaaccagcaggacatggaccaatccttcgcatccagactacgcccatcaagacctcgaccaacaactccaagtccacaacatcgcaaagcagacacaactag

SEQ ID NO: 145452 - DNA, 250 bp, Zea mays
  Clone ID: MRT4577_64166C.1
gatccccaggacgaatgcggcaatgtttgtcgtgcataaaacatcgaaatcaaacgaagggccccagcccacagagtttccaaaagtaaattgcgtgaaccagaacaaatttctccaggaccacagacaagagggcaacaccacaacaaatcttgttgatctcccctgactcttggcactgggcctactcctttttggcctttgcccccaacacaaattatgtaccctgcccgagcacctctgggtgtgg

SEQ ID NO: 145453 - DNA, 336 bp, Zea mays
  unsure (1)..(336): unsure at all n locations
  Clone ID: MRT4577_64167C.1
ntttattttctttctttttttctttttcgacgggggttttttattatttacgccctactaaacgagggagaaatcacacaaccataaatcggcctgcccgcgttttaacatcggaactcaaatcataacaagtcctggggcaaagaaaggaaaacgcgggttgctaaaatataatccgccgatggggggcggttggaccaccatgtcaacccagaggccgccaccgttagggcgataaaccggggtcaccacggagccgaagggcagcaccaccatgtaggcagcccactcgttcatgaagaccaacctcttggcgttcaccacactcagcccgac

SEQ ID NO: 145454 - DNA, 213 bp, Zea mays
  Clone ID: MRT4577_64168C.1
tcggctcccgttcggaatgcgcagccctgcctccggcgaactggtccccaagcgatgtggcatggcgccggtgccgggtacgatcacgacggctaaagtgacgaaacctctattcttgaagaggccgatgcagttcggcatcagcggccctttgccgcccagtatagacctgcaccggttcgtcaagttgcccattgtcctgcgttgccagcg

SEQ ID NO: 145455 - DNA, 454 bp, Zea mays
  Clone ID: MRT4577_64169C.1
ggggacaaacaatgaaattttctgggtaaaaaaaaaaggccccccggggccctgtcggccctaaaaaacagggttggaaaagtttgttcggggggaaaaaaaaaaaggcccgggttttaaattaaccccccggaaaaaaccggtggatccccggccccccctttaaggggcaaaagcttcccccccccttggaaagggggaaggcccttgccactcccggacccggggggccaccccgaaaatccggaccgggacccggaggggtaccaattttccctatagggaggcgaattaaaacttggggaaaaaaagggcaaaactgtttcccgggggaaaatgttatcccctcaaaattccacacaaaaaaaaaaccggaagcaaaaaagggaaaacccggggggcccaaagagggagccaacccacaataattggggggggcccactgccccctttc

SEQ ID NO: 145456 - DNA, 489 bp, Zea mays
  Clone ID: MRT4577_6416C.1
gtacaagcttttttttttttttttttttttttttttacctttcttttttttctttttacagggccaggcccaccacacaagaggggccaattccagcgcactgggggccggtaccaagggaggcgaactcagggccaaagttggggccagcgtgaacatagtttccgcccgcaagaacacacaacacccgacaccagaaccaaaaaaagaaaagccgggggcgcaaaaggaaaaacctggggcacctaaagagggaggcacccaacatcaattgtgcaggccgaaaaccccgctttccagctggaaaaacgaatcggccaactcccttaaagaagcggccaacgcacggggagaggctgctcttgcatggggacctactccctttcctcggtcaatgacttgctgggagcggtattagggcactcaaaagcggtaatacctcactccaagggggtaagggggaactccacaaaaaacaggggaaccaaa

SEQ ID NO: 145457 - DNA, 379 bp, Zea mays
  Clone ID: MRT4577_64170C.1
ccggccggaaaaacatctctctcgacttcatcaacacaaacaaaaccaaccttcaaacaaccactaccctttcaaaaacaaccatcatcatgtctggctgtggatgcgcttcttctggctcttgcggctgcggctctagctgcacctgcgccggctgccctcacaaataagctatttcttcaacgacctcgatgggaaccctgatgggcgagatgaggcatggggaagctgaatgtccttcagggcctgacgattcagggaaggctgatcagcaatggatccactcgttacttgaccgtatctctattgagtgtagtcagaattgaatgaagacataaattgcagtttgaacgaaaaaaaaaaaaaaaaacccgcggcc

SEQ ID NO: 145458 - DNA, 740 bp, Zea mays
  unsure (1)..(740): unsure at all n locations
  Clone ID: MRT4577_64171C.1
caaggaggccgaggagaggaagaggcggaaagccgagaaggacaaggagaaagccgagttcaaagcgcgcaaggaagctgaggagagggagaaggtaacgatacgttctacgtgttctctgctttgaaattcgagttacattactataaatcatgcactcggcaacaggtctccaattctaattctgaccctgatcaaaacatctgcagaagaaagccaagaaagacaaaaggagaggcacggcaccagcagattctagcctccctggtgacgggcacgccgcggccttggcccagcagacctgcagcacgcatcggacaacccgagggaagctgaggctcctcaaccggcggcggctcccaagaggctgtctaggcccgcagcggcaatcaagcagctgaacagggtgcagcccatgccggcgccgctacgtaacaggggcagaaggagactgcggcagtacatcctgatcgcggcggccgtgctatcggggcttgcgttgttcgtggcaggcaactatattcccaggnnnnnnnnnnnnnnnnnnnnnnnnnnnnnnnnnnnnnnnnnnnnnnnnnnnnnnnnnnnnnnnnnnnnnnnnnnnntattatttcgattattctccnnnnnnnnnnnnnnnnnnnnnnnnnnnnnnnnnnnnnttggttgtgaaagatnnnnntgcattgtgttaaaagttgttttacaggatggtggtgaaatcttcgttagaacatgga

SEQ ID NO: 145459 - DNA, 979 bp, Zea mays
  Clone ID: MRT4577_64172C.1
ctgcttccgaaggtgacaggagcacgccgccgtggtcgtcctctgccacctcgggcagcgtgtcgcagccttcgctcagggacatacaacagatgcagcagaagaggcaccatggcggcgtctcccacagcccaaaaacccagacatcgggcttctctataccgccccacagcggagcgccagaggccgctgtggggcggtatagagaagccccacagcggagcgccagaggccgctggcggtcgcggcgtgaaggacaacgtgcccaaccggtggttcaggccggagaccgacgccccgtcctccatccgctccatccagatcgaggagcaggctatgaaggacttcaggcgcttctacagcagcgtgaggatcgtcaagccgcaggtctagtagcactggcggcggcggcggtggcgcccttggcgaaaagtgactgatggcacaacaaccccctttaggctcaccctcccatttgacactggctcgttgtacattcgagtgtacagttggttttgttccccataggttccttgagctgaacaataaacaaacaccctttgctgctgttgctgctgctttcccagtgagtggtctcgtttagttgtaacaaaagattgtacaggccatgtgagatcccccccccccggctttggcttaacagtttaacttgagccaatgcttcttttttttttttttggcgccaaaatgtctttggttgttccaagcagaggtcataaaaactgtgtggtgcgtctgcacccaggtacccaacatttttagcttcgatcggacatgatctcactttggggctgtagcctagtgcttctatatgctctcgatctgcttcactggtcggtgtgagaatttggtagatagcggcatacttgtgctgttgtgcaatagtagcactatgcatggtcatctgctaagatcgatggcagctcgtaattaatggagctagtctgcctggttcagt

SEQ ID NO: 145460 - DNA, 638 bp, Zea mays
  unsure (1)..(638): unsure at all n locations
  Clone ID: MRT4577_64173C.1
ccgggcagggaaggcttggttttggggtgtcgtcgagagtgccgctcaggaacagcgacaggccgccttttctgttcttcttctttgatggagttggttgggaaggtttcttctccggtggagaagcggtgtcttttgaacttgctgaacttggcattccctcagagatatactcaacttcctctgcttgtccagcagaaggtaggacaaacagaaaatctgaggtttctaagaaacagaagagaaagaacaagcagtcaacacagaccccgtcagtgaaaaatgagcctgggcaacaaatccccattacggaacttcaagttctacccgtcaatgcctctgctgaaaagcaggaggcgtatgccgctgatccaattaaacctatggaggctgccgcgttcagcaacacaaaagacaccgcttctccaccggagaagaaaccttcccaaccaactccatcaaagaagaagaacagaaaaggcggcctgtcgctgttcctgagcggcgctctcgacgacaccccaaaaccaagcctccctgccccggctgtgcctgngagaccgaaacccgaactacccggctggggcgtagtgaagataaccaagggacccgctttgctttgagacattgagaccgag

SEQ ID NO: 145461 - DNA, 234 bp, Zea mays
  Clone ID: MRT4577_64174C.1
aattcggcacgaggaggagacgtggtcatcttatgtctgtctctcctaccctgcctcaccacccagcccctatggccagcaaggtagtcccagtctgctcctacctcactattctccatgccccaacggcccagacgcaggccctccatctgcccttcctgtcccccgagctgatggacccaggcaagcgcaatgctcctgcagaggctacttggaactgatgaaccctgatca

SEQ ID NO: 145462 - DNA, 4725 bp, Zea mays
  Clone ID: MRT4577_64175C.1
cttcatatagaggcactgcgatgcattttttatgtatttttaggcaacatgaaccttggacacatatttcatgttcttttttgcccttactaatattgtttacctggggatcaaatagaggcactgtgatgcattttaaatgtatttttaggcaacatgaaccttggacacatatttcatgttcttttttgcccttactaatattattttctccttagaagcagcctctccgcatttgtggggggatgcttgcctcggtttattccttccccagaccccactcatgtgggagctctggcactgggtctgcacttttatggtctataacaaagtcctctgaatgatgctaaagagagagtgaggtgcgtttgcgtttggaagcagtgccttcggccggggtcccaggacgtatgcctcgcccggagatcccgtacccgaccctcccctgataaacaaacgcaagcgtcagggagggagggagggacagagagaggtagagagggccggggcgaagggggcaaagatgcgttcttgaggagcctgtgcaggggaggtccaatccagaggccgccattccttttcttttccccccaacctctgcaggctcttcagatccagcaatccggcttgtttcttttgctggttgatttatactctatagtggttctctacttagcatcaagtcttggcatggcaatggcctcgtagctcgcggctctctaataggaataattttactcaaaatgaagctatagcgtcatgctatcttaggttgtttggacagttccttaggatactgaaactgtattagataatcaagatagtcttcattcaaacatttctccccagagctatacaattctaattacaaccgaactgtacttcccattaagaacaacaccaactgtaacgtgacgtatgcgactgagtccagatagcgtatggaagctcacctgttggcctgctatttcagatactgtgtgtgttcctgaaacttcatggagacttccatatctccaccaggcacatcaaagcagtcagctgtccgcaaaccttctcctggaggctctcttaaggatctgtgccttgtttccaaacaagggtcaatagctgaagtagaatctgctttggccttgttgaaaaaaagtggtgggaacattgatggtagaaatgcatttggtcttagtgccctccaccttgcaacatggagaaatcatctacccattgtgaggcgactcctagatgctggcgctgatccagatgcaagggatggagaatctggctggagtagcctgcatagagcacttcattttggtcacctatgtattgctggtgttcttttacagtttggtgcttccctcgctttggaggacactaagggccgtacacctgttgaccttatctcctgtccagtatcacaggccaatggagattttccagatgcagttgcaacggaagtcttcagttggggaagtgggacaaattatcagctgggaactggcaacgcccacatacaaaaactaccatgcaaagtagaagctttgcatggatcatatatcaaaacagttgctgcatcaaagtttcacagtgtagcagttagttctaatggtgaactatacacatggggatttggtcgaggtggtcgtcttggtcatccagatattcacagtggacagacaactgctgtgattacccctcgccaggtgacagtaggattaggccgtaaacgagttaatgctgtggctgcagccaaacatcatactgtgattgctacagagctgggggaattgtttacctggggatcaaatagagagggtcagcttgggtacccttctgttgatacccaaccaacaccaaggcgtgttggttcgctcaagcaaaggataatttcagtagctgctgcaaacaagcactccgctgcagttgctgatactggcgaagtattcacctggggttgcaataaggagggccaactaggatatggcacttcaaactcagcatcaaactgtatcccaagaatggtggagtacttgaaaggaaaagtacttagaggtgtttctgcagcaaagtatcatacaatagtgttaggagctgatggagaggtgttcacttggggccatcgccttgtcaccccacggcgtgtcgtagtagctcgatgccttaagaagggtggaaatacaaatctgaagtttcatcgtatggaacgacttcaagtgatttcagtggctgctggaacaacgcacaatactgctttaacagctgatggtgctcttttctactgggtttcatcagatcctgatctaaaatgccagcagatattttcaatgtgtggaaggaatattgtgaacatctcggctggaaagtactggaccgctgtggctacatcaactggtgatgttttcatgtgggatgcaaagaaacgtaaggacgaaacgccaattttcactcgggtgcatggtgttaagcgagcaacatttgtttgtgttggtgaaacgcacatgcttgtgctctcaagtatataccatcctgagtatccacccaagcctaaaagccaaggcttaaaatccatgttagaatggaacggtggaactcctccgctgggtgaagatatcctgtttgatgaggtatgaagcaacagtggtttatcaggaagcagtggtgaaatgagcaaaggtgtgcctagcttgaaaagcctctgtgagaaggttgcagttgagtatttattggagccaaaaaacgcaatacagcttcttgaaatcgctgattccttggaagccaaggagctcaagaagcattgtgaggatttagctattcgcaacctcgattacattttcacagtgggagctccttcaattatgaatgcttcttctgaaattcttgtgaacttagagaaattgctagatgagaaatcctcagagccttggagtcagcgccgtcttcccacaatgacagctacctatcctgctgtcattgacagtgatgtagaggaagatgaagcaagagaattccccaagacccgtaaatgtgggaaatctgcatcaaggccatctgcgatgtctagtgatgacagcttccttcagaaagactgcaccgctgaacaagccgtctctaagcaggtcagagcacttcgcaagaagctgcaacagattgagattctcgaggctaagcaacttgcaggtcatcagcttgacagtcagcaggtagcgaagcttgagtctagggctgcccttgaaggtgaacttgctgaacttggcattccctcagagatatactcaacttcctctgcttgtccagcagaaggtaggacaaacagaaaacctgaggtttctaagaaacagaagagaaagaacaagcagtcaacacagaccccgtcagtgaaaaatgagcttgggcaacaaatccccattacggaacttcaagttctacaagtcaatgcctctgctgaaaagggaggcgtatgccgctgatccaattaaacctatggaggctgccgcgttcagcaacacaaaggacaccgcttctccaccggagaagaaaccttcccaaccaactccatcaaagaagaagaacagaaaaggcggcctgtcgctgttcctgagcggcgctctcgacgacaccccaaaaccaagcctccctgcccccgctgtgcctgccacaccgaagcccgaaggacccgcctggggcggcgtgaagataaccaagggacccgcttcgcttcgagacatccagaccgagcagagcagaacaaacgagcccgcgtcggccaaggcgaaggaccgccacgagaactcgccggacagcgccggccgcgcgacaaggctctcctcgttcattcccgacgcgcgttccagcccagtagccgtcgtggcgcctgctcgcgcagcggcggcgccgccttcttccgaaggtgacaggagcacgccgccgtggtcgtcctctgccacctcgcccaacgtgtcgcagccttcgctcagggacatacaacagatgcagcagaagaggcaccatggcggcgtctcccacagccccaaaacccagacatcgggcttctctataccgccccacagcggagcgccagaggccgctggcggtggcggcgtgaaggacaacgtgcccaaccggtggttcaggccggagaccgacgccccgtcctccatccgctccatccagatcgaggagcaggctatgaaggacttcaggcgcttctacagcagcgtgaggatcgtcaagccgcaggtctagtagcactggcggcggcggcggtggcggccttggcggagagtgactgatggcacaacaaccccctttaggctcaccctcccatttgacactggctcgttgtacattcgagtgtacagttggttctgttcgccataggttccttgagctgaacaataaacaaacaccctttgctgctgttgctgctgctttcgcagtgagtggtctcgtttagttgtaacagaagattgtacaggccatgtgagatcaccaccccccggctttggcttaacagtttaacttgagccaatgcttcttttttttttttttggcgccaaaatgtctttggttgttccaagcagaggtcataaaaactgtgtggtgcgtctgcacccaggtacccaaaaaaaaaaaaaaaaaaaaaaaaaaaatttttagcttcgatcggacatgatctcactttggggctgtagcctagtgcttctatatgctctcgatctgcttgac

SEQ ID NO: 145463 - DNA, 411 bp, Zea mays
  Clone ID: MRT4577_64176C.1
cggacgcgtgggttttcagcattcattaacacaccaagcgatcctcactagcagcgacctaactcctatgggtaccaatatattagcccttcttgcgcttgttgcccttttactgagcgcaacagatgctttatttattccacaaagctcattcgtttctagagccattgttccacaattacgtcacaccatttacttcaatgggctgagaacatccagccgtgcaagcctacatgctacaactagcactagcgggcagcgcattacaacaaccaattgcccaattgcaacaacaatccttgtctacatctaaccctacaataccattgcaacgcaacaacaacaactacaacagttatctgccatcactaatccacctatccgtggtgaaccatgtcacctacttgcaac

SEQ ID NO: 145464 - DNA, 477 bp, Zea mays
  unsure (1)..(477): unsure at all n locations
  Clone ID: MRT4577_64177C.1
tccggggttccgaagggttacggttgtaaagggcatgggttccttcctttgcgaccgcctgggggcccgatcctaggtcaagttgatctttgaacggtttcccctaagtgattcgtatggaaactggcctcaaaactggacctttggccgtatgcggccaaaacctgaaaaaaaccggaaccaaataagggctaatgtactccgcggggaaaacccggaatggggaatgcttggaacggaccttaattgcttggtagtggtttgcctggttaactagatggttgatgccgaaaatggccttgaatggaaacgtaacctttcctttggccgattaaactcacttatggaaatggattaannnnnacggggggaggcatcggggggtacataattcctggctgttcccttataagaaaaggaaataaggggtgctctttggtccggtcctcctggatggcaatccttaaaatctaattt

SEQ ID NO: 145465 - DNA, 320 bp, Zea mays
  Clone ID: MRT4577_64178C.1
cgcgtacgatcaacactttgttgttgatcacttatgttccaaattctgagtttgacgctggagcatgcctcatttgatgctggaaaggaaaaaaaaaaaaaaaaaaagaaaaaaaaaaaaaaaaaaaaaaaaaaaaaaaaaaaaaaaaaaaaaaaaaaaaaaaaaaaaaaaaaaaaaaaaaaggggcggccgtttaaaagaatcaaagtttactaacccttgaatgcaacttaaaaccttttaaaaagggtaaccaaaattaaattaatgggccgttgtttaaaaacttttaaactggaaaaaccctggcttaaccaaat

SEQ ID NO: 145466 - DNA, 171 bp, Zea mays
  Clone ID: MRT4577_64179C.1
aaaacaactcgcggtgggactcaaaaatcaagactggtgttcaatgtcatgtcctatacaggcataatcggttcgcgaaaaaacaggaacacggctatgacacgggccccgattgaccttcttcggtggggcatacttgaaatcaaggactacgaggtgcatggaagaaca

SEQ ID NO: 145467 - DNA, 330 bp, Zea mays
  Clone ID: MRT4577_6417C.1
cagtattgaataataataattgttctttcggcccggccggtgatgacagatgacgggcggatccgtattgatccacggaaagagaataatataagaaactacatgactgtgcacgcgtctacgttgtcgtcgttgaacatgttcatgtacttgagctccggcgcgccggggtccgccatggcctgcggcgcgctgcggacgaataccgcgggcgccttcttgtcgtatgcgccgccgacctatgggtaggtggtgagcgcgtatggcacgtaaggccacatctcggcgttcttgccggtggccttgacgcgttccagcaccttggcgggc

SEQ ID NO: 145468 - DNA, 460 bp, Zea mays
  Clone ID: MRT4577_64180C.1
ggccagtgaattccgttgctgtcgcgattacggaggatggatgggtggtgtgtagggttttcaagaaaaagagcatccagaggggattcgaccagctgggcacagcgtcggctggcgacgacgacgaactccattccttccactccccgggcggcgtgatgaccactctggtggagcagaagcacggcctccaccagctcacgcacggcggagtcgtcgttcccgccttcgacccctgcatgaaccttccacacctcacgagtgcggaagggccgcttggcgccacggcagcatttacatccggcacatcggctgtggccatgaacctgctcgacatgggtcgttgttctcgccacaaccacaacatgctgaagatgacaacaacaccatgtggctctgccagtgacatgccgctgaacagcggtgagcgcttcggtgccgccgccgatcgacagcaacg

SEQ ID NO: 145469 - DNA, 192 bp, Zea mays
  Clone ID: MRT4577_64181C.1
tcgtttacacttgattctactttaccaaagggggggggtatattgattatgcgtgcgggttaacagctaatttcatataaatacgtgctaagataacactcaaacactgaactgtatagggataaccccctgttataagatttgcaccatatcatcatggatatatgtggcagcttatcccaatggcttgaa

SEQ ID NO: 145470 - DNA, 392 bp, Zea mays
  Clone ID: MRT4577_64182C.1
cgagacacacggatacaagcggggggggacagaagcgcccactgctggccctggggggcaaacaacgcgagcggagcccgcgcataggcaaaaacaaacagtgtacacagcttgcacaaggacgagatattaccaacgggggacagcggtaacagagcgctggaaggtagttgacatgctctggacacccgtgtgtacctcggctgggggttttaggaggcactgggggggaaccgttggaagatggggggagatgaagagcggcccactggtgacgccggggaggcccacgacgaaaaagggggggacccaccaaagccactggtagtatacctcccaactgatgagggcagggccttacgggacagaagggttcatggacgcgccaaacc

SEQ ID NO: 145471 - DNA, 344 bp, Zea mays
  Clone ID: MRT4577_64183C.1
aaaccggggggactccacgcgtccgaacacacccaattcaacttttgttttaaaaagaaaacacaaaaaagggggggtcaaatgattattttttggggctatggaacactcaacggctcacaccccaaaaggtgatccaaaagggtggatcactcatagctggaaatatgtcattcttaacggcaagagctactatagaaggaacaacacctgtccctggatacaaaaagccatcttttgtcatgccaacgagcccagcaatctttcaacataaactaatgaataatacaacacatgtcctgacaaaggataccaccagttcagtcaaactgacggacatcacc

SEQ ID NO: 145472 - DNA, 731 bp, Zea mays
  Clone ID: MRT4577_64184C.1
gccggccacccccctctgtccctctctctgcttccattcacttcactattgtagcccgcttccacgttgccggccgggagacctgccataagccgtagcatcagctcagttgaatcgccacgcccaaggcacacgtatgtctcgcgcgctcgcgcttgcgatcctcctcctggccgccgccgccgcggtggcgccgctggcctccgccggcaccgaggagttcaccagcgtcgggtccagcggcggcaagatgttcgacagggcggtcggagccgatcccgacccgtccccggccggcggactgccggccgacccggcgcccgacgcacgcccctaaggccacgcacgcaccgtcgtacggccccgtttccgtgtacgcttcacgcgctggtactctcgccgcccgtttccgtcgcccctaagacgtagtatgttcatgaacacgacgcgccttgtacatgtctctggaatgtgcagcctgcatgtgttttgcttgcgagcgtttttcctttggctgtcgaccgatcgtgaatccgtcacgcagcactcagcagtagtgagcttagcattctgccgtcagtgtggaaatggcactctgatgcttgggttccatgttagctccagccagccagccaggctacccgtgtgaaacttgaaattaatcgtgcgtatgttttgagatcgaaaaaaaaaaaaatacgatcaagaaaaaaaaaaaaaaaaaagcggcc

SEQ ID NO: 145473 - DNA, 249 bp, Zea mays
  Clone ID: MRT4577_64185C.1
actaaatcttcatcctcaaaattcgtcaaacgatggtattattccatgaagcctctttcgcaggggcagttctactgtccagcctcatcaccatgtactgcttcaagccgcccaacgacgttccacgcgacggctggaagcaagacagtcttggaacatacgccagcccagccgcagcacgaccccgacgaattcttgccgtcagcgttggcattttccatgccctaatttccatgggctacggtgatt

SEQ ID NO: 145474 - DNA, 329 bp, Zea mays
  Clone ID: MRT4577_64186C.1
ggggagaaattggggggggggttatagtcggggggtgcaaaaaacagggtaaaaaaaaacattcagggggggaaaaaaaagggggggccctttttatttggggggggaattggggaaaaccgaacgaaaagaggtttgggagggggggggggaaatttgggtccaattggggaatttggggggggtcatttttgtggaaaagctttgtttatggggaaatttatcaaaaaggggtttaagcacgggggggggggcttggggtgtaaaagggatatccgggcagattcccggggggaaacaaattttaaatataggggggaaagtaaggg

SEQ ID NO: 145475 - DNA, 351 bp, Zea mays
  Clone ID: MRT4577_64187C.1
gcgtccactgtaacctgggcggtagcgtgggcgcatgcgtatgcggacccatggccgaagaccaggctgagatgtacgaccacgatattattgagttctggactgcttggcaggagtacgtgattgtggcggccgtcttgctttcaattctcgcgttcctttcaaggattgctgcatcactgcatgtgtacttcttctaagtctcactctgccggttacgggtgctcctctacgtcgcggtctatgaacccatgtgcctcacgtatgacatggggaggatgcttttccctatcaggctaacctttgttggcgttgtgatgctagaccgcattggttcattcttttgacttt

SEQ ID NO: 145476 - DNA, 399 bp, Zea mays
  unsure (1)..(399): unsure at all n locations
  Clone ID: MRT4577_64188C.1
ttgggaccctcgaggccggccgggctgacaaccgctaaaaccctctatctcctgccaccgcggcggccccttctcttccctgtaataaacccccggcgagcgatgcggcggctggcgaaatccctcctcctcgcctccctctccaggaccctccgccactgcccccagctcccgctgcttcacccttggcctccccagccccgccgcccggggccctgcctcctccccttctccactcaaaccctagccccgggccctgctcccccgcctgcgcttgttgcggcgtcgacgggcgagccctcaggcctcgcgcttctgngagtncnncgcggnnagctgcnnacgagtccgagggggaccaccaggaggcccctcggctagcccctcagggcgctcgcg

SEQ ID NO: 145477 - DNA, 641 bp, Zea mays
  Clone ID: MRT4577_64189C.1
gccggccggtttcgggccttcacagaacactgcaaaagcactcctctcttcgtcctccccctcccttccataccattccaccaaagaagaacggaacctttattactcgccttcacagacgctcgcaagtcccaactcccaagccaagccggatcccaaatcggcacagcgcacccactccgctcggtcccttcgttcaccccccatcatccatccagccagccagccagccatgggcggcaaggactgcggcaaccacggcgaggacgacctgcggcggtcgtgccggcgcctactagcgatcctcctagtcctggccctgatcgtgggcgtgatcgcgctgatcatctacctagtggtccgccccacgcacccgcgcttctacctgcaggacgcgtcgctgcagcagctagacctctccaacgccaccaccaccaccaccacctccgcgtcctcgtccctcctctccacgacgctgcaggtgacgctggcctcgcgcaacccgaacgagcgcgtgggggtgtactacgaccggctggacgtgtacgcgtcgtacaagtaccagcaggtgacggtggccgcggcgctgccgcccgtgtaccagggccacggcgacgcggacgtgagatcgcccgtgatct

SEQ ID NO: 145478 - DNA, 279 bp, Zea mays
  Clone ID: MRT4577_6418C.1
cccctgtgtctctgtttaattggcgcccggccctgggaattagaaaaatccagaaaagtaattaggaaatgaatttctaatttaaaaataaatactaggacttgtttaattcatattaagtccaaatgagtccatttcagttcctggaattttataatattatggtttatcaaatagggccactgatttgacatgaaagccactttaaaattatttgctaattaatacataaaaccttagaaaattcggaactcctccgttttaaatctgatttgactc

SEQ ID NO: 145479 - DNA, 348 bp, Zea mays
  Clone ID: MRT4577_64190C.1
cgccgtccgcttccgtttcttacgataccacgacgcccgcccgccccccggcaagcgaaagcgaagcgagccaatttagccatggagaaggcgatcgatcggcagcgggtcctcctggcgcacctcctcgcctccccctccgacgcctcctcgcagcctcagcttgcggagtcagggtatgcagccgaggaatgtgcccagtaccaaagttcatccactatcttacacgaagaaggtaaaattggagcccgatagaagacctgcatccagatgctcgagaagggagtgtgtccccggcaaggggccccgcccacccaccttttttttttttccccccccccccccccc

SEQ ID NO: 145480 - DNA, 1334 bp, Zea mays
  Clone ID: MRT4577_64191C.1
gactgacaaatcatggtttatttagatattggagttatatacttatatgtgtttcttttactcgcgtgccgatgcacctttttctcttctaaatgatttatttcagtggcatgcttatgaattatgcagcagcagcaacaacaacgaagccttttcccaagcaagttgggtaggctagagttgaaacccaacagaagccacaaattcatgcttacgaattatggatgcacttttttttctagtcattaaatagtttaatgaagaagatctctatgtatttctgcaggtcttcgtaatctgcaaagtattaatctctcatttactttggtcacggacattggtgtgaagaagatctctgtgttgaattcgctgaagtcagttaaccttgacaatcgccaaattactgatgttggcctggcagcacttataagtctcactaggctgactcatcttgacctttttggagcttgcataactgacaatggcacaaattgcttcagatattttaagaatcttgtttctcttgaagtctgtggtgggttcgttactgatgctggagtgaagaacatcaaggatctgaaggccctgacgttgctgaatctttctcaaaatgctaatctgacagacaaaaccttggagctgatctctggtattgttcttccatgttggaataagtgtacttcttttttacagttaaaatctcatggccatctggtttacaggcctgactgctttgatcaacttgaacgtgtcaaactcacgggtgtccaatgctggtctcaaacacctgaatgacctgcacaacctgcgttcactgtctctagattccacccgggtgacggcaaacgagatgaggaagcttcgagcaacagtgctgcataatctgatcagcatgcggccagagtagtacccatttggcacctgctgtaaataatcattaggttcgagcaggttgttctgttggtaagtactgccttcgttctcgaatatttgtcgtccgctagttcatttttgaactagaccgcgataaataaaaaagaacggagggaatatcttgtaagaacctgaattgaaggcaggcatataattatataagttaacaatgtggtcttgtgctgtgtcagcgagctcgttcgtttcagggtgatgctgaataaatggcactatggcagctgctttgcactgaattgtaaatagcctttctcgccatctgggaactgggatgcatacgtgggtcgcccttttttatgtttgggtagattagagttgaatgtgcgttatgtacttgtgttctgatgagcaccgaatgcttattttgtcacatgctgttattt

SEQ ID NO: 145481 - DNA, 758 bp, Zea mays
  Clone ID: MRT4577_64192C.1
gttcgcccccccactctgcgtctgtagtcttctttctcgcgtcgtcagtcagcttggcagggccgaaccaatggcggtcgacccgcggcaggtggtggcgggcttcctcaccctctccatgttcgtcatgctcggcaacatgatcaagcacgaccacttctctcccgtcaccgaggagctgggcttggaggcaacaggtgtggtgtcgaacacaaggaagcttgacagcaatgctgaaatgagcagcgtcgatacggctggagtggaggacctgatggacgctgtcgaggaagttaaaccttgctggaccaaaccaagtccaagtaagtaactccactttttagaactttacaaattcgtcagatctgaacctttacttggacgatgtactgcagaaaatcagccgtctaatggttttgttacattctccttgactatgggccctgagtatcacatctctcaggtgagcctctaactctgaactttttgacataattgattgtgtaagcaaaaaagcgtcttggtgctgaggccttcggtgttgctcatcctgagtaagatgacgaacttcctcagaggcttcgtctatctgcttttgtagttcagctagcctggtcatcttttccttcttcctctgcacctgttggtgaagcatctccatgtctctgatttgttggtctatctcatcctcctgggtggtgttgggctaacagccttccttttctggcttcgggcctcccgaagaaaacagtctcctg

SEQ ID NO: 145482 - DNA, 838 bp, Zea mays
  Clone ID: MRT4577_64193C.1
aacaacaacaatcattggttcacctatttcaccgaacatctggcgttcatcacactagggctttctttactactcaattcccttggggtttttttctactatcaacatccggatttctctcccatcaacacccacatatacatccatcactcacataaaactgaatggcaccaccactactacaaaacctacaagatgatacctgcaaggcgttgagcttgacccaagaagggaggatgtagcatggcgaagtaaataggaggcgatggtgatctctgatttgacattgcgtcgaacactcgacgagcgtcacatagacccttttgctgatcagaaaagagacgatgagaaatgacaaaatctcaccaaaaatctcctaaatcagatgtttgctgtagtacacggtgaagaggttgtcgagcagcgagctcctcgcgaggagagggtggctgttgcccaggggagcagggaacgacgcctgaggctcgacgagctggagcagggcgcatggcggttggaggctcgggcgccatgggagagggagctcgactgggcgagctgcaagtggaggagggcgcctggtgaaggagatggtggccgacacaggaggggatctcggctagggtttgggatagccatcggaggaacttagcgcatggagatgtcttcctggtggccgacgagcagggagggcgcgaccttggtcgacggcttgccgtggctgagcaggggagtagcagccggcgtggccgagcgctcctgctcaagcaagcgtgggagtggaggtgggtgcccaagagccgaactggaagtgaggagacgacgagagagaattggc

SEQ ID NO: 145483 - DNA, 2741 bp, Zea mays
  Clone ID: MRT4577_64194C.1
gaaaggtatgattatcttataatgtagttgagacctcatatcttttaacatttggacgtgtgcacaatacagtagtaattcggcacgagggtggagctctgtcgcggcgccggctctcttccctcacactttgcatttctcgcgctgcggctttccgccctcggttttcctcctcctccgacaccagcccaccacgcgagaactcgtcagatatttatgagcgcagccgcgggttaaccttcccttctcgctgccgtgctcctgctcgtgcgcgcgttcgcaatcgtagcgctggggttgagccgcgagtggataaaccctagccggtggtgtagctgggttggtggctttgatgccggcgacggcccgcttgtccccgggtgggtgagaattctgcgaccgaatggagtgaggtgacgaaggctgccatgggctctaactatgccacgattggattataggatagtagctggcagctaccagtttcctagaaccaatttgtggatagcgagaggagtgactgttgttcagtactttcacctcgatcatgggtggtgtctgctcaaggaagagaagccaattggtggatgaaggtgacgctctccagacatccccaaggttctcaaagaccagcagcttaaaatggctgttgcttacactgcctcgcagcagttctgatgtttccgggaagggacagggaaatgaacctgggcggtgcccgtccctcatggagctttgtgtggctagagtttgccaggatatcgacaggtattctacttttgcaatgctgccaagggatctcagccagcagattttcaatgaattagtaaattcaaaccgtcttacagaggcatcacttcaagtttttagggattgtgctctgcaggacattggcttaggggagtaccctggagtaaaggatgcttggatggaagtagtggcatctcaaaagcagtcattgttgtcggttgatatttcttgctctgaagtagctgatagtgggatagatcttcttagagattgctcaagcatgcaaagtttggcatgtaattactgtgatcaaatatccgaaagtggtctgggagtactgtcaggattgtcaaacctatcttctttaagcttcaagcgaagtaatgctgttactgctgaaggaatgagagcctttgcaaatttagttaacttactaaatctcgaccttgaaggttgcctaaagattcatggtggccttattcatttaaaagatctgacaaagctcgagtcattgaatatgagatattgcaattatattgcggattcagatatcaaatatttaacagatctgacaaatttgaaggaccttcaattgtcatgttgtaagatcacagatctgggggtgtcgtatatcagaggcttgcagaagctcactcacttgaacctagagggctgcccagtgactgctgcttgtttggaagctatttcaggattgtcttcattggtattgttgaacttgaaccgttgtggtatatacgatgatggctgtgaaaactttgaaggtcttaaaaggttgaaggttttaaacttggggtttaactatattacagatgcttgtttggtgcatctgaaagaattaatcagtttggagtctttgaacttggattcgtgcaagattggagatgatggtctatcacatctgaaaggtcttgtgctactgcaaagcttggagctttctgatactgaagttggaaacaatggactccagcatctatctggtcttcgtaatctgcaaagtattaatctctcatttactttggtcacggacattggtgtgaagaagatctctgtgttgaattcgctgaagtcagttaaccttgacaatcgccaaattactgatgttggcctggcagcacttataagtctcactaggctgactcatcttgacctttttggagcttgcataactgacaatggcacaaattgcttcagatattttaagaatcttgtttctcttgaagtctgtggtgggttcgttactgatgctggagtgaagaacatcaaggatctgaaggccctgacgttgctgaatctttctcaaaatgctaatctgacagacaaaaccttggagctgatctctggcctgactgctttgatcaacttgaacgtgtcaaactcacgggtgtccaatgctggcctcaaacacctgaatgacctgcacaacctgcgttcactgtctctagattccacccgggtgacggcaaacgagatgaggaagcttcgagcaacagtgctgcctaatctgatcagcatgcggccagagtagtacccatttggcacctgctgtaaataatcattaggttcgagcaggctgttctgttggtaagtactgccttcgttctcgaatatttgtcgtccactagttcatttttgaactagaccgcgataaataaaaaagaacggagggaatatcttgtaagaacctgaattgaaggcaggcatataattatataagttaacaatgtggtttagcgagtggtaggtcttgtgctgtatgtcagcgagctcgttcgtttcagggtgatgctgaagaaatggcactatggcagctgctttgcactgaattgtaaatagcctttctcgccatctgggaactgggatgcatacgtgggtcgcccttttttatgtttgggtagaatagagttgaatgtgcgttatgtacttgtgttctgatgagcaccgaatgcttattttgtcacatgctgttattt

SEQ ID NO: 145484 - DNA, 338 bp, Zea mays
  Clone ID: MRT4577_64195C.1
ctaaggttttttttttttttttttttttttttttttttttttttacataacactgttacatttataaacatgtttacaattcacttgtgtctgtgcagggcatgtttatatccacatcatggactgtatgtgtcacgtagttggggggggggacaagcgctattacaattgtcacaaaaatgcatgcatggttggcttctatttcctgctggacctgaaaaaaaccctgctggaaacaaataccccgagggaaaaggcggcaacggcaacggcaatcacctccctgttccttttgaccgtttccacaaggccctccgcccactcggagcccgccagcc

SEQ ID NO: 145485 - DNA, 141 bp, Zea mays
  Clone ID: MRT4577_64196C.1
caaaaaccggagacagagaggggaaatctcacggcagaggcaccgaggcgacacaccaaccaagaagagaaacgacaaacacagccgagactacaaaggcacgaggggacatcgccgaacagggagggcgccgacaaagaa

SEQ ID NO: 145486 - DNA, 420 bp, Zea mays
  unsure (1)..(420): unsure at all n locations
  Clone ID: MRT4577_64197C.1
acaagctttttttttttttttttttttttttttttttttttttttttttttttttttttttgttgtgagctcacgcgggggctgcggcggcctcnttgcgtggggtctgccgggcccgttctggccttgctcgtttgcgtcggggggggcccggngtcgggcccgttcgtgcttgctggtgtaaattggagaagcgatccggtttggaatcgttccgatccaccaatccgacggaaacgaacaggggctccgtgtgactgtgaacctgtaacacactttccgcgtgggttattgcgacttggtggggggctaattcccgcgtgtcctcaggatcgatgcttgacattatgtactcagggggggccccgggtgtgaggagtccttgagaaaacatagcttgtggcccggattttctacgca

SEQ ID NO: 145487 - DNA, 286 bp, Zea mays
  unsure (1)..(286): unsure at all n locations
  Clone ID: MRT4577_64198C.1
tgttttcgcgtggggttccagatattatcagtcgaccagtttattcggcgcaggaggaaatttctagctaactaccaagctaccttntctcgctgctaacgccagcatctcaggtaacaatttaccatccatgcagtggtcattatggtctaaatattacaatctcaccgtgcaactctttatttcccaaccaagcattaagctcattattttgtttatttcaatgtcaagtgagttgtatgttataatttcttttattattattacatttaaatattgaattttt

SEQ ID NO: 145488 - DNA, 436 bp, Zea mays
  Clone ID: MRT4577_64199C.1
atctgtggcaaggaagctatctgaccaccagaccagttttatcatccgttcactccagccattacccgcaggtagcatgcaaatggacactgacctgagcagcccccgcgcgccggccttctgcttctacctccgcgccgagccagcgtccactaccgtggtcatgacccgtggcggtggagccagcatacggatgcgcgcgcaggccacctacaacgagaagctcatcacgccgtatggggaggtggagctgcaagagcccaacgacgtgtacatcctggactccgccgaggaggaaggcattgacctgccctactcctgccgcgcggggtcctgctcctcctgcgcacggaaagtacgcttacggctccgtggaccagaccgaccagagctacctcgacgacggccagatcgccgtcggctgggggctcacctg

SEQ ID NO: 145489 - DNA, 371 bp, Zea mays
  Clone ID: MRT4577_6419C.1
gcgccggcgttcgcgccgctctgcttgagaacggacgacaaggctgcggctgcgcgcgtcggggtgccggatctgtcgtccttgctgtcgtcgccggcgaccatgcctcctgcggacgccggcgccgaggagagccgtcgccaggttgtgggatttgcgcaagctgcggccagggcggctgccatggcgccgtctgcccctgcgcttgggctccagtcgcagcagcagcagcagcaggcaaggaaggctcggcgttgctggtcgacggagctgcatcgcaagttcgtcgccgccttggatcaactcggtggcccccaagttgccacgccgaagcaaatcagggagctgatgaaagtggatgggctgacaaa

SEQ ID NO: 145490 - DNA, 338 bp, Zea mays
  Clone ID: MRT4577_641C.1
atgacggacgcatctgtggtattgcatggagctcccatgatccatcattattcgcttctttgtcatatgatggaagggttgtcttggaatcagtcaagccctacttgcagagaaaatgaaccttgtctggttttctaaattgtaagctgagtagctttgccttgccattctgtagcctcttaacaagcatttatgtgatgattcggtttactgttgtagcaatggcagaaaaatggataacaagattgttacagaaatcaatttttaggatgttgtatatttgaagtgtccatgaaaaggtcttgctgtatatgatgaggtggggttgaactcaattt

SEQ ID NO: 145491 - DNA, 437 bp, Zea mays
  unsure (1)..(437): unsure at all n locations
  Clone ID: MRT4577_64200C.1
ttggcacctctnacacggccggccggtgggttctttcttttttaataactctttttttttttttttttcctttttttctttcattcattatcctttctttacttttatgttattacaatttacttctttcttttcctcttactttttaatgatgctatttctcttttttactgggggaacgtaagggggctaaaaacatctaacctgccgttaacaacacccagacagctcatctgcaacaaaaaagaaggagcgtgccgccgaaaggaaggactccaactcatatggtagccagaagaggaaaagatgagatcatggctaggggaacctctgccaacatacgccccccgaataggttcttgaagggtgacgctgtacccaagacaatccatgttccatgtggggatatgcttttattttgtgatgctggtaccaaa

SEQ ID NO: 145492 - DNA, 437 bp, Zea mays
  Clone ID: MRT4577_64201C.1
aacaaggcccaaccagaaacaacccggttttttaaccttgcaaaggcacagggggggggggggccgccccggatgaaggggtcgggggcccttgccgttcggttaaaaaaagcccaaacatttttcaaaaacggggggctggtcagagacctttatttgcggggatcattggggtaatttttactaggggggtttttgcagcctcatccttccggggggggggggtcaatttttgggccccgggaaggggtcccgggaaatttgtaaacagtccattaacccccacagggtttttccaaaagtcgttttctttgggggggtcttgaaaaaattgaagggcaagaaccgggtctccttcctgtgcgggtttgggtgtacccggggattattagcctgtgccccggcgacaagaacactaggggggcttaaatattttc

SEQ ID NO: 145493 - DNA, 663 bp, Zea mays
  Clone ID: MRT4577_64202C.1
cattgggtacctcgaggccggccgggatcctctatgcgtactgtctgtgccaacgagaccctttcttcttccctccttcgccgacgctatgtctaagtactctcagaagccggacaagcctaccacatcggtcgacgacatgataagggacctgagggtccacttcaacaacacgacccatacagattttgatgctgtcgccagatgcctttgagcaacgctacacgataccttgactgcatgttattgctcacaagcacgcgattcccttctctgatatactgcgtaggtgacggtcgtaccgcatcaaccaaagactcgccacctccaacgggcagagacgctggcctggtacgacggccatgatcatgattgtattcgttgaacactgctgaaactactgctgatgggacaggctcgaacgtgcaccacctctatgtttcacaattgcagaagaacccagcgccagatacgacatgcgccgcacctaccgtgtctcacggacccattaaccacttacatgacctccccttgccacatggagtatgattctgtcagataatgaacaagtccgtgtagaaagaggctgatctgcattgtcgcgtcgaggaagcttagtatgatgttcacctgctgataatggcatcctttcgaagcattata

SEQ ID NO: 145494 - DNA, 296 bp, Zea mays
  Clone ID: MRT4577_64203C.1
cggacgcgtggggcccccaggggccagggcttgtcattggcggcgtgtccctaatcccaccgccaggctctgggcaccaaatttccggcggcgatggcacccgctgaggcgaggccagggttccggcgcatgttctccgtttgtgccttcgcgcgcgccgaaggcgctcgccgcgcgccctaagggcgacccatgccgcaaccttttcttgctcggcataagcaagcgtaccacatgtgagggactgagagaagcgcatgcggagcttggtgcaagcatagcatgctcgaccttgt

SEQ ID NO: 145495 - DNA, 583 bp, Zea mays
  Clone ID: MRT4577_64204C.1
tcggcgatctagactagtttgagattatataatctctataggttatataatctaacttattttaatctagcacttaattcaaaataagttatattatataatctggacatattagaatcctgaacaaacaaactctaagcgtaagttaaaaataagttataaactacataatctaagcaattataaactcaaacaaacaagcatcatagggaactcaaaaccccaagttatcctcaatgggttttgtagtttcattttttcgacgtaacaaaaaaaagcaacaaattaaaactcactatggttagacagaaacatcatcttgaatacggtatggacgcttactctcaatgcactgtctgtatattcaggtagataaaatcgaccacatccaagtgaagaacatgattgaggctgctctcacgttgctcgacgcccccggaagcccccacagctcgatgagctattacgagacctaactatgttgagcaatgcttttcggacgtctactaagtcaacaactcagtccacaattaaccaaaaaggagtatgtcgggttttgctacaatgtgcttgttggggtttt

SEQ ID NO: 145496 - DNA, 757 bp, Zea mays
  Clone ID: MRT4577_64205C.1
tctgacaggcggacccagggcgaggcgagtcgccgacacattgggccacgagccacaggtcgggtgggtggcttgggcatagggcgaactgacagaagggccccagcggaacagggctcgctgacgagtgacggttccggtgctgggtacgcagcacgcgatactgacacgtgggccatggggctccacgggtcagcggcgaagggtgaggtgcgggcgcaacctggcttgtggggtctactcgccagaggctcagaggggagagcgagagcagaagcgcgggagaggctggcccgagggttctaggtgtcacgaccttcgtcctcctctcgcacgcgcacgacgcgaagcgccatgaccggaatcggcgagcggcgagggtcaagggtgggtcggtcggcggggatcgctcggggaactcgcctccttggcgtgacacagccccaggcgcataccgacgacgaccgagaggggaggggagaacgggcgggggagagaaaagagggaacagggattggcagttctcaccctcggtggagctcgatcgagcagctcgacagaagggcgatggtgctccgagtgcggcaagtgcacaggcgacagtggaggtgctccagaggctcggcaattgcacggacgacgacactcctcggcaaacttcggcgagccactgcgggcgaaggggagaggaatttgctggggaatgtggcgaaatgaggcaagcaggaggagaagatgaccgtcggggggggggggg

SEQ ID NO: 145497 - DNA, 218 bp, Zea mays
  Clone ID: MRT4577_64206C.1
gtcttgtccaaggctgaaggcgcacacatttaggctactcctttatcggggacctgcgttgatgagtggaaaggcgccccgactttcacggacgctgtcaactgcgcgtttgtgccgtcgggctatactcacaaggtcaagtccgcgggtgcgggcaccactgagtacggtaagcatctgtcgagcacagtgtactagaaggtctccgttttaagtac

SEQ ID NO: 145498 - DNA, 273 bp, Zea mays
  Clone ID: MRT4577_64207C.1
ctcgctcggactacatacttcccctacccattctacagcgcggactatcaggtctcatatagactcacacatgaacacgcccgcgttgtctcaggagccccttgacggttcttccgaggactcctcgcgctcggattccgatcaagtaggctgctaggataagggcgggagcgcctctaaagctgctgctggggctgaagatgtgatgagggcggtgctgcataaagaatcccaggacgtatctactgatgacgacctgagctcggattctga

SEQ ID NO: 145499 - DNA, 383 bp, Zea mays
  Clone ID: MRT4577_64208C.1
attcggctcgagggacagccatggcgcaaaaatttttttgaggccacatttacaggtgtactcacggggcttggcaaggtttgaagtcaggcccactcaactgagaagtgccattagaaaattcatagctccgtattgccgaatgaagggtccttcaatgtcatcacacactgagttgccgcctccgcaatgccaggaaagcgtcccaatgatatgaccataggcaggacagacgcctaacgcctgacacttacagttacatgccacagattcgagttgtttgatcgtcgatctgtactaccaacgctactggatgagctgctgttatcaaaaacaagatggctatgctaacccggtacctaccaacaccggttataaatgaa

SEQ ID NO: 145500 - DNA, 623 bp, Zea mays
  unsure (1)..(623): unsure at all n locations
  Clone ID: MRT4577_64209C.1
tttttagctaaaaataaagaaaccattcattaaaaacatagtttctattgtcataacaaatatatatagaagctaacttatagttataatctccatcttaacagaccccagatatgctcgtcaccacgaactacttcctgccgcaaataaagctatgaaatgctagtcctaagcaatattttgatcacttgttatggtaatctatggttccccttcttctcactacctcctcctactactacaaataaatttgtacaatacattccaaattaatagtcttccttggcagcccaaatcttggtctagaagctttaataatatccctcgggtcttattcggttggtggagtatggctgaaggtcttgtgccatttttgcatggggaagggttcaacacattggttattctcgtggcttggtggatctggaagcacagaaatgtttgtatttttgatggtgtctccccaaacacgaatacagttctgcaacagatccaggaggatgccaggctttgggagatggcacgtgctaaggctaaattggggtcttggttgtctttctctttccccctttttttcttcttttttnctcctncttttnctggttttcccnccggacgctggg

SEQ ID NO: 145501 - DNA, 577 bp, Zea mays
  Clone ID: MRT4577_6420C.1
gccggccgggtcgggcgagaccggcggcgcgcggggaaagaaggacgccgccacggcgctgtacgcgctctgcagcggcgcgcgcgagaaccggcagcgcgccgtggaggccggggccgtgcggcccctgctggacctcatggccgacccggagtccggcatggtggacaaggccgcgtacgtcctccactccctcctgggctccggggacggccgcgccgccgccgtggaggaaggcggcatccccgtcctggtcgagatggtggaggtcggcacctcgcggcagaaggagatcgccacgctctgcctcctgcagatctgcgaggacaacgccgtctaccgcaccatggtcgcccgcgagggcgccatcccgcccctcgtcgccctctcccagtcctcctccgcccgcaccaagctcaaaaccaaggcggagtcgctggtcgagatgctgcggcagccgcggagcccgagcctccgcgcgcgaccaacggcggtggttgcggcggagtgacggcccccttcccaatcatccccccacttgtcttcttcggcgagacgaaccggggcccggtcgtcc

SEQ ID NO: 145502 - DNA, 1426 bp, Zea mays
  unsure (1)..(1426): unsure at all n locations
  Clone ID: MRT4577_64210C.1
ctcatttctccccctttttggcatgaatcgccggccttgtatctaatagtgccaccaccctcacacttcgccctcctcccggcgaggtcgcctctgcttccgactgcgcccgaccccagtctcgcctgcgtccaccggcatggcctcacccacggtcgcctccccgacccgggcgagccccgccgacatccccaccgccgcaccctcgtcggccccccggccgcggcgcctcgcgtcggcgccgcccgcagtctacgcgtctgcgtcctcctccccggcctccgcctactccggggaccagctctccgcccccgacgcctcgagcccgctgctcgcgagcaggagcgaggagtacaggcttctgttccggctgccgcccgacgaggttctcgtgcaagattttaactgcgctctccaagaaaatatccttcttcaggggcatatgtatttatttcttcaccatatatgcttctactctaacatatttggatatgagactaagaaaacaatacctttgcaagaggtaacagatgttcgtaaagcaaagacggctgccattttttctaatgccattgaaattgttgctggtagtagaaggcatttctttggatctttcttgtcacgtgatgaagcctatcaaattatagtagatggctgggaacaacatgttagtgatgcaagattgctccttgaacgtcaggagacaaagtcagctagtagcagtgaagaaaatggttatgttttattggaaggagcaaaggaacctaaacaagatgaagattcatcaccgctggacaggtctgtcaatagtacggctgtctccagtggtagtgctgatggtggtgattcgaacatcaacatttccagaaggttttcaaatgttgaggagaatggacttgaagacaacatcgtcacgctaaacccattcaatttggagccagttgatgctactcctagtgtacctgaatcttacacttcgatctcggagtcgaagtttcaggtgcctgtggaggttctttttaatttgttattgtctgatggtgcttttggctttttggatgatttccacaaaaattgtggtgacaaagaatttagttgctccaaatggcgtacagatgaacaagggggacttgtaagggatgtctcatttttgcacccaataaaaatttatcttggtgcaaaatttgggacttgtcaagaggtccagaaacttcgtctttacaaaaacagggcatctgggatgttgaacaagatagcctagatgagaactgttgttacctcaggatatatattaatgtagccttctcaaagaaaacaatatttagagggaaaatagagcagtcaacaaaagatgaatgccttgatgttttcagnctctggatnaagcccggccatganctnnngaagcaggagnntgatcgatcaa

SEQ ID NO: 145503 - DNA, 2323 bp, Zea mays
  Clone ID: MRT4577_64211C.1
gggtacctcgaggccggccggggtatcgtgtgacctgtagtcgtcgccagccacctcgctccctcccatacgacacccagctagtgctcccttccacagccaaggtaaccagccacctaaccccgcccgccatgccgggtctcgccgcctccgacaactcgcccccggcaccggggccggcggcgcgtcgggtctcgtcgccgctaccccgtggcgcgccgtcgtgcccgtctccgtccgtctcctcgcgcgtcgagactcggaagccctcgccctgtcccgcggcctgtgccaccgacgccggagactcgctcgctacccggatctggggtgcttcctcctccagtacgatgccgaccaagaaaatatccttcttcaggtagggcatatgtatttatttcttcaccatatatgcttctactctaacatatttggatatgagactaagaaaacaatacctctgcaggagctgactcgtgttcctaaggcaaggacggctgccattttgcctttggcctgtggctgggttgctggcagttgttggcacttccttggctcgtgctgggcccgtcgtgttgcctagctggctggaaacaagatgtaggttcatcacggctggacatgttttggcttatgaacaaaacggatttacacttgtcttacattttgtaatctacatctgttctctttaattggaataagcaagggaaactaaacaagctggagattaatcaccgcaggacaggtctgtcaacagtacggctgtctcaagttggagttctgatggcaacatttccaaaaggtattcagaagttgaggagaccggacttgaagacaacatcctcgagctaaacccattcactttggagccatttgatttggagccagttgatgctactccttagtctacctgaatcttacacttcggacacggagtcaaagtttcgggtgcctgtggaggttcttgtttttttgttattgtctgatggcgcttttggctttttggatgatttccacaaaaattgtggtgacaaagaatttagttgctccagctggcgtacagatgaacaagggggacttgtaagggatgtctcatttttgcacccaataaaaatttatcttggtgcaaagtggggcagaaacttcgtctttacaaaaacaggcgtctagtcattcaaacctctcaatcaataggtgatgccccatatggggaccattttactgtagagggcatctgggatgttgaacaagatagcctagatgagaactgttgtgacctcaggatatacatcaatgtagccttctcaaagaaaacaatatttagagggaaaatagagcagtcaacaaaagatgaatgccgggaagttttcagtctctggattaagctcggtcatgatcttttgaagcaggagtatgatcgatcaaaaggcgcctccagcacacctgattctggtgttcaaccaggggctataacaaacgaggaaagtgccgtggaagtagcagttccagtggtgagttcctcacatgatgaatctggtgcgagaagcctcattcctcctactcaagatcaccagcagaggacaggaagagatccttccatcacgtccacttcacaagaattgtggggttctctatcgtcatacatgaggtcaaggcaacttggtccagtactagcaatgtcactggtagctctcattatcctaatgcaggtgaccatcatagttctactaacaagacccccccaggtccaaatggatcctcatgggatctggacgggcagttcagggtacagcaaagaaagcatagagtgggtgcagaagcgcctcagcttactaagcgaggagatgcagctcgcggaggcacacatggagacgatgaggcgcgagtttgcctggctcaggtcttacctggagagactgcagaggacgcggggcagcacatgacggcggcgcgtgtacatggcacaggggcacgagttcgctacgcgaattcggaggtgtatacaaatacaatacaatacaacccggaggtggtgttcagtgtttcttctgttgttacagatggtacagatgcaaacagagagaggtggattgttgtttgcagaggtatttgccgtaaggcagaactgcaagatcccggtatagcgttcgatgtaaatagctggagcttccccattgcgctggggtgatgtacaatgtcagggacgagtcactgcgatcacgctacggcggtgacgcgttatgttatttataaatttctgactgaattttaacttctaaaagctacccggtccgtccgcggtccgtccaaaaaaaaaaaaaaa

SEQ ID NO: 145504 - DNA, 1639 bp, Zea mays
  Clone ID: MRT4577_64212C.1
tgggtccctcgaggccggccgggccgggatctacacactcacctcttctatatcatccgccattccttaagaagtccgtagtacgactcgtagtttaggtcgtcatggagtcattgaaaagccttgtgttctcgtcgtcatccgacgattccgacgatgagatcgataccttgttgcttgcccaacatgttgagcaccttgtagtaggagacacgagcacgcggcgtaggcgctcctcattgcctcgccgagttatccatagggaccacgctgctggagaaaatctcatcaaacatcactacttcggacctaatcctgtgtatccatcacatgtatttcgtcgaaggtttcggatgcatcgtcctttgttcctgcgtatccttcgtgccgttcagcgagaagacgaatacttcactattcgttctgatgcaaccggtttagcagggcttggtccattgcaaaaggtttgtgctgcattgcgtatccttgcgtatgggttaccaaccgatgcggtagatgagtacatacagattggacagactaccgctagagactgccttatccgtttttgtcgcgcaatcatctcttgctttagcgaacgataccttcgtatccctaaccacgacgacattgctcgcatactacgtgtaaacgccgacagggggtttccgggtatgcttggctctattgattgtatgcattgggaatggcgcaactgtcctactgcatggcgcggacagttttgtgggcgcaattcgaggccaacaatgatactagaggcagtcgcagggtacgatttgtggatttggcatgccttctttggaatgcctggtacgaacaatgatctcaacgtgcttcatcggtcacctgtgtttgatccgttacgtaacgggacgatgccaccagtgcacttcactattaatgggacaacttacaatttcggatactacttagcagatggcatatatccaaattggcctacctttgtaaaagctattcgccacgcatttgaggaaaaaaaggttcactttacaaccaagcaagagagttgtcgaaaagacattgagcgagcatttggagtttcgcaggctaggtgggctgttctacgtggacctgcttatggttgggatcgtaatcacctcgcagacatgatgactgcttgcattattatgcacaacatgattgtcgaggacgaaggagatggtgcagctaatgtcgacttcattggcccctctgggccgccagagccgtgcaacaatactgctgagggccgcaacgagtggctgaacaatcatatccgctcggagttacccaacgatccggaccaggacatcacctgtcaggcaacatacttgtctttacagcacaacctcatagaacacatgtgggctcgtcgaggctccatgggttgatgcatagtttccaaatgatgtgctacaccaatgttgttcactttcaattatgatgtgtaccaggactagaagtcgtatgtgctatgtatgtccttggtagagaagtgatagttccttctaagtgtaatgcctctggtacaaataagttgcataagtttccaaacttgaagtcatgtatcagaatccttattaccaaaaaaaaaaaaaaaaaagcccctagggccctc

SEQ ID NO: 145505 - DNA, 1383 bp, Zea mays
  Clone ID: MRT4577_64213C.1
tgatactcctagtgtacctgaatcttacactacggtcacggagtcaaagtttcaggtgcctgtggaggttctttttaatttgttattgtctgatggtgcttttggctttttggatgatttccacaaaaattgtggtgacaaagaatttagttgctccaaatggcgtacagatgaacaagggggacttgtaagggatgtctcatttttgcacccaataaaaatttatcttggtgcaaaatttgggacttgtcaagaggtccagaaacttcgtctttacaaaaacaggcgtctagtgattcaaacctctcagtcaataggtgatgccccatatggggaccatttcactgtagagggcatctgggatgttgaacaagatagcctagatgagaactgttgttacctcaggatatatattaatgtagccttctcaaagaaaacaatatttagagggaaaatagagcagtcaacaaaagatgaatgccgagaagttttcagtctctggattaagctcggccatgatcttttgaagcaggagtgtgatcgatcaaaaggcacttccagcacaactgattctggtgctcaatcaggggctataacgaacgaggaaaataccggggaagtagcagtacccatggtgagtatctcacaggatgtatctggtgcgaggagcctcattcctccttttcaagatccccagcagagaacaggaagagattcttccatcgggtccacttcacaagaactgtggggttcactaacgtcacacatgagatcaagccaacttggtccagtactatcagtggcgctggtggctatcattgtcctattgcaggtaaccatcatagttctgctaactaggtccccccaggtccagatggctcctcacgggatctcgacgggcagtttcgggtacagcaaagaaagcatggagtgggcgcagaagcgcctcagcctactcagggaggagatgcaggtggctgaggcgcacatggagaggatgaggcacgagtttgcctggctcagatcttacctggagggactggagaggctgaggcgccgcacatgaccgcagcgcgtgtacacgacaggggcacgattccgcgatgcggattcgttggtatacagtacgaactcggagacgttgttcaggtttcttcttcttctgtgttgctacagaccgtacagatgcaaacggagagctggtgccgtggtggtggtgttgcagaggtattgccgtaaggcagaactgccagatcccggtacagcattcaatgtaaatagctgggggacgtgtcattgccatgacgatacagcggcgtgatgttagaaacctcgcactacttttttttttcagaaagtaaaaaactttttgtggtttatgtt

SEQ ID NO: 145506 - DNA, 398 bp, Zea mays
  Clone ID: MRT4577_64214C.1
tttgggctgatttatgtgcttgattatgtgcatgcttatgtgcttgagtttgtctccggtagcgttacggccgtaaaacctcgggtgtgactctgtacggtatgagtcgtagaaaattgaccaaaaaaattaaacaatatattggcaaagcaactaaattaaatatgtgtcgatattgattgactaggtgattttgtcttaagaggaaacttattattgtggttggggttccttagactctgtcggaggtagtggtagtgatggtggccgcgagtgacggtgtctaatacgaagatttcgatgtacgtgtcggtgaaagtgccggtcgctacttagaagatggcgcctatgatcgcgtacgaggcgatgggtttgtgtttgtcgtaagatcatgagtc

SEQ ID NO: 145507 - DNA, 448 bp, Zea mays
  unsure (1)..(448): unsure at all n locations
  Clone ID: MRT4577_64215C.1
tatgtcggggaacgggggggttagcgtgtaacacgggcgaggcgccagacatcagacaaaactttattattgaactactaactcataactaaatctacaaagagggcaccaaccaatcgctgggtttgtgtggtgagaacccctgcctggggggtgaacaaaacaagttatcggaggggggggggggttgcaggcgtaagtagggggggggccataggcgcatcgtgtgggtagaacgacaacaactggggctgtgtgaagaaggcagcagggctcacaccagctagctggctcaatggtaatagttgttgctgctgtaaataatcangagagttcaatgctactagtgtgggtgaatggaagaaattgctgggggtacgcagcanctacctggctgaatgggattgttgttgttgcaaataataatcatagatcaatgcaactagtt

SEQ ID NO: 145508 - DNA, 720 bp, Zea mays
  unsure (1)..(720): unsure at all n locations
  Clone ID: MRT4577_64216C.1
cccgccggccgggccgggactcacctacccttctctatcaatcttccattgtccaccaccctcacgcctcgccctcccgtcccggcgacggcgaggccccctccgcctccgactcccgcgcgactgccccggaccccagtctcgcccttgtccaccgtcatggccgcacccgcggttgcctccccgagccgggcgacccccaccgacatccccaccgccgcgccctcgcccgcctccccgccgcgccgcctcgcgtcggcgccgcccgccgtcgacgcgtccgggtcctcctccccggcctccgcgcattcaggggaccagctctccgcccccgacgcctcgagcccgctgctcgcgagcaggagcgaggagtacaggcttctgttccggctgccgcccgacgaggttctcgtgcaagattttaactgcgctgtccaagaaaatattcttcttcagggacatatgtatttatttcttcaccatatatgtttctactctaacatatttggatatgagacaaagaaaacaatacctttgcaagaggtaactgatgttcgtaaagcaaagacagctgccatttttcataatgccattgaaattgttgctggtagtagaaggcatttttttggatctttcttgtgacgcgatgaagcctatcgaattatagtagatggctgggaacatcatggtagngatgcaagattgctccttgaacggtag

SEQ ID NO: 145509 - DNA, 556 bp, Zea mays
  Clone ID: MRT4577_64217C.1
ggccacttccacgaccacagactttgatatgtgtgtcgcgatcaacatggtcctcctctggatggtgtgctcctgctgatgtcggaggagcggacacccaagctgatcaactggaaagcactaccgtgaagagatagctctgcaagacattcagcatcgaagaaatccgacgcgaatccgcaaaagggaaggagatgcgcatcagacctcgctgaacctctctctggcacatgcggtatcctccatcagcaaatgtacagagcgggcaccgctgtttccaagaatactcgaggcgcggacgcgtaccagggcaccgacaagcgcgcggaacaacatacaggccttctcctcgtgggacagcgcgtcgccgacactcccggggaagagaaaggcgatgaccctcttgatcctcggacgacaggaacgggtgcgacacggcggccatactgaatctcgtccgggatgccgcaaaactccaccacccgcgtgcggaacgccagggggacaccagtctgacatccaccttctcgatcgcgtccagattgagcgacaacac

SEQ ID NO: 145510 - DNA, 578 bp, Zea mays
  Clone ID: MRT4577_64218C.1
ccagagtggaatttacatataggtatgtggataagtaagctgctagagattgtcttagttcaacctcttaaaaaaaattggctccatccttgcatataacattagttaaaagttagataaatctgattcataacaaaggtaagctgacctatagttttaaatggaaggaaatagtaacgttaacgtaggttgagaaatgtaagacatgtattgcaggccggccgagttcgttgcgcatcgagttcagttcactccttgtccttgcaaaggagacgctagcgggcagggcaggtgcaaagtagtagtcgaaacgggcggtcgatagaatcagcagttcagcacccacccgtgctgctggccctgccttgacccgtctcggctcgtctcgccggaagataaccgaacttggtgggcacagactccgttcctcgctgtgagccgtcgatggtggcaagcaatcccggcccgccggcaaatcctcccaacccctcgcgcgcgcggctcccgtcgttggctgcgcctgcaaatcatctacagcgcccggcggcctgacacacgctggccgtccgttcgtgcgc

SEQ ID NO: 145511 - DNA, 503 bp, Zea mays
  unsure (1)..(503): unsure at all n locations
  Clone ID: MRT4577_64219C.1
aaaaacaaccccccggcatccaaataatggcagtccatcgccaaaagcaggcggggaaaccccaaaacccaaaaaaggctaaagaatcccggaaccggttcaaacaaacctttaacccggaaaattcgaggggaaacaaaaaccgagggccgggggacctccaacccaccggggagggagcgctaaaaccgggttccaaaggggacccaacagaacccgcggaccctgggccgaacccacgcaaagggcaaatcccaaaacacggcgggccgtaacagggaggacagacccgaaacccagcgaggggggacttacggacttagccgctctccggcggccctcggtcactgactccctatgctccggcccgctatagctgcgcgcgagccgnaaatcagcctcactccagagggcgggcactacggggtatgcgaccagaaatcacgtgtataaccgcaaggaaaagacacagggcgaagtcaaaaagggccaggcaaaaaggg

SEQ ID NO: 145512 - DNA, 226 bp, Zea mays
  Clone ID: MRT4577_6421C.1
gtcagttcctcttcaaaataatactttaacaataattaacgccatcatacaacaacatgcatccatatgactagtaaatatttaactacagttaactactactacgccatcatagtaagaaacgagtgctccctctactttagttgaatatttactagtcatatggatgcatgtgtgtatgatggcgtcaattattgttaaagtattattctgaagaggaactgac

SEQ ID NO: 145513 - DNA, 1890 bp, Zea mays
  Clone ID: MRT4577_64220C.1
cccacgcgtccggagaacatgaactggtagtacaagatccttctggtagtgctcccaaagatttaatagttaaagattatgtggacgaacctcatgtatcaacaactaccatgagatcgagcggtgaagtacctcaagatcatagtgccaccgaggaaaacccaaaaacaattgacagcattgttgaaaggagaccatctctaagcagtcagattagcattaccctaagatcaagtggtgaagtacttcaagatcatagtgccaccgaggaaaacccaaaaacaagtgaaagtattgttgaaaggagaccatctctaagcagtcagattagcattaccctaagatcgagtggtgaagtacttcaagatcatagtgccaccgaggaaaactcaaaaacaagtgaaagtattgttgaaaggagaccatctctaagcagtcagattagcatgaatgaagcctatagacttgccattggcaacaagggtagcttgacatcccctacattgacggatgtaatccttggaaaggactctacttctagcataaacgaagaactgaggctactgttatcacagatctcagcttccagggggcttgaggcaccatgggccgatccaggccctagcccacgtgcatatggacgtggtgatgagttggtggtgcagaacattaccaatagattatcacttgagaggaatgcttccggtttggagtctctagacggaagcattgttagtgagatggaaggtgaaagcaccattgaccggttgagacggcagattgatcttgatcggaaatcaatacacctactctgcagggaactggaagaagagaggaatgcctcagccattgctgcaagtcaagctctggctatgatcaccaagttgcaggatgagaaggccgcaatgcagatggaagcttcgcattaccaaaggatgatggaagagcaagctgaatatgacagtgaagcggtagcgaaagctaacgagttactcactgaaagagaacagctaattgaagaactggaagttgagctcgaaaactataggagacagtatggaggtggatcaacacagagacgaggcaatcgagtggcttttaaacaagaaaatagggatacaactatgcttgacggtggtggtcttgaagatcctctgattaacacacaacagggcataaattccttggtgggtttggaagaggagagggcatatatagcgactggtttgagaaaattggaacagaagctccaattctactccaacaacagtgtttccgttgagttacccagtccagatgttaaggatgacctctccgacaaagtatatgtcacagaagacttctcgttacactgccaggaaagctcgatggagagcaaggaagctggctcatcgacaactagtggggaggttgatctagttgcagtgcaggaagaaattgcaaagttgaacagaagactgaagacactagaaggagatcgcagttttcttgagcatagcatcaactccctcaggaatggcgacgaaggtttgatgtttatacaggaaattgcttgcaatctgagagaactgcgagcaattgctattggcaaaaaataaaatgcaccaaaatgtgtataatagtcattttctcgaaacttatttgtgcaatagacgccgaatcaacatatgaatcgtgcatcatgtttgtcatataaatgaaaagaaattcttgtaattagacaccagatgttgctgtaattatctttaaattcgtagggttgagatgtaaattggttctataaaaaaaaacgttattatgttaagtttttgctatgtaactaataacttgctatcctatagaaaaatggagcacccctcttatggccagtatggccaggccaatagtagt

SEQ ID NO: 145514 - DNA, 368 bp, Zea mays
  Clone ID: MRT4577_64221C.1
gcacgcacgcaagcgcggtgaccggaagctcaacgtagaacgaccagcagtggcggatccatggggggccacgctctcctctccggcccagaactgctgggcacacgcgggaccgccagcgagcctagctcgaggtgaggaaagggcccttccacggccagggcagctccatccctcccagccaagcaaagaggccgcaagtacctaaggttggcgtgcgaccacgccctctcgtagctcggaggcaggctgcccagacagtatggcttccagccggtggggctcacggaccgaggagggcaccgccggcttcatacaggccaaggggctgcgctacgggcgaggtggccaggggcggatacgacatg

SEQ ID NO: 145515 - DNA, 159 bp, Zea mays
  Clone ID: MRT4577_64222C.1
aatattttttttttttttttcttctttttgggggaatttttttagaaacggggggataaaatccacagtttcccaaagctgttatagcaacacaaaatgaaaccaccgttggagctcggactactgcaagaaccgtttcccgacacgatctcagcaaat

SEQ ID NO: 145516 - DNA, 504 bp, Zea mays
  Clone ID: MRT4577_64223C.1
aattaaataattaaaaattttaaaatgtttgggggggggggggagaaagaaaacaaccaaatattgggggggagtgatgtgaaaaataaaattttggaagcaacagggaaaaaaaaattggggagaagcgaaccgggaaaaagtgaaatttttaaacagagagcccaaaggggggagaatgcttcccttgataaaagaaaaaatggggtaaggtcattattaaaaaagaaaagaggaaaagggttttcttgctttaagccggctaaaaagatgtcatgacaatgaagacgagaaaacaatgggacatgaagcaaaaaagagcgggcccccgggggaagaaggaaaattcaaaagggggcgggcaagcgcaccaaattttgagaagagaaagttcaaaaaacaaacgtggaaataaggggatagagggagactgggggaaaatgttgaacccacacaaatccaaaaaaaaaaagaacccgaatcataaaacggaaaaagctaggg

SEQ ID NO: 145517 - DNA, 283 bp, Zea mays
  Clone ID: MRT4577_64224C.1
ctgactgatcatgattgcagcattcacttagttgctgccaattaagatggctctgctatagaagctctgggatgatgttgtggctggccctcaacctgagcgtggccttggcaagctcagaaaactcaccacgctcaaaactattgatgaaggagaaagtagcaagctgcagaagacgttgtcgatgccgtcgacaccaacaaccccgatgactccgacgactccaacgacaccgggatcggcccgtatagctgacaacgtttggaggagcgtcttccatcct

SEQ ID NO: 145518 - DNA, 530 bp, Zea mays
  Clone ID: MRT4577_64225C.1
gcgttcggtgacctctagaaagaaggcggagactcatctggtatggttgaggcgaacactatccaaaaaacaagctgttcagtagctcactcgaaactgacgcacagttcactataggaaaaactaaaaccctcctgtactctctatccaggctgacgaggctaccggtgccatcatcaatgacagacaaagcagccactgagaagccgcttaacgaaacatcttaatgaaatcagcttaaactcgccattcacaagacatgaacaccaatggtaccaacgccgataacgacggtctgtcctagggtgaaacaagagtcaacagtgaagccaaacatgatctgatgaaccttttagacacaacctcgagaataacataactgctgactaagacactcgaggaagtgaggcatcttctcacccggcatcaacatgatgctgctttcacggaaagaaagactcaaaggggactatgacgatcttcataagctgtatcaagctagcgaacttcgttataatgaactggaaacg

SEQ ID NO: 145519 - DNA, 1288 bp, Zea mays
  Clone ID: MRT4577_64226C.1
aattcggcacgagggtcggtcgtccctcctgcaggtcgccgccgcacgctcgctcgcttccctctcccgaccacagcgccaccgcccgacgcataagctcgacgaacccgtctacccgaccggagcccctccctcaccttcggtgattgtcgacgtctgcattctcctccggtcctcccgagagcttgagccttgaagaagttaaagaagcagctggaaccatgacatcccgtttctggggacagggggacggtgagtctgaggaggaggaggaagtcaagccagaacagagcagcaatagtgatgatgatggaggccgtgatggtgcgggacgcaatgcccaaaaccgctatttgaagaaccaagaagatgacagcgatgagtctgatacgggtcacagcgtgatccgctctctgaaggacaagcacaatgagatggaccagatgcgtaatgcaatgaagattaatgactgggttagcttgaaggagagttttgagaagcttagcaaacatcttgagaaggttgttcacgtcaatgaatctactgaggttcccaagatgtatatcaaggctcttgtgttgctggaggacttccttgctggagcccttgcaaacaaggaggccaggaaaaagatgagcagcagcggggggggaggcactcaatgtgatgatgcaaaagctcaagaagaacaacaagcagtacaaagaacagatccagaagtgcagggagcatcctgagggttttgaagatgaagctgtggatgataaagatacacatgacgatgacagcgatgatgttgatgagagtgatgcagagattgaagatcctgataaaatagctatgtcagaatcagaagaggaacgtgatgaagacgatggtcacaaggatggttgggaacaaaagaggagtaagaaatagggctgaaaaaaactcgaggctcgcgagccggctcgggctcgatcaggctcgggtcggtgaggctcgcgagcctaaacgagcccgagccgagcctaattccatggctcgctacactaacgagccgagccggctcgaggctcggtccaaactattgcagctatcacttgtcagttgtcagtttgtttactagtgtctagtcatctatatctagtgatcggtgtgttgttttggtcacaactcacaaggaactagagtgcagggacataattttttattatatggaagatattgtgcttcaaatttgagctaaaaaatataaaaaaaaaaaaaaaaaaaaaaaaaaaaaaaaaaaaaaaaactccagggtggg

SEQ ID NO: 145520 - DNA, 155 bp, Zea mays
  Clone ID: MRT4577_64227C.1
ttctattctcaacaatataaatatcagatattgctcaaactgacactgccacccatggtgatgcgtcacacattattaatcaaccaacgccgctaaatgactaaactaggttgatagtcatcagctataccacaagacatattttcttcgggggg

SEQ ID NO: 145521 - DNA, 1063 bp, Zea mays
  Clone ID: MRT4577_64228C.1
atgccacgttcttcatctaggcggcacgtgttggacggctggctggctcatgagccgcgagcccgacaatataaagccacgttcatcccggcggagcccgggacgcagtttctcgcgccatctgaagtcagctggggcgacgaagaaatgtcctctagcgatcaaaacccagctgccacacccgcgtcgtcgggccccgccgagccctcgccgccgggcaggccaacggcggtgtcctcgcgtgtcctcgacatgggcgcgcagctggcgcaggcgctgaagccggtgcggcagatgaagcagcacgcgtgcagcttcgcgctgtacgcccacgacttgcaccgccaggtggaggtccaccacttcgtcgcccggctcaaccaggacgtcctccagtgcgccgtctacgactccgacaagccctcggcccgcctcatcggcgtggagtacatcgtctccgacaccatcttcgagggcctggccccggacgagcagaggctgtggcactcgcacgcgtacgaggtgaaggccgggctgtggaccgacgtcggcgtgccggaggcgctgcagagctcggagatggcgagcctcgcaaggacgtacggcaagttctggtgcacctggcaggcggaccgcggcgacgcgctgcccctcggcgcgccggcgctcatggtgtcgccgcaggccgccgagcccggccgcgtgcgcggcgagctggtgcgcggccgtgacgagaggtacgggatcgacagctcggcaggggggctcaaggcggcgagggtggagatggacgagccggagtggatcaacccgaacgccgactactggcggctgcacggcaaggggttcgcggtagacgtcgtcccggccgagatgaagcgacacgcgcccttcccgtgagctgccggtcttcttgttgtgacacgtccgtaaggagcataaagatcgttcttgtatccagaggcgtattttgaagaagaagaaaaagagcttgtgttgcgtgccaaaaaaaaaaaaaaagggcggccgtcgcgactagaactagtctagttctagatcgcga

SEQ ID NO: 145522 - DNA, 479 bp, Zea mays
  unsure (1)..(479): unsure at all n locations
  Clone ID: MRT4577_64229C.1
gacggtatcgataagcttgatgggataaaacattttcaacaatcaaattcgatcactggagataaaacatgcttttaagagaatttacttatagataaaataatcttataactctatttgaattgtcctaaaattatatccaaagtattatctaaaaaactctttaaacatctgtttaaacgtgaaaatgaacaaatggttgaaagagttgaagcttttgtgatctgtgaagatatgacatttttctctgtacagatggtgtccccagatctttcaagaaaatacaatggctgcaagctctaaatcatgagccgagtagtttttctcgtgcagtttcaactgttgggacgcataagctaccactttaccttcttgcatcaaaacacagcccaaaccatttaatgaagcattgatataaatcacaaattctttactggactatgattgaaccaacatanggctcttgtcaataatgcttt

SEQ ID NO: 145523 - DNA, 609 bp, Zea mays
  Clone ID: MRT4577_6422C.1
ttttttttttttacttgttcccacaagtcaccttcgggtacacggtggaagccctcgagatgttgctactgccaatggctaaggatggagtggaagctcttggttccatgggaaacgatacaccacttgcggtgatgtcaaacagggagaagttgacttttgagtacttcaagcagatgtttgcacatgctacttaccctccgattgaccctattagagagaaaattgtcacatctatggagtgtatgattggccctgggggggcctgggcggcacctcctacaactgcaaccactccaaccgttggattaggcctcctcttctctgtatacatagcactatctatgggaagtgccctgtgtgtcttgtctcggtccttgcttgtgtcactgattggtctactaacatcagaaaggttcttcaagaacatgctccactgcatcctgcgtgccccaatgtccttctttgattccacacctactggtagaattttgaacagggcctctaatgaccaaagtgttctagatctagaaatagcaaacagctaggctggtgtgtgttttcaatcatacaaattctggggaccattggtgttatgtcacaagttgc

SEQ ID NO: 145524 - DNA, 625 bp, Zea mays
  Clone ID: MRT4577_64230C.1
actcactcacgcagtttctcgcgcgcgatctgaagtcagctggggcgacgaagaaatgtcctctagcgatcaaaacccagctgccacacccgcgtcgtcgggccccgccgagccctcgccgccgggcaggccaacggcggcgtcctcgcgtgtcctcgacatgggcgcgcagctggcgcaggcgctgaagccggtgcggcagatgaagcagcacgcgtgcagcttcgcgcggtacgcccacgacttgcaccgccaggtggaggtccaccacttcgtcgcccggctcaaccaggacgtcctccagtgcgccgtctacgactccgacaagccctcggcccgcctcatcggtacgcgccgccgccgcgcgcccgttattacagctgcgtgactgcgttccgtcccctcacgtacgcaggcgtggagtacatcgtctccgacaccatcttcgagggcctggccccggacgagcagaggctgtggcactcgcacgcgtacgaggtgaaggccgggctgtggaccgacgtcggcgtgccggaggcgctgcagagctcggagatggcgagcctcgcgaagacgtacggcaagtctgggccaccctgggcaggcggaccgcggcgacgcgctg

SEQ ID NO: 145525 - DNA, 106 bp, Zea mays
  Clone ID: MRT4577_64231C.1
gagtctcagaagaagagagagcaccatttactggaggcaattgaccacctgacggaacagctgcagccccttgaacaggtgaaagctggcttagacgctcattcgg

SEQ ID NO: 145526 - DNA, 407 bp, Zea mays
  Clone ID: MRT4577_64232C.1
gacccacttgcaactctatccgcaagcggcaccgaaagcaactacagcgacgcagcaacagaaatctgtggcagtctagccccgttacagctcgaagcgagaagtgctttccaaccaagtactgcatcgtcctgacttgccggttcctctgcaggatttgaaaccgggttagaagctgaagctgaagctgaagcagggactgagacagcagcacagtctttgtttcggcaggtgatgcactgaaaccgttcaggctttcctgtagtttaccatcatgatgaaccgtgggtgtggtgctgtgctgtgctttgttttgttttgactgctttcatggatgtagactaatgatttcatgaatgatacgtgcatctacgttgctcaaaaaaaaaaaaaccccccccccaccc

SEQ ID NO: 145527 - DNA, 258 bp, Zea mays
  Clone ID: MRT4577_64233C.1
aggacccctgaacggggatgaaaaggttaaaatgccagccacaaccgtttaagggggtttccaacccaaccggaccaggtttcaacgttcccccccttaaaccaggggggggatggcgaggtttttccccgcagcattttatttggggggcccccaaattttcccgacaaataattataaaacgggtgttacaagcgttgcacccaaaaaaccaggggccaaaacacattggataatggctttagacagcagcaaaca

SEQ ID NO: 145528 - DNA, 1941 bp, Zea mays
  Clone ID: MRT4577_64234C.1
taccctccgaggccggccgggaaaaaaaaaaaaaaaaaaagttgctgtgggctgtgagatgctcataaccaaaacagcagggtgtgcatggagaccctccgcgcttacgatgagctgtttccatgggccctccttgtcctcgttaccaccattaccatcctctacctgaagcaactgttggtcgcagcgttcaagagacgcgccaccagctctccttctctcccatgcccaagaggcctcccgctcatcggcaacctacaccagctgggcacggtcccgcatgacgccctcgccgcgctcgccgccaagcacgcagcgccggtcatgctgctccggctagggtcggtgcgcacgctcgtggtgtccaccgccgacgcgctgcgcgccgtgttccagcccaacgacagggcgatgtccggccgcccggcgctgtgcgcggccaccaggatcacctacggcctgcaggacatcgtgttctcgcccccggacggcgggttctggcgcacggcgcgccgcgcgtcgctgtcggagctgctgagcgccccgcgcgtgcgcagcttccgcgacgtccgggagcaggaggccgccgcgctcgtcgccgccgtaacggacatgtccaggagcggctctcccgtgaacctgagcgaggagcttatggcgacgagcaacaagatcctgcggcgcgtcgcgttcggcgacggcggcggggaggaagagagcatccgggccagcgccgtcctcgaggagacgcagaagcttctgggcggcttctttgtggccgattacatgccgtggctggggtggctggacgcgctccggggcctccggaggcggctggagcggaacttccatgagctcgacgcgttctacgagaaggtcatcgacgaccacctcagcaagcgcggtgacgacgacgatgcctccaagtccaagggcgaggacttggtggacgtgctccttcgcctgcacggcgatccggcttaccagagcacgttcaacagccgcgaccagatcaaaggcatccttacggacatgttcatcgccgggacagacacagcggcggcgacggtggaatggactatgacggagctagtaaggcacccggacaccctcgccaaggcgcagaaggaggtgcgcggcgccgtggtcggcagagacgacgacatagtccgcgagtccgacctcccgcggctcaagtacctgaagcaggtgatcagggaggcgatgcgggtgcacccgccagtgccgctgctggtgccccgggagaccatcgagccctgcacggtgtacggctgcgagatcccggccaggacgcgggtgttggtgaacgccaaggccatcgggcaggaccccgacgcgtggggcgccgacgcggcgcggttcgtgccggagcggcacgaggagatcgcggacctcagcgaccacaagccgtggcacgacagcttctcgctggtgccgttcggggtcggccggaggagctgccccggcgtgcacttcgccacctccgtggtcgagctgctgctggccaacctgctgttttgcttcgactggcgcgcgccgcacggcggggtcgttgatctggagcaggagaccgggctcaccgtgcacaggaagcatcccctcgtgctcgtagctcgaagggtacgcgtgcaggcgccaagcgatgatgagctcgacggacgtttctccgccatgcattccgttcctagctagtttatttttaacgtaactaaaccggagggagtataatatacttgcatgttgctgtgatccaagtgacgtgtatatatatatgctactatctctgcgtttgtttgttctgttgtgaaatgaatatgttatcttcgattggaaggaacgatcgatttgctaaaaaaaaaaaaaaaaaaaaaaatttaataaaataaaaaataataaaaaaaaaaaatatattaataaata

SEQ ID NO: 145529 - DNA, 585 bp, Zea mays
  unsure (1)..(585): unsure at all n locations
  Clone ID: MRT4577_64235C.1
cgccgtgtgatggattccgctgaatcggcttacgtggtcgcggccgaggtctgttttttttttttttgatttctnttgagatggccctccgttcctcattacctcatntgcctcctttattggtggttttttccttctacttgctgcggctggtgttgccgaattcacggtggggcaggcttttttttttgtgcctgctggaattgttccatcttggctggcgccaggattggacaggcgccccctgcgatggtgtgctttggcccagttcctggcttttggtaccgttgcctactgtatttatgaatgtattgggaaggacttgtgtttctttggccatgtgcttgttgaaccaaacctctttgttgtggaagctgtctaaatcagactggggcttgtgggttccatggatatcttgtgggaagataatagtttttgtttcgattcctgtctccttgaaagccctggcatactgctggccattaggatcgggaactctgtgatcttgcgctccagcaagaaagaatgttggtgtcttgacctttgcactatgtgaaattgctgacttctggtgggattgacaaa

SEQ ID NO: 145530 - DNA, 579 bp, Zea mays
  Clone ID: MRT4577_64236C.1
tgggtacctcgaggccggccggaaaaaaaaataaaaatggtgaacgccaaggccatcgggcaggaccccgacgcgtggggcgccgacgcggcgcggttcgtgccggagcggcacgaggagatcgcggacctcagcgaccacaagccgtggcacgacagcttctcgctggtgccgttcggggtcggccggaggagctgccccggcgtgcacttcgccacctccgtggtcgagctgctgctggccaacctgctgttttgcttcgactggcgcgcgccgcacggcggggtcgttgatctggagcaggagaccgggctcaccgtgcacaggaagcatcccctcgtgctcgtagctcgaagggtacgcgtgcaggcgccaagcgatgatgagctcgacggacgtttctccgccatgcattccgttcctagctagtttattttttatttttaactaaaccggagggagtataatatacttgcatgctactatctctgcgtttgtttgttctgttgtgaaatgaatatgttatcttcgattggaaggaacgatcgatttgagaaaaaaaaaaaaaaaaaagcggcc

SEQ ID NO: 145531 - DNA, 556 bp, Zea mays
  Clone ID: MRT4577_64237C.1
ccggccggaagacggacagagagattgaagaggcgagacatctcccactcacagtacagtctcaacaacgtgaccgaaggcgcagatgcatcacattatggaattgacacacaacctgagcctctcgctgacgcatcacacgcacctcccggatcagatgcgaccaccagcattgcacactatattaattatggccgctagctcactacggctgggtgaacactaactctgaggccctacaggttcagaagcatctaccgctcatacacctagcatcacaagccatcttgagatcaggcacaagcgtcacgcgcagggacccctaccatcactgcatcaccagacactctgcatcggcgacagcttgcagaagatccggtacaaccattgcaactaagaggtactcgcgctgctccaagaaaatgcttccaataagaatgatggtgactaaatgctcttgtgtgtgaaaaatgttaccacaaaactatactatttcctggtgtcccactgggatgtagacatacagaagtgtacttctatctctcataaactctga

SEQ ID NO: 145532 - DNA, 593 bp, Zea mays
  unsure (1)..(593): unsure at all n locations
  Clone ID: MRT4577_64238C.1
gcgttcgctagnatctcctgccacaactctaggatcataaggtcatattttgctgttgtcagctatcccagtctatcttctcatagcaataaatattcccaaatgggtaatttaggctatcgacaagattagaaggggatttatttggaaaggtaggaaggaggtcaatggtgtcagctgtctggtttcttgcgacgtggttacaagacctattaatcttgggggtcttgggatccctaatttgcagttcaagagctgggctttgcaatcaaaatggttatggctggaaaaaactgatccaaactggccttcgcgaggtctgaaactccctattcagaagcatgtcagggagctgttcttagcttctgtggttactagaattgggaatggagccaacactcttttctggtctgataattggttgaatgggaccgggatcagggatattgcccctgaagtggttgccaaagttggtaaaagtttgattcactctagaaccgtggctcaagccctggaaaactgacagtgggtaagtgatattcgatcccctctgttactggctgggcttcaacagtacctactgttatgggact

SEQ ID NO: 145533 - DNA, 734 bp, Zea mays
  unsure (1)..(734): unsure at all n locations
  Clone ID: MRT4577_64239C.1
ctacggcctgcaggacatcgtgttctcgcccccggacggcgggttctggcgcacggcgcgccgcgcgtcgctgtcggagctgctgagcgccccgcgcgtgcgcagcttccgcgacgtccgggagcaggaggccgccgcgctcgtcgccgccgtaacggacatgtccaggagcggctctcccgtgaacctgagcgaggagcttatggcgacgagcaacaagatcctgcggcgcgtcgcgttcggcgacggcggcggggaggaagagagcatccgggccagcgccgtcctcgaggagacgcagaagcttctgggcggcttctttgtggccgattacatgccgtggctggggtggctggacgcgctccggggcctccggaggcggctggagcggaacttccatgagctcgacgcgttctacgagaaggtcatcgacgaccacctcagcaagcgcggtgacgacgacgatgcctccaagtccaagggcgaggacttggtggacgtgctccttcgcctgcacggcgatccggcttaccagagcacgttcaacagccgcgaccagatcaaaggcatccttacggtacgctagcttgcatgctacgtgcgttttcacaagtttcttgatcgacaataaccgtccgtgtgcgtatttcaggacatgttcatcgccgggacagacacagcggcggcgacggtggaatggactatgacngagctagtaaggcacccggacaccc

SEQ ID NO: 145534 - DNA, 693 bp, Zea mays
  Clone ID: MRT4577_6423C.1
gccggccgggctgcaaaaaagggtgtccattctatgtggcatgtcactttacagctacaccaaaaaggatcatgttatgttctttttgtgttctgctacgactgtgtttgcccaagttaatcattgcatttggttcagttccataaacattttccatgttttccaaaaaaaaaagctctaacagtgtaagaaatatgtgtttttcattttcttcttatcttcagagatgtgttaggattgagacatttgataaggacttcatacgtttagaaatgtttcaaatttctgactgttatacacctgctttttggttccaaggcccaatcaggatgttaagtgtttgttttttatacattgatgcttcatacctcggtgtattgttacaagtgacactgtaatccacagagtaacattacgcataattgttgttagatgacatttgagcaaaaccaagcatgtcaccaccaaacgaacttcctatgcagttttttttctcacatcagcatatgttagtttgagattttaagtttgggctgttttagctgttgtgggtgtggcagaccaggtgcaatctcgactgcacaatagtttaattcggattggccttttggtagttgtaagttaacagcttactgactagatatctggtgtccattttggataattctgatttaggatgacaagaaatttcaa

SEQ ID NO: 145535 - DNA, 413 bp, Zea mays
  Clone ID: MRT4577_64240C.1
tactataacatcacgtgcactccaaccttacctcagaattcaactcgagcccagtttatttttaaataaacaattacaactcggctccctacttaattttttagtatccaacatcaaatcccattacaaattcaataactcattaaaacaatttataccatcctcactaacacccacttcttacttcatgcctcttgaacacaattaaacattcacattaacactatcacaaactcatcaataaacctatacttatcctaactaaactctttcctctttattaccaccaacacacaattctcatatataactcactattttattacaaacacaaaaatcttcttcaatattaaccatacaaatcttaaatatcaacctttatacactcaatattcatactacaaaacttcttt

SEQ ID NO: 145536 - DNA, 322 bp, Zea mays
  Clone ID: MRT4577_64241C.1
gccgtgtccacgctcatggtagactcgctcatgctctcgttccacggccggggcaaggccaagaggagcgctgctgcggtcacgcaccataatcatggaggccaataccatgacagccctccggtgcacgggcacgggcacgggcatctagacatgagtgagggtgagacggacgtcgaggccggcgtggcgcagcagctttgcaggaaccgtgtcattgttcaggtcctggagatgggcatcgtggtgcactcggtggtgatcggcctcagcatgggcgcgtcgcagaacgtgtgcaccatccggccgctcgtggcggcgc

SEQ ID NO: 145537 - DNA, 424 bp, Zea mays
  Clone ID: MRT4577_64242C.1
cctgagccctagagctggttgggatcctcattcctctgtaacttgtgcgtcagtttttggtggatttgccgctaaatttgctgaggcatgccaggatcctattagatttttagaaacaagacatggtgaccctccgtgcgtaatgagaattcttagaaacaagaagacatggtgtgaccctgcgtgcgtaatgagatattagtctgcgatgcagaagattgtaaccttatacaaacacaatctggaggtttctgcgtgtggagttctacctttgtactctacacataatatcataatataccaggagcgtacaattgttctttcagggtgtgtttgagagcaacaagactgaagacgctaaaatctccttatattcaaagcctctttaattcattctaatctacttgctccaaacaaaccctag

SEQ ID NO: 145538 - DNA, 1556 bp, Zea mays
  unsure (1)..(1556): unsure at all n locations
  Clone ID: MRT4577_64243C.1
aattcggcacgaggcgagaccttcccgtgccgccctgtacgcgcctgcccacgtacgcctcctcccctcccacacccaaccccagcgcacccacaagaggaataggaggaatcaatccgccccatgcccacatccgtcgccacccacgcatccctcctcctcaaagccgcagccgccaagcccttcttctccccccgcccggcggcccggatccccgccccttctcctcaccctcctcccccgcccgccggccgccgcctgccgaacacggcggccgctctcgcagccgcagcccgccggttccggtggccgtcggcggccgcgtcggcgcgggggctgtgcgcgccgccgcattccggcggcgaggggatgggatctgatgcgggggcgggggccaggaagaggcgggtgccggcggtgaacgggctcgccaaggacgtgcctgcggtgaacgggatgtgatgcccaaggaggagcccgcgaccgcgccgcccaggttgctcacgctgcccaccgtgctcaccattggccgcgtcgctgctgtgccgcttctgatcagcactttctacatggagggtccatgggcagctacggccacaacaggcatcttccttgctgctgcagtcactgattggctagatggttatatcgctagaaagatgcagctaggaacaccttttggtgcatttcttgatcctgtggctgacaagcttatggtagccgcaacattagttttactatgcaccaaacctttggaaacatcactgctcaatgatgggccatggcttctaacagtcccttccattgctatcattgggagagagattacaatgtcagctgtgagagaatgggctgcatctcagaataagtgaagttcttgaggctgttgcagttaacaacttagggaagtggaagacagcaacgcagatgacagcattgactctgcttctcgccagcagagacccaagtctacctgcgcaaggcgctctagttgcccccggtgttgctctactttacatttccacgggactcgccgtatggtccctagtggtgtacatgagaaagatatggcggacacttctaaaatagtattagcacaatatatatagtgtagtagaagaaacagaagcaaggcgaggttctattcgtgatcgtacgatttttggaaggctgcttagttgattggtggactgggacctatctagagctgcttgtgatcctcattcctcagtaacttgtgcgtcatctatttttgccgccaaatttgctgaagtatgccaggattctagacatgatgtgaccctgcgtgcttaaggagatataagtctgcaatgcagaagattgtaacccaatacaaacacaaaacccagaggtttgtgcatgtggagttctatcattgtaatctgcacataatatcatatgccaggagcatgcaattattcttttcagtaataaaaaaatccctgtctctaatgtgtagctcttctttttaaaaaaaaaaaaccncnnaaaaaaaaaaaaaaaaaaaaaaaggactctgcgttgttacccctgct

SEQ ID NO: 145539 - DNA, 1069 bp, Zea mays
  Clone ID: MRT4577_64244C.1
tgcacgaggctgcccactgtgctcaccattgggcgcgtcgctgctgtgcctcttctgatcagcactttctacatggagggtccatgggcagctatgggcacaacaggcatcttccttgctgccgcagtcactgattggctagatggttatattgctagaaagatgcagctaggaacaccttttggtgcatttcttgatcctgtggccgacaagcttatggtagcggcaacattagttttgctatgcaccaaacctttgggatcatcactgctcaatgatgggccatgggttctaacagtcccttccattgccatcattgggagagagattacaatgtcagctgtgagagagtgggctgcatctcagaataacaaagttcttgaggctgttgcagttaacaatttaaggaagtggaagacagcgacgcagatgacagcattgactctgcttctcgcaagcagagacccaagtctacctgcgcaaggcgctctagttgcccccggtgttgctctactttacgtccccacgggactcgccgtatggtccctagtggtgtacatgagaaagatatggcggatactgctcaaatagtattagcacaatatatatatagtgtaatagaagaaacaagcaaggcgagcatccgttcgtgatcgtacaacttttggaaggctgttgggtggcctgagccctagagctggttgggatcctcattcctctgtaacttgtgcgtcagtttttggtggatttgccgctaaatttgctgaggcatgccaggatcctattagatttttagaaacaagacatggtgtgaccctccgtgcgtaatgagaattcttagaaacaagaagacatggtgtgaccctgcgtgcgtaatgagatattagtctgcgatgcagaagattgtaaccttatacaaacacaatctggaggtttctgcgtgtggagttctaccgttgtactctacacataatatcataataaaaaaagagcaaaaaaaataccaggagcgtacaattgttcttttagggtgtgtttgtgagcaacaagactgatgacgctaaaatct

SEQ ID NO: 145540 - DNA, 301 bp, Zea mays
  Clone ID: MRT4577_64245C.1
ggccgccctccttttttttggttgggtttataataggggtcggccggttcttcccctccaagcagtgcaaaggagctggggatttcatgggggctggagaacgagctgatggccacaagaatgtcacatcccaatcacgcccattggagcacgcatgcggattacggggaccaaagcctctccatgcaagactagagacgtggactgcagagagtgtttgatctctctatgcgagataccactggaatcaacctaggagactagcctggcggtcacttgagctgaacctgcagaatgctgc

SEQ ID NO: 145541 - DNA, 172 bp, Zea mays
  unsure (1)..(172): unsure at all n locations
  Clone ID: MRT4577_64246C.1
cccacctccaacctccccgacaactcctactaaactgcggagacctaatttgctncctaactcagcacccccaagactccacttacccagtactataaccccttcaatgacctccccgtcttacttccctccatcccaaatttactctcccaataccctcgcagactaaccc

SEQ ID NO: 145542 - DNA, 785 bp, Zea mays
  Clone ID: MRT4577_64247C.1
cattgggtacctcgaggccggccgggatgctatttgctctagcgagcacgctaaaaatcggccaagatactaatacaaggcttacagaatacaacaccaccctgcaacaatacaacagaaaccttcaggctgatgcctctaatagtggtgagaccatctcaaaacttcagaaagagagagtgccatgatggaaactgatggttactctgagacagtgtaaccgctctatgggcaatcaacttgaatcttctacagtatctccacaagaagctattacagtgaaagaagagctcacgaaagaagaggagcgccttacatctcaattgtagcaagttaaacatgatcgtgatcattcaggtatgtcaactgaacagccctcgaacatatgcatatcttgtgatacttacaacgcaacagattgcgaaaacttcaaaacaatgtcaaacattccgcaccatacacgcatctggaactttaggaaacgtgcaggacacatagcacagatacagattccgacactttgcaaaactacacttgcagttgcgactgagaagatgaagcttgctgactcgaactgcgatataggctgatgactggatactgaagaacagaacgagaagataaaataccttgaggagcgtgtaacacaggtcatgagtctcaaattgctgaacgctacgagttactgaaaagactgcacaacactatattggaactgataggaaacattacgcgtctttgcagatgtcgaccacttcttcgatttgaaggagattccaatggtc

SEQ ID NO: 145543 - DNA, 660 bp, Zea mays
  unsure (1)..(660): unsure at all n locations
  Clone ID: MRT4577_64248C.1
ccggccgggccgacctgaaacccacggcatcgatggtggtcgagtagaacgcgtgctggaactagttggcgtcgcagccaacaaaaacacagtccctggcgatcgttctgctttggttcctggcggtcttcgcatgggtacacctgccatgaccacgcgcggctttaacgaggacgatttcgtccgcgtcgctgatgttgttgatcgcgctgtcactatcgcttctcgcattgacaaggccgcccggaaggcggcggaggagaagggcgataagagtcctggtaagataaaggtttttctagagcatctcggcgatggtgagacacaatccgaaatcgttcagctgcgaagcgaggtcgaggattgggtaggcacataccctgtaccatggaacacgtcacaataacatccctttggcaaatcggttaggtcaatcatgggcttatgaattgacaccaaccttctctactcgtggccggggaacaacaacacgagccgcagctgtctcgagttggtactctagctcgacaggtgtatagtgcatatcgtgatccacgaccgttctgttcctggttatcggataattacttacgcattcaactttcgtacaatataacttgcgggtcgtgggttcaaaaaaaaaaaaaaaaacccgcggnc

SEQ ID NO: 145544 - DNA, 1714 bp, Zea mays
  Clone ID: MRT4577_64249C.1
cccgggtgcctatatgggcagggacatgcatggtcctccgacgatccatccgcatgctgaacgatcaccatctcaggttgcccgaacttgcccgctcataaagaagaatgcgcacgacgcgttgcatgctcatggtcgcccaagctcttgtcgtcgtcgtctccgcgttgctggccgccaccgccaccaccaccactactgcggcagagtatgtccggcctccaccagggcggatcatcctcacagagcacaccgagcccgccgcccatcctcagcaggtccatgtatcggccgtcggggagaatcacgtgagggtgtcgtgggtcaccgacgacatgcgcgcgcagtccgtggtggactacggcaaggcctcccggaactacaccgcgtccgccaccggcgagcacacgtcataccgctacttcctctactcgtccggcaagatccaccacgtcagcatcggcccgctggagcccagcaccgtgtactactaccggtgcggcaaggcagggaaggagttcagcctcaggaccccgccggccgcgctgcctatcgagctcgccctcgtcggcgacctggggcagaccgagtggacggcgtcgacgctggcgcacgccagcaagacgggccacgacatgctgctggtgcccggcgacctgtcgtacgccgacacgcagcaggccctgtgggactcgttcgggcggttcgtgcagcggcacgcgagccggcggccgtggatggtcacgcagggcaaccacgaggtggaggcgccgcccctgccggtcccggccggctcgccgcccccgttcgccgcatacggcgcgcggtggcggatgccgcacgaggagagcgggtcaccgtccaacctctactactccttcggcgcggcggggggcgccgtgcatgtcgtcatgctgggctcctacgcccccttcaacgccagctcggaccagtaccggtggctggccagggacctcgctgccgtggaccgccgcgccacgccctggctcgtggtgctgctccacgcgccctggtacaacacgaacgcggcgcatcagggcgagggcgaggccatgaggaaggccatggagcggctgctcttccaggcacgcgtcgacgttgtcttcgctggccacgttcatgcctacgaacgcttcgcaagggtgtatgacaacgaggcgaacccgtgcggacccgtgtacatcaccataggcgacggcggcaacagagaaggccttgcattcaactttgacaagaaccacaggctggcgccattgtcgatgacgagggaggcgagcttcgggcacgggcggctgagggtggtcaacaccacctcggcgcactgggcgtggcaccgcaacgacgacgcggactcagtggttcgcgacgagctctggttggagagcctggccaccaaggcctcgtgccggcagcacgccggtcccgccgtcgtcgattcatgggacgatgagttgtagcgggccatctcttgttttgcccaaagtgtgagcaatcttagggattgtcatttgaataagacataattttttatgggaggtttttttttttgtaggtttggctctccttcctagccagtacttttagactatctaggtacgtctccaatgtctacctatttcactagctagattcattttttttactacctagatagaaaatacggggaaaacaagaaatagctagattcactctc

SEQ ID NO: 145545 - DNA, 326 bp, Zea mays
  Clone ID: MRT4577_6424C.1
aacaagaaaagcccccgcccccccccggggttaataaacaacaaaaaaacgaaagggggggtttgcccaaaaacgagggcccaagccattctagggcaaaccaaaaccaaaagccaaaattcttccaaaaaggaaaagctggaagaaaactttttcgggtttcgaacaaacccccacaaggcactggatcccccccccctaacccaactgggaaaggaaaaaaaacccccccccaaagtgggggttttggactaaacgggggcccttggggggagcccaaacgcatttgaccctttcaagaacccgaacccggggaaggggccggg

SEQ ID NO: 145546 - DNA, 422 bp, Zea mays
  Clone ID: MRT4577_64250C.1
gggtggggttttttttttttgaaagacaacggtagaattgacaatccaaccaccgatgggggtaatttttaaacgggtcaaggtccgcgcttgagggggggaaaaaaaaaaaaaatattttgggccccccaactcgggaaataaaacaatccgccccaaatttggggggggtggggccatcccaaaatacacccaatttttaccccggaacggtgtggtttgaaaaggaaacggtaattgccaaaaccactataaactgccttttgccggaaattttcttggggggaggtctctgtttctgtttaaaaaacaaaaccacccggcgcatttttttgcgggaaaccaagaacgcggggggaggggttcctttatgcaacgggcaaactcccaaactaaaaccactgcctttgggaatttggggg

SEQ ID NO: 145547 - DNA, 155 bp, Zea mays
  Clone ID: MRT4577_64251C.1
tacgtaagctcggaattcggctcgagggtttcctgaccctccgtggttcactcggccgacggcgaaattgagccggccgttttcatccatggtggacccaatcaaactgaccaggactggagcagctgcggaaactgcagattgactgctgtaca

SEQ ID NO: 145548 - DNA, 145 bp, Zea mays
  Clone ID: MRT4577_64252C.1
atcatagatagtttcttctactacacgacgacagacatggggaagcctgcgaagatcggacaatggggtgtatacacctgccatcttcggtatctgagggctacttcggaccggctgaccgaggtgaaggtcacggcggtacaac

SEQ ID NO: 145549 - DNA, 110 bp, Zea mays
  Clone ID: MRT4577_64253C.1
gagtcgctgacgttccgggtgatgaccaccgaccagcgcagggcgacctcatgggatattctcgcggctgacaggaagttcggcgtcacgtaccacgcaaccaggacctt

SEQ ID NO: 145550 - DNA, 1232 bp, Zea mays
  Clone ID: MRT4577_64254C.1
cggccggaaaaaaaaaaaaaaaaaaaaaaaaaaaaaaaaaaacatttgggtacctctaggagctgccccaccggcccggccgggagagtccagaccatagcctgcagccttccatccacgaactcccgttctccatttccagccatggcggtgtcgatcgagctcaccaaggagtacggctacgtcgtgctggtgctggtggcctatgtcttcctcaacctttggatgggcttccaggtcggcaaggcccgcagaaactacaaggtgttctaccccaccatgtacgccatcgagtcggagaacaaggacgccaagctcttcaactgcgtgcagagggggcaccagaactctctagagtggatgcccgttttcttcgtcatactgctgctgggcggtctgcagcacccgaccatcgccgccggtctgggcggcatctacatcgtcgcgaggttcttctacttcaagggatacgccaccggcgttccggacaaccgtctcaagattggggggctcaactacttggcgttgcttgggctgatcatttgcacagcatctttcggcatcaacctgctcatcagggagatgctctaaactttgggtttatatgtgagctccaggctgggttaaccgcacaagttactcatggtctgagcatcaaaactttgtgatactagtcgtttggggttttatagtggagttatcgtttctttctttgtctgtgtgttgattagcaaaagaagtgtgcgtctgcgtcttatagctgtgatggaataaggagacagatgggttgaagcgtgaatcgtacagttcttgctgcttgtcactctctgatctggtttcgttgtagatgagatggttgttaatggtttgtgtttgaggcacgatccgccttattttctaccgatctaaagccggggtgtaacaattttgaattattctggttttgggtttatgtttatgcgatgtattggctggtagcagttctgcattgactgcatatcaaccttaatcagctggtaacagttcttggacttctttatattattattatactagagagcaaaaaaaaaaaaaaaaaaaaaaaagttgtgtgcccgtgcgttgcaacgggaacatatgcttatgcaaaaaaaaaaaaaaaaaaaaaaaaaaaaaaaaaaaaaaaaaaaactaaaaaaaataattatatttaataataataataaataaggggcggccgttttagaggttcc

SEQ ID NO: 145551 - DNA, 367 bp, Zea mays
  Clone ID: MRT4577_64255C.1
tcgtcccggccgacacgccgggccggccgtgcgtttccttttgtcttcgcttgcttcctttcgaaaggccttgcgtcacactcggcgatcgatcgagtctttccggatttcagagaggcccaactggcgaagccatcaatcgccgccaccttttcgagcagaattgttgataaaggctgacgaggatatccagcctatcgtatgggacaatggcactggaatggtcaagggcggtttcgctggggatgacacgccaagagctgtcgtgcccagcaatgggggaagaccacgccacaccgaatttatggccggtatccgccaaaaggatgtctacgtcggtgaagaggctcaggccaagaaaggcaag

SEQ ID NO: 145552 - DNA, 563 bp, Zea mays
  Clone ID: MRT4577_64256C.1
gttgtcaactgtgatagttgtatatttgtatggcatagtggtccaacagcagcagcagcgtacatcttccagcaggtacaagactatactatggcagtagaagaaaatggcagatcgttattcaataataacccacagaacttccgttccctatacatatcttcaaaggcagcaattgcttctttttaagagagttacaactaatcaactttcaattgaaaatcttcagaaacgctccatttgtgctgagactggaacaacgaatctctcagccgatccttcagtatatcttgtttctgttcttgttcacatcctggagtagccctcgtattgctccatgaatgagtcgttgaacttcttgaagctcgacatgatggcagggaagtcttcctcagctggaaggatagttgtccgaaggtggaacaccccttccttttgcccaaaaccagagcccggaacagtggaaattcctgttgcctccaggagctttagacagtagaaaacgtctgctgctttgccagctctttttgccgcctcaatggctcttggtggcagccttattt

SEQ ID NO: 145553 - DNA, 407 bp, Zea mays
  unsure (1)..(407): unsure at all n locations
  Clone ID: MRT4577_64257C.1
natcttcacgcgcgtcttcttcttcagccaccgcgccgcttcctgacgcgcgccccctcagtccatggagctccctgctcctctgccccaagctttttcctcgcacgaacagccctccgctcggcttcatctccctcaggtgccgtcggccggatcacccatggcgagtttccccagatcggcatccctgcagagtccatgaccgagctcccccatggcgtcttccccatccatggcggtccctatgctcacgccctgatggccgccctctctttgctcctggtggtcgagctcgcccctgcccaagttcggntgactctgtttccctctctttctgttggtggctggcgtcccatctcccctgtnttggntggccgncgctggcgnncgnccctgctctncctctt

SEQ ID NO: 145554 - DNA, 114 bp, Zea mays
  Clone ID: MRT4577_64258C.1
gagcagcacacgaagtcggacgagtctgagatacactgcaataacctacaactcatctttgattggttctatgacccgaatatggttatacaggtacagatcaaagctgaggat

SEQ ID NO: 145555 - DNA, 282 bp, Zea mays
  Clone ID: MRT4577_64259C.1
gccgctaagcgatggcgaaggtcatgacgggcgccgacgccgccaccgacactgtcaccgacgacgacgacaccgacaccgacaccgtcaccgacgacgacgacaccgacaccgaagacgccgacaacgtcaccgccaccgccgcagagaagccgaagcacgccgagaagccggactacgccccctaaaacggagcttcaaccgaaaatggcggcacgggcgcccgaaaacaacgaggaagaagaacggcggataacaaggtggtgcgaaggcagcgggagg

SEQ ID NO: 145556 - DNA, 453 bp, Zea mays
  Clone ID: MRT4577_6425C.1
attttcttttttttttttttttttattatgtttgttttttttattttttttttaaaaaaagccaataatcttggggataaccacctacggatttttaaaagcgaaaaacttgggttctaaaattatccccgacatcgttaagcttgctccgctgatttaccaaattttaacaaacgagcttgcttttccaaggctttgcaacataaaaaaaccttaaaaattaaacctgactcgggtttaactttggtgccaccgaccaaaaaaaatgtgtgattaatgacccccccacttaaaaaggcgaaagcccttttattctggggttttttgcttgttttccaccttttgttttttttttgccccagctggaaaaacagatcccccaggacataagggagctttcggaacagagaacccggcacccccctatgggactgtagcaaactttccccttcc

SEQ ID NO: 145557 - DNA, 354 bp, Zea mays
  Clone ID: MRT4577_64260C.1
aagtggtacggccgattgaaaaaaaaattaaataaaaaaaaaataaaaaaaaataaaatagaaatgatacaactacacaacattactaaaaccataaatttaatcaactccactataatccaactacctctacaatcattaatctaaatatttcttattcacatttatttatgcctattcacaaaaaatcgtactcttactgactttacatcttttcataatagctctacatttctctaatttttacaattgagaatcttaacctctctgtaacgctcatcataaataacttaatattccaaaatactctttacacctctatattcactctttacgacaatttcaacatacact

SEQ ID NO: 145558 - DNA, 417 bp, Zea mays
  Clone ID: MRT4577_64261C.1
tggctggacccacccatgcgagcctcacgatttttatcttctgcaccatgcatgtcagggggagtgagatttactccaatatagacggtgatcataattgtccaggaccgcaaaaataacaggagtcagttcagtacaatctcgtacaaagctttgcagtgccactgtgctggctgcagcacgagcaaaggtttatcccgtggcatctaaagatggtaacatagccactgggaattgcttctttgaaatcatcaagggactacggcctgcaaacactgcaggttgcagatcatcagccgaagcacctaacaacccacatgatggcacatcttgcactgaattggtgcctgacagcatgaaccaactgggcactaagaatgagaatcacttggtgcaagacctttttttaggagaaaa

SEQ ID NO: 145559 - DNA, 684 bp, Zea mays
  Clone ID: MRT4577_64262C.1
agataccaccatctcacttcttatacccctccctaggaggacccgataacctcacagccgagcttttcttaagcaagatgaacccgagtcgcaggagactggatactgtggcggagtgccagcacctcaacttcagccgcctagacatatgccaccgctgcaacgagacacataaacctgctgatcctgccgccggaggaggaggacgctactacgccaacttcatggggcgtgctggctcctccttcagcgctgtgtttgccactgctgggtctgacatccggactgcggactgggactgctcctgcagcgcgtacaaattcaccagtcgctccacctgattacagtgctccgactacaatgaggaggccgctgtacagcatgggcatctgtgcgcctttgacggcgacatgtcacgctcacagggctactgcttccgcagcgatgctgctgcggctgtggctgaagctgcccgtactaacaaccgacccgcatgaaagtccggagactggatctgcaccatatccgaatgcaacgagcactacttcaccagcaggatgtagagcttccagtgcaacgcaccgcgagactctggcactgatgtgtaagatcgagcagtttaaaaagactgcaccgtcgaagacagctactacaagaggagtcctcatcacgtcgtaacgtaag

SEQ ID NO: 145560 - DNA, 361 bp, Zea mays
  Clone ID: MRT4577_64263C.1
ctccttttgctcggaacgcacacaacggccgttcccgatctccgagtccctcgtcgattcaaagattcaagatctcggtacagaccctcattggaagaactatcaccttccaggtggagtcctctgacacaattgacaacgtcaaggccaagatccaggacaaagagggcatcccccggaccagcagcggctcatctttgctggcaagcagctcgaggacgggcgcacacttgccgactacaacatccagaaggagagcatctccaccttgttctccgcctcagtggaggcatgcagatcttcgtcaagacctcactggcaagactatcacctcgagtggagtctctgacacatcgacacg

SEQ ID NO: 145561 - DNA, 214 bp, Zea mays
  Clone ID: MRT4577_64264C.1
actaactgttgcatcttctgactccccttctcgcatagagccgaggttatctagcttcagagcacggacaccaccaaataaatccatatctcgcagaacatgcttgcactagacatcagtcaactcttactaccagagaatcaaatcataaccctgtctaagctccaaagctaccacaaactcaacatctcactatccttgagactatccatct

SEQ ID NO: 145562 - DNA, 169 bp, Zea mays
  Clone ID: MRT4577_64265C.1
acatggtctgctcctattttaactcttcatgggacactcaatgtgaagaccagacactacacgtacggaccggggctaggccatctatctcacgctgcagagctggctcgagccgaattccgagcaaacggacgcgtgcaagcgacgacatagctctcctatagtggcc

SEQ ID NO: 145563 - DNA, 1260 bp, Zea mays
  Clone ID: MRT4577_64266C.1
cattgggtacctcgaggccggccgggacgggatgggacggaagcgcactctctgactcagctacgatctgaaagaaacccgccaccagctctcgtccttccttctctccaatccaaccgcaatcctttcagcttcagcttcttctgctccttctctggtgaggaggcgtggtgagagactgcgactgcgcgatggaggcgtcgtcgtcggcgttggcgctcgtggccgccgtgctcctcctctcctccccgctcgctgcgtcagatttctgcgtgtgccgttcggaccagccgacggcggtgctgcagaaggcgatcgacttcgcgtgcggcccgcagggcggcgccgactgcacgcccatcctgcagggcggcgggtgctacagcccggacaccgccgccgcgcactgctcctgggccgccaacacctactaccagaacaacaaggccaggggcgccacctgcgacttcggcggcgcagccaccgtctccaccaccgacccgagtacaaacgattcctccaccaccgacacgagtttctccgggtgcactttcgcttccagtgccaccagcgccggtgctgggactggaaccgggacggcgggcagcagcaccttcagccccagcgcgggcaccggcttcaacggcaccgggaatgggatgggcggcagcactactaccggcctgggacccacgggcaacgcctttgacgccgccgccgccgccgcgccgggcctgctccccagcgccgcctccctcgccccactcgccgtcctctccttcctaacctagccctgccgcgccattaacggcagctcccctcgtcttatgtctggtcgtgttcagtaccataccatacctctctgaacatgagccagctgctgctgctacttggcttgctccatggcggaaggggacgggccggggagctgtacgtactgcgacgaagaagagtgcggtggaactggttggttggttggttttggttccagcttcattttcacctcacaccccacactgctagtggcgacggtggttggggttgcggggtgcggtgcgtgccttttttgatgaatcctagctacacgacgggatggcgtgtggtttattcgctggtaggatggctgtctcttttcctccgaggaccattcatgtcttccttgtttgtacgtacctctcttcctttcttgttttatgtaccaagacttgtcgctagccctttgtttgtttgtttctaatcaaactctttgttctgctgccc

SEQ ID NO: 145564 - DNA, 170 bp, Zea mays
  Clone ID: MRT4577_64267C.1
gggggggacccccaggcaaacgggccctccgccagaaggcttggggcgcaacttgggttaaaaaactcgagggttcgggggattttgcaattaacaccaggtatcgcatttggctacgtttttcatcgatgcgggggccgagatatccgttgccgagcccacccgtccgg

SEQ ID NO: 145565 - DNA, 1275 bp, Zea mays
  Clone ID: MRT4577_64268C.1
ccccccccccccgggctttatgggcccctaaaaggggggtcccctttcccctttagggtggggaaagtttggaaaggcgatcggttcgggcctttttggtttttccccacctggggaaaaggggattttcttcaaagggatttaattggggtaccccaaggttttccccgtccccacgtttttaaaccccggcccacttaattttattttagggggccccataaaaaaaagttattaccgttcgcaagcacgcgggaagttaaaactttgatcccttttaaaacggcccccccccttttttttttttttttttttttttttttttttttttttttttttttttttttttttttttttttttttttttttttttttttttttttttttttttttttttttttttatatggtatccatcgctttgaaaccatcaaatttgatctccttccatatttcacaagctgcggctagttcagcactccatttgcaagctgctttgataatttcattaccttcacgagcaagatcgcgcccttcgttacgagcttgtacacaggcttctaaagccacacgattagctgctgcaccaggtgcatttccccaagggatgtcctaaagttcctccaccaaattgtaatacggaatcatctccaaagatttcggtcagagctggcatatgccaaacatgaatacccccagaagccaccggtataacacctggcatggatacccagtcctgagtgaaaaagataccgcgagaacgatctttttcaataaaatcatcgcgcaataaatcaacaaaacctaaagttatttcgcgttccccttctaacttacctactactggaccggagtggatatgatctccccccgacatacgcaatgctttagctaatacacggaaatgcataccatgatttttctgtctatcaataactgcatgcattgctcggtgaatgtgaagaagtaggccgttgtcgcggcaataatgagacaaagtagtatttgcggtgaatcctcctgttaagtagtcatgcattacaataggaacccctaattcccttgcaaatacagctctcttaatcatttcttcgcatgtacctgcagtcgcattcaagtaatgccccttgatttcaccagtttcggcttggtgctttataaattgcttcggcacaaaagacaaaacggtctctccagcgcataaatggttgtgagtttacgttttcatcatctttggtaaaatcaagtccaccgcgtagacactcataacacgctc

SEQ ID NO: 145566 - DNA, 176 bp, Zea mays
  Clone ID: MRT4577_64269C.1
cccgtccggcctttgcgtcacccggcggtttataccctagtgcccatgcgatcttcttttccgctccgccgccgtcgatggagttctggggtctcgaggtcaaacctggatccactgtctagtgtgagcctggacatggctttttcctgcacgttttccattctgtccttgttgaa

SEQ ID NO: 145567 - DNA, 309 bp, Zea mays
  Clone ID: MRT4577_6426C.1
ggaagcatctgtagtctgagcctgaggattcagacgagatcgaggccatgacttaattgggggcggacatgctgggcttacagcggccatgatgcagaccaatcggctttatgttgagttgtaatggaacgctgaataccgcagtatcccgaataacatatatatgggggcttctctttcgtttctgctctggtgtggtagcaataatcccgaaattgcgatttcagtttaatataacaagccatcttgatggggctgtccttacaaaaaaggacgcatttaaacgccattcgtgaagggtgcacacac

SEQ ID NO: 145568 - DNA, 830 bp, Zea mays
  Clone ID: MRT4577_64270C.1
cattgtacccctcgaggccggccggggcgccgcagccgcacgccttcattctccattgctcctcgtgcagcctgcacagggacagggtgaagaaaggaggaggaaacaagcttgccgagatggcgacgtgcgctacgaccctcgcacctcttctgggcccggcggcaaacgcgacggagtacctttgcaaccaattcgcggacaccacgtcggcggtggactcgacgtacctgctcttctcggcctacctcgtcttcgccatgcagctcgggttcgccatgctctgcgcgggctccgtccgcgccaagaacaccatgaacatcatgctcaccaacgtgctcgacgccgccgccggcgcgctcttctactacctattcggattcgccttcgcgtacgggaccccgtccaacggcttcatcggcaagcatttcttcggcctcaagcggcttccccaggtcgggttcgactacgacttcttcctcttccagtgggctttcgccatcgccgccgccgggatcacgtccggctccatcgccgagcgcacgcagttcgtggcgtacctcatctactccgccttcctcaccggcttcgtgtacccggtggtgtcccactgggtctggtccgccgacggctgggcctcgccgacacggacgtcggggaagctcctcttcggctccggcatcatcgacttcgccgggtccagcgtcgtccacatggttggccggcatcgccgggcctctggggcgccctcatcgagggcccccgcattggccggttcgacacgccgggccgctccgggggcgctgcgcggccacagcgcgtcgctcgtc

SEQ ID NO: 145569 - DNA, 413 bp, Zea mays
  Clone ID: MRT4577_64271C.1
agaacgacggcttcgacagcgtgctacagtcgccagcattcccttcccgcggcttctactcgcccttcttcgtctgtacacacttttgcagtccgcaccatctcatatactaagcctgacaagctctcatgaaatctgacgtctactatcaggaacagcccgtcatcaccatagctgccgtcgatcatgcatccgatgaagcgctcaactatcatcaggctaccgagagggatttcgttactagcgcattggctctactaatgaacaatgagactgacatattgaagaattttatctcgaaaactcttcaccttcagagctctgataaaatgagagaccgattcatgcttgaatcatgagcgatgccagcacgtttatggaggaccgcttaaaaacataaacacttgaacctt

SEQ ID NO: 145570 - DNA, 1351 bp, Zea mays
  Clone ID: MRT4577_64272C.1
caagagcttgtacgccatgcacgcgggggtaagctcggaattcggctcgagccggccggggttggtggaaccgaagattgaaaagggaaaaaagaagggaaaagagggggggagacaccggctcgtcggccccgcccgcaaacgaaatccagcagaccgacgcgaaccgagaaaaatcccacgaaatctcgtggccgcggcgaccggaagaagaggacgacgacggacggagcggcgatggcgtgccgcgcacttgccctccgctccctgctcctccccgacccgctacaccgcctcccggccgcggcgccacctgtttggagagcgtcccgcggtggccgccgtccgcacctccgctgctgctccggcggcgggggcggggagcccgggcagccgccgcaagaagctgtgctcgaggccatatccaagatagcaaggtctaaaggaagggttgcactcacaacaaatatggtcatgggtggtactgtgactgacgatgcaagtgatgaatggcttgttctggatcagaaggtaaattcctaccccacagatagaggatttacagcaattggcactggaggtgatgattttgtccagtcaatggtagttgctgttgaatctgttcttcaagaatcaattcccaagggccgggtatctcagaaattatcttcaagagggaaatatgtttctgtaaacattgggccaattcgtgttgtttctagtgagcaggtccaagctgtgtatcgtgccatgagaagagataacaggatgaaatacttcttatgaagtgcaatttcatgtcctggatgttccctagtccattccatgttgtatcctacgatgcattttcgccatatttgctggacctccggtgaattccaatgacttttatgtgccattcaagcccaaattgaagcttctctactacaaaacaatatgttgggtccagctacgttatttagtgcagggggcgtatatagctactatgtattccctttcttctataatgaataagattcaaaggttcacagtttgtcctaaaataaataatattttacacaaatatgaaagattgtctcctaatatggaagttaatcataggtgcttgcaagcaataactgtcaaatccaagagatatcctctacaaaaggaaaggagataaggatacagcttcttttgccaacgttcctaatatatctgaaaatttctaggaacttgtttattatgggacggatggagtatgttaaagatgtatgttagtgtttcatattacatgtgtttttactattttataaacagtatgaatagtagtataagtgctcctaaattatcgatgtgtcttcgtaattcc

SEQ ID NO: 145571 - DNA, 365 bp, Zea mays
  Clone ID: MRT4577_64273C.1
ctctaatcaaacagaaacaatttcagttggagaacctcaagaagaactcaatctttgtgcttgttaaactgtttttcaataacaacaacaatacatttacatcaataacatttatatcaatattaacatcaacatcaacaattattaactaacaaatgtttttttgttaatttttttttaaaaaaacattctacaaaatcattttctttctttcaattttcatcaattatcaaaaatacatttataatttttaatttgtaattttttcaaataaatcatcaaaaataaattaaaaattcaataaaaaaattaaaattaattgtgtgtaaattgattaattacgtaatttttcataaatcattttt

SEQ ID NO: 145572 - DNA, 555 bp, Zea mays
  Clone ID: MRT4577_64274C.1
ttttagaacacacgtgaaattggtattctgcttgatgagacgtaactcctgtttctcaacttagaaattggacaaaactttgaaaagcttagctccttagagcagcaaactatttatttctttttagttttattttattttgttgcacaacggtgcttcatattttacacataaatatttaagtaccatatcttacaagggacctatcgctccaaaattcttgaacaaccaaaagtgactgaactcgagcgagctttgatatggaaaggcatgtaacaaacaacctgcgtatgcactcaacttagagcacaccttggtacataggacaacttgatcaagtggttgtggaattgtccattatgtgataactgtaggcttctccctccctgtgaagtctttgagctttgacatggatattgccaaatctattaatggttttaaggcaatttgagcatcaacatcatgtttagagacatctggttcaaactgttcaatgtacactctaacagttgcccctgcagaacccagtacctgataacgatatataatccttga

SEQ ID NO: 145573 - DNA, 1063 bp, Zea mays
  Clone ID: MRT4577_64275C.1
cctcgagcccggccgggaaagaaaaaattaacggctcgtcggacctccacgaaaaccaagtccagcagacggacgcgaactgagaaaaatctcacgtgacgacgacggacgcggcggcgatggcgtgccgcgcacttgccctccgcttcctgctcctcccggacccgctacaccgcctcccggccacgccgccatctgttgggagggcatccggctcccgcggtggtcgccgtccgcacctccgctgcagctccggcggcgggggtggggagcccgggcagccgccgcaagaagctgtgctcgaggccatatccaagatagcaaggtctaaaggaagggttgcactcacaacaaatgtggtcatgggtggtactgtgatggacgatgcaagtgatgaatggcttgctctggatcagaaggtaaattcctaccccacagatagaggttttacagcaattggcattggaggtgatgattttgtccagtcgatggtagttgctgttgaatctgttcttcaagaatccattcccaagggccgagtatctcagaaactatcttcaggaggaaaatatgtttctgtaaaaattgggccaattcgtgttgtttcaagtgagcaggtccaagctgtatatcgtgccatgagaagagataacagaatgaaatacttcttatgaagtgcaattgcatgtcctgcacgttccctggtccattccatcatgtaaacaaaaggagtccaacagtacattttcgccacattttgctggactggactggactggacccccgatgaattgcaaaaggaaaatgggaagacttttatgtgccattcatgccctgatggaagcttctcaaataacctgctacaggcaatttggtgggatcggttatgttatgtagtgcttgtgtagtacagtgggcgtatatagctactatatatgctaaagttgtattttagtgtctcatattagatgcattttaatattttataaaccatatgaaactagcggtataagtgttcctaatttatcatgtttgtttgcttgcaaagcggcccaaaaaaaca

SEQ ID NO: 145574 - DNA, 669 bp, Zea mays
  unsure (1)..(669): unsure at all n locations
  Clone ID: MRT4577_64276C.1
ggaaaaagggggccccctccttttttttcaagttttataaaacattcagggcccggttgatttcccgataaaaacataacaaaaaaaaccctccccaggccatttttccaacccccccccaaaaattttttttttgggggccaaaaaaaaagaaaatggcgcccgactaaaaagggctcaccccgaaaggcaagggtgggggtgggcccccaacttcccaacctaaattataatttccagggcccaaggggatagctcctggtccggccccagcaggtggagggacccggggccaggggcgatttcgggggggaaccccccttccggcggggccaaaaggcccctcgcgggttcccgggggcggaaggggccgaaccgcccgcccccggaaaccctgaaagcctgggccttgcccccggcttcgttgatcacggggaactcctaaagggggccccgggggttgaaattgtccagggccccggggggggggaacgaaacccccgggcggagggggggggggggggcccctggggacccctttttggggggggggcttttgcgggcgggtcgggcaaccgccccgggggggcgcgctttctgggggggggggggggggggttccccggggggggtgggggtggcccnggggggggggggtggggggggggg

SEQ ID NO: 145575 - DNA, 426 bp, Zea mays
  Clone ID: MRT4577_64277C.1
aacgattctcatcaaagaacaaacgcatcgttcaagatgagagccaaatggaggaagaagcgcgttcgtcgccttaagcgcaagagaagaaagatgagagctcgctccaaataaacgactcgctcttctacctgacttgacacatctttcacatacaacatgagttcacgatgaaacgacaccagttcagctgctgcaccaaccttggatatgcgacgatcgaattggatttcgcatgccggtgcgcctcgccaatttagctctggaagtctatggacgaacgcgaaggatgaggctttggacaatttcagtcgggtgaaagcaccgtttgatggatcgcaggccatgaagcaaaaactgctaccataagcgcgcttaagattgatcttcgctacttgacaaacacaaaaatgcagattttacttc

SEQ ID NO: 145576 - DNA, 507 bp, Zea mays
  Clone ID: MRT4577_64278C.1
gcacgagataagatgttcttttgaaacacttgtagtggcactggcacatgattaagaattcatgtccctggattctcaattttcctgttcgctatttatgagcaaactgcaaggtcacaagctctaatcctggctagggcaatataataaaatatttgctccttgctcctaatccacatctgaggcatgggagagcctccacatgagggggttgacgtattaagtgaatttccaccttttcccgccatcttaagcttttgcgttgaactgatcagcgcatgcaactgaataactgtctggggtgtatactcaccctctagtgtttagctcctggtgtattgttgatgttgcttatgtgcttagcatgttaaatggttgtgtggctatatttatgacttgcaagttagattgtcttgatctagaaacatggttgtaacctgtaaagcaccagttgatgagaactagggttatttttgctccaaaaaaaaaaaaaaaaaaaaaaaaaaa

SEQ ID NO: 145577 - DNA, 2719 bp, Zea mays
  Clone ID: MRT4577_64279C.1
gaagacccatgaagctattctgaaagttttagatcttcagtagtacgtacttttgcatgatcacatcaattgttcatgttgtagtttgatcattcaaggagcactgctcatgagttcacttttattactgctacgtatgcagtgatggaaaagtacctcgggaacctttagggatgtggactaaaagagccaccaagttgccggccggcccgggaagcctaaactcttgccctccccccggcaccacactagcctagtgagaagtgcagcagcagcaccagcggcagaagtgttacttagttgctcctcctacctgtgctgctgcgcaggagcagagcctgaaaggacgacggccgtcggcgtaaggggagcgagcgagcgagcggccatgaagtacgtgctggtgaccggaggggtggtgagcgggctcggcaagggcgtgacggccagcagcatcggcgtcgtgctcaaggcctgcggcctccgcgtcaccaccatcaagatcgatccatacctcaacaccgatgctggaaccatgtcgccgttcgagcacggggaggttttcgttttggacgatggcggagaggtggacttggaccttggaaactacgaacgttttctggacatcaaattgacccgcgacaacaatataaccacgggaaagatcttccaggctgtcattaacaaggagaggagaggcgactacctagggaagaccgtccaggtagtgccgcacatcacggatgagatacaggactggatcgaacgcgtcgcggtggtcccagtggacggcaaggaagggcctcctgacgtctgcgtcatcgagctcgggggcactataggggatatcgagtcaatgcctttcattgaagcgttaggtcaattctcgtaccgtgttggacctggaaacttctgtctcgttcatgtcagtcttgttccggttctaaatgtagtcggtgaacagaaaactaagcctacacagcacagtgttcgagggcttagagggcttgggttagcgccggatgttttagcatgtcgcagtactgagccactggaggaacatgtgaagatcaagctttcacaattttgtcatgttccgatctcaaatatagtgaacctccatgacgtgacaaacatttggcacatccccttgctgctaagggaccagaaggcccatgaagcgattctgaaggttttagatcttcagtatgatggaaaggtgcctcgggaacctgagctagggatgtggactaaaagagccaccaagtttgacaagttgaagactccggtcaagattgccatggttggaaaatacactggcctgtcggattcctacctgtctgtcataaaggctcttttgcatgcatcggttgctatggaaagaaaacttgtagtcgagtgggttccttcctgcgacctggaagattcttcagctaaagagacccctgaagcccataaaaaagcatggaaattgctgaagggcgcagatggcgtactcgtccctggagggtttggggacaggggagtccagggcaaaatcctcgccgcgaaatacgcacgcgagaacaacgttccttatcttggcatctgcctgggaatgcaaatcgcggtgatcgagtttgcccgctcggtgatgaagctacgaggtgccaatagcacggagttcgatccagctacgacgtcaccctgtgtcatcttcatgccagagggctcaaaaacccaaatgggagccacgatgaggcttgggtcgaggaggacctatttccatgtcagtggctgcaaatctgcgaagctgtacggcaacgccagctctgtagatgaaagacatcgccacagatacgaggtgaaccctgacatggtcccagactttgagaaggccgggcttcagttcgtgggcaaagatgagagtgggaaacgcatggggatcgttgagcttccctctcacaagttcttcatcggtgcacagttccatcctgaattcaagtcgagaccagggaagccatctccgcttttcttagggctgatagccgcggcgtctgggcagctagaaccattgcttcagcgcagcaacccgacaacgaaagcatgttcgatcagtaaagtcccgaaactgaaactgtaccccactgggcctgtgaataatccactgaacagcttggtgaacgggtactacccaaatggcactgggatccacacctagaagcgtagcgcttagcgatggtttggttggtatttgctgctatggtttttttgcttgtacccctcctttttcatgtgttcctttttttcagtttgttatttgtctctgatcaactgagagaagagaaggctaagattcagcaagcccccagctccagcgacacatggttccgacatttttaacgaggaacgccttccagtccgttgaagcgagctagccatagggtggtgaggtctagtgtgatgttgttgttgtttttttctctttccttttttttttggcctggaactaaggcgcgaagtgttttgagtagcgctagtagagcctggaagaagttatctaaactatttgtacattatggaagaacttatctaaggactgaatacacaaatgcttggccatgattgctttaataccacacccctagaaaaaggacgatagtttccatgcatcatcagtaactaaaaaaacaaaaaaaaaaaaaaaaaaaaaaagcactctcgcgttgttaccactgct

SEQ ID NO: 145578 - DNA, 1736 bp, Zea mays
  Clone ID: MRT4577_6427C.1
cccacgcgtccgacgtcactaccgtcccagaccagccgcgtacgcctgcccctgccctcggtcgcgatggaccagggccacctcaaggacagcctcctcgtcccgtcctcccgcgccgccgcgacgaatggcccccaccaccgccgcgccacgctcgcgccgggaactggcgccggaggcccatgtggcggagccggcggcgtgtccatcgacgtcaacggcctgaagcggcgtggcggcgggaggcgctcgtgggtgcgcgtggacgcggcgacgggcgccgcggaggccgtcgaggtcgccaagccggcgttgatgcggcggctggacctgcccgcgcgggacctccgcctcctcgaccccctcttcgtctacccgtccgccatcctaggccgcgagcgcgccgtcgtctgcaacctcgagcacctgcggtgcatcatcaccgccgatgaggcgctcgttctgcgcgaacccgaccccgctgggggcgccgcagcggaggaggccgtgaggaggtacgtcgacgagctgcagcgacgcctcgtcgaccgcgccgacgacctgcctttcgagttcatcgcgctggaggtcgcgctggaggccgcttgctctttcctagactcgcaggctattgaattagaggctgaagcttacccattactagatgagctgacagcaaaaattagtaccctcaacttggaacgagtccgacgcctaaagagcaagctggttgcattgacaaggagagtacagaaggtcagagatgagatagagcaactgatggatgacgatggtgatatggctgaaatgtatctcactgagaagaagataagaatggaagcatcaatgttagatgacgaggaccttcagggaattggcaatagtcataatgggtttggttcatctctatcggctccagtttcaccagtttcgacaacccctgcaactcggaggcttgagaaggaattcagttttgccagaagcaggcacagcagcttcaagagctcagatagcagccagtacaatatagaagaactggaaatgttgttggaggcctactttgttgttatcgattacaccctcagcaagttgacttcgctaaaggagtatattgatgacacagaagatttcatcaacatacaactggataacgtccggaaccagctgatccaattcgagctgctcctgaccaccgccacgttcgtggtggccatcttcggggtggtctcgggggttttcggcatgaacttcgaggtccctctgttctcggttccgcacgcgttcgagtggaccctcgccataactggggtctgcggcgccgtcgtgttctgctgcttcatctggtacttcaagaagaggaggtttttccccttgtaggtgaaagcttgactcttctctcgccctgtcaccagagtccagacagcagcgtacgtatgagactgggtacggcaattgtacatgcattgttctcgaaatgcgctgtctgttcacgtgagcttttctccctttttaagctcacgccgctgatcgtgtgtagcttcaccggtctgctgtacactttgtattattgttgttgctggtgggtagtgggtactgcatgtgacactgttcggccccggaagagggaaaggagcccaacagatcagatcagtgctgttctcctctcccttgcggtgcgtgttgttggcttgttttctatttgctgtggtgaccagtggtacccaggagttttgcct

SEQ ID NO: 145579 - DNA, 1256 bp, Zea mays
  Clone ID: MRT4577_64280C.1
cccacgcgtccggtttgtttcgtgtggaaccctgaagcccataaaaaagcatggaaattgctgaagggcgcagatggcgtactcgtccctggagggtttggggacaggggagtccagggcaaaatcctcgccgcgaaatacgcacgcgagaacaacgttccttatcttggcatctgcctgggaatgcaaatcgcggtgatcgagtttgcccgctcggtgatgaagctacgaggcgccaatagcacggagttcgatccagctacgacgtcaccctgtgtcatcttcatgccagagggctcaaaaacccaaatgggagccacgatgaggcttgggtcgaggaggacctatttccatgtcagtggctgcaaatctgcgaagctgtacggcaacgccagctctgtagatgaaagacatcgccacagatacgaggttccgtgatctaatcgatctattagccatatcgaataataataataatgcatgccactgttaatcttttttgctcagtgaagaagatatctctttgttcttcttttctttcaggtgaaccctgacatggtcccagactttgagaaggccgggcttcagttcgtgggcaaagatgagagtgggaaacgcatggggatcattgagcttccctctcacaagttcttcatcggtgcacaattccatcctgaattcaagtcgagaccaggaaaaccatctccgcttttcttagggctgatagccgcggcatctggacagctagagcctttgcttcaacgcagcaatccgacaacaaaagcatgtcctatgagtaaagtcccgaaactgaaactgtacccaactggacctgtgaataatccactgaacagcttggtaaatgggtactacccaaatggcactggcatccacacctagaagcataatgcttagcgatggtctatttgatgtttgttcctatggttttgcttgtacccctttttatgtttgtttttcagtttgtatttgtctctgatcaactgggaaggctaagattcagcaagccccagctccagcaacacatggttccgacattttaacgaggaacgtcctccggtccgttggagcaaactagctatagagtggtgaggtctagtgtgatttttttgagccctggaattaagcgcgggaagtgttttggtagcgttagtagagcctggaatctcaactatttgtacattatggaagaacttatctaaggactgaatacacaaatgcttggccatgattgcggc

SEQ ID NO: 145580 - DNA, 338 bp, Zea mays
  Clone ID: MRT4577_64281C.1
gcacgagcacctcttccacttcgacaagatcctagccaagatcagctggtgagcaacctggcaccatatatatttctttgctcttggcgactggaaattgctgatttgacactgggtttgaaacaaccagcacggagtatactggttgctcttgtaaacagttgtgtgtttttccatcttctggtgtttagaaaattgtgtaatctaggaacatttttaccaagtatccactagtagccactgtaggtgaactggaatttcctaaaccagcaggagttgagactgaagggttctaacccaaggtggtgtggttggatcagggcttttgtgaaaatgtg

SEQ ID NO: 145581 - DNA, 819 bp, Zea mays
  Clone ID: MRT4577_64282C.1
atcctcaaactcttgccctccccccggcaccacactagcctagtgagaagtgcagcagcagcactagcggcagaagtgttacttagttgctcctcctacctgtgctgctgcgcaggagcagagcctgaaaggacgacggccgtcggcgtaaggggagcgagcgagcgagcggccatgaagtacgtgctggtgaccggaggggtggtgagcgggctcggcaagggcgtgacggccagcagcatcggcgtcgtgctcaaggcctgcggcctccgcgtcaccaccatcaagatcgatccatacctcaacaccgatgctggaaccatgtcgccgttcgagcacggggaggttttcgttttggacgatggcggagaggtggacttggaccttggaaactacgaacgttttctggacatcaaattgacccgcgacaacaatataaccacgggaaagatcttccaggctgtcattaacaaggaggggagaggcgactacctagggaagaccgtccaggtagtgccgcacatcacggatgagatacaggactggatcgaacgcgtcgcggtggtcccagtggacggcaaggaagggcctcctgacgtctgcgtcatcgagctcgggggcactataggggacaaaatcttttcgccgcataacgacagtggcattcttgatgcaggggatatcgagtcaatgcctttcattgaagcgttaggtcaattctcgtaccgtgttggacctggaaacttctgtctcgttcatgtcagtcttggtccggttctaatgtagtcggtgaacagaaaactaagcctacacagcaca

SEQ ID NO: 145582 - DNA, 362 bp, Zea mays
  Clone ID: MRT4577_64283C.1
actgaacccccgctgaggcgcgcaaacattgggggtttactagggacgagacgcgccgcgctcgccttgatccgtatggtgatggaaaatgcacactaagagcatgacacgtgcaccggaaacgagggtaagacacatatctggattgggagatgatacatggggcaagaacaacgggactctatggtggcgataccaagtgatacaggaatgatgggaggggtgctcggctcagaagaaggaacggaaggattgcctagttgggctctatggaacatgttaacagagacatgtggaccataggaagtctgactgacaaggtgaaatgatgctgaagacagaaagcgagagcgcaatggaag

SEQ ID NO: 145583 - DNA, 673 bp, Zea mays
  Clone ID: MRT4577_64284C.1
cggacgcgtggggttgagcttccctctcacaagttcttcatcggtgcacagttccatcctgaattcaagtcgagaccagggaagccatctccgcttttcttagggctgatagccgcggcgtctgggcagctagaaccattgcttcagcgcagcaatccgacaacgaaagcatgttcgatcagtaaagtcccgaaactgaaactgtaccccactgggcctgtgaataatccactgaagaagtggtaacaacgcagagtacgcgggggcactgggatccacacctagaagcgtagcgcttagcgatggtttggttggtatttgctgctatggtttttttgcttgtacccctcctttttcatgtgttcctttttttcagtttgttatttgtctctgatcaactgagagaagagaaggctaagattcagcaagcccccagctccagcgacacatggttccgacatttttaacgaggaacgccttccagtccgttgaagcgaactagccatagggtggtgaggtctagtgtgatgtttgttgctttttttttctctttcctttttttttggcctggaactaaggcgcgaagtgttttgagtagcgctagtagagcctggaagaagttatctaaactatttgtacattatggaagaacttatctaaggactgaatacac

SEQ ID NO: 145584 - DNA, 297 bp, Zea mays
  unsure (1)..(297): unsure at all n locations
  Clone ID: MRT4577_64285C.1
naggcgcatgggctgaactcaatgaaaattttggcgctgacggagtagacagccaagagtgcaagactgatggtgctcaatgtggacagcaaaacctcaatttattgcttgctgcgacacaaccatataagatctgatctgacgttggtatgagcacttctgtttgcacccatggcgtcagctgcttgcattcataacgctgcgtacgatgaagctgtgacattaactggtgctgtcacgagagacccaatgggcactgcttgccatatggacgttggatgcatgctcacccctctc

SEQ ID NO: 145585 - DNA, 410 bp, Zea mays
  unsure (1)..(410): unsure at all n locations
  Clone ID: MRT4577_64286C.1
cccggagcggcggcggacaaagcgcgcgagggagagaagcgcaccgcgaggccgacggacgggcgacgcaggccgggccccgcccgcgcgggacaaccaccggggcagcccgagttgccccgggctcaagcaaggcgagccaaggccgcgcgcgggccgggagcgccngcgccaccaggcgccacggggaggggggcgagaagaccacggacgccccgcgcagcagagcggcgaagcggcgcggcccaaaagacgccaaggcgcaggcaggagcgnccgggaccaggagagcggcggcgaggacgagggcaggacgaacaccggcggcgacccggggaacccggacagaacaccgagagccggcaccagacgccgacggcgggcggcgngaggggcgcgcggcacccgca

SEQ ID NO: 145586 - DNA, 301 bp, Zea mays
  Clone ID: MRT4577_64287C.1
gcggcccggaataatagcccgggcgcgacgcttatactaggcgggggccgccctgaatttgtggatttatcaagagaccgaaccgaggctcgtgcaaactgaaaaggcccccaacgtcccaatgtctcagtggaaaaaacccaaagcatgcaaactgtagcggcgtagaagctaaccataactcccgggatgaccgaaacaaagagccctacaccatgcattctgtggcctttacagttctacagcttgtatgcagttaggtcatctgctttaaaaaattgcttgaggatctttggaagcg

SEQ ID NO: 145587 - DNA, 720 bp, Zea mays
  Clone ID: MRT4577_64288C.1
acagttgcagtcgccacccaccaccactagagccatcagcacatcaaagaggcaatggacaaaaaagaatccgcacttgcttggctttccagctagtaactcagcttgtcgtccggttactggctcccaggtgatacagatcggcctttcacggcgtcggtggatcggctagcagcaatggcgcgcgcgttcggcgtcggcgctgcgatgctcgtcgtcgtgtcggccttcttcgcgccggcggtgacggcgcagaccggcagctgcaacgacccgctgccgaccgagctcgtcggcaactactccgggatggcctgcagccccgtctggaacaacttcgtgctccggtacgcgcagggcggggacaacgtgctgcgggtggtgctctccgcgatgtacagctccgggtgggtggggatggcgttctccaaggacggcctcatggtgggctcgagcgccatggtcgggtgggtcggcaagaaggggcaagcccacgtcaagcagtttgccctcaacggcaaggcgccctccatggtcgtcgccgacaggggcttcctcgtctccaacggccacgaccacaccgtccttgtcaagcaggccaagatctacctcgccttccagctcaacttcgactcgcagctcaagaagcagcaggtgctcttcgccttcggctctgccatccctgtcaaagaccgcctagccgagcaccaggcaagacgt

SEQ ID NO: 145588 - DNA, 244 bp, Zea mays
  Clone ID: MRT4577_64289C.1
attcggctcgagctatgcggcccctttagtatgcacgacgcacaactggcgcaacgaagcatcagatggagagcaaatgaccccaggatgggagaatgcggatactggcaccccaagagaggcaagccacgtgtagactggtttcacatcgcaaatacaaatttcgacgaaagctgctacgccagtgcatgaataagtggttggcttacacgggaacatctgaagatggctggggatcaacagg

SEQ ID NO: 145589 - DNA, 1682 bp, Zea mays
  Clone ID: MRT4577_6428C.1
aattcggcacgaggcgcccgcgctgctgtcctgctgctgctattttgccattgcatccatttccgggggacggagtggaggaggagggcgtcgcctgcgttgcttcgcgtgggaagcgtagcgtgcttcgtttaggcctctcgccaatatccgagggttaatctagagaggcctttggctttgccagacgcgcctgtacgcgcctttctgggaggcagccgcttgctctcgcctccaatggccgagatctgctgcgaagaagccaagtccacgccggcgaccgccgtggctgcggcttcagtctccgccacggccgctgcggccgccgccgtggcagtggcctcctcggcgttagagaggaggcgacgcaggttggagatgaggaggttccgcgtcgcgggcgatcccgaggcgccggtcgcggaggacgtccgcgccgccaagcggcagaggctggcgcgcacgctgtccagcacctgccccgacgcgggctcaggctcgggctcggactccgacaggcctgccctaccggagcggttgcccaggtacggggtcacctccgtctgcggccgacgccgcgagatggaggacacggtctccgttaggccggactttgtgcccggcaccagcaaacaccacttcttcggcgtcttcgacggccacggctgctcccacgtagcaacgatgtgccaggacatgatgcacgaggtggtcgcggacgagcacaggaaggcagatggttctggcgaggagacggcgtggaagggcgtgatggagaggagcttcgcgcgattggatgagcaggccgccagctgggcgaccagccgcagccgcgacgagcctgcctgcaggtgcgagcagcagatgcccttgcgctgcgatcacgtggggtccaccgccgtggtcgccgtcgttagccccagccacgtagtcgtcgccaacgccggcgactcgcgcgccgtcctctcccgcggcggcgtccccgttccgctctccgtcgaccacaagcctgaccgacctgacgagctggctcgcatcgaggcggcgggtggccgcgtcatttactgggatggtgcccgtgttctcggcgtcctcgccatgtctcgagccataggcgatagatacctaaagccgtttgtgtcgtcggagccggaggtaacggtgacggagcgcaccgacgacgacgagtgcctgatcctcgccagcgacggcctgtgggacgtcgtgaccaacgagatggcgtgcgaggtcgtccgggcgtgcttccgcagcaacggtccgccggcgccggccgctcgcccgaacggcgtggccctcccggcagccggcgcgggcgccgaggacggatccgcggttgtcaagggcggagcgccgacaatgttagcgtggtcgtcgtggatctccgccggggcatgtgattctcggagcggagcggagcagagcagagcaaaatcatatgctccatgcttgaactagctcttctggaatccaagctaatttctcccccgttttcttccatacttttagttctgttttgatttagtattaatactgtagtagttaccaatcagacgcttttcttctctcaaacgaggaattaaaagccagtcggaccaaggaaatagaacaggaccgaaggaaatagaacatcgaattgcacaaaaaaaaaaaaccaacagaac

SEQ ID NO: 145590 - DNA, 161 bp, Zea mays
  unsure (1)..(161): unsure at all n locations
  Clone ID: MRT4577_64290C.1
aagccacgcggattcttccttctgcgtttatgcacctcctcgcacccgcactgcatgtatgtggtagngtggtcgtcttcgaagctccctcccggcctcacgggctggatgaaacgaaccctcgttcgcactccttataaccgaacggccgaacccagcaa

SEQ ID NO: 145591 - DNA, 538 bp, Zea mays
  Clone ID: MRT4577_64291C.1
tttttttttttttttttcgcaggtgaggtgaatactttctttaagagaataataacttaaggatctgagcgattataaccatatgttggatagagacaacaagatatattttgcatgaaaaaataaatatatgcaggagttgctaaattcatggggcactaagaaaccaaatcatggattgggtttcttgtattatttacgacctggacaagaaaaaaaaagtaaacttgaaatgggataactgttagggggggatatatcaggcttgtcctgagaggccgttgagctgctcttgtcgcaggcggcgtttgccgggaagaaatttggagaggaaggagggcagagcggtgttgccatgcagggtgcaagtgacctggttagtggcgatgaagaagtcgtagatgaacgccccgacgatcgcgccgcatgtcggtccaagaatggccacaacaaaccagtagtgggaccggatagaccacacatggcttccgtagcctgcgaaccaggtgaccagtctcgggcctaaatcacgcgctgg

SEQ ID NO: 145592 - DNA, 288 bp, Zea mays
  Clone ID: MRT4577_64292C.1
cggaacatggtgctggtcttctacgaccgcgaccggaacgagctcaagctgaacatcacctaccggatctggagggaacactgagcttgatgggtcagctagtacgtcatgccacctccggtgctgacctgaactcaagaatcgaatcgcacagagcttttgtcagtcataggaatgggcgactctggggaccgttcagggttatcagcttgttctagctcgctattgacttcatgcctcccgcaggctaggtcgatgctgatggatgtgtagatcatataaagggtg

SEQ ID NO: 145593 - DNA, 229 bp, Zea mays
  Clone ID: MRT4577_64293C.1
ggagcgcggcgcgccacatgcgtgcaagcgcaaccaatcgcctcgccgtgcgctcggctttgcattcctcgataacgtgagtaacctgggtggctgatcaaggctttgacggcggcaacaaccttcttccctaggcgcctcactgcgtacatccgcacagcgcccactcgtacataacccaccaccgcgtacagcgcgtctctctacacgcccgccgtgagctacccca

SEQ ID NO: 145594 - DNA, 315 bp, Zea mays
  Clone ID: MRT4577_64294C.1
attcaaccaactaggttcattgaatggaagaatttatttgccacaacaacaactacggttcaggcagctaccttctgcttaccctcagcaattgctttcattcaaccaactagcagcattgaactctactgcttattaacagcaacaacaactactaccattcagccacttagctcgagtgagccctactacctacttgacacaaaccccttgtgaatgcagactactagcacactgtgattgatgataacaccctatttcaaatgcaccatttgttgacattaaccccattttttttgataaaaccagtacttt

SEQ ID NO: 145595 - DNA, 403 bp, Zea mays
  Clone ID: MRT4577_64295C.1
aaaaaaaaaaagggggttttttaacccctttttttaaaaaaaacttaaactgggaagggggcttttttaaaccactggcaatttgcccggggccctccaaatttctggccccaaaatggggggggattaccccccggaaccgggggggtcaaaaaaccaacccctttttttaaatttaattttaaagggcataatccgaaaggggagtttaaaaaccaaaaccctttaaaagggttttcaaattttttccgagtttttccccctttgggccaaaattttaaccctttttttgccccccccccaggggaacaagttaaaattttggtttggcctaaagggctttttaaaccttttttttaaagggggggtttaaggggccacccctaggatattgccccttttc

SEQ ID NO: 145596 - DNA, 653 bp, Zea mays
  unsure (1)..(653): unsure at all n locations
  Clone ID: MRT4577_64296C.1
cgacgtggcggcgcgctggccggcctgctccgcgcgggagcgccgcggcggcgtcgacgtgttccgcctgctgtggcgcaccgcgttcgtcgcgctcatcaccctgtgcgccgtcctgctgcccttcttcaacagcatcctgggaatcctcggcagcatcggcttctggccgctcaccgtcttcttccccgtcgagatgtacatccgccagcagcagatcccgcggttcagcgccacgtggctggcgctgcaggccctcagcatcttctgcttcgtcatcaccgtcgcggccggggctgcctcggtacagggcgtgcgcgactcgctcaaaacctacgtgcccttccagaccaggtcgtgatgagcactgcacgtacggtcccatatgtagctcaaaaacttaattacgtgctcatcaagcagtcaggctccttcattcaattccaaagcaggattaatttgggatacgtggcttaattatattggtgtgtttgcgatggtatggtacgatgggtaggagcagatcctcttaggcgtgtttcgcaatcctcctccaacattattgtaaatatgtgaatgattgattgtattccaatacagggaatatgagtacatatatacagcgcanaaaaaaaaaaaaaaaaggggcggcc

SEQ ID NO: 145597 - DNA, 573 bp, Zea mays
  Clone ID: MRT4577_64297C.1
acttcgatcacaccgctcaaaccctagctaccaatccccacaattcctcccctggcccaggttcttccgtagctggatgtccccaacctaggcggcggctcggtggcgtgtgtgcgtgcgcggccgccgatggagccgcgcgtgggtaacaagtaccgcctcggccgtaagctcggcagcggctcgttcggggagatctacctcggtactaacgtgcagaccaacgaggaggtcgcgattaagcttgaaaatgtgaagacaaagcatcctcagttgctgtatgagtcaaagttgtacagggtactgcagggcggaactgggatttcaaatgtcaagtggtttggtgttgagggtgactacaatgttcttgttatggatgtgttggggccaagccttgaagatcttttcagcttttgcaacagaaaactgtcgctcaaaactgttctgatgcttgctgatcaaatgatcaaccgagctgaatttataccttcaacgtccttcttgcatcgagatataaagccagaccattttctcatggggcttgcaaagagagtctatcacggcatatttgcc

SEQ ID NO: 145598 - DNA, 134 bp, Zea mays
  unsure (1)..(134): unsure at all n locations
  Clone ID: MRT4577_64298C.1
tgttgtttactgtntggagccgctgactagctcctagctcgctagttntctcatttcgcggcgatgatgtacgtagtgtcacccctcgccgtgggtggccgtgtgcgccgtgtcctgggtggtcctttgttgtg

SEQ ID NO: 145599 - DNA, 284 bp, Zea mays
  unsure (1)..(284): unsure at all n locations
  Clone ID: MRT4577_64299C.1
ggtggttnnatagagatttttttgggttttttacaccggcggcaggcacactggacaaggccacttatccagttgtttctataaacgccccaatactccgaggcacacacccacgcgacggcttgatcaaatttggccctgatttttggggcccaccttttggcggagcctacttgaaacacaacccccgcgggcccagagactgcctcaaacccacacttgtcgttgaccttagaggcctgtcacgctgtacgagaacatcttatctttgggctaatggcgaa

SEQ ID NO: 145600 - DNA, 268 bp, Zea mays
  Clone ID: MRT4577_6429C.1
agggtatgtgatgctgcaaaagctgctgctcattggggagtatattaaaactactggggtatttcaggcgattgatgatgttatccaacattttttgctgcatttgataaaaataatgatgaatccactaggaaaatttatgtctgaaaatcttaatagcttgtagaccatagtactgttgaaataataagaatcgcaatattgatacctgagtgatacatatatagggacacttgcactagttccagttcatgggcgcccaatattt

SEQ ID NO: 145601 - DNA, 547 bp, Zea mays
  Clone ID: MRT4577_642C.1
gtagactgtgctaaaaaaaaagccattcacgtatcgatacactagttcgtagactccagcgcacatcaaaactctacgtgctcatcggcattcggcagcatattacatttctcatcgactcgaagatagtaacacgaacagcgtgggaaaggcgtacaagtacacagtgcacgtaggcacgagacacaacacactctcgacgacggaccaacggcgccgttcccggttccggcgttcaccgtccgcctgttttcagaaaatcgcgggaagccggtttagcgggaagaggtcgcgcaggtcctggaagtagtcgttctcctgcaccggcgacgcggcccagctgggcgcgtcgtcagacgaggcgggctcggcgacggcggcggcggcattccacgacgcctccggcgacgacggctcggcgtagaggaaccccgcgtcgggctcgaagtcccagaagccgctggtggcgtagacgggcgcgtcctcgaacggcacgaactcgcccagctcctcctcctcgaggacggccaggctgcggcgctgggcg

SEQ ID NO: 145602 - DNA, 483 bp, Zea mays
  unsure (1)..(483): unsure at all n locations
  Clone ID: MRT4577_64300C.1
tacgcagtttctagctctgtatgcgtggtgccgtgcatgttgtccgtaggcgtgaacctacgtgtgcacttatgtgtgcgctctttttttatgtctctatgtgtgggtgcttttgtccgtgcgtatttcctcatgtagttggggggggggttcggttcgttgttcgtttcagtttcannnnnngagggggggggggggtaattnnttnttgggggagaaggttntaaatgggggggggttttgttgggtatggtgtttggtgggtggggtgattttttttttttnaggggggggctttttggggggcccttttttgggttcccgttttttgccccctttcttcctttttttgggctttctttttgggggctccttggcccgtttttttgcccctttttttttgggnacccctttggggccccctttttgttccccttttgngtcccttctttttttctccccttttttttgccgggggggggg

SEQ ID NO: 145603 - DNA, 397 bp, Zea mays
  unsure (1)..(397): unsure at all n locations
  Clone ID: MRT4577_64301C.1
caacatgttatttaaaatattacctgtcaagtggcattggagaccatgtgtcaatgttgtaatggattttaggattagagaaagtaactgtatagtccttcatttttaaccatgctgactttaatttaatacataatcaattttaaagggaagagcttcaatacagcttctagcgttggatatgtctaaatagttacttttgccatggttacgatcttcttttaggggcctagttttggaaacttaaatcctctccgggtttcctggggattgagggggaaattaagctactttcctcaatccccaggaatcccgggggggntaagngnccacacccgcgcccnnngggggagcgcgcccccggggcnggggggcccnnnngncccccnccccgcgc

SEQ ID NO: 145604 - DNA, 1161 bp, Zea mays
  Clone ID: MRT4577_64302C.1
acaccttctacttcgtttgagcacaggaaaaaaatgcttttcgaatcctaagacttgggcccactgtcagcctcggtagatatcactctcactagtccactccccccgggactcccgtcggtggattccatgtccaaccgcgtcgccggaggccggaaccatgaagcctgtcagtgtcgccgaacacaacaaccaccagcctcgcctgcactcccccacgccggcgtcggcgaccaagatctcgatccccatctcttcgagcgaggcggcgctgttcgggaagggtaggtacaaggtgtgggccctcgcggccatcgcgctcctagcgctctggtccatgttcgccgcctccgtcacgctgcgcttgtcctccgtcgatctcgccaccacgttcggggacgcgagcgatccgctcatcgacgaacttgatcccctggagatggagcaaagagaaaagctagtgcgccggatgtgggatgtgtacacacgcacagataatcatgtacggctaccacggttctggcaagaagcatttgaggctgcatatgaggagcttgctggtgatgatacgcttactactgatgcagctatatctgagattgctcgcatgtcaatccataggcctgaggttgagcaatcgtcgaataaggattaggagatcagaggaacaggacagatatttggaagggtggaactggtacgctgaaggtgaagaacgttaaaaatggtgccgtcccatctaaagacggagttgcaaagtctgacccttagcgccgcagcaatttaaggagatgtttggtttgaataatcaatctattttagatgaggtgatgtatcataagttcattccacaaatttggtggaataaatttattcctcatattatgactaattattaacctatgaggaataaaattatggtggatcaaaaaaaaaaaaaaaaaaaaaaaaaaaaaaaaaaaaaaaaaaaaaaaaaaccagcccggccgggcggataaaaagggggaaaaaacaccacactaacgaaaagatgttcctccccccggggcgcccccctcaaagggggaatttctcaccccccggggggcggtttttttggggaaaccgcactccgcccccaatttggggaaaaataggagaaaaatgtttcctggggaaaaa

SEQ ID NO: 145605 - DNA, 394 bp, Zea mays
  Clone ID: MRT4577_64303C.1
gggaaaccccctgcgtgggaccaatattttcacattttttttgggaaaccaacaggaaaaattccaggggcccctggaaaaaaggggttcccgccagccccagtaccccaaggaatacacggggggcccccaaataaaaacctttttattacccccctttttatttttgtaaaaaatgaaacgggtgacatacgggaaacacccgttgttttttttttttgggggaaaccctggccaggacttgatcgaataaaatggaaaagctgtgggggatgcccttgggggggaccccggggttttcgcccttgtcggaggggttggggaaaaacaaggtgtagggaaactggccccggctttaacggtttttaaagggggggtcctttttcatggcccc

SEQ ID NO: 145606 - DNA, 386 bp, Zea mays
  Clone ID: MRT4577_64304C.1
ccacgcgtccgtctgacttctgacttctgacttctgaccgtgctacgtactagtcaatcactaccggctaccgccaccatttgcatgcatacatgcgtgagtgcgtgcgtgcgtggatgcaaaataatacacgtgtgcatggcagcttgacgggtaactgggcctgcatgtgcatgtacctactagctccgtctggatgccttctgtgtgtctacttctactacgtagggtacgacgaggaggccgtgtaagagagaagccgaccttgtacggtggcattggcatgcatgctgttgggatgggacttgggagttgggacttgggagctgctgtggaacacccttccaaagaagctgacgtgtcgggcaatgccacccgataccttg

SEQ ID NO: 145607 - DNA, 166 bp, Zea mays
  Clone ID: MRT4577_64305C.1
attcggctcgagcggggagagacgagagtagcggacacctcggctgcctggactcgggggctctagtagacagaaaagagcagaagagatacggggatgtctaagacggccggcgtaagcagactgggaggagccggggcggttgactcctcgcaaccggacagcc

SEQ ID NO: 145608 - DNA, 597 bp, Zea mays
  Clone ID: MRT4577_64306C.1
aaatttatttttaaaaaaaaaaaaaaaaaaaaaaaaaaaaaaaaaaaaaaaaaaaaaaaaaaaaaaaaaaaaaaaaaaaaaaaaaaaaaaaaaaaaaaaaaaaaaaaaaaaaaaaaaaaaaaaaaaaaaaaaaggggggggccttttaaaaaaaacaaattttaatacccgggcttggaaaaaataattttttttttatgggaccccaaattaaaattacggggcccggttttaaaaaacctagattgggaaaaacctggggttacccaaattaaatccctttgaaaaaaaaccccttttcccaatgggggtaataagaaaaagggcccccccaatgccccttttcaaaaattttccaccctaaaagggaaaagggcaccccccttttacgcgcctttaaacccggggggggggggggttccccccaaaaggaacctttaaattttgaggggcctataccccccccttttggggttttttcctttcttttttaaaaaaatttgggggtttttcccggaaaagttttaaacaggggccccctttaaggttccaaaaaaattggttttaagaacccctcgcccccaaaaaaaaatttta

SEQ ID NO: 145609 - DNA, 271 bp, Zea mays
  Clone ID: MRT4577_64307C.1
gttcggagcgggcagcagcacacagcgccatctcaatcctagtcgatcttcttcgcgctctcaacgaagacatgaagctgaagcatggggatgagatagtcagctgctaagccacgtcctaagaagcggatggacaagcttgacatgtcttgtcgtgctattctgcagcacggagtagtgtgagtgcgaatgacatgagaatctgatggcgagatcttgtagatctgtctgagactcagacactgtgatgatcactgagctatgtattata

SEQ ID NO: 145610 - DNA, 238 bp, Zea mays
  Clone ID: MRT4577_64308C.1
gtacagactgttgaaatggatcaagagtggcctacttttggattggtgcatcctcatatgtgcttttgcaggaagattctcccagggggtagaccttgggagacaactgaagaaacattcacaaagcattttcaccaattttttagctgtgtgggaacctgcgagcatgacggacaagcatactaagatgcctcccggatctggatttgggacatttttccatccatcaggaccccac

SEQ ID NO: 145611 - DNA, 839 bp, Zea mays
  Clone ID: MRT4577_64309C.1
cattgggtacctcgaggccggccgggaatcagcacagccctcccctcctccactcctcgccctctctctctctctctctctcatcccgtcccgagaagcggacaaagcgcggcgctgcagatttcgatccggttcccaatgcctcccatgctcgccgtcgccccgtgctagctcctctcccgtctccgcttcctccacctgccgcgccagcgccacgccgcctggatccggcgagcgcgtggccgggagcctcagatccgagcgaaacccagccttcccgtggtgacggccttcgctctagctccagattggctggcggctgccattcctcctcctcctcttctcgctcgaggtttcaaggcgggtccgttcagctctgaaatctacggaggagtcttgccgccgctttaaacgtagaggtagagctgtagtatatattttggcgagtaatcctgcttcttgctccgttcccgtgctagtgctggcgtgacagtggaaaggcttactgttgccatggtattggtgtgacgaacccgtcaaggttttgcgcaagatgtggaagcagctcctcagcaagctgccccggaagtcgccggcctgcggggattcgggccagtgcagcaatggcaccggtatacagcgcacgagcagctgcgggagcatcccgcccggccgcccggcctccgccatccggcgcatgtcatccgccgtcttcccctcgagtgtcgtggccggtatcgagccgctggtctcgttcaaggatgtccccaactcggagaagcagaacctgttcgtcagcaagctgagcctgtgctgcgtcgtcttcgatttctcggacc

SEQ ID NO: 145612 - DNA, 775 bp, Zea mays
  Clone ID: MRT4577_6430C.1
tccccgttccgctctccgtcgaccacaagcctgaccgacctgacgagctggctcgcatcgaggcggcgggtggccgcgtcatttactgggatggtgcccgtgttctcggcgtcctcgccatgtctcgagccataggcgatagatacctaaagccgtttgtgtcgtcggagccggaggtaacggtgacggagcgcaccgacgacgacgagtgcctgatcctcgccagcgacggcctgtgggacgtcgtgaccaacgagatggcgtgcgaggtcgtccgggcgtgcttccgcagcaacggtccgccggcgccggccgctcgcccgaacggcgtggccctcccggcagccggcgcgggcgccgaggacggatcggcggttgtcaagggtgtgggcaaggaggactccgacaaggcgtgctccgacgcggccatgctgctggctaagctggcgctggcccggcggagcgccgacaatgttagcgtggtcgtcgtggatctccgccggggcatgtgattctcggagcggagcggagcagagcagagcaaaatcatatgctccatgcttgaaactagctcttttgaaatccacgctaatttctcccccattttgaccatccttctattttgatgtagtatttagtagtagatcctgatcagatgaatataatagacgcttttcttctctcagacgaggaattaaagccagtcaggcaggaacaaggaacaagaacagcgaattgttgaaaaaaaaaaaaactcgaaggagggcgccggtac

SEQ ID NO: 145613 - DNA, 656 bp, Zea mays
  Clone ID: MRT4577_64310C.1
cattgggtacctcgaggccggcctcgagagactgcgattctcatccatctcctgctccattctcgattcaagcggcgggcaggatcatttcacagccaaacaccccctccaaaaggcaaggataggagacgacgaccttccatcatctggaggccgccaatcctagccgggcgccgttgccctcctgcttcggaggatccgaaaaccccccgcgccggcggtgtggtgccgcttcccttgcgacacaggccgtgcagtctcccgtcttccacatctcatggcggattgtaacaatccagcgcctcggcaccacgatcgtgacgtccatggatagcccgcacctccgctacaggatacataactgactccgacacatgacactactactgcaggatagatcagaacagcttcgacgatgtagctaggaaaaacatcttcgtcgatcgcaatagctacacacaaaagatagctgaagtcaacgtagctatggatctcccatccacgactaatataattcacctgaagctacaacaatcacctctgcgacgagagaaagttcttaagcgccttgtattactgacacagcgctgccgcagagcgacaactcacgaggaacgaataccggcgcgtgacctcccgccagagacgagcatgct

SEQ ID NO: 145614 - DNA, 722 bp, Zea mays
  Clone ID: MRT4577_64311C.1
cctcgaggccggccgggaaacaggacagccctcccctcctccactcctcgccctctctctctctctctctctcatcccgtcccgagaagcggacaaagcgcggcgctgcagatttcgatccggttcccaatgcctcccatgctcgccgtcgccccgtgctagctcctctcccgtctccgcttcctccacctgccgcgccagcgccacgccgcctggatccggcgagcgcgtggccgggagcctcagatccgagcgaaacccagccttcccgtggtgacggccttcgctctagctccagattggctggcggctgccattcctcctcctcctcttctcgctcgaggtttcaaggcgggtccgttcagctctggtttcgcgcaagatgtggaagcagctcctcagcaagctgccccggaagtcgccggcctgcggggattcgggccagtgcagcaatggcaccggtatacagcgcaccagcagctgcgggagcatcccgcccggccacccggcctccgccatccggcgcatgtcttccgcggtcttcccctcgagtgtcgtggccggtatcgagccgctggtctcgttcaaggatgtccccaactcggagaagcagaacctgttcgtcagcaagctgagcctgtgctgcgtcgtcttcgatttctcggacccgaacaagagctcagtggagaaggatatcaagaggcagggattgctggatctta

SEQ ID NO: 145615 - DNA, 783 bp, Zea mays
  Clone ID: MRT4577_64312C.1
attgggtggctcgaggcgccaaaaaaaaaaaacaggcacagccctccctcctccactcctcgccctctctctctctctctcgtcccgtcccgagaagcggacaaagcgcggcgctgcagatttcgatccggttcccaatgcctcccatgctcgccgtcgccccgtgctagctctctctcccgtctccgcttcctccacctgccgcgccagcgccagcgccagcgccacgccgcctggatccggcgagcgcgtggccgggagcctcagatccgagcgaaacccagccttcccgtggtgacggccttcgctctagctccagattggctggcgggtgccattcctcctcctcctcttctcgctcgaggtttcaaggcgggtccgttcagctctggtgggttttcgggtttgctcatactttttcttcggttggtttgcttcagcgtggtccagatttagctgcattttctcgggctgtgtttttctgtgccagaaatctacggaggagtcttgccgccgcgctttaaacgtagaggtagagctgtagtatatattttggcgagtaatcctgcttcttgctccgttcccgtgctagtgctggcgtgagagcgtgacagtggaaaggcttactgttgccatggtattggtgtgacgaacccgtcaaggttttgcgcaagatgtggaagcagctcctcagcaagctgccccggaagtcgccggcctgcggtgattcgggccagtgcagcaatggcaccggtatacagcgcacgagcagctgcgggagca

SEQ ID NO: 145616 - DNA, 707 bp, Zea mays
  Clone ID: MRT4577_64313C.1
cgctgtcagaacttctgatgaagattaccatggtacagtgaccagaaaagatctccggtgccgtgagctcaacgccggtgatctgccaccacaattcacgcccgcctgggagattcatgctgcgggaggagtagacaacgtcggggcggggtgaaaatatccggtggggggtgaatccagtcgctggccggactggtcgtcgtgtcccgccacggtcagtcgcgctggcattaccagaactcgtcgtttttccgtccgtgacacgtaataaccactcctccacgctgtaagggtcgtggcaagctgccagttatcgttcgcagaccagttccttcttgtgtgccatggtgagcaagccactgtgaaatatcctagccggataatcatgatctcaatcccaaaattcttgtccagttcgatcgagacctataaattgaggatgccctctgctccgcttcttagttacgtgtccaacccatccccagctagctcctatcgtgcaccatcgcgccccaatttcgcatttcccccaattcacttctccgcgcatccgtgtgtcctcgcgttgtggaccgcagtttctaagttcggtcttattctcgttgttcatgtttcaacacctctattcactggtgaggctcgtcgattcaacccattaagctagaccatgctcaattgtctagaacacttcgatttgtccgtaaagg

SEQ ID NO: 145617 - DNA, 651 bp, Zea mays
  unsure (1)..(651): unsure at all n locations
  Clone ID: MRT4577_64314C.1
cattgggtacctcgaggccggccgggaaacattccccgcaagaaacagcaaacaggcacagccctccctcctccactcctcgccctctctctctctctctctctctctctctcgtcccgtcccgagaagcggacaaagcgcggcgctgcagatttcgatccggttcccaatgcctcccatgctcgccgtcgccccgtgctagctcctctcccgtctccgcttcgtctccacctgccgcgccagcgccagcgccacgccgcctggatccggcgagcgcgtggccgggagcctcagatccgagcgaaacccggccttcccgtggtgacggccttcgctctagctccagattggctggcggctgccattcctcctcctcctcttctcgctcgaggtttcaaggcgggtccgttcagctctggtgggttttcgggtttgctcatacttttcttcggttggtttgcttcagcggtggtccagatttagctgcatttttctcgggctgtgtttttctgtgccagaaatctacgggaggagtcttgctggcgccgctttaaacgtagaggtagagctgtagnatatattttggngagtaatcctgcttcttgctccgntcccgtgctagtgctggcgtgacagtggaaaggnttactg

SEQ ID NO: 145618 - DNA, 403 bp, Zea mays
  Clone ID: MRT4577_64315C.1
cccacgcgtccgcccacgcgtccgcaaatatatggccctttgcttcgaatatatgcataatggaagccttgacaagttcattattggtattattgcgctcttcttattctcgtatgatcaattgaattcacttgaagtaaccattcttcaaattcacattttgagagactgtttgctccaacagatgaaaatagtgtccatgactggtccacacgctatgcgataatcaaggggatctgtgagggtttgaaataccttcacgaggaattgaatcctcctatttatcatttggatttaaaaccagctaatattttgttggatgacaatatgatgccaaagcttgcagattttggcttgtcaaagatttttgacaggaacgaacacgaatcacacaaagttgtgt

SEQ ID NO: 145619 - DNA, 256 bp, Zea mays
  Clone ID: MRT4577_64316C.1
aatacattggtcatattacttgcgacttacagttagctttacctatgttcttgtattgtggagttgaaaatgaagcgagtgttgtaatgccctatgtcataatgtcatacgttcggattatttcttctttaatgggtgcgcaaaaccttgctagggtaagaagttaataaacttgatatcccccttaatttgattatttggggtccaaagctagttagtcaaaatattgtactaggttatctggcagagtaattta

SEQ ID NO: 145620 - DNA, 1805 bp, Zea mays
  Clone ID: MRT4577_64317C.1
atttctgaactcccccccctgctgccccgcgccgaagcaggtgtggcggcgctgcgagcctgcaaccatctccgcagactccgctgcgactcatctgggctacgacccacgtcaaggctgctagttgcgttcgttggagttgcggcttccgcgaatcccccaatccatcccagtcatggcgttctggggggtggaagtgaagcccgggaagccctacacccacatccatcacgctgaccatggccgcctccgcatttgccaggctacactgggcaactgtgatgctgctgcaaggacggtgctgcaatgcaatgttggcaacaagattcccatcaaactttgtagtctaaatccgaaattggccgagacatgccatctagaggttgagtttgaggaggttgatgatgttatcttctcagtaattggtcatagttcgatacatctctctggatactatgtctgtgcaagcaacaggtctaatgtgggggatgatgaatcagaatcttatggggaagatattgggcactccagcaccgatgaggagcatgataccagtgaggacagctatgaatctgacttcattgatgatcgtgaagttccattatctgagaagtatgggtctggttctatagatgacagtgatgatgagtgcacccaacgatgccacagacaaaaagctgaaaaaacgactcaaaatgctgaaagacggcggcgcttgaagaagcaccaagtaggtagcactgattacgatgatgatgatactccagtcatgaaacatgttgcgaagcgctgtgctcctaaaatatctgatagtggtgatgatgacactcctgtcacaaaacctgttgtcaaacgtagagcttcaatatttgatagtgacagtgatgaagatgataatgtacctatttctcttgcattgggtaagaaagacaatgctaaggttgctgaggaaactgaacatcaaaatggacaggcaaatggcatcaccaaaaaaaggattattgatgtcaagaaaagaaaacagtcttccatcagcgaggatcctgcatcgtcaatggatatgacagatgctaatgcaccatctgtttcaaaacaagttgatgaaataaaaaagaaatcaaagaaaaagatgagaaatcaatcaggggaaaataatgagaagcagtccaatataagaacattggatgacgggttggtggttgaatatttgtcaatgggaaacaatgatgcaaaagtggcttctgatggctgcaaggtctatatcaaatatgttggcatgttgaaggatgggaaaattgttgagtctaatgttagtgaaaagccttacaagttcaagcttggtgctggaaaagttatccgtggatgggatgttggtattcatggtatgcgtgttggcgagaaaagaaagcttacagttccaccttcaatgctctctggcggtaaatcagtgggagaagtacccgaaaattcttcagtcatatatgaaatcgagttagtgaaagtgaaataaagaaaaaatatgtcaggcttttgcatgtgccctatctcagcagctgcaacagttgcaggaattttgttgatatacagatgactcatgctcatgttttgcttccttctggaagaatttatatgtgccactcgtgccacaccataggacatcgagcagtgaactgcagcgggtgctttatccatgcatgccttgactggatacttggttttgcactatctggctacattactttgtaaactgcatacgatggttgaagcactattgtggtctggtgatttgccatatgtttgtgact

SEQ ID NO: 145621 - DNA, 2397 bp, Zea mays
  Clone ID: MRT4577_64318C.1
gccggccgggtcgggaacaggcacaggctccctcctccactgtccagtgtccactcctcgtcccgagaagcagacaaagcgcggcgctgcagatttcggtacggttcccaatgcctcccatgcccgccgtcgtcccgtgctagcacccggcgccgctcctccacctgccgcgtcgcgccgcctggatccggcgggcacgtggctaggagcctcagatccgggcgaaacccagccttccgtgcggacgtcttcactctacctccagactggcggctgccatttccccccctcttcttgctgttttttttggtgggggtggggggtggaatctgcggtggagtcttgccgtcgctcgctgtaaacgtagagctctctctctctcttggcgagtaatcctggttcttgctccatttccgtgttagtgctggcgtgtgagtggcaaggtttacgtgtaagatgtggaaacagttcctgagcaagctgccccggaggtcgtcggcctccggggactcgggacattgcagcagtggcgccggcatacagcgcacgagcagctgcggcagcatcccgccgggccgccccccggcctccgccattcggcgcatgtcatccgccgtcttcccctcgagcgtcgtggctggcatcgagccgctggtctcgttcaaggacgtgcccagctcggagaagcagagcctgttcgtgagcaagctgagcctgtgctgcgtcgtgttcgatttctcggacccggacaggagttcggtggagaaggatatcaagcggcaggcattgctggatcttatagagtttgtcgagtcgaccaacgctcgcttctcggaggcagccatcgcggcctgctctaggatgtgtgccatcaacctgttccgggcgttccctccgagttgcagatctggctcatcaggtggtggtgagggcgacgaggaagagccaatgttcgaccccgcgtggtgccacctgcagcttgtttatgagctgctgctgaaatttatcggatcctcgtccttggacgcgaaggtagggaagaagcactttgatcactcattcatcgtgaagctccttaatcttcttgactccgaggatccaagagagagggattgcttgaaaactattctgcacagggtatacgggaagttcatggtacaccgtcctttcatccgcaaagcagtgagcaacatattctaccagtttgtctttgagactgatcggcacaatgggatcgcggagctgctggaggtctttggcagtgtcattagtgggtttgccttgcctctgaaagaagaacacaagatctttctttggagagttctgattcctttacacaaaccaaaatctgttggtgtgtatcttcagcagttgacctactgtgtaacacagtttctggaaaaggacccaaagcttgcaagctcagtgatcattggtttgttaagatattggccgataacaaactgtcagaaggaagtgatgtttctcagtgagattgaagagatcttggagtctaccagccaagcagaatttcagaaatgtatggtaccattgtttcggcgaattgctcattgtattaccagttcccacttccaggttgctgaaagagcgctcttcgtatggaacaatgatcacattatcagcttgattgcacaaaaccgccaagtgatcatgcctcttgttgttccagcgctagagcagaacattcagaatcactggaaccaggcggtcctgaatctgaccgtgaatgtcaagaaaatgttatctgagatggacgacgatctcttctcgtcatgcctggccaagtacaaggacgaagaagaaaaacgcgcgtcgctagaagcgaagcgtagacttacgtgggagaagctcgagtcagctgcagctttccagccagtgactggccatacagccgtcctagtaggccaccggccgtcagcaaatctgatcgccaccatgatctagctcatgcatgtatgccgaacaagcgaaggtggtgctctcccccccttttggtgaggcgcagcaagtgtagtgttctctattttgctcctgtttattattattattttccttttgctggcatgggtaatcagtgtagtagtaagttgtaactatttccggatgtttatgttcttaaggcaaggatacctgtaacttaagactgccgagtgctggcactctacatgtatctttgcctgtttatggatgaacaggtgtcctacagtttaatttcactttccatcttgcctataggctatatatatagatgactggtatgcagaatcatcaagtgctatatgttttcaaaatgtctgaagcttaggtctgtattccatccactgtttcatcttacagctgtaatttaatcttgaaatggccatatagtgttattgc

SEQ ID NO: 145622 - DNA, 910 bp, Zea mays
  Clone ID: MRT4577_64319C.1
cgacccacgcgtgcggtatttgccaagttacttttttttggcatctttaatgatttaggtagctttgaaaatgtgaccagctgaagcagggccagccactcaagttgtagagcgaagtggacttgtgctagtctatatgatgctcaattattttgcttggctcacactctcatgatatttatgttatttaatcttttctaattaaggtacacaggaacgctagcatgaaatgaatagtgaagaaaaattggcaattccttttgtttctggcactagctgtaatggtgtaggactgccttaagtggagtgttgaactgttgatgcaacatcttgagaaagagcagttctgcccatatttccagattgatggttgaatgaaaattctttagttattgtgcttttggatgaaataatgatacctgtttcaaacagaagtaataaataaatatcggttcagatctttccaaatttattttcaccatatgtctttcttttttccttgtgcagaaacattgagggtagcctagtaccaatttccttgggactaaaagactttgttgtttttgtttttgtttttgttgttgttatggaaacactttagtcttaatgctggtgtcatttgcatttgcagatacaaggcagcggacaaatcttttctttagtcaaccactttatggccaagtgaggagcaatgcagggtcttcatgggataacttgggaggcttaaaattcatggagacgaaacatccgccagtgcatccaacaaaaacagcatcccctgatgaactgcatttctcagccctccagataactagtgctgcggctcacaccggacatcatcatgatctcgatgggttcatggcgttcaagggaaccagcacaaaggtccttaaccaaggcgtggaggctt

SEQ ID NO: 145623 - DNA, 440 bp, Zea mays
  Clone ID: MRT4577_6431C.1
gaactatcaatttgctgtttttgatgcgcccaccaggatgtgaccgcacctattataacaaaagccaccgaattaaaaggtcacagcatatggggaaacagcttttccccacaggtgatttcccacctccctatgacacgatatctttacccccacagccgggttgccagtgacggccaacactaggttatgacattggaacactcaactacccatagggtgcccaggctggttggacagcgacaattttttgggagacgatggattatgggtcccaacaagacatgcccttccaggtggcggcgcccaaagcgacaaaaacctaggcatcctcctctcttgtgatactacaaggtgggacccctcactgaccaaaatgcctccatacctcccccagaaataccccgacaagttcttagtctaacctgggggctgctcct

SEQ ID NO: 145624 - DNA, 2313 bp, Zea mays
  Clone ID: MRT4577_64320C.1
cattgggtacctcgaggccggccgggaaacaggcacagccctcccctcctccactcctcgccctctctctctctctctctctcatcccgtcccgagaagcggacaaagcgcggcgctgcagatttcgatccggttcccaatgcctcccatgctcgccgtcgccccgtgctagctcctctcccgtctccgcttcctccacctgccgcgccagcgccagcgccagcgccacgccgcctggatccggcgagcgcgtggccgggagcctcagatccgagcgaaacccagccttcccgtggtgacggccttcgctctagctccagattggctggcggctgccattcctcctcctcctcttctcgctcgaggtttcaaggcgggtccgttcagctctgtgctggcgtgagacgcgtgacagtggaaaggcttactgttgccatggtattggtgtgacgacccgtcaaggtttcgcgcaagatgtggaagcagctcctcagcaagctgcccccggaagtcgccggcctgcggggattcgggccagtgcagcaatggcaccggtatacagcgcaccagcagctgcgggagcatcccgcccggccgcccggcctccgccatccggcgcatgtcttccgcggtcttcccctcgagtgtcgtggccggtatcgagccgctggtctcgttcaaggatgtccccaactcggagaagcagaacctgttcgtcagcaagctgagcctgtgctgcgtcgtcttcgatttctcggacccgaacaagagctcagtggagaaggatatcaagaggcaggcattgctggatcttatagagtttgtcgagtcgaccaacgctcgcttctcggaggcagccatcgcggcctgctctaggatgtgtgccatcaacctgttccgggcgttccctccgagttgcagatctggctcatcaggtggtggtgagggcgacgaggaagagccaatgttcgaccccgcgtggtgccacctgcagcttgtttatgagctgctgctgaaatttatcggatcctcgtccttggacgcgaaggtagggaagaagcactttgatcactcattcatcgtgaagctccttaatcttcttgactccgaggatccaagagagagggattgcttgaaaactattctgcacagggtatatgggaagttcatggtacaccgtcctttcatccgcaaagcagtgagcaacatattttaccagtttgtctttgagactgatcggcacaatgggatcgcggagctgctggaggtctttggcagtgtcattagtgggtttgcattgcctctgaaagaagaacacaagatctttctttggagagttctgattcctttacacaaaccaaaatctgttggtgtgtatcttcagcagttgacctactgtgtaacacagtttctggaaaaggacccaaagcttgcaagctcagtgataattggtttgttaagatattggccgataacaaactgtcagaaggaagtgatgtttctcagtgagattgaagagatcttggagtctaccagccaagcagaatttcagaaatgtatggtaccattgtttcggcgaattgctcattgtattaccagttcccacttccaggttgctgaaagagcgctcttcgtatggaacaatgatcacattatcagcttgattgcacaaaaccgccaagtgatcatgcctcttgtcgttccagcgctagagcagaacattcagaatcactggaaccaggcggtcctgaatctgaccgtgaatgtcaagaaaatgttatctgagatggacgacgatctcttctcgtcatgcctggccaagtacaaggacgaagaagaaaaacgcgtgtcgctagaagcgaagcgtagacttacgtgggagaagctcgagtcagctgcagctttccagccagtgactggccatacagccgtcctagtaggccaccggccgtcagcaaatctgatcgccaccatgatctagctcatgcatgtatgccgaacaagcgaatgtggtgctctcccccccttttggtgaggcgcagcaagtgtagtgttctctattttgctcctgcttattattattttccttttgctggtatgggtaatcagtgtagtagtaagttgtaactatttccggatgtttatgttcttaaggcaaggatacctgtaacttaagactgccgagtgctgacactctacatgtatctttgcctgtttatggatgaacaggtgtcctacagtttaatttcacttaaaaaaaaaaaaaaaaaaaaaaaaaaaaaaaaaaaaaaaaaaaaaaaaaaaaaaaaaaaa

SEQ ID NO: 145625 - DNA, 401 bp, Zea mays
  Clone ID: MRT4577_64321C.1
ccgaaaaaaaaaaaaaaaaaaaaaaaaaaaaaaaaaaaaaaaattttatatataacaaaacaaaaaaaaataccaaggggaagatcacatacatacaacacaataaatctcccctccctttacctaatttcaattcactgtcctcccctttacaccactaagacttttaaaaccctccctttcccaacttaatggccttgcattacatccccctttctccaactaacctaataattaccaagcccaatcctttcacccttcccaacactttccctacctaaattttaaatggaactccccctccatcatccccttaaacaactgtggttttgtcggttacgctcaccttaaccgcttcacttgccatcaccctatcccccgctcctttccttttctttcct

SEQ ID NO: 145626 - DNA, 751 bp, Zea mays
  Clone ID: MRT4577_64322C.1
cattgggtacctcgaggccggccgggaaaccctactctcagacacacgcggatgcagacgctgcctgtctcctaccgtgcggatgtaccgttgctacgattggcggacagtctactgtcgaagacggagaaggatgtcaacccgcacgagttcgtcaaggcctactccgcccacctcaagcgctccggcaagatggagctccctgagtgggttgacattgtgaagactgcgaggttcaaggagcttcctccttatgatcctgactggtactacatcagggctgcatccattgcaaggaagatctacctaaggcaaggcatcggcgtgggtggctttcagaagatctacggtggccgccagaggaatggctcccgcccaccacacttctgcaagagcagtggtgctgttgcacgcaacatcctgcagcagctgcagattatgggcatcatcgatgtcgatcccaagggtggacgcctcatcaccaaccagggaaggcgtgatctggaccaagtggctggaagggtcgctgttgaagcgtgagcagtgtcatctttggtttcaatggtgtcatgtttgatggttgagaaggctgcgctctatttgctcttttgggttaggattttcgagttcagaggactttaaggtttattgcatctagctatggcgccacactatgttccccgagaacctaatgtgttatcaagactcgattctcgaatcgaagatatatgtttgaaaaaaaaaacaaaaa

SEQ ID NO: 145627 - DNA, 259 bp, Zea mays
  Clone ID: MRT4577_64323C.1
gcgctcggcgattatattccattgcagcccgaacacatgatccctcctagcacgtggagatgtaagaagctcgacatcgagcgcaaacaccccgctcagacacccccagttactatggatgccatgtacagagcctacccagcttccacaacccataagggtgcagttccacggtagcacagcctgaccttaatctggcgggtgccgagcatatctctagacaataacctaaatggtctcctcaacattatactacctt

SEQ ID NO: 145628 - DNA, 2651 bp, Zea mays
  Clone ID: MRT4577_64324C.1
gccggccgggtctggaaagaagtatctttctctctccctgctcgactttcctctggagccggcccatatgaaggacaccacgtgaactcccccgacgactcagtgcgtcttcgccgccgttttcgtcgtcgcagattaaggttcccctcctctaacacgccggcgcttccccccctgccaccgcgacactcagtcgtcgccgccgtcggctctgctgccgtggccaagcgcgttggcagcgaggattgctttagcttgcaggcactttccccacccccaccgccgctgatttcgccgttatgcggtgaagcccttcgcgttgacgggctaatcggctgcctgatttctattatgatggggtaggtgtgctcctggttcgcgtctcggaggaccctcgccgtttatcgatccagtgatgtggagctcacctttctccggctagcgttgtgtcaggggagagtgcttgttgatccctcgggagctggttgagttgtctttcgtttgtgggaaatctgtgcggcagcgtaaggttgctgattcggatggcaccggtgggggatcatattgtggacatcagctccgatgaggaggacttgttcatcggcacttccctaaatatactcctagaacccctcgaccccgttaaatgggtggatgaggtttgcggtgtggctgattatgtggccggggaggatatcgatgacctcatgattatgagtgagatatctgctccaccggtgttgcagaagatagccaagcctgatgagctcgtggttatgggtgagttgtcctcaccacctgccccgcagcagaaggccagtgctaatggtgggtgccatgaggatgatgatgattgtgtagttctagatggtgaccctgataaggcgattacagttgctgaagaggggagcttgggagatggcagttcggatgaattgcagatagtggcggagaaaggcccggtagcatgcagggacttccctcattcacggcattcatgctcaaacttgcctttcagcactacttctcacgtaaagcactgttccatgtgccactgttttgtatgtgacgcaccagctccttgcaaatattggggtaacagtacatcagctgatgatcattgccatgctacagacaaggattcaaaatggacatgcatgaggcaaatattcaagcaaaaattgttgccagcatcttttctagaaaaacaccagaacggcgtttactcaacaatgacaccacctagacagcaacatatgcagtgtcatgtttcagtcccacaatcgccttcggtgtcacatgggagtcacccttctcttaccatccaaagtcctcttcttaatgaagggagccaaaaccaacaaagacatccctcagtgagagtctcactgagtgtaggggcaacagtcagttctccaagagctggaagaggtactggcaatgctcacattgctcaaagtactcattcacatgcaatattcaagagagcaggggctgttgctccagtctttgcaacaagaaatgctagccaattctgtccttctgctccagatgatctccttttgcagcaggcattgtctcacgcttctcagcctgttcaagttgcgcctacaaccaatgctttcactggcgcttctcaaaataaccattttcagagatctttcagtgcgccgatagcacctcaggtgcaacaaggtcaacctgcggcacgttaccaggtcgccataaatggaatgcacgccgtagggccgcaacttgcacggtccacctcacttacaactcagagaacacaatgcctcccagaaccagcaataatagatgtcagcacaacaagctggcaagacatacttgctactgtggcatctaatctgggggtagcagattacaacacgagcacccctgagtctcagcatgtaacggttgactctctagccatgcatcccactgcaaaccatgggttggatcttcagcatgagcccattgcagaatcagagaacctgacatattcgcttctgcatgattcatccaatggcgcagcaggtggcagtgttcaggcagatggtcctatgcaaacaccagagaatttggaccatctgattggccagagcaatcctgttccaaatgaagctcacctggatgactttgcgggtgcccccgctaatcaattaccaatagaagaagaagaagctcatcagcctgagatgtcaaggctggagcctacaaacattctgttcgagttcgattgggtttaagcggtgacctgcctggctgcctcatcagcatatccctaacccatgaataataaatcagtgccattgacgtgcccctttctaggtctcctgcataggagacatgtctggtgtccccttgtacagtaattaggctatgtactagaagagtttcgccgtcatgttgtttgttatcatagtggtcagatgttgtggctcttcgggctttagatgttaacaggtctgaagtagaagggtgttgggtgggtgccaagatgcttgtctaaccactggtctacaatttgacaatgtaaggtattgagatacagatgcttgggttggataccaaatttctttactacaaaaaaaaaaaaaaaaaaaaaaaaaaaaaaaaaaaaaaaaaaaaaacccccccacccaccc

SEQ ID NO: 145629 - DNA, 1205 bp, Zea mays
  Clone ID: MRT4577_64325C.1
aaatcaaaattgaaccatacatatcctctcaaattacaactttgttttgcctggttcagcttaagtacaagcttataaggttacatgctccacttagattagaacaaaacgctcaggaccagttatgccactgccactaacacttcttgcaggccacttagtcctgtccatgatctatctgactatctgtatagctcagggagacgatagcctgtcattactatcttatctgcaaacattttgccagtctttggcataatgtgccagtgcattgtcaagttgaattccttgccctttagattgcttcctcgtgccgaattcggagcagcagccgcatccacaacctgcctctctcgtcccctggcggcgtccgcggcaggatggcggaatctacggcgaggacggtgaaggatgtcaacccgcacgagttcgtcaaggcctactccgcccacctcaagcgctccggcaagatggagctccctgagtgggttgacattgtgaagactgcgaggttcaaggagcttcctccttatgatcctgactggtactacatcagggctgcatccattgcaaggaagatctacctaaggcaaggcatcggtgtgggtggctttcagaagatctacggtggccgccagaggaatggctcccgcccaccacacttctgcaagagcagtggtgctgcttgcacgcaacatcctgcagcagctgcagattatgggcatcatcgatgtcgatcccaagggtggacgcctcatcaccaaccagggaaggcgtgatctggaccaagtggctggaagggtcgctgttgaagcgtgagcagtgtcatctttggtttcaatggtgtcatgtttgatggttgagaagactgcgctctatttgctcttttgggttaggattttcgagttcagaggactttaaggtttattgcatctagctatggcgccacactatgttccccgagtacctaatgtgatatcaagactcaattctcgaatctaagatatatgtttgcaaagtgtctgaccaggtatcaataatgtgtctttcttttggtacagatatacgtgataataacgtgcagttattggccacccttggttaccgatagcaaggctaataactcagctattgactcggtagatttttgtagtccaactgtaatcctttcgtttttcattattaatatatgggctcagttatct

SEQ ID NO: 145630 - DNA, 382 bp, Zea mays
  unsure (1)..(382): unsure at all n locations
  Clone ID: MRT4577_64326C.1
agcgttcgcggnagcgtgggnaaaaaaaaaaaaaaaaaagaaaaaaaaaaaaaaaaaaaaaaaaaaaaaaaaaaaaaaaaaaaaaaaaaaaaaaaaaaaaaaaaaaaaaaaaaaaaaaaagggaaaacggtttaagaggatctaaaataaacgaacgtttttttgaaaacgtttgtaagctcttttatatagtttattttggaggggagggacattgttcataacattttaaaaatgttttagaattgggaaaaaccgtggaaaaaacccaattaaactcgctttgaaacagattgcccttttatgcaattttgctaaaatagggaaaaaggatccaaaaggaatcccctttaaaaaaaagtttgccaaaacttgtaatggt

SEQ ID NO: 145631 - DNA, 535 bp, Zea mays
  Clone ID: MRT4577_64327C.1
ctaatacacactcgttgaaaaccgtgatggctagtacgatctgccaggttgtatccagaccagcacgcgcacttaaacatagcgtcagtgctgcagctgagagtacaacaaagacggctgcttccacatagagtggaaggaaacacttagcgcagtggggcccccaaatacgcctgatatattgattgcaactgcacagcacttctacgattccaaaaggccacgatgtgaagccattggacaaggagcctgcacttgatccggagatctgtccaggctctatagactacattcatgaagggacccgtacggacagcagccggagcttacgctgaaaccgaatgagagaaacgtgaggcttaggctcatgtatgagcatccccagaacgctaatgacagggagaccattcttcaggagatctatatggaagaagcattaaaaaactttgctaatgaacctgggacatcaggactgaaacccggaccaatgatattggctgagagacaaggaccagatccatgactgatgccaagg

SEQ ID NO: 145632 - DNA, 565 bp, Zea mays
  unsure (1)..(565): unsure at all n locations
  Clone ID: MRT4577_64328C.1
aaaaaaaaaaaaaaaaaaaaaaaacaaaaaaaaaaaaaaaaaaaaaaaaattaaaaataaaaaacaaaaaaaaaaaaatataaaacttttttttaaggcagttaccacctttcttgtcgagtggtgagggtttccttatcggtggcaagatggtagagaatataaaaaaaagggttttttttttcgccctggccccccctggggggattttctgctttttcccttccccgggggggcctttgggccttctttttgggggccccctttccccctttggggggcgtttttcctttcccgggggcggttttttccacgaggggcccggggatccccctgggtttcccccctttatgccgtttggaaaattccccctttttcccggtggggtttttagcgagggggcccccccggttcccctttcccaaatttgtcccctttccaggggcattggccccccccttttagctctctttcagggccgggggggggggggtttcccccctgttggcccgttttttttgccggggctctaggccggggtntttggtttttttcccttggtttt

SEQ ID NO: 145633 - DNA, 174 bp, Zea mays
  Clone ID: MRT4577_64329C.1
attgtaaacaacctttcgtcattatcaactcccaatagtaactgacacggcagcccgggttctataaaacccagatagtgctgccatcagtaaccacaacatctgtcaacggaggtccatgattcccagtacacagagaacagaatgcaattttgtatcaacccaatggacttg

SEQ ID NO: 145634 - DNA, 1796 bp, Zea mays
  unsure (1)..(1796): unsure at all n locations
  Clone ID: MRT4577_6432C.1
aattcggcacgaggccgtttcgcctcgcgcctgcgttgctctgctatttgcattgcacccatttccggggtcgcttgcgttgcttcgcgtgggaagcgtgattcgttgaggcctctcgccaatttcggagggcgacggcgacgtgctttcggcgggcgggcagagaaaatctagagagccttgggtttgccagacgcgcctttgtgggagacagacacttgctctcgcctccaatggccgagatctgctgcgaggaagccaagtcgacgccggcaaccgccgtggctgcggcttcagtctccgccacggccgcagcggccgcagccgtggcagtggcctcctcggcgttagagaggaggcgacgcaggctggagatgaggaggttccgcgtcgcgagcgatcccgaggagctggtcgcggaggacgtccgcgctgccaagcggcagaggctggcgcgcacgctgtccggctcctgccccgacgcgggctcggactccgacagcccggccctgcccaggtacggggtcacctccgtctgcggccgacggcgcgagatggaggacacggtctccatcaggccggacttcgtgcccggcaccagcaagcagcacttcttcggcgtcttcgacggccacggctgctcccacgtagcaaccatgtgccagaacatgatgcacgaggtggtcgcggacgagcacaggaaggcagattgttctggcgaagagacggcgtggaaggccgtgatggagaggagcttcgcgcgactggacgagcaggccgccagctgggcgaccagccgcagccgcgacgagccctcctgcaggtgcgagcagcagaagcccttgcgttgcgatcacgtggggtccaccgccgtggtcgccgtcgtcagccccacccacgttgtcgtcgccaacgccggcgactcccgcgccgtcctatcccgcgccggcgtccccgttccgctgtccgtcgaccacaaggtctgtatactcgtgcatcacggggctgagggcgctgcgcctcctcccctccccgcgtattcgtcgcctgtccgtgagcctgacgtgctcaacttcctgattcgttcagcctgaccggcctgacgagctggcgcgcatcaaggcggcgggcgnccgcgtcatttactgggacggtgctcgtgttctcggcgtcctcgccatgtctcgagccataggcgacggatacctgaagccgttcgtgtcgtcggagccggaggtaacggtgacggagcgcaccgacgacgacgagtgcctgatcctggccagcgacggcctgtgggacgtcgtgaccaacgagatggcgtgcgaggtcgtccgcgcgtgcttccacagcaacggtccgccggcgccggccgctcgggcgaacggcgcggccctccgggcagccgagaacggatccgcggccgccaagggcgtgagcgtggaggattccgacaaggcgtgctccgacgcggccatgctgctggcgaagctggcgctggcccggcggagcgccgataatgttagcgtggtcgtcgtggatctccgccgggggatatgatttgccttccttcctttttagccctcttggaatccaagctaatttctcccccgttttcttccatacttttaggttctgttttggtttagtattaatactgtagtagttaccaaccagacgcttttcttctctcaaacgaggaattaaaagccagtcggaccaaggaaatnaaaaaaaaaaaaaaaaaaaaaaaaaaaaaaaaaaaaaaaaaaaaaaaaaaaaggggcggccgctcg

SEQ ID NO: 145635 - DNA, 254 bp, Zea mays
  Clone ID: MRT4577_64330C.1
gtcggataaggagaagaaggtctttgggatcgtgatccccatgcaggtcctggccatcgtggcctacatcatcatcgagtcccgcgtggaaggcgccacgactacgtgctgtggaaggagattttgttcctggtggacctcatctgctgtggtgccatcctgttccccgtagtctggtctatccgccatctccaggatgcgtctggcacagacgggaaggtggcagtgaacctggccaagctgaagctgttccg

SEQ ID NO: 145636 - DNA, 132 bp, Zea mays
  unsure (1)..(132): unsure at all n locations
  Clone ID: MRT4577_64331C.1
agtgtggaatccgatttatggtatacttaaacacacagggttgaacgttttacaacttatcnaagcaaaaataaacgtattttcaatcggtggggcttaatcacttaaagcgaatttttttatgaaaacttt

SEQ ID NO: 145637 - DNA, 302 bp, Zea mays
  Clone ID: MRT4577_64332C.1
cgtcgacgcacgcgtccgcgatcttcttcggctgttgaccgcccgtgcagtgctctacttgcttgggggcgtgcgtgagggacgcggtgaccgacttgcttgtcgtcagctgtgatggaggggcggatgctgcagactgctgcgcagctcgacgctggcggaccagctcgccgcggtcgctgaaggtcgggctccgcactgcgctgcgccacgttctggaagtgggtttcgtgaatctgatcggcgctttcaggtcagctctacattacagatggtggttgaaagcaaaaagggaacggatc

SEQ ID NO: 145638 - DNA, 604 bp, Zea mays
  Clone ID: MRT4577_64333C.1
gttcgtggactacagcagcgtgctggacgtgtcggagaacctgggctacggcggcgagagctccagcaacagcagcaactggaactgcgcgccggaggtgcacaacaatgcgctcgacggcgacgcgccgctgcactgggcctccgagagcaaggccacgcccttcgccggctacggcggcgaggagcaatcactcctcgggcacaggttctcggtgccctgccacggccagcaggagcagagccctccgcgttttgacttcgacatcggccggggcgccgtggtcggcgagttcagcctcgagttcttctgaaggtccagcttgggaatttcagcaatctagataccgcgtagcgcgtatatatatactgtgtattaaaggcatttcacacggaacaacaattgagagatcgtgcttcgttaatttcctctagtcgaccttactccttaacaatgtcttgcgtttcttttgtttttatgttttatgtatgtctaaaataaaggcatagacatatatatgtatatgtaaacacggtgtagtgtaatagctatacattaaagtttttgtaaaaaaaaaaaaaaaaaaaagggcggcgctcgcaaa

SEQ ID NO: 145639 - DNA, 325 bp, Zea mays
  Clone ID: MRT4577_64334C.1
agcctgagacaatgcgccgactactaccacggcggctagggccttttactcccacactgacgcgtgctatgatgccggcaggcacgccgccagcgggagggggtgctcgtgcaccgacgtgtactacgacaacgtggactaccgcatgaggacgcccgcgtacggcgcctactactgcggctacggctgaaggcagaccgacgtgtacgccgcaccaccactcccgcggagcccgctactaatgctacagccgcgaggatgaggccttcctgaagcccgataacgacccccctgccctgatcgctcacgctgcggggggcgcccc

SEQ ID NO: 145640 - DNA, 349 bp, Zea mays
  Clone ID: MRT4577_64335C.1
ctttctcgtatattactgaggacagctcagagtgcgcctgactcagagcccaaagacgaacgtatgaagcggagtttgatactgcccccacaacaaagtctatgagcgtgaattctcctttggaacaagaacttcaccgctctcaaacgtactggaggacatgagcgttcttatgatgtttccccaattctgctcccactgattcatcagagccctagctcattgcgtccctgcccgcccaggacgctcgacttggcacaattcgcgcagactgtccggcggatctagcgtattcgagctagccacgagctgtggactcatcatggacatggcagaatgctgtgtgcta

SEQ ID NO: 145641 - DNA, 567 bp, Zea mays
  Clone ID: MRT4577_64336C.1
cctcgaggccggccgggccggactgagaatcttcgaacactacgagaaatagctcaccatctcacctcaaccgaggaataacacatcaatcggcgcccgattagcgatccgggatcgcgatgccacactaatgttgcactagacaaccacatcaccaaggccagagaaaacgggaagctgtcgggcattgacttcactgccgcctgcagcagcccatgcgcgtgccatccacctcactcgttcgtaaaaaacgccaagaacctcactcacgtcaagtatcgctgaagagagacgtggcacgaagccgcacatggaatacaccgctgcctaccacgactatgctgatggcgaacttccactacgtcaacaacgataagacactcgagaccatcaagacccgccatcgaatgacgagctcctgacccacgatcgacaagaatgactgaagcactgctcctgcttctgcgtctgcctagaccgatcatctagatcagcggcaatcgccaataatgcacaacacgtatgtctcgaaaaaggtgccggtatcacatctgcctttgtgcgttt

SEQ ID NO: 145642 - DNA, 779 bp, Zea mays
  unsure (1)..(779): unsure at all n locations
  Clone ID: MRT4577_64337C.1
tcttcgcaaatgatggaagtggtgcatcgaagaaaatgaagcgtgatataagtgccatgcctcttaacgtgtcatcagctggaagtgttgacgatagcttcaagcaaacatttagtgtagatacccctgatctacagtcaaccgcaacctcgcgtgccaagcggcgaaaaattgaggtaaatcatgctctcttggaggagattgaggagataaaccaagggctcatagatacggcgctccgtgtatgcgaggatgatgatgagtcacccgctgccacatctgaagggacagtcatcaaatgcacatatactgctgtggctgttagtccgagcttgaagtccatgttggcgtctgcacagacgagtccgattatgccgctgaggttgcttgtccctgctggctaccctaaatgctccccggtgctcctcgacaagtttctggacgaacaaagaaactcggacgacctgtctagcaaaacgaagtcaaaatttggcgtattgctgcggggcctagaggagcccatgtcactgcgagaaatcgcaaggacgtgggatgcttgcgcgcgcggagccattgcggagtatgcccagaagagtggtggaggaagcttcagttcgagttatggtcgctgggagacctgtgtagtgtaggtgcttgatccgtctattatggtttgtccttgaattatgtataaattatatatgtcccggctacaggcatgaacatgctcagacggcaactttcaccanaataaaaaaatgatgacctaatcaaaataa

SEQ ID NO: 145643 - DNA, 295 bp, Zea mays
  unsure (1)..(295): unsure at all n locations
  Clone ID: MRT4577_64338C.1
aaacaacgacgcccaacaccnnaagaaaggcaagcaagacaaggccaaactgaaatggaacaacccgtaaaaagccacggcgctggaaaaaatgcctccaaaaaacccctcggggcagaaaaaaaaagaaaaaaccttcggttccaaaccacacagtttttaagggctgcacccacatcaagaggcccccgattttaaaactggccaaaaaaactcctagctgggccttcccgacaacacaaactctttcaaccacttgacaaaccccctaaagtaacgcgagcaattattgttg

SEQ ID NO: 145644 - DNA, 108 bp, Zea mays
  Clone ID: MRT4577_64339C.1
caactgactctcaatgtaacatcgcattcacctcgtctgaactaacggttactctcatactaacctatacacttatcagcgccctatcacccattggtttaaatttat

SEQ ID NO: 145645 - DNA, 493 bp, Zea mays
  Clone ID: MRT4577_6433C.1
cgggccccctctcgagttttttttttttttttttttttttttttttttttttttttttttttttttttttttttttttttttttttttttttttttggcaaaaaaacccacggttaaaatggtttataaaaaaaaaaacataaaaaggttacaacccccccaaaaaaaacgatgcctgggccctaaaagggagattggggttgttccccttaaaagttaaacaccaaggccccttgcttttgcccaaaagaaacacatgttaatcctaactttacagttatagaaaaggttgtttccccccctattttttagagcccaaacagccaaattttggggtaaacccttaaaaaacagggggcccatccttttaaaaaaaaagtcccataagggtaagtttaaagcctttttttggggtttttttcttgaaaaagaatttccgggggccccctgtttttttaaaggggcctaaatttttttttccttcccctttttt

SEQ ID NO: 145646 - DNA, 739 bp, Zea mays
  unsure (1)..(739): unsure at all n locations
  Clone ID: MRT4577_64340C.1
cgggaaaacccggcgacggggatcctgcactcttgggttcttgcatcccgcataccctcgaaagctcgaaagatcccgcggcggcagcagccacccttctctcctctccgctcccaatcttatcgtcgcctccctcgaagtcgccgctgccttcattccaccatggcgcttcacgccccggtccccgtgatggctggagagatgctacacgttgcacaggcattcattgacaagaactaccatcctactgttatttgtcgagcatacaccaaagcacttgatgatgctattgctgtacttgacaaaattgcaatgcctgttgatgtgaatgatcgtggggcagtgctaggccttgtgaagagctccattggtacaaaattcactggccagtttggtgatcttattgctgaccttgctattgatgctacaacaacagcaggcgttgaccttggtcagggtatgcgtgaagttgatatcaagaaatacattaaagttgaaaaggttcctggtggtcagttagaggattctagagtccttaaaggagttatgatcaataaggatgttgtgactnctggaaanatgaggagaaagatagttaacccccgtatcatcctgttggactgccctgttgagtataagaaaggagaaaatcagaccaacgctgagttgatgaaggaagaagattggtaagagatgtccatgtaccacaatgatcttgctgtacatgcatagttttaga

SEQ ID NO: 145647 - DNA, 733 bp, Zea mays
  Clone ID: MRT4577_64341C.1
cctcgaggccggccgggccgggcctctcacccgcagccgcagtcccactcccacgcgcattccgccgcgcggctcccgagagagagagagatggccaggcacgccaagacggactccgacgtgacgagcctggcggcgtccacgccgccgcggtccccgcgcggccgcccggcctactacgtgctcagccccgccgcctcccacccggacgtccacctgggcgcctccggcggcgtggcggggaccaccccggcggagtcgccgctccactaccacttccaccaccaccgccaccactcgagcggcggcgccggtgtcggcgtgggcggcacgcaccactcccgggagtcctcgacggggcggctgctcttctccgaccagctccgctccggcggcgacgtcgccgcggtggtgagcgtcccctggcgccggctcgggaacggcagcggcgcgggcagcgtcggggacgaggacgacgacggcgcgtccctgcgcggcgggtcgttcgcggagtcgccgtggcggtgctacgcgctcggcgcggtcgcgttcgtcgccgtgttcgccttcttcctgatcgtgctgtggggcgccagcaggtcgtacaagccccacgtcgtcgtcaagagcgtggtgttcgagtcgtaccacatccagggcggcacggaccggacgggcgtccctacgaagatgatgtcggtcaacgcgacggtgcggctgcgcttccgcaacc

SEQ ID NO: 145648 - DNA, 2950 bp, Zea mays
  unsure (1)..(2950): unsure at all n locations
  Clone ID: MRT4577_64342C.1
cggaaaaaaaaaaaaaaaaaaaaaaaaaactgacaacaacagtgattgcttaaagcttgtgagagcagtttataggtgaacaggccctgaggacgctccaagaattctgatgtntggaaccaaagagcttggccttgttcangaggttaagaaagatanggtgagaggaagtctctttttttccttanntattggttgacnngtgtaaaagactcccccaaggcangtgtacttggggttctttgtgtgagggggnacgcaagcanannggatgtatnnntgaattgaagnnnttgagaagaaaanncctgnncagagatcgccattgtcnncgttgcaaggggaanctattttgnnaaaaatcacaaaacttccnnttctctggagggtggcngnnctacagaaagctgacttggttatcagcnnaacacttgannagcaaaaagagtttctttttcagttgnnaaggtgnntggaannaagtggcncnnctatagaanngctgcntgcntnnttagcatnnnttgaggnnggaaagatcccgcggcgcacagccacccttctctcctctccgctcccaatctttgtcgtcgcctccctcgaagtcgccgctgccttcattccaccatggcgcttcacgccccggtcctcgtgatgaaggactcgcggaagcgggagtctggcccgagcgggcacacagcccacatccgcccggccaaagctgctttgtctcagctccggtaaccctactcccggcgacggggatcctgcactcttgggttcttgcatcccgcataccctcgaaagctcgaaagatcccgcggcgcagcagccacccttctctcctctccgctcccaatcttatcgtcgcctccctcgaagtcgccgctgccttcattccaccatggcgcttcacgccccggtccacgtgatgaaggactcgctgaagcgggagtctggcgcgaaggttcaccaagccaacatccaggcggccaaggctgttgctgacatcattcgcacgacattgggtcccagatccatgctgaaaatgcttctggacgctggtggaggtattgtggttactaatgatggtaattctattttgagggaaatagacatcgcacaccctgctgccaagtctatgattgaactaagtcgtacacaagatgaagaagttggtgatggcactacatctgtcattgttctagctggagagatgctacacgttgcacaggcattcattgacaagaactaccatcctactgttatttgtcgagcatacaccaaagcgcttgatgatgctattgctgtacttgacaaaattgcaatgcctgttgatgtgaatgatcgcggggcaatgctaggcctcgtgaagagctccattggtacaaaattcactggccagtttggtgatcttattgctgaccttgctattgatgctacaacaacagcaggcgttgaccttggtcagggtatgcgtgaagttgatatcaagaaatacattaaagttgaaaaggttcctggtggtcagttagaggattctagagtccttaaaggagttatgatcaataaggatgtcgtggctcctgggaaaatgaggagaaagatagtaaacccccgtatcatcctgttggactgccctgttgagtataagaaaggagaaaatcagaccaacgctgagttgatgaaggaagaagattggcaggttctgttagagatggaggaagaatatataaagaacctgtgcggtcaaattctaaaattcaagcctgatttagttataacagagaaagggctcagtgatctcgctatccattatttgagcaaggctggtgttactgcaatccgtagacttaggaaaactgacaacaacaggattgctaaagcttgtggggcagttatagtgaacaggcctgaggagctccaagaatctgatgtgggaacaggagctggcctgtttgaggtcaagaagataggtgatgagttctttgcctttattgttgactgtaaagatcccaaggcatgtactgttctgttgaggggagcaagcaaggatgtattgaatgaagttgagagaaacctgcaggatgccatgtccgttgcaaggaacattttgaaaaatccaaaactccttcctggaggtggcgctacagagctgactgtatcagcaacactgaagcaaaagagttcttcagttgaaggcgtggaaaagtggccctatgaagctgctgctctagcatttgaggcaattccaaggactttggcccaaaattgcggtttgaatgttattaggataatgacacaacttcagggaaagcatgctaatggtgaaaatgcgtgggttggcattgatggaaggagtggcgatattgttgatatgaaagagcgaaagatctgggattcctacagcgttaaagcgcagacgttcaagacagcgattgaggctgcttgcatgcttttgagaatagatgacattgtcagcggtatcaagaagaagcaggctcctggagcctcagctcccaagcaaccccaaattgaaactgagggtgatgccgacaatgagcagatgatcccagagtagaggctgtgaccaacctgcactgtcaaagttatttactagtgccggaatagcactttgaatagagttcattttatttgagtgttggtggttagccttaggttttatatatagtttgatacactcgtccgagggttttttttgtagtgtggttgctgcgcattttgctttggactgatggacgaactttgcctgttgtatgccgtaaatctacctaatacatggtaatgctgttgtttcccatgaaaaaaaaaaaaaaaaaaaaaaaaaaaaaaaaaaaaaaaaaaaaaaaaaaaaaaaaaaataaaacggtaccagaatacaaaaaccataactcattctatattgacacattaaaatccaattcactgg

SEQ ID NO: 145649 - DNA, 2606 bp, Zea mays
  Clone ID: MRT4577_64343C.1
tgggctcctcgtcgccggcggggccggccgggctggaccacacacaaaccgccgccgccgctaccttcaccactgcggactgcaccagctgcccgccgactactccgtttctcttcctagtacattgccgcgtcgaaggcgaggtcctcagcagcgccggcggactccgctcgcacgccatactcagcctactccgtcttcccctgtctagcagacaccctcttcccctctccactcccaatcttatcgtcgcctccctcgacgtcgctgctgcctccacttcaccatggcgcttcacgccccggtcctcgttctgaaggactcgctgaagcgggagtctggcgcgaaggttcaccaagccaacatccaggcggccaaggctgtcgctgacatcatacgcactacattgggtcccagatccatgctgaaaatgcttctggatgctagtggaggtattgtggttactaatgatggtaatgccattttgagggaaatagacattgcacaccctgctgccaagtctatgatcgaactaagtcgtacacaggatgaagaaggggaatgcttctggatgctagtggaggtattgtggtgatggtaatgccattttgagggaaatagacattgcacaccctgctgccaagtctatgatcgaactaagtcgtacacaggatgaagaagttggtgatggcactacatttgtcattgttctagctggagagatgctacatgttgcacaggcattcatcgacaagaactaccatccaactgttatttgccgagcatataccaaagcgcttgatgatgctattgctgtacttgacaaaattgcaatggctgttgatgtgaatgatcgtggggcaatgctaggccttgtgaagagctccattggtacgaaattcactggccagtttggtgaccttattgctgaccttgctattgatgctactacaacagcaggtgttgaccttggtcagggtatgcgtgaagttgatatcaagaaatacattaaagttgaaaaggttcctggtggtcagttggaggattctagagtccttaaaggagttatgatcaataaggatgtcgtggctcctgggaaaatgaggagaaagatagtaaacccccgtatcatcctgttggactgccctgttgagtataagaaaggagaaaatcagaccaacgctgagttgatgaaggaagaagattggcaggttctgttagagatggaggaagaatacataaagaacctgtgcggtcaaattctaaaattcaagcctgatttagtcataactgagaaagggctcagtgatctcgctatccattatttgagcaaggctggggttagtgcaatccgtagacttaggaaaactgacaacaacaggattgctaaagcttgtggagcagttatagtgaacaggcctgaggagctccaagaatctgatgtgggaacaagagctggcctgtttgaggtcaagaagataggtgatgaattctttgcctttattgttgactgtaaagatcccaaggcatgtactgttctgttgaggggagcaagcaaggatgtattgaatgaagttgagagaaacctgcaggatgccatgtccgttgcaaggaacattttgaaaaatccaaaactccttcctggaggtggcgctacagagctgactgtatcagcaacactgaagcaaaagagttcttcagttgaaggtgtggaaaagtggccctatgaagctgctgctctagcatttgaggcaattccaaggactttggcccaaaattgcggtttgaatgttattaggataatgacacaacttcaaggaaagcatgctaatggtgaaaatgcgtgggttggcattgatggaaggactggtgatattgtcgatatgaaagagcgaaagatctgggattcctacagtgttaaagcacaaacgttcaagacagcaattgaggctgcttgcatgcttttgagaatcgatgacattgtcagcggtatcaagaagaagcaggctcctggagcctcagctccaaagcaaccccaaattgaaactgagggcgatgctgacaatgagcagatgattccagagtagaggctgtggcgaacctgcactggcaaagttatttactagtgtcaaggtagcacttcgagcagagttcattttggtggttagccttagcttaaagatgcaccttgttttatatagtttgatgagtggtacgagggttttgggatccaggttttgagtgtggttgctgctcgttttgatttggactgatgaaaaagcagtgaaactagcctttatttatggctaactttgcctgttgtatgccgcaaatctactttttttcttggcaacgtctcgtttcgcacgatccaaaaaaaaaaaaaaaaaatttgccccctgcgaggaccggaactctcccctctgggcaacaccccccggccccccctttggggggtttgggccgaaccccctctgggggggattttttggagtttttccccacttgggggggttttgaaacgtccctaaaggggcccctttcccccctattgggcggctttaaaagtaaatggccgctttttttacatcttttttaagtgaaaa

SEQ ID NO: 145650 - DNA, 368 bp, Zea mays
  unsure (1)..(368): unsure at all n locations
  Clone ID: MRT4577_64344C.1
ggcgcgctggcaaggaacacagacaaagtttttcgagtcgtacaccaagcactcggctaagtcgtatcataatgtctggcgaaacaagctctcgtaaaggcacgcgcatcagcatttggaccgatcaagatctacttcccaccacaaccggatatggctgtggtagaacttccagtcatattcatgagctagactttctaaatcctgccctaacagtaatctatgacacaggaagaagggcacacagcacaacccaccgaatattgngatgctgatggccatgatgaatatgataaacgggtgaatactgacatgatacctgtgcacgatccgattgcctccaaaaagccttcggttgtaataccaaa

SEQ ID NO: 145651 - DNA, 209 bp, Zea mays
  Clone ID: MRT4577_64345C.1
gaagcccccaagggaggggcgcaatttttgggttccaccgtgacaagcttcctgctccgattttttacgggcgggcaggacaaaaacaactttgacaaacaaaaacgtgggtgtaataaacgctaacaccggagaacgcgatgacctttcagactcgtggtcacaagaataacaaacatgagaggaccccaagaaagagcaaactgggc

SEQ ID NO: 145652 - DNA, 232 bp, Zea mays
  Clone ID: MRT4577_64346C.1
ggccactcgtcgtccggtgcgtgcgtgcgtgcttgtgattttgggatcctcacctccctgcctaatttggtgcgtgctgtcatttggtaaacgaagaggtacgtagagttttcggtaggatcgcatcggatcggagttcattcgcccatggcaggccacactgtggcagtgtgaaacgtgtgcgcggatgaccttgtgctgtgggcgagtcaatggctggccgatgcatgga

SEQ ID NO: 145653 - DNA, 359 bp, Zea mays
  Clone ID: MRT4577_64347C.1
gtaacaccctaaggtgagtcgtattaaaccacaggtgccgccacaggcagtaggagtcaccgagtagagctcatcatcaatcaactacaccgtggcgctgatcaagaacacctcggactcaccacaagggcgagcgcgacactaggctaccttcatgagccgacgtctacatcggtacccgacactaccaccagaggtcgacagcacatccatcacagtcgactccagctaggacccgctcaaccacgcagagcgtgagctcggcaatgacaacggcatcgagggcaccggagtcatcgtagacatgccccagccccggcaagcacatccacgtcggcgcgaacaacgtgatcatcaac

SEQ ID NO: 145654 - DNA, 540 bp, Zea mays
  Clone ID: MRT4577_64348C.1
cctcgaggcctgccgggtttctcagcggcgccagggcggggcagtacgacctgctggccgacctgccggggtaccccgacaacgtgaggcgggacggcaagggtggctactgggtggcgctgaaccaggagaagcaacggctggacgcgacgccggcgacggctcccgtgaagcacctggtgggcgtccgcctgaacgctgacggggaggaggtcgaggagctcacggcggccaagggcgtcacgctgagcgacgtggcggagatgaagggcaagctctggttaggctccgtggagctcgagtatgtcggcttggttgcatgagctgctgcgtctgagtaccagcattagttagctatgatgttaattaggaacttaggattaggaattgcattagtaaatttaggaacttaggtttaggaattgcattagtaaatttaggaacttaagattaggaattgcatgataattttaaacattaagaactaatttgaagattgtttttttattgtgtaaatttatactttggttttttttcttt

SEQ ID NO: 145655 - DNA, 336 bp, Zea mays
  Clone ID: MRT4577_6434C.1
aaagctccaatttaacccacttttattcagatccattcaatgtaacgaccaacacaggagggggggggcggaatgccagggtcttgccctgggggggggtggggtaactgggatccgagtttacccggtttatacacaaaacacaccaaatggctcttgcagtgcagtgctgccctggccccacaattatgactcatgagccctagatgagatctcagcatgagcgttcactgctgggggggagtgccaggggggggcgacacggtaacttggctagcagtgtcatatagccccccaaaatggccttggcgaacaagaacattccggtgccggtgt

SEQ ID NO: 145656 - DNA, 304 bp, Zea mays
  Clone ID: MRT4577_64350C.1
ctctttttgtagtgtcaagaaagtagaaaatatttttagtttgttgtagatggcaagcaaaacatcggcctgttgatccatctttttgccttgagtaatagttagttgtatgtatcatacttgatgatttccaatggaatgcaataaccaaatatcttctgttcttcattcttgttgttaataacgattagatagtgattttctgaggtagtttgttcatcatgtctctctcgttttcaatgtcatgccttgtagagaaaagaagctacaagacgacggaaacctgaagaacattatcttggaa

SEQ ID NO: 145657 - DNA, 466 bp, Zea mays
  Clone ID: MRT4577_64351C.1
acctacaatccacccactcctcccccgatcccctctcaccttcttcctcccacgcccgagccccccgatccaccaacccaccgtcgcgtccccaggccggcgacctcccaccgccacgccaccttcctcccctgcacctccgcgccacctccacccctctgcgccaccgcaccacctcgaaccgcctaccctccccgccccacctgcccccgcgcaggtcagtcaccggattcgcccatcgcagtcctccacagcggcgcccccgccgctggatacgacgcgcgccgacgagaagtgtccgatcccacgctcgcgagagggcttaggcctcctcccctacagctcccctgtcttgtcgtccctgctacctccccttcccacaccttcatattcttttcttcctggcgacgctcgtttcgatcaggtccgagggatgtgagtagtccgttctcttcctccttctccg

SEQ ID NO: 145658 - DNA, 1547 bp, Zea mays
  Clone ID: MRT4577_64352C.1
ccaagcctcagcccctctccccgctcgtgtctccaagccgcaacggcgcagctcctcttcttggacgccgaaaccgggcaccgtcgtagcccctgtctccgctcgtctccgggaccctgcttggccctctccggcgaacctctgtgcccctgctccgccgccagttcgacgccgcctgctccagatcgacgttgtcgtcctccgtcctttgtccgcctgctccagatcgacgacgcctgctccagatcaaatccggcctccgtcctctgtgcccctgccctgccgctcccagatcgacgccctaccgctccaggtcgagctgctgctccagatcgacgcccaactgctccagatcgagctgcttgtcccagatcgacgctaaggtaattagttcagtgctttcttttgtggtaatctgaacattgtgactggtaatttttttgtcaaagaagtagttgcaatttagaaggttggaagtctccaatttttctgtcactgaacagccaagaataattagttcaacctatcatgcatagatggataacatgccaaagaacaggaaaccaaatgctcaatgggatctcagtgctgctagaatttttaatgagatatgtgtggaataagtattgacaaataatagaccacaaggttgtttgaacaacaaagggtacgccaatcttgtagccaagtttaatgaatggtcaggcagaaattacacccgtgttcaaatgaaaacccgttgggatgcactgaaatctgactttacaacatggaaaacactactccttagtgtgtctgggttaggaagagatccaaggattggttctattacagctagtgacgaatggtgggaagaaaagatagaggtatgcaaccttggctttgtttctattgtatgaaatggttatgttgcttgttataactattagagttgttgtgtttcaggccatgccagcatgcaaaaagtttaggcttgcagcattggagaatgaagatcttgaaataatgtttaatggggtgtcctgcactaatgcatatgctatggctccaggggcaaaagaaggattgcctgccaatgatagtgatgatgtggaggaggtgtctccaagtgttgaggacaagcaagctagaaaaagaggtgttgatcacaaatccccaattaaaaaatcaaagaagaattttagagatatgcagttcaagcgttttgtggattcatttgtggaaaaagctagttcaagcaagtcttccgcaacatcttcgcctaatgatcatgttaggcaagagataacagaaatgatggaatcagttatctcagctgggatagttgaaggaagtgatgacatttctatgccactcaacttctcatcaagaaggagtatcgagatgtgtttctcacactaaagattccagaagggaagcttgcatggctcaagagaacttgggaggagaggaaaaaacataagctagttatatgtattcatgctgtatcttgaacttgattagtaatgctatttgttcatgttgtatcttgagcttgattaaaaaaa

SEQ ID NO: 145659 - DNA, 305 bp, Zea mays
  Clone ID: MRT4577_64353C.1
gcgatcgccaccacctcccgctctctcccgctccccttctcttctgcccgggaccaccgccgtcgccgtgccgtcttcctgccagttgtcgactccaagcgtcacgacgactacaaggaggccgggaaagggtgcagttcgtaaccacggagcgaggctaggactctggcgtataacggactattgatctggcagtggtgaacgactctagcattgggctgatggggagcgctgccactgtgagtggttgcaccaccgccatgggcttggagggctgccttcctgaaaaagcgtagtggttgaaa

SEQ ID NO: 145660 - DNA, 404 bp, Zea mays
  Clone ID: MRT4577_64354C.1
aattcggcacgagggatgtctactgtcttacattctaacctggccaccatctcccgacatggcgccaccgctcgtcagagtgtccattttcataccacgttggccgagccagcctctgctgaggctcacgcgcttcctctgtacggtcgccgttgcccgcatgaatggtctcttcccctcccaggcgtctctccacgcagccgtgaacgagataagctttcccaactgccttcccaagatgaagccacaaacagggggccagcgcgaagggtaccatccaaccctaccttgcgggcggccaatatcggctccgcgtaccgcaagttgctgccttcagtggcagccgtcgtgaattgctaggtcatggctgcccgtcgtccctagggtctccagcgctgccccgc

SEQ ID NO: 145661 - DNA, 726 bp, Zea mays
  Clone ID: MRT4577_64355C.1
gccggccgggccgggacgggagccacggagagcaaaggcagcacactcagctatccagcaaaagagatcgcgagaggcaggagtcatggccaccgtcagcgccgccgtggtgaccaccatcgttgcccgcgccgcgatcgccaggaccaatgctctaggtacgccggtagagtaccgcgccgtttcactttcacgctcgcatatgcatgcatatgtgctcactcgatcgctgtccgcagggctgcctgcgttgagggcgaggagcgagagggtgcggtgcagctacgccaaggatgccaagaacgcggccccagtcagcaccaagggcgcaggcgcgtcgctgctcgccgcagcgggcgcggtgaccgcgtcggcggggcccgcgctggcgctcgtggacgagcgcatgtccacggagggcaccgggctgagcctcgggctcagcaacaacctgctggggtggatcctcctgggggtcttcggcctcatctggtccctctacaccatctacacctctgacctcgacgaggacgaggagtccggtggcctctcgctctagatccaccctctcctgttaatgatctgaatgtaaacatggtggcggtcatcggtgtaaatttagacatggctatttgcatctaagatccatcctctcctgttaataatgtttggagactacgtacgcctgaagcaatgcaatagcaactttgcgagaaaaaagagaaa

SEQ ID NO: 145662 - DNA, 264 bp, Zea mays
  Clone ID: MRT4577_64356C.1
agaattgcaattatttcaacatttttccccagggttttttttaaattgggcatagcattttttttttacaatttaccgccacaggggacacaaagtttttgatattcaggggcgacaaattttttccacatttttattttttttttcaaccccggtccaagttttgacaaacaaacacgggaggaaaccccttgggattttttttaaccctagtttggggcttttgttttggccaaaattcccattttttttgggggggtttgg

SEQ ID NO: 145663 - DNA, 743 bp, Zea mays
  Clone ID: MRT4577_64357C.1
gtacccttcgagggccggggccggggagccacggagagcaaaggcagcacactcagctatccagcaaaagagatcgagaggcaggagtcatggccaccgtcagcgccgccgtggtgaccaccatcgttgcccgcgccgcgatcgccaggcccaatgctctaggtacttacgccggtagagtaccgcgccgtttcactttcacgctcgcatatgcacgcatatgtgctcactcgatcgctgtccgcagggctgcctgcgttgagggcgaggagcgagagggtgcggtgcagctacgccaaggatgccaagaacgcggccccagtcagcaccaagggcgcaggcgcgtcgctgctcgccgcagcgggcgcggtgaccgcgtcggcggggcccgcgctggcgctcgtggacgagcgcatgtccacggagggcaccgggctgagcctcgggctcagcaacaacctgctggggtggatcctcctgggggtcttcggcctcatctggtccctctacaccatctacacctctgacctcgacgaggacgaggagtccggtggcctctcgctctagatccacctcctctcctgttaatgatctgaatgtaaacatggtggcggtcatcggtgtaaatttagacatggctatttgcatctaagatccatcctctcctgttaataatgtttggagactacgtacgcctgaagcaatagcaactttgcgaaaaaaaaaaaaaaaaaaggccccta

SEQ ID NO: 145664 - DNA, 881 bp, Zea mays
  Clone ID: MRT4577_64358C.1
ccggccggtgctcgggaaaaaaaaaaaaagtgcggcgctcgaggccggccggcccgggagccacggagagcaaaggcagcacactcagctatccagcaaaagagatcgcgagaggcaggagtcatggccaccgtcagcgccgccgtggtgaccaccatcgttgcccgcgccgcgatcgccaggaccaatgctctagggctgcctgcgttgagggcgaggagcgagagggtgcggtgcagctacgccaaggatgccaagaacgcggccccagtcagcaccaagggcgcaggcgcgtcgctgctcgccgcagcgggcgcggtgaccgcgtcagcggggcccgcgctggcgctcgtggacgagcgcatgtccacggagggcaccgggctgagcctcgggctcagcaacaacctgctggggtggatcctcctgggggtcttcggcctcatctggtccctctacaccatctacacctctgacctcgacgaggacgaggagtccggtggcctctcgctctagatccaccctctcctgttaatgatctgaatgtaaacatggtggcggtcatcggtgtaaatttagacatggctatttgcatctaagatccatcctctcctgttaataatgtttggagactacgtacgcctgaagcaatagcaactttgcgagaaaacttgctgcacacagattttttaaatttttttagctttgaggctttgagtagagttgtgtgtgtggccagttgtcccactgctatccgttgctgctcaaagtcagcccaacgcagtcctgcaaatcccgcactggcaacactgcaccatcgctaggttcccgacagtggcagtggacaccaccacgacattcgtcattacacacgtctcatc

SEQ ID NO: 145665 - DNA, 719 bp, Zea mays
  Clone ID: MRT4577_64359C.1
ccggccgggaatttcgtgtattcgccttttttaaaaggaaacgccaccaaaaccggccggggagccacggagagcaaaggcagcacactcagctatccagcaaaagagatcgagaggcaggagtcatggccaccgtcagcgccgccgtggtgaccaccatcgttgcccgcgccgcgatcgccaggcccaatgctctagggctgcctgcgttgagggcgaggagcgagagggtgcggtgcagctacgccaaggatgccaagaacgcggccccagtcagcaccaagggcgcaggcgcgtcgctgctcgccgcagcgggcgcggtgaccgcgtcggcggggcccgcgctggcgctcgtggacgagcgcatgtccacggagggcaccgggctgagcctcgggctcagcaacaacctgctggggtggatcctcctgggggtcttcggcctcatctggtccctctacaccatctacacctctgacctcgacgaggacgaggagtccggtggcctctcgctctagatccacctcctctcctgttaatgatctgaatgtaaacatggtggcggtcatcggtgtaaatttagacatggctatttgcatctaagatccatcctctcctgttaataatgtttggagactacgtacgcctgaagcaatagcaactttgcgagaaaaaaaaaaaaaaaaaaagcaaaaaaaaagcggcctgcgggttcgagt

SEQ ID NO: 145666 - DNA, 630 bp, Zea mays
  unsure (1)..(630): unsure at all n locations
  Clone ID: MRT4577_6435C.1
ccgggnagaagagtattcaccatatcactgtcgtttagtctttagggcttgtttaagagggcttcattttaagaatttcagctttggtttttcaatttcactataaacagcttcaataaattgccaagatgggttcgaggaatgtttggcttgtatatagacttcaaacttttataatacaattaattttaacttctgtaatacaaactttctttgttttccttgatgattagtgggctctagtgtcttggtgggctgttgggttggaacgccaacttattaaatgtcatgaaaacaaaaatatttgttttgtatacacaatcaatcacgagtgcgcaggaaggtgcaaagtgattactcgtgcttggccaagaaggtgccagagctgatgcgcgcctggctcgtgacactcttcccggagtcgttatccgcgcgccaccgtcgacttctccttgttgcctttctactgaacccaaccttccgtttgcaattcctggccgaccacttgcattgttgattgagtaacccctcccttcatccgccgaacaaaaaataaatcggatgcagtctagatgtaaacttatgccaaccacccaattagacgtgaggctgtagccgcgtgggtttgca

SEQ ID NO: 145667 - DNA, 715 bp, Zea mays
  Clone ID: MRT4577_64360C.1
ttgggaccctcgaggccggccgggcccctgcaattccccaacacagcgcaagggctagacgcccagaaccagacgagcacggacggacctccgcaggccgcatccctccacgtgcacgagttccgaggcgccccttcgatccgcccggcccggccctctccaccgcgcgcgcgcgtccgtcgctagcgtttggccgtctccctcttgagccccgagtacccccacgacgcggcaaggaacctcgccatgagggtccacccggctccgcggaagcgcaccatcgccgtgcagcgctgcgccacggcggcggcggcggcgggcgggcgcactcggcgggaagaagctgcgccgcctgccgcacatcttcgccaaggtgctggagctccccttcgcggccgacgcggacgtgtccgtcgaggaggacgcggcggcgctgcggttcgtcgccgcggccgtcgacggggtctcccccgatggcgcccgcgcgcacgccgtcgagatccacccgggggtcaccaaggtcgtcgtccggggcctctcccccgccgacggcggcggcggcgtcgacgacgacgatggggccgccgctttcgagctcgaccgctggcgcttccgcctcccgccctgcacgcgccctgccatggccacggccacctactcccagggcgagctcgtcgtcactgtccccaagggcgccggccccgacgacgcggcc

SEQ ID NO: 145668 - DNA, 1055 bp, Zea mays
  Clone ID: MRT4577_64361C.1
aattcggcacgagacagcatcccctgcgccggtcccggcctcgcggcgcgcgcgtccttctcctccacgtccacctacgagagcttcttccacatcgaggcgctcgactcctccgacaacatcgggcccggcaacggcaacgacaacgcgtccgccgcgggcagcaacgagttcctggacttcgagcccacgacgcggcctccggcggcgcagacgatgacgccgcagcagagcaggcagaagaaggccgagggcgccgccgcttacgacccgaagaggctcccgtcgtccatgttccggacgcggtcgacgaaccccgccgaatggagcgccacctccaacggatccctcttcagcatccagctcagcacctccacggacctcaccgcgcagtacgccgacttctactacgacgccgccgggttcccccggttacccaccctagggcgcgagcgcgacgcggctctggcgctgccgtccttgtcagaatcgtcgtcggagcgcacaggggggctgtgcatgaggcatgactgcgccagatgcagcagcagcagcaagacctggaagtccgtgaggttcgccgccaccgagagcgtctccggagagggcaagcactctgtagttgtctccaccacgatggcggttgcggtggaggaaacggagacggaggctccggcggcgtcggcgtcggcaaccaaggcccctgcagcagggtggtgcgagtccgggtgctgtttgggatcgtcgtcaccgacgatgtgctggcctcgctgctgcggatgccacgaatgtggctgccattgcaaatgctggttttgaatttggcgggaagggatggctgcgcgcctgttgtaaatcgaaatgaactttgattgttttgtgctgatgtacagggtgtgctatgtaaatgtatgagtaggcattattagaagattgcacacttttaagattttattaatttctaaagcaatcaatgtataaataatgaataaaccatacattgtaaataagaagcaatacacatagctgattaaatttaaaaaaaaaaaaaaaaa

SEQ ID NO: 145669 - DNA, 846 bp, Zea mays
  Clone ID: MRT4577_64362C.1
gcaggagtcatggccgatttgcagccccccgggtggggcagcacacggggctttccccttttttaaaaggaatcgccaccgactggcgcacgggagccacggagagcaaaggcagcacactcagctatccagcaaaagagatcgagaggcaggagtcatggccaccgtcagcgccgccgtggtgaccaccatcgttgcccgcgccgcgatcgccaggcccaatgctctaggtacttacgccgggctgcctgcgctgagggcgaggagcgagagggtgcggtgcagctacgccaaggacgcggccccagtcagcaccaagggcgcaggcgcgtcgctgctcgccgcagcgggcgcggtgaccgcgtcggcggggcccgcgctggcgctcgtggacgagcgcatgtccacggagggcaccgggctgagcctcgggctcagcaacaacctgctggggtggatcctcctgggggtcttcggcctcatctggtccctctacaccatctacacctctgacctcgacgaggacgaggagtccggtggcctctcgctctagatccacctcctctcctgttaatgatctgaatgtaaacatggtggtggtcatcggtgtaaatttagacatggctatttgcatctaagatccatcctctcctgttaataatgtttggagactacgtacgcctgaagcaatagcaaagcaactttgcgagaaaacttgctgcacacaattttttttcgtaattcagttgttgcatctcagatggtaatgataatgacgagtacgtagaaccattccagcaaaaaaaaaaaaaaaaaaaaaaaaaaaaaaaaaaaaaaaaaaaaact

SEQ ID NO: 145670 - DNA, 279 bp, Zea mays
  Clone ID: MRT4577_64363C.1
gccggccggtccgggctgtagtcattgaagccttgagatgttgcaagtacaagttccctggtcaacaaaagatcatcatctccaagaggtggggtttcactcctttggaccgtgctgactatgtcgaagctcgttccaagggtctcgtcaagcccgatggttgttatgtcaagtttgtccctcaaaagggtagccttgccaactacttcaaggaagctgttaaggcttaaataaaattacgattttttttgcgaaaaaaaaaaaaaaaaaaggccccta

SEQ ID NO: 145671 - DNA, 275 bp, Zea mays
  Clone ID: MRT4577_64364C.1
gacctgcgaacaccagcgaggcaacgcgaacgaacgctacacacctagacactgcgagacgttcttctgatggatggaaaaatcagcatgacttgtgtctagcatttagcctgtgagacatgcactgatcaagagtgttgagttatatagcatctgcaaatccttttacctttgaatcgttactatggaaactcatactgatcttccagctgcttttgctatgcaattgagatcatatgatgcctgcactaatcatgtgttgtgtatgcagatgg

SEQ ID NO: 145672 - DNA, 220 bp, Zea mays
  Clone ID: MRT4577_64365C.1
tagacacccacggaccagccacggaccagcgggagcactagaggacccgcagggagggcgcagcggaagcaacagaagaaggcaagcgccccacgcaaggccccccacaagcaaccggcaagaggggaggcaagcaacgccacccaaccgaccaacgcgacatagaccgcgcgcacgagcacgaccgaaacgggcacaccggcacaaacccacacggagc

SEQ ID NO: 145673 - DNA, 337 bp, Zea mays
  Clone ID: MRT4577_64366C.1
aaaaccaggatatttttttttttttattgttttggcttttttttttggggggggggcccttttcctggctttaacaaaaaacggaaggggcttacatcacttttattcggggggggcgggaaaatttttgaaaaggccccccccatggaaaattcccggggggggagcccaccaaactaaaacctggaaagcttgaactgcttcttgagcaaggggcgggggtcctctggggaccccttgggcccccccgttttgttcaaaggggcctttcaccccttcttgtacaggggtgggtacacattcccattgtacccccccaaaacaaaccccagaaggg

SEQ ID NO: 145674 - DNA, 416 bp, Zea mays
  Clone ID: MRT4577_64367C.1
atgcacaaacttggtaggggtttccagaatgcaatgatcattctgttccgtaactaacaaaataaaatttaatggtaaaatattcaaaatttgaataaatccatcagtagataaaaggaaatctggctaacaaacagaattccagctttactggcaaatctttgatgcaattcaagcttcttgtcaacctcaactaaagctttaagggctacaattcagaaaagtgtgctctagtcaggtaaaccaataagatttccatcctagtagtaaggacatattttggtttttttttctttggataaaaaaggtggcacactgtgtctgtgtgtgccttttcttatttgggcaagttgtcaggtcttgtgccactagtgaactaaaacaagaaatgggcaatgcatgccagcttttattct

SEQ ID NO: 145675 - DNA, 534 bp, Zea mays
  Clone ID: MRT4577_64368C.1
taaaaaaaaaaaaaaacaaaaaaaaaaaaaaaaaaaaaaaaaaaaaaaaaaaaaaaaaaaaaaaaaaaaaaaaaaaaaaaaaaaaaacaaaaaaaaaaaaaaaaaaaaaaaaaaaaatttttttactttaaccaaaaaaactttttggggaatttttccaaaatcccctaaaccggggggccgttgaaccttccttttagggggcccatttcgccttttagtgaggggggttccaaatttcccttggtccggggttttaaaatacaattgcatggaaaaacctttttccccccccaatttttgggaaaaaccttggactttccctttttaaaacgttttgaaaaaaaaacaactttccccaaaatgcctttttaaaaaaaaggcccccccctattgcttttaaaaacctttctcaaccctaatttaaaaagggagggccctttttcccccccataaaaccctttttttttggagtttccttaaagcgcgacctttaatttttccaccccttttttcccggcttttttggttttt

SEQ ID NO: 145676 - DNA, 445 bp, Zea mays
  Clone ID: MRT4577_64369C.1
catccgcaaggtggcggtgctactgctaacaagcacacacccgccaacgctaggggacagccccagttccgagtcacgtcaacatgtgcgagcatcctcgctgaccctcagggtcgctgaagcctaccctcatccaagcagctcccgccatcgattgagcctcttcccgcaaggttacctgttaccgcacagcccatgtacttgtactgagctatgcacataggaatgtatgttgtgcgtacctctacacacctagcacactggctattatcgactactacatctggagacgcacacttctacaatgaagataaaatagcccgtccgcaacgatcccacgagagagatctataaccgtgaagaatagcaccctaacgtggacactcatgacttccacactggcactgattgctacgccatagcccatcttcacaaacaatatgac

SEQ ID NO: 145677 - DNA, 353 bp, Zea mays
  unsure (1)..(353): unsure at all n locations
  Clone ID: MRT4577_6436C.1
cagaaacatttaagcngcaccnggcgcgcaggagacnagagcagcaggaggcganagaagcnncncannngaggggggagcnccaccaaagggggccgagaaagcccanagcccngnnnggagcccnnncccnaaanacannacnncncagagnagcaaganggccacagaaaanacggaggggggaggnncnnngaagganacnagnganganagnaagaaaanancnacngnggagncnggnaaagaacagcnancagaaaggaaagnaacnngaaaggcnggggggggccccncagacaaccgcaananagacgacancacnaagggnagaagnncaccgncgcggcagc

SEQ ID NO: 145678 - DNA, 138 bp, Zea mays
  Clone ID: MRT4577_64370C.1
gcgttcaccgcctctccacagtggcggatctaggttttttatacaggatgtaccgtaataaattttttatatgcaactgtatatacagttttatagtagatttgataaaaagtttgataaatagatataatgtttagc

SEQ ID NO: 145679 - DNA, 110 bp, Zea mays
  Clone ID: MRT4577_64371C.1
ccacgttcgtgcgcttcgtgagcacgccagaggtgctggagttgacgagcatctatgatttagagatgtcgcagctggaacgggctaggcagatatatgcgcagggaggt

SEQ ID NO: 145680 - DNA, 225 bp, Zea mays
  Clone ID: MRT4577_64372C.1
cttggtcttctcacctaagtctctcacttgaaacttctagcacttcaaatggacagagagcagtcagtgattctaatttgtggaaatgtattgaactagatgatatccgatttgaggtagctatggttacagcagatggtgggcctttgttggatgtaccacctccagagggtgttgtaagaattggtgttgctttccaacagttcaagtccaacacctcagttg

SEQ ID NO: 145681 - DNA, 254 bp, Zea mays
  unsure (1)..(254): unsure at all n locations
  Clone ID: MRT4577_64373C.1
ctctacagcgaccaggtagaaatcatttggtgtccagaaatgacgacaaggtcatccatgctcgttctcacgatgatctccttcctcctcacccttcctccggcctactcccaacaccaagtcttccgtgccaccatgacccgccacgaaccgaccatcaacttcactcgggccgcgcacaggtcncgcgaacggctttccatcctcgccacccggcttggcgcagctctgcagggagcgcgcagacccgctgc

SEQ ID NO: 145682 - DNA, 357 bp, Zea mays
  Clone ID: MRT4577_64374C.1
attcggctcgagcactgtcgcttgagagttttgatttgggtgctcatccataggatgatgatctgtaccgcatccagttggaaacactactacctaaaaaagcacgggtggcgcatgaaaactcagattatgcacaacataacagattcctgcgggaaataggtgagtatcaccagctaactttgcaagagcatatatgtgtagatggaggctttgaacaggtcaccaaggtgtaccataaataagtactacctggcactgagtagagcgtcaatcaagcatccactggacttacacggaaatgtgcttccaccggaacataatattgccctgtctgacaagcttgtacatatacac

SEQ ID NO: 145683 - DNA, 462 bp, Zea mays
  Clone ID: MRT4577_64375C.1
gggcccaaatcgaataaggttttattaaattcaagggctggggtttacatacccaaacccatgactctgaacagattacatgcctgacccggggatttaaaaaccaggaagccgcccccccctttttctgggggaaaaaaaggcaaacccttataaacaaagggtcaaatccaaaataaaacaaaaaaatggaaattcaacaagagacaatccctgggaaccgacaagaatttgcccggaatatgggtctaggaccggaaaacccaaggggcccaaatgagacaggggagatcagcgggcccccaaaacatgggggccatgcaggggcatgcttaattacccacccgaacgggtacaaaaggggaaccgggcggggcttacccacacatgtagcccttgggcacccacttgccacaatagttgacgagggcattgaacttggtagggacatcgaaaaccacc

SEQ ID NO: 145684 - DNA, 268 bp, Zea mays
  Clone ID: MRT4577_64376C.1
tttttggtagataaactgcctttactttcttatcgcgctggtatatcatgcttttcgtgcacagctccgccaccactacgcatagcacctagggactcactaccatatcctgctatggtcctgacccatgtacctcactgcatgtccacagggagatgctacctactatacaccggcggaacatgcccagctatgcacccacgcacgtgtgtgtatggggatagctcggtctggttgactctgtgacaccttccgagaacactgggga

SEQ ID NO: 145685 - DNA, 267 bp, Zea mays
  Clone ID: MRT4577_64377C.1
ctgcagcttcggcgacggtctcggttgcggcgccgagaagagcacggtggggatgctggtgcgcttcatcggggagaaggtgtggggcgcgtggaactgatcgggctgtcacctcctagctcgccggtccttgtaggttagaggagggagggaacgaaggaaggaaggaaggaaggtggagagacagacagccaacaaggaggcggagtgtctccgtcaatgtcggtagcagtagcaccgttttcctctcttcttgtagtctgatga

SEQ ID NO: 145686 - DNA, 558 bp, Zea mays
  Clone ID: MRT4577_64378C.1
cggccgggccgggaatttgaccgatcggctctcattacctgggtggagcctcctccttgccgggcggagccgaatcgacgaggaaaaggcgacggcatcccgccgcctgtcacaaggaatgctcgaaacaccgtgcactctatctcccgtacatccaccgacacgccacacctctactgctcataacctggtactccatgaagatctgctgactccacctaaccgctacatgaatttcaccacagaataatctctgttcaccatgataaactcctttctgaactacaagtactatgcgcgatgtgatgaataatgagacctctcttgccttgtatgcgtgcctgggagcaatccacgcctgcgctagatatccgtggaacgtcacaagctactatctcgagtctgccgcattgctcccagccatagtgtacttataccggctcaactactctgtatgggttgtgtaccgatacctgctttttcaggaaaagcggaaagaattggcgagagctatcgatgacatacatacaatgattgttgcgccatcgatgaataact

SEQ ID NO: 145687 - DNA, 401 bp, Zea mays
  Clone ID: MRT4577_64379C.1
tcccttgtggagttatccatcagggcacggcgacgccaccccgcgtcctcccggctccgatccgatgcttactcgccacccggagatggcgaccgctccccgcgtgctctgtctcctcggacggagagctcagccgtcgccgcgccatcccaggtgatagcaggaggcgaccacgcgcagaactacaagtgactgccgcggcggatctcggggagcaactgttgccgcgacatgatggcccttgcagaggatggttctcattaagaaggagggcctgtggctcctagatacacaaaatcttggtgtttctgacgccatgaaagtacagatcaatgagctaactctcaagctagaggctgataaatatgcgacagaacaggtacagccctactatgctcgat

SEQ ID NO: 145688 - DNA, 542 bp, Zea mays
  Clone ID: MRT4577_6437C.1
ataccccatcatcttagcaagccaatgcaaccgaagcctgtcttcgccgccgccgcctctgcgatccccgtgaggtcagcaaacatgtctaccgtgctccagatgcccgacccccggaacgtcccagggcttactccgcaagaatacggctgtgcgcgtcgactacaccaagtcagtgcgcggactgtatcaaagagaacgacgtcccgattgatttcatcttatcgtagtatgctgcgactacaatgacttctagaccatcctgctggaggatcgctccaggttcaaggacatctacatgaggatccgcgaacaaggacggcgggacagacagtagcagatctacgccattcgccaggccgtgcacaaggggcgtcgctcctactaccaaaattacgtcgacgatgccgatcataaggatcgtcagtgcctcttcccccggtacgaccgtactcttctaccaggcgaccccaggtcctgcacaactgacaagatcggtggctgctgaagccggagcagggtcctcaatgcctaccgtggag

SEQ ID NO: 145689 - DNA, 859 bp, Zea mays
  Clone ID: MRT4577_64380C.1
ttgatgttaaccctagtctacttgggcatatgccagtcaatgtgtggaagaagtgtgtcaataatatgcttcttgtgcttgatatactccagcagtatcctaacattgtagtagacacctcatttgagcctgatgagaatgaaactcaaaagggtgcagactacaatggaacaatacatgttgtcggtgacctggttgcattccttgagagactggactctgaatttttgaagaccttacagtgcacagatccgtacacaaaagattatgttcagaggctcagagaggaacccctgtttctggttgttgcacagaacgtccaagattatcttgaaagggttggaaacttcaaagctgctgccaaggttgcactgcgccgtgttgaactagtttactacaagccccaagaagtacgatgcaatgagaaaactcgcagagcagcctgaggactgtgtggatgatgatgatgcagaggctggtgatgaacataaagcagtagatgacaatagaggaccatcaccatttgttgtgattccagaggctgtgcacaggaagcctacttttccagaaagcggtagaactttgatggatggattgatgttcttaatttacaagtatggggatgaaaggaccaaagcccgtgcaatgctgtgtgacatatatcaccatgcgatctctgatgagttttcagtggctcgcgacttgcttttaatgagtcatttgcaagatggtattcagctcatggacatatcatcgcagattttattcaacagagtcatgggcccagttaggctgtgtgctttcagggctggtttgataaatgaagcccatggttgcttgactgagctctattctactg

SEQ ID NO: 145690 - DNA, 455 bp, Zea mays
  Clone ID: MRT4577_64381C.1
cgaagctcggaattcggctcttggtttttaaaccacaagttgttacccgagggacaagcacggaccagggtccctttaaacgagatgtcgcgcggaaccgctcgacgcttcacataaacagggtgtgtgccctgactgaaggcggagagttcagttcgtcaccgtgccgcttggcggggcccggtcaccgaccaacagcgccttgcagcagtcgatgcagaactcggtctagcctatttaggcctcacaaagatagcagcatccttgctgcacccatggaaagaggcaggggacgagctcgagctcgagctctcgacgacacagtcctataaggtgagccacatcttggggatgggcccgcgggcgatgactcaggtgaagttccaaactagacagatactcctacacctaggtccttcggcttgccagccgcgccggcgaccgttgcacggggg

SEQ ID NO: 145691 - DNA, 510 bp, Zea mays
  Clone ID: MRT4577_64382C.1
gttttttttttttttttttttttttttttttttttttttttttttttttttttttttttttttttttttttttttttttttttttttttttgggaaaggggaccccttattcctggggggccccaccccacacccaaaaaaccggggggggggagacccacaaaaaacccacccaaaaaagggcccccccaaaaagggggtaggggaaaaaagcccccgggttacacaaaacaagggggacaaagggcaaaaaagggggccagggaaaaaagggggcgggggtaaccacaaaccgcggggaaaacggaaccaaatggggtggggccaaaaaaaaaacggggcctccagtacccacccgcccaaaagggaaaaaaaatcgcgggggaaaataaccaaagggggtcaacgcggccaaaagggtatatggaaaaaattggcgctccctaaaaggccaaaacccacccggcaaaaagggaaaaaaaggggttgctgcaaaaaccaacaggggtc

SEQ ID NO: 145692 - DNA, 3137 bp, Zea mays
  Clone ID: MRT4577_64383C.1
ccggccgggccgtgtggccaaaacaccagctcagaagcttgaaatcctcttccatgtgatttctgcgcagtttgatgttaaccctagtctacttgggcatatgccagtcaatgtgtggaagaagtgtgtcaataatatgcttcttgtgcttgatatactccagcagtatcctaacattgtagtagacacctcatttgagcctgatgagaatgaaactcaaaagggtgcagactacaatggaacaatacatgttgtcggtgacctggttgcattccttgagagactggactctgaatttttgaagaccttacagtgcacagatccgtacacaaaagattatgttcagaggctcagagaggaacccctgtttctggttgtcgcacagaacgtccaagattatcttgaaagggttggaaacttcaaagctgctgccaaggttgcactgcgccgtgttgaactagtttactataagccccaagaagtgtatgatgcaatgagaaaacttgcagagcagcctgaagactgtgtggatgatgatgatgcagaggctggtgatgaacattctgagtctacagcatctaggggaaagaaaggtactggaaggatcgagcgtgttgagcagttaacatttctgacccgggtggccaatccgccagctcagaatcgtgaagccttattcaatttgacttctgggttgatttcagcgacctctaatcgcagaggatattcaacagaatcatggcgcagggagggctgtaggctatctggccccggtccataaagtgcgccctgtgtcacaggacggatcaatccaggcctcgggaggtactcttccaggttgcagaaaaaatgtaggagatggcaaaggaaaacgagagttcataggagttaagaattggtggtactcttgaggggcctccgcataggcgcaggggcgaggctcaggagtcacccaagcggcaggtgagctttgtcgcgtcacaggggcggctgggtggtggcaaccgttttggaaaggccggttgaggtgcagcctctggtctgcgtggtggactccagatgggcaggggcatgaatgtttcccgcggaggatacggtcgcaaaacatgattccagcaagcaagtgcacacatggtgaacctgaagagggttggtagggtgtctagtcgtagagaagtgagaaggtttttgaggcaagagcccttgccattctgacgagcttcctgttctaagccaggggctgtgcacaagaagtctatttttctagtgagcgttagatctttgctggatggattgatgtccttaatttacaagtatggtgatgaaaggaccaaagcccgtgcaatgctgtgtgacatatatcaccatgcgatctctgatgagttttcagtggctcgcgacttgcttttaatgagtcatttgcaagatggtattcagctcatggacatatcatcgcagattttattcaacagagtcatggcccagttagggctgtgtgctttcagggctggtttgataaatgaagcccatggttgcttgactgagctctattctactgggagggtgaaagaattgcttgcacaaggtgtgcaacaaagccgataccatgaaaaaactcccgaacaggaaagacttgagaggagaaggcaaatgccttaccatatgcatataaacctggagcttttggaagccacacacttgatctgtgcgatgctgattgaagtccccaatatggctgccagcacctatgacaagcggagacctatgagcaaaacattccgaaggcttcttgaagtgagtgaaaggcagacatttgttgggccgcccgagaatgtgagggaccatgtaatggctgccacaagagccctcaacaagggtgatcaccaaaaggctttcagtgtcataaattcgttggagatttggaagcttttgaggaacagagagcatgttcttgagatgttggagcttaagatcaaggaggaagctcttagaacctatctcttttcatactcgtcttcgtacgagtccttaagccttaaccagctcactaccatgtttgatctcagcgagcagcatgcccacagcattgttagcaagatgatgatgcatgaagagcttcatgctagctgggaccagccaacaaagtgcatcgtattccatagtgtggaccaaactaggcttcaggggctactcttccagatggcagataagctctcggtcctggtggagatcaatgagagggcatacgaggcaagaactggtggtactctcgagggggtacctcccaggcgcaggggcgagggtcaggataatatgggaaagtggcaggataactttgtctcgtcacaggggcggcagggtggtggcaacaggtttggatactccggcagaggtgcaatatctggtcaaagtggtggtggacaccagagggacaggggcaatcagggttaccgcgggggctatggtggcgtttcaaggtttcaggatgcaaggggtcgcaaccagtctattccatcaggcagaggtggtgatggtggtgcacgcatggtgaacctgaacaggattggtagagtttagaagtgataattttcagctcgagtaagcctgaaattctcctaaaagccaagttttgaatcactgctttttacatagtttcctgttctgggctgagccatccacctgtttcctacatttcgttgtagccttttaatttaaggggctaggaaattgaactaagagtttggtactgtgaactaagagtttggtactgtttcgtgggagtgtgacgatgtattcactccaatatttgatatctatctgtgacacttgctataaactgtaaaaaaccttgtgttatctctagatcattgggttattcgttttgattttttctattttttagaagtgataattttcagctcgagtaagcctgaaaatttcctaaaagccaaggtttgaaacactgctttttacataggtctctgctctgggcttagccattcacctgttacctacatttcgctgtaacctttctatttaaagggcttggaaattgaactcagagtttggtactggtttgcgagaatgtgacgaagtattcgatccatatttgatctctatctgtgacactagctatt

SEQ ID NO: 145693 - DNA, 495 bp, Zea mays
  Clone ID: MRT4577_64384C.1
ccggccgggattttcgggacggttttatccggaacattcgttcgcgccgtctgcgtccaccgtccgaactccgacgtggcgcgccctgcgccgcccgctcggcggcggcaacgctccggccagctcggcctcctcgacgctgttcgccgatggggacgacgacggtgaggtcgacgccggcggttgccgtccgtccatgcgtttgggatcctcagggtgagaatattgtgagaatattgtcattgacgagaggtccttttcgattctcactgttcgatttctttaatttctttctcttttccccctctcagtaaccatacaaaaacaaaatttcttttgtggattcttttaatttatagcacatcaaaacagtgctttatgagtccaaaagccatcaaagcagtggtttttgtggattcttttaatctataggatcattgacgatgtgtgtgtctaaaaagccacacaactaaaaaaaaaaaaaaaaaagcggcc

SEQ ID NO: 145694 - DNA, 438 bp, Zea mays
  Clone ID: MRT4577_64385C.1
ccacccacttattaaaaaccctcaaaagcaaaacaaaacccttttttaaggccaaaagggggtgggcaaccggggctagggtaaccccgggggtgggggccgggggaggagtccagcggccccacgggggcagggggaaaaaaaaggaagggcccgagggaaaaaaaaactatgcctgggggggtcaacaaagctctaaacgttttgacccaagcaacatcaacccaaaaatcaccagccccagtttgggccccagaaaccccgccttttgggttaacagagagagacatccccccgacccgggcggggttaattcccaacttggccgggaccacattccctctccaggggggaaaaaagcgaccaagggggattttcaagacttcccatttgtctgggggggggttgcccacaaaaccctcccacgagttgtttttt

SEQ ID NO: 145695 - DNA, 759 bp, Zea mays
  unsure (1)..(759): unsure at all n locations
  Clone ID: MRT4577_64386C.1
aggaccacaaaggctctctccctccccccacccacctactaaaatcccctctccgactccggcgattctgatctgcagatccctcgctcgctcgctccggccgctcgtccaccgccgggatttcgagtgctgagctgctccagcatccaaccgcaccgcctggaaactttcatgggtgtggagtgagatcgagagcggggaccgtgaattcctacgagggtcgccattcggcttgcgcgtctgcatgaactgtttcgtcaatctgggactcaactccaactccaaccactacgtcgcctgcctcctcatcttcctgctgcatttctccccgcagccgctgctgataaatcaccccaattccaattcaagtagaagtaatcgtcaagaaggacaatccaatctcagtagtagtaatcgttaagggggaaaaacagagctcaacaaatggcgaacaacaacagctcatacggtgaaaatgtcagtagaaaatcccacacgccttcagctattgttattggtggtgggtttgcaggcattgctgctgcaaatgcgctcaggaatgcgtccttcgaggtcgttcttctggaatcccgtgaccggataggtggccgagttcacactgactactcttttgggtttcctgttgatcttggngcatcttggcttcatggtgtttgtgaagaaaatcccctggcacgatcattggaagacttgggcttccactgtaccgcaccagtggagatgactctggcctttttg

SEQ ID NO: 145696 - DNA, 224 bp, Zea mays
  Clone ID: MRT4577_64387C.1
gcacgaggctggacatccaagaactgctgccttactcatatggatacaccgacatcaacccgtacggatacacggacctgaacttctactgaaacagggtttgagggattcagcgtccttcgaatgttgattcaatgcaagtgcaagtgcaagtgcaagtgcagttgatggaaagatccgaaatttgttgggccaaagcttcagcttctgatagatagcccggc

SEQ ID NO: 145697 - DNA, 307 bp, Zea mays
  unsure (1)..(307): unsure at all n locations
  Clone ID: MRT4577_64388C.1
gcctctcctcttttttttttttttgaagttcaacncacnacacagatggcactgaagaccagacttctgtgatgaagcatgacactagtaccacctctattctacgagtgacgctggcaccaatggctttattttcttacgtttgattactcttttgtttacttgcagtttctgcaattggacaatgtattgatgaccatgctgacctgtttcgtactaacactaacgcccacgattgcccagtctagctcactccccgaagtacttgtcgggcgacccaccatcagtaatcctttcataactggac

SEQ ID NO: 145698 - DNA, 141 bp, Zea mays
  Clone ID: MRT4577_64389C.1
agcctgagggggacagagaaaccgtagaatatcatacagaccacatagacgcgaagctacaagatggctaacacccagggccacacgatcacataaaaggaactctcccccacaaagcgaaccgggccattcaacaggcac

SEQ ID NO: 145699 - DNA, 329 bp, Zea mays
  Clone ID: MRT4577_6438C.1
acccacgcttacaaatctgttccctcctgacttatccaaaccctttcttccctttggtccccgatatagctaaagtgtgctttataaaccggcacgaggtccataacacctctagaaccttaacccacagttatgccatgtattatttactctacctgtcctttggggtctctatctccattttttgcccgaacctgtacatcccacaatgtattctttctatccttcctgtataacgattaacctaatttgttttgcaaaacatttcccccttttggtgctgaatactgctaaattgcctaactattaacctataattcttattaatt

SEQ ID NO: 145700 - DNA, 469 bp, Zea mays
  Clone ID: MRT4577_64390C.1
gtatccaccaatggtaacataaactaaagacagtttacttcatttagtaggattatgctacaaggtactagtatggagattatatggaacgttacaacgcacgtttgaaagactgacaaataggactccttgtagaatgttctcttaattacatgaccaaccctttttctcttgtgcaatttgggcgacctaagacggctgtcatgatgggcccgcacaattgttattacgtgtccttaaacacctgcttgccatacaccgaccatgattctggtgatttccctgggggacaggacgattaatatgtaagggtgatctcttagccggctgacttacgtgtcggctgggggcacatgtattcacatgtctttaaaccaggggaaagctttgcatgcatgagcaacttgaaacaaggtcacatggttgagctcatgttcgacggaggacagagcattcacgaacctccgga

SEQ ID NO: 145701 - DNA, 924 bp, Zea mays
  Clone ID: MRT4577_64391C.1
ccggccggggcgcgacggacacgctagcccgttaattccgtgccgcccttcgcctctttcaaattccacgccccctccattttcattccaaaccagcacgagcgcggggcgagcagtggctctggaaacgactagaatcaacggagatcagaggcgacactgctcttcccgatgcacgcgtgcttccatggcggcggtggcggcaacagcaggatcaccaagtccgtcggcttcatcgtcaagagcatgaaggccctgtccctcctaaaagtgaagacggcgggcgacggccatccgcacgcgccgcgtcgtcggcggcggcggcatcggaggcgctcccccgaggcagacgagctgcaggacaaggacgtcgcggcggcatcgtcgtccgcgtcctcgtccgccaagatcgcgccggcgcagccgcacgaagccgccgacggtgaccttcggagagaccgcctcccccaggacgaggagctgcggcggcaaggaggagctaaacacgggcactgcgacaagtgctgctcgccgttggaagacgacgacgaggaggccgccgcgggtacggcggacgcggcaggcgacggggagtgggcggcggagccggagcccggcgtgctgatgacgctgtggccgcgcggcgacggctccaactacctccgcaggatccggttcagcgaggagtacttcggcgacgcgtgggcggcgcagacctggtgggcggacaactgcgaccgcatcgtcgagctctacagcgtcgtcgtccagcccgaacacccctcgcaggacggcgacgacgatgacgacgacgacgatccggctgcgcccgtaactccgtgccagtccgaggacgacgagcaccaacggcaggtacacgatcatcctcgttcatctgattccccggccggcgtcgaggtaccc

SEQ ID NO: 145702 - DNA, 259 bp, Zea mays
  Clone ID: MRT4577_64392C.1
agcccataccctacttaacctttttttcccaaacctaacccaccgacacaggcgatgctcttgccaactttccttatcccaacccaagctccatatttcataataactcttctttctttcagcaacaacctccaatttctgtctccaatatctttttttatttctgatagcattattttcacacccatactttttactctccaaccttatttttttttatataccaaatctttttctttcatctaattttttttctttc

SEQ ID NO: 145703 - DNA, 386 bp, Zea mays
  Clone ID: MRT4577_64393C.1
gcgtcgttcttcgacccaaaccgtaaacagccgatgactagcccggtggttaccctatgcggcctcccaccctaactggttctcttcacaactgattactgggtcgatgttgacctctagactgcagcatatatcctggcctatttgctcgctgggaggccaattatgccacgacgaacacaggttgaacagctacataaaatttttaatttgtattgctccacaacagaataatattggaaaaagtctaatctacctcatgctacaatatttaatcctcagcaaccgtacagaaagcgaataacatatacttttaacgattttccacaatcaacacttacattgatctagacactacttgcaattgatccatcatatcgcttaac

SEQ ID NO: 145704 - DNA, 589 bp, Zea mays
  unsure (1)..(589): unsure at all n locations
  Clone ID: MRT4577_64394C.1
aattcggcacgaggggtttgcttgaccccgtcgccgcgtcggtcgtcggccaccatcgaagccacgcggcttcttccttctgcgtttctgcccctcctcgcacccgcactgcccgcccgttcgtccgtcgtcgtcttcgccgctccctcccggcctcccgggctggacgaaacgaaccctcgctcgccctccttataaccgaacggccgaacccagccaacccagccgtttctcttcgtacggcctctgccagccagtgtcctgctactagggaagcataccaactccccattcttctcttccgacgcgcggccgtacgccggggcgccgccgctcgtgttccgccaggagggcaagatcgagaacctcgtgcgatccgtctactccgaggttgatgagaaggatgtgaacctggatgctgcgttcagtgtgcatgctgggatcgcacataccaggtgggccacgcacggtgtgcctgctccaaggaacagccacccccaatcgtctggtgccggtgatgagttcttggttgtccacaatggcattatcaccaactatgangtcttgaaagagacactaactaggcacg

SEQ ID NO: 145705 - DNA, 110 bp, Zea mays
  Clone ID: MRT4577_64395C.1
ccaggtcggaaggagaagtgtatgtacccaagttcaatagcaacgatgtctatctgcatgtgtgaagtatatgacttggtaataaatatgaatccatgtacatatatata

SEQ ID NO: 145706 - DNA, 2542 bp, Zea mays
  Clone ID: MRT4577_64396C.1
ttccacggatccatggattggtttgcttgaccccgtcgccgcgtcggtcgtcgggcagcatcgaagccacgcggcttcttccttctgcgttccgcccctcctcttctccctcctcgcacccgcactgcccgcccgttcgtccgtcgtcgtcttcgccgctccctcccggcctcccgggctggacgaaacgaaccctcgctcgccctccttataaccgaacggccgaacccagccaacccagccgtttctcttcgtacggcctctgccagccagtgtcctgctactagggaagcataccaactccccattcttctcttcgccgcagccaggaaggaaggatgtgcgggatcttcgcctacctcaactacaacgtctcgcgggagcgccgctacatcctcgaggtcctcttcaacggcctccgccgcctcgagtaccgcggctacgactccgccgggatcgcgctcgatgccgaccgccaggtcccctcccccgctcccgcttcctcttccgacgcgcggccgtacgccggggcgccgccgctcgtgttccgccaggagggcaagatcgagaacctcgtgcgatccgtctactccgaggttgatgagaaggatgtgaacctggatgctgcgttcagtgtgcatgctgggatcgcacataccaggtgggccacgcacggtgtgcctgctccaaggaacagccacccccaatcgtctggtgccggtgatgagttcttggtcgtccacaatggcattatcaccaactatgaggtcttgaaagagacactaactaggcacggcttcacctttgagtctgatacagacacagaagtcatccctaagctagcaaagttcgtttttgataaatctcatgatgaacaaggtgatgtgacgtttagccaagttgttatggaagtcatgaggcagcttgaaggagcctacgcacttatctttaaaagcccgcactatcccaatgaattgattgcatgcaaacgaggcagccaactgatacttggtgtcaacgaattgagtggtcaacagaatgggaaatcatttcatgatgtcaaaaccttgacaacaaatggaaagcccaaagaattattcttctccagtgatctatgtgctattgtagagcatacgaagaactacttagctcttgaagataatgaaattgttcatattaaggatggtagtgtttcgatcctcaagtttgaccctcacaaagagaagccagcatctgtgcaacgagcattgtctgttcttgagatggaagttgagcaaataaagaaaggaagttatgatcacttcatgcaaaaagaaatccatgaacagccacattcgttgaaaacaacaatgaggggtagattgaaggatggtggggttgttctaggtggactgaaggaatatctcaagacaattaggcgctgtagaagggtggtatttattggttgtggaacaagttacaatgctgccttagctgcaagaccttttgtggaagaactgactggtattcctgtgactatggaggttgcaagtgacttgctggacagacaaggtcccatctacagagaagacactgcagtttttgttagtcaatctggggagacagcagataccctccttgctctagattatgcactagaaaatggagctctctgtgttggcataacaaatactgttggaagcacgctgtctagaaaaacacactgtggggttcatatcaatgctggttgtgagattggtgttgccagtacaaaggcatatacaagtcaaatagtagccatggcgatgatggcattggctattgggtccgatcagatatctactcaagctaggagggagagtatcatcagtggactgaacaacctttcaagcaatgtcagcgaagttctcaagctagatgctggaatgaaggagcttgcctcttcgctgatcgactcagagtcgctcctcgtgttcggaaggggttacaactacgccaccgcgctggagggcgccctgaaggtcaaggaggtggcgctgatgcacagcgagggcatgctcgctggcgagatgaagcacgggccgctggccctcgtggacgagaacctccccatcattgtcattgcgacccgcgacgcgtgcttcagcaagcagcagtcggtgatccaacagctcctctcgcgcagggggcgcctgatagtgatgtgctctaggggagatgccgcggctgtgtgccctagcggtgggtcgtgcagagtcattgaagttccacaggttgcagactgtctccagccagtgatcaacataattccattacagttgctcgcgtaccatctgactgttctccggggattcgacgtggaccaaccaaggaatctggcgaagagcgtgaccacgcagtagggagaggtagatgagatgtttgtattgtagttaattgtccttgctcttgaggtggctagtacgtagcataaatattatggtgcgttaaacttgttgttttgtgaacgaaatgtacctctctttttttaattatggtatattggtgtcaataaaaaaaacaa

SEQ ID NO: 145707 - DNA, 2809 bp, Zea mays
  unsure (1)..(2809): unsure at all n locations
  Clone ID: MRT4577_64397C.1
cgagcgatcctccccgccgatcgcgcccccgaccatggattggtttgcttgaccccgcgtcggtcgtcggccatcatcgaagccacgcggcttcttccttctgcgttctgcccctcctcgcacccgcactgcccgcccgttcgtccgtcgtcgtcttcgccgctccctcccggcctcccgggctggacgaaacgaaccctcgctcgccctccttataaccgaacggccgaacccagccaacccagccgtttctcttcgccgcagccaggaaggaaggatgtgcgggatcttcgcctacctcaactacaacgtctcgcgggagcgccgctacatcctcgaggtcctcttcaacggcctccgccgcctcgagtaccgcggctacgactccgccgggatcgcgctcgatgccgaccgccaggtcccctcccccgctcccgcttcctcttccgacgcgcggccgtacgccggggcgccgccgctcgtgttccgccaggagggcaagatcgagaacctcgtgcgatccgtctactccgaggttgatgagaaggatgtgaacctggatgctgcgttcagtgtgcatgctgggatcgcacataccaggtgggccacgcacggtgtgcctgctccaaggaacagccacccccaatcgtctggtgccggtgatgagttcttggtcgtccacaatggcattatcaccaactatgaggtcctgaaagagacactaactaggcacggcttcacctttgagtctgatacagacacagaagtcatccctaagctagcaaagttcgtttttgataaatctcatgatgaacaaggtgatgtgacgtttagccaagttgttatggaagtcatgaggcagcttgaaggagcctacgcacttatctttaaaagcccgcactatcccaatgaattgattgcatgcaaacgaggcagccaactgatacttggtgtcaacgaattgagtggtcaacagaatgggaaatcatttcatgatgtcaaaaccttgacaacaaatggaaagcccaaagaattattcttctccagtgatctatgtgctattgtagagcatacgaagaactacttagctcttgaagataatgaaattgttcatattaaggatggtagtgtttcgatcctcaagtttgaccctcacaaagagaagccagcatctgtgcaacgagcattgtctgttcttgagatggaagttgagcaaataaagaaaggaagttatgatcacttcatgcaaaaagaaatccatgaacagccacattcgttgaaaacaacaatgaggggtagattgaaggatggtggggttgttctaggtggactgaaggaatatctcaagacaattaggcgctgtagaagggtggtatttattggttgtggaacaagttacaatgctgccttagctgcaagaccttttgtggaagaactgactggtattcctgtgactatggaggttgcaagtgacttgctggacagacaaggtcccatctacagagaagacactgcagtttttgttagtcaatctggggagacagcagataccctccttgctctagattatgcactagaaaatggagctctctgtgttggcataacaaatactgttggaagcacgctgtctagaaaaacacactgtggtgttcatatcaatgctggttgtgagattggtgttgccagtacaaaggcttatacaagtcaaatagtagccatggcgatgatggcgttggctattgggtccgatcagatatctactcaagctaggagggacagtatcatcagtggactgaacaacctttcaagcaatgtcagcgaagttctcaagctagatgctggaatgaaggagctcgcctcttcgctgatcgactcagagtcgctcctcgtgttcggaaggggttacaactacgccaccgcgctggagggcgccctgaaggtcaaggaggtggcgctgatgcacagcgagggcatgctcgctggcgagatgaagcacgggccgctggccctcgtggacgagaacctccccatcattgtcattgcgacccgcgacgcgtgcttcagcaagcagcagtcggtgatccaacagctcctctcgcgcagggggcgcctgatagtgatgtgctctaggggagatgccgcggctgtgtgccctagcggtgggtcgtgcagagtcattgaagttccacaggttgcagactgtctccagccagtgatcaacataattccattacagttgctcgcgtaccatctgactgttctccggggattcgacgtggaccaaccaaggaatctggcgaagagcgtgaccacgcagtagggagaggtagatgagatgtttgtattgtagttaattgtccttgctcttgaggtggctagtacgtagcataaatattatggtgcgttaaacttgttgttttgtgaacgaaatgtacctctctttttttaattatggtatattggtgtcaataacaactcggtatccctgggaattctcatgtcagaaacttcagttttttcatgggagcgtgcccgatcaggaacttcagaaagcccccttttcgtgtatagtatttacataaacccgaggcccaagtcaaatcccttttaatgtgatatatgcaattttgtattacccagcataatattaaatggagccgatggtctatttagttgtattgttgctcggtaggactcgactcaaatatatgttagtatcagtccatatcgcctccgtgtaaatacaccacgcattaatttcgagaataaaaaaaaaaaaaannaaggacgaagcggcggcctactgacg

SEQ ID NO: 145708 - DNA, 155 bp, Zea mays
  Clone ID: MRT4577_64398C.1
aagcaaccaaccaacagattccactaattaaagggcacgcacctagttcctgttgctgcaagcccagctacagatggaccaccatggcggcctttacctgatagatagcgagtcactagcatagcaaggaggatttttaggcagtgacaagccct

SEQ ID NO: 145709 - DNA, 1961 bp, Zea mays
  Clone ID: MRT4577_64399C.1
cctttttaagcagtggtaacaacgcagattactttttttttttttttttttttttttttttagaatataatgcttgaataatgagctcaaaattatgattttgtcatcaaaagcttggaaatgcttgaaagagatatcctggttacagaagctaacgttgagtacagacagtaggcagagattcggattccaacgtgaatggaatagctttatttatctgttcgttattctgctattcaactcgcaaggagatttgggcggatggagtggagatcacttggtatactcgaggacggcatagaaggggtcgagatagatggctcggaaggcggtgaagcctgcggcgtcgacgccgaggtggcggaactcctcctcggagcgctccctcccctgcgtccggtaggtggtcatgacgaagatgtcgttctccagcagcgccctcgtcctggtgctgctgtccgtctcctccggcaccaccggctcgcaggccacgagcttgccgccgtccggcagagcggcgtggcagttcctcaggatggccgtgcactcgtcgtcggtccacgtcgtcagaacccacttcatgaaaatggcatcaccggaggggatggacttgaacatatctccgccaacatgcctcactccggcgatgggcggcgctgcggcgacgacgtcggggaggtcgaagttgatgccctcggtgattgtgttggggaccctgcgcatgatcatctcgaggcaggcgccggagcttcccccgacgtctacgagcgttgcgacgccgcgaaacccgccggcggcgccgtagccgtcgaggagggcacccatgaagggctcggatacccccgccatggcgcggagcatgacggttggcgtcctggtccttgccgtagtaggcgtaggcggtgaccccggcgttggcgcgcgcgaacggctcgggccccgcggggtcaagcacggcctcgtgcaggcggggccacgccgccagccagcgcgtcctggtggtgctgcagcacgtagtcggcgtaggacgcgcccgaggcgggccccggcaccagggtgcggcccaccgcggtgagcgcgaatagccgccgccgcgtggtgggcgtggactcggtggactcggagaaaacgccgcgggacgccagcaggcggagcagccgctccaggacggacgggtccgggtggcccggcgggaggaggtcggccgctgacatgggcgcgttggcgccgcccgcccacaccgcggccggcacgcccagccggatcacggccgccagcgccatcggcaccgacaccatgttcgccagctccatcatcgccagcctggcctccgccggggacatgtcgtccctcgcggcggcggcggcggcggtggcgccgtttgcggacggcggcggcattgcttttggtggtttggattgacggcacgccgcacgctacgggagggggatggcgtgcgcgcgcgcgtgttcagttcagtgtgtggtggagggagcgacaggacaggatttctactgcagtactgctacagcggcggacgggactcgtgtggatctcccggccggcctcgagcctttctgtctgctctagtgtgtgcctctaggcagttgtcggacctgctacaggtcgcgtgaaacaccgtcagcgccacagaatcgaaaccatccttggttcgcagtaagaactaacaaatctatttacaagtatttttataccaaacatttgaagagtgctcacacattgctacggtgttcaaataagttattgttcaaacatgtttaaacttatttatgataacattaaaactagagaaaacacaacttacttctataaccagttgggtaatagttatgcttcataattcagatatattaataaaggaaatgcaaagaatacacaaatcttggtgccatatatttacaaataaattatatatcattgtagcaaagcggacgcgtggg

SEQ ID NO: 145710 - DNA, 381 bp, Zea mays
  Clone ID: MRT4577_6439C.1
ggtgttggggttttttttggggggggttttttttttttttttttttttttggccccaaacccaagataataaattctttggtacaggccaattccaataaaccaccccggttaaaaccacaaaatccctgcctccctgggggcccactaatccataaacagccgcacatgggagggggggccctaacaattcggccgcacgatgcccgagcaggaacaacccagggggccccacaacaaaaacccaagaaagattgccttaacctttttcccataaaaattttatgggggccattttgccatgacaagagaataacaaaaatgccctcggcccgggattaaatacacctccccggtggggctgatcccctcccccttcctt

SEQ ID NO: 145711 - DNA, 526 bp, Zea mays
  Clone ID: MRT4577_643C.1
cccgggcgaaaaccccaaatctatcgcgaaataggcatcccaatgggggggggggtgaccatctaaaaaaaaaatctctctacaacggctcaaggtactgacggcggccttcactaatctgtcccaactctcctgaagccacaagggcactaaaactagctggcatgcatctctaggcgcatacttgtgccatcctaatggatgaactgctgtgcgggcgggggggggtgccaacactatataatgccacatgttgactggggcgatgctaacgtgaaactctgacaccatcgatcaactagagccaaggctacctgacgcgaggcatgctcacatcacaagctagacttatgaggtcaacatgatttcaactcactgaactactccttaacaacatgctgccaaggaaaaaccctgtccattcccaactaaagaaacttatgggacatacgtacttctcaacatggctaatgagagaccaggtccgaaccgatcggcctgccgatcaggtgcgcagcctctatgg

SEQ ID NO: 145712 - DNA, 230 bp, Zea mays
  unsure (1)..(230): unsure at all n locations
  Clone ID: MRT4577_64400C.1
cgggnttacaatatcccagcagaggcagaagagatggcgtccttggtccagcacgtcgcggggctcgcgtgcccaccactctccggcgcgtcgcgccgccccggggcgcctatgcggccgtccgcgctggtctgcgggacgtacgtgctgagcaaggatgagaaggagcgggagcggatgcgcacgctgttcaatgaggactccgagcgctgccgcacagaccccatgaa

SEQ ID NO: 145713 - DNA, 588 bp, Zea mays
  Clone ID: MRT4577_64401C.1
aaccacagctcctggctgggggtaacatgcgactcaagctcccgggtcgtcgctctggaggtgctctccccttcacggcgtttcggacccagccaggagcttgccggcgagcttcctgcggcggttgggctcctcaccgagttgaaagtggtctcttttccgctccacggcctccggggcaagatccccggtgagatctggcggttggaggatctcgaggtggtcaacctcgctgggaactctctccggggcgcccttcctgcctccttcccgccgcggctgagggtgctctcgctcgcttccaacctgcttcacggtgagatcccgtcttccctttccacctgcaaagacttggagaggttggatctttcaggcaaccggttcactggatcggtgccgagagcacttggcagcctgcctaatctgaagtggcttgacttgtctggaaaccttcttgtcggtggcatcccctctggtctggggaattgcaggctgctccgctcgctgcggttgttctccaattcattacacggttcaattccagcagggattggaaagctgaggaaactacaggtgttggacgtatca

SEQ ID NO: 145714 - DNA, 1278 bp, Zea mays
  unsure (1)..(1278): unsure at all n locations
  Clone ID: MRT4577_64402C.1
tcgaggccggccgggaaacataaaaaaaaaaaaaagccaagcgcactgtgttcttccctgcagggtcctgggctgggctggcgctggcgatggcgctagtattagggcgggaggaggagctcctggcgcagctccgcgcgctactgacgttcctaccacctcctgcgtcgcccccggcgccggcggctcccgttaaggtggagtccatcatgggcactagtggcggcggacgacgactggggagcaagagagaccgggacgacgacagcgaagccgaggccgagcagcacggcgacgaacctgcggctgcgcagcctcactattgtcctcatcctcctcctccctgcaaaaggacgaggaggaggaagaataagaagaagcggcagcagagcaagtgccttgtgacgacagtgcccgacttcgacgggtaccagtggaggaagtacgggcagaagcagatcgaaggtgccatgtaccccaggagttactacaggtgcatacagagcgccaagcaaggctgccaggcaaaacggacggtgcagcgcaacgacgacgacggcgccgccgcccccccagagtacacggtggtgtacgtggcggagcacacctgcacggccaacgacgacgcgctggaggccccgccggtcatcctggagaccactaccagcgtcgtcgtcgtccctgcacctgcagcacacaccgatcccgtcgtcgtcgtcgttccggcaactacgtcagccgccgccgccgccgcctccgcttgttccaccaccgtcaccacggggactgaatctccggcgatttccggcgacgacgacgtggcctgctggagcagcagcggcagtagcagcagcggttacagctacgccgacgactcctgctgctgctgctgctgtgacgggttgctcgccgctgtcgtccacggtggctgcggcagctcatgggcccccggaccggcggactcggtttcggtgccgtcgttccagttgcaggagatggaggacttgaccggaccgatccggtcgccggtgcacgttccccgcgcctggttggaccgttgacccgctagtccctgtgctgcatgcagctcgttgatgagaatgagatgagctacagagctagccgcttttgccacttgtaagctcgatctgctgctgcttcttcttcaactagttcgtctctgtagcttttagctttggtggtgatggacgtgcagtttgtctgtactgtgnataatggagtttgcctggggcaggngaaaaatcatggtagttttct

SEQ ID NO: 145715 - DNA, 277 bp, Zea mays
  unsure (1)..(277): unsure at all n locations
  Clone ID: MRT4577_64403C.1
accggaccacgcctgccccccccaggcgccgccgcccaaacacagaccgccgccgcgagacaagcccgccggcccacccgggccccgctcccgcacccgcaccggacagccgggcaggggacgcccaataccgcccgaaaccactcactcgaggaaggagcccgagggcgagccacgggancggaagcccggaacgaaagaggacacgacggccgcaccggcgacggcgagaagacacagcgcgcaccaccaccagacggggcaacaggagggccag

SEQ ID NO: 145716 - DNA, 178 bp, Zea mays
  Clone ID: MRT4577_64404C.1
ccatcgaacgcataccatcaatcgagagatttttatatatggactactctacataaaaacaataaacccacgacgttatcacgattaccccacttatacccacactaactaatcattttcacatcagcaatcattttatctttctcactatataatcaacaactactactcacaatca

SEQ ID NO: 145717 - DNA, 431 bp, Zea mays
  Clone ID: MRT4577_64405C.1
ggccgcttttttttttttttttttgctttttttttttttttttttttattttttttttgtttttttaatttttttttttttttttttttttaaaaaattgccgggctgacaaaccaagggcgatctttatgaccataaaggttttgggggaccggtgtccccccctaacaggttggttccaagggtttggggatctaagcctccttcacacaaacaaattgtgggaagaatcctccctctccaagaattattgattttttccatgagaaaggcaaaaactttaccagatccttattggaaaggaccgggaacacacactggctttcgttcgtcatcaaattaggaccttgaagcaccgcacagagccatattttttttcaaacaaaaggatttggagctggttttaccccaaaagccttccaccaccacca

SEQ ID NO: 145718 - DNA, 817 bp, Zea mays
  Clone ID: MRT4577_64406C.1
ggctttacgcccattttgggatatcattcgacaaaacttcgtaggtggttgtgtttctaaaggttcagagttgcaaatagagatggatgagtttctatggaaagatgttgagctggatggaagctttattattctagctgacaacgtcatgggttcaaccaagaatagcaaaaatggtgaacagatactgcactatggttccaggtgtgggagatgcagactgcaaagtgttaaaattgttaatgaagggatcaattggacttctcccaataatgtctattggaagcatgatgtagagagatcagaatctgtaaagattattcttcatggaaacgcagaatttgaggcaaaagatgtagtcttgaagggtaaccatgtatttgaagttcctgatggtcatagaatgtgcatcattcaggacagagcaggatttgttgttaaattggatcttatacgtgacgaattgatggacagtggaacctggcattggaagtatgcagttgatggtgtccatgtaaagttgaacatggtagaactataaggggtatcaactatagattcttgattcattgatttgtggccagcttaattttattgaggacacacttgacgttggttgactttagtctagattgtaggcgatgacatgttgtaaagataagggagctttgttttcgtacattaggtctgaactgttcccttcattgaagaggtgatgtactagaatatgtatttttcaaatatatggagaatgcttgttctccgaagttatcaaagaccattggtcttgtttgcttccaaaaaccccccccccccc

SEQ ID NO: 145719 - DNA, 232 bp, Zea mays
  Clone ID: MRT4577_64407C.1
gatcaaggggggtttataacagccatttttaggaattcagtgaggaaaggggggcacaaaggggattggaatgttctattgttcaaacccatttataaccccaccctccaaagctattacaaaaaggtgaacaccccttttcgggccaacccgtaccaataacacaacacttttggacctaagtttctctctccaaaaatagggattttccaaggtccacctggaaactttt

SEQ ID NO: 145720 - DNA, 319 bp, Zea mays
  Clone ID: MRT4577_64408C.1
atgttattgtttatactgacactgtcacccatggggatgcgtgacacatttttatttattcaaagaaaaaaaatgacttatcaagctaaactagcacaaaaagatatacaaaaggggcccccccactggagggggggacaaaaaccgcagcagggtatggaaaaagaggcgggtgaggggggcccaacatcgccctcagaaaagggggcacctgcgccgcccacaggcccgggaaaaaaccaaaaaacggggtggtgctaaaagagggactgggggaccaaccccaaaatcggctaaaaccggggctgcggctccacct

SEQ ID NO: 145721 - DNA, 179 bp, Zea mays
  Clone ID: MRT4577_6440C.1
gattttgataaaagagcatggtggatataagccgagcagctgataattattttagaacagttatggtggtaaatgaaaatggagccatgaggagctagttttttttttttacctgaactcctagtgtaaaatgaaaaaaaaaaaaaaaaaaaaaaaaaaaaaaaaaaataaaaaataag

SEQ ID NO: 145722 - DNA, 352 bp, Zea mays
  Clone ID: MRT4577_64411C.1
tcttttgcgtgcgcggacgcgtgggcacaagctcactatgtataaacgcaaattcgctgaaccggttatgcggttctgacgagccgggatgtactaactgcttgtacccgagagaggacacaggataggagacacaggctacatgcgctacttgggcgagggataggagtggatgttacagattgttcccgatctgtgctctgctgctggaaccgagagggctgctactgatggttgattgccagattgtatgcctgactcacagagcacggacgtgttctgtggcagtatttaaggacctgcccgatccacagttgtcattgtcgggtccatgcttgagcttgctgctatt

SEQ ID NO: 145723 - DNA, 141 bp, Zea mays
  Clone ID: MRT4577_64412C.1
cgcatagcgtacaaagatcaattcagctgttaaggaggatgttatttcagtggctaagaccgaatgacacatgctatgcttctgttttcagttctgttgactcatctgagcttggcagacagctgatccattggtcataaa

SEQ ID NO: 145724 - DNA, 141 bp, Zea mays
  Clone ID: MRT4577_64413C.1
attcggctcgagctcatgctccccgttttgtttcacacggaagccacgttcaacagggggggccatatcaacccgattggcgcattattaagcgagagcacaaacccctgggcacagccgtcctggatatctgcaacatgt

SEQ ID NO: 145725 - DNA, 703 bp, Zea mays
  unsure (1)..(703): unsure at all n locations
  Clone ID: MRT4577_64414C.1
agtctgactccgacacagatagcattcccgattctggatgcggttcataaggacgtggcccgctgagcgcgtccggacatacttgcctgcatcatgcagctaatagancaggtcactgcgacggcgcatggcacgctcgatagccaccggaagacccgccggagggctccctcggcacaacacacaaggcgtctatgctgtgagtgacacagagccatccctgggacatctgatgacacgctcactgctccgcaccagattgctcctgaagccaaacagaccaactccgctatccgcaattgagtcctggtgcttgtatgtgaagacagtccgaaaattgctgccctctacgtcgatgcaccgtgcgacgaactacatcgctgactctcatgaggtcctgatcgctggatgtgtgcgtcaagggatccactgtgtgcatatattcatagtgcgtattaatcaggcctgccaggtaaccggagagaatctgctggtgctttatttacagaatatggagaaccaataactgtagattgattcgtggtaccgtgtgcggcaagcgtggagttgaaacgccctagcgtcctatgattacaaataatggtcgcttgatatgtgtgcaatggattcctggaattgataacctaacattctgttgccgagaacgaattcttttccgatcacaattccacacaaggtccct

SEQ ID NO: 145726 - DNA, 1186 bp, Zea mays
  Clone ID: MRT4577_64415C.1
aggtatggcagctaccctcgccggtgtatgcaaggtgcctctgacatctgtcctactactttttgagcttacacaagactatcgtatagttctacctttgctcggggctgttgggttatcatcctggattgcttctcctcaaaggttctctaaaagaattaggagtaagctggattcttgggaggataaatcgagtattcctcagcaagcaaacgacatgctcactgaaaacaaagaggccacttccatggatgcagctgatttgtcgttagaattatataaaattgaaagctccctttgtgtctatgatgccaacgacagcaatatgttcaaaaatcttactgttggtgaggccatgaaaactaactacttctctgtctcaatgacaaccccattaattgaggcactagatcttatgcttgccgagaagcagccctttgttatgataactgagaataacacatctgcaagaggcttgctggcactaaagaatatccaagatttttgcaaagctgcaaaaactaccagatcacaagctgaggtaaaggaactcctgatatctcatgtttgccaagcaggcaagtgtaaatcgtggtctgtgacgcctcagatgccacttactactgcagagaagattatggactctcatgatgtggatcacctacctgtagtttctgaggatgctaatcttcaggacagaggacttttgataggttttgtagaccgagaatgcattgccattgctcgaagagccatggcaacaaaagaaattttcagttctatgtatgggatcaggaaggaagagaggtagcacgaaaggaaggaatgacacgacacagaagcactccctacttggcaaatctggcttcttttcctggtcaaggctaatacctctccaggttattagttgctaagtaaaaacgtgcttcaggcatgtggttaaggtgggtctccatatttttctcgaagtatcccgcttaccggttaccaccatgactatctgcaatggtgaggttttgttgctcttgtttgctacaagttctcaatgttagaatatacccgtttagggtttggggtcttccccgtgtaatgaccatctcacccctctgtaatgggcctgacccagtttactcagcctattaatatatcacccaaccccctgttagggttagggttttcattctcc

SEQ ID NO: 145727 - DNA, 261 bp, Zea mays
  unsure (1)..(261): unsure at all n locations
  Clone ID: MRT4577_64416C.1
tntnnnnnnnnntnnnnnnnnnnnnnnnnnnaaaanaataatgggatccatcgctttgaaaccacaaaatttgatctccttccatttttaaaaagctggggtttgttaaacactcctttggcaagctgttttgatattttatttaccttaacaaacaaaatcgcccctttttttacaagcttgtacccaggtttttaaagccacccatttagttgttgcaccaggtgcttttccccacccacccttccggggacccttggg

SEQ ID NO: 145728 - DNA, 230 bp, Zea mays
  Clone ID: MRT4577_64417C.1
ctcgcgccctcgctcgcttaaatactatggaggcgcaccgcacagaaggggcctgccccctcctcgtctgcgaaaagattgcggtgctgctgctgacgaagaagatcgtgaagaagcgggtcaagcagatcaagaggccctaactcgatcggtacaagtgccttaagccaagctggctcatgccaaatggtatagactttcgtttctggaagaagtttaagggatgcacc

SEQ ID NO: 145729 - DNA, 375 bp, Zea mays
  Clone ID: MRT4577_64418C.1
acaaaaaccccctggggaacgggggggcccaaaaaaaaatttgatcccggggcccccccagggaaaattgggtccctccccccccaagggaaatccccaacagggaaggggtgaagggacccgggttgtcttgccccggggggaaatcaacaaagctttaatggggggggggggggccgcattagcaaaggcaagcgacgtggcagcgggggggacgggggccaaccaacaaaacgggcccgcccggggggtgggacctttatacaaaggggggcttttccagcaggttgggggccccctcctgggtgttgagcttggccacctcgaggggggttttcccgtccaggttttgaaggggaccgggggggccccttt

SEQ ID NO: 145730 - DNA, 526 bp, Zea mays
  Clone ID: MRT4577_64419C.1
agcagtggtaacaacgcagagtactttgtttttttttttttttttttttttttttctgggggggaaaggttctggaggccttcagccttcgaaagcactgaaaatcgtctttgatggcagatagacaggcattgtttgtacaaagctcgcgctgaatcccagaacaagacacctgacgaggagaacaacaataagggtgcatatgctgacgattcttttaagataggtttaagggcatctccttatatgaagtcgaagaataccgtattaaaggtttaaacggacatgcttaccttgaatcttgctttgataaagcttgatattgacaggctggtacttaacattagtacgaacatggagaacggatgcctgagcataggtccgcatgtgctcactctgcctatgatacatcgatagcttatgaaggtcatgtgcccagtcctagattatgttgaagatgcatgaccttacatacatgtagaacctcactgacatgggacagaatgatgtataagaccagctcatg

SEQ ID NO: 145731 - DNA, 585 bp, Zea mays
  unsure (1)..(585): unsure at all n locations
  Clone ID: MRT4577_6441C.1
tttttttttttttttnnnnnnnnnnnnnnnnnnnnnnnnnnnnnnnncggtttatattgtcttgtgcagcagtattgtggtcttgtatagttaggcccttggaagcgtttgcaaatgcaaagcccaacgccccagaaactagaagtgctctccagtcctgttattgagatttcctgctgtaagttgcaatccagcatgtattcaactcctctcagactattgccgccgtgatccgactactcggggtcatcatccaacagctccttcaccctctccaacgcctccctctgaacgtcctcaaccgactgatcaacgctaacaatcaaaacatccttctcatcctccgtcggcctctccagaacctcaaactgactatgcacaagcgcaggtcccgcaaaatgccccttcctctccgcagcacgcttcgtgagcacttcctccggcgcatcaagatgcaagaaatgcacacgcatatcaccggccttgtcagatccttcacgtagcatgtcgcggtattggcgcttgagtgctgagcacgtaacgacgaggtgttctgtttctggaccaatgggatggtgcgtggcg

SEQ ID NO: 145732 - DNA, 231 bp, Zea mays
  Clone ID: MRT4577_64420C.1
acttctcttctacactccacacgaccgcctcattccaactgcatccaactcattctcacacatctcctcttcatacatcctccaacttcatccaccccaccaatatcttccacccagatacatccatctttcatactatctcaataaatccctttttcactattcaaccttcatccacaattttattatacctcctcaattacattcccataaccatttcactctccatac

SEQ ID NO: 145733 - DNA, 274 bp, Zea mays
  unsure (1)..(274): unsure at all n locations
  Clone ID: MRT4577_64421C.1
tttntttttttcttatttaattatttaacgaaggggacgttgttaacatatcaattggtcgttcaaataaccaataatgttgatccgttgttgggcgaaaccaacaccaacattaattgacaacaattataaattttaaaacatagtcagatttgataatttcttaccacttgtccattatggatgtatattaccaactttaacacccataaatgttactttcacaaaaaggtagcatcttatagttgcaatccttactacggagtcatttcca

SEQ ID NO: 145734 - DNA, 506 bp, Zea mays
  Clone ID: MRT4577_64422C.1
caccaagtcgcctaaggcggacaagccgcccaaggagcacaagccgcccaaggagcacgggcccaagccggagaagccgcccaaggagcacaagccgacgccgctcacgtacaccccgagccccaaacccacgccgccgacgtacactcccaccccgacgcccccctagccgacggcacccacatacactcccgcccctacgcccctcaaacccacgccacaactctactcggagttctgcgacccacaccgccacgcccgtgctgtccgagacctaggacgatcacgacggcctacagtacagccgccaatgtgtccgcgcccatcgagagactaccgatgtgttctgcggcgctcaagctcccgaaattggagattctcccaacgagtgcctctcgaggggcgcaaggatccatctcaaacatcttgacctacgaagactaggaagtcgaagtccatcacgtggacgacgtgtgacaatggccggctgatccatacgacgtaca

SEQ ID NO: 145735 - DNA, 307 bp, Zea mays
  Clone ID: MRT4577_64423C.1
cacgaatcccatgctgtctgcatttatcactaaaagggacaccattgcatttgtgcacaagccgggggctagcacacaactaagctcgctctactatcttacacatataactgagtacactggactggctttaagcagctgctaaacaaaatttcgcaacataatgtctccagggcgtactacgtacagtataaccctaacaaccacaaggcatcaacaaggatttggttcagatttcacaatagtggccagggctaatagtcctgagctcgaccaattatccgattaacaacgccaacaccaatgg

SEQ ID NO: 145736 - DNA, 201 bp, Zea mays
  Clone ID: MRT4577_64424C.1
acgaaacgcatggtttatgcatgtcagatcgaacttaccatgtccaagttcacaaattataccagacatatgtgcgaacacttattacttctagttcgtcaaacaaataatgttggctacacggatatctagggtgagatgacaggctctatgcaggtaagcaagcaagctgatggtcgatccatgcacgtgaattagatc

SEQ ID NO: 145737 - DNA, 296 bp, Zea mays
  Clone ID: MRT4577_64425C.1
ggtgggtgtttttttttttttttttttctttttttttttttttttttttttttttttttttcgggggccatgcacttgccgattgacaaacacccccccgtaggtaattttttttccatccccgggggggggggaatcatggaaccctcgcgcgggggattaacttttttctcccaggttttttttccccttgcagggtccatggggcttccggggtgctcgaactggtttttctttggcacaaggctgttgacttttttaaacaacaggtatagctggaccctgttaaaaatttt

SEQ ID NO: 145738 - DNA, 515 bp, Zea mays
  Clone ID: MRT4577_64426C.1
aattcggcacgagggagagaactagtctcgagtttttttttttttttttttttttttttttttttttttttttttttttttttttttttttttttcccagccggccccctttaaacccaaaaatacccaaagaaaacatttttgggcaaaaggcaaaaccccgcccgcccccaaaaaaccgggaccatggtttccccatgggcgggggccccaccccccccgttgggaaccccaggccctttaacatttaaaaccccgggaaacagaaaaacacccccaaaacctttggggggccttgcccccctgggggggggggggggcactttgccccctgacccttccagccctctaaggggaaaagaaaccaacctttgggccggggggggggtttggggggaaaaaaaaggcgaaaccgagggggggggggtccccccccccgggggggggctccaaggggtcaagggcccccccccccccctggggccagttgttccttttaccaggggcctgggggc

SEQ ID NO: 145739 - DNA, 334 bp, Zea mays
  Clone ID: MRT4577_64427C.1
tcgttcacgctcaggtcgccgtcgcgactggctagccgctacgttatgtacgtcgccccggtacctcccatgagatgagagccgcatccttattcatattcatagtctccgctctcattgcccctgttttttagtttattatctgttactcattccttttcattatttaatatttcttttctttatttttttcatatatatattatttttttatactactttctttttttttttttttaattttatatttattgatgatatcatttttttagtttactttctaatcttttgccccccctttacttctttctttcttactttctttttttcattt

SEQ ID NO: 145740 - DNA, 457 bp, Zea mays
  unsure (1)..(457): unsure at all n locations
  Clone ID: MRT4577_64428C.1
gagggccgcttttnnnnnnnnnnnnnnagggggggacgccgcgccgcngaacaaaacngggcggggaagacacaccggcagcacggaggcaggggaagcagacccnagcgggcaggacaaaaccgggacggaacaggaacagcagcagnagcagaccgaccctgaaaacaccgaacgcgcacgcagggaggggcgagaacagcaccagaancccagcaaccccncacgaggaccggcgcccgccaggaggggcagggcgaggccaccgcccacacccgccgccgaacagagaaccgaccgcccaggagacggcgnccccagancgaccgacgggcgagcgggcaccaccccgcccccgggggcagcacccgcnnngcgccacaggcccacggacagccccgaggcgacggngaccgggcgcaccaagccgccggcgggcaacgccccgcggaggacg

SEQ ID NO: 145741 - DNA, 296 bp, Zea mays
  Clone ID: MRT4577_64429C.1
ggggcccgggggaggggctctcctttttgttgcaccccttcgggatggggccatccttgctctgggcagacgcgtcaccttccttgaaacctcccttttagcgagcagctgccttctcctgttcactgggggcacccctagactcgcttcttattgaacgccagcgggggcccctggaatcagctcacggtttgctggcgctcgcgcaggctgctgcttctcaccatcgagatgggcctcggggtccttcaccgtgacctcatggtgctgtctctgtacgcgcgcagggtgctact

SEQ ID NO: 145742 - DNA, 1713 bp, Zea mays
  Clone ID: MRT4577_6442C.1
gcacgagatccaactctagctgccatctgtttctgaaccatggatccatttgttctctccatcctcttatgctcatcgatctttgttgtagtgtactggagaaggctgaacagcatgaggctaagacttccaccgggacctccaacatggccaattttcggcaatcttctccagttgagccctcttccccacaaagactttgcccaattttgcaccaaatatggccctctcgtctatcttcgcctgggaaccatcgatgccatcaccactgatgaccccgaagtgatccgtgaaatactcatccggcaagatgaggtctttgcttcgcggcctcggacactggctgccgtccatctcgcctatgggtgtggtgatgtggctctagctccactgggacccaactggaaaaggatgaggagagtttgcatggagcacttgctgacgaccaggcggctcgagtctttcgctgctcaccgagctcaggaggccgagcacctctgccagtttgtgtgggctaaatctcagtccgggaagcccgtgaacctcagagaggttctcggtgccttctcgatgaacaacgtcacgcggatgctgctggggaagcagtactttgggatccagtcggcaggccccggcgaggcaatggagttcatgcacatcacccacgagctgttcttcctgctgggcctgatctatctcggggactacttgccggcttggaggtgggtcgacccgtacgggtgtgagaagaggatgagggaggtggagaagaaggtggacgacttccaccagaagatcattgatgagcacaggagagctagggaggccaggaagagtcgttcctccgttgaggaagatggcggcaacggcaaagatgagatggacttcgtcgatgtgctgttatctttgcctggtgagaacgggaaggagcacatggacgacatggagatcaaagcgttgatgcaggacatgatcgctgctgctactgatacttcatcggtgacgaacgagtgggtgatggcggaggtaatcaagaacccgcgcgtgctccggtgcgtggtgcgcgagtcattccggatgcacccggcggggccgttccttatcccgcacgagtcgctgaaggcgacgaccatcatggggtaccacgtgccggcgcgcacgcgcgtgttcatcaacacgcacgcgctggggcggaacccgcgcgtgtgggactccgtgggcgagttccggccggagcggcacctgccggcggaggagggggcgcgggtggagatcagccacctgccggacttcaagatcctgccgttcagcgccgggaagcgcaagtgccccggcgcgccgctgggcgtggcgctggtgctcatggcgctcgccaggctcttccactgcttcgactggtccccgcccgacggcctccgccccgaggacgtggacacccgggaggtgtacggcatgaccatgcccaaggccacgcccctcgtcgccgtcgccactccgcgcctgccgccgcacttgtacggcggcggcggcggcagctcggctccttagttcgatgacactttgacgcacgtgcgctgcactgccagtctcattagtcattatacgcatgatgtacttccctccatatacaatacaccgcataaaccaaacgatgaatgaaatgtagtcgttctatggtttcaatatgagaagatataattgatggttaacatc

SEQ ID NO: 145743 - DNA, 236 bp, Zea mays
  Clone ID: MRT4577_64430C.1
gatcagcatagccggactccttggtgcggatcgtccaaccgaacagtaagaagctggtcatctgtgtcacgtagggtcgcctggctctaacaactagccaaagactatgctatgcagatgccctgcccatgcgccgaactgctgggctagtacggcgctgaagacgagctgactacgatgatcggcgccggctggatgtaccaatacccggtgtacctgatgcagccgcatgcatt

SEQ ID NO: 145744 - DNA, 510 bp, Zea mays
  Clone ID: MRT4577_64431C.1
atgggcagcgttgatgttgcttcgcatgtatcgctgactgttgatgacatggcacatgtttggatccgaatgtgcaaggggaagaagatggtttgctgcctaggtaaggatgtttcagtagccttccgcgtccgggggctcaagcaaagtcgggtagcaagttctgggaaggagtgggttgtcacacgagtgtctagcatcatgttcttctctttctcgctcgcgctcctggtcatggcgatgatcacggcgtcaggaattgcggcgctcgagaaacgccctatcgtcaggagtttctcctacttcggatgcctcatcctaggatactggctgggtagggtcccattcttcgtcctcatgatgacaccaaatgttacgtggcctgtttcgatgttggcgcgcctcgcgctgtggggtctcctcccccaatacggtgggctcatcatcggagatgggactatcttctattcttccctaaagaaagaggacatccgagaagaaagagcttga

SEQ ID NO: 145745 - DNA, 239 bp, Zea mays
  Clone ID: MRT4577_64432C.1
ggaccgtggcaaaatgctgggattataggcgtgaccgccacgcccggcccaacaacttaatcttttattagctttgcttaagagggctaattaaatcaaagccctttagttccctttaacagggactggagttatgatgcatgtgttacgacttttggcccactgtccatgcaactctaagtgcaggttgatttgctttccagaaatcccaaaggggctgctcttggatcaccgaagag

SEQ ID NO: 145746 - DNA, 141 bp, Zea mays
  unsure (1)..(141): unsure at all n locations
  Clone ID: MRT4577_64433C.1
agacgtgcggggagacaaagatnaatcagaaaaacacgagaaggcaggacgggatataagcaatggccaatgcacaggagaccactcaaccaaagctagtggacaaaatgggctgagcttaccctgccccagaggattaag

SEQ ID NO: 145747 - DNA, 339 bp, Zea mays
  Clone ID: MRT4577_64434C.1
gccagaaatgctagtcctttttatgctagattcagttactccccctcctaggatatactgaaacatagttcttattaacatatttcgttcgaatgaatgaaaatgaatcatacataaagaccacatttatagatttactaatgtatgtttagtctaaaaatactattttaagaccgagggggtactattttccgtggacgaattgaatgccagaaatacagcggaaagttttcgagatattgtctccaattatcagcaactagcgtctaattagacagtgattagtttctagagattaaattttagtttctccattttattttattctagttcctaaat

SEQ ID NO: 145748 - DNA, 254 bp, Zea mays
  Clone ID: MRT4577_64435C.1
gtgaataatatattaacagaaattcaacttttggttatggaagccacttttggggcgagggctgatgttccatagaacatccatctggttgattgaacatgtggaattcaatgcaaaatgaaaagtatgagccacttttagcatgatcaatggcatctttcatacataagcctttttgaataagataagcctaataccaagtcgcgaattgcaatgaatatatgagctttgtgcaatgcttgtaagaataattt

SEQ ID NO: 145749 - DNA, 831 bp, Zea mays
  Clone ID: MRT4577_64436C.1
ccgccgggccgggacctcgtccgccccagtctagtccgattcaaacccgcccgttccccgtgtccgagccacgcaagccgagctcaatccccagaggccagagccagctgctcggcgctccacgcgatggcgcagaaggagaccaatggcagcaacgtgggagtacatctccacccgcccgccgtcgaccccgttgcccctccggttctccgagctgttgcagggtaacctgcggctgctgcgcaatgtcgcgcacatcgcccggacgcacatgatgccgccgtggctcgcgcaggtgcacccgcggacggggacgcccgtcaatgccaccgtcgtcatgctcgtcgacaccgtgatcatcgccttcttcaccgaccttggcatcctctccaacctgctctccatctccacactcttcatattcatgctcgtcgccgtcgcgctgctggtatgatgcttctacgtcttctggcccaccgccgttgtcgtcccccccccgctcgcgtttttttcccctcccatttcggcccccccacggtccatcccattttgcccctcccccccccctttccctcccccccctaccccttccccgctacccttgtttttttttccccccccttccctctcactcccctttttctttcccccttttgtcccccccctacccccccccacccacctctgattaccccctttttttccccccccctccccttgtttttttctttgtttgtaaacctgcctgtccccccgcaagtcccccgtccccgccccccctttttttttgttttccctttttccccccccccttttatccgcccctttccc

SEQ ID NO: 145750 - DNA, 319 bp, Zea mays
  unsure (1)..(319): unsure at all n locations
  Clone ID: MRT4577_64437C.1
ggccgcgggttttttttttttttttttgtacggaactacatttctgactttgacagagtaactgatccgcttacctcaagtagcagatgcctgcttaccgcctacacccatacgccttacgaacgtgcctgccttcacagctgacacaaacaatcgagaactatcagtgagatatcgcctgatcgccgggagggggtgtgaatagttanntctcttctttgcattttttgcccttctccccgtgctgggcccccacttctttgttcnccatctttctcccttgcgnggccgcccggcctancacttgctcnntgtcctg

SEQ ID NO: 145751 - DNA, 1009 bp, Zea mays
  Clone ID: MRT4577_64438C.1
tcgaggccggccggggcagcacccaacttcttcctcccaccccccagctcaatcaacacaatcagacacaatggctgaccgaggaacttctcgcggtggaggctttgcttcccgaggtggtgaccgtggcagaggtcgcggacgaggccgtggccgcggtcgcggtaagaacgaggagaaggagtggcagcccgtcaccaagctcggtcgtctcgtaaaggccggcaagatcaacagcatggaggagatctacctgcactctctgcccatcaaggagtaccagatcgtcgacaacttcctgcccaagctcaaggatgaggtcatgaagatcaagcccgtccagaagcagacccgtgccggtcagcgaacccgattcaaggccattgtcatcattggtgactccgagggccacgtcggtctcggtatcaagacctccaaggaggttgccaccgctatccgtgccgccatcatcatcgctaagctcagcgtcatccccgtccgtcgtggttactggggtaccaaccttggtgccgtccactctctgcccaccaaggagagcggaaagtgtggttccgtcaccgtccgtctcatccccgccccccgtggtactggcctcgttgcctcccccgctgtcaagcgattcctccagctcgccggtgtcgaggacgcctacacatcctctgccggttccaccaagaccctcgagaacaccctcaaggctactttcgttgccgtctccaacacctacggtttcctcacccccaacctctggaaggagaccaagctcatccgaagtcccctggacgagttcgccgatactctgcgcgagggcaagcgatactagagcgggaatgttttatgaactgatgggagctggaaactggtgccgcggagtcacgaatcaattgtgtttcattgcataggttggccggttaggacacttcagatcgtataggctatggtgactgatggcttaacggtctgaaatgaaaaagaaatttcatccttc

SEQ ID NO: 145752 - DNA, 179 bp, Zea mays
  Clone ID: MRT4577_64439C.1
ccggatctaggttagctaggaatgggaatttgttgattcgttggaggccttccgagcacgcgcgcacggcacggtactcgtacagacaggccgctgccgctgccgcctgtgtggaaaggccctataccgtatatatagtgtgacaaagtcaataaagctgaaaagatcgcgttatttcc

SEQ ID NO: 145753 - DNA, 241 bp, Zea mays
  Clone ID: MRT4577_6443C.1
tcaacacggtaacgcgcctataatgtcacctatagtcaattcactatccaactattcacaacgtcctggactgtaaaaaccctttcgttacccatctaaatcctcattcaaatcatcctcctttcgctatctatcctaacaccgaacacgcccacaccaaacgcccttcatatcattaacacaccctgcttcactaatgcaacacgatccttaactgtgcattaaacccaccaaataattt

SEQ ID NO: 145754 - DNA, 210 bp, Zea mays
  Clone ID: MRT4577_64440C.1
tcggcgtcttcgacggtcacggttgttccgacgccgctcgcttttttctgcgaccaccttgtcctcaacctacgagaggcgtcctccggccgcggggcgttaccgcagacgccatcagggaggccttcctggccacggaggaaggattcctcgcgctcgtgtcaagcctttgggaggcccagccggacattgccacggtcgggacatgct

SEQ ID NO: 145755 - DNA, 624 bp, Zea mays
  Clone ID: MRT4577_64441C.1
ggtgaaaaatgatgttggagtaatctgattgacaccgttagtggaggagcgacaaagcacgagcatcatacaacggacgcgtcgcctgatagaatgcgcacggacgatacctgtgagacaaaaggctacacgtatattttctatagcagagctttctattacatgggataggtcgggtttagatgaatcgcctaaagcaaccacaactcggggctctggatcgtctccaccagttggttctgctgacaaacagttgcagctgatatagtacctttccagcatatgcatttagacgtacacctcaacatgcctcaattctaggggccatgagaaccatttgaggtgaaggtttctttcccacttggttttggagccaagactgccctcggcttgggccagtagcatggacaccagaggtaaagaagcatgtgatttctgttggcctttctgaggccgggtgatttccatacaggttgcacctccgcttccttgacaggattagcatggtcgcttcggtcgtcaaggatgtcttgcaagtggcagacgtccatggagatctagaacaacggtcttgtccgtgctcctgtaccttgaggagcgcgttcatgcacttttgcatgattg

SEQ ID NO: 145756 - DNA, 571 bp, Zea mays
  Clone ID: MRT4577_64442C.1
gcgccgatggtgggctccggcggggccttgatgggcaccggcggcggcccagaggatcatcgtcatcagcagccctacaccctggagatgctgagcggcggaggaggagggtacggcggcggctacgcggccaaggacgagccgcgggacgacctgttcgtcgactcgctcctctgctagagggagaggctagagctggcgagggggatgcggagccggtccaccaatctcggtgcggcggcggtgtctgtagcctgctgtacgtgtacggcgggggtatacgtagcgtgcacgctcgccttcgcattcagaattcagatacgtgcagtatacacacacgcacgcacacacaacacgctgtgtgcaccggatctaggttagctaggaatgggaatttgttgattcgttggaggccttcctgccacgcgcgcacggcacggtactcgtacagacagtcatacggttgtgtcgttttgtagttgtagcaacggtgccgctaacgcctgtgtggaaaggccctataccgtatatatagtgtgacaaagtcaataaagctgaaaagatcgcgttt

SEQ ID NO: 145757 - DNA, 230 bp, Zea mays
  Clone ID: MRT4577_64443C.1
acagcttccttcagcagcgcaggcagtggtccctgaggaccgtggaaggagtcaaacttgcgggaattttgcagtgtatctgcagggctgttgttatcagcaagacccaaagctagaaaaggaggaggaagaaactgacccgatcagtgccagaagtcattgtattcaaagaagaataagcaagaaagaaaagaaggaaggaagagaggtagacagatacaagatgaaat

SEQ ID NO: 145758 - DNA, 317 bp, Zea mays
  Clone ID: MRT4577_64444C.1
gggggggggggttttttttaattttcttgtaccccctcaagctgcaataccccgtctactccccattgcgagcgaaattgagaattccaagagagacccggagatcggcggcaacccgaaaatctcggacgaaagtagaacacagattcatctttacccaataaaaagaagataggaccaggggagcataacgggggggtacctactcgcgcatgaaaaaagctagaccctcccctagtcccaataatttcaaaccactcatctaaaagggggggagggggggggggggttcattcatatctcaactaaacccaatt

SEQ ID NO: 145759 - DNA, 134 bp, Zea mays
  Clone ID: MRT4577_64445C.1
ggacccgccagcatccaggtggccctgtcgaggttgtctccctaccttggctcggcccaccgggtcagcgggctcatgatggccaaccacaccagcatctcctcgctcttcgatagaacctgtcgccagtatga

SEQ ID NO: 145760 - DNA, 458 bp, Zea mays
  Clone ID: MRT4577_64446C.1
ggaaggaaattggtttttttaaaaaaaggggtttttttggcccccccaagaaatttaaaaaatccccctaaagggaggaaaaaaaaaagggggcggggaaaaaaatttttggtaaaagggggaacccccaataaaaaacccggcccttaaaagggaccccctggttctttaaaatttaaaaaccccacgggcaaaaagcccttgttggcttggggggccccttgccccaaaaaaaaaacgggaacaggccgtttgggaaaaaaacccctgaggggtccccaaaaaccccaaaaaacccccccccaaagaaccctttaaaataaccccctttcttaaaaaaacccaaggggccgttaaggggggttttattgaaaaaaccccggcaaatttcatgggggccccccttgggggtcccaaacccggcctttgggaaaaaaaggggaaggcccccatgggct

SEQ ID NO: 145761 - DNA, 597 bp, Zea mays
  Clone ID: MRT4577_64447C.1
cctccaaaactctatctatgctcagactcacactgcctctctatctctagctagagagctacactgctactagcttacaagaataagcagcttacagctagaattgcagcaatgctcaaatcttacaccttactgatcgtcacactggtcggtatgacccttctagggacccccattgcttgctccctgaagctcgccaagacgaacaagaccgagtcgacccacaactcggcgagcaggtccacgaccggcagtgaccacaccagtatccccggaacgtccgccgcctacgcgtccggcggctggttgactgccgatacgacgcacatactgagccccaaacagatactgcagagactgcggtgcgagcgggaaccagagcgccgacggacagcgtcccttctcgtctatgatcgccgccaggcagcccgtctctgttcaaggtcaggaaaaggctgcagcgcctgctacaagttaaatgcgacagcaaacctgcatgctccatacagccggacaccgggtgcatcaccaacgaatgtcccgttgtggtgcgcctcgatataagcgcctctcttcgacatgagctgtacctccatg

SEQ ID NO: 145762 - DNA, 409 bp, Zea mays
  Clone ID: MRT4577_64448C.1
aggggggggatccaagcaagaaaacctgcaagttttcacaggagggcctcccaagagggcctggatgattacattgggtgatccccttaaaaaaagcccgcttaaaaaaaacggggtgctcaaaaagggacctttcaaagccacaatttgttcccccaaaagattctccctcctgccgggaatttttaccatgaaaaaaaaaaaaaacttccacaaaaaaaagaggcgttaggcggatatggggttcctgggggggggtataaagggcccagatgaaacttcttgttggggcctcagaaaaagggggaaaccaaaataactttgcttaaaagccttccacaaaggcccgaaacagggggaccactttttggtgaaattccaaggaaaaaatcgaagcttgaaaagaatg

SEQ ID NO: 145763 - DNA, 458 bp, Zea mays
  Clone ID: MRT4577_64449C.1
agcgtcgtcactttttgtatgcgctacaggctcgagatggagaacagtatggaggtagacaaccatgcatagagactggttagtacccagtggcgatcgtgcggcgtaaccagaagtcttacacatcggggttgtgaacaaatcggggacaagacgtcaacaagcgtgactatgaccgatgaggatacttctaggctaatcagcatgataacctgcttaccctcataaaactaggagcaacctcctcagaggacttttagagcgctgacagatcctgacgggcctcagagaactagccctgctccataccctcaccgacataccagagcacgaaagctcccttggcgtacatgaggccgaacttgtagtcgatgctggagaacaccttcacaacacttttgggagttggagatcattcacacagtgcgctgcaccttggccaggtgaccaccaagccc

SEQ ID NO: 145764 - DNA, 1172 bp, Zea mays
  Clone ID: MRT4577_6444C.1
ggccgcttttttttttttttttttctttggtttcgcgctcgccattttttttttttttttaggaggagagagaaccgtgagggccaaacttaagttaaaacccacaacatagagagaagggctagcaaccaccgaaggattacgattgtcaggcggccggcattgagaacgccaatgccgggagagagattaagaacgaactgaaaatgaacaccttattatttattgcagtaaattgctcctaacaaacacagaatcactcgtgtgacatatttcaacttagttcttatagcccaccaaatgaagagtttacaagtactagagcagacatgttttacaggcgtgactaaaattaacaaacacaggtgtgcatgacaaccagatgtccagactcccatataattttttcagtcacttctacctgagggctactggccagtgcaaatggcacgggtcagtcgaggaatccagtcttccgccagacagcattgcgtacctggcggagatcccgccccttcagtgtgcgcccggctccctccagcattgagaacgtcgtcatcggcgactcccgagcccgcgcgcgcgctaacatctcgtgtggcggtagcatctcctcgtattcatcctccgcttcccccatcaccatcaccacgggcggcttccgcagccgcgccgcaggaacgttgaccggcaatgattgcggcacatacggcgccggtgccggcgccgggcggggaacggcagggatcatgcggggaggggccgcagccggggaagcgggggacgaggacgtggatgaagaggactgaggcggcgagcggcggcgctcggggagggcgtccaggatgccctccggcgggcggcgtaggcgtggaacagggctagggtttgcagggcggacggaggacaggatgagtgggcggcgcaacggctgcggcggctcgggcgagccggatcctgcggagaagaggtcgtcctcgtcaagctcgaaggccgtagaggccgactgttctccggcggctgcggagcgggcgaaggagccaaggaagcgctcggagctaacggagctcctgtgtcgcgtgcgatccatggttgagctagcgcgtgccgtcgcgtgtgccagtgtgagtgtgagactgtgagggtgggggagatgtcctcgaggtacccaa

SEQ ID NO: 145765 - DNA, 634 bp, Zea mays
  Clone ID: MRT4577_64450C.1
gagctcctcagagatctgggggggggggggggggggccgccctcggcggctcttttttgcggccaacccacgccgcggttagcagcagctaagcactccccacggcaaccatgactcccccctccgtgtagaacctcacaatcccgtgacctcgtcccaagtcctttagcactacgccgaccgggtgatcccatccactacacgtcctacgggcacaacgtagagcacacgagtgtcccactcgccggacgtgccaacacacacttaccccagtggaaagaccgactacttggaagtaagaacaagtattaggggcgggacacagggcgggcgtttagtccgatcaccctctcaaaagctcgaacgacacccgtgacagcacggtctccaacttgatagctaaagtttccacgttctaagtaacagtaacggtgtttgacccattgtgtgtcgaggtaagactggcgtatactagtaacctggtattcgtcacgcctttcttcgtaagaacgttggtcctgcataactagaacaagactgtgaccctatccatcgtacctgtccctcgggaaacggtgattgctgccactgacacgaagttaatttcattcgagacagtcttgttctttctcga

SEQ ID NO: 145766 - DNA, 326 bp, Zea mays
  Clone ID: MRT4577_64451C.1
cacacacagacaagtggtttccaaagcctagtgtgtgtactagcaaccagctagcgccgacggcatcaagcagccagcatgtccgacgagaatcaccaccacttctttaaccaccacaagaaggaccaggagcatcccgcccacgagtacggttactccgatacccaggtggtcaccgtccccgacgacggccatttctagaggtacactaaacaggaaacataacttaagcacaagcatgactctcgctcaggccgattccatccaccgactacaattcgcctatcttataaacaataccattttctaacaccaagacttacatc

SEQ ID NO: 145767 - DNA, 173 bp, Zea mays
  Clone ID: MRT4577_64452C.1
gggtttagatgactacacctaacgctattttcttggctctgatgcaggctagtggctgcaggagtgaacaatgccgtcactaccttggaggcagcagcgcttttgaccccagactcccgcaaagcgcacacagtccgccctccgggtccctgcgcaacctcccccagcagccg

SEQ ID NO: 145768 - DNA, 128 bp, Zea mays
  unsure (1)..(128): unsure at all n locations
  Clone ID: MRT4577_64453C.1
aaaaaaanntnannaacacatcaatgtactaccattactatcagcaagctgaggttgcatgggcctgtcaaaagatcagttcttggtatgaattgtggaagctggttacttcctttgcatgtgactat

SEQ ID NO: 145769 - DNA, 201 bp, Zea mays
  Clone ID: MRT4577_64454C.1
gcgtgagcttagaggctggccgtcacgaacacaggcgccggccggtgtgaccaatcttacggcgtccttgggcgcataacgggctaacctggccttgcgccggtggccagtataggcaccctttggtagtttgaatcacgagctaaaggcgttcagggatcatcggtgtgaccactgctcactgcccatggcttttaaatg

SEQ ID NO: 145770 - DNA, 607 bp, Zea mays
  Clone ID: MRT4577_64455C.1
acctgaatcttcacatggatagatcgccgtgcaattccacactacgataaaagacacccagagaatacttacactccgcagtcgcgacctcgtcctgatctctgctacgttctccgaaccgacaggcgccggtctgccacattcggtcaccatgaggcccaagcttcgggaggagaagaagaatcatggaaccgggccctcaaccctcaaggccgttgagagtgcgatgccgaaccacaagtgcagagaagaaactccagactgggggcctacatctgagtaacagaagcctggagtggtgacttgataggttctagaactagctctacataaagatatatgctgcgtccctgagattcgaaaaggcattgatgatgacgagagcaggcacggagaactacatatcgactgttttgataagaatctcggacagcaatcagatgatcatgtaaagtagatgtctgttcgtcgatttgtacttgatgagactattgaaggagaccaatctgagctctggctcaatatcatgtctgctttacggaatgcgaattgcgctattggcgcactcgtatctgatagcatgatactgtgagacttggtcttacag

SEQ ID NO: 145771 - DNA, 570 bp, Zea mays
  unsure (1)..(570): unsure at all n locations
  Clone ID: MRT4577_64456C.1
attcggctcgaggacgcaaggagcaagggcttgaatgaatctgaggctgtggatgccataaacaacaatatagttgaattggatgcggtcaatgaagatgcgaggtgcaaaagcttgaatgatgaatcagagctggttgaagaggaatttaagagcccaagctttgatgacatgaacaccgtggatgagcacgtcaatggcacagacacggatggattatgtttgggatttgtggaagttgaagcggtgcctgctgtacatgaggcaatgcctgataataatgaagaaacgacagaggaagcaccagcagggggtgctgatgtggcaggcagtgataatgtggcagtgcctacagatgtggattgtgaagaacactatgttgaggcagtagttgtaacacaagaggtagtggctgttgcagaggagttgggggatgaggaggccaagagggatgaagagaaagatgtgatgggattgagcttgggttttaattctaccaatggttatggtgctatggatgttgaaataggaaaccaatgttgaaagttttgatgaggacnacagtgacag

SEQ ID NO: 145772 - DNA, 459 bp, Zea mays
  unsure (1)..(459): unsure at all n locations
  Clone ID: MRT4577_64457C.1
caaagaaggcagngagcaaaagncacngagaaccccnannccaaagnccgagagggacnnnngcggaaacgcggagcnnanggcaaacaaacnacgccccnnagagaaaagcnncacnacanggcncngcnnaagaagggcaggagagggggcaggacaccgcngaaaggggcggacgccaaagaaanancnngcnnccgggacggcaanggcnaacgagaagagcaaggcngagaaggaggcngcagcaggcaaaaagaaacaaggagcgaaaaagaagcaacnccacancgagaaaggagacgacgacnncanccccggccgggggggnggcnacgangaccccgangagnacgacnncangngaacnggcngggagggaaagnaggnnncnngnangnanaccnnnggcgggcagagaaanancacaagagngngcggcanacnanngcanggaac

SEQ ID NO: 145773 - DNA, 494 bp, Zea mays
  unsure (1)..(494): unsure at all n locations
  Clone ID: MRT4577_64458C.1
ttttttttttttttttttattttttttttttttttttttttttttttttttttttttttatttaccccccccggcgggcgcccggaagggggaccccccgagcaggggggggcaaggccaaagggcccccccccggggccccgcaggggcggaaccaaggcggagcccaacccgggggaaaaaagggccaccccgaaaaacccacacaaaaaaaaagccgcaaaaaaaaaaagcaaaaacccaggggccgaaaagaagaaggaacaaacgaggaagccaagaggcaaaaaaccccccacccaaagggagaaaaccccaggcccagaaccaaaggaaaaacccgcccccacggaggaaaagaagaaccgnaaaaggcgcgcagaaaagagnacgcgcaaagagcccctcggccccctccccccgcggggcggagaggcccctccccccacgaagacggggaaaccccgacgcccacaaaagggggggaacccgag

SEQ ID NO: 145774 - DNA, 539 bp, Zea mays
  Clone ID: MRT4577_64459C.1
ccacgcgtccgttttttttttttttttttcttttttttttttttttttttttttttttttttttttttttttttttttttttttttttttttttttttttttttttggggcaacgggggaaccccccagggaaaagccaaccctttttacaccccacccggaaagggggggggcaaaattgtacaggcagggggaagccaaaaggggtcaaaaaaatttttttttttattcgcccggaaccccgggggggcatcaaacaaaccttcctaaattcccgaaaaggcccaacatataaaacccagcaaactaaatagccccccaaagcccacaaaaacagagcgctgaaaaggctcaggggattaaaggcccgggggaaaaaaaaaaccaagcccatccaggcccgggggaaaaccacagttacaaaaaactaaggcctttttgaggataaaattggggtcacgggggggaccaaaaatccaggccatccaaacggggtaggggccaaagttggggcgggaaacccaagggggggggggggg

SEQ ID NO: 145775 - DNA, 230 bp, Zea mays
  Clone ID: MRT4577_6445C.1
accacgcgtacgcccacgcatccgcgcattctctagatcgctacatatcgtatgccaggtgcgaattctatcatggtgacggttatatacaccactctaacacttccacgaaccagtcgccaacagatctccactccaatcatccttacacctgatgctctgcgtcgtacatcatatccaccgtaagttcatcttcaactacgcgcaaacccgaacacgcgacacttcta

SEQ ID NO: 145776 - DNA, 301 bp, Zea mays
  Clone ID: MRT4577_64460C.1
tgcacgcctaccgaagctcggaattcgtttcgagacggcactgtcttacagcgctttttttcgtaagcccgtggctctggccataacggcgggggggggctctataggagcgcctggtctcatacccgtgctcccgggtgtggcagcgctcgtaccctgacatcgcctcgacctgcttcggcctcatctacaaggatggtcttggctccttaccgcggacggttagcagttgcactcctggatcattcgacattatcccagctaccgaggaccaaccatttttgttcttacaagaaaatgc

SEQ ID NO: 145777 - DNA, 2130 bp, Zea mays
  Clone ID: MRT4577_64461C.1
gcggccctgcctccccatgttcgcatggccacgcccacggccgcaccaaccaccagccccgatttcctcctcaatcacacccccaaaccaaaacccaaacagcacttctcctccaatcgccgacgtcgccggaggcttcgccggccggagcagcgccgacggttgttttgcccctccctcgtccggcccagcagcccaggcgagcatgccttcgattgcgccaccgtcttcctccgtcgctgccctcacccgccaaccggtgcaattcttcaaagggtgcagtgtatccaaggagacaaagggaccggtccgcagtttcttcactgcaaattcaaagagcaccacggtgaaatcagcgggcttgaaagtagcgtcatccttcaaaaatgatggtggttatccagctggcggtgtctcttggaaggacgacactctattgccaaaaagcacaaccattcgtggccaggaccatccggttgctgaccctgtactcccaatggattccatgattacgccagaaatcctctctgctaatgtggaacgtgttatagacatgtttgcagacgatgacactgatactgaacttgatttggatagcccgacagaggacttcacatcaattgcagaagccattgaggacatacagcaaggaaaacttgtgattgttgttgatgatgaatcaagggaaaatgaaggagatctgataatggctgcctccttggttaccccagaggctatggcttttatagtaaggcatgagacaggaattgtttgtgtcagcatgaaagaagatgatctggaaagactgagccttcctttgatggttaccacaaaagaaaatgagaagctatgcactgctttcactgttacagtggatgcaaaagagggcacaactactggggtatctgccaaggacagggcaaaaacagttctgaaacgggctggacacaccgaggcatctgttgaccttgccatgttggctggattacctcctgttgctgtcctttgtgaaattgtggatgatgcagatggttctatggctcgcctaccaaagttgcatgtctttgctgaaaaggagaacttaaagattatatctattgctgacttgattagatgagttgaattaccaaaacttcagcttctggtataggaggaaaagagacaggctaattgaacgcgcttctgttgcacgcttgcctttgaaatggggcaatgtccatgcctattgctacaaatctgttattgatggcattgagcatattggcatgatgaaaggtgatattggtgacagccaagacattttggtgagggtgcactctgagtgcctcacaggcgacatttttggatccgcaagatgtgattgtggcgaccaacttgcgatggcaatggagatgattgagaaggctggaaggggcgtattagtctatctccgtggacatgaaggaaggggtattggtctggccacaagcttcgtgcttataacttacaggatgatgggcgtgatactgtggaagctaatgaggaacttggtcttcctgtggactcacaggaatacgggattggcgcacagatattgcgggatctaggagtccgttcaatgaagctgatgactaataaccctgcgaaatatagtggtattaagggctacggattgagcattgcgggcagggtgcccttgattacgccaattaccagtgagaaccgtaagtacctagagactaaaagaacaaagatgggacatgtatatggattggccaatgcgcaggccaaccaagcaaataaatggcagccagagcacagaagagaatcattaggcccccaagcatgtttccattattattccagcaatccagcttcgtggcacaaaagagtgatatgattcttcgtttggggagttcctgaaatcttctccccctatatttccgtagattctttcgcaaaaaagccgatatttcggtagatcgatttcttcaattgtaacggtaggttttaaggtggctaatctctactacttattaagttagcaatagtagcctgcctttttgtgttgtgccgtgtagtctctgacaggtagggcccgcttgctcctgcgtgtatgctcccggtttattccgtaacacttttttttac

SEQ ID NO: 145778 - DNA, 183 bp, Zea mays
  Clone ID: MRT4577_64462C.1
agcagtggtaacaacgcagagtactttttttttttttttttttttttttttttccttcattaatggctcttgttcgcttgcgatggatttctcctgaaatcagtacaagataggcaaaggctatatcagaaaaggaagcgagccggagacagatcgtagaggcccaggagcccggccaaaagg

SEQ ID NO: 145779 - DNA, 1418 bp, Zea mays
  Clone ID: MRT4577_64463C.1
cattggtgcgctcgtcgtcgagggcggccgggacccgcgcccacgcccacggccgcaccaaccaccagccccgatttcctcctaatcaatcacaccccccaaaccaaaacccaaacagcacttctcctgcaatcgccgacgtcgccggaggcttcgccggccggagcagcgccgacggttgttttgcccctccctcgtccggcccagcagcccaggcgagcatgccttcgattgcgccaccgtcttcctccgtcgctgccctcacccgtcaaccggtgcaattcttcaaagggtgcagtgtatccaaggagacaaagggaccggtccgcagtttcttcactgcaaattcaaagagcaccaaggtgaaatcagcgggcttgaaagtagcatcatccttcaaaaatgatggtggttatccagctggcggtgtctcttggaaggacgacactctattgccaaaaagcacaaccattcgtggccaggaccatccggttgctgaccccgtactcccaatggattccatgattacgccagaaatcctctctgctaatgtggaacgtgttatagacatgtttgcagatgatgacactgatactgaacttgatttggatagcccgacagagggcttcgcatcaattgcagaagccattgaggacatacaacaaggaaaacttgtgattgttgttgatgatgaatcaagggaaaatgaaggagatctgataatggctgcctccttggttaccccagaggctatggcttttatagtaaggcatgggacaggaattgtttgtgtcagcatgaaagaagatgatctggaaagactgagccttcctttgatggttaccacaaaagaaaatgaggagaagctatgcactgctttcactgttacagtggatgcaaaagagggcacaactactggggtatctgccaaggacagggcaaaaacggtcatgactcttgcatctcctgactctaagcctgaggacctcaaccgccctggtcatattttccctttgaaatacagagaagggggtgttctgaaacgagctggacacaccgaggcatctgttgaccttgccatgctggctggattacctcctgttgctgtcctttgtgaaattgtggatgatgcagatggttctatggctcgcctaccaaagttgcgtgtctttgctgaaaaggagaacttgaagattatatctattgctgacttgattaggtataggaggaaaagagacaggctaattgaacgcgcttctgttgcacgcttgcctttgaaatggggcaatgtccatgcatattgctacaaatctgttattgatggcattgagcatattgccatggtgaaaggtgatattggtgacggccaagacattttggtgagggtgcactctgagtgcctcacaggcgacattttt

SEQ ID NO: 145780 - DNA, 553 bp, Zea mays
  Clone ID: MRT4577_64464C.1
ccggccgggaacccagttgttagctgcctaaaacaaccttgtcatgagcctcctcgtcagatcctctccaacccagtcctcgcatctatcacttcgaccctaatgttttcgatgccacctaaaccagtttgcctcgatgcccgtttcgactgtcgcctcctcttgacgcaacgctgcccgaccccgacccttcctggcgcctccacccccgccccgtcgtcgtcgcgacatcggcccgcctgacaaagccaggtctcgctcgtcgcaatgatgtgacccgtcttcgcgacgaacaagcttggcgacatagcaagccctatctctgagctagagacgtcgcttgaccccactgctttactggcatctctgcccttctaggagatcgacatttgacaaggtacacgactttgattcggtcataaaaaacttagcaatatgtttgcttcttttgttcatacaattttattctttgaacttgtatcatatattgatatgaaacttgaattctatacaatactggtttttcaaaaaaaaaaaaaaaaaatttgcggcc

SEQ ID NO: 145781 - DNA, 1013 bp, Zea mays
  Clone ID: MRT4577_64465C.1
ctcgaggccggccgggacccgcgttcacgcccacgcccacgcccacggccgcaccaaccaccaggcaccagccccgatttcctcctaatcaatcacaccatcaaacgaaaacccaaacagcacttctcctgcaatcgccgacgtcgccggaggcttcgccggccggagcagcgccgacggttgttttgcccctccctcgtccggcccagcagcccaggcgagcatgccttcgattgcgccaccgtcttcctccgtcgctgccctcacccgtcaaccggtgcaattcttcaaagggtgcagtgtatccaaggagacaaagggaccggtccgcagtttcttcactgcaaattcaaagagcaccaaggtgaaatcagcgggcttgaaagtagcatcatccttcaaaaatgatggtggttatccagctggcggtgtctcttggaaggacgacactctattgccaaaaagcacaaccattcgtggccaggaccattcggttgctgaccctgtactcccaatggattccatgattacgccagaaatcctctctgctaatgtggaacgtgttatagacatgtttgcagatgatgacactgatactgaacttgatttggatagcccgacagagggcttcacatcaattgcagaagccattgaggacatacagcaaggaaaacttgtgattgttgttgatgatgaatcaagggaaaatgaaggagatctgataatggctgcctccttggttaccccagaggctatggcttttatagtaaggcatgggacaggaattgtttgtgtcagcatgaaagaagatgatctggaaagactgagccttcctttgatggttaccacaaaagaaaatgaggagaagctatgcactgctttcactgttacagtggatgcaaaagagggcacaactactggggtatctgccaaggacagggcaaaaacggtcatgactcttgcatctcctgactctaagcctgaggacctcaaccgccctggtcatattttcc

SEQ ID NO: 145782 - DNA, 1614 bp, Zea mays
  unsure (1)..(1614): unsure at all n locations
  Clone ID: MRT4577_64466C.1
tcccacccgcgcccacgcccacggccgcaccaaccaccagccccgatttcctcctaatcaatcacacccccaaaccaaaacccaaacagcacttctcttccaatcgccgacgtcgccggaggcttcgccggccggagcagcgccgacggttgttttgcccctccctcgtccggcccagcagcccaggcgagcatgccttcgattgcgccaccgtcttcctccgtcgctgccctcacccgccaaccggtgcaattcttcaaagggtgcagtgtatccaaggagacaaagggaccggtccgcagtttcttcactgcaaattcaaagagcaccaaggtgaaatcagcgggcttgaaagtagcgtcatccttcaaaaatgatggtggttatccagctggcggtgtctcttggaaggacgacactctattgccaaaaagcacaaccattcgtggccaggaccatccggttgctgaccctgtactcccaatggattccatgattacgccagaaatcctctctgctaatgtggaacgtgttatagacatgtttgcagatgatgacactgatactgaacttgatttggatagcccgacagagggcttcgcatcaattgcagaagccattgaggacatacagcaaggaaaacttgtgattgttgttgatgatgaatcaagggaaaatgaaggagatctgataatggctgcctccttggttaccccagaggctatggcttttatagtaaggcatgggacagngaattgtttgtgtcagcatgaaagaagatgatctggaaagactgagcatttcctttgatgggtaccacaaaacttcatgaatccaagctatgcactgctttcactgattcagcggatgcaagattggaacaaatacttcaaagattcctgattggacggcataaaaggcgagtcctcgcagaagaactgcatgtcagggtgggtgcgctttacatcgcggtcaatctgctccataatctctgagtactcaaaaaactgattccaagcactggtcttcccaaggcttaaagggtgctcctctcgggttacctctgacctgtgcaggaagccattgtcaacatgctctgcacttacgttgtggtggccttctgttggcacctgttgcgctctttctacagggtttgtaaggaactcatctttgaaagcagcgtactgccctctcttctttgccagctcctgctcccacagcgagcggtcattgggcagatagcccagtagcagcttccatacagttgctcggacgcccgccgcgtctgggactccctgagccgccagcatcctcagttcatcgagatctatcaccttcttggacagctagaagggtacatcaccctcaatgacccctgagttagaagccaacaaaccaaaaccaagcaacacgcaaacagcaggaggccttaccgccgcaaagaggcgggactgccgagagatctcgaattccggcgtaggcgccggcggaggagatcgcggcgagctcgccatggatttgggcgtcgggatgcacccgtccgtgtggacgtgtggttgtcgcttcagaaacgtgcaggttggccagatatcatccgacccggccggcctcgag

SEQ ID NO: 145783 - DNA, 207 bp, Zea mays
  Clone ID: MRT4577_64467C.1
cgcttcctctgttgcataatcctccgctcgctcccagtaacaatcgcaattgcttatttgatactcctagcatcctcgcgcctaatcgttttagtggtaaccatcctaacccggctcctgtagctgagcaccgcacagctaaccaaaaattgcacgctgtccctaagttacgtatccgcgatagtatgcatagcaatgatcacttga

SEQ ID NO: 145784 - DNA, 306 bp, Zea mays
  Clone ID: MRT4577_64468C.1
gtaattcaagaatcctggactatctttttatgtgcttatttgagtttgcaaaaaaaaaaaaaaaaaaaaaaaaaaaaaaaaaaaaaaaaaaaaaaaaaaaaaaaaaaaaaaaaaaaaaaaaaaaaaaaaaaaaaaaaaaaaaacaaaaaaaaatatgaagataacaactaaatgctaactaaagctattggggatcaaaactcccgtaggggggcggccccttcaagaacctaatactttctgccgtcggtggcgctatatcgaatctttttcgtgccgtccaaatacaaaacgactgcccccttt

SEQ ID NO: 145785 - DNA, 320 bp, Zea mays
  Clone ID: MRT4577_64469C.1
cgtccggctcacgcgtcacggcatttccgtcaaagctccgggcctttctactcgaattttaactacgaaatccaccgaggccatgggctgagcccccggggcaaacccgtcgtgctagcggccctgtgagcagccgaagccatggcgcagacgatagacgagaagaaagacgacgatctcgacgaggaagagtactagtggacattcctgggcatagagaagggcgccgtgctgcaggaggatgaagtttagcatgaccctcagctagactcgcggggaagctgccaggttatgaccaagcttatgtacctggtcaacca

SEQ ID NO: 145786 - DNA, 660 bp, Zea mays
  unsure (1)..(660): unsure at all n locations
  Clone ID: MRT4577_6446C.1
aggagaaaaaaatttgagggcaccaatatctatcggttcctggcagtaaaaagaggaccccaagctagcaagcggcaaagctagcaacaacaacgaggaggaggccggcaattaactctcgctcaccacagcaaagtaacaagggcaatgaaaattccaagcgatataaaaccaaacggaatgcgaacaaagagacgtacggccggacacacacacacacactctcttatgcaccccacgcatcagtaaaggtagctgcaacacgtacaacaccatgctcgcttttgcttcgatctgtaggctaaaacgatgtgcacgagagagagagaaaggggcggctataacctagatgcaagcttatcagctggcatggcacgcagggggccggggcgaagtgaggacactaccttccttgctaaatatggctcgtctccgtgctccattttcgacccaacaacaagaacttgatcgaccccacccaccaccatgagtcgtcctcgtccatgacctgcacacagaaagaacaaagaaaccttgaaactagcagagagagagagagggagaaggtagagagagagaaggagcgcgccaacgtagtttgtactcctttgggaacctctcagtgttgcagtgtactggccggccctcgnaggggtaccc

SEQ ID NO: 145787 - DNA, 513 bp, Zea mays
  Clone ID: MRT4577_64470C.1
acgcctgcacgtaccgggccgcgagttccgcgggtcgacggcatcgcagctccaggcgacacgccagcatcctgacccagacccaccaccccacgatgcacctcttgtctgttcctcttcctccatgcaatgcaagtatgcaacgcaacgcatcttctgtttgctagccgccgctcccaacacgtcgctatcgccggcctcttcgggttcggaagcttccacgcctcggcatgcgcgctcccgacgtcatgctcgtcccggcgatcgtcctgacttgccggttcctctgcaggatttgaaaccgggttagaagctgaagctgaagctgaagcagggactgagacagcagcacagtctttgtttcggcaggaatgatatgtgcatctacgttgctcactgggggaataggacttgtgtggttgcttttgctgaaagattatagcatatcatcataggggaatggtggagtggtgagggaaaaagagcgcatggcatcttttgctcatatgcgtc

SEQ ID NO: 145788 - DNA, 601 bp, Zea mays
  Clone ID: MRT4577_64471C.1
cgcgttcgccacggctgcgcagtcctcctcctcgcctccgatcccctcccttcgacgatgcgagcacacccgctcatcctcttcgtacctgcaccgccacctcatcctcttcctcgccgcgccgacacccaccgcgctctctccctcccgcggcgacgcccttcgccaacgagaaccgcacgccgtcgtctcccacgggcactgtcgcacgctgggccacgctgcagtcggtggcgccgccacaccttcttcctccatgtgccgtcgccgccctattcttcttcgagatgcagccgctagcgctgccctcctcccagctccccttcatggccgcgtgcagggactatgtgccagtgttagtttttggtaccagtctacaggtctttcatttctacattcaaagcggcgacggtgtagtggtgaggaggcagaggagtgccttcggcctcgacggaagaaggccgccgatggagaagaagaccagctgggagcgtggcgcggcgtcgcggtcgtgcacgaggaggaggagcctgcacttgccggagggagaagaagcatgtagcacggtgcggtgctgcagtcgtgctaatacaagaataga

SEQ ID NO: 145789 - DNA, 208 bp, Zea mays
  Clone ID: MRT4577_64473C.1
cgcggtggccatgccgcccgcccatgccgcccgcccgcactgcactcatcggcagctacgtccatgccggattctctagtgttcggtgctacgcacacgcacaggtatgcgcagggtccatcgagctcgcttcccctcggtttggctctcgcttagagggccgcacgcccgccttgctgcgcgcgcatgcgcaggccggtctaggcag

SEQ ID NO: 145790 - DNA, 385 bp, Zea mays
  Clone ID: MRT4577_64474C.1
atattgtctacttataatgaattgaatagctggatggaggacatgtctgcgtacgtcaagctcatatgcaagaagcatttgctcaccgtcggcaccgaggggttatacgggccgacgagctctgaggagaatctggacgtgaatcgccgcacgtggaagagacatctactacaaggtgggacttcatcctgaacgccaagatcccagacatggacttggctttcatccatctctaccctgacacctggctgctggagcaacacgccacggtggacgagaagctcaacctcacgaagcggagggtggcgttccacatagaggaccgagacaaagagctgggcaagccggttctctgcaccgagttctggctgtagcaccgcgccaa

SEQ ID NO: 145791 - DNA, 437 bp, Zea mays
  unsure (1)..(437): unsure at all n locations
  Clone ID: MRT4577_64475C.1
tggcttgngacctttgggctgatttatgtgcttggggaaaaggaccggtctcgagggcatacggagaccatcggtcctagcgtcttagcaagagagtagactcataagacagtcctagcgaattcacgtcttaacactatcggctaaacttccgtgagttctgctacgaacttattaaaggccggagatgaactacacgtccttcataaggtagagaaagacggaacttccgagctcccagtctgctgcgtaaaggtgccggaggacgtacctaataagtccgagggacccctacgcaataaggttgaaggagtaacgcactcccctttctagacctcctcgttatagaaggtaactgaagtcgtcaaagtcgtcaagaaagtgttcgatgtccctcatgtctcttgctcttccgaactgatcggaactgctgcggc

SEQ ID NO: 145792 - DNA, 864 bp, Zea mays
  unsure (1)..(864): unsure at all n locations
  Clone ID: MRT4577_64476C.1
cattgggaccctcgaggccggccggggtctagtccagctaacgatccgcgcctttcgcgaaacagcccatcacggctcagggcacagccggctcggtccgcaccttctcgcccggcgcgcgccatccgatccatctggtccgcggtcatctgtcagtttgtttgcgcgaaaaaggtgaggaatcctcttgtgtcctggccgttggccgtcgctgcgtcgttccagatttggggaaggaaatccggcaccgagattcgagtcgaaaagatggcgcgtaccaagcagaccgctcgcaagtccactggaggaaaggctcctaggaagcaactcgctacaaaggcagcccggaagtctgcacccacaactggaggagtgaagaagcctcaccgttaccgcccagggactgttgctcttcgtgagatccgcaagtaccagaagagcactgagttgctgattaggaagctgccgtttcagaggcttgtcagggagattgctcaggatttcaaggtaggtgaaagcactgaaacctcacatgcgggaattatgggatatccatggaatggaagaccgatctgcgcttccagagccatgccgtgcttgctctgcaggaggcagcagaggcctacctggttggtctcttcgaagataccaatctgtgcgcgatccatgccaagcgcgtgaccatcatgcccaaggacattcagcttggcaagaaggatccgtggcgagnagggcgtaagtctgtcgacgggaggaagactctgcgctcgttttgtgtgtcgctctctcaccctgtagttttgtgagaaatgatctagtaactgtacttgggctgnttgactgtagccgcagtacatatgcatg

SEQ ID NO: 145793 - DNA, 281 bp, Zea mays
  unsure (1)..(281): unsure at all n locations
  Clone ID: MRT4577_64477C.1
ggcggcggctgttccgcagcgtgcatggacgctggagcagctgcgcaggagcagctgcccaagaaggacattatcaagtttctgcaggatcacggttcagattcgtttcttgcagaacataaattactgggaaacatcaagaacgtagctacctctgncaataaggaccatttggttactgcctacaaccatctttttgaaagtaagcgcttcaagggtactgaaactataagtagagtatctgaacacgtgaacaacgtgaagcttaatgacgataaaca

SEQ ID NO: 145794 - DNA, 894 bp, Zea mays
  Clone ID: MRT4577_64478C.1
cattgggtacctcgaggccggccgggaggaatcctcttgtgtcgtggccgtcggccgtcgctgcgctgcgtcgttccagatttggggaaggaatccggcaccgagattcgagtcgaaaagatccgcggtatcgctcgaccttcaaatacttcggcaacgtcgccggttcaggacatcatttgctagatggcgcgtaccaagcagaccgctcgcaagtccactggaggaaaggctcctaggaagcaactcgctacaaaggcagcccggaagtctgcacccacaactggaggagtgaagaagcctcaccgttaccgcccagggactgttgctcttcgtgagatccgcaagtaccagaagagcactgagttgctgattaggaagctgccgttccagaggcttgtcagggagattgctcaggatttcaagacggatctgcgcttccagagccatgccgtgcttgctttgcaggaggcagcagaggcctacctggttggtctcttcgaagataccaatctgtgcgcgatccatgccaagcgcgtgaccatcatgcccaaggacattcagctggcaagaaggatccgtggcgagagggcgtaagtctgtcgacgggcagaagaactctgcgctcgttttgtgtgttcgcctctctcaccctgtaagttttatgagaagatgatctagtaaactgtacttggcctgtttgactgtagccgcagtagcatatgcatgcgcatactgttggctgtttgtcgtgtctggagtcttttatccatccattctagtactacttaataatcgtgatatatcaccgggttgctaaacgtgtatccagacttaactgtgtgtttggctgtctgaacctcagaatcgttattgatgtcatcccattcgtcc

SEQ ID NO: 145795 - DNA, 847 bp, Zea mays
  Clone ID: MRT4577_64479C.1
acgcaggtgtcctaagatgagctcaacgagaaaaaaataaaaatctggtccgcggtcatctgtcagtttgtttgcgcgaaaaaggtgaggaatcctcttgtgtcctggccgtcggccgtcgctgcgtcgttccagatttggggaaggaaatccggcaccgagattcgagtcgaaaagtcttttgtgtaggacatcatttgctagatggcgcgtaccaagcagaccgctcgcaagtccactggaggaaaggctcctaggaagcaactcgctacaaaggcagcccggaagtctgcacccacaactggaggagtgaagaagcctcaccgttaccgcccagggactgttgctcttcgtgagatccgcaagtaccagaagagcactgagttgctgattaggaagctgccgttccagaggcttgtgagggagattgctcaggatttcaagacggatctgcgcttccagagccatgccgtgcttgctctgcaggaggcagcagaggcctacctggttggtctcttcgaagataccaatctgtgcgcgatccatgccaagcgcgtgaccatcatgcccaaggacattcagctggcaagaaggatccgtggcgagagggcgtgagtctgtcgacgggaggaagaactctgcgctcgttttgtgtgttcgcctctctcaccctgtaagttttgtgaaaagataatctagtaaactgtacttggcctgtttgactgtagccgcagtagcgtatgcgcatactattgggctgttgtcgtggtctggagtcttttatccatccattctactacttaataatcgggttgctgaacgtgttccggaaataaaaaaaaaaaaa

SEQ ID NO: 145796 - DNA, 165 bp, Zea mays
  Clone ID: MRT4577_6447C.1
gagcagaaagttggcaaccctttgagttcctcactcacacgcgcgcgagccgagagagcatggatcccaacgacgccttctcggcggcgcacccgttccggtgggacctcggcccgccggcgcacgccgcgcccgcgcccgcgcctccgcctccgccgctagcac

SEQ ID NO: 145797 - DNA, 789 bp, Zea mays
  unsure (1)..(789): unsure at all n locations
  Clone ID: MRT4577_64480C.1
ggaggatcctcttgtgtcctggccgttggccgtcgctgcgtcgttccagatttggggaaggaaatccggcaccgagattcgagtcgaaaagatccgcggtatcgctcggccttcaaatacttcggcaacgtcgccggttcaggacatcatttgctagatggcgcgtaccaagcagaccgctcgcaagtccactggaggaaaggctcctaggaagcaactcgctacaaaggcagcccggaagtctgcacccacaactggaggagtgaagaagcctcaccgttaccgcccagggactgttgctcttcgtgagatccgcaagtaccagaagagcactgagttgctgattaggaagctgccgtttcagaggcttgtcagggagattgctcaggatttcaagacggatctgcgcttccagagccatgccgtgcttgctctgcaggaggcagcagaggcctacctggttggtctcttcgaagatacncaatctgtgcgcgatccatgccaagcgcgtgaccatcatgcccaaggacattcagctggcaagaaggatccgtggcgagagggcgtaagtctgtcgacgggaggaaaactctgcgctcgttttgtgtgttgcctctctcaccctgtaagttttgtgagaagagatctagtaactgtacttggnctgtttgactgtagccgcagtagcatatgcatgcgcttactggtgggctgttgggcgtgtctggagtcttttatccatccattctagtatacttaaatatcgtgatattatcaccgggttgctgc

SEQ ID NO: 145798 - DNA, 425 bp, Zea mays
  Clone ID: MRT4577_64481C.1
gaaaaccaaaaatttttttatttttttaagggaagggggaattgcccttggcccataaaaggagggggaaaggcctagggcccttaaacctggccggggggggaatgaacattagggggcaaaacagggcaaaaggggggggaggactcgccgggccccggggggcaccaatgggtctttgtggaaaaaaacttgaccaatttgggggcaaatggggtttttcaagttggggccggacgaacgggaaagggggcaggggcccttttttttctgggggggttaagaaaaaagggttgggggggcccggtaaacccaaatggggcctggggggggggggcgacccgcccctggttgggaatggggacaggaagaacagggggtggttgtacccgctcataaaaacttgaaaaaacgggggggggggg

SEQ ID NO: 145799 - DNA, 203 bp, Zea mays
  Clone ID: MRT4577_64482C.1
gtgctaacggaacgctactccaagatgtgcctgctgtaggtcatggatcggtactcggctgtggtgcgtaacatggagcaagtggtgatgatccccaggcttctgagggatttggatctgagtgggtacggaggctcggtcatgacggatcccccgatctctatacctacttcatcatgctcaagagcatctgtgtataagtg

SEQ ID NO: 145800 - DNA, 904 bp, Zea mays
  Clone ID: MRT4577_64483C.1
cattgggaccctcgaggccggccggatctgtcagtttgtttgcgcgaaaaaaggttaggaatcctcttgtgtcctggccgtcggccgtcgctgcgtcgttccagatttgggggaaggaaatccggcaccgagattcgagtcgaaaaggacatcatttgctagatggcgcgtaccaagcagaccgctcgcaagtccacaggaggaaaggctcctaggaagcaactcgctacaaaggcagcccggaagtctgcacccacaactggaggagtgaagaagcctcaccgttaccgcccagggactgttgctcttcgtgagatccgcaagtaccagaagagcactgagttgctgattaggaagctgccgttccagaggcttgtgagggagattgctcaggatttcaagacggatctgcgcttccagagccatgccgtgcttgctctgcaggaggcagcagaggcctacctggttggtctcttcgaagataccaatctgtgcgcgatccatgccaagcgcgtgaccatcatgcccaaggacattcagctggcaagaaggatccgtggcgagagggcgtaagtctgtcgacgggaggaagaactctgcgctcgttttgtgtgttcgcttctctcaccctgtaagttttatgagaagataatctagtaaactgtacttggcctgtttgactgtagccgcagtagcatatgcatgcgcatactgttggctgttggcgtgtctggagtcttttatccatccattctagtactacttaataatcgtgatatatcaacgggttgctgaacgtgtatccagacttaactgtgtgtttggctgtctgaacctctgagtcgttattgatgtcatcccattcgtccggttgtcggttttaacatgttgatgcttgcgagtt

SEQ ID NO: 145801 - DNA, 880 bp, Zea mays
  Clone ID: MRT4577_64484C.1
gccggccggttcggggtccgcggtcatctgtcagtttgtttgcgcgaaaaaggttaggaatcctcttgtgtcgtggccgtcggccgtcgctgcgctgcgtcgttccagatttggggaaggaaatccggcaccgagattcgagtcgaaaagtcttttgtgtaggacatcatttgctagatggcgcgtaccaagcagaccgctcgcaagtccactggaggaaaggctcctaggaagcaactcgctacaaaggcagcccggaagtctgcacccacaactggaggagtgaagaagcctcaccgttaccgcccagggactgttgctcttcgtgagatccgcaagtaccagaagagcactgagttgctgattaggaagctgccgttccagaggcttgtcagggagattgctcaggatttcaagacggatctgcgcttccagagccatgccgtgcttgctttgcaggaggcagcagaggcctacctggttggtctcttcgaagataccaatctgtgcgcgatccatgccaagcgcgtgaccatcatgcccaaggacattcagctggcaagaaggatccgtggcgagagggcgtaagtctgtcgacgggcagaagaactctgcgctcgttttgtgtgttcgcctctctcaccctgtaagttttatgagaagatgatctagtaaactgtacttggcctgtttgactgtagccgcagtagcatatgcatgcgcatactgttggctgtttgtcgtgtctggagtcttttatccatccattctagtactacttaataatcgtgatatatcaccgggttgctaaacgtgtatccagacttaactgtgtgtttggctgtctgaacctcagaatcgttattgatgtcatcccatc

SEQ ID NO: 145802 - DNA, 361 bp, Zea mays
  Clone ID: MRT4577_64485C.1
aacgaggcactaggtcttgttatcgataagggcccgatacacatcacatgaccacaaagccactgcgggtcaaccagggcactacagttgctggcaggcaggggcgaggcaacaatactgtagatgaaggcgttgctgttgactgactggatggtgcctatgtgcagttttgtcgctgcccgtgctgttagaatattgtattaggctcctatagatgtggggccaagctgtcatatgcgcatgtacaagcccgacccaaggggtgctgccacctccagtggtgctggccttagggtttcctcccacttcatgttatatatgtatacctcttgggtcatatcaatacatcggatattgtggc

SEQ ID NO: 145803 - DNA, 479 bp, Zea mays
  Clone ID: MRT4577_64486C.1
ggaaaacgggaacccatttttgattgggcccgttacaaagggggtcgcccaaacaagggggctacttttccggggactgaagcctggaaaactgaattttaaaaaaaaaaaggggcctctactttttttttttcaggactaggtttttgattgcagatctaggaatcccaaaaatattcagcggggcaaagcaaatttggggggaccctggccgggcccaacaacaacaaaaaaccccccctcctgttacgggaactcatgaacagcacgggtttcaaaacctaaaccaaaagagttaaacttttaacccccccttggggatcatgggctctttatgtatctcggggcagcttttttaaacgagggccaaaagcttttcaaggctcggggcccatgagttcagggggccattgctgtcttgggtcgcccggaagctgacaactcccatgggcctgtcgatctttgccactagagatttc

SEQ ID NO: 145804 - DNA, 1436 bp, Zea mays
  Clone ID: MRT4577_64487C.1
ctcgaggccggccgggatcttcgtcttcatgatgtttttctacattatctgggggctcttgttgggatccttggccactgctgtgccgcaacacgagtcgaaaagggcagcccctgcacttccattattcaccaagggccgagacatcctcgacgccaatggaaatgtcttccacttcatgtcgacgaactggcctggccatcaggagatcatgataccggaaggccttcaacactcctccatcgaaaaaattgtatcttggttcccaaagctcggtcttaattctgtgcgaatgccatttgccattgagatgatcgatgactacttggcaaacagcccgaaccagactctggagaggagcgtcctaagatctattcctggtgccaacgggacgaccgttttgaactccattttgaaaaacaatccgcaattcaccaaaaacactactagactgcaggtatgggatgctgtcgctaaagagctggcgcgccaaggtatcgttctccaccttgacaatcacgtgagcaaggctttctggtgctgcggcgagaacgatggaaatgggtggtttggagaaagatactttgacgttgaaaaatggaagcgaggtttggcgtttatggcaaaacacgcaaaggaaaactggcccacattttcctcgataggtttacgcaatgagttgcggtctgctacgggcgctgagcctgtagactggtacacgtggtacatccacatgacaagtgctgccaatgccgtccaccaagctgacccggatgccctgttattcttttctggactctcatacgatacttacattgatcctataccacttggcaagacgcttagcggaaccgctggtacctctactgccaataagaaggccacgtttgtcccaagcgacttcgcgtggaagaacaagattgtgctggagattcacaagtacgactttgagggaacgaaagatgactgccagacgttcaagagaaaatggtaccagagtggattccaggctgtcaatgccagtgacccagcgaccaagtatgtctttccaatggtcatttccgagtggggctttatcaacaacggcgtttactggaaccaaacaacatatgccaagtgtctggtggagatggtcaaagagtacaaggttggctggcaacattgggagctttgcggtagcttctacctccaaacgcgaccgaataggcagcctaacacacttgttggtgcagatgaagcttggggcatacttgactacgactggacggctatcaggtcgcctgtcactcttgagaatagtctgttcaagatgatagctgccttgaaataggagatggtatgttgaaccacgttggtatacttctggtcgatcctacatgaggtagaataacgcggttcagtaagaaatacctatgtctcaataaattcctttcacg

SEQ ID NO: 145805 - DNA, 218 bp, Zea mays
  unsure (1)..(218): unsure at all n locations
  Clone ID: MRT4577_64488C.1
gaanccggggccgacccactcttccggcccttcttcggccgccacttctgcttttttttatcatcacgtcgccaagtataagtgcgaggttttcttcacggtttggcgcgccttctccaaccactaccaccaccattttcaccacggttgccactgcttctttttcctcaagaccagtgtcgaataggacatttacaccttcaccggctaggtccact

SEQ ID NO: 145806 - DNA, 403 bp, Zea mays
  Clone ID: MRT4577_64489C.1
accttaaaacgcgggccacgattattttggtcaccaacaaaaggttttacgcgggttccccggggcgaccaccattaattgaggagggactggggccgcccgccactggaggaggacacaccagacctggcacaaaccggttggggcaccttcttttttttgggggccggggcaccggtttcaggcgggggggcctcgttcatgccgccggggcctcccatgttgggacccgcgccctggtgcattttggggatgatgggggtgcaaagggtcttcagctccttcattttgtcatcgaactcgtccgcctcggcgagctggttggcgtccacccagctgatggccgcgtcgatggcgtcctccatcttcttcttgttgtcggcgggcagcttcgacgcgatct

SEQ ID NO: 145807 - DNA, 1582 bp, Zea mays
  Clone ID: MRT4577_6448C.1
tccatcgcgtccgcacagccacaagctgctgcgtgcttcctcttcagttcagctgaggtagcggcgcctcacccatcccccccgctacatacacatatctccttcttcgaagaactcggccctttgggagcgagcaggagcccgagcaggaccaggacgaagatcattatcaggagaagctaggggatatggcgaacgctggcggcggggcggccggggaaggggagtggctcaaggtcgcccagctcagggccctcgtccaggaggaccaccgcgccaaggaggtggacaacctgacgctgcgccggttcctgcgcgcgcgcggccacaacgtggacaaggcggcggccatgctgctcaagttcctcaggtggcgggcggaggcggcgcccggcggcggcaccgtgcgggaggagcaggtgcgcggggagctggagcaggacaagatctacatgggcggcgtcgacaggaccggccgccccatcatcgtcggcttgctggctaagcactactccgccaaccgcgacatggcggagttcaagagtacgtcgacgacgtggcctcttctttcttcatcaatcaaaatgcatgtgtacgtacgtgcggaggttttctttctttcttggccgttgagcgcgcgcgtgtgtgtgcggtgtgccctctctcttgttcttgtgcaggttttgtggtctacttcttcgacaagatctgtgccaggtaaacgtaaatattaaacgcagtggccggccggtttatcttcttctgtgcctagcaatggagatttactgctgttcatcatcaacatgtaaaatagaaagaaagaaagaagatagagagagagagagagacgattaatttaactgaacctcatgcatgcatgcaggatccccagaggccaggagaagttcctcgccatcatggatctcaagggctggggcttcgcaaactgcgacgtccgggcctacatcgcggccattgagatcatgcagaactactacccggagaggctgggcaaggcgctgatgatcaacgtgccctacatcttcctcaaggtgtggaagacgatgatctaccccttcatcgacgccaacaccagggacaagttcgtgttcgtggatgacaagagcctgcgggagacgctgcggcgggagatcgacgagagccagctcccggagttccttggcgggaagatgcctctcgtctccctcaaggactacgcccagcagcctcagcccgtttgcgagtgagtctgtcgtagcgatggtggccggccggtgacgtgagcgacccaaagccgaaagctgattcgatctagactaagctaatacagcctacaagagggaggaagagaggccctacccgtggaattaagtcattagtttgtggtccaattcaataagaaagtaaatgtggtgtgtgaagatggtatggcattatcagtctttaatcccatattatacatttagatagaagaaaatcaacttatatgtggtagtgttccctactttttatatgagataaataaagggatacggagaatgctgcacgcacgctctcgctcacgtttcatgtttttcgcgtt

SEQ ID NO: 145808 - DNA, 279 bp, Zea mays
  Clone ID: MRT4577_64490C.1
ctggcaggaaaatgggttaaatcagttctgcaacccactggccgtccggggggggcagaaatataagacgggggaaccctgcccattccccggaaagccaaagtttcgccgggaggagccccaagggagcccccccattttttttcggggggccgaacacccaaaagggaggggttttccccccccagtttcgggggcacgggtccccgtccgggcattaccccgggtggaggccccccgacccggatcttgaccacgtatccctaaatttggaaaagc

SEQ ID NO: 145809 - DNA, 146 bp, Zea mays
  Clone ID: MRT4577_64491C.1
ccttatcaccttgtacacagctacagggcaccattatttacattaccacccaaaggttttaatagcggcccaagagaccccggtaccttggcccctctcaagacgctcaactgacgttacgaaagcaaccacccaagcagcctcac

SEQ ID NO: 145810 - DNA, 1750 bp, Zea mays
  unsure (1)..(1750): unsure at all n locations
  Clone ID: MRT4577_64492C.1
aattgggtgcaacaagtggagggcacggacccccagttctaaaccctaaacctgacgccgccatggccgccgccgttcgccacatcgtgcgccgccgcctctccacggccgccgccatcactgcaccggtccccactccggcctccatcctcaacccgtcctcgccgagcactcccctcacctcgcgacataagacccgactcgccatctccctcctcaagtcttccccgccgcctccccccgaccagatcctctccatttgccgcgccgcggcactgaccccggagacacacatcgaccgcatcgcgctgtcgctagccgcatcaaagctctcctccgctccggacaccctccgtgacctcgcctccaccgtcctcaccccgcgccacgcaccccacgccatcgcgctcttcggccaggcacacctcctccccgacgccatctccactttccagtcctccccctccacccgctccctcaacgccctcatcttcgcgtgcatcgtctccggtaaccacacggaggccgcccgcgtcttccagacattcccagacgcccatggcgtcaagcccaacactgagaccttcaatgccatcatcaaatcattcgccgagtctggcaccataaggtccttttactcggttttcgatgaaatgtgcaagaagggcttgaagcccaactccatcacatttaccactgcgctcgctggtttctacaaggaggagaggttcgatgacatcaagaaggtattagagctcatgaagaagaatggatgtggtgagtccctgccggtatacaatgtgagggtgcagagtttgtgcaaactcggtcggagtggtgaggcgagggcattagtggacgagatgatgaagaagggcacaaagccaaattgggtgacctacaaccatctgatttatggattctgtaaggagggggatttggaggaagcaaagcgtctgtacaaggagatgggaagaaaggggcttgttggggatagcgatttctattttatgcttatttattacctttgtaagggtgatgatttggacactgcccttggactatacaatgaaatagcagctaagaattgggtgccatgcttctcaaccatgaaaatgcttgtgaatggacttgctgggagctcaaggatcgatgaggcaaagggaatcattgagaagatgaaagagaagttcccagataaaactgaggggtggaaggaggtggaggaagcatttcctcattagagtaaaacatcgatgatctcagcaaatttgccagtgctgaagacattgttggttggtagttgggactgcatctatatttgatcaactgtttcgagtatatgaagatatggcctggattcaattttatatagatgtgaatcatgctccagctgtgatgactgattaacagtggcagctgcaggttgttcttggcgatgccccagtagttaataccttttgcatattgaagttttagttgtgggaattagagagaataaaactgtcagttttgttggcacaggctgagcctgtcattgccttgtacggaccttgcgcctgcaatttttgcagtctgtaagcgatgcaatgtatgctataactgtaacgacttccgtttcagtttgaatggactgaaattaatgtttcctccctggaattgtgtctagcaaaacaaaaaaaaaaaaaagaaaaaaaaaaaaaaaaaaaaaaaaaaaaaaanaaaggggaaaaaaaaataaaaagaggcc

SEQ ID NO: 145811 - DNA, 340 bp, Zea mays
  Clone ID: MRT4577_64493C.1
ctcacgcgtccgcccacgcgtccgcctacgcgtccgctagttctagatcgcgagcggtgcgtcctttatactagcacaggaatatttttttaataatttagaaatgaacttacttatatctgggtagccacctacatcattctaaaaacttgattattgcactataattcataacaaatctaaaagacggcactaccaatgatgggtagttactagaaagctggttgctttgtcaaattatgttagtataatagcaaccattgacgcagttgtaacagggttccaccgttacacgcatcttgctagtaaaacgggcacaactgtgctttttttaataacg

SEQ ID NO: 145812 - DNA, 201 bp, Zea mays
  Clone ID: MRT4577_64494C.1
ccggccgggaggcatttccagttgagacatcagccattgccgagatctacaggcgtccttactacataattaagcacggccccgcgcaactaattaccccatcatgtcggacaacgtcgacaaggagaccactcctgagatcgactcccctatcacaaaggtcgagatcacaccaaccaggattgagatcgaaaaggcgcc

SEQ ID NO: 145813 - DNA, 277 bp, Zea mays
  Clone ID: MRT4577_64495C.1
gtgactcactcactagtaagcatttgcatttcctgcagagatgagctctctggcattgggtagacttcagtagataggtgagctgacaagagggcttgagctcgatctcatgatctgttacctagtggtgaagcactcacagagacaagttatttcgacaggacggaacacttggcttttaccagagatgtaatgtaattttgctgtagttgcgcaagggcagatccagaatgcattcatccagttgactatccagatagcttaaccacattcatgt

SEQ ID NO: 145814 - DNA, 368 bp, Zea mays
  Clone ID: MRT4577_64496C.1
gagtctataagtcggcggccgcccttcttcgggtggtgcacgtgctggtgttccgtcgccaggatcacgagcagctttctgttgaatataatgacttacgacgacagctaccatcaggcgaccttcatttgaacgtctataacacccgccgtaccatgtgctccttcacaggagcctagacatccaacgtgctcactcccatctctaccccaatgattagtatatatggctatacggttttgctgctacacaatatacatatactacctcccgtagacatgcatgatatagcctagctctcgtataggcccagacaggctgagttaaacaggattgaatgtataaaaacccatgaggcaaacctagca

SEQ ID NO: 145815 - DNA, 189 bp, Zea mays
  Clone ID: MRT4577_64497C.1
aaaaacaaggggaaggcaggggaaaagcattaaaacagcagtttcgggcggatttaaaaaagacgggggaagcacctgggaccccacctacaaaacttttattctaaggcacactggttttacaaaactcaaatacaaaaaatcaccgaactactcaaatacaagaaatcaccaaactccagtaacgac

SEQ ID NO: 145816 - DNA, 372 bp, Zea mays
  Clone ID: MRT4577_64498C.1
cctccaaaacaaccgacaccttaaaccctctgaagaaaaaggaaacaaactaaacggccgaggacggaggggcactggaaacaagccaacgccgaaaggggggaaaagggcaaaaagaacggacagccctccccatgtcacacaacccaaaaaaaaccaactagacccactaagggcttgggggggttactggtgacccagggggaacgagggggatggggtccatttaaacccaaaacaaatcaaaaatcattacaatccattccaatctaccccaaaccacaaggaaaagaaaaaacccaacaaggcccaaaaggggaccgtggtcccctaaacaagaaaccaaatgggttggaagggagtgagggggga

SEQ ID NO: 145817 - DNA, 477 bp, Zea mays
  Clone ID: MRT4577_64499C.1
cttaaaaacaaaacaaacaaaacaaaaaacaagctaaaaataataaaaaaaaatttttaaaaaaaaaaaaaaaaaaaaaaatttttgttccttcccggtctgcctttttttaagggctattttctgcagatttttttcactctggggggcgttcgggcgtgcgtttttctggcccatttgcccctattggggggccgtttccagtccttttgccggggctttactgcctctttcctgggctgtctttgccttacccggccttacttgctttcgcccgcatcggggtttgcccggctggggcccctcttaaggggcccgcggcgatcgccttttccaacctttgtgctctctggttggggcttggcccccctctgttccgccccttttaccccccctggtggggggtttcccccccctcttaaccgcttcttttgcctggtcgttggggcccgctccttgctgtttttccctttcctt

SEQ ID NO: 145818 - DNA, 388 bp, Zea mays
  unsure (1)..(388): unsure at all n locations
  Clone ID: MRT4577_6449C.1
naaaaaaaaaaaaaaaaaaaaaaaaaaaaaaaaaaaaaaaaaagaaaaaaaaaaaaaaaaagaaaaaaaaataaaaaaaaaaaagcatacaaaaaaaaaaaaaaattatatagggggcggcctattttaaatgcacctggcctgtcgttctacagcgttcctgtactgggaaaaatccctgtgcgttgcccatcgttaatgcgccttgcaggcacagtccctttttccgcctgcttggctgttttaacttaagaggctcctccccgttttgtccttcttgagcagattgctcccccctttattgcgcgaggtgggacgcggccctagaggcgcccccacttatagcccggttgcaagtggntggttcacgcccagggggaccagttgg

SEQ ID NO: 145819 - DNA, 574 bp, Zea mays
  Clone ID: MRT4577_644C.1
acgcctatctcgtgtcgatgacggagcaagtaatcggctgctacctatacgtgacaggacagcgacaaaggctcataacgaaatggtctgatagcagactctaaagcgcactaaggtagatacggaacctagctacacagagaggacatcaactgacacacggctgctgtaaatctcacgaggataccacgtagcacattgacgctcttattaaaaaataaaccatgaagaggactttaactgatgtacttatacaacaagcttgaatcatgatgctataataccacatcgctataacatgtgcaagggacgatcatgatattcagatagagcgaccaaactggactccatgaagcggatgccatacacgcttgaaggactcatcctaaacaaggataaggtcacaactatttaaaataaaacttgaagcaaaacaacaatggcttaatctctatgtcaacgcaatatcactgtttaacctactggagtgagctgcatactatagactgacttttactcttactagcacagctataaacactatagaaaataaggactgtgcacataccatact

SEQ ID NO: 145820 - DNA, 210 bp, Zea mays
  unsure (1)..(210): unsure at all n locations
  Clone ID: MRT4577_64500C.1
gtgcggacgctcgaggncggncggcgtacgttactcgagatcgaaaggatatgtctttccttatacggttttctttgacagcatttgtaagaaaaaaaagaggctgacgctcgttccagctcgtggcgctccgacgtcgattattggatttaaccccgccgatccccttggaggtgtttggtcgaaaaaaaaaaaaaaaaaaggccccta

SEQ ID NO: 145821 - DNA, 148 bp, Zea mays
  Clone ID: MRT4577_64501C.1
ctccattgcttgccgtctcctgccacgaatggtctggtcgctgtcttcttctgaagacctaacccaagacggtaggtaagtgccagcttaaagtctatctaaaagcggaccaccactgtccacctggacggcaatggcgaccgccgcg

SEQ ID NO: 145822 - DNA, 1597 bp, Zea mays
  unsure (1)..(1597): unsure at all n locations
  Clone ID: MRT4577_64502C.1
gggaccctcgaggccggccggggtctcccttcgctgattccatcatcgtcctccccggcttttccccaccaagagccggaagccatagcaccttctgccagctagtccccagccagaaggagcccacccccatcccacgcagcacagcggcagacaccgcaccgcgagtgacgcggcagcacaaaaccatggcggctctgccgttctcgacgcggcggcccttctcgtcgccgtgcttcatcctctgcttcctcctcggcttcgttgccggcctcttccccttcgtgcaccgccacctccacctcgacctcgacctccgccacctcccgctcgcggaccctcctcccgctgcgccgacccagcgggccctagtccggccgccaccgacgacgaccctgatcgtcgtgacgccgacccgcgcgcgcccgctgcaggcgtactacctgcaccgcctcgcgcacaccctccgcctcgtcccgcagccgctgctctggctcgtcgtcgaccgcggcgccgccacgcgcgagaccgccgcgctgctccgcggctgcggcctcatgtaccgccacctgccctcccagtcccaccgcgacgcgcccggtgctcgccggacgaggcccgagcacccggcggcgcgcggcctgcgccagaggaacgcggcgctcgaccacatcgagcaccaccgcatccacggcctcgtctacttcgccgacgaggacaacgtgtactcccttgacctcttcgaccagcttcgcggcataaggagttttggcacctggccagtcgcaatgctgggcgtggggaagagcaagacacttgtggaagggccggtttgtgacaacagccaggtagtgggatggcacacgaacgagaggaccaagaggcaacgaaggtttcatgtcaatacttcgggctttgctttcaatagcagtatgctctgggacgccgacaagagggctcgtcaggcgtggaattacatccggctgctggacacggtcagagatgggtttcaggcaacaacatttatagagcagcttgtagaagatgaaactcatatggagggcataccaactggttgttcaaaaattatgaatgttaatcttcgcctagaagataaacatcttgtatatccgaaggagtggcagatgacagaaaacctggatgtgttaattcctctctgagccagaacagaggcataccgccctgcagcttcagcaatcgagcacatggagacgcggccgagcatgacgtgcgtgtgtggcatatgtcaagctgttgtgggtcagcggaggtttaggttaggtgtgtacatcacccaaggaaatatgcacttaactttttcgcagatttgtttgtagcaaagagctaaaagctcccgattaggtacatgaatacatcatacaagaggatcttacgtccccagtagggccttagcctttgtgggcatttaaggtaaatacatctaactttttttggtttattgaagtggatgcggtgactacttttaccagtatagagactatagataacattggttaattagtttaaattatttaaaaaaaaaaaaaaaaaaaaaaaaaaanaactcgaaaggggg

SEQ ID NO: 145823 - DNA, 592 bp, Zea mays
  Clone ID: MRT4577_64504C.1
ttcgacgcgtgcgcttgaactagcctggcaggcggtacgaactggtcttttgatgggaatcatgcgtataggaccatggatatgtgcaactgcgtgcacgataggtgcttggacgttgctcgaagatcgatggctcgggtgaggaatcatctctaacaatttaatggctgctcccattggagggggtgcctacatgtttcgttacatgcaaacatatatgcaaaccctttaatgagggaaaggaccattctagggccaggactgctatagctaagaaagggctacacaaaactattcattggattataacccagctcaaaattaatgccatatcttctactatggataaactatgcaccaactctcctggtcatatacacacgactggactaaactcatagggtagatcaaacaatgtgcactatgagccagacacatgattgaatacatgaatcctaatatgatgtatatgaacaaatatttatcacccacagcacaaagctcgctatggcatatgggctaattcaaacaggccatcacacgacaattcatatcgagaacatcttactagtatgactctactgtgataatg

SEQ ID NO: 145824 - DNA, 1051 bp, Zea mays
  unsure (1)..(1051): unsure at all n locations
  Clone ID: MRT4577_64505C.1
ctcgaggccggccgcaggagcccgtcgacggcgtattccccggactccgaggaggagaccgaccaggtccccgccgccgcccgctacttcgacgccttggaaggccccgagctcgacacgctcagagccacggaggtgccggtgctgccgaaagacgagaagtggccattcctgcttcgcttccccatcagcgcgttcggcatgtgcctgggcgtgagcagccaggccatcctgtggaagacgctggcgtcggcgccgccgacggcgttcctgcgcgtgagccccgcggtgagccacgcgctgtggtacgtggcgctggcgctgacggtgctggtgtccgccatctacctgctcaaggtggtcttctacttggaggcggtgcggcgcgagttctaccacccgatgcgcgccaacttcttcttcgcgccgtggatcgcgtgcctgttcctggcgctgggcgcgccgcggctggtggtggcggagatgcaccgcggcgtgtggtacgcgctgatggcgcccatcttctgcctggagctcaagatctacgggcagtggatgtccggcgggcagcggcggctgtccaaggtggccaacccgtccaaccacctgtccatcgccggcaacttcgtgggcgcgctgctgggcgccaagatgggcctccgcgagggccccgtcttcttcttcgccgtcgggctggcgcactacatggtgctgttcgtgacgctataccagcggctgcccaccaacatgacgctccccaaggagctccaccccgtgttcttcctcttcgtcgccgcccccagcgtagcgtccatggcctgggccaagatcaacggccagttcgacgccggcgcccggatcgcctacttcatcgtgctcttcctctacatgtcactggcggtgcgcatcaacttcttccgtggtttccgcttctcgctggcgtggtgggcgtacacgttcccgatgaccggcgcgtccgtggcggcgatcacgtacgcgatggaggtggacaacgtgctgacccgggcgctctgcatngggctgtcgggca

SEQ ID NO: 145825 - DNA, 2760 bp, Zea mays
  Clone ID: MRT4577_64506C.1
actcatctaaatttgactgactgccacctgcatgttcatggatagatccggcagcatatagcggcagggtgagatatttctagctactgcagtgtgcagcgcgggaacgtaggacggacggagcaggggtcccgtcgtcatcccacttcgtccctgtcgcgcttaatgctgccattaaactgactgcttgcagctcatccgtgctggcgagctccactaataaatgcgtgcgtatctgtgtgcatcgcggcagccggcagggaagggctggacacgattgcgcgtctgcgcttcagcctccagttcccggtgacgacgcccactagtctctactagataggcagcgccggctgctgctgctgccgccgccgatcagggcttcgcctcccctgttctcgcgaagatccgattgctttcgcccgccacccgcatggctccggcgtccgagacggagctgcaagcaccaccaccaccaccggcgtcggctaaggagatcaagtcgccggaggtgctgccggagccaggctcgctgtcagcgctgcagcgcaagaagctgggtgcgcacttcatggagagcgacgagcgccgcgtctcccgcgccaggacacctctcggcgccgcctatgaaccgccctccgccgccgctggcggcggcggcaccacgccggtcaacatccgcggcgagcccatccaggacctgtcgaggaccggggggtgggtggccgccttcttcatcttcggcaacgagatggcggagcgcatggcctacttcgggctctccgtcaacatggtcatcttcatgttcaaggtgatgcaccgcccgttcgccagctccgccaacgccgtcaacaacttcctcggcatctcccaggcgtcctccgtgctgggtggcttcctcgccgacgcctacctggggcgctactggaccatcgccatcttcaccaccatgtacctgctggggctcatcgcgctcaccgtgagcgccagcgtgccggcgctcgtgccgccgcaggagggctgcgacaagctcgccatgctgctgggcgcctgcgcgcccgcggcgccctggcagatggcctacctccagacggcgctctacgtgacggcgttgggcgcggcggggatccggccctgcgtctcctccttcggcgccgaccagttcgacgagcgcagccccgggtacaagcgccggctcgaccgcttcttcaacctcttctacctcgccgtcacgctcggcgccatcgccgccttcacggccgtggtctacatccagatgcagcacggctgggcggcggcgttcggcacgctggcgctggccatgggcacctccaacgcgctcttcttcgtgggcacgccgctgtaccgccaccggctgccggggggcagcccgctcacgcgggtggcgcaggtgctcgtcgccgccttcaggaagcgggacgcggccttcgacagcggcgacttcgtcggcctgtacgaggtcgccggcgccaagtccgccatccgtggcagcgccaagatcgaccacaccgacgacttcagatggctcgacaaggccgcgctgcagctggagggtgacctcgccggcggcgaggacgaggaggcggtgaacccgtggcgtctgtgcacggtgacgcaggtggaggaggtgaagatcctgctgcggctgctgccggtgccggcgtgcacggtgatgctgagcgtggtcctcaccgagttcctcacgctgtcggtgcagcaggcctacacgctgaacacccgcgtggcggcgctgcacctgcccgtgacgtgcatgccggtgttcccctgcctggccatcttcctcatcctggcgctctactaccagaccttcgccccgctggcgcgccgcctgacgggccacccgcacggcgcctcccagctgcagcgcgtcgggctgggcctcttcttctccatcctgtccgtggcctgggcggggctcttcgagcggtaccgccgcgggtacgccgtccgccacggatacctcggcctcttcctcacgcccatgccggacctcagcgcctactggctgctcatccagtactgcctcatcggcgtggccgaggtgttctgcctcgtcgcgctcctggagttcctgtaccaggaggcgcccgacgcgatgcgcagcgtcgggtccgcgtacgccgccgtcgccggcgggctcggctgctttgtggcgtcggcgatcaacaccgcggtggacgccgcgacgcgggacgatgaggaggggcggccgtcgtggctggcgcagaacatcaacgtgggcaggttcgactacctgtactggctgctcgccgtgctcagcacagtcaacctgctcgttttcgtcttctttgccaagcggtacaagtacagggtcagggtcgacgtgccgaccacagttgctgttgataagcagtagctagccgctagcgccattacaaggatttgagtttggatgtgctgtaactattgattactgggaataccataaaacatagatcttgtaccgtcgcggcaatagaatagaccagccggaactggtgcctggtggagtgggagcttcagccttgggcctccatctggagatcaagtatccggtgactgctgccagctcaggagcgtgatagcatgatgaaccacatcgtactgctgactgttcatcagtaattccccagttgctttagctttgctacaaaaaaaaaaaaaaaaggccgaactgctacagactattttttttggaaaaaaaaaaaaaaaaaagcggcc

SEQ ID NO: 145826 - DNA, 754 bp, Zea mays
  unsure (1)..(754): unsure at all n locations
  Clone ID: MRT4577_64507C.1
gggtaccctccgggtccggccgggaaaacccgtccctcatacacatcgtcaaagctgcgggcgtggtaccggtagatctaatctcctgttaataagtatcgatttcgttttatttccttgttttttcggatcccaagttgttttgaggtgatgatcctttccccaaattatcgactatgattatactgtgcgatttttcgagctcttctcttcggagaaggcgctcctaagccagatgttctgatcgaaacaataacgcccgcctcctcctgaaaacatccttctttgtgcacccttcttattttgttctttttttttgttgttgttgtggttttgacgatggagatgaggatcctttccccagctgatcgactatgattatactgtgcgcaactgcgacgcctcctctgcggaggagggtcccaagccagaaatctgatccatcatgtgtgctagtttctgcatcgattgttgtaaaacatttggaatttgaaaggtaccctaaagcaaaaaagcaggactttgtgctctctctttaaacagtgtccccganaactttaggtacttaatatggatgtccatcgttattgggtgaacctttggacgctcgttcatgtggtggacggtctctcgtgtccattggttcaagaaacgaatggggcacttccgaactacacacaagcaaattttaaatgtctccattttttgggaatnttaggtaattcagtggaaaatgagtncggatttccccttc

SEQ ID NO: 145827 - DNA, 159 bp, Zea mays
  Clone ID: MRT4577_64508C.1
gaacagggtggggtggagactgccaatggacggacagaggtccgtgagcgagcttgtgaacatgaccgagaacaacttactgcgaatcgagaaacacaccagcgacggcggtgcttcaattcgtggaggccaaactcgatgcccgaggagaagatccgt

SEQ ID NO: 145828 - DNA, 382 bp, Zea mays
  Clone ID: MRT4577_64509C.1
acactctccaaactgaaaaatattaacagcttcacatcaggtgacatgctcatggggtataggaacgctgctcacctgctggtgttagctgctgctgctgcgtgctgcccgtgccaagtccggagcaacatcagccaaccaaccacctcctgcgctctccgtctcccattccgtgctcgctcagccactcgtagtttcggagtcaaccgccagcgcctggatccggtgaagccagcccagcccatggcctccggcaccgtaccaccgcagctggtcagccctgctggcgctcgccgtcctatccgtcgtctcattcacgcacctgtccctccccggctagtcccatccgctccctgaggaagctgctgctgctgctgctgca

SEQ ID NO: 145829 - DNA, 576 bp, Zea mays
  Clone ID: MRT4577_6450C.1
cccctcgagtttttttttttttttttttttttttttttttttttttttttttttttttttttttttttttttttttttttttttttttttgggtttttttttttttttttttttttttttttttaaaaaaaaccccccccaaaaaccaaacgggcgggggaaaacccccccccccgggccccccaagggaaaaccgggggtcaaccgggccccaggggccccaaaaagccccttcaacctgggaacggggggggtttttaggggaaaaccaatggggggccccccccaccccccagggggccccgttttaacccctgtttaaaccccagggaaacctttggggcccaaaaccgggggggggcccaaacctggccccggggggtttggcccaggggacccaccccggggccaaagggaccccagggggtgggcccccgggcccggggccaaatggccgggaaaccctttgaaagggtaaaggggggcccccccgggccctaaaaaaggaaaaggaaaacccccccctttttttaaaattccggggaaaaaccctgggggggaaaacccccttggggg

SEQ ID NO: 145830 - DNA, 246 bp, Zea mays
  Clone ID: MRT4577_64510C.1
ccacaggaagagggtgcttttctgttaaaaaaaacactcttacattttttctagcgggaaacaatcctctaaaaattagaaaagggcgtgacaaccctcttcaaaccgttcataccttaaaccaactaaactcttttgtgcacatgcggcattactagagcaaaccatggtttcctgtcccggttctgcttttcccggaaacctagagatgcccccccctcctggtttttttgcaagggtgatacc

SEQ ID NO: 145831 - DNA, 859 bp, Zea mays
  Clone ID: MRT4577_64511C.1
ggccggccgggaggttcctagaagaaaatctcaccgctgcttgttcctctcgtgagctcggcttccagatgaagtcatcggtgttgtctccagccgccctcctcagatttttgccgctgccgctgttctttttatatgcgcgcagctcgccggcgttatcccctgcaccgctttggcttgcaaaaatcctggccgccggtgcttatctcctcaagccgccgcccctggattcctataaatctcgccggagttcttctgctgcccatcttcttccttctgcgcgattctctggtgtccagtcgcccagctcccatggcgcgtcgtactcctctgcttccctgaccgccctgccctgccttccagtgccgcgtccggcttcttccccgccgcgcgcagcttcttcccatggctgcttgcgcagctgcgcctctctcctcccaggcctctcccagcgtgcgcgtctgctcttccagcgcgtccagccagcgcctgcgcgtcgcagtttcctctcctgtgctctgctcgccgagcttggtttctccctcgccggcgcgtgcccagccgtgctcccttgcttccctgccggcgcccattttcttggccgcgagcaagctcccgcgcacgcctggcttgttcatgcactcgccccagctcggcctctggctgctgtgcacgctccctcccgctccctgttcggcgcccaacttccctgcgcgcagctcgcgctcatgccgcggcatcgcctgctcgcagctcgcgcccaagctcctctctgccgagcatttcgcccagcctctggcctttcttcttgcgcacggcctgccccagctcgcggagttccctcgcggcgttcatctcc

SEQ ID NO: 145832 - DNA, 324 bp, Zea mays
  Clone ID: MRT4577_64512C.1
aaggggggttttaattttttggttccatcccacagggaaacttttgtaaaggggcccacaacaagggggacccaaggaaataagcattctacccacctttgccaagggccttacgaccaaaaaaaaatgggtcctggcaaaaaagaactaaaaaaaacatgcccccgcaaataaacatccccaaaaaactcccaaccccgcctcaaattttccaagagaataaaaatccttgaaaaaacaaaaaggaaccccaacctctttgaaattccctggatgaaaaaacacatataagccccccccttgaacgaaaacttgctaaccccc

SEQ ID NO: 145833 - DNA, 487 bp, Zea mays
  Clone ID: MRT4577_64513C.1
ccaaaacaataacaaaaaaggcacatgctggcatacctcaacaaacaacacggtttcggcttctatcacaaacgatgcccgagcacaagcaaactagcaatcgataaaacccgcacgcgtgggtttgattgctttttggcttgccaaaagacctcctcggaaccggacgaaaactccttctcccccttttgctaactgcaacaacggccgtgagccttatgttaccatcagcaaacctaccaaggggaacataaaatgagaaccccatcccctccttggccttaaggaagctaatggctcaccataccagcataagcgacacctcacgaactttcactccatcccaagctgcttgccccaccccctgtaaatctttgtaaagaccttaaaacactatacagctccggggaagaattaatagtcaaacacttgtttataaacccagacaatgtgcccgcaatagttcaaaaagatgttcaataaagcg

SEQ ID NO: 145834 - DNA, 226 bp, Zea mays
  Clone ID: MRT4577_64514C.1
tgttcatcgagatctgaaatctccaaacttgctggttgacaataattggaatgttaaggtttgtgactttggactttcgcggttgaagcacagtacatttttgtcatccaaatctacagctggaacagtgtgatgtttatagctttggtgtcatcttatgggaactggcaacacttagaatgccatggagtgggatgaatccaatgcaagttgtgggggcagttgg

SEQ ID NO: 145835 - DNA, 236 bp, Zea mays
  Clone ID: MRT4577_64515C.1
ctttctcggctctgaaggaactaccttattctgcactagctccatccctagagccctgcttctccaggcccgagagaccagcaaaccgtcgccctccgtcccgttgggccccacattcccccactgcctcacagcctcagtcacccggagacccgacgtccttggaggagcatggtggcgaggagccgcccgaggagcagccacaccgagatgcaagcttgcatggattatcacag

SEQ ID NO: 145836 - DNA, 1202 bp, Zea mays
  Clone ID: MRT4577_64516C.1
aaaacaaagaacacaatgtatgtatcctatattgaagtgtccttttttaaaaggaacaattggatctataccattaaaagatccaaactttagatatataccatggaccccacatgtcattgactcatgtggacccacatgtaagtgagatagtaatggtatggatccaaagtggtgatcttttaatggtatggatccaaatttccctttttaaaaacgaactatattcaagtgtcctgattgtacagagttttacaacgcttcaaacttccagatacgctgctgcctattgcgcagcaagacagaaaatccacttagcatagccacgcacttcacaatgaacacacagagctctcactgcttttcagagggctcgcacccggtcgcacccggttgggtgtacaaaggactaaaagagggattgacgatcagttgctacacactgaatcacttctcccgatgatgggcaactctatacataccctaccacggggtccttgtcgcagacggcagagtgtctaccaccgcctggggcgctcaatctacaagccgcgcccgcatttgcgggctcttggacaaaacacaaacggcaaaagaacaaaaactatgcacaacgggaagttgacagccctcctatggagtcaagttcactgagatttcttgatgaacatgggggctctgggtctcctggtgagaaggggtcactagtctttgaacagtctttagggcacttgttaactgtgcaaatgaagggcgcagatttgggtccttctgccagcattcgaatatgatccttgctaccagaggatcaacttccttgggaatatcaagccgtctatcctggaaaccaactgcccccacaacctgcattggattcatcccactccatggcattctaagcgttgccagctcccataatatgacaccaaagctgtaaacgtcgcacttttcattcgattgttcattccgtagaacctcaggtgccatccactcaggtgttccagcagtggatttggatgacaaaaacgtactgtgctttaaccgtgaaagtccaaagtcgcaaacctttacattccaattattgtcaaccagcaagtttggcgatttcagatcccgatgaacaattgtaggtacactagtgtgcaggcaattcatgcctttggccacatcaagggccatcttgatcctccgcttttcatcaa

SEQ ID NO: 145837 - DNA, 1320 bp, Zea mays
  Clone ID: MRT4577_64517C.1
tattctgaatctccagatacgtgtggtcatttcagtcactaaaccacacaagctggtttagtctggggcaacataatataatagatttacaacgaactgaatcactgaattgcctggggaaccaaattgaacgaatgaaatccgtggaaatcgattgttatattctgaatctccagatacgtgtggtcatttcagtcactaaaccacacaagctggtttagtctggggcaacataatataatagatttacaacgaactgaatcacttcattgcctttccaaagacattcaatccccccttggaacagccatcgtccttctgggctctggctgcaggctctagcaggggcttctgatacttgaaagtcccatcaacgtcctccacattattcaagctgttggttgggtagccgatttcacattagaagggaggtccaataaaacttccctgtcatattctactctcggcaggcactggtgccaaatcgaagtgctcctccagcacagcgaatacttctgtcagtgaggacaccttgaagtcaggttttacttcctcaggtaaagaatcgtgaggaccatatcgccccgtttcatcaagcaagcaagtgaaagctcctgccctctttccacaaacaacatcatccttgagactgtcgccaaccatgatcacttcgtgtggtggaatgttccaagcggagcatatgtgaagcagtggagcaggatttggtttataggggcgaaattctctgctcagtgcaggagtgaacgtcataccaaatctttggtggaacaaatcaactgtgtccttcacattacgggtgatcaaacctcttctgatctgcttcgcgtccaggaagccacacagctccgaggccccgggcatgatctggaggcggtcgaggccctcccgctcgaagcgcgcgatgacctcgtacgcgtggcgctgcttgtcgggcgcccagtcctcgatgcagtggaggatgtcgacggagcctccccccgagccgcgcgccgcggcgtaggcggcgtccccgccgagcacctcgcggtacatggccgggaaatcgatgactggcaccgtgagggtgccgtccatgtcgaagaccaccccgcgcagcggacgcctcggcccggacgcgggcgaggcggaggcggacatggcccggcggccggcgaggacgcggcggcggtggaggggcgcggcgcccgaggcgtggggcccgccaaggagcaggcggtggggcccgttgagcaggcgggggagcatgcgtgcgtggcgtgagagcgtgacctgggccgctggatgggccctcccgtatcg

SEQ ID NO: 145838 - DNA, 479 bp, Zea mays
  Clone ID: MRT4577_64518C.1
aaaatctggaaatgtaacttcttttttctgggtggccccctccctcatccaaaaaactttttttttggattccccctaataagccatctaaaagaagggccccccccatgatgtgttgttgggaggaggctgctgggtttgtcaaaacaagttggacaaagggcaacaattgttgtatttgtaaaagggttgcggggttacccccaaactactggtaaaaaggcaccaactgttgctgtgtcaaaaaagaaacccgggttgctgcaactagctggctaaatgggaaaaatatttgctgctgcaaataaacagcggggttcaaggcggcccattggttaaatggaaaaaatttttgttgataaaagtaggccaaacctacctggctgaatgggaatagttgttgctgcaaataaaccacagggttcaaggtaaatagttggttgaatggaaaaaattgttgttgcttatattagggaaaa

SEQ ID NO: 145839 - DNA, 1014 bp, Zea mays
  Clone ID: MRT4577_64519C.1
ttgggtccctcgaggccgggccggggcaacaaggccacatcagcagagagcccagcaactgaaaaaaccaaccatcgcgcgggcacggttgcggttgctacctcccgatcccgtcctcccgcaagccaagctctctctctccccctccccttcagcacgatcggagtccaagtccatcccatccagacccactcgacagtcgacccgatggcgccgtccatctccgtcggcgccgcggcgccgtcccgtgcagcgggcgcgagcacgaagaagagcgcggacgaggtggagctcctgcggcggcggaacgcggagctggagcgggaggtggcggcgctgcggctggagctgggcgcggcgcggcgccgcgccgagacggcggaagaggccgaggagcggctgtgcgtgcagctcggcgacgccgaggtggaggcgctcgagctcgcgcgcgcctaccaggcccacgtccacgagctcgccagggagctcgccgccgcgcgcgcggccccggcacgcccggccagataggttctcgtgggctggtagtaggctactagtagctatagcgtgcggttcagcgggatggctgtggttcccgcgtttggttggcgtcggacggcaccccgcgccgcggtgccatttatttgctcgccgccggcatcgtcgtctttgctttttgctgtgtcgatgatgattctttaacgaacaagagtccatgatgacgcgtcctatgaaaaaacaaataaagttgactgttgaggctaagggcatgtacaacccagatactgctgcacggtactccaagtacaaaatacaactaaaacacaatataatacagtggtcatgtctaaaacatgtgtcttacgatattcattgtgccaatcagagtattcaataaattaaagtgcccaatcagattaaaacctgtcgcgaacatagagctaaaaaaaaaaaaaaaaaaaaaaaaaaaaaaaaaaaaaaaaaaaaaaaaagaaacaaaaaaaacacacccac

SEQ ID NO: 145840 - DNA, 1780 bp, Zea mays
  Clone ID: MRT4577_6451C.1
caggagcaggacaggacaggacacaggaagatcatatcaggagaacctaggggccggatatggcgaacgctggcggcggggcggccggggaaggggagtggctcaaggtcgcccagctcagggccctcgtccaggaggaccaccgcgccaaggaggtggacaacctgacgctgcgccggttcctgcgcgcgcgcggccacaacgtggacaaggcggcggccatgctgctcaagttcctcaggtggcgggcggaggcggcgcccggcggcggcaccgtgcgggaggagcaggtgcgcggggagctggagcaggacaagatctacatgggcggcgtcgacaggaccggccgccccatcatcgtcggcttgctggctaagcactactccgccaaccgcgacatggcggagttcaagagttttgtggtctacttcttcgacaagatctgtgccaggatccccagaggccaggagaagttcctcgccatcatggatctcaagggctggggctacgcaaactgcgacgtccgggcctacatcgcggccattgagatcatgcaggtccgtccgtgcccccgttaattgcttctgctttcactcaacggcggcacgcagctgccctctgctctgattgacagatgacggcgacgaccctgcttctcaataatcctgacggccgctcgtctgcctcgatcgtacgcacgtgcagaactactacccggagcggctgggcaaggcgctgatgatcaacgtgccctacatcttcctcaaggtgtggaagacgatgatctaccccttcatcgacgccaacaccagggacaagttcgtgttcgtggatgacaagagcctgcgggagacgctgcggcgggagatcgacgagagccagctcccggagttccttggcgggaagatgcctctcgtctccctcaaggactacgcccagcagcctcagcccgtttgcgagtgagtctgtcgtagcgatggtggccggccggtgccgtgagcgagccaaagccgaaagctgattcgatctggactaagctaatacagcctacaagattagagcggtggtaacaccgcagagtacgcgggaagtcattagtttgtggtccaattcaataagaaagtaaatgtggtgtgtgaagatggtatggcattatcagtctttaatcccatattatacatttagatagaagaaaatcaacttatatgtggtagtgttccctactttttatatgagataaataaagggatacggagaatgctgcacgcaaaaaaaaaaaaaaaaaaaaaaaaaaaaaaaaaaaaaaaaaaaaaaaaaaaaaaaaaaaaaaaaaaaaaaaagaactctgccttgttaccactgctaaccaaaaggggcccccccatatagagcgccccaaatttacggtccccgggccctcattttaaaagagcctcgtctaaaaaaaacccctggggggaaaaaaaaaaaccgtgaccaaaaaaaaaccccttgtggcaaacacgcccgtatccccccagaagagcccccctcatagccctccccccaataaccactagccccaacaaggaaagaccccccccccaatggggctccccaaaaagcgggaaatgtaacgcctacagggacggcgaaatggacacgggcaacagggccattgcccaatgcattaaccctcaaccctaacccttcctcccccccactcttgactccccccacctgttttaactcgcgctttttaatttgggcccccggtctgtttttcagggacgcctttatt

SEQ ID NO: 145841 - DNA, 427 bp, Zea mays
  Clone ID: MRT4577_64520C.1
taccgacctttggtctttgacattcttcagtctgggtttacacaaattcacatgttctttttttctttctttcttgttttggtttgaagaaactacacactgcacggtcacaactttactgccacaacaaactatgcactgcaccattggcattgccatggcacgctctgcttctgccagctctgcattggttaacagcactcgcagtccattcagcagaccaggagaccgttgctgcatgcactgctccatggcggcgacgggctggtgtctcggatgcgctcgcgatctctcagttgtagttggacctccatggagccatggcggactggctcgcgttcgagacgtggtgcggccgcgtcgggtcgctcgccgcgtcgtgtcgtggctgcgaataggggttgccgtggaaggcggaggaggagct

SEQ ID NO: 145842 - DNA, 523 bp, Zea mays
  Clone ID: MRT4577_64521C.1
tacgtaagctcggaattcggctcgaggcgcccactgcccatggcctgcaccaacagtgagctaggacaacatggctgggaggttaatgcaatgaacacagacaacctgacatgaaaacttgcattgatgtgggatgtggacccaggttcatgtattaggagagcgctatcaaaggactgctcatctatgaagcagattattatgacactaatggatgacgatatatcaaagcacctccaaatcattgaaagcagtctagaggaaggaggagaaaaggtatggataaaagaaacatcatgaaaccatggctctattgccatgagcagaggctaagtttcacgtatggtagggccatggagatgccactagttataccgccaggactctgagagtccatctgtttgttcatgcagtattacaaatgaagccatagctgtttgccttggtggccccacttcactgaggaatggagaatcgtaatataatatggaattaactacacttgctcacaccatttcttgag

SEQ ID NO: 145843 - DNA, 531 bp, Zea mays
  Clone ID: MRT4577_64522C.1
ggtacctcgaggccggccgggccgggtaactatagcctctcacgctcgcagactgcctccttttggatccctttagatagccaccgccgcccgccatccaacctgtctcctaataatgatacaggctcgcgcgcacccgctcagcctcagtcccagcgactgtctctcgtgcgaggcatgccgagaaggaaaaagacattggacctcaggcacaactaaaggaaaaggtgatctaagtggtgatgttcgatcacagtacgtacgacatactgctctctgcaggtgacctggcacaggtctatcaccccctccatcctatccgagtggctcatgtggatgtctatgtgactaggtgggttatcaaggacctgatgccgcgggggatattgcggaggttgtctgcacactcttgaaggctgatctacccctgtgtcaaaaggatgaagggaagggatacactggtgtgccctctcagtaggagctcaactctctcaaaaagaggtgccttctctgacaggagcttgtgaaagt

SEQ ID NO: 145844 - DNA, 218 bp, Zea mays
  Clone ID: MRT4577_64523C.1
agtactgacctgaaaacttgtgacaagaaaaacaccaacaagtgctccctgggctgaggaccctttcttgcatccccaccccggaagctgaacctgagggagacaacggcagagggagtgagcaggggagaaatagcagagggcattggagggtcacataggtagatggtaaagagaatgaggagaaaaaggagaaaagggaaaagcagaaaggaaaa

SEQ ID NO: 145845 - DNA, 382 bp, Zea mays
  Clone ID: MRT4577_64524C.1
acggttgcctacacgaccattatggatctctatttctcgttctgttagcttacacccacgatgggagtgttagcaggttacccccgatttcaactccgctctctattatatagtgttgcacttgaaaacctatcatatgatttcgttgccaccagagcaacatcctccagtgattgagctacataatatactttcagctcctaaatataagcaactgacagctaacacagcaaaaatgctggttgagaatctgtcacatcacataattgctagttgatcactaatactaaactggaaatgatccttacattcgtttatgaaatcaccactcctcctgtaacctcgaatcattgtccgcattctgattccatcatgatccata

SEQ ID NO: 145846 - DNA, 253 bp, Zea mays
  Clone ID: MRT4577_64525C.1
gacacgcgtccgcggacggtgggcgacgcgtggcggacgcgtgggcaagaagcctgccaggctgggctaaacaagaaggagaatgttaaggccctggaattagaatggaactcgactggtaagattgtgccctctagtgaggctgatgtcttggatggccttgaacccaaccaatatgttaaaaagcttactgttagaagatatcgtggtgatagatcaccaaactggcttaacacaagcttgaaagtgagtg

SEQ ID NO: 145847 - DNA, 2753 bp, Zea mays
  Clone ID: MRT4577_64526C.1
tcgatttcgtatctatttcaactctttagcatgtttagcagttttttttttttttttgcattcagcgttgctttgcctccgcaaggtgcaagaatctgagctgttgacgaaggaacttattagtgcgtaattgttaaatagtgcaacttattccttggagttaatgattactaggactttttttcgtgaaattatgatgatgcatttttttttcggttctgtcatgctcaagaattgaatccctgccatttttgggcaatgttctgattttgccattgccatatctgactgatagatcccagaagttcagctgctagtctatcaggatggccgtggaaactgccagtgacgctcaggtggcacaagataacgagatttcccccagcaatgaggcaatccaaggtgatgagttggctcatggcgaagagctgttccaaggtgatgatcttgttcaaggaaatgagttggttgtttctgaggtaacaacacctcctactactggaatcagacgtaggaggaagaagtccttggtatgggagcacttcactattgaagccgtcgcgggcggggccacaagggcctgctgcaatctctgcaagcaaacctttgcttacagctctggctcaaagattgctgggactagccatctcaagaggcacatcaccttgggctcttgtcctgagataaaggaccaagatcagaggctggcactgccttcagctggggggactgacaatgatggcgaggcaactgcagagcgtcctaccaagaggcgctacagcactggttatgcaaatgctgcttttgatcaccagcggagcactgctcttatctggcaaagatgataattttgcatgactacccacttcacattgctcaacagtcatcctttactaattttattgagagtctgcagcctcgtttcagggttgtagatgttgaaacaatggaaggagaggtgtatgctgtttttcagaaagcaaaagaaaacctgcttcaagcattcaacactatgcctggaaggatcagcctcactataggactgtggacaactagtcagactcttgggtatgtttctcttgctgggcagtttattgactctgattggaaagtgcaccgaagaatgctcaacttcatgatggtgtcatctcctcattcagagaatgcacttagtgaggctattagctcgagcctttctgagtggaatatgaaggacaggctattcactatcacattggggataatgactcttcacatgatatttacagtgcaagatcatctgtctggatgttacaacccagtggaacaccacctatctcatgcttaaaaaaaaaaaaaaaaatgtctacagttgcattaaattcataaatgcttcttctgcccgacaagagaagttgctgagattgctctgcagctggagattcccagtaccaggaccctctgtctggatgttacaacccagtggaacaccacctatctgatgctgctggctgccttggattataagcaggctttcactacactagaaacatgtgatgataactacaatgaagctccatcatcagaggactggaggaaagttgaggctgcctgtaattacctgaaactgctatacgactctgcacatagtatcatggcagcagcaaacccaactgcaaacatctttttccatgaagcatggaaacttcagctagagctagcaaatggcacaggccatgaagatcccactttcagaagcatcgccaaggatatgcatgagaggttcgacaagtactggaaagattgcagcctcgtgttagccattgctgttgtcatggatccacgtttcaagatgaagcttgttgagttcagttactcgaaaatctatggggctggggctgcaaagtatgttaaggtggtcgatgatgctgtacatgagctgtataaggagtatgtggctcagccactcccactgaccccagcctatgttgaccaggcgaagggaataatgggagcagccaatgcgaatagcagtcaaggggctcctgcttccactggtgatggggcttctagacttcgatatgtacctttctgagatccaaagtagccagccctcgaaatctgagctggaacagtacctggatgaatccctcactccacgtatccaggagtttgatatcctgaactggtggaagctaaacacagtcaagtttccaaccctctctaaaatggcccgtgatatcttggccatcccaatgtccatggtaagcagtggcagctccatattctctgctggaactgggaaccgcatgctcgatgactacagaagctctctccgtccggagactgtggaggcacttgtatgcgcaaaagactggctccagtattcaccgcctgcaactgaggcgccaggttctgagatgatcaaggcagaagcattgtagattgccgatactgcttccatgttgaagcacaaataagattgtggtatctttgagtatagttaaccgtaggcatattttaggcagcaattgcagacatatatctcttctggcattaatctctaatggtgtaatttgtcatgtcgaactcagtttaactcattgtagtgtgtattgagtttagctgtggtctgagggatgtctaagggattgaggtggtaaacttatttccagattctggctattgttggctcaggcattcaggtgatacacttatttccagattttggttattgttggtgctgctgtttaaaaaaaaaaaaaaaaaaaaaa

SEQ ID NO: 145848 - DNA, 199 bp, Zea mays
  Clone ID: MRT4577_64527C.1
gacccccccttgagcggcgcataaaccgccgcgggtgtgggggtcccccccctggggacccttaacttggccaggccccataggccccctcctttagttttttcactttctctttatccacccttgccggttttcccgaaaactttaaacggggccccctttggggttccaataaaggcttaccgccctttcccccaaa

SEQ ID NO: 145849 - DNA, 281 bp, Zea mays
  unsure (1)..(281): unsure at all n locations
  Clone ID: MRT4577_64528C.1
gcgtccggccgcggcccgttcggagaggttttcaccttngtaccctggcggcagcttcgacccgctcgggctcgccttccacccggaggcgttcccccagctcaaggcgaaggagactaagaaccgccccctcgctatgttcttcaagatcgggtttttcgtgcaagctattgtcaccggcaagggccccctcgagaaccttgccgaccacattcgtcgaccccttcaacaacaacagctgggcttaccccaccaacttcgtcccccactagtgagcaagg

SEQ ID NO: 145850 - DNA, 688 bp, Zea mays
  Clone ID: MRT4577_64529C.1
cctcgaggccggccgggccgggtttctcatcaaaacgctacagcttgcagcgacgcctcgtaagcgcccccggttcgaactccaccgagcatgcgagagagcgccccaaccgcagcatgatcctcaacatcgaggacccttcaggcgcgagaaaaaacaagctggaaataagatcgacgaccagaagatgccggccttttataagcgaagaatgttccaggaggtaagaaggcgatggtctggaagaggctccccagggttatgtcttgaacagcctgaggtgaatgtggctaacaagacttcccagagaagcgaggagacctaacttatgtacatcgttcatgttctgcatccatagtgcaccctccacttcttcctcgcgtatgacggcatgaacgtcgtgagttccttcatgaacgacctcttctagatcgtcgaccaagaggtatccgagatcgccttgtagattgagaagaccgccgtcaactatctggatatcctgacctccgctgacatcgcactaatcagggatctcaccaaggacgccgacactgaagggatgtacgagctcaccaagtatgcttacgtactagattgcgtgccctccctctccatgacactgacgactggtaacagatatcatgtaattaaggcagctgaagctaacgggttgtgacaccctttgccc

SEQ ID NO: 145851 - DNA, 399 bp, Zea mays
  Clone ID: MRT4577_6452C.1
ctgcagggtgccgggccggaatatatagctggatcgacgagctcatctttcggtgggcgcccttatttttttttttggacgttttatgctacccgatacattacacatctgtgaaccaaacatgagattactaccttgagcgagccagcttgctagatcatagaggaatacgtgaacaaagccagaccaaaagctaactcacaaagatctatggacatacaggaaccaatctggcagttggaagcctgagattcatgaggcaaggcaccttattattggcgagtgaatcttgccaggaacgaattctacgactcagaagcttgacattccagagcatgtcgacagccattatgattttcggcccgagacggagatcctgctggacacacaagagaccga

SEQ ID NO: 145852 - DNA, 286 bp, Zea mays
  Clone ID: MRT4577_64530C.1
tgcattctcttgtacaagggatgttccctggggtatgaggcgaatgtaaacaggcctaccttcccaaaaactacaatgctgggaattactggaaaataccattgcctagaagcagattcgtgaggtacaagtccagtctgcacaacaccactgcactaattatatgatgtgccgcattgatcatgacaaggccattactagattggctacatacagatgctcctgctcctgatataagctcctgcgagatagaactttgcatatgtaggatcataatttatgtagt

SEQ ID NO: 145853 - DNA, 250 bp, Zea mays
  Clone ID: MRT4577_64531C.1
aatacaaaaaaaaagcctcgattaatcattccaggctggtttgggaaccccattttctcatagttttttcatttgaaatttccaaaaaaaattattttttttttccttggaaaaatgaaaatcttttaaaaaaattgttttcccaagcttgtcttacaagggtgattgttcaaccccaatccacaaaattttagcctcagggattagctaaaaccaagattggtggcaaggctccagccttgagcccaat

SEQ ID NO: 145854 - DNA, 156 bp, Zea mays
  Clone ID: MRT4577_64532C.1
catctaggcacttggcgcctgataaggcttacaggcttgagctgcacatgtcccagaaggggcccgcatatagcggcgcactagaacccgaccttgtcctgaactcgctccatctctgcgatacgttggacgaccttgacctgtggggatatataa

SEQ ID NO: 145855 - DNA, 381 bp, Zea mays
  Clone ID: MRT4577_64533C.1
aaaccaccatcgaacaatataatcaacaatatttctttttttaaacttactgaaaatcaaacaaggcaggatctaatcaaacacacccttccttaatatcctaaacttcgctcttagtactaattgattcttgctatgaacaataattacaccaatcacctttaaacatataatctttaacaaaggcacaacaccactgattatattcacaaccctacaattaacatttccactaaacaaaccttacatctccatctcactatttaaagcctcaattcaactatagaaaaaaacacaataatattaccaaattttttatttaaaccacaacccaagttatttaattataaaaacttttcacatctattcaataatcttcaa

SEQ ID NO: 145856 - DNA, 310 bp, Zea mays
  Clone ID: MRT4577_64534C.1
aataattttttttttttttttttttttttttttttttttttttttttttttttttttttttttttttttttacacaccacagccaaaaaaaattttgggggttccacaagaagttgggcatacatattcaattttgccaaagcaaaagaggggccattcattgtcccctttgaacaagctcattggttgcattatttttattatacccccccctaacttttggcaaattaatgattagcaaacatgccttaatgtggggaccggaatgttttggaccattttagaggaattctttcaccaatttaatttt

SEQ ID NO: 145857 - DNA, 1313 bp, Zea mays
  Clone ID: MRT4577_64535C.1
gggaccctcgaaggcgggcggccggccggactcccctccggccctcccctcccacctcacatcccttcttgcttctcgcctccccacccttcatccacccgccgctcctcaagccccaagctccggcgatatgtcacgcttcggtcgatccggtccgccgccgccgatccgcgacacatattcactcctcgtcctcaacatcaccttccgcacgactgctgatgacctcttcccgctcttcgacaagtacggcgagattgtcgacatctacatcccaagggaccgcaggactggcgactcgcgcggattcgcgttcgtgaggtacaagtacgaggacgaggcacagaaggcagttgataggctcgatgggagattggtagacgggagggagatcatggtgcagtttgccaagtacggtccaaatgctgaacggattaataaagggagaataatggagccagttccaaggcccaggggtcgttccagaagccgcagtccaagacggaggtaccgtgatgattatcgagatgactaccaggatagagattatagaaagcgaagccgtagccagagtagagatggatacgcccgtgacaggtacagagatagggattaccgccatcgtagcctgagtcgcagtttgtctcctgcacgaagaagccctagtcatagccgcagccgcagttacactcctgatgattacaagaggcgtggcaaagacagcgcatcacctgcaagtaggagccctagtcgctcccctcctcgcaagacgccaccttctcctaagagatctcctgtcaggcacaatgatgaccggtctccacgctcacggagcccttcacataagcacaattcacttgcaaagcatcttcaacagctcaggatgaatggacttgctctgatcctatgtgtgtgtggctatgcttgtgctcaatggtgggcacttttcagttaaagttttgtagtgctgtctgtcagttgctgcctcaaacttggaatactacttctgtttggcacctgaactgcttatcaaaaactttatgtataccagttacattccacttttaaccttcatattagtattaccatattataactgtcttttcagtatttagtacttactattcatggtgacttgcacctttctagttacatggagtgaagatatgctggctgatatgcggtcaacatgcacgtagcttactgttgaagttgatataatctgtgctgtttgcgttgctgatgatgatggctgatgagatgatggaactgcagctgactgcacaagttgctgctgtctgcacctattatgc

SEQ ID NO: 145858 - DNA, 1090 bp, Zea mays
  unsure (1)..(1090): unsure at all n locations
  Clone ID: MRT4577_64536C.1
ggcggggctctccccttcatccacccgccgctcctcaagtcccaagctccggcgatatgtcacgcttcggtcgatccggtccgccgccgccgatccgcgacacatattcactcctcgtcctcaacatcaccttccgcacgactgctgatgacctcttcccgctcttcgacaagtacggcgagattgtcgacatctacatcccaagggaccgcaggactggcgactcgcgcggattcgcgttcgtgaggtacaagtacgaggacgaggcacagaaggcagttgataggctcgatgggagattggtagacgggagggagatcatggtgcagtttgccaagtacggtccaaatgctgaacggattaataaagggagaataatggagccagttccaaggcccaggggtcgttccagaagccgcagtccaagacggaggtaccgtgatgattatcgagatgactaccaggatagagattatagaaagcgaagccgtagccagagtagagatggatacgcccgtgacagtttgtctcctgcacgaagaagccctagtcatagccgcagccgcagttacactcctgatgattacaagaggcgtcacaaagacagcgcatcacctgcaagtaggagccctagtcgctcccctcctcgcaagacgccaccttctcctaagagatctcctgtcaggcacaatgatgaccggtctccacgctcacggagcccttcaacataagcacaattcacttgcaaagcatcttgaacagctcaggatgaatggacttgctctgatcctatgtgtgtgtggctatgcttgtgctcaatggtgggcacttttcagttaaagttttgtagtgctgtctgtcagttgctgcctcaaacttggaatactacttctgtttggcacctgaactgcttatcaaaaactttatgtataccagttacattccacttttaaccttcatattagtattaccatattaaaaaaaaaaaaaaaaaaaaaaaaaaaaaaaaaaaaaaaaaaaaaaaaaaaaaaaaaaaaaaaaaaaaaaaaagnnnnacaaacnnggggggtcccaacttaaaaaacccaac

SEQ ID NO: 145859 - DNA, 491 bp, Zea mays
  Clone ID: MRT4577_64537C.1
gtttgaggaaccactccatccaaaataagatgatgcatcatgagttcaatcctcaaatttggtggatgacctcatttctcatattagtaactaactaactatgaggaatgaggtggtgatggatctactcatttcattccacaaaccaaacaaagaagtaaggagtgagaagattatggactagctcatttctcaaaccaaacactccataaatgaatcatattggtgtattgcatatgctgtttagaggtatgcttcgtcttggattcaccaaatgaaataaattggctctcctgcatgtcaccagacatagtcccacagcccatagttgaaaagcatgacgcatggatgctcaatttcacacacctattgcttacttcacactgtgacaactatagtggtaagcattttaatctggcagtgattgccactatgccgacaagctaattgttggttgatgccctcagtatttactgatacctgatttttct

SEQ ID NO: 145860 - DNA, 724 bp, Zea mays
  Clone ID: MRT4577_64538C.1
cggccgggatcgttttcacgcttattacctctctctgctcttcgcagctcccctacccgggctgatggctcctaccgactctcccgagcctagtcctacttggcggcgtcgacggcgacatcggcagccgccccttacgcactcgcaagttgatgaccaacacgcctgctgggccgctcacctgtcgggcttgccgccatgctcctcgcccgcaacaaccgctccgagatcgtgctagtacctcgtatccttgacgacatgctcgatgcgaaggaccactacaccctgttcaacttcccgcacagtgccgagtccaacgtacgcgagatcactgtcttgcacctcttctacgacaacctctatgtctgagagaacttctcctgcaaatactaccactgcaagctcgcccttgatgctattgatgacctaccccgctacctgatgctccagcgtgagatcaggcctgacacgatccgagatgctgacaagacactggtgcgtgacatctggatcaggtcctccggcagtacatattctctggatcactggtcgtgaactctgacatgcccaggtatgtgcactggcatgattatcgtggtggtactctttgttgctcacgcagacttcagtgaagatatgaaagtactgcctgctgacctacccgcatcgttctggagcatgtggtgagatgacagggttatttcgtgatgcaggtgtggcattt

SEQ ID NO: 145861 - DNA, 661 bp, Zea mays
  unsure (1)..(661): unsure at all n locations
  Clone ID: MRT4577_64539C.1
gaccctccgggtcggccggtactacttctgtttggcacctgaactgcttatcaaaaactttatgtataccagttacattccacttttaaccttcatattagtattaccatnttataactgtcttttcagtatttagtacttactattcatggtgacttgcacctttctagttacatggagtgaagatatgctagctgatatgcggtcaacatgcacgtagcttactgttgaagttgatataatctgtgctgtttgcgtcgttgatgatgatggctgatgagatgattgatgagatgatggaactgcagctgactgcaccatttgctgtctgcacctattatgctgacaagtaagattccaatgatttagctgaattcagtgttcccatttttcgtgtcataaaatgcatggcaccacgaatcttgaatctacatgcttaggtattaacacccttttaatattttgatttagaagtgtctgcactgatttatcatagatctgtttttggggttgtnggatcataagcctgcatgtgcattattaattgttgcatgcactggntgtgctgtnaatgcatttctgccatttgccagacgtgtcttgtnaggtaaagcgtgggcttagtgttacttttgggaactggtccagagtggtggtttaa

SEQ ID NO: 145862 - DNA, 651 bp, Zea mays
  unsure (1)..(651): unsure at all n locations
  Clone ID: MRT4577_6453C.1
gtcaggaccggccgccccatcatcgtcggcttgctggctaagcactactccgccaaccgcgacatggcggagttcaagagtacgtcgacgacgtggccttctttctgcttcatcaatcaaaaaaagcgtgtgtacgtacgtgcggaggttttctttcttatttcttggccgttgagcgcgtgcgtgtgtgtgccctctctctcttgttcttgtgcaggttttgtggtctacttcttcgacaagatctgtgccaggtaaacgtaaatattaaacgcagtggccggccggtttatcttcttctgtgcccaccaatggagatttactgctgttcatcaacatgtaaaatagagagaaagagagacgattaatttaactgaacctcatgcatgcaggatccccagaggccaggagaagttcctcgccatcatggatctcaagggctggggctacgcaaactgcgacgtccgggcctacatcgcggccattgagatcatgcaggtccgtccgtgcccccgttaattgcttctgctttcactcaacggcggcacgcagctgccctctgctctgattgacagatgacggcgacgaccctgcttctcaatatcctgacngccgctcgtctgcctcgtacgcacgtgcagaactactacc

SEQ ID NO: 145863 - DNA, 1540 bp, Zea mays
  unsure (1)..(1540): unsure at all n locations
  Clone ID: MRT4577_64540C.1
gacccctctggactcccctccggccctcccctcccacctcacatcccttcttgcttctcgcctccccacccttcatccacggtccacccgccgctcctcaagccccaagctccggcgatatgtcacgcttcggtcgatccggtccgccgccgccgatccgcgacacatattcactcctcgtcctcaacatcaccttccgcacgactgctgatgacctcttcccgctcttcgacaagtacggcgagattgtcgacatctacatcccaagggaccgcaggactggcgactcgcgcggattcgcgttcgtgaggtacaagtacgaggacgaggcacagaaggcagttgataggctcgatgggagattggtagacgggagggagatcatggtgcagtttgccaagtacggtccaaatgctgaacggattaataaagggagaatagtggagccagttccaaggcccaggggccgttccagaagccgcagtccaagacggaggtaccgtgatgattatcgagatgactaccaggatagagattatagaaggcgaagccatagccagagtagagatagatacacccgtgacagttacagagatagggattaccgccatcttagcctgagtcgcagctacagtcctgatgattacaagaagcgtgggagagacagtttgtctcctgcacgaataagccctagtcatagccgcagccgcagttacactcctgatgattacaagaggcgtggcaaagacagcatcacatcacctgcaagtaggagccctagtcgctcccctcctcgcaagacatcaccttctcctaagagatctcctgtcaggcgcaatgatgaccggtctccacgctcacggagcccttcaacataagcacaattcacttgcaaagcatcttgaacagctcaggatgaatggacttgctctgatcctgtgtgtgtggctatgcttgtgctcaatggtgggcacttttcagttaaagttttgtagtgctgtctttcagttgctgcttcaaccttggaatactacttctgtttggcacctgaactgcttatcnnnnnctttatgtataccagttccattccacttttaaccttcgttttagcattatcctattatcagttatcaccatcttatcagtatttagtacttactattcatggtgacttgcacctttctagttacatgatgcagtgaagatgtgctggctgatatgcggtcaacatgcacgtagcttactgnnnnnnnnnnnnnnnnnnnnnnnnnnnnnnnnnnnnnnnnnnnnnnnnnnnnnnnnngaactgnncagctgtctgcaccatttgctgctgtctgcacctattatgctgacaacaatagaaggcgtggggagaagtttcagcgacagaaatgcctgactagttgattgatcttctggatctgaatgctgatgatttgcttcaaagacttagtctcatgtagtcatgtcatttgtggagtctgctgacccatcaggctctggattttgtaacccgaactttgatatgcttnctgtg

SEQ ID NO: 145864 - DNA, 898 bp, Zea mays
  unsure (1)..(898): unsure at all n locations
  Clone ID: MRT4577_64541C.1
cggccgctcgagccggcgggcggattccattcgaacagcgacaacagccaagcggaagaagaagaagcctccaaaccgcgggcgatccctcccaagctcctcggcccctcgcgcccttcgtccccgacctcgcccccctcgctcgctatatacatacacacggaccggcctttggttccgcggagcactttgctttgagagcggaagtccccggcgaagaaggagaagaagcgctgcggcgtgggaagtccctgaggcaggctgcagcagagatggagtggctcaacgagtacgagaagctggtcatcaggatggacacccccaaggtggtcatcgacaatgccgtctgccccacggccacgctcgtccaggtcgacagcgcgaggaagagaggcgtcctgctcgaggcggtccaggttctcgcggacctcgacctgtctatcaacaaggcctacatctcctccgacggcaggtggttcatggatgtcttccatgtcaccgaccgcctcggccggaagctcaccgacgacagcgtcatcacctacatccagcagtctatcgggacctggaacggaccgtccaagccggcggcgctcgatgggctaacggtgctggagctgacgggcgccgaccgcacggggctcatctccgaggtgttcgccgtgctggccgacatgagctgcagcgtcgtggatgccagggcgtggtcgcaccgcggccgcctcgcctgcctcgtgtacctgcggcacgaggatgtgtgcgccgccagtgtggagcgtatcgaggtccgccttgccccgctccttcgcggagactcggaggccagcggcggggccgnggctgccgtctccgccggttccatcgcgcacgccgaacggggcctccatcacctcatgta

SEQ ID NO: 145865 - DNA, 271 bp, Zea mays
  Clone ID: MRT4577_64542C.1
tcctattccaaaacgcaaacatgcattcacaccaaagaatacccagcccactccttttttaattaattggaaacaaaaaaacacaatgctctaaaacaccaacacgaaaaactaaagaagcaaatattaacaaaaagccaacaagctccgctaaaggtacagaaacaacaaataaagattgaaaaacgactacagcatcccatacaacacacacacacaaaacactcaaccacaaaacactgcaccacaaacaaagcctcttcatcaccaa

SEQ ID NO: 145866 - DNA, 181 bp, Zea mays
  Clone ID: MRT4577_64543C.1
ttttgaaagtgggtagtacccaatacaagcaaacagatgttcgttttataaaaggttttatgtcgggaaagctttaaaaccagaaaaattccgaagggggccttttttttatgggaggggggaccgcccccagacactcctatgaatattgtcttgggaaggtactacaatacagcctgcc

SEQ ID NO: 145867 - DNA, 340 bp, Zea mays
  Clone ID: MRT4577_64544C.1
aaaaaagaaaatgcattcaagagtttcatttattggaagcccgataccataggatacatattattttagtgggaactaatattcaacatgaatagcggggcattcaagcttttattattctagcagcacattaagcgtttcttgtacaacacacagacaacataggcggcgcactggttttacatcctatgatggaaacctcgaaaaggtctttttttggagacaataaaaagggcaagtggttaaccaaacaagtctttcctggatcttgtgatggaagattaaacggcgctttttaaagaaaccttttggggggtttaagtattcttccatgcccccc

SEQ ID NO: 145868 - DNA, 127 bp, Zea mays
  Clone ID: MRT4577_64545C.1
gttgttgtgcgtgctaatccaacgacaggtagtgtgaccggatgaaatctcaagctgttgagcgtcatcgacgtactgttcatcgaattgaaaactatactagttgcctagttcacaatctattcct

SEQ ID NO: 145869 - DNA, 837 bp, Zea mays
  Clone ID: MRT4577_64546C.1
ccggccgggaagccagcaacccattggccacctcctcgacggccgttaccttcaccgcaccctaatccttaccgccaacaagccgccaacatgggtaaccaacagtcagggctgctcgacaacatcgcctcaggctcgaatttcgaccgcgaggaggtagaccgcctaaggaagcggtttatgaagctggacaaggacaactctggaaccattgagcgtgacgaattcctggccctccctcagatctcctcgaaccctctcgcaacacgaatgatcgccatttttgacgaagacggtggcggtgatgttgatttccaagagttcgtctctggcctttcagccttcagtagcaagggcaacaaggaggagaagctacgtttcgcattccgcgtatacgacattgatcgcgatggcttcatcagcaacggcgagctcttcatagtactgaagatgatggtcggcagcaacctgaaggaccagcaactgcagcagattgttgacaagaccatcatggaggctgacctagaccgcgatggcaagatcagctttgaagagtttaccaagatggttgagaacaccgatgtatccatgagcatgaccttggaccaattttaagcgctattccctatcacaaatacaacaacatctcctgatacaaaaaaaaaaaaaacggcgcgttcacggtgttgcaggcacacttgggatggacttgaaagtactcgatatccatcgatccaggggtttggttcctgaacatgagcagtgtgcgcgaggacgctgatattgacaagaggcagttgtgcagcttattagatgcaatttatcttcacaagagat

SEQ ID NO: 145870 - DNA, 293 bp, Zea mays
  unsure (1)..(293): unsure at all n locations
  Clone ID: MRT4577_64547C.1
cagataaggcttttttgaaatgtaaccatctgtcaagggcaatgaggtaaggaaccctttccccacagtgatgtccgctactgctcatctcagatgatactacagtggcngcatcctgtgcccatcgcttcccaaggtgcttccgtttgccttcgcgacccttcgccgtcgccaaatgccatagctcaaaggagatcagtgttccttctttctacaaacatcatcgtactcgtcgtcgcaatcgcaatatgacaaatgaaagagcttccaagaaaagtttgctgagaaaagat

SEQ ID NO: 145871 - DNA, 355 bp, Zea mays
  Clone ID: MRT4577_64548C.1
gttagccctcctagagagtttaactatatgtccagactttttctcatagagaagctgagatcatgttctactttctgtaaaaaaaaaaaaaaaaaaaaaaaaaaaaaaaaaaagggaaaaaaaaaaaaaaagaaaaaaaaaaaacacaaaagaaaaaggaaaggaaaaaaacatcaaaagagaaaccaaaaaaaaaaaaaaaggaaaggagtataacaacgaaaaaactgagagaagggggggcgtctcccaaggaaaagggtaggaagcagaggccccgtaaggaagaaggctttaaggggaaaaggatggcacctctcgcgctccccaaggattagcccgccagaagggaaaa

SEQ ID NO: 145872 - DNA, 1392 bp, Zea mays
  unsure (1)..(1392): unsure at all n locations
  Clone ID: MRT4577_64549C.1
cattgggcacctcgaggctcgacgccggcgggatcttcgccatccgctgcgtcgcgagctcgccgccatggcattggctctccccctcgcccgcctcgtccccgcctgccagtgccagccttggccccacctgcgctttcggaagcgccacgtctccttcgccgctcacgccagttctcgcgccgccttcgctgcctgcgcggcggcccctgccctccaggtccaggcgccggaggcggaggcggaggcggagacggtcgagcaagtgggcccgaagacacgcctcgtcgcgcagaacatcccgtgggactgcacggccgacgaaatgcgcgcgctcttcgagagccacggctccgtcgtcggcgtcgagctttcaatgtacagcgccaataaaaacagaggattggcgtttgtaaccatgggttcagaagaggaggctcttgcagctctcacccatctcaattcaactattttaaatgataggaaaataaaggtggacttcgcaaggcctagaaagaagcaacctaagcaacctgctgtggtatcggatgccacggaaaagtatgttgtgtttgtcgggaatttgacatggagggtaagaaatcgtcaccttcgggaattatttgcctctgccccaggtgtggtatcagctgaagttatcttccataccaccactccgagacgatctgctggctacgcgtttgtttctttttcttcgaaagagagcgcaggggccgccatatctgctttcaacggaaagatattgatgggacggcccattaacgtgatgttcaaagatgaaaatggtgaaaagaatgaaccttcttctgtcccaaagaaggccgaggtggaaccatctgatgaccagagtgataagctaagcatgaactgttaacgaaacaaataggtcatatctgtcattacacacacatatatatttctgacccatggtatttccttttcagaaatagttatgtcccttgttttattgatttgccaatctgatgtatgttcgtcgtgaggcaaacgtgagcgctgtgacctgtgagggcgtcaaatcctcccgcccgcgttgtaaggggtgaatataaacttaattagttttaataaattcgtctcgtcttttagttaattttatatttagcatttaaatcctcacaaccctgtcttgtgtagctttataaaaaaacccataacaaaccacgattacacatacggttggatctagatctggatctagatccaacggaccatgagaattgtttgcacacttacacctaatgactgcttgtatttaatcgttgccatatttaatatccaaattactattcaaacattcggctattcaaacattcggcgtgtcgtaaattaaattntagttggtagaaccaa

SEQ ID NO: 145873 - DNA, 1403 bp, Zea mays
  Clone ID: MRT4577_6454C.1
gttcgaagaactcggccctttgggagcgagcaggagccggagcaggaccaggaagatcattatcaggagaagctaggggatatggcgaacgctggcggcggggcggccggggaaggggagtggctcaaggtcgcccagctcagggccctcgtccaggaggaccaccgcgccaaggaggtggacaacctgacgctgcgccggttcctgcgcgcgcgcggccacaacgtggacaaggcggcggccatgctgctcaagttcctcaggtggcgggcggaggcggcgcccggcggcggcaccgtgcgggaggagcaggtgcgcggggagctggagcaggacaagatctacatgggcggcgtcgacaggaccggccgccccatcatcgtcggcttgctggctaagcactactccgccaaccgcgacatggcggagttcaagagtacgtcgacgacgtggccttctttctgcttcatcaatcaaaaaaatgcgtgtgtacgtacgtgcggaggttttctttcttatttcttggccgttgagcgcgtgcgtgtgtgtgccctctctctcttgttcttgtgcaggttttgtggtctacttcttcgacaagatctgtgccaggatccccagaggccaggagaagttcctcgccatcatggatctcaagggctggggctacgcaaacttcgacgtccgggcctacatcgcggccattgagatcatgcagaactactacccggagcggctgggcaaggcgctgatgatcaacgtgccctacatcttcctcaaggtgtggaagacgatgatctaccccttcatcgacgccaacaccagggacaaggtgatgagcatgagctgccatgccgcgcgcgttcgtgttcgtggatgacaagagcctgcgggagacgctgcggcgggagatcgacgagagccagctcccggagttccttggcgggaagatgcctctcgtctccctcaaggactacgcccagcagcctcagcccgtttgcgagtgagtctgtcgtagcgatggtggccggccggtgacgtgagcgacccaaagccgaaagctgattcgatctagactaagctaatacagcctacaagagggaggaagagaggccctacccgtggaattaagtcattagtttgtggtccaattcaataagaaagtaaatgtggtgtgtgaagatggtatggcattatcagtctttaatcccatattatacatttagatagaagaaaatcaacttatatgtggtagtgttccctactttttatatgagataaataaagggatacggagaatgctgcacgcaaaaaaaaaaaaaaaaaagcggccgctctcgctcacgtttcatgtttttttgcgttatttatcttgtaacttgttctaaacggcaatttaattt

SEQ ID NO: 145874 - DNA, 858 bp, Zea mays
  Clone ID: MRT4577_64550C.1
gtacccgtgattagtcccccaatctgtgaactcatcgttttgcagcactacaagatcagaatatttgattcaaagatgcagttttcattttcagataaatacactgacatacatttaaaaaaaaaaagtacatattaactcgttttgtttacaaaataaagttaaacccaaaggaaatggacaaatgagaagaacccataggtttatcaggtttcagacacagaagaattttgttgttgttgttattgcgtgcagcagctcaaagttcagtgtcacagaacttcaccatcaggtcggaaaccatccttcgtgccaaaggaatgtagctcaaactataccaaaatagggcgcagatctcacatatgacagcgatcagtgttagcagcttgtcatgaatccaaagagcaaagattagagccaaaacaacacatccaacataaacagccgttgcatacagacgaactggatcaaacatcatccttagctgtttttgagggcccataacaaaggctgtgctcccaactgccaatatgtttccaaatgtaaacattactgcgaatttgataggtcttgcgaagacaataaaagacaagatcatgagggtgagtccggccaccaaacatgccgcgaaggcgtagatcctctggaggggggagagggagcagaggtcctcggtatcagcaaggatggagtcctccggctgatcctcgtcgtcgccgccgacgagggagcggtggaggcgcgtcagggcgtccatggctggcgtggtcgggtcgtcaaagcagaggaggaggtgacgcggcgaattgagttggaatagggctgggcattggatctgccgcgtaattccccggccgg

SEQ ID NO: 145875 - DNA, 276 bp, Zea mays
  Clone ID: MRT4577_64551C.1
tttcacatctcagtctgaaaatgcattgtttatttttgaactaacgagcgcacctacaagaacaaaacctgccccccacgtttctacttaaacgccaactattacaaacaagtttcccgggacatgctacatccctgctcacatgcagtggtgagtgctttaaaaccccttatcgaaaggaaacgccaacaactaacactggcatgcgatgctgtttgactgtgctaccctcttacagttcatcaatcatctacttcattctagactgaaaccata

SEQ ID NO: 145876 - DNA, 295 bp, Zea mays
  Clone ID: MRT4577_64552C.1
atattgccgggtcgacgatttctctcgtcggcggccggtcgcgaaccagggcggtcctattggatggccacatcgttctgactgatttgacctctggccaacggctaactcaaaaccttttgtttttatgcgcccaacaaaggggccattaacaacaactgagtctctgccccggagtattgactcagcccctcccaatacatgacttactattgcctgtactgcagattacagtatggtacagagggcatgcctatgagacccacatacaactgtcgtcaatcggagggccctt

SEQ ID NO: 145877 - DNA, 231 bp, Zea mays
  Clone ID: MRT4577_64553C.1
gcaggaccggccggattatttccgggttgacgagctcacataggaggccgcctttttttatttttgggggtttttttttgtttactcggtttatcacaacacaaaaactgcaaccaatacattttgttgggccgcgtaagactggggtatacaattaaattcggttggaatggaacactaactgaattgacgttatgcgttctatgaatagctgtattgcatacatggagg

SEQ ID NO: 145878 - DNA, 344 bp, Zea mays
  unsure (1)..(344): unsure at all n locations
  Clone ID: MRT4577_64554C.1
aaaaaaaaaaaaaaatttatattaactaattctaaatcacaaaacaaaagaaatttttaaaacattttttccctccccatacctnccacnccctttatattatatactctcaccttcacactactacctctccatattttttcaccaaattcacttaaaattccatttcctttacccaactttaaacacctttcaaccctttaaaacccctctcctttccccaatattaactaatttcacctcaaaccacccttccttcccaacaattttacccccctaaatccccaactctttcaccccttttaaaacttttattaatctcaataaccaatttctaccccccc

SEQ ID NO: 145879 - DNA, 401 bp, Zea mays
  Clone ID: MRT4577_64555C.1
gagccatggccttatctgcgaacctcaagtctactgcaggaaactgtccgagaaagacgagttcttggtgcttgctactgacgggatttgggacgtgctgccgaacatggaggtggtgaagtctatgatatcagcgcctgacaccttccaaagcggcgaggcagctgatctaccgctcggtctgagcgtggcgactcatgctctcgacgtgcatggaggacgactgctccgccatgtgcctgcacctgaaccggtgggcctgacctgctaccatcgagagcatcagatcactgatcactgctaccgacagacactatgtcgagcacacctttcacaatcatcagtttccgtatgactctgacgagcaactgtcccgctgtgatcgacgaggtgaccacggt

SEQ ID NO: 145880 - DNA, 141 bp, Zea mays
  Clone ID: MRT4577_64556C.1
acaggagctggcatcgacctgccggaaaaaaaaagcgctgcacatcatgcccttggaggagactacctgcggcaatggccggcgtcgaacgcacatcagcttcaccgacgactacaccgacctggtgcgcgacggcatcca

SEQ ID NO: 145881 - DNA, 463 bp, Zea mays
  Clone ID: MRT4577_64557C.1
ctcacctgcactcgccgatctcgcaacatctgttcatttgcctgcatgatcagcctactttttgacgcacgctgacaaggggatcgataaggacctcttatatgagcaccagttcctgtcgaatgcctacacctacgcggacatgaccaacccggagcatgcgtggagagccgagcggaaagagcggcaccactaggatcaggagaccgacactgctgagggccaaggacgatctctctacactgaagagaatggatgagaatggctcatgcacaacatgccactaatgttggccatagacatatgacacaggcaaaaagctcgagcaatctgcttttgacaacacatctgtgattttacatgtgaaccgcactgagaaccacactgatgagatatcacaagatggagctgatgaccttaatacggagatggggcactaacgaggatcttcttatcccaactg

SEQ ID NO: 145882 - DNA, 228 bp, Zea mays
  Clone ID: MRT4577_64558C.1
aggccacatgccgttctcgtggatcgccgcgtcctctgtgctggtagccgagggctacgctgcccgcaggctctgatggtcctggggtggtggcgtcaagctgatcctgtcggtgttccctagtcggctccgcctccgcctggagacgggcgttatgcttgatgtgccgtatgaaccctgttagcaagtctgcagcgttgtcaggatcaagaacatcatcgaggctta

SEQ ID NO: 145883 - DNA, 342 bp, Zea mays
  unsure (1)..(342): unsure at all n locations
  Clone ID: MRT4577_64559C.1
ggtcaagaagnaatagcnttgcgtcattactngnnggctcannttgggatnnctcannagtcgtacccgggaaccgaccgggnaccacaccacaagnccnaaagtgtgnnnggatttgnnttttggtggcccaatnnnttcgcgtggtttgttagcgccctanntaccttggnnnatgattcatttattttgcgtagagagtannttcaatggctnnncagcagatnnagagctgtnnaaagggtatngnnatgtataaagncnnacgattgaggggnnccgtcanncggtgtacccaanannagcgtcannggggaacctattttgtggaccgcccgaata

SEQ ID NO: 145884 - DNA, 1004 bp, Zea mays
  Clone ID: MRT4577_6455C.1
ggccgccatgctgctcaagttcctcaggtggcgggcggaggcggcgcccgccggcgccaccgtgcgggaggagcaggtgcgcggggagctggagcaggacaagatctacatgggcggcgtcgacaggaccggccgcccccatcaatcgtcggcttgctcgccaagcactactccgccaaccgcgacatggcggagttcaagagtacgtcgacgacgtggcccttctttcttcatcaatcaaaatgcgtgtgtactgtacgtacgtgcggaggttttctttcttatttcttggccgttgagcgcgtgcgtgtgtgtgtgccctctctctctcttgttcttgttgtgcaggttttgtggtctacttcttcgacaagatctgtgccaggatccccagagggcaggagaagttcctcgccatcatggatctcaagggctggggctacgcaaactgcgacgtccgggcctacatcgcggccattgagatcatgcagaactactacccggagcggctgggcaaggcgctgatgatcaacgtgccctacatcttcctcaaggtgtggaagacgatgatctaccccttcatcgacgccaacaccagggacaagttcgtgttcgtggatgacaagagcctgcgggagacgctgcggcgggagatcgacgagagccagctcccggagttccttggcgggaagatgcctctcgtctccctcaaggactacgcccagcagcctcagcccgtttgcgagtgagtctgtcgtagcgatggtggccggctcgtgacgtgagcgacccaaagccgaaagctgattcgatctagactaagctaatacagcctacaagagggaggaagagaggccctacccgtggaattaagtcattagtttgtggcccaattcaataagaaagtaaatgtggtgtgtgaaaaaaaaaaaaaaaaaaaaaaaaaaaaaaaaaaaaaaaaaaaaaaaaaaaaaaaaaaaaaaaaaaaaaaaaaaaaaaaaaaa

SEQ ID NO: 145885 - DNA, 1170 bp, Zea mays
  Clone ID: MRT4577_64560C.1
gggtacctcgaggccggccgggagatgttctagaatatcaggcggcttcctccccctaaccgcaacagttaaaacgccgtagcaactaggggcgctaccacagtgcgcgcttgaagatagtgtcatttgcagttcccggtagcagccatggcgtcggtgcagctgtctgggccgcgggtggtggcggctgcgaaaccggctgcgttgggcgggctcctcctgacgccgtcccttgcggtgccaaaggggcggagggccaggggcctcgtggtgagggccgccacggtcgtgtcacctaagtatacgtccataaaaccattgggagacagagtacttgtgaagatcaaaacctctgaggctaaatctgatggaggtattttacttccagtatcagttcagaccagaccacaaggaggggagattgttgcggttggagaagggagaagttttggaagtaaccgcattgagatcagtgttccggttggtgcacaagttgtctactcgaaatatgcaggcacagaattgaaattcaatgacgccgaccatctcattttgaaagaagatgacataattggtattcttgacagtgatgatgtgaaggatatgaaaccactgaatgatcgcattctgattaaggttgctgaagctgaagaacaaactgctggtggtttgctattgacgcaggcaactaaggagaaaccttctgttggatcagtggtagccgttggcccagggccgttggccgaggacggcagcaggaatcccctgtcgatcactcctggaagcaacgtgatgtattccaagtatgcggggagtgagttcaagggcgaggacggtgagtacatcgtgctcagggcgtctgacgtgatggctgttctttcctgatccccaaaccatacagcgccaggtgtgcgataggaagttttgatgttgaggccgagccttatcttttatttgctcttgtttggaattggtggaggcttttgaactgtaatctggtgcgaattataaggaaaataagccgagttgtgtagacttgagacaggactgtgctatgctgtttggctggtaggtgagctgaccagtgttcagctggtgggtgaattaattaatgtgtgcataagtttgttgtgactaaaaaaaaaagagaaaaaaaaaaaaaaagcggcc

SEQ ID NO: 145886 - DNA, 1347 bp, Zea mays
  Clone ID: MRT4577_64561C.1
attcttcttagcccacgcgtccgaacgccgtagcaactagcaacgctacctcgaggccggccgggaagtgcgcgcttgaagataggttaaccgccgcttcttatcctcagttccaaccccttttccgagctcctcagttctcgtcatcgtcctcgcgctcagtgtcatttgcagttcccggcagcagccatggcgtcggtgcagctgtctgggccgcgggtggtggcggctgcgaaaccggctgcgttgggcgggctcctcctgacgccgtcccttgcggtgccaaaggggcggagggccagggggctcgtggtgagggccgccacggtcgtgtcacctaagtatacatccataaaaccattgggagacagagtacttgtgaagatcaagacctctgaggctaaatctgatggagggattttacttccagtatcagttcagacaagaccacaaggaggggaaattgttgcggttggagaagggagaagttttggaagtaaccgcattgagatcagtgttccggttggtgcacaagttgtctactcgaaatatgcaggcacagaattgaaattcaatgacgccgaccatctcattttgaaagaagatgacataattggtattcttgacagtgatgatgtgaaggatatgaaaccactgaatgatcgcattctgattaaggttgctgaagctgaagaacgaactgctggtggtttgctattgacgcaggcaactaaggagaaaccttctgttggatcagtggtagccgttggcccagggccgttgggcgaggacggcagcaggaatcccctgtcgatcactcctggaagcaacgtgatgtattccaagtatgcggggagtgagttcaagggcgaggacggtgagtacatcgtgctcagggcgtctgacgtgatggctgttctttcctgatccccaaaccatacagcgccaggtgcgcgataggaagttttgatgttgaggccgaaccttatcttttatttgctcttgtttggaattggtggaggcttttgaactgtaatctggtgcgaattataaggaaaataagccgagttgtgtagacttgagacaggactgtgctgtgctgtttggctggtaggtgagctaaccagtgttcagctggtgggtgagctgaccagcacgtcgggttcggctgttcttcctgatgtcagcgttgtacgccaaggttggccaacggcatcaatattactaatagcatctaggctaccgtttgagtttttcatggattaaaaaaaaaaaaaaaaaaaaaaaaaaaaaaaaaaaaaaaaaaaaaaaaaaaaaaaaaaaaaaaaaaaaaaaaaaaaaccctgg

SEQ ID NO: 145887 - DNA, 263 bp, Zea mays
  Clone ID: MRT4577_64562C.1
ctataggttaggctgaccccctcggggtcccgccccggaatatatccccggctcgacgcgctcacttttcggccgccgccctttttttttttttttttcggcaactaccaacaccccgttggcattaaacttgccacttaacttcctgcgcaacagatcatacgccaccccttctctgccttattatacaacagaaagaatggctactttcttaacctttccgacactgcgaacactttctgacaattaccgcctaacgggta

SEQ ID NO: 145888 - DNA, 157 bp, Zea mays
  Clone ID: MRT4577_64563C.1
gccaaatcagctggctgagcgggcgagagattattcgttctttgggcacggttgctagtgtagagtatgtaggccgtggagaccttcgtcgtttgccttcgcctatatataatcacctacacaaagatggcgaggatgcaaacagcaccattcggtc

SEQ ID NO: 145889 - DNA, 254 bp, Zea mays
  Clone ID: MRT4577_64564C.1
gacccacgcgtgaaaggttttcgagttcgctacatgcgtgtgcaatagccggcctgctctttcccggagacccccgacgccaccggggacagtagacagccgactcgagctcaatctcgaagatctcgccgcctgcggcggcacgaactgcttcggcacgctcacctgcgaaaggagcagcttcttctaccgccgcctcccggagccccgactccgattaaccattcaaaaactagacgactccttcttaaaca

SEQ ID NO: 145890 - DNA, 372 bp, Zea mays
  Clone ID: MRT4577_64565C.1
attattgagcctggaaaccattaagtagaacaatgaattatgaccatttatgtcaaagaggggagccggaacagttgagccaccaattccatggcaaaatgttggggtcgcaaacccatggtcattttggctagggtcggaggctcaacataaatttttaagaccggactaattttttgaccggtcagaagacgaaaaattcgtccagttttaaaaaggaaaggacaaccctttaccattgccaatatgatcaacggtctgcgacctgaacatagggacatgggactggtgctacaactgggctggctccactttttaacataaatgctcctagagaaagttgtacttcttggtttccaggctcaataatag

SEQ ID NO: 145891 - DNA, 447 bp, Zea mays
  unsure (1)..(447): unsure at all n locations
  Clone ID: MRT4577_64566C.1
cccacgcgtccgcaggtttatctgcttccctttcgcgtgttcacccggcgagagcagcgtcggtgaacggatttcctttttccctgagcgaagctcggattctgttgcaactaaccggatcactcgcctaccgtgctaatcgcttgcgggccggctcccctagacttagaacccagtagccttataaaaccgagccatcccttttcgcttatgtcttgtccgccattatcgagagcagaggaatttgagcgatgccgccaacattgatttcgggctgcgttcgggttggggccacggtgtactgccagggcgcttcgccagggcacaatgactgtggccgtggcaccggtactaggaaaagagcatcagaagtcctattatccctcattggagttagagctccgncgtggacccaaatatcgccgtggtctgggttctgtgctgcgt

SEQ ID NO: 145892 - DNA, 369 bp, Zea mays
  unsure (1)..(369): unsure at all n locations
  Clone ID: MRT4577_64567C.1
ccttacttgctagtgactatattntttgcctatcacatttccaaaggtggcttctctttggtcgagatttggtgcaagcccctggttattgaccatctttaacgtttgccctgtataaaaatctattgcatgttctcacttggactattgattggaacttttaggtacggaagtcctccacatgtagatgagcgtcatcgtcatagatacgaggtcaatccctcttttgttcccatgcttgaaagtgctggtcttcattttgttggttgcgacgaaagtcgaaaccggatggagattgtggagctacaagatcatcccttctacgaaggagcttttttctgtctttccccccccccccccccgggaagg

SEQ ID NO: 145893 - DNA, 356 bp, Zea mays
  Clone ID: MRT4577_64569C.1
gacagagagaaaaccttgactttttttaaggccgcaacattaaactgtgggcggtttgttccgattaacctgattggatagaaatgtttgatgatctgcttcttcaaaccgagaagaaggccacagatctgctagagctgatgcggaatgaagctttcaagaattctcaggtcacccagactaaaggaccaagtggaccacggccactgtgaaggaaaccaacaaagaaggatgtggtggaccttaggaccatcctcatccactgtgcacaggctgtggcagcagatgaccgtatgactgctaatgaattgttaaagcatataatgcaccattccaagccaaatggtgttggaacc

SEQ ID NO: 145894 - DNA, 183 bp, Zea mays
  Clone ID: MRT4577_6456C.1
cgacccgacccacgcgtgcggccccactccccatcacacagcatcattacgaccaacccaaaaccccaccccaccgggcggtagccttatctcacattgcgtgaccaccccactccatcatagcattccattaactccagaccaggccctgtacccacatgccaatcacagcgtacaccgaca

SEQ ID NO: 145895 - DNA, 337 bp, Zea mays
  Clone ID: MRT4577_64570C.1
ggccccaattttgggattaaagggaaagggtggccggtggaccaaaaaagggggacaccaagctttaaaagggggcagggccttaaaaaaaaaaaggattttgaagccccccagaaaattattaggttactattccaaaaaaattgccccttggaaaccaacgcaggtataaaaaaaaaagggagccttgtttaaaaatttaaaaaaattgggggaaaggttttgggggaaaaaaaaaaaaaaaaaaaaggggtccagggaaggggccctttttaagctcctaaaacccggaaaggggagaacccgggggaaaagaaaccggaattttaaattgccc

SEQ ID NO: 145896 - DNA, 472 bp, Zea mays
  Clone ID: MRT4577_64571C.1
ggccgcccgggggggggtgtttttttttatttaattgtttttttttgtttttttttatttgtttttttatagtttttttttatgtttttttgtgaactatttgggggcgccaaaacaatagagtaaaaaattggccaaggaaaaattctggaaggaaaacaggaccgtgtgagggacaaaaaagaagccaagaggaccattccatcaaaggttggcggaggcaaacgggaaaaaaaaaagtcacgggccccaaaacgaaaacgagggaacaacaaatctcggccacttttaaggaaagcctaaagaaaggcaccttgtgaccggacggtactaagggcaccggaccaaaacctttgtttcccgacaaaggggacacgttgaaggggagcacgatagaaaaaaaggggggggggggcaaaaaagggggacgggaacaaagcgggaagggaaaaagttggggggggggcgccgg

SEQ ID NO: 145897 - DNA, 1003 bp, Zea mays
  Clone ID: MRT4577_64572C.1
cctccattcccgagtcccgacctctcgtattttttgctcgcctccctcgtccgcggtccgccgccgctccagatccagccgtgggagcggggacggggcagggcttgagcacgctctctgcagcttcaggctctgctgagtgctcccgggctctcaacctccacgctctgaaccgctggtacccgagatgacatgtccttgggcttgggcttgagctgggcgcagaacaagcctgtcgtcgaaagggacgatgtggacaacctcgtccctggctccatgttgaggccatggagcttgaaccccgaggcggagcccttctgcctgagcgcggccccgcggttgaactgctcgacgaatgcgccgaactgctccctcccggaattggagcggacgacggagtgggagaagcgcgtccgccgcaccacatcctcgtcgtccatcttcctctctcagatcccgccaccaatggcgagcccaggaattggcagccgctcgtgtcgtcaacgataagagcgatggagcgcgcgcaggaggcggattggtgccttggtcttggtggatgtctgcttcgctgccaccaacgagatggtcccgtattcccgatacagctggatcagagaaatctggacgagaggaatccggatcctagcacatcccacaggtcattaaacaagcgccacatttggtagtgctgctccctttccttgttgaagaaggaccccgaaccgaaccttctgccccgctcgatagctctgcagattcgatgaatgaaacaaaccaattcgaaagcagaggcagcagacgtcagagatcaatacgcttggtcaacgagaaagaaagaaacgtagatgaattcttatttgaaattgaagtcgccagaaaagaaaaacggtcaaaagccacaagctacgtctacgaacagaggagtttcggcctcgtgccgaattcttgttcctgttggatggttaatgatgtgcgtgataaaatttctgtatttgattta

SEQ ID NO: 145898 - DNA, 526 bp, Zea mays
  unsure (1)..(526): unsure at all n locations
  Clone ID: MRT4577_64573C.1
gggcgcgccggggggggggggtctcatagccatgtattgccttacattgcgatgttccattagataaaattatgtcttagtagcatcacggtttcatcgaatgtagtaatacttcacgaccaggcaaacattgccatcatagattacctgttcacgcgacatctgcaatgatggggggggggggatatattttaagcttccacnagtgtaccaacaagctagcacagcaccagccagatagatcatttcttcttggcagcggccttcgtcaccagccagatagatcatttcttcttggcagcagccttcgtcaccttgggtgcagttgggtgcttcttctccacactcttgatgactccggacgccaccgtttgcctcatgtccgggacatgcaatcggccaattaggggaatcttgataataggtcttcaccacccttgggcttagtgggaaccatgttcgccataccagcattgaccgtttcttgaggaaattggggacttctttctccagcttccttggccgg

SEQ ID NO: 145899 - DNA, 360 bp, Zea mays
  Clone ID: MRT4577_64574C.1
atccactcctactccttggctacacacagtgcgtatatgttcctcctaattcgccttcctgtttttgcaaaactaactctgaacggtgttctgttagaatcatgtgcacacaaaaaaaaaaaaaaaaaaaaaaaaaaaaaaaaaaaaaaaaaaaaaaagaaaaaaacacaatacaaaaaaaaaaaaaaaaaaacataaaagaaaaaaaaaaataacatccataatatcaaaaaacagcaactcaaatgctactcaaataaaacagctagtgtgatcaaaatcaatgacaccatgtaccataagaccattgatggcaaaccttttgttgatatcttcaatgatggagacgtcgtccctagc

SEQ ID NO: 145900 - DNA, 581 bp, Zea mays
  Clone ID: MRT4577_64575C.1
gggtacctcgaggccggccgggatctctcgctcgcctccctcgtccgcggtccgccgccgctccagatccagccgtgggagcggggacggggcagggcttgagcacgctctctgcagcttcaggctctgctcgtcggggtggaaggagaactcgagtgctcccaggctctcaacctccacgctctgaaccgctggtacccgagatgacatgtccttgggcttgggcttgagctgggcgcagaacgagcccgtcgtcggaagggacgatgtggacaacctcgtccctggctccatgttgaggccatagagcttgaaccccgaggcggagcccttctgccagagcgcggccccgcggttgaactgctcgacgaatgcgccgaattgctccctcccggaattggagcggacgacggagtgagagaacttcttgttcctgttgtatggtttatgatgtgcgtgagtgataaaatctatgtatttgattcttctgagtgtctctgtgttaataacaagttgtcttgttcctgcttaaaaaaaaaaaaaaaaaaatttgcggccctccattctgttgtctccccctc

SEQ ID NO: 145901 - DNA, 1445 bp, Zea mays
  unsure (1)..(1445): unsure at all n locations
  Clone ID: MRT4577_64576C.1
gagcagctgggagcgatcgacggaccatttctcgagtacctccagtgcagttgcagcaaccttcatcctcccngttggcatgnccctccttcctattcatcagcttgcccggtgccctttgcagcagcggcgctggaggacactcattcattgctagagaagacgcggatctccggggcaggggcggagtggagggcctcttggtggctgattgaagctcttgaaacacttcagcaacgtggcgagacgggaggggagacctcgccctctgcttcgtcttgggcgcctcgccgagcacacttagcgacgagctgcgcgtgagggcatcatcgccgggcgttttcttccgcgggaacggggcagggcttgagcacgctctctgcagcttcaggctctgctcgtcagggtggaaggagaactcgagtgctcccgggctctcaacctccgcgctctgaaccgcgggtacccgaggtacggccacgctgagtttgccaattcctttctttccgtttgaagccttggcatcgtcctccttcctcgccgatgcctcttgcgacgacgggcgatcgctgactgccttggcgtgctgccccggcttggcgtctgaagatgacatgtccttaggcttgggcttgggctgggcgcagaacgagctcgtcgtcggaagggacgatgtggacaacctcgtccctggctccatgttgaggccatggagcttgaaccccgaggcggagcccttctgcctgagcgcggccccacggttgaactgctcgacgaatgcgccgaactgctccctcccggaattggagcggacgacggagtgggagaagcgcgtccgccgcacccacgagtaatcctcgtcgtccatcttcctctctcagatcccgaggccaccaaccaatggcgagcccaggaattggcggccgctcgtgtcgtcaacgataagagcgatggagcgcgcgcaggaggcggattggtgccttggtcttggtggatgtctgcttcgctgccaccaacgagatggtcccgtattcccgatacagctggatcagagaaatctggacgagaggaatccggatcctagcacatcccacaggtcattaaacaagcgccacatttggtagtgctgctccctttccttgttgaagaaggaccccgaaccgaaccttctgccccgctcgatagctccgatcgtgaggagcggacgacgccagccgcgaacgagcaggcaccaggcaagcaaggcagccacgaaagtgggaggaacgcgcatcaacgtgggtgtgctgtgcaataaaaggcggccgacggaaggagggacgacggtacggatccaaagctgcgcgccggtaaggaaggcggccaggcgacgccggaaacctggaagcggagttcgcgcggcgcgggggggaggaggaggatgagaaaaatcccggcccggccgg

SEQ ID NO: 145902 - DNA, 747 bp, Zea mays
  Clone ID: MRT4577_64577C.1
ttgggaccctcgaggccggcccggccggggagttacttcctctcccgagtcccgacctctcgtatctctcgctcgcctccctcgtccgcggtccgccgccgctccagatccagccgtgggagcggggacggggcagggcttgagcacgctctctgcagcttcaggctctgctcgtcggggtggaaggagaactcgagtgctcccaggctctcaacctccacgctctgaaccgctggtacccgaggtacggccacgctgattttgccgattcctttctttccgtttgcagccttggcatcgtcctcctgcctcgccgatgcctcttgcgacgacgggcgatcgctgactgcctttcgtgctgccccggcttggcgtctgaagatgacatgtccttgggcttgggcttgagctgggcgcagaacgagcccgtcgtcggaagggacgatgtggacaacctcgtccctggctccatgttgaggccatagagcttgaaccccgaggcggagcccttctgccagagcgcggccccgcggttgaactgctcgacgaatgcgccgaattgctccctcccggaattggagcggacgacggagtgagagaacttcttgttcctgttgtatggtttatgatgtgcgtgagtgataaaatctatgtatttgattcttctgagtgtctctgtgttaataacaagttgtcttgttcctgacaaaaaaaaaaaaaaaaaaaaagaacccggcggccctcgag

SEQ ID NO: 145903 - DNA, 240 bp, Zea mays
  Clone ID: MRT4577_64578C.1
gggttgggggtattttttaaatagggtttttttttttttttatttttttttatttgtttactttagttatttataggtaatggttaatggagagtaatattagataaataatttttaagaagagggcaggggggaccaccgaataatacccaacagaaaactgaggaaccaacaatatttacaaagaagaagtataaaaaaaagggggtaagaacattagcaaagcgttcttccggggaa

SEQ ID NO: 145904 - DNA, 352 bp, Zea mays
  Clone ID: MRT4577_64579C.1
acagcgcgtctgctaggcatggtactgatcagtgactgcatgagctgctgtagcaagcgtgtataacgagattacagaccggcatgatgttagactaaatcaacttgtgctaggccgactgtatcggatccacagtggtgtgtgcacgagagatcgaatcacaatgcataggagtttatgcaccaacatgtccgttttctaacggggcgcgatgtttaatcggtccatcataaccactattattgatggcgtactcgtataaacactggtcgaataatgtcgatactgatgcgtgatcatacctaagggactatctatctcgatagtcacttactgcatcatatatttatga

SEQ ID NO: 145905 - DNA, 350 bp, Zea mays
  Clone ID: MRT4577_6457C.1
attcggctcgagacctcctgcaccaaattttgtaccaccgaccaacgaacgcgagccctagagcctgtctaacccacagcaggcaccaaaacccggcaagcgcgaggctcctgaacgcacacagacagatggcgcaggaccggcactgcaacacgcccggaccacagtgcatttgatccgcaccaaacgcctacacaaactccaagaaggcagcgctagaacatgcctctggccacggggagctgaccaacgaggccatagtgaaatcgacacgaaatgaacatgagaaagagcaccactacttggaaaaaaaactggaaacatttgcaaacacactggcttatctggaa

SEQ ID NO: 145906 - DNA, 616 bp, Zea mays
  Clone ID: MRT4577_64580C.1
attgggtacctcgaggccggccgggggcagtgtctcaagtttcctcggagttgatgcgatggttgtaaagggagggaaaggattgttcgccgcgaatactacggagtgcaagtccgccgaaaaagacgaggggaagaaggcgcccaatttcacactcttcccgagacggcctccaattccctgtaggacgaatccaccgtcaactgaagaaaaggactcaagaaaatggacctgatgttgccaccgtacccgtatactccgctgccatcctggaatacttgactgccgaagtactggaacatggatggcaatgctagcaaggatctgaaggtgaatcgtatcaccccatcgccatttgcagttaggcattcctgcagacaacgacatgaacaccctcatcaagagcaccatcgaatgaggaggtgccatcccgaacattcacaagctcctgatcgacaagacctccaaggagtgaagactaggagatgcgcatctataggtcaaactagacttctgtgcactcctcggcgagaccttggcatcctggagggattagatgagctggcaggaagtagctcctctgtgaaacgcttgcctgatactgcttcatcaggta

SEQ ID NO: 145907 - DNA, 482 bp, Zea mays
  unsure (1)..(482): unsure at all n locations
  Clone ID: MRT4577_64581C.1
acactatanaannactatnacgtcgcatgggcgggtacttaagcgtttatcctctacatcaagcggccttggtttatgtttatttttttttgtttttggttttgggggtttttgtggaaagggaaacaatttcccttcttatattatttcaaaccgtgttgatgaatgtatgggggtacatccaccaaaataccatattaacagaatcaagaaatgggatacctgcaaaatttacattttccatagagggggggcgcatcaaactgagacaataaagcacaatctgaggggggggttatctcactggacattttttaagggcacattttccaagaaacatatattatcaggtgtttatcaaatggggacaaatacttcaaatgtttaaagggggtgtgatttctaggaacttatttttagggaaaccattgtattctattgaagggttttaattacgaatttctaaaacttatataaagttt

SEQ ID NO: 145908 - DNA, 315 bp, Zea mays
  Clone ID: MRT4577_64582C.1
cggggcggacccaggcgtccgccacacccgtccggttttggattgggccaatttcctttaccatggaacgtaaaatccccgatccggcggtaggaagataaaatccccgcggggaccacccgtttaaaggttttccatgaggcgttaatggttgggacccgggactgaactgttccagtggcttgttcccaccgtgtaacccgaaccaaattaaagttcccccctttttttgggtttgggcgtgtgttggaactgttctttgaatggccaaacaatgacctctgttgccccttttaatggcatttgtggaaaatt

SEQ ID NO: 145909 - DNA, 584 bp, Zea mays
  Clone ID: MRT4577_64583C.1
ggccggccgggtcgggacctctctccactgcatgcctcgctatctcctcctcctcctcagcagcagctctgcaatgccaagggcgccttagccgagttcctcccgagtccagactggtggtggcgataaggttgtcgcgaggggttccgcgcgcggtgctgcgctgcccagagctcggttagcttcggggcggcggcagcccggcagccatggcgcccaaggcggggaaggccaagcccaaggccaggggcgacaggaagaagaaggaggagaaaggtgcagcgctcaatctgctggttctctagattctttcgtgtgaagggatttgttgtgcttggagtttcgagatggttttctggaggatgaaaggagggcaaactgttccatgtcctgagtcctgacaattgtgaaccgctgatgatggaggagatgattaattacatccagtttggaaatgactaattaactgttttgctgtttggttgcttttctctctctatctccttttcccctctgcgtgtatgtatatatgtgggatatataattctatgtgtgtataaaaaaaaaaaaaaaaaaggccccta

SEQ ID NO: 145910 - DNA, 833 bp, Zea mays
  unsure (1)..(833): unsure at all n locations
  Clone ID: MRT4577_64584C.1
ctcgaggccggccgggctcccctccgtggctccgtctctgcccgccgcgcccgcctgcgcctataactactccaccacggccgccctcgtaaacgatctgcggtttcttccacgcaccaatcatttcggccacactgcacacgaacgaaactcgctcgtccttcgcctccatcaacagccgatccgtattcagttcccgtgccgtgcccacctgggggaacccgatcgatgggaaactgctgtctcgagaggcctcgtcgcggtggcagcggcagtgcgggctccgtgcattacgccaggacgaaccccgtgtgggtggaggacaggagggaggaggcgtgcaagggcgagggcgccggccacgcgccggcggctgccacggagatgaagatcaggatcacgaggaagcagctggaggagctgctgcggcgcgtagaggacggcaagcacggcggtggctgcggagtgcccgtccaggacgtcatctcggagctcctgtgcgtggccagcactagctccaacttccggcacagggaggaggggcagtggcggcccgtcgctgcagaccatacccgagtgagacggaccgtggtctgattgacgatcggatcatgttacttgatattacttgctgttttagttatttagcacctccgtcaatccatgcatgcgtgacttagccatttgttgccatattcatactagtagcatagcattagataccagatagggtgtacatttgttaggtcttggatcaggagaccaatctatcttaataaagtatattgatagacaaaaaagctatgaatagngattttatccttgttgtttta

SEQ ID NO: 145911 - DNA, 784 bp, Zea mays
  Clone ID: MRT4577_64585C.1
gggaaatagaccaaattcgcccacaccacaccctccgccgctgcacgcctccacgcctcgcccacccataggccatagccggtagatactttcatcaaagatagcacacaggattcgccccgccggttcgcgtgaaaaggagccgacgaatccacctacccgcattcgggctccagcgccaccccgtgccatcgggctgcgtccgctaacgaccgcccgttcgcgcagggcccagggtgtgggagggagcaatggtcgctgggatggaggcggaggaaggggtgatggcgacggacttcttctggtcgtacacggacgagccgcacgcgtcgcgccgccgggagatcctggccaagtacccgcagatcaaggagctcttcggcccggatccgtgggccttcctcaagattggtttggtcgtgtcgcttcagctatggactgctacattcctccgtgacgccagctggctgaagctactgacggtgtcctacttcttcgggtcgtttctaaaccacaacctgttcctggccatccacgagctgagccacaaccttgccttcgcgaccccatccctgaaccgctggctgggcatcttcgcgaacctccccatcggtgtgcccatgtccatcacgttccagaagtaccacctggagcaccaccggttccagggcgtggacggcgtggacatggacatcccgagccaggcggaggcgcgcgccgtgaggagcgccgccggcaagtccgcgtgggtcgtgctccagctcttcttctacgctctgcggcc

SEQ ID NO: 145912 - DNA, 2502 bp, Zea mays
  Clone ID: MRT4577_64586C.1
cggagccttaaatatgcttcttcccctcccgcagccggcctacaaatccatagtgacactattattatctcaccttcctacttgagttacctggcagctcgggcagcgcaggggaaccaattgcagagagcaagcatatccaacgcaattaaatgagtgtgctaaactcgctggggatcctactcctgctcacggcgccggcgtttgcggcggcactgtcggcggatgggctttcgttactggccttcaagtcggcggtgaccgacgatccgtccatggctctctcgtcgtggtccgacgctgatgcggacccgtgccgctggctgggcgtcacctgcgtcaacagctcgtccagcgacggactgcgcgtcgtaggggtggccgtcgccggcaagaacctgtccggctacatccccgccgagcttgggtcgctcgcgtttctacgccggctcaacctccacgggaaccgcctgtcaggaaccgtccccgcggcgctcgccaacgccaccgccctgcactccctctttctctacgataaccgactcacggggccgttcccggccgcgctgtgtgggataccgaagctgcagaacctggacctgtcgcagaacgccttgacgggcgcgctgccgctggagcttggacgctgcaagcagctggagagattgcttctcgccgagaatgcgttatccggcaacataccggcggctgtctggcaggacatggtgggcctgcagatgctggacctatcgtccaacaacctcaccggagccataccagcagaactcggcaagctcgccgcgctcgccggcacgcttaacctctcccacaaccacctctccggcggggtgcccctcgagctcggtcggctcccggccaccgtcacgctcgacctccgcttcaacaacctctccggcgagattccgcagtccggctccctcgccagccagggccccaccgcgttcctcaacaacccggggatctgcggcttcccgctgcaggtcccctgccgcgtcgctccaccgtcgtcgtcgtcgttgcccccaccgcctccgtcgtcctctgccactaccaacggcggcgcgggcggtgcacggctgccgatcaagaccagcctcatcgtgctaatctcggtggccgacgcggtggccgtcgcgttggtcggtgtcatcgtggtctgcgtgtactggaaggtctgcgaccggcgccgcgccgcgaaagacaaaggcgacgacagcgagtacgaggaagggtgcggcctgttcccttgcccgtgctgcatgcgcgccgacgcgtgcggcgactcgtcctcggaatgctccgaggtcgacggcaagtgcaacggtggcggagggaccggggagggcggctatctggtggcgatcgacaaggggttcaggatggaactggacgagctgctgaggtcgtcggcgtacgtgctgggcaagggcggtaaggggatcgtgtacaaggtggtggtgggcaacggcacgacgcccgtggctgtgcgccggctcggcggtggcaccgcggcgcccgagcgataccgggagttcgccgcggaggcgggcgccatcgggcgcgtgcgccaccccaacatcgtgaggctgcgcgcctactactggtccgccgacgagaagctcgttatcacggatttcgtcaacaacggcaacctcgcgacggcgttgcgcggccggtccggtcagccaagcctatcatggaccctacggctgcggatcgccaagggtgcggcacgcgggctagcgcaccttcacgagtgcagcccacgccggtttgtccatggcgaggtcaagccctccaacatcctgctggatgccgactacaacgcgctcgtcgccgacttcggcctcgcccgcctcctcaccatcgtcggttgcaccgacgtctactctgtggcaggctccggcggcatcatgggcagcgggctcccgtatgccagacctgccgctctaacggacagatcctgcagtgcgtatcgcgcccctgaggcacgcgcgccggggggtgcacagccgccgagccagaagtccgacgtgtactcgttcggcgtcctgttgctcgagctactcacggggaagccgccggagcatgcctcgccgtccgcgtcgtcctcgtccatgccgggtcacaatgggcaacgggagctagagcaacaggctccggagctcgtgaggtgggtgcggcaggggttcgaaggctcgcggccgctgtcggagttggctgatgccgccctcctgcgggacgctgccgcacggaaggaggttgttgcggcattccatctctcgctaaggtgcgtcgaggcggacccggagcgccgaccgcggatgaaggccgtgtcagatagcctggacaagatcggggcttgacttgtcaccgtcgacccaaaaatggttatgatgtggagttgtatattgttcgtaattatacttatcattattattgcttttctttctttaaaaaaaaaaaaaaaaaaggccccta

SEQ ID NO: 145913 - DNA, 301 bp, Zea mays
  Clone ID: MRT4577_64587C.1
ggcgcccacgcgttcgtccacgcgtgcgcacgattcacgcttagccgcagagatccgtcacactgcaaggtttgaaaactgaacggggagagggcattagcagagctttcccgtgaggaaaatgtgtacatggcgaagctcgcctagcaagcagagaggtacgaggaaatggctgagttcatggagaaggtagcgaaaactgttgactcggaggagctcactgtggaggagcgcaacctcctgtctgctgcatacaagaacgttattggagcccgtcgtgccctatggcgcatcatcttct

SEQ ID NO: 145914 - DNA, 395 bp, Zea mays
  Clone ID: MRT4577_64588C.1
ggggcccccctctttaaaacccattttagggcacccaaccaaacaaaggggggggttaatttgaacaagtttttgcaagcaaccaaacaaaaggggttataggaccccaccccaattctacaaaaacggggtaaacgggggcaaacctagctggatttttacgaaaaccaaacacccgggtggggaagcatatttttttaaaatcgggcaaaggggtggctacaggggattcccagcattgggaaacaaatttttctaaaatctggcaaaggggttgctaaaggggatcccaagccttgggaagcaaatttttttaaaatcgggcaaaggggtggctacaggggattccaagctctggaacacattggacaggtcacccaaaaatataccggggg

SEQ ID NO: 145915 - DNA, 333 bp, Zea mays
  Clone ID: MRT4577_64589C.1
aataaggacctgggccttttttttttttttacagggaaccctcccaaaacaattttttgaaaaaaatggaaccggaccccaacccaccaaaagaggccccccaaaaataaagggcattgaccccaccctggattttccgcatcactgcagcgaccactaaaaagaccgccccctggggggggacacaacaggcccaaaaaatggatcattgatcctcgaggggggccaataccggaggaaaaaacccccaacaatgttcctcactggaaggggacccccgctgggggaaaaaaaactcttgttggggttgtttcccaaaacaaaaacaaaaac

SEQ ID NO: 145916 - DNA, 639 bp, Zea mays
  Clone ID: MRT4577_6458C.1
gccttgcccttccgtccactgcattatatcctttctggtgctcagggcacctctctcgctctgcgccgtcgacaccgccctaagccacgtgctgaggctttcgttgggtctctgcgacggcgacggagcacccagttctgtagaaatggctgatggcgaggacatccatcctattgtctgatacaacggcactggattggtcaaggctggttttgctggcgatgatgcaccaagggcatctatccctatcatagatggtcgtcctaaccacactggtgtcatcgtagagatcggacacaaagactcatatgtcgccgatgacgcacagaccacgagaggtattattacactaaagtacccgatcgaccacggcatcgggagcaactgcgatgacatgccgaaaatcaggcatcatactttctacaacgagcttcgtgttgccccagatgagcaccctgtgttgctcaccgaggctcctttgaacccataggccaacagctagaagatgacccaaacgatcgtgatgagacttttaatgtgcctgccatgtatgttgcaatccaagcggcactctcactctatgctagagggcgtactacagggattgaaccccactctcgtgatggagcgagccacact

SEQ ID NO: 145917 - DNA, 448 bp, Zea mays
  Clone ID: MRT4577_64590C.1
ggaagcctccgaaaacggaacccattggcccacccaaatcgggttcgggggaaaattaaaaacggggggtatggccccaaacaccccccggggggttaaaggcccaactgctcctacgtaaaaagggtatccaaggccgggggggtttagaaaaaacataggcggagaaactggaccacatcgatggtaaagggtgccccatcaaaaaggctacataaaaaacattcctgcagttacattgaacggcaacatttttttaaaaaggctaatgggctgcccaaccatttgagggcaaaagttggggccaaaaaatcgggtttaatttttttgctttggggggacggattaaaccaaaaatttgggccaaaacatcccctgttttttttaggggccgggaaccctccaaggacaacccccgtccaagctggtgaacccttggttgccaaaa

SEQ ID NO: 145918 - DNA, 423 bp, Zea mays
  Clone ID: MRT4577_64591C.1
tctttctactttattaggcttattaagttcaacattgtcatctttctttatccttaggctttttcactatgctgttcaattctaaaaatgtggagtatttactatgcatcaatgaaagttttacctttaaaggttaaataaagtcatatacatgtttattatgggtcagattgataatataatggaatactacatttcttctatgcctttgctaagcttgagaggaacctctactgatgttgagcaacagttcataaacaatacagtttactttcagaaaatgtggagtaatgtaccagaaattcaaagtcgatgcaaactagttgtcaagcagattagagatgacgtaaaggtgttcattaatatgaaggcctctttgtcctaatgagtatgtttcaattggtgatattgcctcatgttggc

SEQ ID NO: 145919 - DNA, 1732 bp, Zea mays
  Clone ID: MRT4577_64592C.1
tacaaagcccgctactggtggatatgcgaggccatttttttgcaacaccccaagtgattcgtttcgaattagttagtttgttcttgtaacggatcaaagcactgatgttcctgcgctgcaatggctctttcgctagttaatctcttatattttgttgtcaaaactcgcctactcggttttagtcaaggatgcgatttctttcatccaaaatcttttgggtgctcatgtagaagttgaaaatcttcgtattttcactcctgtttgtctggattattcgctgtattttgacggcgttaatctggcttgttcgactattgacaatatcgttgcattcttgtttccgacagagttctcgaagcaaaacgatcggatgagattcttcaaggggagcaaggtggaggtattgcaggaggcagaggtgccatttggttcttggaggcctggtgagatcatctccggcaatggacacacctacctggtgagatatgatgaaagtcccgttgactctagcgtggctgttgaaaggatgccaaggaggttgattagacctagccctcctacggatgatcctgtacgctggagtttgggtagtattcttgaggcctttgacagctactcgtggaaggttgctgaggtggtgagagtgcttaaaaagaatcaatatctagtcaggctccttgggtcgtcgctggagttgagtgcacatgcatcagatcttcgattgaggaagctttggttagatgacagatggattgtgactcagaagtattccgcaagatgcttggatggtgcattcagaggtcaatctgaagatggaaatttagactgcaacttgagaaaggacagccatattcaacttgagaaccggaatgcttttgagggtgatacatctagaggcatgaagagaaaatcgtctgctatatcaacacatcctcattgcagcgtcatcagtaagagattgcaatgcagtgacgccactaagagattctggacactaaatagagatggaaggcacacaaagctggttgatagaggttttttccctttggctgaaaaggtagatgctgttgattccccatgcttaatgctgcgtgggaaatacatgcatgctagtcataaagggcatactagaacaactgaagaatttagtgacaccgagagtacctcatcttctgttggtagttctagtcctaatagtaccccccatagatcacagtattataatttggtcaaccaaagtggagatatctgtagtagaactgatggtgatgaagcttttacatccgaaagagaaacatcagaacatggtaacaatggatcgaggggagaaacccatttgctggaattacatgcttatcgtgcgacaatgttagccttgtatgcttgtgggtcaattagctgggagcaagaggctttgttgactaacctaaggttaacactgaacatctcaactgatgaacatctagctgaattgaggagtttggttacccatgctgttacttccagatagccttttcttgttaatttcctggggacatttcatatatttcaaattattgtaagttgggaaatctcattaaggggttgaggtgttggagtacttcatgtgtagaattatacttgtcaaaagagtcacttgggaaattttgtactgttgatatctcaagacttctgaatttttgggacagtcttgaagtattaatatttttcatactgaaacctttttttaatc

SEQ ID NO: 145920 - DNA, 801 bp, Zea mays
  Clone ID: MRT4577_64593C.1
actcttgcctctatcccagcgtgttcattccaacacaagaacaacacacacgacgcgcactcgcaccagccagccacggaggaagaaaggcgcactccagagatgaccgagcgaaggcaggaacactcgccgccgtccaagctcccccgcctctccggccccgacgccgacgacaacgacggcgcagggacggtgaccatggcggcgccgtcgccgctggttcttgggctgggtctcggcgtaggcggcagcagcagtgacagtggacgtggcgacgcggaggcatctgcggcgacgcggccatcggcgctgacgttcatgcagcggcaggagctggagcaccagtggcgggactggggagcatgtgctacgaccacaggagcagcatggagccggagccggaccggtgccggcgcacggacggcaaaaagtggcggtgctcgcgcggcgtgatgccggggcacaagtactgcgagcgccacgtccaccgcggccgcggccgtgcaagaaagcctgtggaagccgcgccggccacatcagccatcccgatccgcgcaatgcacgccgccgacgcgcagggcgccacaagcgcgcacgcggcgccaccgcagcgcctcggcttctcctcccccgccggcgtctacctggcccacggcaccgcccgtggcacctgacctgatgacggcattttcttcagttagctacagatgttttgcttccttgtttgtgctaatctgtagcggggaaatctccgaggattatgctgtactggtgctggtaattttattttcgccttgactg

SEQ ID NO: 145921 - DNA, 250 bp, Zea mays
  unsure (1)..(250): unsure at all n locations
  Clone ID: MRT4577_64594C.1
gcggccgccctttaatanttttttttnctccctttttttctctgggtggttacatgaatatcaagggggatttaacaaacatccaaaccttgtcctttgcccaattcctctcacgacacaagctgggtccaagaacattacacaaaaattactgagaatgaccctccaaaacaggacaataccaaatttctaaactggtgtttctcccctatgcacaaggtcaagaacttttgtgaaccgggaaagacag

SEQ ID NO: 145922 - DNA, 304 bp, Zea mays
  Clone ID: MRT4577_64595C.1
aaatcaggtgtgccagacgtaatgtcagcatcaaacccgggcgcgaactttcgtcttccacccaccgtgtctaatacctaggcatttcgatcctcgcgatagtgaaactaggtgctgtactatgatgtgctgtgctctgcacttactatgaagtaacatcaattcacaggttcaagaatttagtgctgcgcatgtggaagaccctgtcatcaccattatggcgcacttcgacctcgtcttcgacgcagacgtacaccagcctcaggtccatgtccatgatcacacggcgagacacgagcaccac

SEQ ID NO: 145923 - DNA, 666 bp, Zea mays
  Clone ID: MRT4577_64596C.1
ggccgcttttttttttttttttttctttttttttttttttttttttttttttttttttttttttttttttttttttttttttttttttttttttttggccccaaaaaagaacacagttaatttgctctgggccggattcaaagggttccataaccgggaaaaagggatacccaaataataaccggggcccaaaagggggaaaaattttttttgagggccgccaaagtttctccccgacctcggcggggccccccaaaagggccgggcccacgtttggctttaaaaaatgggctacccacctccctgcccaaaaggggtttgacaaaaatttggcagtttctttttgaaaaccccccgcaatttaacccccaggggggtttcaaaaacaatttttccatttggggaaggtagcacaaccccaccggagcatgaggggccaggggcctgaaaatgcctgggagcaaatggcaaaaaaatttgacgatcaacccctatctaaggggggaaaactttgggtttattggcaaacccattccttggaaattccaaaactaaatcaacaggggggagaccccccttcctgcaggggaaaaccacaggtggttttttaaggcccaacaaactttgaacaaaaagggtcttgggggccttcttgaaagggggggg

SEQ ID NO: 145924 - DNA, 2890 bp, Zea mays
  Clone ID: MRT4577_64597C.1
tttttgcgtccggaggtggccggcaggactctcgctgactgccgtggtctgagaacgctcaacctctcaggcaaccacctggtcggcccgttcccgccggacgtcgccgccctcacctcgctcgccgcactcaacctctcaaacaacaacttctccagcgacctccccgccgacgctttcaccgagctacagcagctcaaggtggtcgctctctccttcaaccacttcaacggcagtattccggactccttggcagcgctgccggagctcgacgtgctggacctcagctccaacaccttctccggcaccatcccttcgtccatctgccaaggccccaactccagcctccgcatgctgtacctccagaacaactacctctccggcgccatccctgagtcaatctccaactgcaccaggctcgaatctctcgatctcagcctcaacaacatcaacggcacccttcccgcatccctcggaaaactccgggagctccgggacctcattctgtggcagaacttgttggagggcgagattccggcgtccctggaaaatttggtcaggctcgagcatctcatcctcgactacaacgggctcaccggtggcatcccgcgggaactctccaagtgcaaggagctgaactggatatccttggcaagcaaccagctgtctggtccgatcccggcttggcttgggcagctcagtaatttggccatcttgaagctgagcaacaattccttctccggaccaataccggctgagctcggcaactgccagagtttggtctggctggacctgaacagcaaccagcttaacgggtcaataccggcggaactggcaaagcagtctgggaagatgaacatcggtcttgtcattgggcggccgtatgtgtatcttcgcaatgacgagctgagcagcgagtgccatggcaaggggagcttgctagagttcaccagtatccgacctgaagagctcagtcggatgccgagcaaggagctgtgcaacttcactcgggtgtacatggggagcacggagtataccttcaataagaatggctccatgatatttctggatctgtcatttaatcagcttgactcagagatcccaaaggagcttgggaacatgtactacctcatgatcctgaatcttggccacaacttgctgtctggcgtcatcccaccagaactagctggtgccaagaagcttgctgtactcgacctgtcacacaaccagttggaagggcctattcccaactctttctcgacgttgtccttgtcggagatcaacccttcaaataatcagttgaatggttcaattccagagctcggttcgctgttcacattcccgaagatttcatatgagaataactctggtctttgtggcttcccactgttgccatgcgggcacaatgctggctcaagttcttccgatggccaccgatcccaccggaaccaggcttcactcgcgggtagtgttgctatgggactcttgttctcgctgttctgtatagttggaattgtcatcatagccgtcgagtgcaagaagcggaagcagatcaatgaagaggcaagtacctctcgtgacatatacattgatagccggtcacattctgggactatgaattccaattggagactctctggtggttttggtgatgtctataaggcccagctcaaggatggaaaggttgttgcaatcaagaagcttatacatgtgagtggccagggtgaccgggagtttactgcagaaatggagaccatcggtaggatcaaacaccgcaatcttgttccgctcctcggctactgcaagtgtggtgaggagcggctgttggtttatgattacatgaggtttggcagcttggaagacgtgttgcatgaccgaaaaaagatcgggatcaagctaaattgggcagcaaggaaaaagatcgccattggggctgcaaggggattggcatacctccaccacaactgtattccacacatcatccaccgagacatgaagtcaagcaatgtgcttatcgatgagcaattagaggcaagggtatctgatttcggtatggcaaggatgatgagcgtggtggatacccacctgagcgtgtccactctcgccggcactccaggctacgtgccgccagagtactaccagagcttcagatgcactaccaagggcgatgtgtatagctacggtgttgtattgctcgagctgctcactgggaaaccgcctacagattcaaccgacttcggtgaggacaacaatcttgtaggatgggtcaaacaacactcaaagtcgaggctcacggatctgtttgatcctgaactactggtggaggatccagccctggagctcgagctactggagcacctaaaaatcgcttgtgcatgcttggacgacagaccgtcgaagcgtccgacaatgctgaaggtcatggcaatgttcaaggagatgcaggccagttcgacggtggactcaaagacttcggcgtgcacagacgatgcatgttttgccgatgtggagatgacgaccctgaaagaagacaaggaggagaaggactaacaaggccaccgacacgcgaggaactgctcctggtgcacctgcccagggggtgagtggcagcagctacacggcgagtcagaggcaaaatgcccgtaggaggaatcagttggtcaggataccatttgaagtctcttgttgagcttagcattcccttgttgatggtagaagacagaagttttccctcatagcttcgccagttgaatatgctgtgtacctatgggagtaggttgatttttttttcttctttctttttaagctttcttcatctcttcttgtcacacgtcagtaagatctgtgtatgtacatatataaatggtgattttttttcttcggtgccaag

SEQ ID NO: 145925 - DNA, 1979 bp, Zea mays
  Clone ID: MRT4577_64598C.1
ggctggacttgaacagtaaccagcttaaagggtcaataccggcggaactggcaaaacagtctgggaagatgaacgtcggccttgtccttgggcggccatatgtgtatcttcgaaatgacgagctgagcagcgagtgccatggcaaggggagcttgctagagttcaccagcattcggcctgaagagctcagccggatgccaagcaagaagctgtgcaacttcactcgggtgtacatggggagcacagagtataccttcaataagaatggatccatgatatttctggatttgtcatttaatcaactcgactcggagatcccaaaggagcttgggaacatgtactacctcatgatcatgaatcttgggcacaacttactgtctggcgtcatcccaccagaactagctggtgccaagaagcttgcggtacttgacctgtcacacaaccagttacaagggcctattcccaactccttctcaacgttgtccttgtcggagatcaacctttcaaataatcagctgaatggttcaattccagagctgggttcgctgttcacattcccgaggatttcatatgagaataactctggtctttgtggcttcccactgttgccatgtgggcacaatgctggctcaagttcttcaggtgaccaccgatcccaccggacccaggcttcgctcgcaggtagtgttgctatgggactcttgttctcgctgttctgtatagttggaattgtcatcatagccgttgagtgcaagaagcggaagcagatcaatgaagaggcaagtacctctcgtgacatatacattgatagccggtcacattctgggactatgaattccaattggagactctctggtactaacgccctcagcgtcaaccttgctgcatttgagaagcgactgcagaaactcacctttaatgatcttattgtggccaccaatggcttccacaatgatagcctagttgggtctggtggttttggtgatgtctataaggcccagctcaaggatggaaaggttgttgcaatcaagaagcttatacatgtgagtggccaaggtgaccgggagtttacagcagaaatggagaccatcgggaggatcaaacaccgcaatcttgttccgctccttggctactgcaagtgtggcgaggagcggctgttggtttatgattacatgaggtttggcagcttggaagacgtgttgcatgaccgaaaaaagatcgggatcaagctaaattgggcagcaaggaaaaagatcgccattggggctgcaaggggattggcatacctccaccacaactgtataccgcacatcatacaccgagacatgaagtcaagcaatgtgcttatcgatgagcagttagaggcaagggtatccgatttcggtatggcaaggatgatgagcgtggtggatacccacctgagcgtgtccactctcgccggcactccaggctacgtgccgccagagtactaccagagcttcagatgcactaccaagggcgatgtgtatagctatggcgttgtattgctcgagctgctcactgggaaaccgcctacagattcaaccgacttcggcgaggacaacaatctcgtaggatgggtcaaacaacactcaaagtcgaagctggcagatctgtttgaccctgtactactggtggaggatccggccttggagctcgagctactagagcacctgaaaatcgcctgtgcgtgcttggatgaccgaccatccaagcgcccgacgatgcttaaagtcatggcgatgttcaaggagatgcaggccagttcggctgtggactcgaagacctcagcatgcacggtcgccgtggatgatgcgtgttttggcgacgtggagatgacgaccctgaaagaagacaaggaggagaaggactagagcaaggcccaccgacacgcgagaagctgcccttggttcctgcccagggccgagcggcagctacacggtcagtcagatctcagatgc

SEQ ID NO: 145926 - DNA, 729 bp, Zea mays
  unsure (1)..(729): unsure at all n locations
  Clone ID: MRT4577_64599C.1
ccggccgagcggcatcggccagaccgtggtcaccggcaaccggagcgtcgtcgacggctggaccacattccaatcggccaccttcgccatggtggggcaaggattcgtggcggtgaacatgacgttccgtaacacggcggggccagccaagcaccaggcggtggcgttccgttccggggccgacctgtcggcgtactacggctgcagcttcgaggcgtaccaggacacgctgtacacgcactccctccgccagttctaccgcggctgcgacatctacggcaccgtggactacgtgttcggcaacgccgcggtcgtgttccagggctgcaccttctactcccggctgcccatgcaggggcagtgcaacacggtcacggcgcagggccgcagcgaccccaaccagaacaccggcacctccatccagggctgctccctcgtcgcggcgccggagctcgccgccaacaccgccttcacgacgctcagctacctcggccgcccatggaagaacttctcgcggacggtggtcatggagtcgtacgtcggcgcgctcgtcgacccctccggctggatgccctggtccggngacttcgcgctcagcacgttgtattacgcagagtacaacaacaccggnccgggcgccgacaccagccgccgggttgcgtggcccgggttccacgtgcttggcgacggcacggacgcccgcaacttcaccgtctcaagcatggtgct

SEQ ID NO: 145927 - DNA, 212 bp, Zea mays
  Clone ID: MRT4577_6459C.1
acatgagacttacagctacttattaaggagtctttatggggaagcagctagacaaggtaccttgtgctagatgaccagaccttagaagacattcactcagccaatggacattgaatgtatataagactgcgatcacttatatatgacaatcaaacagacggacgaggtgcacataagaggattcttatgtggtataggatcacgtccccgga

SEQ ID NO: 145928 - DNA, 1232 bp, Zea mays
  Clone ID: MRT4577_645C.1
ctcgtctgtctctccttgcctgtgcgcttcggttattagctagctagcttgggtctagtctagtgtaactcccggccgccatctttgctgtacttcgttcgtccatgtcgcgctcgcgcacggtgcggatcttctgggacgatcctgacctgaccgattcctccggcgacgacgagggctgcggagcccggagggtcggcagaatggtgagggagctggcaccagcaccagcaccggcaccagcggctcttcccgtgccggatcagtgcaacgccggggacggcgaccgcgggaggaaggccggcgtcgctggtcccggcgtgtgcagcggggcgcggagacgggtggccaagggcgccggtggcccggcgagcaccaagttccgcggcgtgcggaggaggccgtggggcaagttcgcggcggagatccgcgacccgtggcgcggcgtgcgcgtctggctcggcaccttcgacaccgcggaggaggccgcgcgcgtctacgacaccgccgccgtccagctccgcggggccaacgccaccaccaacttcgccgcgtccgccgccactaacagcggctccggggccggggccgggcaggacccggcgacgacaccggcagcgggctacgagtccggcgcggagtcgtcgccgacgtccgtgctccgcaaggtcccctccctgtcctccctcgccgaggacgactccgacgcgccggccgccgagcgccgcagcctggccgtcctcgaggaggaggagctgggcgagttcgtgccgttcgaggacgcgcccgtctacgccaccagcggcttctgggacttcgagcccgacgcggggttcctctacgccgagccgtcgtcgccggaggcgtcgtggaatgccgccgccgccgtcgccgagcccgcctcgtctgacgacgcgcccagctgggccgcgtcgccggtgcaggagaacgactacttccaggacctgcgcgacctcttcccgctcaaccggcttcccgcgattttctgaacaggtggacggggaacgccggaaccgggaacggcgccgctggttcgtctaccgggatgttattttggacgtcgagagtgcgctgtgtctgtgtctgtgtctgtgtcgtgcctacgcgcaccgtgtacttgtacgcctttccccacgccgtttttgttactatcttcgagtcgatgagaaatgtggaaatatgctgccgaacgatgagcacgtagagttttg

SEQ ID NO: 145929 - DNA, 309 bp, Zea mays
  Clone ID: MRT4577_64600C.1
gaggaccacagctgtagttcaagtagatgtgcgtactacctcagttcgcggctgcaacttatggcgtgagcacaaccgctgcctcgacaccatgtgctccttttgcactagatgttgtggactgagataatagcagcgcgtgttgcctaacgctgtgttcccacaaagcagacagatcgatattactattgctcaaatgcgctccacaagagtctgagagcactaatgcatggagttcatctacgggaaaagctgcaactgtactacatgtagctttattacgagcaacgggagcaacaagtgcacctg

SEQ ID NO: 145930 - DNA, 176 bp, Zea mays
  Clone ID: MRT4577_64601C.1
cgcaagtccgttcgatcacctacgactccattcattctcatctagggtttaaatccactcaaacacgcttacatctacaattcgtgattgctcattcgatagatcgtactaaaggaagcccatagatctagtatgatttatatacaattcagcgcaactgctcgtggggattcgat

SEQ ID NO: 145931 - DNA, 182 bp, Zea mays
  Clone ID: MRT4577_64602C.1
tcgtatgtggcgtacggcttgtcggaattcgatcgatccagttaaacaaagtatctgtatggcgtctggcagttcgcatgtgatcggtactgtaggtgctgtgtgtgaggttgggtcacctcttcctcctgttcctggtggcgtggtaagctgatgtttatgttcgcctcgttgatatccta

SEQ ID NO: 145932 - DNA, 368 bp, Zea mays
  Clone ID: MRT4577_64603C.1
aaatccaacttaggtgatccaaataaaggagttcataatactgcagcaggagtccgactcttttctgtttacaaacaaaatgcctagataggaccatgtacaacgaggctacaaaaactaaactgctatatcttaaagagaaggaaagtagtagataaccctggcccttatttaagatactcgaccaacatttgttctggactgtgctgctgactatcaccaaataataaatggcgtataaaaaaaccgactccagacgattactactgaaaccggcatcatcttgaccttggactacgcagcatgctgcgtgccagactcaccaagtgaaatattcccatctgtcagctaatcatgcgctctaattc

SEQ ID NO: 145933 - DNA, 332 bp, Zea mays
  unsure (1)..(332): unsure at all n locations
  Clone ID: MRT4577_64604C.1
cggacgcgtgggccgccctttttttttttttttttttttttnngtnaatttttttttttttgggttgggttttttttttgggggtgggggttttttttttttttttgggaaaaatacattttttgcttaattgcctgcttgcttcattggattttggcaccggggtgggtcgttacactcttaaaaaacatcccctatagttttttttgcagaccataataatttgtttgatggggtttggattcagcaacacaccctttaccaccttttttttttttttttttcccccccccccctgttcccgcttttggggccctttatattttgggttt

SEQ ID NO: 145934 - DNA, 289 bp, Zea mays
  Clone ID: MRT4577_64605C.1
tcgcgaaaacaatgaacaggcgcagcacggcatcatcgaccgcgctctcggcgccagccctcgcgctagcggcggacaccgccccatggccgcggaggcacagccgacgagagcggcggagagcgacaaggcggcgcaagcgaaaaatatccaggacgacttctgctcaacgctgagcgagggaaagaagaggatgaacctggtcgtgagcaacgacccctgcgatatctacagaaatgcaacctggtgctgtaccgaaggatccagtgccagggcaagcgcccccagc

SEQ ID NO: 145935 - DNA, 1419 bp, Zea mays
  Clone ID: MRT4577_64606C.1
cggaagcgtgggcggacgcgtgggcggaggcgtcggcgtcggcgtgaggaaaaacttggggaaaaatacacagggcacaatgtgcggaggcgccatcctcgcggagctgatcccgccgacgcggcgcgtggcgtcgaagccggtgacagaaggccacctctggtcggcgagctccaagaaagccggcagcggcagggacaagaggcaccagcacgaatacgccgacgatgacttcgaggccgccttcgaggacttcgacgacgactttgacgtgcatgaagacgacgaggacggccacttcgtattctcgtccaaatccgccttgtccccagccctgcacgacgggcgcgcggcgagccagaagaagcagcgcgggcgccagttccgcggcatccggcagcggccctggggcaagtgggcggcggagatccgcgacccgcacaagggcacccgcgtctggctcggcaccttcagcaccgccgaggacgccgcccgggcctacgacgtggaggcgcgccgcctccgcggcagcaaggccaaggtcaacttccccgcagccagcggtcgcgctcgcggtcgcgcgcgcccacgccgcggcgacgacggcaacccacgaaccgcgccggaaacgcagcacccagcacagcccgctctgctgcctcgaggagagagagagacgcagaggaaggaagggatcgccgccgtgaagccagaagctacggagtcgttcgacgtgggcggcggtctcttcttcgacatggccttccccaccttcccagcctcgccgccgccgcaggccgtggatacgtccttcgccggcagcaccgccacgtcggagaccgggagccccgcgaagaggccgagatgcgacgaagactcgtccgagggcggcagcggctccgcgctggagctcgctgacgagctggcgttcgacccgtttgtgctgctgcagatgccctactcgggtgggtacgacgacgactcactggacggccttttcgccgcagatgaggccgtgcagcaggacgtgggcaacggcatggacggcgtccgcctgtggagcttcgacgagttccccgccgtcgacggttctgttttctgacgtttgcttactacgtactactactattttctgcctggtggaatcatatgtgatagtgctgcatgtgtctgcctgatcgtcagattgtactccactctggatatttgtgctacgtactcgtctggtatttcctactgtgggtcaatggttcctatgaatttgttcacgtcggcgaaactctgtattgtacggtcgtgattgatgtgccaaattaaataagcctgtgaacctggttctatgtatatatggtatcttgattatgagtcaccggcctcctaaccttcccctgccatgtttgggttggagcatcctcgtgc

SEQ ID NO: 145936 - DNA, 990 bp, Zea mays
  Clone ID: MRT4577_64607C.1
ccggccgggattggtatcaagaaaaacttgtcgaaaaatacacagggcacaatgtgcggaggcgccatcctcgcggagctgatcccgccgacgcggcgcgtggcgtcgaagccggtgacagaaggccacctctggtcggcgagctccaagaaagccggcagcggcagggacaagaggcaccagcacgaatacgccgacgatgacttcgaggccgccttcgaggacttcgacgacgactttgacgtgcatgaagacgacgaggacggccacttcgtattctcgtccaaatccgccttgtccccaggtaatccgttcgttcgagggtgcaagtgcaataatctgcacgggcagaatgttattcacgtacgcgcgtccatgggtttgggtttgggtctggccatgacgacgttggcaagaactgcatgctagactgctagtgtaatctcaagggaaagagcccgtcttgtgtatagccctgcacgacgggcgcgcggcgagccagaagaagcagcgcgggcgccagttccgaggcatccggcagcggccctggggcaagtgggcggcggagatccgcgacccgcacaagggcacccgcgtctggctcggcaccttcagcaccgccgaggacgccgcccgggcctacgacgtggaggcgcgccgcctccgcggcagcaaggccaaggtcaacttccccgcagccagcggtcgcgctcgcgcgcgcccacgccgcggcgacgacggcaacccacgaaccgcgccggaaccgtagcaccctgctgctgctgctgctgctgcagcacagcccgctctgctgcctcgaggggggagagtcagagagacgcagaggaaggaagggaacgccgccgtgaagcctgaagctacgcagtcgttcgacgtgggcgctctcttcttcaacatggccttccccaccttcccagcctcgtcgccgccgcaggacgtggaggcgtcctttctcggcagtaccgccac

SEQ ID NO: 145937 - DNA, 292 bp, Zea mays
  Clone ID: MRT4577_64608C.1
ccgtgacaacaacagggtgggcttcgccgaggctgcccgcctctagttcccaaggcgtccgcgcgccacacagaaacagaggagagtcccagagcaggaggcccctggcccagcggcccctcccacacacacgcagctacacgcacgcccactgtcctgggcgccctggaagccggcggcccaagcccgacttgctgttttgttctgtggttttcccctccctgggttcacccatgctgcctgcctgtctgtctctccatctgtttggtgggctccagagcacagatctgtt

SEQ ID NO: 145938 - DNA, 423 bp, Zea mays
  Clone ID: MRT4577_64609C.1
acggttccatcctaccgagacggcggggacggcggatgggccagatctacagtgcagcgttgccctctgtagacgcgggcagcttcgtccctctccgttcattgacgccgccatcgccttgcgttgcctcgtgcgtcgtcgtcgctactttctggggccatgtggtgctgactcattggtccctgcctccaagcgggtccacgcgcagcatgctacacggagaggcgcaggactacgcgatgctgcggagccatcgtcgagtcgccagcagtgtgcggtgcgactgtgctggggcagcgacaggcatggccgacatagcgccgtcctctgggggtgtactttcttcccggtaaatattcgcttcccctctgcttggagcccgcgcgcattatttagtccttatatctactgattctcgaatct

SEQ ID NO: 145939 - DNA, 675 bp, Zea mays
  Clone ID: MRT4577_6460C.1
cggtcgcgtgggttcgacatctccggcgaggacatggagaggatgaaggccgtcgaccggaagtaccggactaaccagcctgccaagctctggggcatcgacctctatgcttagcttttagttgggtcgcgtcgcgtgctgcgtctctcggctccccccagacaagacaacatcaataatgaggattccctcagacgacatcagtcaaagtcatgaggatctcagacaacatcttccatcacatgtgacagtgtgaggttgatggtgaaggcaaatgttataatgctaattgtaaggatctgagaaccttgagtggtcgcatgaaaaaggttggacagtacctcttgcgcaggcaaacctaaaaagttggcatactgctcgttttcttcgacactataaatatggtgaaggcaaatgttatactgctaaaaccgtaagggtctgagaacctacacttgagtggtccctggaaaaagttgacagtacctcttacgcaggtaattgaggggttataattatttcgttaagtatttgttttcagtgctataatgtaatgagtatagctgacctgtgttttttccaaggtagtatttactatgtagtgcagtttgcaacccggtttattgtctataataatattatatccatctaactgtatgcttatttttatgctat

SEQ ID NO: 145940 - DNA, 590 bp, Zea mays
  Clone ID: MRT4577_64610C.1
tcgcggacactggcgaggcgcctacaacagcgacaacagggacttattccactgatagaggctaacccatcggtcgatgccttcctacagcaccaacaattgctggcatacaaccagttctctctgatgaaccctgtcttgttgaggcagcaacccatcgctggaggtgccatctttaagattactgtgtttatgtacctgcccaagagcgctctatactgagagaactgtggacataccctgcacaggcgcacgctccaccgcgcgtgtagagggcacacacagcgctatagagagacttgtcacacacctctcgccccctccttacactctcttgactgtgttaatcccctcgttacccaactttaacgcgttgggtctcatacccctgtttccttaaggggtgctatagaaaagaggaccgcacctcgacctcttcaaaattggtgcacactctgtgtcgcgtataggcgccctgtcccgatagcactatacgcgccgcttgtgcggtggactcacacagtgatacctgcacactctagagccctatagcacacgactctagctttttttactctatttttctcgac

SEQ ID NO: 145941 - DNA, 1946 bp, Zea mays
  unsure (1)..(1946): unsure at all n locations
  Clone ID: MRT4577_64611C.1
tgtcaacgcaacatgtactacatacggtctggttagcttgctttttcacactataaatacactgccctagctcgaggccggccgggatggaccgcggaccgtccgcagcgcatcacaagcaatcgatcgagctgggtcgaagaaacttcaacacacaacatacgtatacagtcagctgctgcagtacagtaggagctagatcgagctagcatggcggtgaaggtgtgggtgttcgccgtggcactgatgatgtgcgctggtgtaggccttggagctgacgacgacgacggcagccgccttattagccgctgtcgtctgagctcgcccaactaccgcggcgccctggcaaaggccatcctcttcttcgaggggcagcggtcggggcggttgccggcaaaccagagagtcaggtggcgcggggactcggcgctcaccgacggccaacccgaaaacgtgaacttgacgggtggctactacgacgccggagacaacgtcaagttcggtttcccgatggcgttcagcgtgaccctcctgagctggagcgccgtcgagtaccgcgacgaggtggcggcggcgggtcagctccgccacctccggtccgccatccagtggggcgccgacttccttctccgtgcccacaccacgccgaccaccctctacactcaggttggcgacggcaacgccgaccaccaatgctgggagcggccagaggacatggacacgccgcggacgctgtacaagatcacccggagctcgcccgggtccgaggccgccggcgaggcggcggcggcgctcgccgccgcgtacctggtgttcagggacgaccgggacaagaccttggccacgcagctcctggccgcgtccagatccctcttcgacttcgccaacgactacaggggatcctaccagatgtcctgcccattctactgctcctactcaggctaccaggacgagctccagtgggcgtcggcatggctctaccgggcaaccaaggacagcaagtacctcgacttcctgcagaacaaccagggcggcagcgccaccgagttcagctgggacaacaagtatcccggagctcagctgcttgcaacacaggagtacttggctggaaggacagagctggaaggctacaagaggggcctggactcgttcgtctgcgccgtgatgcccaacagccgcaacacgcagatccgcaccacccctggagggcttctcttcacccgcgactccgttaacctgcagtacacaaccaccgcgaccctgctgctgtcgatctacgcgaaggccctcctcgcttctgcagcaggagcagtccagtgcagcgccgcgaccttctctccggaccagatcagttcatttgcgacgtcacaggtggactacatcctgggagacaaccccaggagcgcgtcctacatggtcggcttcagctccaagttcccgaggcgcatccaccaccgcggctcctccattccgtccatcaaggtcctcccccggaaggtcacctgcagcgagggcttctcgtcgtggttcccgacggccaaccccaaccccaacgtccacgtcggcgccatcgtcggcgggcccgacgggaacgaccagttcggcgacaacagggaggactccacgcactccgagccggcaacgtacatcaacgcggcatttgtgggcgcctgcgctgctgcactggggcgcagccagcaggtgcctgtggacgacacagcctcagcccacagtgatgttatgtaactagctacaacggaggagtatgcaagggcgggcaaccaaaccatgatatcgctttgtgtaacatcccaaggcccctacccccactaccactcttgatcatcctgataagaagagataaataaataaataaatacaatggcaaaaaaaaaaaaaaaaaaggggcggaaaaaagcggccnnnnnnnnnnnnnnnnnnnnnnn

SEQ ID NO: 145942 - DNA, 1849 bp, Zea mays
  Clone ID: MRT4577_64612C.1
atttatttatttatttatttatctcttcttatcaggatgatcaagagtggtagtggggggtaggggccttgggatgttacacaaagcgatatcatggtttggttgggacttgggcaagaccctgcccgcccttgcatactcctccgttgtagctagttacataacatcactgtgggctgaggctgtttcgtccacaggcacctgctggctgcgccccagtgcagcagcgcaggcgccgacaaatgcagcgttgatgtacgttgccggctcggagtgcgtggagtcctccctgttgtcgccgaactggtcgttcccgtcgggtccgccgacgatggcgccgacgtggaagttggggttggggttggccgtcgggaaccacgacgagaagccctcgctgcaggtgaccttccgggggaggaccttgatggacggaatggaggagccgcggtggtggatgcgcctcgggaacttggagctgaagccgaccatgtaggacgcgctcctggggttgtctcccaggatgtagtccacctgtgacgtcgcaaatgaactgatctggtccggagagaagctcgcggcgctgcactggactgctcctgctgcagaagcgaggagggccttcgcgtagatcgacagcagcagggtcgcggtggttgtgtactgcaggttaacggagtcgcgggtgaagagaagccctccaggggtggtgcggatctgcgtgttgccgctgttgggcatcacggcgcagacgaacgagtccaggcccctcttgtagccttccagctctgtccttccagccaagtactcctgtgttgcaagcagctgagctccgggatacttgttgtcccagctgaactcggtggccctgccgccctggttgttctgcaggaagtcgaggtacttgctgtccttggttgcccggtagagccatgccgacgcccactggagctcgtcctggtagcctgaataggagcagtagaatgggcaggacaactggtaggatcccctatagtcgttggcgaagtcgaatagggatctggacgcggccaggagctgcgtggctaaggtcttgtcccggtcgtccctgaacaccaggtacgcggcggcgagcgctgccgccgcctcgccggcggcctcggacccgggcgagctccgggtgatcttgtacagcgtccgcggcgtgtccatgtcctctggccgctcccagcattggtggtcggcgttgccgtcgccaacctgagtgtagagggtggtcggcgtggtgtgggcacggagaaggaagtcggcgccccactggatggcggaccggaggtggcggagctgacccgccgccgccacctcgtcgcggtactcgacggcgctccagctcaggagggtgacgctgaacgccatcgggaaaccgaacttgacgttgtctccggcgtcgtagtagccacccgtcaagttcacgttttcgggttggccgtcggtgagcgccgagtccccgcgccacctgactctctggtttgccggcagccgccccgaccgctgcccctcgaagaagaggatggcctttgccagggcgccgcggtagttgggcgagctcagacgacagcggctaataaggcggctgccagcagcatccatactaccggcactactgctgccgtcgtcgtcgtcagctccaaggcctacaccagcgcacatcatcagtgccacggcgaacacccacaccttcaccgccatgctagctcgatctagctcctactgtactgcagcagctgactgtatacgtatgttgtgtgttgaagtttcttcgacccagctcgacccattgcttggatcccggccggcctcgaggtacccaatg

SEQ ID NO: 145943 - DNA, 867 bp, Zea mays
  Clone ID: MRT4577_64613C.1
cattggattgctcgctcgaggccgggcaaaaaccggaacactcattcctcccgttcgcatctagcctcacaggcggcggcggctcccgccgagcgctgagcgtcgagcacatcggcccaggaacaccaacgttgcgtgcagcagccccgctaggatcgccaccgacgccgccgtgttgtacaggacgaaccccatcgggctgtccttgggcacaggttttaattctctctttacacatatcttggtctttaattctctcgtcaccagcataaggattttttataccctctccacactctgcagcccgctcgcctccaccttatcacgacacgtggcatgagtacggatccaaccgagggactgttcagttagtctcgattgcaggcctccatttctccaattggggggacttcatgcgagcgggcacggatccaacgctggagcctccgctccaacggcctctccctcctcaacgcctccgttgccctctccctgttcggcgccgatggacaggaagaggaggaagggccgcccgaccgccaccgatggccatggcatcacactgtgccccgtccgtcccgcccaactggtcagacacctgtatcaacaaacaatggcgtccaacggcagcgacgtggtgatgatgtacgggacacggcgctggctggagccgtccaagcagcccaagccagcgactctctctgtcaaggtgagcctagcgcagatgctccgtggcatgatcgatcatggacaaggtcaccctggagcatctcgcatcgcgaattcgtagttcgcagctcttggcaatggattctatatccccacaaatatgtatccgatgtgtccattgacctttcactacatcca

SEQ ID NO: 145944 - DNA, 448 bp, Zea mays
  Clone ID: MRT4577_64614C.1
gccggccggtgcgaaaaagagtacacgcaaaaaaaagcataacatggctccagttattaattctcctgatagctacaagaagaatcctggaagattttaattaccatcaggtttgaagaatggaaacagaattgatatttcaggtcaaggcggttggggtggtttgacaaatggatattcgtttcaatacaaatcattggaagaagaaattgaacaagcttttaaaaacgtcgagcatgtattgagtactgtaggtgcttcctggaaagatgtttacagtgttacttcatatcatgttaactttgctgaaacttctgaacgtgtctgcactatattccccgctttgttcagacagtatattggtgaaagggctcctctatggacctgcgttggtgttacgccccttgctataaaggaaatgaatgtagaaatagtagtctcagctatt

SEQ ID NO: 145945 - DNA, 409 bp, Zea mays
  Clone ID: MRT4577_64615C.1
caagggaaattaaaaaaaaagatttcctttagccccttttaccccccttggggggggctaaaaactaaaaacaattaagtcctaagtcctaaaggggactaaaaattaattttttttttttttaaccaaacggggccttgtaattttttaacaaatttccaacctgggggacttttgcaaaggttcttttgtaacccccccccaggatcggaatttaccctgcccggatttaaaaatgaaaaaagcgttttggctttcttttgcatggacctaaaaatggccggaacctgttccacctgacccttgtggaaccacccggaaagcaaaactttgggggggccggcttttgggtaaaacccggggtccaccattttttaaaaaacccgaaggccctgcccttacttttttt

SEQ ID NO: 145946 - DNA, 493 bp, Zea mays
  Clone ID: MRT4577_64616C.1
ctgggtgtgtttttttaaacttattgtgttgcggagggaagcctacattactcagacttacgcagatctagagaccgatagagagcccagcggcagcagctagctagccgagttcttcaacgtaccacaacccaaccaaccctcactcgcttttacattggggggggtatctcgccggatcatcacacaggccaaaacagctggcccgagggggccaaggagccgttactcgcgcaaggacccggctactaccatcccatcccttttatacgggacgagacaacgggagggactgcatgcatgcaggcagtacatatggccgctgttgtcgcgtaccaacaacagcgggcccctatcttgactcgacaaatctactactgatcgatattgactcaactctgtgttacactttaaccaacctatccctgcccggaaatggccatgtagggcttgatcgccagatgttccggcggcgccctgggtccagggaccc

SEQ ID NO: 145947 - DNA, 561 bp, Zea mays
  unsure (1)..(561): unsure at all n locations
  Clone ID: MRT4577_64617C.1
atcttatatctttttctattttagcaccacagatgatcgtttagaagcaaagcgaccaccagagatcacagataagatacagaaagcgtggttttccctgcaaccgaatccaaaagaacgaatacaagaacaccgacgctaatacggcctatttgatgggcaactaaacattcataagatcctcggagatgaagggtaccctcgctcgtgacggatgctgttggacgaactggatgtccttgggcatgatggtgacgcgcttgggggggatggcgcagaggctggcgtcctcaaagaggccgacgaggtaagcctcggcggcctcctggagcgccagcacggtgtggctctgaaaccggaggtctgtcttgaagtcctgaagcgatctcgcgcaccacttgctggaagggcagcttgcggatcagcacctccgtgctcttgtggtacttgcggatctcgcgcagcgccacgggtacgggcctgttcctgtggggcttnttcacgccgacggtcgtcggcgccgacttcctagccggcttggtggagagctgcttgcggggg

SEQ ID NO: 145948 - DNA, 451 bp, Zea mays
  Clone ID: MRT4577_64618C.1
gggggaaaaaaaaagggggggcaagggttcccgggggggggaaaaaaagggcaattttttttttaaaaaaaaaactggaaggggcgtttttttgaaaaaggggggctttcttgccaacccgggcaaatttcccaacccacaaaacacccaaaaggggggggaaaaacaaaattggccaaaaaatttttgggaaacccagggcggaaaaaatgtgtaaaaggacggggtgaaaatgggccttaacttggggccccccttggaatttttggggaataagattcggggccttttccttgggggggaaaaaaagggggggtcccttcttcccccccggggggcaaaaaaaggggcctaaaaaggcagcgcggcccaagggttttttcggggggggggccccccgggggggtcccgggggggggggccccggggggggcgccggggttgcccccgg

SEQ ID NO: 145949 - DNA, 330 bp, Zea mays
  Clone ID: MRT4577_64619C.1
catacccttttcaatgacatgtttccaccaaggactctgcatgagcaggaagactacaacaactgaaatcactggaaggagccattaccagatgtctgttcgtagggtagatactacagaaacagtcgtaccataccacttgatcctaaaaaagcctagcaggagaacatatctctccctaatttttaaacaccacaactgatttaggtccaatttgcgaaggtcataagaattgcctgctatatggctattttaaagacaatggaccaatgcaaccatatcactttatttacatcatacggacgctattaacgatatcataacaagctt

SEQ ID NO: 145950 - DNA, 348 bp, Zea mays
  Clone ID: MRT4577_6461C.1
aaaaaaatggggggtccaaaggcccccttacaaggaggaaatttttttggggggttccattacatgggctggtcaaacccggacagtttatcagctttgctgttgtaagccccttacaggggcccccccccgtaatctaaagatcgattttttttttggggggtctccgattatgacagtttggaaaacataatactggggttacccgcgcgcgggttccacacgtcccggacccctcaattttttagacaggggggactcccccgacggttgagacgacccagggggggctttttccccttacccgcgtgggggggatggagcaaatttccccccaaccattgcaag

SEQ ID NO: 145951 - DNA, 198 bp, Zea mays
  Clone ID: MRT4577_64620C.1
atgccggaggaaggcccaagcggcgacgataggtgggagacggatctgaggggcagcaacagcgggggcgagaggcaggtgcagccggaccaggccaaaaaaggtatcccatacccacaacaactggctacacctacgagacctgcttatcctgcagcaatttctgcttactttgtggctaaactcaaagaatggtag

SEQ ID NO: 145952 - DNA, 379 bp, Zea mays
  Clone ID: MRT4577_64621C.1
acccacgcgtccggaagctacagctgcagcacacagatccatacctattattccgctcggagcagatagagcatctctagctagttagtttgtggcaagagcgtgaccttgagaacccaaccgaccgagtgaacgatcatggcggcgtctctgctaggcccgaacaccggaggcagcggcttgggcgggagggtccacgcccggagcggcggccaccgccgttcagctgcggcggtgaagcggctgctgttgaggctgaggcgctcttggagaagacgcgcggcgcggccgaggcgaaccgcggtgaggttcgggtacgacccgcatagctactcccagaacttcgaccacgccactgcttcctacgaccaccactgct

SEQ ID NO: 145953 - DNA, 317 bp, Zea mays
  Clone ID: MRT4577_64623C.1
acataggctatttaaagcgctcggagattcgactaggttacataggtaacgtttttgagagagtcaaattagtatgtgactaaagtttataaatacaacggaaaaccgatttactgagcttgcccgactaggggggagcggctactaaaaaaccagataggttttctggctcaccgtcaggtactggttgagggtttactgtcctcatactaaaattacacagtatgtttagctgggaaccctattattttgtttaaggcttggcagcagacgtgctggatgcggctctctatgctatgtgtgccctgttctttcct

SEQ ID NO: 145954 - DNA, 606 bp, Zea mays
  Clone ID: MRT4577_64624C.1
gatctccgttctccaccgtatctgtcagcaagcgacacgggctagcctcgcgctgaccatagctagctgatctacagccaacagcaggtggtctgactgacatggcaaaagacatctaggcatcggcgcccgaggcgcccgagctctcggccaaggactacacgcgatccctgccgcacggacgtacgctcgatcagacgtggtacgagctcacccagtgcgtcactggaccgcgcgtgcatcgtcgagatcatcgccacggtgctcttcctctacatcaccgtgggcaccgtggtcggggacaagcaccacacggacgcggcggagtatggccccacacgcgagagtgcggaggtgtcataatgctcggcatcaattgtgtcttcgcagcaatgatcttcatcatcgtgtactgcacggccgtaatgtcaggtgatgacgtcacatgccgagcgtgaccttcggactgttcctgagcgggtgagtgaacctcgtatgcatgctggtctacatgagcacgaagtgtcggtgcggcatctgcgtggcgtgcctgagaacagagtaccatagtaccaagtaggtgaggtacttggtgatgacctacga

SEQ ID NO: 145955 - DNA, 734 bp, Zea mays
  Clone ID: MRT4577_64625C.1
gctgtgagtgtaccaacggtagtaaccaaggatgtcataggcgttggagccttgcttagagaagtaaccagccttagcccaggtctggacagtgcgaacgctcacaccggcttcctgggccaattctgtcacagaaacaaataaagaaggggtagaggacataggagcaaagggggggcactaccaggaagcatacccagagaagaaggaaagttaaggaacgacgacgaagaccaagcaacagcaaaatcacacaaacaagagagcaacctaagtcccgatagagaccacaaacgtcacatctgtagtggattactgacaaaccaaggataatgaggctctgggcgcagccttaagcatggcagggacaagagtgggtttgtcggggcatagttcccccactgtgggacagcactaaccccagcaaggtaaggaaaagaagaataacccttccatcgcggacataaaaatccgagggggtcaagctccggctccaacgaaaagtaagcagggacatacgggccatacctagagtgattggtgtaagagcaactacggagccaaccagggggtccgatggactcagacctccaaaggactcgagacttacgcttctgaagaatccaagggctatccgggtaagggctcggtggtgcggacaggttcaacttagagttaggaggagccgtgaggtagtgagcacatgggagaggcgggggcagctggggtgaggc

SEQ ID NO: 145956 - DNA, 384 bp, Zea mays
  Clone ID: MRT4577_64626C.1
atgagcaagaacacaagagacacaagatttatcctgaggttcggtcacaccaccaaggcgccctacttcctcattgaggcgcccacaaagagccgggtctctttcaaccctaatcctccctttgccgaccacaaagggtgttttcggttcactggcggactcagccggagactggaccggtcccaaattcggttgagccggaccaaaattcggttgagccgggccaaaattcggttgaaccggttgctaatccagttgagccgggccaaaattcggttgaaccgttttcccaaaaatctgcacacgactttttctgactggcagactggcaggtcagacagtgacaaaggggaaaagtgcagaaaccggttgaaccggttttaa

SEQ ID NO: 145957 - DNA, 116 bp, Zea mays
  Clone ID: MRT4577_64627C.1
attcggctcgagagcgagtcctccgtcttttcgcacatcggagccacgtccaactgggggggctgtattacctcgactgcgcaatcataaattgcgaggtctaaccaatgtcctca

SEQ ID NO: 145958 - DNA, 618 bp, Zea mays
  unsure (1)..(618): unsure at all n locations
  Clone ID: MRT4577_64628C.1
cggacgcgtgggattctttggtataaggtttactggttaaaagttgttatctaagttaacatccataatatctgtaggtgggattcatacctggttggtccctgactatgtccagctaatttgtactatataagtaaataaggtacttgagctagagccatctaatgtttttgcatcacctctggaggaagtgatgaacagatcgcttttttggcacaagtctcaacttgaaaataatcttttggggcatgtttggttcgataccttccaggcagctcactggccaggcagcccgaaatcagaagcctgggaacgctgcctgagcgaggcagcttctgtcatgagccaaccaaacagccccttaattcgaaaatggaagcaggttggttttagtaaccaatttggaagttgatatttttctttccactgtaagcgacttcagtgtagtttatggaagttgagctcatggacatttctagagaagatatttgtagaggttatgttatatatcctngaaactgaaactggtcagatagttgtcccatcctgctcatgttgatctagcatacgagcttgtctaatttatttggaattaaagttcatatttaaatgtgagtt

SEQ ID NO: 145959 - DNA, 150 bp, Zea mays
  Clone ID: MRT4577_64629C.1
ttttaatttttagggggggtgtaaaggttgataaccctaactctctccggaagaaaatgacccaagttaagtctctcgaaaacaagtcacaaaaattgcaagacaatttcagatggacatctcaactaagaaggctctcatcgtagaagt

SEQ ID NO: 145960 - DNA, 771 bp, Zea mays
  unsure (1)..(771): unsure at all n locations
  Clone ID: MRT4577_6462C.1
attcggctcgagaaatcgccgaacagatggaagccatggacacggaaccgtcctcccctgcgccggcagcagccgtcaatctgcctcctccgccgtaccatcactgcccagctccagctgatgaggttgcagcgacgccgcagccgaagccgaagcaatcaaccgcggggccggggctgaggacaccctcgccgccgccgtcggttcaggtgtccgggtactctctacacgacctgctgctgctgtccccgccacccccgagctcacgccgccaccggtcgagtacgcgtggggcagctgggacgagcgtggacgagagcctggagattgttgcggtggcggggacgcccacgcctccaaggcgcaggcggcgcgggggcgcggagcagtgtgtgacgcccgttctggcgtccccgaggaatgcacgacgggcgagacggaggctggagaaggacgtcgaggcggttgaggacgccggcaggagggcccgcagaggaagtccacaagggctgcgccgaaagctgcagcggctgccgacaaggcagaggcggcgctgaacgaggaggatataaccatggnctgtggtcccggcttgtcctgctgctacctgcggaactgacttcctggagcaatctgacttggaaggtctctgggaaaggatcgttgaattggtgatgtggaggaatatggctaaatcagcacttttggttcgatntgnatcgatgntcttctcatgctcattgtcaagagacgtcaccttcagcccatctc

SEQ ID NO: 145961 - DNA, 303 bp, Zea mays
  Clone ID: MRT4577_64630C.1
agggggaaaccacattttttttttgcattcattggtgtcttgagcatttaaaggagcgcgcaaaggtgcattttttccgacgggggttaattgctggaaaaaaaaaaaaaattctcggtcgtttttttaagatcaaatttttgtcacgggggatcaaaaagtttcttaaaccggtgaacataaacaacacgggtaccaaatcgtgcctgacttagtgacgaccgtttttttcacaaaaccgaactaaagcttggccaaccaccagttttttaaaggggagtttaaactattgacccatcgttg

SEQ ID NO: 145962 - DNA, 335 bp, Zea mays
  Clone ID: MRT4577_64631C.1
attcatactcgttctatttataattttgcgttcaaacgaactgcgaagaaacgtgatcgcgatctattatcagtcaccccctatccctgctcccctcccactcattttttccccctttgctcaggcgccgacccgggcgacacgacggcgacaccaagtgcgcggacgcaataatcctgtccgtccttacgcccaggcccggccgtcgtacaatcatctcgtccccagcgcgcgcgccttgggctgtcgggcaccatcagccgggcgacgcgcaatggggtcagctagccccgctccgatccggtgaccacaggatcccaagccaccgtacccgc

SEQ ID NO: 145963 - DNA, 623 bp, Zea mays
  Clone ID: MRT4577_64632C.1
aattcggcacgaggcaaaactaaaacactgcagcctaccatagcccccgaggccgcgagtcacagtcacctttaccgcacgccgacaaggatgtcgtcgtggtcgtcgccctcatccgccgccgccgcctcgggcgcccgattcggccccttcccgagccgaacgcagcggctcgtgccgtatccgtcgctcgcccgcggaacccccgcctcgacgctcgtcctcaggccccagccccacccggacggccgtggccatggcctcctcgcgcacaccggctcctcttcctcgcggtgccgcgccgtcgccgccgaggtcgagggcctcaacatcgccaaccacgtcagccagctcatcggcaagacaccaatggtatatctcaacaatgtcgtcaagggctctgtcgccaatgttgctgctaagcttgagattatggagccctgttgtagcgtcaaggacaggatagggtacagtatgataaatgatgctgaacagaagggcttgattactcctggaaagagtgttttagtggaagcaacaagtggaaatacaggcattgggctttccttttatgctgcttccaaggatataaggtgatattaacaatgccttcatcaatgagc

SEQ ID NO: 145964 - DNA, 1832 bp, Zea mays
  Clone ID: MRT4577_64633C.1
gggtacctcgaggccggccggggtccagcaccacccaccccctgtgcagtggagcctaccactaccagcctacttcgtagtagtccccgaagccgcgaggcgcgcatacctttaccgcacgccgagaaaggatggcgtcgtggtcgtcgccctcagccgccgccgccgcctcgggcgcccgattcggccccttcccgagcggagggcagcggctcgcgccgtgtccgtcgctcgtccgcggaactcccgccccgacgctcgtcctcaggccccacccggacggccgtggccatggcctcctcgcgcacaccggctcctctccctcctcgcggtgccgcgccgtcgccgccgaggtcgggggcctcaacatcgccaacgacgtcacccagctcatcggcaacacaccaatggtgtatctcaacaacgtcgtcaagggctctgtcgccaatgtcgctgctaagctcgagattatggagccctgctgtagcgtcaaggacaggatagggtacagtatgataaatgatgctgaacagaagggcttgattactcctggaaagagtgttttggtggaagcaacaagtggaaacacaggcattggtcttgctttcattgctgcttccaaaggatataagctgatactaacaatgccttcatcaatgagcatggagagaagagtcctcctcagagcttttggtgctgaacttgtccttactgatgctgcaaaagggatgaaaggggccttagataaggctacagagattttaaacaagacaccaaattcttacatgcttcaacagttcgataaccctgccaaccctaaggtacattatgagactactggtccagagatctgggaggattcaaaggggaaggtggatatattcattggtggaattggaacaggggggacaatatctggtgccggccgttttctcaaggagaaaaatcctggaattaaggttattggtattgagccttctgaaagtaacatactctccggtggaaaacctggtccacataagatccagggaatcggcgcaggatttgttccaaggaacttggatagcgatattcttgatgaagtaattgagatatcaagtgatgaagctgttgagacagcaaaacagttggctgttcaggaaggattactggttggaatctcctctggagcagccgccgccgctgccataaaggttgccaaaagaccagagaatgctggaaagctgatagtggttgtgtttccgagcttcggcgagaggtacctttcatctgtcctctatcagtccataagagaagaatgcgagaacatgcagcctgagccatgagggagccgtcactttaagcgggcatagtaaatgtttctgaaataagacgcgtagctagcatcagtttgctccacttggtatcatttggccatgctcactctatcctttcgctagcctctatgaccggacctaaactggtgtgtgagaaacatccacgactctcctcccaactgctttcctaaagcgaaaggataacacttcttaataattgtctatacgattgaagctgatttgattggtaattgtaaacaacttgtctttggatctttgaagtcaaacaaagtcagttggttgaatcagctggatattgtatgcctttttttttgtgtgtgtgtaccggtatcacagaattatgcatgtcagataagtgtcaatcgatggaataaggatttatgatgtaaaaaaaaaaaaaaaagcggccgggaattgttccgacctaccaatccgacacaaccgaacagggccttaccttagtggtgctccaattggtatcatttgggcccatgc

SEQ ID NO: 145965 - DNA, 586 bp, Zea mays
  Clone ID: MRT4577_64634C.1
atatgcttgtcgtactatggttcagaaaaaaagttagtttggtgttttattagttattacacatctatcttgtttcatctacaatgaacttgtcgtatttacaggtgtccaaaccaggttcagtaaaggtagagaaattgatgaatatcgaacgatattctcatgtcatgcacatcagctcaacagtgagtcttcttttaaaataataacaaaaatcatcactatcacaattttcatggatgtattagttaaacaattatcgtctttatcatataatacaagcgtatcattaagtgcttattatgattgtttctgtgagttaactctttttatgatttatattatcaagaattatttataagaaacatgcctattttaaaacttatgtaggtaactggagagctacgcgatgatcttacgtgttgggatgcgctacgagccgcattgccagtgggaaccgttagtggcgctccaaaggtaacttgttgaacatgtagtaatagtcatgtataactaaggaacgaacaaacatgattgtatccctcaatgttgttgtgacataggatcactataaacacattagttg

SEQ ID NO: 145966 - DNA, 762 bp, Zea mays
  Clone ID: MRT4577_64635C.1
gccggccggggaagagccaacagagcaacgcaggcacacacgacacgaaccaggcaaccagctgcggacggaggaaccctagcggaacactgtgccggtgacggcggcgcgctaccggtgacgggggatacggcggcatcggcccctcctccatccccggcgcggcggcgccagcagccggcctgcaggtacggtctccagtctccagatcgcccctctggcgatcaggaacgatcagccgatctgaaaacattgctgtggattcagatcctggggtggatggaatggttacttgttgattcgttacttgctgtgtcgttattttgtgtggcacttgggttggtgtgatctttacccatgctcgattgtgagccttacctgcaacccgaggtgacttgcgtttttgtcttgttttcgtatctcaagctatagtttgaacggtcggggttgtttggatctagaggtgctgatgacaatgtagtgcgcgtgtcagttgattttttgtgcccttccttgaataagtagtaatttatcaactatcatgtccgtcggaggtgccgtttggtatttcctatgagtttactcattttgttctttgttggacatagccagcacttgttttttattacatgttccatcgacgttattcagacacatcatattgtgtatttggcattcactttgctgcttaattgttttattgcactgtgtctgctcattttgataaatgtcttcataaagatctattttttgtaggcccac

SEQ ID NO: 145967 - DNA, 428 bp, Zea mays
  unsure (1)..(428): unsure at all n locations
  Clone ID: MRT4577_64636C.1
tccgggcccacttgtcatcggactgagtggcgtcttcctcctcccttcgtaactttgcagacccgaccgcagcagcccggggcaacaagcgaaccgacggcggcgatggggatcggtgagcacttcgagggcgtcgcgctcaagtactccaaggcgccgcacggcgtcctgctggcgaccggcttcggcgcgatcaccggcgccgtgctgggatccgaggtggcggaccactggtaccagctctacgagatggacaagcagggggccaacctcaggttcatctactggtgggaggacaaggtctcaggccagaagagctgaaccacatcgagtgatgcctattctactgagcacaccagcgtgacaacaaaacattgacgtctctcatgccgagttcttagttgttctttcctagctntctctaataa

SEQ ID NO: 145968 - DNA, 341 bp, Zea mays
  Clone ID: MRT4577_64637C.1
gagctcactagtcggtggccgcccttttttttttttttttgggctgaatccgaaaatacctgtattaactaccatcaccagcccaaaccttgcccgcgtactctagaacaacaaggatggaggaccggggtgcaagaaggcgtcccaaggaacggggatctcgcttgtaggatgtggcgggaaacattgctacggagacggaatatcactcgggcaccctagtgcacagccacgtatgggctatccgtttgaggacactgggctgagccatccgaccacgcgagctgaaaaaatcaggcagcgcctggacgttgagacgggaacgcgacctgaacagggca

SEQ ID NO: 145969 - DNA, 779 bp, Zea mays
  unsure (1)..(779): unsure at all n locations
  Clone ID: MRT4577_64638C.1
aggcatggagcaaagcaaagagactcaaaaaaaaaagaaaaggcatggagcaaagaaactgatgcgagccgggcaaagcgaatccacgcccatcgcggcggcgaggtcgcgcagtagccggcgctcggcagcatctctgagtctccagcccaaatccacccctcctaaatcagccccgtaccggtcggccgccaccgcgcctcggacccgatggacatgggcgcagttcctccacgccgccgccggcccaggaaggcctccgatccccgcaccgccgccgccgccgcctacccacacccgaaacggatgcgtctgggcgaggaacacagcagttgctgtgaggacaagatcagcagcttacctgacgagatgttaatcttgatcatcgacaagctagatgcacggacagcgataagcaccactatcctttcgaggcgatggcgggatcttcctacatacccgcgcacatgttatggaccttggcggttgatgaccttctccctccacggtaccacagactgaagcaaattatgatggaggctaaggcagggtataaggcagagaagaatgcactgaagtcggacgacagttatgcttctagagaccagttatattccttcaaagactgggaagtggnaagtccgtctgctaacacccatccttcaacgttatgagcgtttgggcatgcgacgctatggtaaacgggggaatggattccttctgccccccaacatgttcagcaacggcctatccagaagctgaggcttcaagcctggggg

SEQ ID NO: 145970 - DNA, 1152 bp, Zea mays
  Clone ID: MRT4577_64639C.1
gtagcagaggtggaatgaacactctaaactccatcagtagtttgagaaaacatatctcgaaaacggataggatttgctgtttacaccagattgaccatggatgaacataacccatgacggagatgaaaaatgcattgtccagttggcttcctcaaccaattccacacttattagagaaaactaggaaagaaaaactaagaactcggcatgagagacgtcaatgttttgttgtcacgctggtgtgctcagtagaataggcatcactcgatgtggttcagctcttctggcctgagaccttgtcctcccaccagtagatgaacctgaggttggccccctgcttgtccatctcgtagagctggtaccagtggtccgccacctcggatcccagcacggcgccggtgatcgcgccgaagccggtcgccagcaggacgccgtgcggcgccttggagtacttgagcgcgacgccgccgaggtgggcggcgccgacgagggccccggcgagcgcgaacttcctcgactcccgcagggccttgagctggggcccgtagaccgggtcggatgcgatgaactcgtcgacgtcggcgtcggaccacttggggaggggctcggcgcggccgtagaccttcttgaagtagtcgaggaaggcgaagttgctcgcccagtgctgcttgacgccctcgaagtgctcaccgatccccatcgccgccgtcggttcgcttgttgccccgggctgctgcggtcgggtctggaaagttacgaagggaggaggaagacgccactcagtccgatgacaagtgggcccggatggaatgctcctcctacatgggctgagcccaacttgagaataatgcccgggagaaaggcgaagttgctcgcccagtgctgcttgacgccctcgaagtgctcaccgatcccaaaaaataccgccggttcgcttgttgccccgggctgctgcggtcgggtctggaaggttacgaagggaggaggaagacgccactcggtccgatgacgccgccggttcgcttgttgccccgggctgctgcggtcgggtctggaaggttacgaagggaagaggaagacgccactcggtccgatgacaagtgggcccggatggaatgctcctcctacatgggctgagcccaacttgagaat

SEQ ID NO: 145971 - DNA, 252 bp, Zea mays
  Clone ID: MRT4577_6463C.1
ttccactcgtcctgacgggcttctggtttcttttttatccaccgcaagccttgactacgcgcggtctcccttggaccagcggcggggcctttaggaggctcctatatgaggattgccaacatgtccgtccatctgctgggggctgcttcgggtgcgcctcatcattggctcccctcgctcggcgacattttctattagttcagcatcatcaccttctcctttaaggtcattgtaggcagctttctgtgacct

SEQ ID NO: 145972 - DNA, 1111 bp, Zea mays
  Clone ID: MRT4577_64640C.1
atccttcgtcaacctctattgtcatcgctcccgatccacatccacttcctacagcgtccgcttccgtttcttttccttttttgaatgaacactctaaactccatcagtagtttgagaaaacatatctcgaaaacggataggatttgctgtttacaccagattgaccatggaaccggaattactacggataaacataacccatgacggagatgaaaaatgcattgtccagttggcttcctcaaccaattccacacttattagagaaaactaggaaagaaaaactaagaactcggcatgagagacgtcaatgttttgttgtcacgctggtgtgctcagtagaataggcatcactcgatgtggttcagctcttctggcctgagaccttgtcctcccaccagtagatgaacctgaggttggccccctgcttgtccatctcgtagagctggtaccagtggtccgccacctcagatcccagcacggcgcccggtgatcgcgccgaagcccgtcgccagcaggacgccgtgcggcgccttggagtacttgagcgcgacgccgccgaggtgggcggcgccgacgagggccccggcgagcgcgaacttcctcgactcccgcagggccttgagctggggcccgtagaccgggtcggaggcgatgaactcgtcgacgtcggcgtcggaccacttggggaggggctcggcgcggccgtagaccttcttgaagtagtcgaggaaggcgaagttgctcgcccagtgctgcttgacgccctcgaagtgctcaccgatccccatcgctgccgccggttcgcttgttgccccgggctgctgcggtcgggtctggaaggttacgaagggaggaggaagacgccactcggtccgatgacgccgccgattcgcttgttgccccgggctgctgcggtcgcggctgcggcaggccgatttcccagggccgtattgctgtatgtttccccctatcctcccagattttagtataatagccaatggtgcctgtaccattgcatcgattccgtgggattctgacattagtccttcagtttacccctgggacatctttcctgtatttaaagagtgcgctttggttggctcctccgccc

SEQ ID NO: 145973 - DNA, 1142 bp, Zea mays
  Clone ID: MRT4577_64641C.1
cttccttttttttttgaaacgcgtaactggatgctggtgaggtataaaaaatgcactcttaaatacaggaaagatgtcccagggaaaactgaaggactaatgtcaaaatcccacggaattgatgcaatggtacaggcaccattggcgattatactaaaatctgggaggactagaggaaacatacagcaatacggccgtggaaaatgcccttgctctaatagtagttttggttgccccgtccacggccgccacccattcgtccacggcctcgaacatagcccctgcctggagggtccggccggggttggaggtacgctaaccttccagacccgaccgcagcagcccggggcaacaagcgaaccgacggcggcgatggggatcggtgagcacttcgagggcgtcaagcagcactgggcgagcaacttcgccttcctcgactacttcaagaaggtctacggccgcgccgagcccctccccaagtggtccgacgccgacgtcgacgagttcatcgcatccgacccggtctacgggccccagctcaaggccctgcgggagtcgaggaagttcgcgctcgccggggccctcgtcggcgccgcccacctcggcggcgtcgcgctcaagtactccaaggcgccgcacggcgtcctgctggcgaccggcttcggcgcgatcaccggcgccgtgctgggatccgaggtggcggaccactggtaccagctctacgagatggacaagcagggggccaacctcaggttcatctactggtgggaggacaaggtctcaggccagaagagctgaaccacatcgagtgatgcctattctactgagcacaccagcgtgacacaaaacattgacgtctctcatgccgagttcttagttttttctttcctagttttctctaataagtgtggaattggttgaggaagccaactggacaatgcatttttcatctccgtcatgggtttatgttcaatccatggtcaatctggtgtaaacagcaaatcctatccgttttcgagatatgttttctcaaactactgatggaaaaaaaaaagttcattccacctctgctacaaaactgtagctattgctgtatcatttggacgaggaagaagtagcaaaaaattaaagagaaaggccct

SEQ ID NO: 145974 - DNA, 336 bp, Zea mays
  Clone ID: MRT4577_64642C.1
cccttggcaggcactctggcactacttacctgctgccctctaggatctccccccacgcagcaaggtatcgagcaagaggagggagcaagtatggatctgaagtaggaagagaggatcaatggagatgttgctaccccatgctcttgcagatttgtgttggggaaaccctaggggggtatactgcagatcatgcgtagtacattggttcttcttcgatgagggcaggcgaatgtaacgatggttgctgccgttctaacctggggtttgtatgtgcctgcactgtaatattcagaaggatgggatgggttggataatgggactctatggggatgcttg

SEQ ID NO: 145975 - DNA, 251 bp, Zea mays
  Clone ID: MRT4577_64643C.1
cccagattgccaatgcaactatcagttgcgtttggtgacagcactcagagcacatatgcgcggttatttcctttatgggaagggacagttcgtcctgggtttccaatgacagaacccaagttgcttcttctcacgcgacaaatgtgcaatgctcactatccactcaaggagatggggggggggggcatctcccgaagtggcggcccacggctcgctatgggtgcgatgtgcatcgtcctcctgtccgtgcc

SEQ ID NO: 145976 - DNA, 622 bp, Zea mays
  unsure (1)..(622): unsure at all n locations
  Clone ID: MRT4577_64644C.1
agcaagaagcgcccaggaaagaacacacacaggcacaggcacaggcagagaggagaggcaatggcgaccactaagatggcggtggtggcgatcctggcggcgctgctgctgatggcagctgtggagccggcttcggccacgccgcccagcatgctggcggcaagaaagttgcagatgcctcgcctcatggatgtcgtcttggcagagtcaaagctggcttgcctcccagcaggcggtttttgcatgtttcgtcctatggattgctgcggtaactgcggttgtttatatcctgccggggtttgctacggcacgcggtgtgaggaatgaactgcacgtatgtgtccattttattactagcttatcacgcatctgtgtcacaataaatcgtgttctgcgttcggtccctagcttgttgctcatgatcaacaagctctgttcaagtatcgagtctgttagtttgttagcgtgtactgtcaggtacgtgttgtgcatgagctcacgagttgtgtgacgccgtgcaattagtggtggcgagaataggtagctcgcagtaccgagtctagcttccggccttggactcgctcttcacgtcctgcgtcgngnggatggacgcgacaatggc

SEQ ID NO: 145977 - DNA, 234 bp, Zea mays
  Clone ID: MRT4577_64645C.1
tcgagattcgaatgtctagattggtttcttgtgatgaactcctgcgttctccggagactccatctatgtcgtcaagtgttggatgtgtccttgagggcgtgttggaatactgagtatagtgggaagaagggcagcagctgccgcttgatagggtgaagatgtggtgttgtgtacttgttgtatgtcagtgatgtggtttctgtgtggtaatagatgtcgctttgacttgtcatg

SEQ ID NO: 145978 - DNA, 198 bp, Zea mays
  Clone ID: MRT4577_64646C.1
ccggccggggcgaaagagcctctagcctagtggttaaggacttccgagtagcacctccaagtcctgggttcgattcccctcgggagcgaattcttaggtttggttaaaaaatcccctcgctgtgccccatccgctctcgggttacgattgaaaaaaaaaaaaaaaaaaaagaaaaaaaaaaaaaaaaaaggggcggcc

SEQ ID NO: 145979 - DNA, 382 bp, Zea mays
  Clone ID: MRT4577_64647C.1
ataaaattgcaggattcttggcgctcgaaaagaccggcattatcaaattataccaaaccctaggaacatcagactatcacatccagattttgccgagactacaacacttgaagccaccttagagctctgtctactgataatctagagagaattgagtccttagaactctcccgacgtagcatccatacactgcgaaaggcccggcagctgaccatgtgcctggtgcataagccacgtgagtgtcatagacgcagacccctgggtgcgacctgccatttggcgtagtggcacagatgtaaaacatgcccagcgtggctatggaaatcgactaaactcaacctgaagtgaccgttgtgatgatgactctctttggaccagactt

SEQ ID NO: 145980 - DNA, 344 bp, Zea mays
  Clone ID: MRT4577_64648C.1
gtggccccacccttccggcaggggaaccatccaaatggctgagaaaatggtccaccgggggccactaaggccgtgttgggttggcaattcaagtggtcccggcttgagctgttcctgcatgaggccgtccgttgtttttttgggagtgacccggggctgcttaatggcccttttaccgagcactccttggagtttctgatgtcggccgacccaaatctttgttgtaacccaaccaattttattaggtccggttttaggaccggttgattccggggaccgttgtccggcaaaccaaccacgtggtaaataaaatcgttggatccaagagtttgctgaacctaact

SEQ ID NO: 145981 - DNA, 165 bp, Zea mays
  Clone ID: MRT4577_64649C.1
tttttcgtttgttcgctacccctccccgaccggggcgctacgagacgccgcgcgatccgacccattccaacgccgacgactcctttctgccttcttcggccatgtcgtacggcgaccgcgtcatcatcttctaggactcctagtaggatagcgagtacttttatt

SEQ ID NO: 145982 - DNA, 560 bp, Zea mays
  Clone ID: MRT4577_6464C.1
gggggggggggttttttttttttttttttttttttttttttttttttttttttttttttttttttttttttttttggggggcccggtaatcacacctttttttggcccccaaacaaattatacaccaacccccgggctggccttttttacggggggggggaacaaaggggaagggaataaaaaaaaggccccgatttataattggggagggagggggcccttttcaaagcaaggattttggacatacatatatagggggggggggtctccggttttgaaaacccccctggcttgggcccggggcttttggttttgggcggcccattcgggggtccacaatagggtcctggtcttcgggcgcgggggggggcccggggatttcgggccgggccccgcggggggtccaacttttcctttggggggggggtttaaagcttgggggcctcctgggcataagtggttcccgggggaaattgtttcccggtcaaatgtccccccaataaatcggcccgggggccttaagggtaaaacccggggggccctacgggggggcctccccc

SEQ ID NO: 145983 - DNA, 880 bp, Zea mays
  Clone ID: MRT4577_64650C.1
gtgcgagctttcttcaaccctctccgggatgagcgcatcctccgagtagccatcaaggagccagtggcttccccggctggggtggtcactgccagccaggtgggtgcagtgaaggtggctcctcgcaggtgctggatgggtggcgctggggaggcggcgggcaggcgcggggaggaaacgtctcgaatggtcgaacagtagtttgctcgctattatccatggcgacttctacggctgctgccactgcactgctccgccccaggccggcagttccagccaagttggcgcagaggaggtgcctccatgcggttgctgggtggacgacgatgaggaggaggggagctgcaggggtcgtgcgagctttcttcaaccctctcggggatgagcgcatcctccgagaagccatcaaggagccagtagcattcatgggtggtgtgtttgctggcctcttgaggcttgacctgaatgaggatcctctcaaggaatggataagtcggacagtggaggcttctggaatagctgaggaaaacagctctgaagaatcaagtgaggcagatcaaaatgatgcacctcagcaaattgagattgagtgaggtgcattgtctacttttgtccacttgtcacttttcccttgtaacttatcctgaatatatgtgacacctgattcatcacgtgcttgtcaaaaaaaaaaagttggccttataacgtttttaattcaaatattgtatcaacctcaaaatatcaaaccttgggccctggttttattctacaactcctgtttcataatatggagccccagtcctctagacatgattttaaacttggccataagtataactagagtgtattaccagtaaatggaaagttacacttttgaatg

SEQ ID NO: 145984 - DNA, 298 bp, Zea mays
  unsure (1)..(298): unsure at all n locations
  Clone ID: MRT4577_64651C.1
tcactctgcatcaactgaacgcaaatcagccacttnaatgaagctaagnncntactagacnaatgggacttaaacncacanacacttagttaacagctaagcnccctaatcaactggcttcaatctanttctcccgccgccgggnnnaaaggcgggagnngccccggcaggtttgngctgcttcttcgaatttgcnattcaatatganaatcacctcggagctggtaaaaagnggcctaaccctgtctctagattacngtncaancttcatcngccatttgncctcanccnaaaaana

SEQ ID NO: 145985 - DNA, 947 bp, Zea mays
  Clone ID: MRT4577_64652C.1
tattgtttaacatagcccaggcgatttactgcaaggcagcaggggtgagtggtttacagaacatctttgcatcatttgtcatgcagtaatagttcaagggttcctgagcagttgtggctgttgcagatcatcctgattacacattactgattctttcaatgaaccattatgacatcatttttcgctacacattgttaggcaactcttgaggtaggaaggtgcatgacctctcccgcaacgagccatttgtcttgtgtggacaatggtaaaggttttaggggcttactcaaaccactcccttggtttgcattggcactgatacaagaaacatgacactgacattcttgtcatgttcattgcacatactgtctgataaggacaaatatgtaaccgatgtgtccctgcatgtagctactaccataacctggttaatggttatattgctagcttgattatgggttaatgagctggaggactttgcacctgccatgaccttactgtgctcattgctgaccaattccttgtgttacatttcaaaattattactaaaactcacaccggtgagtattttgccacaatattttgtacctcaacattcttactggaagtttgttctgttcatttgtatctaataaatttaaaatgtacaaacctttgttgttattgttattaaggatcttatttgcttggtttatttcgcatttatatagcttatccttcctgtcaaatcaataattcttccttgcagatttgtaactgtgacattgactgggcactcttccttgccatctgcagatggccaagttcgacttgaaaaggtgtctactttgtttttttccactggagatagtatacctcctgttcttatactgttgcttatcattttagttcttttttacagtctagtcatttctgaagatgatatattcgtaattgtaactaggtgc

SEQ ID NO: 145986 - DNA, 379 bp, Zea mays
  Clone ID: MRT4577_64653C.1
gagaagtgcgcagtcaacctacaacgccaaatcttctacaaaatggccaaattattcatcggtggcctagcatggcacaccacagacgagactctgcgttcgggattcgaaaagtttggtaccatcgaagaagccatcgttatcaaagatagggataccaaccgcagccgtggattcggatttgtgcgcttctcaactgacgctgaagccgacgctgcaattgaaggcatgaacaaccaggacttcgatggtcgtgtcattcgagtcgaccgagcatccaacaatgccagttctcgtggaaacgacggcggcttacatggccgtggaggatataaccgtttcgaaggtggcaacaatcgtggaggctacagtggtggcg

SEQ ID NO: 145987 - DNA, 424 bp, Zea mays
  Clone ID: MRT4577_64654C.1
gcccgacgggctctacagtagcccaagcggtaaacacgctcttggcaagctctatgatgcttgcacatcaatgcgagcgccgcggcacttctggggctgacgagcgcttctagacgttgccggcgcgtgctatgctaccgaagaacgtaggacttggaggacacgtcgttgagtgcagcacgcgataccatcgcacgaggatatccagaggcaagtctttgtgttgccatgcagatgtcactgattcacgttcgaccgatcactcctggctagcctctcttcctatatagctacacaaccgaccatcttataggcgtttagacgctggctgatgccgtgggagcaccatcgatcctactgcctggcatggtagcaagtgaaacagagcacctagatgcccatcgcaggtgaagatctgcattaa

SEQ ID NO: 145988 - DNA, 236 bp, Zea mays
  Clone ID: MRT4577_64655C.1
tgcaaaatgctttgctcagggctggatttttatggtatgtgctacccctgctgcttcagtatgattcgacagcagaagagaatgagatatgtgaggcacatggtgttggggcaagggtgcagattgctaagaatctgcatgctgttcatgcaactcaggctttgtctaagctttctggtctcagcaacgatgatatactgtacccagataacaaacctgcatacaatacgttaaag

SEQ ID NO: 145989 - DNA, 306 bp, Zea mays
  Clone ID: MRT4577_64656C.1
aaccaaagaagacccatgccaataccatacccaaactgccgtgcgtgagaatagatagacagaaagaacaggaaccaaccaacacaagacacaacaagctgcagccgcggcaggcatggggcaccgcgccactggggcttgcccgggacattaccacccgaccacacttttttagcccactgactccaaccgaccggacaagtccacgcgacagtactggtagctcgtccgggctcgtcgacacaccaccagaggagacccagaaccgagcgtctgaacagcaaatccggggggctgcctgtcgcg

SEQ ID NO: 145990 - DNA, 416 bp, Zea mays
  Clone ID: MRT4577_64657C.1
cgtaagcagcgagcgatcttactctcccacgcatcgcgccaaggaagagagagagatcgccgatccccttctcggcgtcagtggtgcggctgccctcccttctcgagcgagatctgtctgttcacagatctatctgacaaaatggtgaagatctgctgcatcgccgctgtctatgccggaacaccaacacatggccgtgattgccctcaagtgcccagacattgaggtcggccacgctgacaacaacaagccccgtattgagcgctgcaacagagacaccttgccaatctacgagcctgtcctccagcatgatgaccggcaaaccaaggccaggaacctttggttaagcactgacgttgagaagcacgtcgggtacgctcacaatatctttgtctcggtgaacaacccaacaagac

SEQ ID NO: 145991 - DNA, 302 bp, Zea mays
  Clone ID: MRT4577_64658C.1
cccaagtgtttgggttgagaagaagaattgtacttccgtgcagcgtacaccccgtctgcgatgaaatgttgacactagtatcatgaacatatccccagtctgggctaactatgggacggctaattggtcacatgctatggaagacgactgggatttatctacaagtgatgctgatggactaagcttagatgcatgtatcaacctagtgccaggatatacgatgctcaccaagtggtcgttaattaacaacactaacttactgtcattccaggttgcaattctgatctgttgcggatcgtgct

SEQ ID NO: 145992 - DNA, 191 bp, Zea mays
  Clone ID: MRT4577_64659C.1
ctacgaatgatgacatgtgagtttgagcagcataaatatgtacaagtatctcttctcaacggatagaattatggttgtggatagactatagaccgagtttgtggatagaatatgagcagcatgatatgcacagatatctctcctcaatggagaaaatcacgtacgaaatataagaaccagtttgtggatgc

SEQ ID NO: 145993 - DNA, 1663 bp, Zea mays
  Clone ID: MRT4577_6465C.1
cctcgaggccggccgggtactagcacaagaagaaaccgtaccacttcatcaggccaaatcgccagcaatccaccatggctaaaccagaggggccaaccattggcgtgaagctgttcgtggacaaagagaagaagaaggtgctctttgctgagtccgacaaggagttcgtcgatgtgctcttcagcttcctcaccatgccgctcggcaccatcgtccgcctgctggacaagcagtctcagatggggtgtctcgaccagctgtacaagagcgtggaggacctcaacttggagtacttccaaaccagtgcttgcaaggcgatgcttctgaaaccgctcaacgcggcttccggccactgctgccgcctcaagatcaacgttgatggaagctttccaagggtggtctatgtctgcaaggacacgtcgtgcagcgcactcagcgacaacgcgtttagttcgttccctggcacggtctgcaaatgtggtaaggtcatggagttcgttgggcggtgcccaaaatacgatggtgacactgaaaccgccgccgccgcttgttcagaggatggagtttttgtgataggttgcttgaagtttatcgtcaccgatgatctccaggttgcgccagcatctacctctcttatgatgtctttcttcgagaaatttggtgtgcttgatccagctgtcctagagcagcaggttctgcagttcagttctgaaaagataaaatgcttgttgaagagattgttgacgtccaagcaacctctcactgatcattatttcgaagctcttgttccacaagatgatgcaagcctagaagcgcttgttcagaacttacatcctaaacaagaaaacgaggaccaggaaatgccaggaaaccagaagatcagggttcttcagacgaaggacaactctgccctgctgtatgatgaagttggtgtcgattttgtggactctctcttcggcttattaagcattccactgggatcggcaattaagttatattgccagtgctcggcaaaaggctgcctcggtaatgcttacaggagcatagatggtagtgtcaaagaattcgtcagagaggagtgccagagtctccttctggacccaaaggtaccacccttctttggttgctgcgcttctaagatccttcaggttgacgaattagctccgagagaactgacgatggaagcctgctttgtttgcttcaagagtctatggttttcaggttgtaaccgttctcacgagttcgcttattctttgcgatgcaatgaagttttttgcgcgaataaggtgaagtccattaaactttgtgaggcgaacccaaaacgacaaaacggcggaagcgggcagacgaattttgtggtgaaagaaatcaaactaaaggttatggagctacagagggctgtccttgtgctgagtcgcaatatactcagctctgtgcttctgcatcctaagaagaccaagaagctgcaccattaccgtcgcatgtaatagtcgtcgttgttgctttactctataattagccccaataataacaatctatgtctgtgttttcctgctgaatttgtaagttatcattttggccactggtacttggtaactactataacagttcgagcatataataaactagtgcatcaggcgcgcccatgcgcgcgtcccaagcg

SEQ ID NO: 145994 - DNA, 261 bp, Zea mays
  Clone ID: MRT4577_64660C.1
ccttcattcactatacaacagatagacaatgtcttcgctcttttcctccaccacgctctctactccgccgtctcagctcaagaattatcccacgcgtcgtctccggcaccgtcgcctgaagcaggagccgcagactccgtgccttgctccgccatcatgatcggtgcctcgctcgttttgtctctcatggcggtcttcaagttctaggatttcttattttgcatttcatgaatgaattaatattccaaaataacatatata

SEQ ID NO: 145995 - DNA, 379 bp, Zea mays
  unsure (1)..(379): unsure at all n locations
  Clone ID: MRT4577_64661C.1
anaaacccttaagtaaaacaacccnnnnncnnaaaaaaacagagggggggatacgaaagcaatgtatgcggttttttaaaccccaccagagaaaaacgacccacagacatatgcaaaaccccaggaccagcttaccctcgaacaatatgtgaaaaacaaaacaaaggtaaaagggggcaggccaaaaacaaccacacccaggcagccccactgtaaagaaaagggactatcaccaaacggggaagcggccctgacaaaaagcgacaggtgatataaaccaggaccacgccctacaaataaagaccggcccaagacactcccacatgtctcggccggcacggggcaaaagaagtaactggagcgcacacgaaaaaaacaa

SEQ ID NO: 145996 - DNA, 349 bp, Zea mays
  unsure (1)..(349): unsure at all n locations
  Clone ID: MRT4577_64662C.1
ctcggcttggtcctgctcaatgaagggggaggggctcgctgagagcgtgtcgggccttcgttgagggctctatggagaaggnnttgaagcgccagtgagaaaatcccgagctcgcttcacgtactgtagatcctcacattatccatgcctgcaagggcatgggaagatgggattcggcaatgcatgattctntgatcatgaatagttctcggaaaactctgatcgccgaaggatcatccatacatcttctgcattcatcaaggggtaccttctatcgctgggagaatagaagatgcctgcaaagtatgtcaagtgacatgagcatccaagggacaagaacattcttgtg

SEQ ID NO: 145997 - DNA, 425 bp, Zea mays
  Clone ID: MRT4577_64663C.1
accatctcttctgtctgccccgccctgctctcttgtccccgctggcgggggcaaaggtggaacatatatacgctccgtgcctccactgtccccggcggaccggggagggacagtccatcgtgccctcccccggggtgaggatcatggccggtcggctgggaccagccttccccagctacggtgtggacgtggccgcaccgaccatggctctgaaggggtggttgtcctcatcctaccctagcgatcaaagcctgtcgaactgggtgctcctttctaacggcacggccctggtcgagaaggagaccctccaaacgtttaccacactggctggccaagaggatacggctagcgggcgctccgtggagctgctcacccttatgcggcgcctcgcctcaggctgcggcagctgtatgctgggcgagact

SEQ ID NO: 145998 - DNA, 320 bp, Zea mays
  Clone ID: MRT4577_64664C.1
atttaatagatcaacaatatatagaaaccttacaccataattccctctagggaaatgaaacatacaaaacactacacactaaatgtgaactatccataatgttcccaactaataatatgcatagacactaggtcaaccaaatattgaaacccaaccaaggttacatagaaaccaatagtttcactcatatcatccaagcatataaccacaacatctgaaaaactaactttttacattaacctaacaactatatcgaatatcaaactacaccactgtcacaagtccaaggaagaaagcggacgggcgtgggtacgacccgg

SEQ ID NO: 145999 - DNA, 269 bp, Zea mays
  unsure (1)..(269): unsure at all n locations
  Clone ID: MRT4577_64665C.1
gcggggggggggggggggtttttaaaaaggcattctggggggctcgccctaatttcttgaattaaagataggctagctgaagcacgactcaagcaaagcggctgctaagacaatccancccactttttaatatcctaagtcttntttntnttgggggggcggctggggggttctanctaatcaaantttatataaattanaaaaacaataccattaaaaatcnttccaacccaccaatccnacacaaactaacaaancctaattcatct

SEQ ID NO: 146000 - DNA, 605 bp, Zea mays
  unsure (1)..(605): unsure at all n locations
  Clone ID: MRT4577_64666C.1
ccccgcgtccgtttttttttttttttttttttttttttttttttttttttggagaacagtgtcgcgtctatccaaaaaaaaaggaaaaatggcacagttctctttgaaaaacaaaggaagaaatggcacagtcgtctcttgcgcccaatggcgtccagtctgctaatcaccatctaattaacgaacagaagcacaggtacgggcatcatatgcatgagccacgggcccacccccatgttcttctcgcttcctcccttaattgcagccagccagccagagcttgcttgcacgcgctcagctgcctcgcctcagtcctcctctccggccgcttgctgttgctgctcccacccatctcctcaaccacctgagctcctcgccctctctgccctctctggtcttcaattcgttcgagctgaactcgagggcaacaattcgctccgatccattccatccaccccgtcgatccatccagcggtcctcctccccgtcccagtcccagaaatgggcaagaacggcctggtctccatcttctcccggctcgtggactccgccgcccccaccttcacgtccgccgccgccgccgncacgccgtggcagtggtcggc

SEQ ID NO: 146001 - DNA, 208 bp, Zea mays
  Clone ID: MRT4577_64667C.1
gaggcacttaaattgtgtgtgcacactgggccggtgatgcctattcattcttactcttaaaccctaatacagtctgtcacatgggtgattccatatttatgcactatgccgttgaaactctaactatgcttgaacaacattcaatttgaaccttgctaatctgactaataaggcttactgtacaaaattctttaatactcatgtttat

SEQ ID NO: 146002 - DNA, 1709 bp, Zea mays
  Clone ID: MRT4577_64668C.1
cctcgaggccggccgggcgcggaggcggtacccgcctcgccgacgggacatggccgtccgcgtcggcgaggaggctcgtcgacgcgttctggcaggatatggacagcgacctgcttgaaggggatgcggcggcggcggcggcggcgcgccggagcttggttcagtggagcggcgcctccacggagttgtcccagagatcgagaagcaagagcaagatcttggaggctgatggcaagggaagtcggcgcggccatgcccggtggctttcggcagatatgacgagcaacggcagcggaatggaggttggtaaattctcccaagacgatgtttcaagatgtcctgagaaaacagtgaacctacaggatctgcagaacagcttgattgcatctaaggagcttgtaaaagtacttgcccacatatggggacctggagaactgaatccgtctagtgtatcactcatttctgctctacgttcagagcttgatgttgcccgttctcatgttagaaagctaatcaaagaaaagaagtctaatccctatgaaattgaggacttaaagaagcaacttgcagaagaaatggaatcgtggaaggtcaaacaaaaggagaaggttgcaaacgctctccaatttatagtttcagagctagacactgagaagaagtcaaggaaaagagcagagaagacaaataagaagttgagtgttgccttagccaacactgaagcctcactgcaggcagtgacgaaagaacttgaaagagagaggaaatctaaaggaagagttgagaagatctgcaacgagctcatcagaggcattgacgaggacaaagctgaggtggaggcactgaagagagaaaccgagaaggcacaagaagagctccagaaagagcgtgaaatgcttcaacttgcagacgagtggcgtgaacaaagggttcagatgaagctgctagaagcacggcttcagtttgaggagaaaaatgcagctgttaatcagctgcgcgatgaactccaagcttatctggatactaagaaagagcaggaaccaatgaacgatccaatgcaactatcccacgcgtctgaaaatggcgccaccgcagctgatgatgtagtccctgacagaaatggtggaaacttcagcgaagacgactcatcggaaggcagtgacatacactcgattgagctgaacgtcgatggcgtcaacaggacctacacctggagctacactccttcctcgaaaggcaggcagaggagcgcttcgaggcatgaatcgttttcggatagagggatggacggcgtgaactcgtggcgtttagagcaaagctttcggggcatggatgaggagctggagggagactgggcggaagggtgtagcaacggaatactgaccatggatcacgacgaggagaggtacctggcaatcaagaatctcagagagcagatgctggccgggtcagggttcatcctatcacaaggtagagaaaatgctgaaagagagtgttgtggcttgtaagataaactgcatatgaagagaattttaaagtaatgtgtcatatgggtcgctgtttgatgctaagatccagctgttcgagaattttaaagttatgttccatgattctgaggtcttgtatgtgtgttgctgtccatttaagtggccggaaatagtttataaaaaaaagcgtccggaaatataaaaacaaaaggaaaacgttcatct

SEQ ID NO: 146003 - DNA, 372 bp, Zea mays
  Clone ID: MRT4577_64669C.1
ttttttttttttttttttttttttttttttttttttttttttttttttttttttttttttttttttttttttttttttttttttttggggggttcacaggggaaaactggaaccccgaaaaatttaatttccccgcagggctggtggtccccgagtttttcctttataaaaaaacctggaaatacttccttccagaccccccaagaaaaaaaaaagggaccttgcaaaccccgccaaagggggcccttttttcaaaggggccaggcggggcaaatgcaaaaaaaacatatcgccccaaaaatagcgggggctttcttcacttggccccccagggaaggaaatccttccccctgtggttctttttttggggcc

SEQ ID NO: 146004 - DNA, 299 bp, Zea mays
  Clone ID: MRT4577_6466C.1
ggggctaaaattcaagctccttttatatttggttatttattcattgatgggccgggggttgacagggacagtttcagacctttttttttttacttcgcatccctactgccaagaacgagaacgtttttgtcgttgtcttcctcgtcgggcaggggcacggacccgtgcactttttgctccagcaccatttgcaccttcgaccacaccttggccgttgtccacagcacgttcccgggggccccgtggtgtcccccggttccgccgaccaccgggaggtcccttttttgggtgtagatcct

SEQ ID NO: 146005 - DNA, 626 bp, Zea mays
  unsure (1)..(626): unsure at all n locations
  Clone ID: MRT4577_64670C.1
cccgccggggagcggtggcgacatttcgctctggcgtgcgagcggtagcgatttctggggcgagcgacggtggcccccatggcaggcgaccagcgacggtgctcccctaggaccgaaaaacgacaacgctcctaaggcgggcgggcaagcactgacggcgctcccgaagcggacgagcgacagcgcaccccagacccggtggcgacggcgatgggcggtggtggcggccacaggagacacaggtcgctccggcagttgtgcgaggcgtggtcgtcttcggcgatggagggcacacaaagcatgggcggctccagcgtccttcgatgaccaactcgtctgatccaatggcctcggcagcgtcctccgatggcgacctttctccaattctttgtttacacatgcgactattggttgagcccatactaatattttttccattaattatgatgtactatgtaggtatttatataacttcctataacgtttatggtaaaaaaaaaaaaataaaagacgcctgatgctttgcgcgatatcagtcatccaacttttgcatgtatgctgtgngaacaaaaatagcattcaaaatttgtgagcatgaaatcaaaaaaaaaaaaaaaaaagcggcc

SEQ ID NO: 146006 - DNA, 497 bp, Zea mays
  Clone ID: MRT4577_64671C.1
gagcggctgacgcgttctgacccctaaccccctaagaaagaaaaaaaacagaaaacagcgacccggtgagctggcacggcgagtggcccgaccgggcgagcacgactcttccgcggcgcagcggacctcgaggccctggccctctgcgccccctttgcccgccgccacgctctacgaccgcttcggctcacatgcgcgaatggccgctgagggctgaatggctgatcacggggcgcggacggggacgccagcgcccgtgagctcggggaccgcaagacgctgggctgaactcttagccgcgccaaatctatgtcgctcccaacggcggcctgcctgacacgcgtctacttggcacgtggtgctgcagccatctcacgggggcgccacccggggccaactatgggttcgtcggtcgcaacggagagacaccacggccacgccgtccactgccgcagcaggccgcccggtgctgcaggcctgtggaaacgtgcctcgct

SEQ ID NO: 146007 - DNA, 795 bp, Zea mays
  unsure (1)..(795): unsure at all n locations
  Clone ID: MRT4577_64672C.1
tctttaggagcaccaagagttatctccggctcgaacccgagccaggtccacactcctgatccgcaccgcacacggcgccgagccgcggatcgccgcggtgcggggctacgtgcgggcccatgacaagttcttccgggccccgttctcaggcgaggcgggcgtcgtcacgaagcacacccagatgtgtttgttcacagaatggagaggcatctttggatggacctttgatctgcatgctcttcttttcagatcatggaaagagcaaattgtgacgtcttttagatcggttccatttgttctggttagtactgaattagcggacgcgtgggcggacgcgtgggcgagctttgtcatctggtactgctggtaacataacaacaggcacgaccaagcttcacaccgagctggaggagctggttgcgcgttttgtcgggaagcctgctgctgtcgtcttcggcatgggttacgttacaaactctgccaccattccctgcctaatcggaaaggtttgtaatgctcatatatacaatacaattgccagatgtctgaattatcagctgttttttctctctccctttttgcgacgtttgacagggtgggctgattatcagtgactcactgaaccacaactcggatcgtcaatggcgcaggaggatccgatgcgactggtcagggttttccggcacaactgtaagctgctttaattgtgcctctgaacaagaacaagaacaatgcggatgaccaccggccggccgcanagcgcaaacgtcactctcttgcatgcatgcaggccct

SEQ ID NO: 146008 - DNA, 1640 bp, Zea mays
  Clone ID: MRT4577_64673C.1
cggacgctatagctagctagtgttattcgatctctctctctatatatatacatatgtgtcactcacgactccacagatagatagctacacgtacgtacgtgtgtgtgcaaacaatccgatcagctgggaagcaaacaacaacgaacgaacgccatgatggcggcgtgcttggaggcgaagaaaccctacctgatcgctcttgccatccagatcatcggcaccggcatgttcgtcatctccaaggcagccttcgacgacggcatgagcaccttcgtattcatcttctacaggatggccgccgcctcgctcatcctcgtgcccacagccattgtccaccaaaggaagaatatgcggtccatgtcttggaagctgcttctcaagctcttcttgctcgccttgatcgggaacacattcagcttgaacacgtacaacctgaccctgaagctgacgtccgcgacggtggggtccgcgctagccaactccgtgcccgtattcaccttctgcctggtgctggtgctgaggatggagacggtgaacctgaggacggccgccggcgtggccaaggccgccggcgtcgcgctctgcgtcgccggagtcctcgtcctcgccttctacgccggtccggccatgagccccgtgaaccaccaccgcgccttcgccgccccgaggcagcacgccgcctccaccggtggtccgccgagcaggtcgaggtggatcacagggacgctgctcatggtcctcgccaacgtcacgtgggccctctggatcgtcctgcagtcggcactgctgaaggagtacccgaacaggatgcttgtgacggcgacgcagtgcgtgttcagcatgatgcagtcattcgtggtggcagtggtggccgagaggggtgacatgtccaagtggaagctccgatgtgacattaccctcgtagccgtcctttacgtgggttttgtggtgacgggactgtcccattacctccaagcatggtgcatggagctgaaaggccccgtgttcctggcgatgacgaacccgctctgcttcgtcttcaccatattcagctcctccttcttcctgggagagatcgtgcacctcggcagcatcttgggtggagctctgcttgtggccggcctgtacagcgtgcactggggtaagctcaaggaagacaggaggtctgaggcggcggaacaggagaagaccaagccgcaggaagaaccagcagcagtagctggagtgccctccgtgctcgaccaagcgtgatgctcatacatatggttgcttcatcagagcgccctagcttgagcgagctccatcgaccatcagctaactaatgaactgttgggaccaatatgcatgatgcatatcactgtgcatgaagaaccaattaattaactgtggattattaagagagtgagcatgtagttctacttgcatgcatctgggtattttgtatagaacacatcaagttgcgtctgtgacatcaatgcaagctagggcatgcatgcattccatcattcaatgcatgcataactcacttgaatgctgttgtatccactccacccatgcactttgaataaatacatatgtcgacttatatatgcgtaaaaaaaaaaagacataaaataaatcgactgagatcgatcaatcat

SEQ ID NO: 146009 - DNA, 291 bp, Zea mays
  unsure (1)..(291): unsure at all n locations
  Clone ID: MRT4577_64674C.1
aggagacaacgacgagnggncagaagnacaagagangcagacaaggagaacaacannncagaaaaccgagaagganaaanggcannagaaaaacangggggggggggggggcggcacnnaaaggaaagcnacagngcannnnaancagaaacaaaagagaccaagnngcnggnnacangagagaaccaaggncggagaaaaacaggagggacccgaccaacncngcngngagngnannnggaaaggaggnnggagaacccggaacagcggaggaggggcacaananggaag

SEQ ID NO: 146010 - DNA, 679 bp, Zea mays
  Clone ID: MRT4577_64675C.1
ttgggaccctcgaggccggccgggctcaccatctaccccgccgtcccccgctccgtatatctcctcgcaccccgccaattacctccatccaagggcgtaagaccggtgatcatgacgccccagctgcagcagatgcacccaccccaaaccttggagaggcaatgcacctcatagaacagcgctgctcctactacaaagaagaaatggagaacaacaagcactacgtgaagcactcccccaacgctgacaaggcaatgagaacactcgatgatctcttttacaccctcgtcgaaaaccgacaacagccatatgatgcctatctgaagaaggttgactgtgctaaacacagataggtcaacatacagcacagaccccgctgctaagacacttggcaattgggagtgtatttggcaataatgtctacgaatgcaatcgtgaggaagcgagaatgtctgcaccagtgtcaccttgaccgactacaatgaataaactgattgcccctgacacagagctgattatgacagaactctagatgaagactgtccaaaaaaacactacattaccagccgtgcttaacaatatggttgcttcgtaagacttgacctaagactgaacgacttactacacgagcacatgaggacaacattgactcaataattctacacgctcaattgtatga

SEQ ID NO: 146011 - DNA, 234 bp, Zea mays
  unsure (1)..(234): unsure at all n locations
  Clone ID: MRT4577_64677C.1
gcggccggacgacccgcaccgggccggcgggcagccgcacgccggcggggacgccgngcacggggagacgaccancagcncggcccaggaggaccancgcgccgcggagggcgnganggacgcgcacncggggcgcaccgcggggggggggnaccggancggcgaggccgacaagagccacaccaagacgcgcagggaggaggcccggagcaacaacgagggggcgggcaacgg

SEQ ID NO: 146012 - DNA, 868 bp, Zea mays
  unsure (1)..(868): unsure at all n locations
  Clone ID: MRT4577_64678C.1
cattgggtacctcgaggccggccgggaaccaacccggcctacctaccatcaacccactgcctgcttcctgtcttgctccccaagccccaacgctgcagacaacccgtactcgctcatcgcccgcacagcctacttttgtcgtccatcgcccgtctgtctgccaacccccccgctcctccaggcggtgaagtcactcccagcatcccactcgacaggctcccgctcataacaacgcctcagcgcctcagcgcccccgctcccctcgcgctcaactgcccaccgcgcagcccacacaggtatccccatatcaacacgcacaattgaccagcgcaatttgcagccgccccacccgtcgcgtgatcccagctctgccaacaggcacttcttgaggggctttgagccattctccacacggcgacagcctgcacccgtctgccactctaaccaccccattcgttgacatcagagcaaaggaagaaagagagaaaaaaaggccctccgtacaaagccttcgccagtgccacgcgcaaatcttcctcacccacccacgcgaggttcttccttgccccttcagccaccgaacccagcgccagtagcaagtcacagctatggccgaaactgaggtggacttggactctatcatagaccgcctgctcgaggtccgcggcagcagacccggcaagcaggtccagctgctcgaaaccgagatccgctacctgtgcaccaaggctcgcgaaatcttcatctcacagcccatcctgctcgagctcgaggcaccgataaagatttgcggagatatccacggncagtactacgatctgctacggctctttgagtatgggcggcttcctcccagagcgaactacct

SEQ ID NO: 146013 - DNA, 791 bp, Zea mays
  unsure (1)..(791): unsure at all n locations
  Clone ID: MRT4577_64679C.1
agcaagactgcctctctaaaagctagctacaagcccgggcatcaagacggaacttagttgaggtcgaaacaattactttccatccatccaccatgatttcatgggcctcgtctctgcctcggaagctcgtggtggcggccgctcttcttgcgctgtccgtggccatcgcggcgtcgcctgcgccggcgaaccagagcagctgctacaagcgtctattcagcttcggtgactctctgatcgacaccggcaactacatcgtccacttctccgccacgccgggtccggtcgtggagttgccatacggcgagaccttcttcggccggcccaccggccgctggtccgacggccgcctcatcgtagacttcatcgtggagaggctgggtttcccgtactggccagcgtacctgcaggcggcggccgggaagtcgccggcagaggagttccggtacggcgtgaatttcgctgtggcctcggccacggcgttgagccaggatttcttcaggaagaagcgcctccgtgttgacctgatgcccccctactccctcgacgtccagatcgggttgttcaagaaagttgtcgccgtgctcggctccacggaccaagagaggaaggcggcaatggcgagctcgctgttcctggtgggggagattggcgccaacgactacatccaacccttgttccagaacaagacgctcgaatgggtcaggcccctcgtaccccggatcatcaggtccatcgctctgtccatcgaggctctaatcgagctgngcgccaagaccatgtacgtgcca

SEQ ID NO: 146014 - DNA, 399 bp, Zea mays
  Clone ID: MRT4577_6467C.1
gcgtacaagtctttgacccactttatatgcgccgccccatgcccaccggcggaccagacgctcacgtactggatgttgtacagcacgccggcgcggtgcgggaacggcgtcgccggctccggcacggcgccgacctgcgcgccgtaggggtccaggatcatgagccccgcgctgggctgcgcgagcttgccgaagataccgtcccacgcgcgccgcgggatggcctgccggacgtagtcggacgtcatcttggcgtaggtgctcagggaggtggtccggttcaggatgtcctccaccgtcgcgccgctgcccaggaagaagtagggcacggtctcgatccagctcatctcccggcagtgcgtgcggttcatcccgagctccgggaaccggcgccccatc

SEQ ID NO: 146015 - DNA, 527 bp, Zea mays
  Clone ID: MRT4577_64680C.1
gacttttcggctcatgcatgtccaaggtcttccatgatggactaacacttcatcagttaccattcaagatgtcatacagggtgaagtactgcttgctgtactttcaaattacatggtggacattgattggttgcttactgcgtgcccaagtttgaggaaggttccacatgtcctggttctacatgggcaagatggtgcttcattagagcttatgaagaagctgaagcctgcaaattggatccttcacaggcctccactcccaatttcatttggaacacaccattctaaggctatgttgcttgtgtatcctcaaggaattcgaattgttgtgcacacagcaaatttgatacatgttgactggaattacaaaagtcagggactatggatgcaagattatccctggaaagacacagtcgatatgaataaaaaaacaccctttgagaatgatctagttgattatctaagtgcacttaagtggcctgaggtcagggtaaatcttccaggggtttgtgatgtcaacataaatg

SEQ ID NO: 146016 - DNA, 173 bp, Zea mays
  Clone ID: MRT4577_64681C.1
ctgccttggagatgtaggtcatggtgccacctacgtgcatgagtttctgccacacagcctctgtgccatgcagtgtggctgtgggttctggctgctcgaatacttcagtatctagcctgtactggttgattgtgcatggaactgacatgttaacacctgatcactcccccatg

SEQ ID NO: 146017 - DNA, 276 bp, Zea mays
  unsure (1)..(276): unsure at all n locations
  Clone ID: MRT4577_64682C.1
aattcggncacgagggtcctgtccttaagcgacgtaccgcggtgccacaccctcgatatcccttacctctcggacccggaggcgcagcagcagcctccagcgcactggcacgcctgcccgatcttgttattggggaggattcggccatggtctgacatcggagtccgtcgcagctcttatgaactgacaagctcaagatacgttggttaggaggtattggctgagcttgagagtcagaggtttttttttttcctaagaaaacaacccacttttttt

SEQ ID NO: 146018 - DNA, 188 bp, Zea mays
  unsure (1)..(188): unsure at all n locations
  Clone ID: MRT4577_64683C.1
acctctctttccttcacttggtttctaatacgcaattcncgggggaacccaaatctttagtcctctctctccaccccgccaaaaacccttgtggaacctcgtccctcgaccttttcattcaacctttcttttaattctttcttagttttctcaaatgggtgacctaaaggaggttttccgctccctcc

SEQ ID NO: 146019 - DNA, 362 bp, Zea mays
  Clone ID: MRT4577_64684C.1
aattacacgcacgcaaccttgaactctaacaccgaccgccctttccttttttttttttttttttttgaaacgaacacaaatattccggggcgggggaacatattgtaaccgcatcggacaaacctataaccagtgagtgcttacatgcatttggtcacctaaaggaaaaacataagctcctgccttatatgcacagaacaaaagggctatcttcagcccaatcgtggatgataacaaacacaaaaatccccacatcaaaaataacatggccgaccgttccctgctactaatggccacaccaaggatccttacatggggaacatagtacaggcacccccttgtgacctttatgaccttcacct

SEQ ID NO: 146020 - DNA, 332 bp, Zea mays
  Clone ID: MRT4577_64685C.1
caaaagggggcccaaatttattcccttttggaaaaaccacaaaaatccatttttttttgccccgggggggggattttaaaccggggaacccgggggcctacctttaaaatttggtgggggcttgaagcccaacccccttgaccttggtcccccaaaaggtttttgggaaaaaacattgggccccccctctggttttttaagcccctcctttaaaacaagtgggggagttaaaccatttttttttaattatttaaccacccctaattgggttttttttcggggaggaaaaggggagggtttttaattagggccccaattacccaaaccgtttt

SEQ ID NO: 146021 - DNA, 572 bp, Zea mays
  unsure (1)..(572): unsure at all n locations
  Clone ID: MRT4577_64686C.1
ctggccggggcatcgtagcacccaagctcgttgcgtccattcttccatctttgtacattcttgcggcgagcgcgaggcngcgggagagcatccactccctgagtaccatcgtgttttgcggaacttcaatcttggcttgaagactatcgacttgggcatctcccatctccacgggtagcgacacaaacacaccaactagactccatccttcgacagtgcgggcgtggcgcancaggcctagcgagttctcagcaaaaaacatcacaatccttcagcaaatatgtgtggccagacatctgcgcattcttgcgcgtgcgcggagtgcctctgcgcacatgatcctcaacacccctatccccttcaacttcgagaacaccggcactcancaagctcctctggggcccgccgacttcccttgcgagcaacccgccgggacatattccattaaagaaatgaacaccatcggggccgggggctctttgggtgggcagcttatggggggcgcgacacatggggggggcgcatgccaggtctccatcaccaccgacaccaagcccaacaaagactctcag

SEQ ID NO: 146022 - DNA, 271 bp, Zea mays
  unsure (1)..(271): unsure at all n locations
  Clone ID: MRT4577_64687C.1
gggggggggggcggtccgtccgaatcccggtggcgccancatccgctcaggccaagcgcgtcttcgccgaccaccctcacttaagggtcataaacgggggagagcggttacccgggggacgtcatcttctactcatccaacaagatggccttggacctgctcgttatggacagtcatggttacggctttattcagagggcgttcttggtcagcgtcagcaaccactgctcgcagatctgcaaattcccgggcctcattgtaaagaggccct

SEQ ID NO: 146023 - DNA, 343 bp, Zea mays
  Clone ID: MRT4577_64688C.1
ctcgagccgttgtgtcccccggcctttcctgcggtcggctactctggctttgctgcggacccccactactctatgtcgccccaaaaccagatcgccacgaccaatggcaaagggcccccgacgggcgcgtatcaatgtcggcaggctaccgggccgaagacgattacaactacctcttcaaggtggacctgatcggagactccggcgtcggcacatacaacttgctctcacgctttactcgcaacgagttcatcctcgagtacaagtccacaatcggatgcgagttcgccaccccatctctacaggtcgaccgcaaggccactaaggcccagatttgggacac

SEQ ID NO: 146024 - DNA, 415 bp, Zea mays
  Clone ID: MRT4577_64689C.1
ggccgccgtgtgctgggaaacgccctttcgaacggccgcccgggcaggtacaagtttttttttttttagttttattaatttttgtttttatttttgtgtatactgtttatctaggaagaaaattttgaaggattgatggacgcatgcatattaaattcctgtggattggataactacaggaacaaaactgggagagggggaggcgatgatgaattgatgatggctgatgagcaaaaaaaaaaaaaaaaaaaaaaaaaaaaaactaaaaaggaaagataaaaaaaaaaaaaaaaaaaaaaagcgaacaaaaaaaaaatgaaaaaagagggccccaggccccctaaaggggggcccattaaaaagcaaaaaaacgggatacccgcgggcgacactggtaaaaccccccctttccccc

SEQ ID NO: 146025 - DNA, 689 bp, Zea mays
  Clone ID: MRT4577_6468C.1
agagctatgacgtcgcatgcacgcgtacgtaagctcggaattcggctcgagagaaaacgagcttgccgatgccaaatttgcctggctttgcgcaaaacatgtcaagagcaacgcaattgtgatagccaagaacagttgcatgctgggcatgggcagtggtcagccgaacaggcgagagagcgttcggatcgctttcaggaaggcaggggaggaggccaagggagccgctttggccagcgacgccttcttcccgttcgcttggaacgacgcggtggaggaggcgtgccagcgcggcgtggcggtgatcgcagagcccggcggcagcatccgggaccaggacgccgtggagtgctgcaacaagtacggggtggccctcgtcttcaccggcgtccggcacttcaggcactgatcgacggcgacggtggcagcggagaccgtgacgacggacgatgggagggacctctatatagctgcgtcgatctggccggtggctggaaggaaggatctggcgtttcatcccagcgctgatgccggctggcgtttcttggctactagggagactctgatggtgctggatactcagtggcaaagagtagagaaagatacaaatggcagaactgttcactgtattgcaggaactatagtttatatacaagaatataagtgatttttaataatgtgtccgttgg

SEQ ID NO: 146026 - DNA, 483 bp, Zea mays
  Clone ID: MRT4577_64690C.1
ggggacaaaggggggggtccctcaaagggggtcttttggggtccccagggctgaaaccccaggaggacaaaggccgcatcgggcccctgggcaaacaagagaggaaggctcccctggaaatctgggcagatgggggaccaattggtacaatgaccgggcccacataactcaaactaatctattcacatacggggggcgggcacccacaaacggggggtgggggccaaaacaaattcaattttcgcaaaaatttcactggggaacccgggttacaaaccacccctgaaaaaccgcggggcttcaacattaggggtttcacccttcaaaaaccgggggggccggggcttcaaaaaaccctccatgggtttaaccggcggggggggttcttcaatatgggcccgggggggatccagttcattcccttttctggtaccgggaccgggctatggggctatttagcccatatttatgccaacttacctt

SEQ ID NO: 146027 - DNA, 226 bp, Zea mays
  Clone ID: MRT4577_64691C.1
cggacgcgtggggaaatgcttggaaacaagcatatatgcaggacctggtgaacaatctcatcaggtaagcttgtattctgcatagactgaaatactgacatatttttccattctgctacttataatgctcatttatgtcctatttagttcgatcccttgattcactcactggttagtctttgaatttactgcctaggcatggaatacctggttttgtaagtttggt

SEQ ID NO: 146028 - DNA, 434 bp, Zea mays
  Clone ID: MRT4577_64692C.1
aaaccccccaaaaccaattaaaaaaaaaggttggggggggcaaccccctttttcgggaatgggggggattaaaggaacaaaaaaccaacctttgggctggcataaaaaaaaggggcccccccctaattccgggggaaacccgggaaatgtttattcaggttcaaaaaagttttgaaagcccaaagggtcaggggacccttgaaaaggggaaaccttttttgggcgggtcaaggttttcgggtttcccacatttcccaaatttccttaaaatccccaaaaagagggggtggttcattttagcggggcggggggaaccccaaacaggggttccaggagggccttttttgcatcaaaaaattggcggggccaactgggggcttcacttggcatctttaagggccaaagccaaaggggtttttttatctttgggcggg

SEQ ID NO: 146029 - DNA, 330 bp, Zea mays
  unsure (1)..(330): unsure at all n locations
  Clone ID: MRT4577_64693C.1
ttttaaacacaaatccactccgtgacatattattgtcccgtgggatggggtggcatctgtctggttcacatctcaaatagtgtgagatcaaaaatctgggtactttttttttttaaactaaaaatacaccttttgggttgttggggggcaaaattcaaaccatnntacaatctaatcacnnttncttctcancttactccnactaactcaacantatccaaccttnttaactcctcatacccaccaactccctnaaccttcnatactttcnttccccacccatctcaccccccctttttnaattctccattctcttcccccatccccccc

SEQ ID NO: 146030 - DNA, 626 bp, Zea mays
  Clone ID: MRT4577_64694C.1
cccacgcgtccgccccttcccccgttcgctgtcccgagcggtccgctcctctcccggccacctctaccccggacgcatgcatgtggacatgtcccaccgcgtccggctcgcggcggcggcgctcgtcgcggtcgcggcgctggccctggcgctcgcccccggcgccgcggccaagtggcagcggaccaggaacggcaccgtggtcagctacgaccgccgctcgctcatgatcgacggccaccgggaaatcttcttctccgggtccatccactacccgcggagcccgccggacatgtggccggagctcatcgccaaggccaaggagggcgggctcaacaccatcgagacctacgtgttctggaacatccacgagcccgagaagggtgagttcaacttcgaggggcagaacgacgtggtgaggttcttccagctgatccaggagcacgacatgtacgccatggtccggctcgggcccttcatccaggcagaatggaaccacggaggactgccctactggctaagggagatccctgacattgtgttccggacgaacaacgagccatacaagatgcacatggagacgtttgtgaagatcataataaaaaggcttaggatgccaacctttt

SEQ ID NO: 146031 - DNA, 485 bp, Zea mays
  Clone ID: MRT4577_64695C.1
ccggccgggtgaaacagttgcatctgctctcctctccaagcggtcgttcttgttctatcgacctcgtgcctgcggctctagtgtgatgtacatagctctcaataaagaatgacaagataacttcatgagggggaaggggcctgaactgctacctacgccgctggccgagacgccatgcacagcccggaccacatgtcacatgggtacacaatcacctacacgaatgatcttctctagactcactaaaaaccgaccgctgtcagaaatgattgactgtaatcatacatatatttaagttcctcccatgcatctgcatgcatggctgactaatatcgatgcatggaatgccgagagacaacgttgaacatccaggtgaacatagacactgcaaatatcgctaaccccgccttgataacgccatgaagtctatgaccggtgagacaaatgccactgcccaatcaaaacacaacaattgcacatctgta

SEQ ID NO: 146032 - DNA, 475 bp, Zea mays
  unsure (1)..(475): unsure at all n locations
  Clone ID: MRT4577_64696C.1
gggagggggaaaaaacaggggacccatgttacggttaaacagacagaaatggcaaaaccaaaaaggggttatagattctccaagtaaaaacaaaaaaaaggggggggtccttggccatttaacccgctccaaacatattaagcattacaaaaattaaaatttaaaaaaagttaaaagggggtaaaaaccaccccatggggggatataatttaggccaacaaagggggggccgggggtgattaaaacttccaggggggggggagttttttggggcgcttggagtagggggcaaggggggggatcctggtttaaaaaaaaatgagcctgaattgggaggccttaacctttttggtcttttgaaaagggttcctaatgggcaaaggttttttaattaggaagtacagggctttcgggattttgggggncaggccatgggccttaggggggggggggattttgtttccagtaaggtttt

SEQ ID NO: 146033 - DNA, 335 bp, Zea mays
  unsure (1)..(335): unsure at all n locations
  Clone ID: MRT4577_64697C.1
agtgctgtggtcttggacgaggggccagcctggcggacccacgaagcgcgcagagctagtccatgtgagcaacgcagaggaaagatactgagcgctttccgcaagagcgactaactgcagcattttttctctggngggggtgggtagccaggcacgccgcgctagctagctatcacgccgcacatggcaaacgagcacgaccattggcgatcactagacaagccgttcttgtccaaggcgtgcattagctgcctctcgtatccccataggtacgagcaccgggcgcctctgggcctaccttgctggcacctcggctaaggacgaagaaactaaga

SEQ ID NO: 146034 - DNA, 564 bp, Zea mays
  Clone ID: MRT4577_64698C.1
gccggccgggagcttctgctccttttcctttcccagcgcatcagggaggcggcgattcgcggcggtgagggcgtccgcggagacgatggcgacggagaagctgggcatcaaggtggagcgcaacccgcccgagtcccgcctctccgagctcggcgtccgccagtggcccaagtgggggtgcgagaagagcaagttcccgtggacctactccgccaaggagacgtgctacctgctgcaggggaaggtgaaggtgtaccccgaaggccacggggaggagttcgtggagatcggcgcgggagaccttgtcgtcttccccaagggcatgagctgcacctgggacgtcgccgaggccgtcgacaagcactacaacttcgagtagccgccgccgccgactagccctgcggcgctcgatgtagacttgctgtgctcttgtactctgaaccaccgtgtaataaagctccggattagggtactacaatactgtactatctgtttcagatcccgttcggttagctgtgattaagacctgaaactattctgaaaaaaaaaaaaaaaaaagcggcc

SEQ ID NO: 146035 - DNA, 1441 bp, Zea mays
  Clone ID: MRT4577_64699C.1
ccggccgggaaaaatcaaccgaacttgccagccccgccgcccctccctgcctccatcgcgcactagggtttttcctcgctctcacgttcggccgttccccaccacttgcgcgttgtgccgcgacgctccggccatggcgtgggggaggacgaggccatcggtcccgacgtggcctcggcgggtcttcacgtctcggagcggatcggccgcgacgccgccgcgcagcccgacctggaggaggcccttgaagcctcgcgctacgcgtcccacccctactcctcgcaccccaaggaggcaagccctgcgcgacctgtggtcagctgcgtgtgtactgatagacgcgcacgcttgagttgttgatgtgtcagtgtccggtttgggcgaatgttaccgttgtattcagggttcctgcagttgtcctgggggattcgtgtcattgtttttcccagtagaatgggggtgacgaggaatcgaaagatgaaggtggaggaaaacatggcgagcaaaaaaaaaaaaaaaaaaaatacacaaccggccgcctcagcttctgctccttttcctttcccagcgcatcagggaggcggcgattcgcggcggtgagggcgtccgcggagacgatggcgacggagaagctgggcatcaaggtggagcgcaacccgcccgagtcccgtctctccgagctcggcgtccgccagtggcccaagtgggggtgcgagaagagcaagttcccgtggacctactccgccaaggagacgtgctacctgctgcaggggaaggtgaaggtgtaccccgaaggccacggggaggagttcgtggagatcggcgcgggagaccttgtcgtcttccccaagggcatgagctgcacctgggacgtcgccgaggccgtcgacaagcactacaacttcgagtagccgccgccgccgactagccctgcggcgctcgatgtagacttgctgtgctcttgtactctgaacctatgatgctccactccagagttaacagaccgtgtaataaagctccggattaggggactacaatgctgtactatctgtttcagatcccgttcggtcaaaaaagaaaagaaaagaaacgaggccagctgatcagttttaatacaaataaaactatggagcggggaaccttaaaaaaatccccaagggcatgagctgcacctgggacgtcgccgaggccgtcgacaagcactacaacttcgagtagccgacgacgacggcgacgatgtgtggtaagcggtggcagtaattggtgatggcctagacgcctagtccaaatgtttggattgctcccgctagcttcctagttcctaccacgtgcttgtattgtagtcttgctgtgctcttgtacactgaacctctgttgctccattcaagagttaaacagcataataaagctccggattagcggactacagtgttgcactatc

SEQ ID NO: 146036 - DNA, 217 bp, Zea mays
  Clone ID: MRT4577_6469C.1
caggaccccataccatttctcaactttccacacccaaaaaacgggaatcgcgcgtgatttatagctccatccctctatctcctgactatcctaacaccaccacatccactcatacgatccgacgctacatgattccatccaccgatgacccatcattcaccaccaaccaagcctctgccacttccggaccatatgccacgtcccatacatataacac

SEQ ID NO: 146037 - DNA, 208 bp, Zea mays
  unsure (1)..(208): unsure at all n locations
  Clone ID: MRT4577_646C.1
acaaaccctaggggncttttgttggggggaagggtgnnncaanaaaaaaacaaacaaaaaggccctgactttttttattttttaaaaagatacctagggcctgtttaaagtttattcccagtttttttcgctcacaacccaaaccaatttcagcaaaccctcccccaggaagtgggtggttggcaacacccctgcccaaggtggtccc

SEQ ID NO: 146038 - DNA, 355 bp, Zea mays
  unsure (1)..(355): unsure at all n locations
  Clone ID: MRT4577_64701C.1
ccttacctccaccttacacgggcctttatcggtccctttgccgctacacccaccgcaccacccacctgaccactattcttattgctcttcattacactataaatcccagcaccccaccaatctccccaacaatagcagtagtaacctcnannatacccacatncaccaccacctccactaccactaccaacacctctcttaccacatnaactttcaaancacctntctaancaccctactaanaaccataacatccatnatnacactcatcaacttnctaatcaaaatcaaaccctcaaccaaaccaacccacacctccaaaaatacctccaaacctcaacccaacctcttccaa

SEQ ID NO: 146039 - DNA, 477 bp, Zea mays
  Clone ID: MRT4577_64702C.1
ggttgccggcgagggcccgtctcgcgccgttgctgatctcgcgcgctctcctcgcccgcctcgaacccccccctatggctcctgaggtcctgatctttaacaacctcttcaccaatggaatctcttagagcatagttgtatacgtgtttatagcctgtatttaaggtcccaggtcccagctgtcgcctccatgagccaagaattcttctttgatctctctctctctcacttagcatgcttagaagccccacttatttaacctaatgacaaacatcgaacttacttaatcttcttcccttttttgttgtctcctggtgaggttggtcgatctgatggtcagttcacgtgtgtagctggttagctatgttgtgtacagcatgagttgtatgctggtgaactgctttcaacagtccaaagttttgtaccctgtttttctcttgctggaaagggatttgttggaactgagctcactttttt

SEQ ID NO: 146040 - DNA, 492 bp, Zea mays
  Clone ID: MRT4577_64703C.1
cttgtccgtaccagttctgagtcggttgttcgacgcccggggaaggcccccgagggggccgttcccggtccgtcccccggccggcacgcggcggcccgctctcgccgcgcgagcagctcgagcattccgccagcagccgacgggttcggggccgggacccccgagcccaaccctcacagccaatactttttccgaaattacaggatccgggctggcgacttcccgtggcctacatagctccattggccagaggctgaccagcttggagacctgatgcgggtatgagtacaaccggacgtggacggaattatgaactaccgattttcaagggccgccggcggcgcacccgacaccccgcgatgtgcggtgctcttccgtacgatggaccctacctcccgctgaaccaattccagtgctggagggccgtgaagcacacaagatgactctttacgaagacggcggcggcgaatccggactcttaacgtatacgtg

SEQ ID NO: 146041 - DNA, 384 bp, Zea mays
  unsure (1)..(384): unsure at all n locations
  Clone ID: MRT4577_64704C.1
cccacgcgtccgcccacatgttagtacaggtctcctacgccatcggcgtgccctagcccggatcattgttcgtggacacgtacggaaccggcgcgatccccgacatggagatcctgaagatcgtgaaagataacttctactataagcgctgcatgatcaatatgaacctcgaccttaagaaaggcgggaactgtcgctaccttatgacggcgggctacgggcactttaagagggatgacctttacttgacctgtgaggtggtgaatcccctaaaggtagaaaatccgtgttctagatgaggtgctttctatgttttggaagaagctnttggtatggtctgtctgcgctctatcatgcttcattatggctcctacgtgttgtgat

SEQ ID NO: 146042 - DNA, 1835 bp, Zea mays
  Clone ID: MRT4577_64705C.1
cccacgcgtccgcccacgcgtccgcccacgcgtccggtggaacagaaattactctttatttgagagctggtaccaatccggagttcccgggtcgacccacgcgtcaaggcttagttaagaactactcgcagtttgtctcattccccatatatacatggcaggaaaaatcaagaacagttgaggttgaagaggaggaagaatcaaaaggtgaagaggctactgaagaatcaaaaagtgaagaggctactgagggtgaaaagcagaaaaagaagaaaaccataactgagaagtactgggactgggaattggctaatgaaacgaagcccatatggatgaggaatccaaaggaagttgagaaaaccgagtacaatgaattctacaagaagacatttaatgagtttctggatccgcttgcttacactcacttcaccactgagggagaggtggaatttcggagtgttctctatgtcccagggatggcgcctcttagtaatgaggagataatgaatccaaagaccaaaaacatccgattgtatgtcaaaagagtgttcatatcagatgattttgatggcgagctgtttcccagatacttgagctttgtgaaaggtgtagttgactcaaatgatctccctctcaatgtttctcgtgagatccttcaagaaagtagaattgtcagaattatgcgtaagagacttgttaggaagacatttgacatgattcaagagattgccgagaaggatggcaaagaggactacaacaaattctgggagagctttggcaagttcatgaagcttggttgcatcgaggacacaggaaaccacaagcgtcttgcaccattgctgagattctactcttccaaaaacgagacagatttaataagtctggaccagtatgtagaaaacatgcctgaaaaccagaaggcgatctattatatcgctactgatagtctccagagcgcgaagactgctcctttcttggaaaagctggttcagaaagatattgaggttctttacctcattgagccaattgatgaggttgccattcagaatttacagacatacaaagagaagaagtttgtagatattagcaaagaggatttggaattgggtgatgaagatgaggacaaggagaaagaaagcaagcaggagtatactcttctatgcgactggataaagcagcagcttggcgataaagtcgccaaggtccagatctcgaagcgactcagctcttctccatgtgttcttgtttctggtaaatttggctggtcagccaacatggaaaggctcatgaaggcacagacccttggtgacacatcaagcctggagttcatgagaggtagacgaatttttgagatcaaccctgaccatcctatcatcaaggacctgaacgctgcttgcaaaaacgagcctgaaagtactgaagccaagagggcggcagagttgctatacgaggctgcgctgatctccagtgggtatactgtaagtgcagcaaacccacgcgcttgttgttggcctatctatgactgtgagtacgacgtgattgtccacctctgttatccagcctgacagtccagcggagctgggaggcaagatctacgagatgatgaccatggccctcggcgggagatgggggaggttggagacagaggaggctgaagtcatcgccagcatcgacgacgcggactcgtctgaaggtgccacgaccacggcggaggtagtcgagccctctgaggtcaggacagagagcgacccgtggaaggattagatagttctgtatgcaaggattatgccctggtggtgtatgagcaccggatgtaacgaaagtacctgccctcg

SEQ ID NO: 146043 - DNA, 236 bp, Zea mays
  Clone ID: MRT4577_64706C.1
ctaaaaaatacaacatccttaaaaaaggcccggtttagtatatttatataggatcaaatcatattatcgggggcccatttatttatgggtacagcaaacccaattggttcaaccaaaattcctgtagacccccctccattagcccaaagactggccccaaacatgctgaggggggaagccatccgaagaaccctttttttttttttttttcacaaacaccaaaaaaatctcttttt

SEQ ID NO: 146044 - DNA, 111 bp, Zea mays
  Clone ID: MRT4577_64707C.1
acatagtgcttaacacttttgacaacacaaaccaatcatgctggtttaaaaaacaaggttgtttccgtaataatgatggctagagctgctagggtagcacgaagaaagcta

SEQ ID NO: 146045 - DNA, 891 bp, Zea mays
  Clone ID: MRT4577_64708C.1
aggaagctgaatcgacctcttaagcggggaatgtatcccttccctgctgcaacataaaacatgctacccaggcatagctgggcaccctttccacctctgcccggcggatttgccagcgcgacggccccgacacatacggggacttgaacgcccgccgcaccccaccccccaacgcccccccgccgccaacgcccccccccccccccgccccacccctcccccgcccccaaaacccaaccacaccgccgccccccccccccgccccccccccccccctcccctccccccgcccccccccccccttccccccccccccccccccccccctcccctcccccccccccccccccccccccccccccccccccccccccctccccctcccccccccaccctcccccctccccccccccccccccccccccccccccccccccgcccccccccccccccccccccccgcaccccccccccccccccccccctcccccccccccctcctcctcccctccccccccaccccccccccgctccccccccccccccccccccccccctcctcccccccccccccccctcccccccccccccctccccctcctcctccccccccccgccccctcccccctcccctcccccccccctcccccctcccgcccccctctccgccccctccctccccccctcccccccccccctccctctccccctccctcccctccccccctcctgccccccccgcccccccccccccctccacccccgccccctctccacccccccctccccccccccccccccctctcccccctcccctcccccctctctgcccccctacccctccaccccccccccccccccccaccccctccccccctccccccccctccc

SEQ ID NO: 146046 - DNA, 384 bp, Zea mays
  Clone ID: MRT4577_64709C.1
gaataacacacgtgagcacgaccatcaggatcctatagctaataacatcatggacatgggcgcggcccttgcatggctcgttgggggcagctcttgctgctcccccaaggtctcaccccggccaaacatcaccaccaactacaacgccaagagactcacccctagggccacctggtacggtcagcccaacaagaccatccactactgacaactgctggaacctgcgcgatcaataacatgaacctgccaccctacagcgccatgacggcgtgccgcatcttccacatcttcaacgacggcaaggcctgcggatcatgctacaaggcgagatgcaaggaaaaacctgcatgatcgggcaatctcatcacggtttacatcactgac

SEQ ID NO: 146047 - DNA, 382 bp, Zea mays
  Clone ID: MRT4577_6470C.1
tataaaagcgctaacacgtcatgcgcgcgcacacaaacgctcaaaattcctctagagcaccgactctgacatccgctcgagtcaacgcgtgggggaacctaacatgatcaagggagctcacgagtacacggtcttcaccacccgcaccgatcccaaaaagggatcgttcgtgaccatcgcgcccatcagcatgcctttcatcgccagcaccacatgatctacgcgtgaccttcataagccagtacataaacctcgtccgctctttaagccatactgacgtgcaaatcgatctactgacttctgtattggcacagaaagactaatgctaaccatctatgatctaccctcacctccaaggtcacctcatcatagcatggagccc

SEQ ID NO: 146048 - DNA, 263 bp, Zea mays
  Clone ID: MRT4577_64710C.1
cacacgcgtagcaactagctctagtcttattctatactgaacgtgtgtatagataacagtactcgtgaacgatggaggacaagtactgccgaacttgctaccgcaggtgccgcaccagccacgactacgacagcagctacaacagcaagtcaggcactgatgactacggacacggcgaaggtggctacaacaagtcgggcgaggataacgactacggccgcataggcgacgatgggtacggcaagtccggcggagacgactac

SEQ ID NO: 146049 - DNA, 252 bp, Zea mays
  Clone ID: MRT4577_64711C.1
cgtccggaagtcagatagtggggggcgctcgggacaacgcattatttgccaggctggagtttcaatcgagcacgggtatcacaggagcttcacactttaagcatgttcttacaaggctcccacctacacatcatccagatatactatatgggccgagaatggttacaccacatcgtcctatctgctctctgattcacacacaggacccgatatattctcacaagcattagactgtaatggatagctattcta

SEQ ID NO: 146050 - DNA, 291 bp, Zea mays
  unsure (1)..(291): unsure at all n locations
  Clone ID: MRT4577_64712C.1
ggggggggggggtttcaacaaaatccggttttcctcgtacaacaaacataagggtgcagagatcggcgatccctgcacaacatctgttcagtctacgcctaggtgacagcaacaagcctgcggcatcttacattccgctgcangcagtgggggggcggggggtttttttatatttttcagccaannnngcaggcaaaaaagggcaggcacactggaacaaggcacgcgngccactcgagncccnacactgnncaggagcaancaancnccagnaagaaaagcagcagacag

SEQ ID NO: 146051 - DNA, 170 bp, Zea mays
  Clone ID: MRT4577_64713C.1
caggaaaaaaaaaatatacataacacactttataaaagatctagctactaacaaagtaagacgcgttatgatagatggtgacggggtccggatgctccattatgtgcttgcagatctagcatgtgtgcccggcattgcaacttacgttcctctttttcactggtccatat

SEQ ID NO: 146052 - DNA, 465 bp, Zea mays
  Clone ID: MRT4577_64714C.1
aaatactctcggcaacggatatctcggctctcgcatcgatgaagaacgtagcgaaatgcgatacctggtgtgaattgcagaatcccgcgaaccatcgagtctttgaacgcaagttgcgcccgaggccactcggccgagggcacgcctgcctgggcgtcacgcccccattcccactccgcagtgcccacccacccacttcgccggcggcgggaggagctttggccggagcctcccccgccgccgccgccaccgccgcagggacgaggccatggggcacggggtgagctgcgcccgcaccggcgacgagcacgacttcttccgcgcggcgcagctcggggacctcgacgccctgggcgcgctgctcgccgccgacgcctcgctcgaccgccgcgccacgctctacgaccgcctctccccggtccacatcgccgacgtcaatggccgcctacgaggagctctccatgt

SEQ ID NO: 146053 - DNA, 344 bp, Zea mays
  Clone ID: MRT4577_64715C.1
aagagggcctgcatgaaacattaattttccttatgaacgaccccgacccccaaaaattgagcccccatgccagctggttttttattcaaaaaatggggaggggcggggaccacaaaaacttcctggtggtccgggaggcatggaggcctttacccacgacggggggcgccaaaactaggggggggctcctcctcctccttgggggccgggcccgaaaaaaggggctcttaaacaatgccggaaaggccggcgccaaccatgggccccacccaaaacacccaaggggggctccagcgaggggagcccacgaaggggggcccgaacgccccccccggattaatccc

SEQ ID NO: 146054 - DNA, 378 bp, Zea mays
  Clone ID: MRT4577_64716C.1
atggagaggctcaccattggagctgaggggagggggcttcctactggttttccatggaagaaatggggcgcatggaacaacagggggaggggtgctggcttcctgctggcagtggagcaggggacgcgcagggaggagggcaccgagcgctgtggagaagaagggtgcggctccctgcacttgagctcaagggaaatagagaggagggagggcactgattgcttgaggaagaagaaggggaggagggaaggacgccatggctgctggaggcgccgagctggagaggggccggtctggccatggctgtcagcggccgagggagcagagcgaggaaaaaaatggagcagcggccaagtggagcagcaatccctggcatag

SEQ ID NO: 146055 - DNA, 343 bp, Zea mays
  Clone ID: MRT4577_64717C.1
atttttattttttttttttttttttttttttttttttttttgttggtagataacaacattgttttttttatgagaaaaataaagggtgtaattgggagttcaaggtcacgtacattagcattctcaggagtgggtgtgcacgcacaaatgccattttttttctctctgtttctttctctaatattgatccgcttttttgtggacatgttatctcgttcaagatttcgtatataaactaatactttgggcgggatatatatatctgtctcactcatttatatcatatgtattaaatatgcgtttttgttatgcaatatatatatgcagctcaatgcgtgttttc

SEQ ID NO: 146056 - DNA, 1026 bp, Zea mays
  Clone ID: MRT4577_64718C.1
cattgggtacctcgaggccggccggggcggcagtggtgatatatgcactgctcagtacgcagccgctcccactactagattcaggtgagctcatcattagtgccccggcccttggtgcggtgcggccaacggccatggcgaagcttgccgcgcagctcaagagcaagttctttggcctcgtcggccgcatcaccagctgtggccgcgccggcgccacccacaaggatgccggtaacagttcggcagcccatgcacctctccatggctctctcctaagaacatcatcttcctctctctctctctctctcttgcacactagctagctagctcgcggctgatgattccaccgttgtttctgcagctggtgcgacagaggccaagtcatcagtgggatcccaggttcctcgacctctactctaataatctctgctatacagatgttgttggctttattacgacttaccgagtttcgctggttatttttgttttgcttaattaattactcatgcataagctaaatatacagagcagtcctgcagatatacacacacgagtatatatagcacctccagccgactttgcgtcggcggcaccgacaagatcgtcgctgtgacgtctgtggccgagtcatcagtgggatcccagcctgttgagatcaggtcaagggaaggtgctcctcccgttgatggaggggccaagggtcacatcaacagtgacaccatctagaggagagggagaggagaagagaagagatcgaagagaagagaagaagctcaccgatggtgcttggacttggacattatctgcagcttagttaccatgtttgaaagaactgaagctgtaaatcgcagtcgtcgttgcttgtgtgtgtgtgtttatagttcctccatggtttaccatcgttttcagcttttcaagtatatctggtgcttgctatgtttcataatttcgggctatgttgtttcagtgtacggtatttctgttcattttcttccactattatataatctagcttatggattatat

SEQ ID NO: 146057 - DNA, 1132 bp, Zea mays
  Clone ID: MRT4577_64719C.1
gtcttttcttgcaaaagacaaatgtcttgcaaaattcttaatcaaagcgtgcttatttaaactgtactggtcgggtaatgatttagaagacggagtcttacgaaagggacgttgacctcgcacacgaaaaaaaaagaaagggacgggactagtttgggaactacatttttctaaggtatttctattttccagggaaaatgaactaattttcctttggaaaatgaaaatctcgtgggaaaacggagttctcaaactaaccctaatgtgtcaaagcctggagttgtggcgttgattacttgattaataagctgcagaaggattttttttaatgctacaaaaacaacacagaaacagcgggtaatgaagtgatatatgatataagttaaatgctgggttaggatttcagaatcggactgtttcagtatttctgtcacccaactggagcaaccatgtctgctaggctgcatacaatatacagatcactcactgtgatgtttgaactacttgtttttagagagaaaaaaaaaggaattgtttacaaatggtttccatttgtgtaaatttacatcattcttcatctctgtcacggttctcccatttccgttcgccttatcgtttctgaacgtggatcagagaaacgccacttgcagatgcgctcttcgttttccaagtgcaggttcagaagaagctgcagatgcggatcgaggcgcaaggcaaatacttgcagacgatactcgagaaggcccagagcaacctctcgtaccacgcgactggagccgcaaacctagaagcaaccaggtcgcagctgacggacttcaacctcgcgctctcaggcatggagttcatgacggggacgatgtcaagtgcgctacggacgaagggttgctacttctggacctgaacatcagaggcgggtacggtcatcggatttcgacggatctgaagatgaatcaacacatgcggtgaaaagttcagtagaaagaaaggcgaggacagtagtttaatcttgggtaacccatcaatctaagagaagaggtgcccttgtgtttgtgagaaattctttcggccatcttgattcctaacgatgcttctttatggtgatggtcagcgtcccggcccggccggcctcgag

SEQ ID NO: 146058 - DNA, 299 bp, Zea mays
  Clone ID: MRT4577_6471C.1
ggaggggtaaggctggagatagcttaaccagagtggtggtggtgctgtgatctagtggcagaatgtaagaaactggctacaccttttacaagctgcgtgttggagatgtatggggctgtttgcgttggattgaccgctgcagttgtaatctatagagacaaaaatattgtagaagcagttgtaatctatatgtaatctatagagacaaaaatattgtagaagcagttgtaatctatagaggcaaaaatattgtagaagctgtagaagtcgatacgaattaaagccagcctgtttctgat

SEQ ID NO: 146059 - DNA, 223 bp, Zea mays
  Clone ID: MRT4577_64720C.1
gtcctgtctatctaactagcaagacccaaggtcccaccttaccatggctaccgtgactgccggcgacgtccccaccggctgtcacccttaccgtcgttcccgcactcgctgtagctcaccgtacctgcactgtctgctctttcctatcgcatcagcatcacgctttttcttcccttccctacccgtctgtcatgctgccaccgctgtcatatggatgctttct

SEQ ID NO: 146060 - DNA, 863 bp, Zea mays
  Clone ID: MRT4577_64721C.1
caacacgacgatggcgatatgagcgaacgcgaatcgacgcgggccaaacaccggacaactgtggtagcgagaaactcacccagggaacaggggagcgcgcgcacaggaacttgaggctgggcacgcaacagagggactcggcacgagagctcgacgcgcgcagggaacaggaaacggtcgcgcgcagagcacggcgctggggcgaactcgaccatgggcgagggagaatcaaagggaagggcggctgggctcggcaagcaggctgagactctgcgcaggggaggaagacgccagaagcttgggcgcgacgcagtggagctctggccgcgagcagagcgaaccaacagcgggcgcggcagagagagaaaacagagagcagggcgagctggcagcgagcaggcatctgggcgtgcggaggggctcggctgggtgccaaggagagacgagccatggaggagcagctgggtgcagccatggcgacgagctcagggaatatgcgacgcagggacgccatgaaatcacagggaaaaagagatgcggccatggaagctccaagccggcgcggcactggagatccgaccggacgccatggagatggggccgagaagggggcgcggtctgagccaacagaggagcgagggcgagcagagggatggccggtagcgctgggaagaggccgagcgccatgaggaagaacctcggtgcgcaggattttatccagtgcttaagcggcaacagaggagcggcgcaagaagataagaacgacggctgcgatctcaccggcggtgagcagctagaagaaaccagagaatggagcagcgtatttttctcctaggagagaagacaggcacactcggtagccc

SEQ ID NO: 146061 - DNA, 288 bp, Zea mays
  Clone ID: MRT4577_64722C.1
cggacgcgtgggttttataataacacagttgagcgcgacgatgggacccctctctaataacatggtgggcgtgggtgcctttcttgcatctcttccggggggtatgttgggcccccaaagtggcggccggttccaacattatcaccaactactaacgggagtggcttaccgccagggccacctggtacggtcagaccaacggtgccggcgctcctgacaacagcggtgcgtgcgggatcaagaacgtgaacctgccaccctacagcggcatgacggcgtgtggcaacg

SEQ ID NO: 146062 - DNA, 323 bp, Zea mays
  Clone ID: MRT4577_64723C.1
aacaccctaaagtgagtcgtattacacgcctcacacacgctctcgcgctcaccggcgcctcgcacctctcccacgctggccgcacccgcaatggggtgcgccgcgtttgccgccaacggggccggggcccgggcggcgggggtggcccggccccggtgcgcggtaaaccaagggttcactcggtctgccgcgcgccgccgccgccgcagggagcggcggagtcgtcgtcccggggcaagaggcgaaggcgcaaggtggcgccggaacccaaggagccggcggaggaagggaccgccgcgctgccgccgatgcccggctcgccc

SEQ ID NO: 146063 - DNA, 366 bp, Zea mays
  Clone ID: MRT4577_64724C.1
actaattatggagtgcctattatccattgcttatttattacaagctaaacttggtcgtacaatacttaacttgtatagttaaacacaccaccgtatactactagcctactaacttggaccgtttaccgtaaaccgtttaactagctaaatccccgatggatccatcggcggtgaatttcccctaccccctgattagtcgtcgtcgcttgccggatcattcccgcaggaacaactttacccgggcaacgtttttgcaacccgttaaaatgctcgcccggaccaacgccaggtacatttggtccattgcttggttgaatgcctttaacaatacccccttcgggtaccccgggtttactccgtaagttt

SEQ ID NO: 146064 - DNA, 346 bp, Zea mays
  Clone ID: MRT4577_64725C.1
tttcttacgtgacagcgcgcggtgacgacactgtttgggtttaccccaggtccacccattattgggtgaatgaccatgaggggctagcgataccagcggtggaggccattcccagttagatcgctccgtcaaagctcaatggcgactagctgcaactggacacgagcaacaagggtctgcaacatgattattaacaaatccaattgtgctgctacctgtccaacgactatatggagaagtgaatgatgctccgacaacgtttactgactctaccgaaactatatgaacgattcataggtaatggacgagttaatctgaagatccataatgatcctgtatcaggatt

SEQ ID NO: 146065 - DNA, 955 bp, Zea mays
  Clone ID: MRT4577_64726C.1
cattgggtacctcgaggccggccgggagcacctacagcgccagccgccagcgctccccttcttcagaaggacgtggccgcacccgcctctcgtctccctcccacccacgcgattccatttcgcttacatttcatccgtgaaaaatcacggaagtgccacccgcagtggcgggacccacgctccacgctttcctctcgttctccggctcgaccgcattcttttttttctcttctactattttcgtgtcccaccagccaccaccagtcggcgacgggcaatttctgtctctggcttagcgatgcaggcgccacgtggcggcgggttcttcgggaagcggaaggagcgcgactactactacccctacccctcggtgtcgtcgtcatcagagcaggcggtgctgctccagcggcaaccgccgccgtacgctaggcccgagcccgacacgcggagcgtcaagccggatcgcccggcgatgaggtttggtgccaagccgccgctccctcagccgggggcccaggtcggctgcaacaagctgctggctgggtacctggcgcacgagttcctgcggtgcggcacgctcctcggcgagcggaggctggagctgccccgtctgaaggagaaggatccctccgcctccacctccacccctgcgccggagccgagcaggcgctacgcggaggtttcgcggctggcttatggcgggcggggcccgcatacccggcgtcgtcaacccgtcgcagctcggacgctggctccggatcaaggagtgaccgggtggccatgcgcccaggccgctggaggtcgggtgcatgcggagcatggccgcattgcctactgcttcgttccctcgtcagcggccgatcagaggaaccgttgtttttgaacaaagcaggcgggtttctcatgtctcagtctttctttcccttcgaatttgtcgtgtagtaattagtaaatc

SEQ ID NO: 146066 - DNA, 235 bp, Zea mays
  unsure (1)..(235): unsure at all n locations
  Clone ID: MRT4577_64727C.1
tagcaagaaccccccctctctctctctctcaacttggcantcaangnnanngnccaanccctcaccaacaacgccagcgcatacgaccaggacaacgccgataaccggaaggcggacgcggcccgcaacccgacgacagcattcactgacgcaacctcctgcaaccaggccgcggctaacctaggtgacgggtgcgtcatgcagaagccgatgaacggggctacagccgacgtcg

SEQ ID NO: 146067 - DNA, 405 bp, Zea mays
  Clone ID: MRT4577_64729C.1
ttttttttttttttttttttttttttttggggttttttttttttttttggtttttttttctttttttctttttcctttgggggaatccccgggtttttttttaaaaaaaaaaaaacccccccgcccaaaggttttccccccaaaacggttaggaaaaaccccctgtgaacattttatgcaaagggggggggcccaccttaaaaaaccgcccaaaaaatttcaaaaaaattcccgggggaaatcccgaaccatccccccaagggccccgcgatttcccccttgttgggccccccgataaaacaactggtccgggtttgcaactcgaagaatgcaacaatgggggcctaaggggtttcccacccctctaatggtattgaggcccaaagcctcaaaatacattgccgg

SEQ ID NO: 146068 - DNA, 2506 bp, Zea mays
  unsure (1)..(2506): unsure at all n locations
  Clone ID: MRT4577_6472C.1
cgggagaaagggacgggaaggtgccaataaattgcgaggatgccgctttatctcttctctcccgccgccgccagctcgccaccggcccacacgcgtccctgcaccggcggcgccagttcctcttccgagttccccaccgccccagccgccgcgccccactgctaacttcggcggctgagcgtccagcagggcgcaccatggctactgcggataccggagcgtccacggtgaccgattcgaggctccgagctacaggagtgaagcaagcactgatatcattgtcagataaaacagacctggctaatcttggaaatggtcttcagcgtttggggttttctattatttccactggtggcacggcatcaagtttggaagcatctggtgttaatgttacaaaagttgaagaaattacacagtttcctgaaatgcttgatggaagagtaaaaacattgcaccccagtatacatggtggtattcttgcgcgaagagaccaggagcaccatctgaaagcactgaaagagcatggcattgggacatttgatgtggttgtagtgaatttgtatccattctatgataaggtcacctcaggtgcaatatcttttgaggatggcattgaaaatattgatattggtgggcctacattgatccgagctgctgccaagaatcataaggacgttcttgtcgttgttgatcataaagactatcctgctctactggaatatctagaagggaaacaagatgaccctgatttccgcaggacacttgcatggaaagcattccaacatgttgcttcctatgattctgctatctcggagtggttgtggaagcaatctaataaagattcatttcctcccagctttactgtgcccctcacaatgaagtctacacttcgctatggtgagaatcctcatcaaaaggctgccttttatggtgacaggagtctttctctagtaaatgctggcggtattgcaacagcaattcagcaccatggaaaggaaatgtcctacaacaactatctggacgcggacgctgcgtggaactgcgtctcggagtttgagagcccgacttgcgtcgtggttaagcacacaaatccgtgtggcgtagcgtctcggcacgacatcctggaagcgtacaggttggctgtgagggcagaccccgtgagcgcgttcggaggcatagtcgccttcaacacgacggtcgacgaggatctcgcgagggagatccgggagttcaggaggccgacggacggcgagacgaggatgttctacgagatcgtggtggcgcctgggtacacggcggagggcctggaggtgctgaaagggaagtcgaagacgctgaggatactggaggcgaagcggaggaggagcgggaagggcacgctgctgtcgctgcggcaggtcggcggcggctggctggcccaggagcccgacgacgtgaccccggaggacgtggccttcacgaacgtgtccgagagggctcccgacgcccgtgagctctcggacgccaagttcgcgtgcctctgcgtcaagcacgtgaagagcaacgccattgtgatcgccaagaacagttgcatgctgggcatgggcagtggccagccgaaccggctggagagcctgaggatcgctttcaggaaggcaggggaggaggccaagggagctgctttggccagcgacgccttcttcccgttcgcttggaacgacgcggtggaggaggcgtgccagcgcggcgtggcggtgatcgcagagcccggcggcagcatccgggaccaggacgccgtggagtgctgcaacaagtacggggtggccctcgtcttcaccggcgtccggcacttcaggcactgatcgacggcgacggcgagggtggcaacgtagaccgtcacggacgatggtacctgtagctgcgtcgacctgatgcccgctggcgtttcttggctagggagactgatgacgctgaagcaaccaaatgtcgcctcctctagtctggagaggatgggtcggtgggtcccggtttgtatatataacgtcgtcagcctggcaagaggttgactgagcttagtgactcttgcggtggatggaaatcggaaacggtcgctgacccggtgggaccgcacagtctgttgcttggctacatgccgtgttattattattaatactatttattgctgtcacgttacatgacacccagtgacgcaacactaaggcttgtcagtctgcaccaccaccagcaggtcttagccccatggctctatggcatgganggtggatggaaggaaggatntggagtttaatnaaagngntgatgnaggntggagtttttggcctcttagggagactctgatggtgctggatactcagtggcaaagagtagagaaagatacaaatggcagaactgttcactgtattgcaggaactatagtttatatacaagaatataagtgatttttaaaaatgtgcccgttggcaataaaaaaaaaaaaaaacaaaaaaaaaaaaaaaaaacaccaaaa

SEQ ID NO: 146069 - DNA, 406 bp, Zea mays
  unsure (1)..(406): unsure at all n locations
  Clone ID: MRT4577_64731C.1
ggtaccctncnaggccggccgggaaaaacccacgctgccctacggagctgcgtctggacccggcacctacctcccccgggcccacctcgccgacggcagggtggagtcgggctggagcagccgctctcctctgttacccccctaaccccctataaagaaaaagaaaaaaaaacagagagagagcgagcgaccggcggctcgacagccatggggcacggagggagctgcactcgcacaggcggcgaggacgattacgtgcgcccggtgaccgggtgcactttacggagttcatacagaagaacctgcacctgtaccagattaagaacaccataccgctgtgaaccgacgctgatgacaacttgacacgcgatgagctctccacagacctgcgggagagtgcatacgt

SEQ ID NO: 146070 - DNA, 3336 bp, Zea mays
  Clone ID: MRT4577_64732C.1
ctctcctcaattctcctctccccgccatttggctccgaaccctcacaacagtgcatcgtctctcctgtccccgccatttggttcggaactctcgcggcctcatctcctcctcgtcatcgtaacacccacgcttagagttcgtgagggtcgcccccaggggatctcgagacgtccgtttccaagagtggaccggctcggaggcgctgctgttaccttgggtggagctcggacctgcggatcagttggattctcaagggagacggtggtttctgatttcctttctctaagcataccaaatcctttgtctcgagtcgggagcaactggttttgggcgtcgcggagcacatggcttaagaataatttcttccagcccggcgacaaattcgcagttggattcagcatatgcattttttatgctgacataggatgtgctcaaccatccgtggactccctctagttgcacaaaccacctcagtgctctctctttcttcgaatcgggctaataatgggcagtgcttgccaagctggcacagacgggccttcccgcaaggatgtgttagggatagggaatgccgccttagagaatggccaccatcaggctgaagctgacgcagatgaatggagggaaaaggaagaggacttggccaacaacgggcacagtgcgccaccgccaggcatgcagcaggtggatgagcataaggaggaacaaagacaaagcattcactgggagaggttcctacctgtgaagacactgagagtcttgctggtggagaatgatgactctactcgtcaggtggtcagtgccctgctccgtaagtgctgctatgaagttattcctgctgaaaatggtttgcatgcatggcgatatcttgaagatctgcagaacaacatcgaccttgtattgactgaggttttcatgccttgtctatctggtatcggtctgcttagcaaaatcacaagtcacaaaatttgcaaagacattcctgtgattatgatgtctacgaatgattctatgagtatggtgtttaagtgtttgtcgaagggagcagttgatttcttggtaaaaccactacgtaagaatgagcttaagaacctttggcagcatgtttggaggcgatgccacagttccagtggaagtgaaagtggcatccagacacagaagtgtgccaaactaaatactggcgacgagtatgagaacggcagtgacagcaatcatgatgatgaagaaaatgatgacggcgacgatgacgacttcagtgttggactcaatgctagggatggaagtgacaatggcagtggtactcaaagctcatggacaaagcgtgctgtggagattgacagcccacaacctatatctcccgatcaactagttgatccacctgatagtacatgtgcacaagtaattcaccctagatcagagatatgcagtaacaagtggttaccgacagcaaacaaaaggaatgtcaagaaacagaaggagaataaagatgaatctatgggaagatacttaggaataggtgctcctaggaactcaagtgcagaatatcaatcatctctcaatgatgtatctgttaatccaatagaaaaaggacatgagaatcacatgtccaaatgcaaatctaaaaaggaaacaatggcagaagatgattgtacaaacatgcctagtgcaacaaatgctgaaactgctgatttgattagctcaatagccagaaacacagaaggccaacaagcagtacaagccgttgacgcaccagatggcccttccaaaatggctaatggaaatgataagaatcatgattctcatatcgaagtgacaccccatgagttgggtttgaagagatcgagaacaaatggagctacagcggaaatccatgatgagcgaaatattctgaaaagatcagatcagtcagccttcaccaggtgcaaaacataatatcagtgtcattactaggttattaacataacagtaagttgcatgctaacccattatgatttctgcaaggtaccatacatctgtggcttccaatcaaggtggagcaagatatggggaaagctcttcaccacaagataacagttctgaggccatgaaaacggactctacatgcaagatgaagtcaaattcagatgctgctccaataaagcagggctccaatggcagtagcaataacgatgtgggatccagtacaaagaatgttgctgcaaggccttcgggtgacagggagagagtagcgtcaccattagccatcaaatctacccagcatgcctcagcatttcatactatacagaatcaaacgtcaccagctaatctgattggggaagacaaagctgatgaaggaatttccaatacagtgaaaatgagccacccaacagaggttccacaaggctgcgtccagcatcatcatcatgtgcattattacctccatgttatgacacagaaacagccatcaacagaccgtggatcatcagatgttcactgtggttcgtcaaatgtgtttgatcctcctgttgaaggacatgctgcaaactacagtgtgaatgggggtgtctcagttggtcataatgggtgcaatgggcagaatggaagtagcgctgtccccaatattgcaagaccaaacatagagagtattaatggtaccatgagccaaaatattgccggaggtggcattgtaagtgggagtgggagtggcaatgacatgtatcagaatcggttcctgcaacgagaagctgcattgaacaaattcagactgaagcggaaagatcggaactttggtaaaaaggttcgctaccaaagcaggaagaggcttgctgagcagcggccacgggtccgaggacagtttgtgcgacaatctgagcaagaagatcaaacagcgcaaggttcagaaagatgacacgtaatttctaatacaacgtatcatcttcttcggcagatctgagaattaggcggttcttcctattgcgcatcttcgtcgacagatctgagaattaagtggtccttcccattgctgatagtagcccactgattcccaacgttagagtacacaataaataagactctagttgtcaatttctgtggttgactgcagatgatcaccctagcgctatggagtcaacaatgtaatatttatatactatgttcgtgccttggcgccttggcggtttgcaatcttcagtttcctttctgagaaaaaaaaaaaaaaaaaaaaaaaaaaaaagcaaactagcagcgtcgccattgctatattaatagctggaatcatgtagtagtagttcatccattcattcgaagatcgtgttccaaatcaacacaagtaggggtttgcttctcctctttccaag

SEQ ID NO: 146071 - DNA, 474 bp, Zea mays
  unsure (1)..(474): unsure at all n locations
  Clone ID: MRT4577_64733C.1
tgctggggatggngggcggacggaggtacgggctgggggggatgacgaggcgcgggaacaacggggacgggcccaaccaggtgcaggagaagctgatgcaaaggtatgctggtgggcatgaggggacaggggctgaccatncacggggacgggtncaacggccgaaggtacctatactgcgacgacggggacgagggggtagaggagagactacaacgaggagaggtgggggagggagacagcataggaggcaagaagggagcgcacggagggggacggggagagggagcatgaggggggaaagaggggagagcgtggggaggagggcagggagggaaggggaaaggagggggtgttagggagagggggagtgtaggtggggaggagaggggaaggggggaaagggggggggcgagagggacgcgctgggaaggatggggctggggggagactaggggggggggaacggggggg

SEQ ID NO: 146072 - DNA, 373 bp, Zea mays
  unsure (1)..(373): unsure at all n locations
  Clone ID: MRT4577_64734C.1
tttttttttttttttttttttttttttttgggtttttttttttttttttttttncccacagaacagtttgtcaatttacaaaattagagttttggtttgtttactaccttgaattaatgtcaatactaattttaagttacaaatcgccatttttttttttgggacctaaaaccaacattttttttttcaggcttgggggggagcaagcaaccttaaaaaatttgggttatgtgaaaacttttttttgttgaatggcaacaaaaaaaaaaggtttaaacaggtgggctttttttttacacattaaaggggggtttttacttttttctgggggaaaaaaaaaaaccttccatgttgggaaagtcttttttttgtt

SEQ ID NO: 146073 - DNA, 228 bp, Zea mays
  unsure (1)..(228): unsure at all n locations
  Clone ID: MRT4577_64735C.1
cgtccggngaaagccccccccacttcgcggagcgcccgacggagcaccacaagcgcgcagaaggcacaggcccgctcaacnaccncaagagggaggaccgcaaccacacgggcgcccacaagaccaacaaaagccgaggctcttttttctgcccggcgggccaccagggaagcagcgcatcacggacaaaacaggggcagggcggcacgggggcggcaccgccaccgc

SEQ ID NO: 146074 - DNA, 306 bp, Zea mays
  unsure (1)..(306): unsure at all n locations
  Clone ID: MRT4577_64736C.1
caaaagccggttcgggcccaaccaaaaccccttaatccccgcccgggccttcgacctccgcaggtacaaggagctccggaaagcctgcggcgtggcggcggccccgccgccgtttcaggcccggaccccttgcccggcccccggcgcgcctcgggagacccggcatngccactcctactgtcatngccattgatcttggcctcgctcggttcattcctttctttatttttttttttgatggtcatgccccattcggtgggggatgatgattcctgtatccatctgatgcgcgcgcggatgcaaaaa

SEQ ID NO: 146075 - DNA, 396 bp, Zea mays
  unsure (1)..(396): unsure at all n locations
  Clone ID: MRT4577_64737C.1
atcacaactgcatcaaaagggaccaactgacttgctactggatcgctctttctaagaggaatacactgccaatggttgcttgtagtgctgcctgtcatgtaaaagaatgcttctaggtcaaatgggtcattccctctctatcttttgcatacatccaacatgcctataatccaccactgttcgctcactagctacccctatactgttatcccggcttatttacagtaaatacggtgggaatttccttgatcanctncctgggaaatggcacggatctaagtactgtggccattgtactgcggacttgggaggaacatatnatgagactgctccaacaaaactcgctgattttattggaagtccagcccatgcattcatctatatgtggattatgct

SEQ ID NO: 146076 - DNA, 343 bp, Zea mays
  Clone ID: MRT4577_64738C.1
acgcccacgctagcgaaactacgtacttgacaatgtctttctctccgatcatctcctacaggccggcccgttcagaccataagaggggcagatccccgatcgcgacccacgcaataagcaacttcacctttaaaattctcttattcgattttcgtgcgcaggctcccacttatcctactcctctgacttaatttcacactcttgcactacagtcaacctcaacagcgtcttctttatcctctgattccgtcaaatccatctccttggctctcgcctcgatggattgtatacatgcacactgacaatcttcttaatgctttcatacgcgtaactcattaaatca

SEQ ID NO: 146077 - DNA, 433 bp, Zea mays
  Clone ID: MRT4577_64739C.1
tctttggttcttttttttttttatgttttcttagttgtttcttttttttttttctttttgttttcttctttcttttttttgtggtgtaccctgctgaagtctttgttgttcatctgtttcttgccttttgacccagccgactggcgctctgtggggtgcgtattgtggccactgtagagaggctcacacccgacacgccggtgggaacaaagaagctgtcttgtaacaaaaacaatcgctgtgagtatacccacagtcttgcgctaaataggagcagccgattctgcttcgccaactcgtgagtgatatcctgcgccctgtatgttgagtacaaagccgactacttatacaacagcaattggtgacattgggccaactaacttgggggcatactaccagcttatggcctcaatccaccatcagggcgagccag

SEQ ID NO: 146078 - DNA, 824 bp, Zea mays
  Clone ID: MRT4577_6473C.1
ataacaactctgaccgaaactgatggatactgcctgtaagcatatgcatttcttcaactgtttgctacctttggtatttttttctgaatttaatgaagatgaactttgcaaacttcttccttctgtcagtcgacgtcgtcaaacacctgagctttgccgactgcttgggttgtcacagaagatgccaggtgtcattggagttctggtggatagtgcaagaccaattgatgcaattaacttggcctacgcgtttggactcactgaacagtttgagccagtgcaattgctgaaagcatatctgagggaggtcaagaaggtgtcacatgccaagaatggaaaaatgtctcctggagcacagaatgagatgaatgagcgtgagctgtctgcactgaaagctgtgatcaagtgcgtcgaggagcacaaactggaggagcaatatccggtggacccacttcagaaaagggtgattcagctggagaaggccaaggcagacaagaggagggctgtcgaagccgccaagccacagtccaagaggccgcgtgccaacggatcgctctatgcaccccgtgtcaccagcttccccgagaagagcttctaccaggcaacaccagagaggcacccatacccttacgaaaggcagtttgtgtacggcgccgaggcccaccaccaccctacgatgatgaacgcggctccctacaccatctcacccgcccacacgccgtactacggtaatggctacccggtgcagtaccaggtaccttatatccactaatgggggagagctacaatggctcttccctacactatccctagcttttaccttc

SEQ ID NO: 146079 - DNA, 316 bp, Zea mays
  Clone ID: MRT4577_64740C.1
gttctgtcttcagtggtgcaaacaaaattggtgatggtggttttggttctgtcttcagtgacgcaaataacgactttgtgctactatgctgaggaacaagctttgtgacttattttggatttgagcagcacggtcataacattgctgatgccaagaaagatgatcctctatgttcactacatcttgcactatgtcctgcgtgttaccggccaaacaaaacaccttggagtgcagcgacgacaggaactacctctacaggaaccggtttaacgagtaatttgacgacgcgtgggtggagcagacctggtgggaagta

SEQ ID NO: 146080 - DNA, 1877 bp, Zea mays
  Clone ID: MRT4577_64741C.1
cggacgcgtggggcacgccccagttctgtcccccccgacatcctcgcccatcgagccgcgcacgccccatgtcgcgcttccccaccacgcccgccgcacacgccgcaaaccgtcgatggaaggtgagcggggcgtggccgcccctggcatggcgctatcaaaataggccctccgcgcacgcctcgctccatcaatggaaggctccatcaatggaagttttacagattgtcttgtcctactgcctactatctgccttgaggaagtaccaaggggtttccgttctgtcttcagtggtgcaaacaaaattggtgatggtggttttggttctgtcttcagtgacgcaaataacgactttgtgctactatgctgaggaacaagctttgtgacttattttggatttgagcagcacggtcataacattgctgttctatttcattcatatgttcgggtgaatcttttctctagcaagatgccaagaaagatgatcctctatgttcactacatcttgcactatgtcctgcgtgttaccggccaaacaaaacaccttggagtgcagcgacgacaggaactacctctacaggaaccggtttaacgagtaatttgacgacgcgtgggtggagcagacctggtgggaagtacaaaacagcatctactgaataaggtgaaggccacaattatgacttgttcgaggaaaaaatataaaaagattccccttccaaggctctgtacagctgttcagccatttctcccttcgatgttggtgtttgtcactgctctgtgtgttggatcaccattgacaataaatatcaaggttgttttgtcaccttttggattaaccatattgttgctccttttttcattccacacctcatcttctgtagctggttatcatcttgctggttcttggtttcttaagtcggatgatgtaaaggcactacaaaggacaatatcttttgagacaggcatgcaaagtagccttcttgctcttgctttagtagatgacgaaaaagtagaagttgttcgagctacggtttaagatggtgtgacgagtggctgatttcgcgaacctgcagataagacgagcggctaaaaacactatcggatattgctttctatgtgttttaaaatataagtatgaaaaacatagcttttctagcttttacaacaccagtttaccatacaaggcatagcatatattttgaatagattcactgattatttacagatttgactcgtgtttcgcttttgtctattttcaaggcataacacatattttgatgaaaaatggaataccttaatgatatgttgatgaaatggtcttttgctaattgaatctactggttcggagctgtatggtgcaacatcacattatttgaagtgtgatgctatcatttttagcttagctactattaagccattgttattttttggcattattcaaaccagaccagtagataaaaactgtattatcaatatggcttacttgattgctaggcaagcagttgattgcacctgtctatggctctggtaagcagcttgtcacacatattttttccctccgaacatggatatttttttattattatatgcttgcaatgcaggatatgcaccctttgaaacctgatgagatggttgaccatctgaaacaaggacttggaaaggagggacatattttcacttatataacgttctgagcaaaatagtagtgttttagtattgcactcacctataacagtataacacttatttgtacataagttatctgatattatatgtttccgttgcaacgcacgggccctcccctagtggaaatatatgtcccgtacaaggttcccccaaacaactttcggtatcaatacaactcgtcctgttttttc

SEQ ID NO: 146081 - DNA, 396 bp, Zea mays
  Clone ID: MRT4577_64742C.1
atggtttacaaatttgggtattacacacgggctgagtcttctccaacacgctccaaggtcctccccctacgacacgggggctgggtcccacacatcgtgcaagatggcccaggacagagggagccaaaaccgccacgcgtgatgcgcgcaactgaccagcggttgcaagcattcctccactttcgcccagaccagcgggtgaaagggtggaccgccatacagacggcatgcaaccgcaccgagggggcgcaccctttcgacttcaacgcgtccagcatggaggcccaggcccacacgtcatgtaaccggtgcgccggttactacatgcaggaaactgcaccgccgcttgcgccagtgccgcgcctcctcgactgcgaaatcagtgccgcgacttga

SEQ ID NO: 146082 - DNA, 406 bp, Zea mays
  Clone ID: MRT4577_64743C.1
ctaaaaaaaccggaaatttctcgtgttttgacgcgcccactaaatctatacatacattgatcatatttaccaacccatcacttgtttacctaatattcacttacacattgcttcaacatttatatctcaaatatattaaaacaaaataaaggatatttttataaaccaaacctttcttttatgatcaaaactcacaccacaattcccttattaaaactcaacttaaatgatcaatttcaatcttcctcaaaaatcttaaatttatcttcccccccaaatttcttttcttccattcccaccaatctatttaatcctcactaaacaaaatcctttttattaccattacttttcttcccccaccaaaaattacaacttttccttttaccctttttaacctccctatttt

SEQ ID NO: 146083 - DNA, 329 bp, Zea mays
  Clone ID: MRT4577_64744C.1
aacagattgacacggtgggaggaaaaagacaatggtcagcaacttactcggagcagagattttttaattgtggtacccgtggtgctgttcaataagagagcatcatagtgttgcataaataagtgtgcttatgattcatatttgctcattgcaaattggagttatttgtgttgtttctttgtatactcaacaaagagatgttaaccacttgtgtttatctcattgccacactcagttatgtcacgtaacttcattttcatgttttattttgttccagcaatgtagtttatctttggtttaatagctctttctttgtaaaacaacatttt

SEQ ID NO: 146084 - DNA, 335 bp, Zea mays
  Clone ID: MRT4577_64745C.1
tggaattcggcacgaggctccttcgttcgcaaggccagggagcacgtgtccctactgtcactgcgtccgatgacccactctgcgctccgatccttggcttacgagctcccatgtgggacccaccatagttatggcctggcggcaccacctgcctgtttgcttctaccctagctcgcaccgagggagcacacttacctttagtacatgatctgcacgagtaggcacacatagtgtagcccaaatgttgagcccacatccaggatcgcacaaaggaactggtttgagtatgacttgacgttcctgggcagcacttattggtaccaaattgcaggtgc

SEQ ID NO: 146085 - DNA, 757 bp, Zea mays
  Clone ID: MRT4577_64746C.1
cttcgtgctcgggtgcgccaggtccacggcggcccagctgacgtccccgtcctgcggctcggccgcgcgctacggggtgcggctggtgcaggacgccaaggcgtgcgtggacgacgactacgtgcgctccatggtcgacctcctggaggagcggcgcggcgcccgcccggacctggcggccagcctggtgatctcggcgtggacgcgcctgggcctcgaggacctggacttcggcgccggcaaggccgcgcacatgggcccgctcaccagcgagatctactgcgtcttcctgcccgtggtcggcgacccgcacgccgtcactgtgctcgtctccgtcccgcaggccgccgccgacaagttccagcacttctgcctcgggttcctcaaggacgtcgaagtggacgcgaagctcacctgagctactatggctatgatgtatgatccagcttgctagctcgtcgatgagtctcagtttgattttcccccgtgcattctgctttctgcatgctatatgagaaaatgatggagtattatgctaattactcccggtcaatataattgtgtcgaacggatgaaatgaaagatcgtctggtgatgatcatagtcatgcatgtatcggctgcggtccgatccagtagtaatatcaatcaatcaatcggtgatgaggtcctttttgtggtgtcaaaaaaaaaaaaaaaaaaaaaaaaaaaaaaaaaaaaaaaaaaaaaaaaaaatccgagggggggaaacggtaccc

SEQ ID NO: 146086 - DNA, 303 bp, Zea mays
  unsure (1)..(303): unsure at all n locations
  Clone ID: MRT4577_64747C.1
ggggngnttntggngagnagtgtgttgtgtgggtggagnanggtagnaggggtagaatgtgtnntggtgtgttgtgtnannatnnatatataataatnttatntatannngaaaaaaaaaaaaaagaaaaggaaaaaaaaaaaaaaaaagggggnatggagatgaagnttttgttatttttagtgagggttaattggggggttggggaaatnatggaaatagatggttnatgggggaaattgttatggggtgagaatatgagagaagataagagggggaaggataaagtgtaaagaatggggg

SEQ ID NO: 146087 - DNA, 450 bp, Zea mays
  Clone ID: MRT4577_64748C.1
ggagtatcacaaaacattgtgagcgctcaaccagtatcgagttgttgataaggtgacgacatcaaatatcttccaaaattcaaaccgggacaacagattgagctactacatctcgtacatgagcgtggactcaatttctgtcgcctgaccaaacacaactgttgacactatgctcgatggcgacgaagaacggccacaattgtgtgttatagaccttgaatacacggcctgttcctcatgccactagccttgtacaacttgcttcccttgtaactcacatacggctaggtgtggcttgagaagcactccaggagccttggcaaagtgcctcactgcctcacaggcattcttggggcccctaaagaagacctttttcttggcatgtggagcacgaagagcaagctggtgaaatgtgagggactcaccctcacgacgtgtcggacgcatggg

SEQ ID NO: 146088 - DNA, 831 bp, Zea mays
  unsure (1)..(831): unsure at all n locations
  Clone ID: MRT4577_64749C.1
ccggccgggatcctcgacctcaccaccaaaaaggacatcactagcctttcatcagggtatcctcaaccctgaaaagatctgaaccccttcgtactttgaataaacaaacctagtttaatccgaataaacccgcccaccatgtcgcaacacgctctatccgaccagcaggtcaacaatgagctcagcaagatgacggcgttcatcaagcaggaagccatggagaaagcccgcgagatcgagatcaaggccaatgaggagttcgagatcgagaagtccaagcttgtccgccaggagacagacgctatcgacagccaatacgagaagaagttcaagcaggccaccatgtcccaacagatcacccgctctaccgtttccaacaagacgcgactcaaagttctcggttcccgccaggagatgctcgataacatcttcgaggaggctcagaagaagctcgccgagggtgccaaggataaggccaagtaccaaaaggccctcaagggtctcttgctagagggtttctttgctctcaacgagcctgagcttcaggttcgtgcgcgcaagaaggactacgacgttgtcaagaaggctattgaggaggccgccaaggacttcaagaaggagcttggaaaggacatcacagccaagattcaagaggatgatcctcttccagagggaatcgcccgggggagtgtttatcattagcggaagcggaaagattgacatcgacaacaccttcgagnccagattgaagtnntgctggagagtctgctgcgcctgcggtgcgcgaggctctattcggcaagacccccaccccgcagtcacgactaaact

SEQ ID NO: 146089 - DNA, 422 bp, Zea mays
  unsure (1)..(422): unsure at all n locations
  Clone ID: MRT4577_6474C.1
nnncatcntcttatcttctatatactttnccctacctctgcagcgtgggccgtatccaaagtgggggggccaattataaccacnacaatcattgncaanatcaatattnnaaataactnttttntaatgatcattaggctntttgcctgngtctnnctttaaagngaggattnnnngtttngtttaaatttatnnnnnntttaatgngngngnttacataaatatattttttaatttcccacccgtttaaccttttatttattatcantnnttatttttttcattggtctttanttctctttttctttattttttnaantcattttattctttttcttagntatttttttatatattaatctttattctccttttatatataatcatattatatttctactataattattttttttaatatt

SEQ ID NO: 146090 - DNA, 2179 bp, Zea mays
  Clone ID: MRT4577_64750C.1
tgagtccattcccacgcgtccgaataggcagaccttggtgtctgaagacattgtacacaatctgcttcatctcataagcaacactggacctgcaattgagtgtaagttgctccaggttttcgttggtctaactgactcttcgacatctgtacaaaatatagttgatgctatcaaaagttcaggtgctattgtcagtttaattcagtttgttgaagcacctcaaagggaagtacgcatgaattccatcaagctcttgaataacatatcaccttatatgggtcaagaacttgctgatgcttttcgtggaaacttcagtcaactaagcagcttggtcaaggtaattgttgataacaatggtatttctgaagagcaagcagctgctgctggccttgtagctgatcttcccatgggggattcagtcctcaccagacgtcttcttcaagatggggcattcgcagcagtcatttcaaaagttttaagaatccgacaaggggagattcgtggggggcgttttgttaacccattcctcgaaggtctggttagaatagtctcccggatcacatttgtcttggatgatgatccggatatcattgctgttgctcgtgattacaatcttacttcactcttcactgatctgcttcagatgaatgggcttgacgtagtccagattgtctctgctgtttcactagagaaactctcgcagcagtcaaaacatcttacgaagatactgcctgctcccagcccagggctgtgcttttcaatatttccatgcctcagccagaagactgtagcaactggggtctgtagagttcactgtgggatttgttccgcaagggagagcttctgtctcttggaggggaaggcagtggagaagttagttgcctgcttggataataataacgagaaagtagtcgaagctgctctagcagcgctgtccactttactggaggatggagtggacattgaacaaggtgtcatggtgctgtgtgatgcagaaggaatcaacccgatactcgcggtattgtgcgagaacagaaacgaggcactgcgccagagagcggtgtgggcagtggagagaatcctgaggacggacgaaatagcgtatgagatatctggaaaccagaatgttggtacagccttggtggaggcattcaggcatggcgactctaggacaagacaggttgcagagcgagcattgaagcatgtagataagttgcccaatttctctgggatattttctaagatgggagcacaatgaccacgttccatggaagtactcgtgttctatttgacatgaggcaggcgcagatgaacacttgtgttcccagcaggccttcactggttttgctgactcgcactccagctagatgttgtagcgatctgattggtggaagaagaattaagtattgcacgtgttgtatagtgtgtatttgtacctgtagacttgtctgtactttcgagattggtcagattcatagaataggttgctatccctgttgtgtggagacaatacataatgcataaccgccagcactgggtggaaaaaaagggaagaaatgtgaagtcgttgcgtcagatatgacatggttttctggtgtatgtcttaatgtctacagaggcaaagtgcaaaggacggtttggtgcggtgtgggcagtggagagaatcctgaggatggatgaaatagcatatgaaatatcaggaaaccaaaatgttggtacagccttggttgaggccttcaggcatggtgactataggacaagacaagttgcagagcgagcattgaagcatgtagataagctgcccaatttctctgggatattttctaagatgggagcacaatgacgacgttacatggaagtagtctaattctattttgacacatggattgcagatccacatgaggcacagatgaacacatgtagattggttttgctgacccgcagatggtggtagcgatccgattgatcgaagaagaatcgaaacattgcacgtgttgtatagtgtatatttctacctgtaaacttgtatgtattttttagattggtcagattcatagaataggttgctatccctgttgtgtttagataaatataaataatgcataatccccagctctgggtggggaaaaagaaagaaatgtgaagtatttgcacgtatttaatcatggttttctggttg

SEQ ID NO: 146091 - DNA, 349 bp, Zea mays
  Clone ID: MRT4577_64751C.1
cttccccttttctctcttttttttctccttcctctcttcccccgcccgtttttttttttttttaaaaaagggccacccactttttttttggcccggatggaaagtccctaaaattttatcacccatttggttttgtccattccaggcatttggccgggttctgcccatttaagaaaaggggggaattgccacttgaaataaaactacgtcgacctttcccctgagcctgccggggggcgtccctagttccgtacaggtaaaaaccacccctcggtgttttttggtgggcccccaaaaaaacaaggtgattcattcttttgccctacaaaaaaagaaccttgcccccccc

SEQ ID NO: 146092 - DNA, 209 bp, Zea mays
  Clone ID: MRT4577_64752C.1
ctcgtacaaatcattgtgatcacctcaccttttccagcaacaccgaaacccaggcttttagaacatattctactgtccagtcgcaaactcaaccataatgtctcggacaaacaacaacttattatactcttcggaagccaaccacgatcatctaaacccgccctatctctcatgctatttacaaatagcatatgcaatggtctgctccc

SEQ ID NO: 146093 - DNA, 421 bp, Zea mays
  Clone ID: MRT4577_64753C.1
gtgattgacagaggcgagcccagtaggagcaccacgagagacggaaccagttgagatgacacaccaacacagtcccagtcaatccactgatcctgtagaacaggaagtatgacaatccgaacctgcgactgttactctcaaggttgttcgtgttatccaagatagcacgtattacctgctggcaatgcttgtccagctcgaacgtaggcattgccttaccttacatgtgcttgcgaccttacgagctgtgacctgatcttgatgaacatagcgtagcacaagcggcaggccagctccttgtaggccggttcgatgaaccgggtgttccacgcaccatgacgctgagaagttaatcaccatcatgttgctgttagtgtcgagggccgtccactgctcattaaaccgtgtgcttggagtgcgc

SEQ ID NO: 146094 - DNA, 877 bp, Zea mays
  Clone ID: MRT4577_64754C.1
cattgggtacctcgaggccggccgggccctttctcacacttccctccctccctccctttcctctcctccccgctccatggcccccgcggcgccagcgggcctggcctccgtcgcggtcgcggtcgcggttgccgtgctcgccgccgcggcgtcggcggccgtcacctacgaccgcaaggccgtcgtggtgaacggccagcgccggatcctgatgtccggctccatccactacccaaggagcgtccccgagatgtggccggatctgatacagaaggccaaggacggcggcctcgacgtcgtgcagacgtacgtcttctggaacggccatgagccctcccgtcgacagtactacttcgagggtcggtatgatctggtgcacttcatcaagctggtgaagcaggccggactctacgtgcacctccgcattggcccctacgtctgcgccgagtggaatttcggtggtttccctgtttggctcaagtatgtcccgggcattagctttaggactgataatgaaccgttcaaggctgagatgcagaatttcaccacaaagatcgttgacatgatgaagtccgaagggctctttgaatggcagggagggccaataattctttcccagattgagaatgaatttgggcccttggagtgggatcagggagagcccgccaaggcctatgcgtcatgggcagctaacatggcggttgcgctcaacacaagtgttccatgggtcatgtgcaaagaagatgatgccccggatccaattattaatacttgcaatggattttattgtgactggttctccccaaacaaacctcacaagcctacaatgtggactgaggcttggacatcttggtatacaggattttggtattccagt

SEQ ID NO: 146095 - DNA, 257 bp, Zea mays
  Clone ID: MRT4577_64755C.1
tattcaattcagctgttttacaccgcattacatacccatcattcattaagatccgctcgtaaccatcctcaaattaatataccaccttctctacataaaatacagatgccacttccttctttaccttatctctaacacgaaagagtttgaattacttgctcattctataccatgtcttgcgccagactcttcaacctcaccaccccataaaactctcctcatgttcttgctaaccctttccattccctgccttatcc

SEQ ID NO: 146096 - DNA, 857 bp, Zea mays
  unsure (1)..(857): unsure at all n locations
  Clone ID: MRT4577_64756C.1
cctcgaggccggccgggccgggaatgaacgcaccatgtctgaaaagcatgtttgacacgaacccaaacctcattcaagacggcctgcggcaccgcgatgctatacctctgatcctgatccatgatggcggcggcaccatatttagctactacatcctcgacgacttatgccgaaagctcctaggcattgccaacccacgattcaagtccggtgtcccctgggctggtggtctacacgagatggcaagcaactatgctcgttttgtggcaactgccatcttatccgggcctgttatcctcggtgggtggtcgttgggcggactcctcgcactcgagaccgcttatgtgctttctcaatcgtatcccgatgtgagcgtggcagggcttgtccttatcgacagtgtctgcccggtgccacccaaggccggatggggtccctctgaggcgcgcctaaccgaacgtcgcatcgagtggccttcgactacggcaccggcaaccaaggtgtgtgtggaaaggtgctttcgcgaggcgcatcgaatggtgcgtgactggaccgttccggtnttttcatacgcccccggccgtacttatccggtgccgagacccagcccccgccccagacgacggaatactctatgtcgacctctatcgcaacgattgcaaactgggctgggacaactactgcaaagatctgttctgccaggttctagacattcaaggacatcactataatgtttttgccctggaccacatcgaaatcatcactggtatgatcaagacggcttgtgaaacaatagaaaattcatggncctcgtcgctcgcaagatagccttggtagtggaacagaggcattggata

SEQ ID NO: 146097 - DNA, 231 bp, Zea mays
  Clone ID: MRT4577_64757C.1
tgggttgggttattatttatttaattggggggccccgatgacaccgacagggatacacaaagaggacggaaagattaagactgaacaaccccaacaacgacggtattattctgcacgcgacactccagaactgatgacaaccaaaaggactcaagaaatacttgttaaagaggatgaggtagagatttacttaaaagggggggccctatacacaaagacgcaacgtaaggc

SEQ ID NO: 146098 - DNA, 279 bp, Zea mays
  unsure (1)..(279): unsure at all n locations
  Clone ID: MRT4577_64758C.1
cttcccctcnncctcaataactcttttttttccnccaccatatccctccctttagaaagagtttcttataacaaccatcccaccccacatcccccattcatctctcacatatactaccaattactactccctcttcctttccccctacagcttatccacaatttttttttaataccactacatcacaaacaaccctctctacttcctcatcttccacaccgaccctcactttatcaacaactacttcctaaacaccatttacccaattatcccttctca

SEQ ID NO: 146099 - DNA, 155 bp, Zea mays
  Clone ID: MRT4577_64759C.1
cataaatataaaccaaatgaaacagctttctgtagcagagactttcttcatgcaggcacatacaggccaggacgcaaaaggccggtttacttactgggttatcaggcttcagcatgccctgaccaaaactcgaggcccggcccacctttatgcag

SEQ ID NO: 146100 - DNA, 315 bp, Zea mays
  Clone ID: MRT4577_6475C.1
tttacgagtgcccggccttttttattttgtgtttgtttttccggatcaggaaaaagaagcaatgtattaatgattaactaacaataaagaattactaggcataagcaattactccgcccacatcgttgctttgatttttaacagaccacccaaaattgttgactttagtttattatacggcctcgcagctcttttgtgatgtccaaaggtccgaatggaccacagataggcccccgcaggtggtaaggggccagctctaaggaacgtagcatcagtggctttgtcacctaccagtgacttagagttccatatcga

SEQ ID NO: 146101 - DNA, 605 bp, Zea mays
  Clone ID: MRT4577_64760C.1
ggactatatggcactggaggcgtctttcttagagtgattgaaaatacaatctacctcaaaactaataacatcgtcagagggaggaagatcagcttgcgtattggtgaagagaggatccttggttgaaagtgatgtttctccatatctttataagaatgcgccatcgctggggatgggtacgatgatcaagatcgtcgaacgacgaagggcaccgaggtgttcgtcagcgggctgccaatgtcgaccacggaaagcatgctcctctctcatctccacaccgtgcagtagctgctgcccgtagcatgtaatgcaatggaataagttatcaaggcaactaacactaaacatagttcttgggctccttggcagcgtcgaggcatggtatctgcccacgccattgtcagggcctcatgcgggtactcatgctcgacctacttcatcgaagatgtggtatggacaaatatacatgcgactttccagatgaagtgaagagaccaaatgtggatgtcaatcaatctctagatgaaggaatgaaaggaaggagctaagttattgcactggatgtaacggggtctagaaaaggtgtcactttgatgccatttatt

SEQ ID NO: 146102 - DNA, 639 bp, Zea mays
  unsure (1)..(639): unsure at all n locations
  Clone ID: MRT4577_64761C.1
catcgctggggatgggtacgatgatcaagatcgtcgaacgacgaagggcaccgaggtgttcgtcagcgggttgccaatgtcgaccacggnaaagcatgctcctctctcatctccacaccgtgcagtagctgctgcccgtagcatgtaatgcaatggaataagttatcaaggcaactaacactgaacatagttcttgggctccttggcagcgtcgaggcatggtatctgcccacgccattgtcagggcctcctgagggtacccatgctcgacctacttcatcaaagatgtggtatggacaaatatacatgccactttccagatgaagtgaagagaccaaatgtggatgtcaatcaatctctagatgaaggaatgaaaggaaggagctaagttattgcactggatgtacggggtctagaaaagctagcagtgcaagcatagaacctatgaaacatggatacttggttacaaaattcaactttcagtcaagttttgttcaacaagggtctgattgagacttccatgaaactgatcgatttgtcgttgctgtcatgtatgtgaacttatggtttagaagcagctaagtttccaacatgttacatggtanggaatgtatttgctaacactatttgctagcacta

SEQ ID NO: 146103 - DNA, 3048 bp, Zea mays
  Clone ID: MRT4577_64762C.1
ggggtcgccgccacgcgcccggtcgtcgcctgtccgctggacgaggtcctcgtgcagtacgtgctagaccacttcgtcacgctgaggttcgtcagccccacgttcaccgtgctccctggccttatccctgcaagatcctaagcggaggtatatattaatttacctgcgaggatgtggtgtctgcaatcacctctctttctttctttgtgctgaccataataagctactcccaggatggagtcactttgcgcaatttacaatagctctaattaataaagaccctaagaaatctaagtattcagatacactgcatcggttttggaagaaagagcatgattaggggtgttaaaagtttatggagctgtcagaattacatgatggctttattgttcaggattctcttaccatcaaagcccaagttcaagtcattagaagatagaccgtccatttcgttgccttgatggtcagtaccgaagggaactaattagggtgtatctatcaaatgtggaacaaatttatcggtgttttattgatgaaaaagaaggacgttcagcaggctgattgaggataaactcgggtggtccagtttcagtggattctggctagccatttttcatctttgattttatctgaacagagacttgaactcgctatcaactttcagtagacctgctaaggagcgatctccgtccaattatcagccagtgaatttatgccctgtaccatgaatagagatagtcaagaaattagaccatttcaagttcagcgagagggactatatggcactggaggcgtctttcttagagtgattgaaaatacaatctacctcaaaactaataacatcgtcagagggaggaagatcagcttgcgtattggtgaagagaggatccttggttgaaagtgatgtttctccatatctttataaggttaaggaagagcagttggggttcttgtgaaacgtagattgtatgaggtctataaatttttatgctctatcattacttgaatgaatcatgtatcactggcaagcaacttcagctcatactctgtaggaattctaattcacattgcattctatttaattgtttgttttatgttccgttcacacgaccatgatttttgtttgcacaaatcactatatatatcctcgttgaattaaaagtccagctttgtgtcataagcatattgtctatttccccttttggctattgcaaatagcaagtatagtttgttgtttaaatgttagtctattctgtttcaagaaaaaaagaatgcgccatcgctggggatgggtacgatgatcaagatcgtcgaacgacgaagggcaccgaggtgttcgtcagcgggctgccaatgtcgaccacggaaagcatgctcctctctcatctccacaccgtgcagtagctgctgcccgtagcatgtaatgcaatggaataagttatcaaggcaactaacactaaacatagttcttgggctccttggcagcgtcgaggcatggtatctgcccacgccattgtcagggcctcatgcgggtacccatgctcgacctacttcatcgaagcaccagcttattgagacttctgtcttagatgtggtatggacaaatatacatgccactttccagatgaagtgaagagaccaaatgtggatgtcaatcaatctctagatgaaggaatgaaaggaaggagctaagttattgcactggatgtacggggtctagaaaaggtgtcactttgatgccatttattagtgctgttgtacaaaagaaaaggttgaattgatgaattcatgggctaccttataaaataaaactatattgaattcatgtgatcttgtgattttatgtaagactatcctataaataaaaactatgatttcactgtcttctctatgttgtagctagcagtgcaagcatagaacctatgaaacatggatacttggttacaaaattcaactttcagtcaagttttgttcaacaagggtctgattgagacttccatgaaactgatcgatttgtcgttgctgtcatgtatgtgaacttatggtttagaagcagctaagtttccaacatgttacatggtagggaatgtatttgctaacactatttgctagcactacaagttccgtatgccctatgtgatagatggaaagattgaatgaagggctgtcattatttgatgcaatactgattgttccaatgtttcaaattgtttggaccttcttctctatttgtacaggatttgtttactttcaagaatatcaagtaagttcttgtttattataatcggataatgaagtgaatcatgcatttcctaattataaactgatgattctgtttttctgctgtcaggtatttgatacgctcaggataattatgtgtgtgttaggcatgacatttgtctttgttgggatctccttgctagcacccgatgacagtaaaggaaagatggttcaagcacctccgaggactccataattgacatagacagaaatggaaagatgccgatggaggagacagacacagatgatagcatctcctttgttacttctgtaaaatctgcatgctccatgtcccttggccttggggagagcaccataagcgcttcatcggtgcttgccatgcttatggtctcgtcaagaacgaacaaccggcttcagaggaatcggaaatgaccgtccaaagtatgcccctttaagaaccactgattggagtaacctatagccgatggtaatatataggtacacaggaaaggtctttgttttttatgttgcctagcgaatggcagtgaagtttttttgttgcttccaaaggcacaactgtttgttgtgatcgtagctagctataacacgagtgtatagttcaccgttgtacccttcaaaacactgtccatacctagctgcatatacatgtgtaagttttagaatacaacaaatttttggaagattaagattagatggagtagcatttgtcagcttttagcttgttgctactgaaatatgagttgaatttgggctattatttttgtgtttacatttgtaaaaacccaa

SEQ ID NO: 146104 - DNA, 2175 bp, Zea mays
  Clone ID: MRT4577_64763C.1
gtcggttaaaccggccaatcctcctctcaagcctcgacgcagcacggcgcgccggcgcgggacgacggcatgacgccgccgtccatcttccaccaccatcgctgcctcgtctccctcccctccgcttccccgacctggacctcgtcccgtcgcctgtccgctggacgaggtcctcgtgcagtacgtgctagaccacttcgtcacgctgaggttcgtcagccccacgttcaccgtgctccctggccttatccctgcaagatcctaagcggaggtgacacacactgccccccgtaattctaaatcaagcattctcttgacgaagtctatgcggcgtagagcccgcccatgctctttgcttgctctagagctctcgtaccctgcattgattctgctcatcagtctgcatctttcgtcattttcatcatggatcatcatattgcaggtatatattaatttacctgcgaggatgtggtgtctgcaatcacctctctttctttctttgtgctgaccataataagctactcccaggatggagtcactttgcgcaatttacaatagctctaattaataaagaccctaagaaatctaagtattcagatacactgcatcggttttggaagaaagagcatgattaggggtgttaaaagtttatggagctgtcagaattacatgatggctttattgttcaggattctcttaccatcaaagcccaagttcaagtcattagggagaagatagaccgtccatttcgttgccttgatggtcagtaccgaagggaactaattagggtgtatctatcaaatgtggaacaaatttatcggtgttttattgatgaaaaagaaggacgttcagcaggctgattgaggataaactcgggtggtccaggttagataaacttacgaatgtttcagtggattctggctagccatttttcatctttgattttatctgaacagagacttgaactcgctatcaactttcagtagacctgctaaggagcgatctccgtccaattatcagccagtgaatttatgccctgtaccatgaatagagatagtcaagaaattagaccatttcaagttcagcgagagggactatatggcactggaggcgtctttcttagagtgattgaaaatacaatctacctcaaaactaataacatcgtcagagggaggaagatcagcttgcgtattggtgaagagaggatccttggttgaaagtgatgtttctccatatctttataaggttaaggaagagcagttggggttcttgtgaaacgtagattgtatgaggtctataaatttttatgctctatcattacttgaatgaatcatgtatcactggcaagcaacttcagctcatactctgtaggaattctaattcacattgcattctatttaattgtttgttttatgttccgttcacacgaccatgatttttgtttgcacaaatcactatatatatcctcgttgaattaaaagtccagctttgtgtcataagcatattgtctatttccccttttggctattgcaaatagcaagtatagtttgttgtttaaatgttagtctattctgtttcaagaaaaaaagaatgcgccatcgctggggatgggtacgatgatcaagatcgtcgaacgacgaagggcaccgaggtgttcgtcagcgggctgccaatgtcgaccacggaaagcatgctcctctctcatctccacaccgtgcagtagctgctgcccgtagcatgtaatgcaatggaataagttatcaaggcaactaacactgaacatagttcttgggctccttggcagcgtcgaggcatggtatctgcccacgccattgtcagggcctcctgagggtacccatgctcgacctacttcatcaaagatgtggtatggacaaatatacatgccactttccagatgaagtgaagagaccaaatgtggatgtcaatcaatctctagatgaaggaatgaaaggaaggagctaagttattgcactggatgtacggggtctagaaaaggtgtcactttgatgccatttattagtgctgttgtacaaaagaaaaggttgaattgatgaattcatgggctaccttataaaataaaactatattgaattcatgtgatcttgtgattttatgtaagactatcctataaataaaaactatgatttcactgtc

SEQ ID NO: 146105 - DNA, 1591 bp, Zea mays
  unsure (1)..(1591): unsure at all n locations
  Clone ID: MRT4577_64764C.1
ctcgaggccggcgggaaaatttttcaggatatctcgaccgtggccgggatcggtgccctcgccctccaccgcagtctcccactgcccctcccactgcggcgggcgcctcccatcgtgcgctccctcatggccttccccaccgatccggcagcggtcgaagagaaggtggaagcggaggacgaagccctccccgcggccgtcgccggcgccggggatcggggcgatgtgagccacgaggagtggcggcgctggggcacctcctcgccgctcccgggcgcggtggccggtgtaatccgcgaccttctcgagatggaggccgcggccagcgagagaatgcgcttcgggggcgtcggctccaagctaaagggcagtttcaaggacgtggaggacaagaagcacagggccgtctacgagaggcttgccgactccgaccagaagctgcagtatttctccgcgcggcagattggctgccgtttgctagggtgcagagggtacctgtgccggaagtgctggctaccaaccgaagactgtatgtgcacaaacattgtcccgtgcaacctttggaagggggtgaaattctggctatatatgcacccaaaggattttttgcgccagaataacacagggaagttactctggcaagtatttggcatccaagctgcacagctatgcctctttggtatccaagaacatgaggatatcatgtgggatgcatttcagagttcaggaaaggggaagatctcagttctatatccaaacaagactaccacccccaagtcagttaaagaccttgaatttgatggtttctccttgactactgaccttcgtgagaatttgcaggacggacctttcaattttgttttgcttgatggcacctggagcaattctgctgcactgtacagaaggttgaaggagagatggactgcagtatggggagatgaagctctaccttgtattgcactatctacacttagtgcctcagtgatgcataaactacgaccgcagcctgcctgggatcgtacctgcactgcagcagctgcagctggcctcctctgggagttgagctcgcggcctgagctcatctcatttgggttggaaaagcaagccgaggcggtggagtgctcgttagacaacttgctggatgctctcactgccaggcggcttcgtctgggccgatcgataactcggaaacagagacatagtaggaactgcatatagggaaagaagaaactcacagtaacagaggagcatggtgtgccatcaagtggaaggctgatttcattcttttttgtagaactcaggagctgatcattgtcaacaagttttctcccctttctatataggttactagatcttcagttcagtgctgtagattacttttaatggtcattgacatgagctgttaccgctgctactgtcgaagaggagggttaccaaatattagggtgctaaaacttgggttgtattctgacagattttgccataccatgaaatcaagttgttttctcatggccacaatntataaaaaaaaaaaaaaaaaanaaagggcggccccgactagtagctcgcgaccgggaattattcggccggg

SEQ ID NO: 146106 - DNA, 492 bp, Zea mays
  unsure (1)..(492): unsure at all n locations
  Clone ID: MRT4577_64765C.1
ccggccggngaaaaaaaaaaaaaaaaaaaaaaaaaaaaaaagctattctacatttactgctcaagatggcgcccgcgcaacctaagctcaagaagtacctcgacaagagactgttcgttcaattgaacggcagccgaaaggtcatcggcgtcctccgcggttacgatgtctttctgaacatcgttctcgacgaggcggtggaggaaaaggacaatggcgagaaggtcagaatcggcatggttgtcatccgcggcaactcagtggtgatgctcgaagcgttggaacgaatcggcggagacgaccgacgaggagaccgataaacccccctggcggcagtggaagcacaggaagagatgatggatattatatgatctttattggcgttaaggtcgaaaattgagacacgttcttgcggaaactttgcttgggaacacgtctaatagacaaacaagagagaataaccctaaaaaaaaaaaaaaaaaacccgcggcc

SEQ ID NO: 146107 - DNA, 421 bp, Zea mays
  Clone ID: MRT4577_64766C.1
cctctgttcctactgtagatatgtgggttgtttgctttctttttttttctttgtgtacctttctcaccccggttccccgccttgtgaaccatggcggggcctgtggcgatcggagctataggcctgggattaccaggaggccttgtggacgcccgggagttcacccgcgtgggccatgtcgcgcacgcagacgcggcacaggccgaacttgcggtagacggccttcggccggccgcacttctggcagcgggtgtaggcgcgcacggcgaacttcggcttccgcttggccttcgcgatgagggctttcttcgccattagtcgttctccttgaacgggaagccgagcagcttcaggaacgcccggccttcgtcgtcggtcttcgcggtggtcaccagcgtgatgtccataccgcgaacccggt

SEQ ID NO: 146108 - DNA, 571 bp, Zea mays
  unsure (1)..(571): unsure at all n locations
  Clone ID: MRT4577_64767C.1
cgcgnccttctcganaggaggccgcggccagcgagagatgcgcttcgggggcgtcggctccaactaagggcagtttcaaggacgtggaggacaagaagccagggccgtctacgagaggcttgccgactccgaccagaagctgcagtatttctccgcgcggcagattggctgccgtttgctagggtgcagagggtacctgtgccagaaggtactgtggtgtccaactcagcaatgcaagcggttgagtgtggttaagttatccgtctgtctctgaaactgcagtgctggctaccaaccgaagactgtatgtgcacaaacattgttccgtgcaacctttggaagggggtgaaattctggctatatatgcacccaaaggattttttgcgccagaataacacagggaagttactctggcaagtatttggcatccaagctgcacagctatgcctctttggtatccaagaacatgaggatatcatgtgggatgcatttcagagttcaggaaaggggaagatctcagttctatatccaaacaagactaccacccccaagtcagttaaagaccttgaat

SEQ ID NO: 146109 - DNA, 645 bp, Zea mays
  unsure (1)..(645): unsure at all n locations
  Clone ID: MRT4577_64768C.1
gggcattcctttataaatgttcctgcttctgggcagatgccttntaaacaatataaaccagctacctcactctgttcaaacattttctccacttcagaaagtgtattatcctagaccaggaacgtacaattcagcacatgtctatcttcccaactccactgatgtccctcttgcaagtaggcaattttcctccaaaattcaaccttcgatgcatggttttgattccactaatagcaaccagccatttacttccatcagacctcctatgccgatatctcggcttgatgctacttccgggccattaacaaatttgcatactgcttccgaaatctcaaatttcaaagggatgtttccatcaagcctacctgctccagttcatgttgagctaaagccgcctattacactccctgctgaaatgaatagtgaatctaccatatcaaatcaacaaaattattgcaaaattgggctagaaatgtcccttgaacctgtaaatttagtttatgaaggaaataacaaagattctgttgcaacttgtgacataagttgtaatttaatacctcaaccagtttcaaccccgcagacacagactcggccaacttcagttgatcatgccacaccagttgtagaccctcaaactatcttaac

SEQ ID NO: 146110 - DNA, 574 bp, Zea mays
  unsure (1)..(574): unsure at all n locations
  Clone ID: MRT4577_64769C.1
ccggccgggaaatccanatactgctagatccttgacaacacagatgaataccacagctataactgaatgacaaaaccacttcttcacctaagcaggatggcacaggaacgaggagatggagtaaaagaggtattcaaaaagacctcaaggatctgcacaaggaccctcccacctcctgcagtgcaagacctgatggtcaagacatgtctcactggcaggaaacaataatgggtacatctgatagaccatattctgaagaagatttcctagacacaatccattatcctcctgattatcctttcaaaccaccaaaggaggcatttcccactatcgtgatccatccaaacatcatcagcatcgtgagcatttgcctcaacatcttgaacgaccagctcgacccggaactaacaatctccaaggtgctgctgaccatctgatccctgctgactgatacgaaccccgaccaccctttgttgccctagatagctcacatgtacaagacggaccgtcacaagtacaagaacaccgcgatgacctgaacccataggaaagccatggaagattctctctacct

SEQ ID NO: 146111 - DNA, 429 bp, Zea mays
  unsure (1)..(429): unsure at all n locations
  Clone ID: MRT4577_6476C.1
ggacctttgggctgatttatgtgcttgtttatgtgcttgtagtacgccgaggaggtagagagaacgggcacagataacacggacgcggaagtttctaagaagacgaataaaaataagaagtcagcgaagaagtcggtaaagaagcattacgtcccttccgtactcgaggtcactaccaagtaaaccttctgctcctccggcttcggctccaataaggtaggaaaacctttcattccggcgatatattaggaactttccgagcttaaggccaatgagataaaggtcatagccaagccttagtcgaagaaggcgtcccgtacgggcgccgtcgccggtaatcgtggtacggacgagaagtagactccttagaacgcgtaaacgagcgctaatccntctgcgctgtctccgaaaaagaaacggtagaacgcg

SEQ ID NO: 146112 - DNA, 875 bp, Zea mays
  Clone ID: MRT4577_64770C.1
gccggccgggtcgggtaatcgcgattagtcgggctggtcgcctggaagagggcgattaggaggacgacgcgattagggtttctagtcgtcctagtcgtccgactagtcgtcgacctgggcgattagtcgtctggtcgaacacttcctggtcgtttttggtcgttgcagttttggtactaggcttcactctggtttttggcccatctagagtagcccgcccctccaaaaaccctccaagccaccaggacccctcccagccgccagaaacacgccagaacccttcccagccgccagaaaccctactcctctcctctgtcctctctggtttctgccgacgtctctgctccagcctccaagtgctccagccagcaggtaatgcagtttggatgctctagcgcgatttgtttggatgctgatctgctctaggtagcagccagcaggttcctgctgtactttttactgaattactgcaagtaattatgccaatattactttcagtttggactttgggctttggatggattctgttttacacttttactgaattactgctagtctgctactaattttacctatattattgcagaaatacaatgtttatatagttaatatatagttatatacatatacatatgtccttaaatctataggacgactaacggacgaccagaggtcgaccagaaccgattaggtcgactaatcgtcgccctaatcgcgattagtcgcctggtcgcccctctcactcgaccagctggtcgcccgacttgtaaacattggttgtttggtctatgatggtactcggccatgcaattgttatgacatgttgctatatttggtgtgctaactccctcactatgtaactgctagttactgaa

SEQ ID NO: 146113 - DNA, 327 bp, Zea mays
  unsure (1)..(327): unsure at all n locations
  Clone ID: MRT4577_64771C.1
ttttaaaaaaaaaattttttttttttttttttttttttttttttttggggcccaaaccaagaaccaacctttttatcaatgcacgggaccggggactaaacagccccttgatccacagcccctcccagtccaaggggggggggggggggggccccccntangcttaacccccacacaaccaggggaaaggcacgggggcttcttcctctcccctttcccttttttcctgcccgggcccgcngcagtgccctccccctccctccttttcgcaacctgccttggggggggggacctggtgcctttcgggccttgcgggccctccccctc

SEQ ID NO: 146114 - DNA, 142 bp, Zea mays
  Clone ID: MRT4577_64772C.1
gtcatggatccgattgttgatggcagaaacacagtagtagctagggcccaagtcgagtgggagacagtgaacgagcagcaggcctctgaagttgacggacccaaagagggggcggctgtgatccccaaaggggggaaggttg

SEQ ID NO: 146115 - DNA, 796 bp, Zea mays
  Clone ID: MRT4577_64773C.1
ctcactcctgggcatcggttttcagcatggggcagcaaggtatcaaaatgcgataactagtttgaattagacaatcccactaaccatcaacttttacaacacaagttgcgcccgaacccttctagacgaaaaaaaaatgcttggccgccgccatcgaatgcataaacaaagctgctcggcggggcgtacactccatctgccgtgctgccggcgcgccgcgtgacgaaggcggcctaccggaccacggagctggccaagggccggtggagctggttgtcggcctcggcggccacgagcgctggctggacgcgctccgcgcgtgggccaagctcgcgtgcttcaacctccgcggtttcattttatactgccccgcgtgtgtgctctcagttctcaccgtgtgtgtgtgtctgtgtgtgtgttcaaggtaccatctgccgcggagcccggcggcgtcggtgacgaaggcggccaagagcaccctggagatgggcaaggagatggtggagaagttggcggagtcggcggccagggccaccgaggaggcgctcgagaggaccaccgagaaggtcaggaggaaggtctcgccgtcggcgcggcgccctgatggagacctctgagcggaacttttccgggcttttttttttttttgtgttcctcctccgttttctaaagcttcagtgctgtgtactctgtagcgtctatatcctgtagcgtgtaaaattgtcaagaacgtactgtaccaccagccagaccacagcgtttggtaagttcgcgatgtaatgtaaacgtgttctgt

SEQ ID NO: 146116 - DNA, 731 bp, Zea mays
  Clone ID: MRT4577_64774C.1
cccacgcgtccggcgacgcgacgcctctcgatcgccaccagcttgcagcagcccgcggcaatgagcggcaacaggaacggcaggggcaagggtggcgccgcgccggcccgtggcgacatgcatggccgccatcatcgtctgcgtcgtcgtgctgctcgtcgcggcgtcggctctgctgttcctgctgtcgtcgccgccgccgccggcgacgggggtaccggggaacgggccgccccgcgagccggtggagctggcgatcggcctcgccggccacgagcgctggctggacgcgctccgcgcgtgggccaagccccactgcttcggtctccgtgtgtgtgtgtgtgtggcaaggtaccatctgccgcggagcccggcggcgtcggtgacgaaggcggccaagagcaccctggagatgggcaaggagatggtggagaagttggcggagtcggcggccagggccaccgaggaggcgctcgagaggaccaccgagaaggtcaggaggaaggtctcgccgtcggcgcggcgccctgatggagatctctgatcggaacttttccgggcttctgttttttttttttcttcttcgtcgtcgtcgttttctaaagcttcagtgctgtgtactctgtagcgtctatagcctgtagcgtgtaaaattgtcaagaacgtactgtaccaccagccagaccacagcgtttggtaagttcgcgatgtaaacgtgttctgtaccggct

SEQ ID NO: 146117 - DNA, 488 bp, Zea mays
  unsure (1)..(488): unsure at all n locations
  Clone ID: MRT4577_64775C.1
cgggccgaataccaccactgggtcctttaaaccattatcttatatactcagaggcgcagacaaacccgatcgacaccatgagggtggtgctggtagctctacctttgctgactctaagtgcaagtgctacctcaacccttacaatcggaggttgatgatgcacacccatggtcgccggtatatataccgtggtcgaggcatttcacacctgccgttcaactgccacctacggggcatttaccaacagggttgcaactatgcacgacgggacagatgccaccaccatntcatgtgcaagcgccggaccatctgccgtggacgccatgccactagccctactcactcatctacgatctcactctaatctgccaagcacacccatgcccaaagacaacactcatcatgcaaaggccgttgcctacttaaggtgaacacatgccgggatgcaaagtgaaagagacgctggaacaggtgccgaagaagatcct

SEQ ID NO: 146118 - DNA, 598 bp, Zea mays
  Clone ID: MRT4577_64776C.1
cccacgcgttcgctctgctcctactatgcgaaaccaaccactcaaactctagctacgtttggagatctgaagttgttgttcatagaaaggatcaacagggaattcttagaccaacatgaggaggaagaaatgcctcatgttattagtgttacaccagacatacaggaggccattggacgggaatgaggggctatctgcaaactatcttcttgagcaagctggtgaggaagattaagccagagtagttttcgtatgggtacaaacatagctttgcgtcaatcgatgccaggcaaatgcagaatgcttggtagccggtcagcgctatgtgtagaacacatactccggagatgaacatggatcaccagaactggaataattgctgtcagccatggacccatgacatcggcggtttcgcgcacctcaaaaacatgggtggggaggcatcgcggctgctgcacgccctctaaagaatgcttatcgatcatcaggtgcattcgattacgcttttggtcgttgcattgagaaatgaatcagtcgaactgtgaaccaactacttgaaatttcccgtgtggtcgggtatagtggcaatgcataagcc

SEQ ID NO: 146119 - DNA, 349 bp, Zea mays
  Clone ID: MRT4577_64778C.1
ccaggggggaaaaaaattatccccagggaggaaaaatattatccggaaaaaaaattcggaaaaaaaacaggggccacaatccgaaccaggtcttgccaaacaaggaaccaaaggtccaacaaactgaaaccacagagggccgaacccccccgaccccaaaaccccaaaaatgggtcccccccatatttggaaaaccaaaaacccccccccccccggattcttgaaaaaataggcgaaaaaaccttttccccccgggaggaaacccggtctcacctctctggggaaagcacccattcccatagcacacattttattcaggttttcgccctttcggaccccggcttccaca

SEQ ID NO: 146120 - DNA, 609 bp, Zea mays
  unsure (1)..(609): unsure at all n locations
  Clone ID: MRT4577_64779C.1
cttgcctttattgcttgttactacnattgcctcttctgtgtttgtcacattgtgtttccatttttttagcaatagtgtattttcattttacgatgtgaattggacctcatggtatctatcgcatttggttggaccagtgaggttatttcaaatgatcaaatccgccagatgcaaattgaatcagctggccaagtattcagggttctctatgaacccatcaagaaacgggatactttattaagggaagagatcgactactcaggcttgtcatcaaatttcctatctcctagcatgatcgcagctttaacagtgctttatatggataagcatcaaaacactgcatgccggaatttggtggtagaatcagaagctaagaaatctcttgttctaccaacgtggtcagggttccatgcatgttgttcatgcacaactggagtaacaaggcaacaagcaactggttatgtttaagcttccacttctgaagtggtatcagggtcggtcagcatcatggtatcgcaaacagatttggtcatcctgttggtgcagactcttctacggttagaatttcctagatggaacaggactcggggagtgtgactagatggtaca

SEQ ID NO: 146121 - DNA, 377 bp, Zea mays
  unsure (1)..(377): unsure at all n locations
  Clone ID: MRT4577_6477C.1
cccggcaggctgacagcacggggcatttttttacccagcgagcggaggcgggcaancagggcaaggggcgacaaggacccccccacagagaaacaaggccccgaagggccangaccacgccagnngnacggacacgaacncacagggccagccagcagcagcagcggggcggaccgaaacaaggngaacncacgcgccggancgccggngggcacccagnnnnacgggnaacgggcagaggcgncaaagcccccgcgccgagcgaccgcancccngcagggcacaggcccggcgacaaanccgaaacaaggacaaagcncgcccccgagggaaaanggnanccgcccacaaccccacacaacaaacgagccggaagc

SEQ ID NO: 146122 - DNA, 973 bp, Zea mays
  Clone ID: MRT4577_64780C.1
attgggtacctcgaggccggccgggctcgtcgccgccgcctctatctctcccttccctcttctctctcccctcacctctctcctcgagccatggacaccgtcgagccgcccgtctcctatctcccctcgccttcatcctctggctgtcgcccctccttggatttcgccctctctgctcgccgatcttctctgttgtggcgcgcactggctgtcttccacctccgtcggaccacaccgagctccctccctgctccagtcttctccatggctgcccttttctttgcccctggtggtcaagctcgcccctgcaacctcgcctcgctggatctcctcagggcgtcgggatgctgcttcctatacatgttgcggcggtcgcgcgcgtaggttccttgctggcctccgtgccataccacaacccaccaaatcgccgatccacatgacgctggaagctttgtgccgcgacgtactcatctacgacaccttcaacgccgccgacgcgtctgccgcttctgcggggatgggggagctttttcggcaatgcaccaccggcggaggtggcacctcagcgggggcgtcccaagcgaatagcgtgcagcaggggcagatgaagcggcggcggcggcagggtagcaccaaaaacgccgacagccaacagataacccacatcaaagtcgagcgcaaccgccgccgccaggacacagagtacctcgctgcgctccgttcgctcatgctggacttttacgatgtgcagagcgatcaggcgtccatcatcagcggctccatcgatttcgtgaaggagctcgagcggcagctgcaatcccctggaggcgctgaagatgcagcagcgcagcgaccgacgcaacgaacccaggccgtgatcatgcttagtatttcatttcagtcatgttttgtgtgaagtggtctatggagatgtattggtcgacaggttaaacatgcatatagaggagtgtgg

SEQ ID NO: 146123 - DNA, 428 bp, Zea mays
  Clone ID: MRT4577_64781C.1
cggtcccagcacggtggtgccctacgctgctcctccgccgcagtacgacggctacggttacccgccgccggggtacggctacctgcccccgccgccgcagcaggccgggtacgggtacggctacccgccgccgcaggccgccagctacgggtaccagcagtaggccgtgaggccgcagaagaagaagacggcagcaggtaccagcagcaggtcgtgaggttacgacgccgggtaccagtagcaggccgctgtctctcgttttggattttccttttgtgatttgtttcctttcgaaattttgtcaatctgacgatcgtttaaccaggcatctctaactcgaagctgcttgtaattttggtggcggcgcgtgatagctatcagattgtaaagtcgtgctgggctctactcctatttaactgggtgtcttc

SEQ ID NO: 146124 - DNA, 766 bp, Zea mays
  unsure (1)..(766): unsure at all n locations
  Clone ID: MRT4577_64782C.1
tcgaggccaggcgggncgggaccttccgagctagctagccagcacccacctcgcagagccgtggcagcctcggcaaagcctgtagcttccatagctggctagcgagctcacacgaatcggcggtctgtccgcagaaccgtggtggctcagggttccattcacgaggtacgtccttgtggagccatggacagggatctgttccggacggtgaagcaggggacgcggaaccaggccaggctcctgtaccaccggctggtgtgccgcctgccgcacctcctcgccgtcacgctgctcctcgtcgtggccccgccgctggtgtccacgctgtcgctcgccgcgctctggggcgaggcgcgcgccaacgcggccgtgctggtggccgcgcgcgcgggctgcgccgccgcggtgtacgcctacgccacgtcgcggccgcggcccgtgtacctggtggacctggccgggtacaagcccgggccggcgcacgaggcgacgcgcgcgcaggccatccgccagttcgggctggccggcgggttcgacgacgagagcatgtcgttccagaagcggatgatggagcggtcggggctcggggaggccacgcacttcccggcgtcgctgatgagcatccccgtggacatgtgcctccagacggcgagggacgagtcggaggccgtcgtgttcggcgtcgtggacgagctgctggccaagaccggcgtgcgcgcggaggacctccgcgtcgtcatcgccaatccagcctctacagcccacg

SEQ ID NO: 146125 - DNA, 338 bp, Zea mays
  Clone ID: MRT4577_64783C.1
cctacgcgtgcgtccacgcgtacggactggcttccgtacatatccaagaaccaaacgtgacgtggctagtccatgacttggtggcgtatcacgatccaagcatcccctcaggacggtggctcccgtggtgattgtgtccgccggactaggcatgctgatcgtcgtatcaatagccaacctgtccctgaggaacggtctcgcgggcaccttcactttggacacacgcacactctgtgccacgtgcggctggtccctgcgcgtatagtgcatatgcaacccgtgatccaacggggactacaggtggctgacctgcttctggtccgggatgatgccctgcc

SEQ ID NO: 146126 - DNA, 440 bp, Zea mays
  unsure (1)..(440): unsure at all n locations
  Clone ID: MRT4577_64784C.1
cccacgcgtccgcccacgcgtccgcccacgcgtccgtacacgtttatgtttcgtcctgcggcctagcttgaagtcaattttcattggatccgtgatctcgtttccaaaaaaaaaagtttgaaactggatctgagttgaagatcttggtccgtagttaccccagtaccccacctttacttagatctgagcatgtaaggtactctttttgtttccttctgcaattttatgctatgtcatttagttgtttttagtttgattgagaagcacgtgaagagtaatttcggtaaatagagaggatcggtgcttcaaaatggagtatgagtttattatgaccttttgagattccaaatactgtcgactntatgataaaatacttgaaagttgaaactgtcctttctggtaagtccgtaactctttcgaagttctgaagttgcatttgc

SEQ ID NO: 146127 - DNA, 617 bp, Zea mays
  Clone ID: MRT4577_64785C.1
gggtcgtaaccctaaattcgtgtccgtcgacggcgacttttttggtgcttgcttgtgtgctgctcggtgctcctgagtcctgatccagctgttctcatgaagttttattcggttattcccctagatctaccattctaccttcactctgaaaccctgactacttcgttcccctctgtctcggccaagatccatattttgctcttattttcctctctcaagctgaagccacgtcccctctggtggcccctcgctggcggatccggtgctccggtcggtcaggtgaaaccctaacttgtgctcctacttgtttggtgctccgtgctcctacttgtttttatcgtaatttgttcttccattttctatgtattgaaggccgttgaggagccggtgacgccgtgaggagccggtcaaaatccctagatggatgttgatccggccgccgaggctgaggagcatgcacttgaggattacaatgagcaccttgatgagatggcgttgtttggccataatgtggatgttgctgtcaacatcgacgcggtggagccacagccaacaccgaccatgggccggacagtgacagggtcttcgagccccgctgccactggtagtgggagcac

SEQ ID NO: 146128 - DNA, 418 bp, Zea mays
  Clone ID: MRT4577_64786C.1
gggggtggtgtggcgttctttccttttttgccaagaacacataatctgtgagttcgttcgtttttctttcttgcaatttccataccggggtcaaattcagtgtttcattcagggttccaaacataattggtttattgccccagctttttttttttttgctggcataaaaaatctccttttgttaaaaaaactccattctttactgcccaagtttttcaaacgttataacttttttttcaaaacatggccaaacttgtgatggggtgtaaatgttgattttcaggccggacatttttctacctatttccccctcgcgtttcaccttaaaagtgttttgtctggccccaaaatgctttttcccgttgaaaacatttggacactgtgtctggtcagtcagccccttttataccttcttttt

SEQ ID NO: 146129 - DNA, 460 bp, Zea mays
  Clone ID: MRT4577_64787C.1
ccggccgggaaaaaactagcaaaccctacctcctcttctccccttctcccgacggcgccaccataccgcctccgccctcaaccctagccgtatcgcgccctcgccctgcctccagccccgcgcagtatgctgctcgctcgtcgttggctactcgcctgctcccatgctccctccggatctgctgctctcggggatttggcgcagcggctttgcgcctccacacttggtcgccggcctcctcacctccacaagcccacgtcatcgccgtctcctcttcgccatcgccccgctcgcctcctgtgccaacgacccgaccaacctcgccgccaagcagggccacaccgtgatataaaaaagttgaaactttcatagcttacctgccgagaatgcattgttgaagttgcaaagatgtatgtctaagtttattttcacataactagatatttttttctattatcaa

SEQ ID NO: 146130 - DNA, 757 bp, Zea mays
  unsure (1)..(757): unsure at all n locations
  Clone ID: MRT4577_64788C.1
ggtaccctngnggttccggccggggcccgcaccaaccctccgccaacacctccctgccttgctcgcaccaaccctccgccctaggtccccgccccgcctgcgccaaccctgcaccctcgagctccctgcctcgcccagctcgtggaggtgagcatatgcttgaacatttaatccaccctcctccaactccctgggcacggcggtggcggcgcgccggtgcatggccggctcgaggcgggattggatgaattgaggagcgggataggtacacgatggagtgggacgcacggacgtggaggtgagatggccaaagcagaaggcgttgtcgcagccgcagtcggagcacaacagacaatgggagtggtggcacgccggagattggagacactcatcgtccatggaatggggcacatggtagcgcacgagggagggtcatagtagaaggtgtctgcgctgaagatttttggctcccatctcgtcggctgtagcgaggcgccatgctttgagggttgctccgccacgcagatgctctccgacatccacttccagcgcgcctgggtccaggatgtgatcctgcctgtcaacgaactacaacaaagctggcggatgacccttgaggaaatgataggtcctgtgtcgtcgaccttttcgtcgtgccaaaataagcagagagacgattctggcggccagggatgtatgtaatgattatttgtgtatacattgcagcatatcaagctatcaaggtgccatattcctc

SEQ ID NO: 146131 - DNA, 138 bp, Zea mays
  Clone ID: MRT4577_64789C.1
atcaattttttgaaaagaggcttttcctatatttttaggaaaaggacaattgcttgatcaaaaactatttcaatagaaaccccccccggtattttaccaattccattcttaccacttgggctggtttttacattttgg

SEQ ID NO: 146132 - DNA, 288 bp, Zea mays
  unsure (1)..(288): unsure at all n locations
  Clone ID: MRT4577_6478C.1
cncacntgtangccgctgttcgacccntanctgctggcgtccatcgagcgcnagctctcggatgnnggnncccacgtcaatctgattntaggttcagatangcccaagcncccgaaggcggcgccnccggcgnttttngccgaggggaagtncccgcctggnggcgctgacgccntcggnctctacaccaccacnctcctngcatccgcagnaccttcgangagttnaanccgtgnncntngnatggaggccnacgacgtgaagcttatctagcggtattggnantgg

SEQ ID NO: 146133 - DNA, 329 bp, Zea mays
  unsure (1)..(329): unsure at all n locations
  Clone ID: MRT4577_64790C.1
cgacactagagaacaccaatgacatgtccggacaaccttacacaccaangngacgggcaccacgggaggggaaggagcaaccgnggcgccggcgccgcccagcggcggccaatcacacttagagcccggcccccggaacgaagccagcccacacaggcggccagcccgccgagcaagccgccgaggcacgcggcacaccccagagatgcaccccggcaaccccccccactacaacaaaagaaacagacactccaaccacacaccatccgggcacaaacaaacgacagcggcaaaccccggaaaaaaacacaggaccaccccccccaccc

SEQ ID NO: 146134 - DNA, 365 bp, Zea mays
  Clone ID: MRT4577_64791C.1
agcccctgagtacctcaaggtcgttcctagtgttggaatcgccttcatgacatacgagacactgaagggcttgctctccagcattgacatagacgatgagagctgaggtttcccattatacgaagaggttaaacttccccggattttttggccataggttaccatcagaatgtatgtaagtgcatcagagtggttacacgaacggcattgtggcagttttgtagttcacggtaggtcaaagcttacctgaggtgtacaactagtcttgtgttgtaccataggctaaacagagcaaataagcacttcatgatggagtcttcatcttgtgttcctttgtacattattatgctccatcaaggaagagc

SEQ ID NO: 146135 - DNA, 753 bp, Zea mays
  unsure (1)..(753): unsure at all n locations
  Clone ID: MRT4577_64792C.1
tttgaggggggggcgacgtgaagcagccgccctcctcaatttcctcacgccgcgctccctggctccctgcccagagcgctggtctgcgcccccctccctgcatcgcccccaccagttcgccctcatctgccatgccgtgccggcgggttggagctttcccctgctctcaacccctccccttcgtccctgcgtttgaccgcacctgtcggacccgcccccttgcccctgcgcgcttgccatgggtgctgtccactggcctccctggcaagctcttcctcacgccgctccaagccaccgcgaccccaagtgctcgccaccttctgcagttcgtccacctcccagcgttccctgctccttgtttctatgcccagccgagctcctcagccccatggtggtgccctgctgcctccatcccctggcgtgccatctctctatgctcggtcgacgtccccagtgcctaacgcacgtccctctggtacttcattggatgaattggttgctaggttgacttggccctccaccctcccactgggctagacggttgagtggggtgctgcctcagcaggagaggaccaggaggagtgactggctaggcttcaccaggttgcttagttatcttcgttaatttattctgttgcactgaaaacaatgatttacttcctttaaaaactccaatgatgtgttaacattggtactccttaacctatggtattgtgctttattgtaaaaaaaaaaanaaaaaannaaaccana

SEQ ID NO: 146136 - DNA, 408 bp, Zea mays
  Clone ID: MRT4577_64793C.1
tcgagccggccgggacaacaccacacagctaagcgtgtctacacactgtagccggaggccggagcaagttgtagatgtagcccaggacgatcctgcaggtagctagcagtgcaaagccgatcgatcagcaaggtactgctctcctagctagcttagctactaccagctccgatcctgtgcgcgctgctgccgccacggagaatccctacacgagcttcttccacagccatccgcagcaccaccgctactactaccaccccgcgccccccccgccccccgccccgccagtccgcccccccccccccccgcccccattacattgtcctctattcctcttccttgcacaccacctctttcaccactctatccttcctccctcccctcctcccccccccccccccccccccc

SEQ ID NO: 146137 - DNA, 658 bp, Zea mays
  Clone ID: MRT4577_64794C.1
ggcgattgggatcctccaggccggccgggacagcagacttcaatcaactcaccaccccacgccaacagtccaataccgccaaaatgggtcgcgttcgtaccaagaccgtcaagaagtccgccaaggtcatcattgagcgatactaccccagattgaccctggacttcgagaccaacaagcgcatctgtgatgagatcgccatcatcgcttccaagcgtctccgcaacaagattgctggttacaccacccacttgatgaagcgaattcagcgtggccctgtccgtggtatctccttcaagcttcaggaggaggagcgtgagcgcaaggatcagttcgttcctgaggtctccgctctggacttcacccagaactccgagagcggccagctcgacgtcgacaccgagaccaaggatctcctcaagcaccttggctttgagtctattcccgtcaatgtcatccctgtcactcagcagcagattcccgagcgtggacagcgatacggcaaccgccctcgccgcgactaaaaaattgggtttgggatttttatgggtgtctagcatttgcagggtttcactatggcgtctttaggacagtgagtgcatagtctcaaagaaagactttacgacccccaaaaaaaaaaaaaaaaaaaggggcggcc

SEQ ID NO: 146138 - DNA, 227 bp, Zea mays
  Clone ID: MRT4577_64795C.1
gggtattcttgagttacattcaacatcaaactaaatgtgacagagcaaccgcaacatatatgtcgcaagaactttttgccagaaatataagcatatggtattgaggatacaatactcaacgaaaagttggaattaagacaaaaggagtgaaaaaaagtccatagatctataaacaaaatcccgtgaattgtgcacaggctcatacatatggtatttggtctagatat

SEQ ID NO: 146139 - DNA, 716 bp, Zea mays
  Clone ID: MRT4577_64796C.1
cttctctgatttactagggaaatcatcaccactaacacccttggattgatgatatgttgtcgtgaggcgataaatatgatgaggaaccaacctcgaggtggtcacatattcaaccttgatggtgctggttctgatggaaggccaactccaaggctgaattgcagatgaatgaagtgaataatgtgatggtgcacaatctatcgcctggcatggtcacaacagatcttcttatgtctggtgcaactacaaaacaagcaaaatttttcatcaatatattagctgaacctcctgatgtggttgcagactaccttgttccaaacgtcagagcaatccgcgtcaagccgaacatgcaggtaaaaaaacatggttgtttcgtaggattagttgtccgctccgccagcttccaacttaaaagattaggaacaattcttttcattaagcgtcacttacttttctcaaaagatagaatgtattacaaatgtcatctcagcaagagaatacagtgatgtactcttctgtacagtagtagcaatttgattaccttaactaaattactgctgataatttatccttgtgcactgtatgactgtacaaatttcgaaccatacttggacaagattggctgaaggtgtattatgactgttctagagcagatcatgatatatctatccaccagattgaacatactctacctggttacttaccagataaaaaca

SEQ ID NO: 146140 - DNA, 425 bp, Zea mays
  unsure (1)..(425): unsure at all n locations
  Clone ID: MRT4577_64797C.1
gtaccggccctgaatttttttcttggccgacgagttaactagccggcggccgccctnnnnnnngggggctttttttaaagngtggccgttttaataacccccnntagtttattttttttatatttttgttcatattgaaaaaaacgggccttttggggcatggccccacatggccaatacaatgggccaaaaagcccgttttattaaaaaagaaacctttggaagcaaaaaaagccccccccccaattaaaatggactaaagcctgccggggggggatcaaatggaaaacccgctggggaagccccccccggggacccccctcttggaaaagggcttgggcaattttaacgggaacatcccggccccgaaagggttcttgaggcccaggtggttgtaccccccccaaaaaaaccccccgatcttc

SEQ ID NO: 146141 - DNA, 219 bp, Zea mays
  unsure (1)..(219): unsure at all n locations
  Clone ID: MRT4577_64798C.1
cnctttnnnnnnaaaaaannnnnnnaggnnggctccaatgaaggagnaggacgggggagcccaaccgcaggagcaggcagcagcacacgangcgccaaaccannnacaggaanagcacccggacccccccaaggcnnaacaacaanaaancgaanagcggggnngggccaaagacgagggaccaagccanncnagggcagaccaaaaccaaaagccaga

SEQ ID NO: 146142 - DNA, 1401 bp, Zea mays
  Clone ID: MRT4577_64799C.1
ccctgtttccttacttcgttactatggaaaccatctcgcgctccagaccacagctcaccctcacctgcgacctgcgcgcattcacagccgccggcgccacacgtgcccgcgcgccgggcgccacctctctcccatacggtccaccagccttcctctcccgggccgggcggcgcccctcaatggctgccaccttcaccgtcgccgcccgcctcccgctgcggggccccgcgcgcgctccgtcccggccggccgtcgctgctgtaacccggcttcgaagccggcaggagcggcgcggcctagcagcgacaggcgggaggggacctgcccgggttcgggccgagactttctccggtggtggaggcgtggggcggagggaccccatggcgccgccttacaatgtcctcatcaccggctctacgaaaggtataggatatgcattggcaaggaaatttctggaggctggtgataacgttataatctgctcgagatcagctcaaaaggtagaatctgtggtcggtgacttgaaggaggagtacggagagcaacatgtgtggggaactgtctgtgatgttagaaatggaaaggatgtaaaggcacttgtggagtttgcacgtgacaaacttaagcatattgatatatggatcaacaatgctggatcaaatgcatatacatacaaaccactagtggagacctctgatgaggctctcatggaaatcatcaccactaacacccttggattgatgatatgttgtcgtgaggcgataaatatgatgaggaaccaacctcgaggtggtcacatattcaaccttgatggtgctggttctgatggaaggccaactccaagatttgctgcatatggtgcaacaaagagaagtgttgtgcatcttacgaagtcacttcaggctgaattgcagatgaatgaagtgaataatgtgatggtgcacaatctatcgcctggcatggtcacaacagatcttcttatgtctggtgcaactacaaaacaagcaaaatttttcatcaatatattagctgaacctcctgatgtggttgcagactaccttgttccgaacgtcagagaaatccctaccaagcaatccatgaagccaacctacattcgtttcctcacaggcttgaaagcctactcaagaattttttctagacttgcttttggtgctaggagaaacaagtatgttactgaagattagttatgctgccagcttccaactgaagagattaggaacaattcttttcattaagcgtcacttacttttctcataagatgggatgtattacagatgtcatctcatgagaacagtgatatactcttctgtacagtagtagcaatttttttagtaaatgcataggaaaactgtgcatcaataaaaaaaaaaatttgcggcc

SEQ ID NO: 146143 - DNA, 419 bp, Zea mays
  unsure (1)..(419): unsure at all n locations
  Clone ID: MRT4577_6479C.1
ggaggacaacccgggaattcaggcagccatcgttcacaaactacctctcacagacaacttcgaaacgtttttgacacgaaaaaggaaggaaagtccgtttgaaaccacccttttggtggccccgaaatccttggcttcttttaaatcggccctcggcaagcgggggggggggctacccttcgccgtctccgcgggcgggcgccgggggcggcccgcggggggcgcgcgggggggggggggggggtcccccgcagccccgnccccccctggtttgggttggggcccgccgcctcttcctcgtttgctcngccggcgcgtgctgcggcccccgctggggcctgccctcgggggcgctgtcccggggtgggggtccctctctcccgggggcgcgtcgccntgcccgtcgctctttctttttt

SEQ ID NO: 146144 - DNA, 373 bp, Zea mays
  Clone ID: MRT4577_647C.1
tgtttattatcttcattgtctgtttatttttttttttacaaaaacacatatacattattgccaaagaatcaccatggaattaccggaacatataatatccgggtactttatttattccgggcccaattccacctttttaaaacttggggggggctttagggctccagtcccaagggggggggggggatttttgcaagcggcctttagatggtcaacccaaccaggtctggggggcaagggagcccctcacggagaatctaccttcctgtgcaaagaagacccgaggacccacattcatttgcgtgacagatggacaataaccgcgtgcaaaatgggtgtacttgaaacatggagaacgcatcaaaccttcatg

SEQ ID NO: 146145 - DNA, 389 bp, Zea mays
  Clone ID: MRT4577_64800C.1
agagaatcgaccagagccatcaatcgctactttccacttcacatattccagcgccacggcgcctccgatggcgttcggcgactctcgaggctacacattcctccacacgaagtgtgggagcctatacacagatggatgctggacgaggaccagactgccgtttgtgatgaacagacgaggagcgcccctatactgaatgaaaggatcctctattatatgctcaggaggtccgcagctgctcatgcatggcatgatcttgagatcggtcctgatgctcctgctgtattcaatgttgttgctgagatcacaaagggaagcaatgtttaatatgatcttgacaagaaaaccggactgattaaggttgatcgaatcctgtactcatcagttgt

SEQ ID NO: 146146 - DNA, 281 bp, Zea mays
  Clone ID: MRT4577_64801C.1
ggtacctgcacccggacatggtgtcggcaggggctccctctgaacacggacacttcctccggagacagctttttggtggggtccttgcgccatctcatgaatgatcgctgacaatcctgacgaagtcggttgaccttcacgtcacacagtttgagcacgagtcaatagatggtggacaatgactcaggaattctttacactaggatactaaatcgcgggctgatgcatcgtggcctgcctctaacaccaatgcttactccattgccggacaaccaaaactc

SEQ ID NO: 146147 - DNA, 378 bp, Zea mays
  Clone ID: MRT4577_64802C.1
caaaaaagctgaaggaactagagaaagaagcttacagattggcaggcaagaatttctctctaaatgctactgctgatatcgcagacattctatatacacacctaaaattgccagttccaaaaggctgtgagaaagggaagctgcatcctagcactgacaagcagtctttggaccacctaagggatcaacaccccattatcccattaattaaggaacacagaacattagcaaaactgttaaatggcacgttgtggtccatttgttcacgtgctcaattgtgcactcaatcacaaaggtacatcatacatggaaattggcttcagacgtcaactgccactggccgtttgtccatggaggagccaaatctgcagtgtgttg

SEQ ID NO: 146148 - DNA, 239 bp, Zea mays
  Clone ID: MRT4577_64803C.1
cccccagacccctccttcttgagttagaataattccctgggcagaaggggttggggccgaacacaaaaagatttatttccttatatatacatcaacgcatgcaaacaacacgaagcttctagggacggggttttagaaaaaaactgaaaactttttagcggtggggggagcacgcttttctccactttctttccaattttccttgccccggacaaacactgagtttcagatagcttggg

SEQ ID NO: 146149 - DNA, 259 bp, Zea mays
  Clone ID: MRT4577_64804C.1
ctacccggttccagcactttcacgctcagctccagcatggctgcctacaccatggcgatctcctccacgtgatgggcggcaccctcatgaagtgggcttcttcggtagagggccgcatcagcatgcgcaagaccctgggcaagcccaagtggcggtgtcaggcagtccttggtacggtgcccgaccgagtcaagtacctcggtcccttgtccagctagccactcaagctacctcaccggccagttccccagatgactac

SEQ ID NO: 146150 - DNA, 351 bp, Zea mays
  unsure (1)..(351): unsure at all n locations
  Clone ID: MRT4577_64805C.1
gccgggccgggatccaccccatttccccgcctccatcccgtcccgcccgccccttgtcgcttccgcttcccccgtcgccacggcccgctggctagtagtcatgtcgtgttcccacctctccaccgcctagtcctcctcggcgctcgccagcagcgcctcatccacccggcggcgtccgccccgcgcacgggcctcgtggtgcggtgctccctccaagagctccgcagccgcatcgacttcatcaggaacacatagaagatcacatagggcatgaagctggtggccgccgccaaggtgcgtcgcgcgcaggaggcggncgnctcctcccgccctttcttagagacggtggtg

SEQ ID NO: 146151 - DNA, 320 bp, Zea mays
  Clone ID: MRT4577_64806C.1
ggccgggatatacgtgctcagtggagatccttggcctcgtcagtcgcaagtcccactactacagtgcccgccgccgctgcgtccaccaccacctcctttcccaactcctccgcgtacccccgccctctccggcggcccgcgtaaccacccgcgcagatggcgacggcggccacggcgtccgctacggcggcgacacgcttcacgctcctagcgggcgccggcctccgcagccgcatcaaacgcctcaccaccgtcgagaggatccagcgaataaggcggctctccacccccgcgctcctgcagaccgccgacatccaaac

SEQ ID NO: 146152 - DNA, 1744 bp, Zea mays
  Clone ID: MRT4577_64807C.1
atggagttgcggcaaggcgaagggcggaaagctcacatggctcctactgctattggaaatagagaggagatagggttttttgtttgtcaaccataccatcgttgttcaatgcctctgattaaaatgtgcctagcgattgaaactttcgatacattggagctcagagctgctggttgtgacggaacctcccaagtctgcgccacccgagagcacaccaccccttttaggcgatcctttgccaggaggtgcggagaatcaaaggaacaacgcgttcccgatgatctatggcagtatagttcaattaaagggatcgaggagcttgaggataacttaagtatgctaggacaaatgattgaggagcttgaactaacctggaacaagctggccgcggtgaggtgttcttgcggtgtattcgaaccgatttggggaaagttagaaattggagttcctcagcgaacgattgagggtgatactgggtggctggtggatcaggaggagcaggtgacgcggtctgcaccttacatttctgctgaagctaactcgaagtttgtagaccagcatacatccccagaagaagactttccaagtgcagatcgatcacaccggtcagttggtaaagtagaaaagctggttactagtgcgccgccaccattgtctacgataggctattctgttgatgttgcagatgggaatgaagtgccacctcctgagaagaaagaatgcgagtacaggaatgggacgtgggtttctgacaatcgtagaccactatactcaggatggcagcctgaagcttgtgagatgccagagtttgaggcctcccagttcttgagaaggataaaaccatcgcttacgtgggcgattctctagggaggcagatgtttcagtcgatgatgtgtatggtcactggtggaaaggagaggctggatgtagaagatattggcgcagagtatggctttgtgttagcgccgggtgcaaaaaggccagacggctgggcctaccggttcccgagcaccaacacaacaattctataccactggtcatcaacgctctgtgatttggagcccctgaacccatcagaccgagcgaccagttatgccatgcacctggaccgcccgcctgcttttctgaagagcaacctccacaggctccatgtcctggtcctcaacaccgggggaagatgagggcgaacaggtgggagatgtatctcggcggagcgccgaacaacgacaggaacaccgccgtcatttggaaggctaagaacttcatggactcaggccgggccgggtgggcggacgcgcagctcccccgccaccccaagctgaaggcgttctacagttcgatatcgccccggcacttcttcaacggggactgggacaccggaagcagctgcgacaacaccagccctctggccaagggagggagcggcgtccacctcgatcgttcggaggacgccgatgccgagggcgccgtgaggggcaccggggtcaggctcctggacgtcactgccctgtcgcgactgagggacgaaggacatatttcgcggtacaacatcaaagccactcctggcgttcaggattgcctggttcgtcctcttaaccattgtttatggtacaggtggaatcatctgatcagagtcccagcggcatttgcgcgtgcaaaatacagtggacctgtcagtggcctggcagtggcaccgagcgttatccgccacgctatcaggcgacggaccagcggatccacatga

SEQ ID NO: 146153 - DNA, 814 bp, Zea mays
  Clone ID: MRT4577_64808C.1
agaccttcaaccgctacatttccgtcactaccggagccgccactccgacgaacgcgggcggcggagcggaagcggaccagagcaccggtaaaaagaaaaggatgaggcttgggagtataaacggcttgcggttcacgcagcttaaacttgtcatccttgcgttcttcatgttgtttgttctctggaaatgggagaagggctcgtcatactacgattccgaaatcctccagccagatccgttggttctgactcatccagctaactcgaagtttgtagaccagcatacatccccagaagaagactttccaagtgcagatcgatcacaccggtcagtagaatgcgagtacaggaatgggaagtgggtttctgacaatcgtagaccactatactcagggtttggttgtaagcaatggctttcagagagttggtcctgcagactaacccagcgaaaagatttcgcgtatgaaaaattcagatggcagcctgaagcttgtgagatgccagagtttgaggcctcccacttcttgagaagaatgcaggataaaaccatcgcttacgtgggcgattctctagggaggcagatgtttcagtcgatgatgtgtatggtcactggtggaaaggagaggctggatgtagaagatattggcgcagagtatggctttgtgttagcgccgggtgcaaaaaggccagacggctgggcctaccggttcccgagcaccaacacaacaattctataccactggtcatcaacgctctgtgatttggagcccctgaacccatcagaccgagcgaccagttatgccatgcacctgga

SEQ ID NO: 146154 - DNA, 363 bp, Zea mays
  unsure (1)..(363): unsure at all n locations
  Clone ID: MRT4577_64809C.1
acctcgngcatgcatccttagggcccgtttcgccctatcctgagtcgccttacagtttactggccgcgggtttccagcgtctcggctttcacaaccctggcgcttccggggtggctcntgttccnnccctttcccctttcntctgctgccgtggttgcggtgggtcccgcaccggtcgcccttcccctcggctgcgccctctgagtggctcctggncgcgccctgtcgcggttctttnnccccgtcgcctgtggtgctttccctcctcttggcgcgtgcctttgccagggccctggctcccgctcttttcggtttcttgccttcctttttgcgcccgttcgccggctttcccggtctggctct

SEQ ID NO: 146155 - DNA, 314 bp, Zea mays
  Clone ID: MRT4577_6480C.1
taggtatttgtatatccaatgaggggttttgttttcaaacatcaccgcgattttctgggaggggggttacacacattatgaaggactacttcttgtcctgcacaaatcttttatacttaatggctcgttcaattctgctccaaatcaagtttatgcttacataatctatttttactatgtatgttttattcttccacatacattggttttgctttcaattttatgtttttttctttatactaatattaagttcagttcttactgtatatttcctttttttgtaattactaaattctttgttcctttttttattt

SEQ ID NO: 146156 - DNA, 1949 bp, Zea mays
  unsure (1)..(1949): unsure at all n locations
  Clone ID: MRT4577_64811C.1
atncttttcccccgccccgtcccgcccgcgcagtcgccctccccaccccacccggtccccactttccactcccaaccccaccagaccttcaaccgctacatttccgtcactaccggagccgccactccgacgaacgcgggcggcggagcggaagcgaaccagagcaccggtaaaaagaaaaggatgaggcttgggagtataaacggcttgcggttcacgcagcttaaacttgtcatccttgcgttcttcatgttgtttgttctctggaaatgggagaagggctcgtcatactacgattccgaaatcctccagccagatccgttggttctgactcatccagctaactcgaagtttgtagaccagcatacatccccagaagaagactttccaagtgcagatcgatcacaccggtcagtaggtaaagtagaaaagccggttactagtgcgctgccaccattgtctacgataggctattctgttgatgttgcagatgggaatgaagtgccacctcctgagaagaaagaatgcgagtacaggaatgggaagtgggtttctgacaatcgtagaccactatactcagggtttggttgtaagcaatggctttcagagagttggtcctgcagactaacccagcgaaaagatttcgcgtatgaaaaattcagatggcagcctgaagcttgtgagatgccagagtttgaggcctcccacttcttgagaagaatgcaggataaaaccatcgcttacgtgggcgattctctagggaggcagatgtttcagtcgatgatgtgtatggtcactggtggaaaggagaggctggatgtagaagatattggcgcagagtatggctttgtgttagcgccgggtgcaaaaaggccagacggctgggcctaccggttcccgagcaccaacacaacaattctataccactggtcatcaacgctctgtgatttggagcccctgaacccatcagaccgagcgaccagttatgccatgcacctggaccgcccgcctgcttttctgaagagcaacctccacaggctccatgtcctggtcctcaacaccggccaccactggaaccgggggaagctgagggcgaacaggtgggagatgtatctcggcggagcgccgaacaacgacaggaacaccgccgtcatttggaaggctaagaacttcaccgtccacaacgtcgtcaggtgggtggacgcgcagctcccccgccaccccaagctgaaggcgttctacaggtcgatatcgccccggcacttcttcaacggtgactgggacaccggaggcagctgcgacaacaccagccctctggccaagggagggagcggcgtccacctcgaccgttcggaggacgccgacgccgagggcgccgtgaggggcaccggggtcaggctcctggacgtcactgccctatcgcggctgagggacgaagggcatatttcacggtacagcatcaaggccacttctggcgttcaggattgcctgcactggtgccttcccggcgtgcctgacacctggaacgagatccttgcggcccagctatagcctgtagctgaatttgaagatgccaagggttatgtcgaattgtttatgggtgaagctcgtatatacagtaactaccacggagtactacgtcgttgccggagacccaatgctgctggtagtgaaacactgagctgcagtacattctttcgggaccgtgcttaactgtagaaaatacagggccttttttttgtgtaagtacatgttgtgtttgcctactgttacctgtgtacgccagttgttaattggagaactggattgatagatagtttggaagtgttgcctgagaggtagggcaacgcatcttgcagcatccagtcctttgagaactcatctgttatgtaccaaacacgaacagagagcatcatgcattgctgatccatgtgatgtggttgttgggt

SEQ ID NO: 146157 - DNA, 486 bp, Zea mays
  Clone ID: MRT4577_64812C.1
ggccctcgtacgtgaattctgtgctgcacaccggacccaaccaggatgatgcccttgcgcgaactgaaaagctttcataagtcaacccgatgctaggctctcgtgattgttttgtttggcctatcgaaccctgaattggtgtaggatgcccgcgcggcccatttctggaagctgttatgctcctgaccaaccatagtctctgggaacactcgaacaccctggttggccaagggtgcccagagataatggttgctcttgcccgagcaccacacgatctggggcttaaagtgactgttatgcgcccaggagctcagaaagtgggccgcattgtggccgatactatcgggggcatgcgctggagcaatggtagccatccgcagtagcacggtctgggggctgatgatacactggaacaagctgaattctttttcttccggacgaactaccggacacacatgaccttcggatacctgagggatgatgtgg

SEQ ID NO: 146158 - DNA, 231 bp, Zea mays
  Clone ID: MRT4577_64813C.1
attcggctcgagcgctcctggtgcactgctttcttttatcactccggcataaagcgggggcatgttcgcggggccatgatggtcttcaccgcgcttatggctcgccgtgcacctgctctaactagtcacgatgatgagcactgaggataagcttgctggttattttgtaatcctccgaaacaatgaaagaagctacaggacacagctctatcaagaggtcaagctacatga

SEQ ID NO: 146159 - DNA, 628 bp, Zea mays
  Clone ID: MRT4577_64814C.1
cctcgagccggcgggacgaggtcaaaaatggccgacaccggcctgttccaccaagagcgccccccagcccgacaacccgccccatgacccaataccccgacaagaaaacgcacacatgtgccaccagcctcaacaagctgagatgaccgacgcgatgtccgagctgatggagacccgtccaacactgccgcacgctccagacgtcactgctccggactgccaccctctgcttcttcccctccccaatgcgattgcgcgtctccgccctccatggagccttgattcccctctttgacatgaggtacagtcccggaagaacaaggagcatggaccacctaatactggaatatctggtctataccaactcctgaactgagtcccatctgtacatacaatctatgaagctgctgtgactccactcgatggccattcttctacatgctgctgcatcaaaggcacctctacacccaacataatttccagactatcatatcaatcttgagcaaatatgaagagcagctcaaacaaatcattccgcttggaaaagactggtggactatttactggcaactcacaatgctctatatgcaatatgcaccgaccactcctagaacccttctactatgat

SEQ ID NO: 146160 - DNA, 538 bp, Zea mays
  unsure (1)..(538): unsure at all n locations
  Clone ID: MRT4577_64815C.1
gcctgggtgtttttttttttttaattttttttttttgtttttttttttttttttttttttttttaaagaaccctacaagctattaaaattccctgcatatggttttttattaacatcttgcacactgtccattttccatacatccaaagggggggggggaataccaaaaacctcggggcagtccctcttcactgccatgataatggatgtctccccattacacactggacacctaaaagtattacgcacctgttcatgcccagagacaaaaagatcattctctaataggggcacaaattgctaataaacccgggcctttgttcttagaagggtttctttggttaactggggggcctgttatttgggtttacacctttataaggacttgttgccttaccaccattgacttttggatnacctggatgctttccaccgggtggttttacaccaacttgggatattttttgtgggtttttggtaaagagttttttgaactggttttttggttttttttggggtttctggttcttttggttaa

SEQ ID NO: 146161 - DNA, 254 bp, Zea mays
  unsure (1)..(254): unsure at all n locations
  Clone ID: MRT4577_64816C.1
gcggcgnngncggcggcggcagcgcttccggctccccttcccattgccctccacgatggcgctccgcctcaacgacgtcgcgctctgcctctccccgcagctcgccgaccgcactccccgatgcagcatcagaaagatcaacgccgacaacacaataactattataccacactaccaaccacgatgacaacactcacttccttcttctcaactacatccataaaaaaataacacaaaaaaaacacaactaacaa

SEQ ID NO: 146162 - DNA, 304 bp, Zea mays
  Clone ID: MRT4577_64817C.1
gggggaaaccaaacttgggggggggcaaaataaggggagaaaattggggaaaataaaaacacgaagggggaagccaacttttatgggggggggggggaaaaccataaaccattttatgggggaaaaattttaaaaaaatgcatgggatgttgggggggcccccaccccggaaggggaactccgaaagcttccggggtgaaacctaagggttatcctcgtccttaaaaaaggcaaaaagatgcttatttggcaccaaatcccaaagcccattattggcaaaaaaaaaaaactccgtataaccatt

SEQ ID NO: 146163 - DNA, 967 bp, Zea mays
  unsure (1)..(967): unsure at all n locations
  Clone ID: MRT4577_64818C.1
tcgcggactagacctctgcagtcccatttcccaaccataaccttctccccccatcttcttcttcttcttcttccattcttccttcctcccctgttcttgtacttgaattcggcgcgcgtctggtgtgttagccaggcctcgccccatccgaagtccgaccgaaggagggagagagagagaggcaacaatggcgaagggcgggctgagcaagctccggtgcatgatcaagaggtggcactcgtcgagccgcatcgtctcccgcgccccgtcgccatcatcggcccacgacggcgccacctccggcgacgcgcacggcgcctcgttccacggcgcggacgaggtgcccaagggcctccacccggtctacgtcggcaagtcgcgccgccggtacctcgtcgccgaggagctcgtgggccacccgctattccagaccctcgtccaccgcaccggcggcaccaccgggggagcggcagcaggcaccgtcgtcggctgcgaggtcgtcctcttcgagcacctcctctggatgctggagaacgccgacccgcagccggagtccctcgacgagctggtcgactactacgcttgctgagtcagtgctgactgctccgacttggaagcctcccgaatcctccaagccgcgcgtccgcgcgcgggggtaaatcatgcatgcatacttcaattctgatgttttaagtaggggggagtagaggaaccgatgttgcagctcatggacgacgacgctgctctttcggctccgttgatttggttccattgacatgagttactagtatagttttgttttatcttcgctacttcatcgtaataaagagtctggacgagtgcttctataaaaaaaaaaaaaaaaaaaaaaaaaaaaaaaaaaaaaaaaaaaaaaacaaaaaaaaaaaaaaaaaaaaaaaaaagggcggccgttcgcgcccacgcgnccgcgaacgctgggcgaccg

SEQ ID NO: 146164 - DNA, 329 bp, Zea mays
  Clone ID: MRT4577_64819C.1
gagacgcacacgctccatagaacgtgttttgcaagggcaacaacactgcaacaccgtcgaccgacatatgtgctatgattaacgctattgctatgtctgcatgtgtcgctaacacgacaaatatacctgaatggtcactatcacctatagctaacgttctactgccatacacttcgatcaactattgcatcattatgagacaaccgagatgttaagacctatcagatctaacaacatgcgttagcaggtaacatacctatatcacccttggcagcaaaacaatctccagccctatctttagtgcaaccattggttcaaaccattagggg

SEQ ID NO: 146165 - DNA, 209 bp, Zea mays
  Clone ID: MRT4577_6481C.1
cataaaacagcagagcattactagggagcagaagtcttattacaaaataaaacaacaaacctcaaacgaactaaggatcatctgctccaatgttaactgacaaactccacctatatcatatcgaactcctcgccttgtggctccttctgaaccacctgttcttttccttcaatgatctcctgctcaactacttatatctgctggtcacc

SEQ ID NO: 146166 - DNA, 359 bp, Zea mays
  Clone ID: MRT4577_64820C.1
cctccttttttttttttttttttggaacgaaaacttatttatctctgagaagttcaccacaggccgcagctactgcgaccactcctcacaaacagccaccagagttctggcactgtcacacctcaccaaacctaacctcgtacactaagcaactttatccaccggctggttcttgggaccagcaccgctcccaccagtcggagcatcctcatccatgccagcctcagctcccatgcccgggccctagccctggtacatcttcgcgatgatggggttgcagatcccctcaagctccctcatgttgttttcgatctccttcacctcagccagctggttgatgtgcagccagctgttggcgc

SEQ ID NO: 146167 - DNA, 626 bp, Zea mays
  Clone ID: MRT4577_64821C.1
gcgtttttaaccaattgatcgtgtatttagcacatatgagttcttagttgaagttgtagctagattccttgtgcacccaaacttaacttctgtgaagttaaagagtacccgtgtgttaacaaattattgtgttgtccgaactttagatatccggccttggaagtacttggtaccatgtatgagggaagatctgtttgccaggattactgggttaacgaacaactcatactttgatggagcacatgaggttcgacattatctcaggaagcattcggatcttggttgtattgtgcttgaagttgctaaggactcgcaaattccccgccaagtaaactgctagaaaacttttcagaggtggacatgatgaagatgatagtgctgatgccaacacaaatgatgttgttgtacctcggtttgtagaaactctgaattgtatgtgcattagcttccacatggttcggaaaacaataactatattgatcaaatcaggtctatgtctcaactgtacaagccaataattatccaatcacttgcacgcaatggcatcctgagaaagccatttttgagtggaggaaaccaatgatcccacacagcgaagatgcaatacaggttactcaacattttgc

SEQ ID NO: 146168 - DNA, 671 bp, Zea mays
  unsure (1)..(671): unsure at all n locations
  Clone ID: MRT4577_64822C.1
ttccaatccgcgaccgcccgaccgcgactctgaaggggaacgcctcgccgccaccggcgacagctggcgcgagaggctccgtcgacggacctgctactcgcttccttcatcgccacctcggatggcaggccccgttgaagcacacacactggctgcctcagcaccacctccgacgccaaaccctaacctggactggcgggttcgacacccacccaggcaccatcgcctaccctaaggtctttcatctggatgcagggaggagggagctctgcagcaaaggaagtctgtagtcaccatggtccatttcaagaacaggaagcatcaggcggcttgcaagaaagctgcactggagtgcgattgcgacgaagcgaaattttgaacagtacaggttggccgcgcggtggtagtgtcacggtgggtgtcgtccggtccgtagagatcgagctgctttgagaagattagagaggactagagagctagctagccgaagaaggaagaactcgtatctcccccttggtgtttttttctgtttcgttgtatccgcgtgatgctgttaattctgggctatctaaggatttttttttgccccagttattagcatgtgctcataccataacgaattgctgcattcttctgccnnnnnnnnnnnnnnnnaaaaaaaaaaaaaaaaa

SEQ ID NO: 146169 - DNA, 434 bp, Zea mays
  Clone ID: MRT4577_64823C.1
agcagtggtaacaacgcagagtactttttttttttttttttttttttttttttttattttttttttttttttttttttttttttttttttttttttttttttttttttttttttttttaaatggcccacccccaacattatttttaacgcccaacaaaaagggcaaatcttgggaacccaaacaaggcattgttttcaagcgggggaagcaaagcaggccaaaaagggttcattccttcagggggaaaaagggaaggaaaccccaaccacagggggttcaggggcccgccctaaaaccgggccaaaaattcaaaagggagaagcctatgaccaggcccttttttgggggaaggcacccccacttcctggcgcaaggggggggacaaaggggggaacactacccccacagggggggggtgtttaacccaaacccc

SEQ ID NO: 146170 - DNA, 284 bp, Zea mays
  Clone ID: MRT4577_64824C.1
caaacccaccctcccaagtcccaagcccaccgaacgctagtgaccaacccatccgtgggaggactgaaaaaaaaaaatcgtgccgaagcaactttcgccgccatggcacgcgatcccccgacagctgcggagaaggagaccctggtctccttcttcatcgagatcaccgccggccagaccctctagactgccacccagttcctccagatgacgagctgtcacctggaggaggcgctgcatctgatctacatcgacggtgaggcccgccacaccgtcgcgcattc

SEQ ID NO: 146171 - DNA, 358 bp, Zea mays
  Clone ID: MRT4577_64825C.1
gtggtagatttttttgtttatttggtggaaataaaaatatgttttttggttccatacctttttttatctgatagtaaaattattttttctaaggaaaatgcagattttttcaaagcgggctttgaataacagttggcaaccaccccaaaaggctctcctttgggggggaaagggggaaaatacaggccccccacctggtcatgggtctggggcccggggattttttagaggaaagggaaaaaaacctccgtccccccgctggggggaggatcatgtacaccgacccctgcttggggggctcttcaaatgcccaaccccggttttttaggggccccctaagttgcaggggacattctaa

SEQ ID NO: 146172 - DNA, 471 bp, Zea mays
  Clone ID: MRT4577_64826C.1
ctctgcaagaatcgttgagatattttgacaaacgcgacccaccggggacaaagaaggaattgaacagacctttttactaatgttcccagccccacaccgttaaactctgaacaaaccgtacaacatcaaactgcccgctctgacgggctaatttgccacaggcgcctaacggttcaaaaaataaatgccccaatcgcaattggacgaactcgtgatgtaagtagccatgcttgttttacgggctgtccgcttacccattggtccacgtgccatttcaataccaaaaaaataggaacctgagttatgtaatgataaacttgcatgaaacgtagatcaccttcaaggacttataagctgtccttggctttaaccaagtttttattaaatagggcattggcctcatcgaaagaacacttcatttctcatttaaacccagccactggcgcacccagtaagtgtcctcaattttaa

SEQ ID NO: 146173 - DNA, 457 bp, Zea mays
  Clone ID: MRT4577_64827C.1
cactcatggcgaatgtccacctctacgcagtctcagcctgcgcaatcattctatcgctcgcgacctatgccttagccggtgacgccgacatgctgcaagacgtatgcccagctgactacacctcctcagtgaagctgaacggtgttcccgtgcaaagcaaacttttcatgcgcacgactgattcttctacggtctgaggaacccgtgcaacaccaacaacctctcgggctacttactctacggctgtcaacgaggacaagttcccaggcgtgaacacactacgcgtatgcatggcgcgcatcgactacgcgctgggaggacagaacacctcgtacacgcacacactcgccacctagatcatcttaggcactagacagcacgctcaaggtcagcttcatcaccatcggcaacacgcatttcaccaagaccgtaaccaaggacgacgtcttcgtattca

SEQ ID NO: 146174 - DNA, 1720 bp, Zea mays
  Clone ID: MRT4577_64828C.1
gcaggcaccaccccgctcagccttcggtggcgtcgcccacgaggctgatccaccgccaacagcccgccactgccaccacccgcctccgcgccgtctcgccgtctccgtctccgccgaccttcttcgtggacgtgtcggcagatgtatgccgccttcttccggcacgaactcgtccagcccatagccgttgtaggtcacctccctgctgacctcaagagtggggtccagcttgccgaccagggccagcaggagcgtcgtcttgccggacgacggtgggccgagaagcagcgtcatcctggacgggcgcacgacgccggagccgtccttgaggatgtggagcgtcttcctcttgccgagcttgaccccgacgcgtcccagcaacgattcggccacgtccagcgagacgttcgccagcgtgggcagagcgcgggtgccgacgtggcactccgcctgcacgttgacgccccggaacctcacctccaccgtggggatctggatgttggcgcggtcgatgcgcgggcggagcttcctgaggaagcgctcgttgtcctcatcggtgacccgtaacacgcgctccacaaaagcctggcgctgcgcgagccccatcgcgcgcacgtccacctcctcgtgcgtgtgccggcgcctccggccgcggtcgctggcgttgccgccgtcggaagcgtccgccggccgcacgaggcccgtgcgcaggcgctcgaaggacggtagtcgctccatcatgacccactgcagcgcctcctcattgtccacctcatcggcgccgctgaggcaccgcgacgatgcgcccgagaagtatgggggtggcgtcggggctcgccatgccgtgcaggcctcagctcagcgtctacatgcttgttgcgccacctccgggcctccggggtggccgtgctcccgggcctgacggagctggagctggcgcccgcgaggccgagatggggttcgcgttcccgcccaacctccgcgacgtcctcgccgcgggcctgtcgtcgaggctcgggttcccggacgggctgcggtccgccttcgacttgcccatcacggcggcgtcgctgcagatcgcgcagggcgcgctatggccgcgctgctggggcgcgcgccccgcgacccagatccgcgcgctgcggctccctctcccacgcatcgtgatcgcccccgaggcggagacccctgctttgacggcgctaaggccctcctgctcatccttgccaccacctagacatcacgcctaagcacctcggtagccgccacacgtgcctcgccctgccacggcgctgcagccagagccaggcgctcctgcacagaatttaggggatggaggccactggtgcaagtgccactcaccaccaccaagatggacgctgaggacatggaggatgtacaagcccccacggccgtccaggttgtcaaaccagttgattccttcagtagtaagggacgttgaagacacccagatcatactagcgacagaaaaaataattacgaatgaagcaaggttcttgtgtcaattctcttgaagcaaggttcttatgtcaattctctatgtaccttagcagcattacaaactaacaactcataacaatgtttgtgttatgaaatatggaagtgagcttactgtacaaattgtgcagcgactgtctctggttgccaattcgtacatttgctaaagatgtgcttcaattgctaacaatatttgttattt

SEQ ID NO: 146175 - DNA, 259 bp, Zea mays
  Clone ID: MRT4577_64829C.1
gttggggggtggttattaaaaaatcttgttctggcctccttacttatgtctttatacgcagatcacatatgtgttgagcggaccttttacgaaaaaaaaatggccgtggcaacgggatcggacaacagggggacaaccaaaaccgcactgcaagaacgccaaatggtgcggcgggggccttgcgctacctgatgtaacgccctcttggggcttggcctacaccacaaaaggtgagggaactgagggggtggcaaccggg

SEQ ID NO: 146176 - DNA, 1180 bp, Zea mays
  unsure (1)..(1180): unsure at all n locations
  Clone ID: MRT4577_6482C.1
gggtacccctncgaggggccggccgggnacccacgggnccgacgcaaacccaggaaagaaacgaagcgagcggcaccaccggcgcgtcctcggctcctcgcgtgcgtgcttaccccggcgaatattcgaccacggaagccgcataacctccgtccatcccatccccgctcgcctctcctctcctcgccccgctctagacgatcgatggccgcgacggcggcggaggagatggagaggatggtggaggcggagtgggaggaggggaagcaggggatgaggaagaggaagcggtacgggctggtggagtaccgggcgctgccggcttacctgcgggacaacgagtacatccaccgccactaccgctgcgagtggccgctcccgcaggtgctgctctccgccttctccatccacaacgagaccctcaacgtctggaccaacacaagttccaaatgcagtagatatccggagcttgcagcatttgccagatgtactgagaaaggctgatattcataagattcaggcagagcttgtgtcatgtcttccatcgttacctcacctttcagatctacaaaagctgaaggatgagctgaagacctcttggaattctatggaggttcttccatctctgtcccgttggcatctcttggagttactcgcaaattgtctgccacacagatttacccatcccaatgaaacaagtttgtctgttcttgtaagtagtctacaactcgctgaattacttgattacattcttttacttttgctacaagggtactactgttttgcattaaggtcaagggaggttaatttttctgaagttggcgaagatttcacttctgtaggtctatatcagagaaaatctgaagatcaatgtgatagatctttctgaccttaggaactagccgattccctctcttaacctgtctcaattctttctaataaattgtagatttataacttgtgcactagtgaggtagagaaggagagagagggagtacgaggagccataccttcgggcctgaggtggagagcagccgcggtggtagtcggngtcgtagatggctttggaagttgagcgcctccgtcctgatttatttctcctccatatgtgtttggaccttggggtggagcattagtggccggcacatagaactattaggtctacaggcgccatgggtag

SEQ ID NO: 146177 - DNA, 388 bp, Zea mays
  Clone ID: MRT4577_64830C.1
ttgcctaggtagaccgactgtacgccaccattctttgcaagccagtaggcaaccactcaaaagctcgggacgcaggcgagatgggcatggtggtgcacgtgtccactctgtaggtcgtggaccctcctgaccgcgactactcgtgccctcgcccggaccgctgatgcccatgccacagctcctgacgaggctcctgtccctggccctgatgggccaattcgtggaccaccctgctgttcctgctcatgaccaagtacactgcgatcgtgtacatgaacaagaccacacgcctgtgtggtggtgcccaactccccgtgcgcgggcgtgaccatcctgagcatctggacgcgctcacccgcaccatcctgatcgctgggtgctgcaccga

SEQ ID NO: 146178 - DNA, 718 bp, Zea mays
  Clone ID: MRT4577_64831C.1
gctcaatggttaagcctccaaatcctaagaaagcattcagagatgaggctgtgacaggagacaggtctcattcagctaagagttcagatgaggataggcctattattggaatggttgcagcacactggaaagataaagagccagcaaatttcacctctaaatggtgggatggaaatggcattcccaattcaacaaataagtacaaagaagaccaaaaggtgagctggcatgcaacaccatttgaggagaggcttgagaaggctttatctgaagagaagtcgctctctgaaaggaactgctcgagtggaaaaacatctcagtttttaggagtggaaggcgaggagagtgatactgctggatctaaccgtctatatgctactgcttatgcatgacaattctgctagccacgaggcacagaagctttcagtacaatggttttctgctatcaccctcctgattgattgcatttgcacagccctgttttcctctgtcctagagtaggtagcatccggatgtgatgtttcagtttgtgcttacctcaactgtttaagatataattaactctaatactgttgctgcctcagttgacaagtataaaatattgttggtaccttctattgttctggtttgcttgcgctggtaaaaaaaaaaaaaaaaaaaaaaaaaaaaaaaaaaaaaaaaaaaaaaaaaagaaaaaaaaaaaaaaaaaaggccccta

SEQ ID NO: 146179 - DNA, 532 bp, Zea mays
  Clone ID: MRT4577_64832C.1
ccggccggaggaccggtcactctgcacgcaggatagcagcacagcagcagccagagccatcccctctcctcgctacgcttagcttcctcggcgccgattcttcctcctcctcctccaccatcgtccgtccgcttccggcgcgcgagctctgcccgagatggcgaacgaagagatcgcatgtcgctgcgaacggatgagagcatgcatgaaggtcgccgagctgcaggcgaagaggctgcaccgcttcataactttacagatgcacgacaaggtcaaggagatagatggggaccaggacactcatcgcgctaccagctaccatgacttcacaaacagtctccctgagaatgactgccgatacgcgatctatgatttcgactttgatactgcacaggatgtccagaagagcaggatcttctatatcctatggtccccatcctccgccagggtgaagagtatgatgctttatgcaagctcagaccacagatgtcagagtgacctcaatggtcattcgaggatgaactccaggcca

SEQ ID NO: 146180 - DNA, 274 bp, Zea mays
  Clone ID: MRT4577_64833C.1
ggagggaggagtatgctctttattacagcaacatttaccattacacaataaataataaataacttagtttaaaaaatgattgccccataatcatttgatatagtaaaaaggaacaggacgacactgactgattgactgacaacatggggcatttaaattgacacacaccaaatgacagaactgaaaaaagaacaaaaagcgaagccatatccgttgctacgaaaaaggcgatcttcccgccatcaccaaaagaaacataagctactatgaaacc

SEQ ID NO: 146181 - DNA, 773 bp, Zea mays
  Clone ID: MRT4577_64834C.1
attgggtacctcgaggccggccgggacccgcgagatctatagaaccgggccaacactttcatcgctcaggcgctcagctctagcaatggctgcctccaccatgcgcgatctcctccacggcgatggacggtacccccatcaagggggactccttcggcgaggggcgcatcaccatgcgcaaaaccgtgggataagcccaaggtggctgtagtccggcagtccctggaactgcccctaccgcatcaagtacctcgggcccttctccggggagaccccgagctacctcaccggcgagctccccggcgactacagctgagacagcggcggagtgtcctacgaccgctagaccttcacccagaaccgcatagctgaagtggatgcactcccgctgggtcatgatctgtgcgctcggctgcgtcgttacccaatctgtgtctccctgcatagttgcctagttctgagaggccggctgagtcaaggccggatcccagatcttcattgatgacgctgtggactaccttggaaaccccaatctgatccacacgcagagtagtcctcgacatcatgggcctgacatcgtatgtgctcatgggacgccgttcagggctaccagatttgccggcgggccgctcggctaggtcttctacccgctgtatcctggcggcagcttcgaccccctcggactgtgcgactaccccgatgccttcgccgagctcaaggtgaatgagatcaagaacggccgactcgccatgattttcatgtgcggattcttc

SEQ ID NO: 146182 - DNA, 195 bp, Zea mays
  Clone ID: MRT4577_64835C.1
gcgaaaggcaagggacgtaagaagtcgtctaattcttggatcgaattagacgacctcttcgtccctctcttcattaacaggctaacttgtaatcagcaggatctaagcatagacttgatttagttatggacggattggaaggcctcttgaaagttcgcgtggtccggggtatcaaccttgcctatcgcgacgcaa

SEQ ID NO: 146183 - DNA, 361 bp, Zea mays
  unsure (1)..(361): unsure at all n locations
  Clone ID: MRT4577_64836C.1
gcgttcggctggggnatggangcgagttggtctgtacgcgcccggcgcggcgatccccgccgccgccgccgaaccgctcgcggcggtggcggaggaaggggaaggggaagcggagggggaggcgcccgcctaggcggcggtggggttcacccttatcatgtagcgcgtcgccgccgccaagttggggtggggggccactaccgttcgnagatgaagaccatccatgtatctcaaggagaggcgctttaaattggagagacagtttgcttcttttaaagttcccaaggtgcagtaaattggtttaatcaaatatgttttgnagaaggaaactgaatacgttccgactcaaaaggcacaaaat

SEQ ID NO: 146184 - DNA, 196 bp, Zea mays
  Clone ID: MRT4577_64837C.1
tctctgacgcgtgcgcggccgcttgggatgcggagctggttcacaggaagggcgaccgctaagggaggcggaaccatatgcgcaatgactataccgtttataaccatcggaatggacaatcttatcgttctattgaggccgcatcgacggctatacaaaggactgggaaaaacccgctagcggagttcacataggt

SEQ ID NO: 146185 - DNA, 441 bp, Zea mays
  Clone ID: MRT4577_64838C.1
cggattcccggtcgaccacgcgtccgtgacttcggaggctccgaaactagtttcccgtgcagggagcccttaacgaccggggaccggtgccatgtacacgtgcgagactgcctctactagaacacaaggactactgctggctataacaaacgcctagtacagtggctgcagaccatgcacccggtgatgaacgaatgcacctttctccagaagcagcactgtctgtactgctacttgggatacaaatggcgacattccgtctataccttgtatgtcgatagtcaagctatgactatgaaccttactgacaaagctatgaggctcctaagagctgatgaaccctatgatgatcttgcctgctcgtgtacacaaatgcgctcacttgctgtgtacgacaagacatcttttggatactgcgccttgaatcatgtaccagggatt

SEQ ID NO: 146186 - DNA, 243 bp, Zea mays
  Clone ID: MRT4577_64839C.1
gttattttgagtccaagacatggggaatgatgatatgatatgttgggtggcggatgatttttatagcgttacaaaactttaagggtgaaaaagttaagagaagacttcaagactgctaaaacctaagatgacggaaagtacaatggcgtatgcactaatgctgtctaatcgacgtagctcatcagcggttagacacgacaggcaaggtaatagagcgaggggaacaataggaattttgaactg

SEQ ID NO: 146187 - DNA, 868 bp, Zea mays
  unsure (1)..(868): unsure at all n locations
  Clone ID: MRT4577_6483C.1
cctcgagccggccccatccctgccctcttcccggtcgccttcttcccttgctccgccctccaccattcctgagcccaccgcccgccactggagcctagcccggccacggccttgtgtccccttccgcctccaccaggcaccaccacaacaggaagatgaagaccccaatgtcgccgcctgcttgtttgcctatggtgcttgatcgacacgaaacgcccaggaccagccaggcgcccagcaggttggcagccgcgccgccaaaagctatcgcgcggcctccttgtccaaatccgcagggtcaagaggacaacgggtcgcgcggccccctcgtcgagatccacagcccgacgcaaacccaggaaagaaacaaagcgagcggcaccaccaacgcgtcctcggctcctgcgtgcgcaccccgacaaatattcgaccaaggaagtcgcataacctccgtccatcccatccccggtcgcctctcctcgccccgctctagacgatcgatggcagcgacgacggcggaggagatggagaagatggtggaggcggagtgggaggaggggaagcaggggatgaggaagaggaagcggtacgggctggtggagtaccagacgctgccggcttaccagcgggacaacgagtacatccaccaccactaccgctgcgagtgaccgctcccgcaggtgctgctctccaccttctccatccacaacgagactcatcgtatggttgccagttccattcctgaatgcagtagcatttcgaattttccagcactatatggtaatcttcgaactataagtccaaaccttctctctgcatgctgcaanaataaatacctcatgggagaagtcagaataaatgatctggc

SEQ ID NO: 146188 - DNA, 754 bp, Zea mays
  Clone ID: MRT4577_64840C.1
aacgtatatgcccttgtcccggttcctttccccatccccaactccattatttgcttgatccttgagaagagagaggaagacgagagctagaagcgaaggagaaaagcagttcttcagctaggcaggagggcacaggaaggaggagatggcgtcaaagaggattcagaaggagctcaaggatctgcagaaggaccctcccacctcgtgcagtgcaggtcctgttggtgaagacatgttccactggcaggcaacaataatgggtccatctgatagcccatattctggtggagttttcctaatttacgtatatgcccttgtcccggttcctttccccatccccaactccattatttgcttgatccttgagaagagagaggaagacgagagctagaagcgaaggagaaaagcagttcttcagctaggcaggagggcacaggaaggaggagatggcgtcaaagaggattcagaaggagctcaaggatctgcagaaggaccctcccacctcgtgcagtgcaggtcctgttggtgaagacatgttccactggcaggcaacaataatgggtccatctgatagcccatattcgttctatccttcctgtataatgatgaaccgaattgggtttgcagtacagtgccgcgtgtggtgctgaatgctgctgtattgtgtcacttggaagctgtaattctcagtgtcaaaaaaaactggtacttggaaccattttgcgtcggatggcgctgcaggccagtcaaaaac

SEQ ID NO: 146189 - DNA, 1742 bp, Zea mays
  Clone ID: MRT4577_64841C.1
atttacgtatatgcccttgtcccggttcctttccccatccccaactccattatttgcttgatccttgagaagagagaggaagacgagagctagaagcgaaggagaaaagcagttcttcagctaggcaggagggcacaggaaggaggagatggcgtcaaagaggattcagaaggagctcaaggatctgcagaaggaccctcccacctcgtgcagtgcaggtcctgttggtgaagacatgttccactggcaggcaacaataatgggtccatctgatagcccatattctggcggagttttcctagtcacaatccattttcctcctgattatcctttcaaaccaccaaaggtacagcaaacgagcatttagggatgaccattcctttttttttgtgcattttgtcctttgtttgccattgaatttgtaaaataaacatatgcttaagctcatttacttcctaggaggattactctgacatatgcactatatatctgtgatgtttagtaccttgacaatgcatatgagctaatgtgcagtagccaatagcttatcggttagatgccatgcccactaagcgcacttgctgaaaacacttgagttatttttggatgaaacctttaaggccttgttcggttgtgcctggatcgaatgagattggggggattaaatcttcttctattcaattttgactaggaagagatttaatctcctccaatccccttcgatccagacgtaaccgaacaagccctaagggagtggattggagggatcaaatctctttctagtcaaaattgaataggagatttaatccctctgaatccccttcgatccccatacgaccgaacaagccctaagaagattcaagattgtaacagtttgcgaaaggacctctagccgagttggttaggtggtctgagtagcactcatcaggtcctatggagcgaattttcgagctgtggttaaagaaattttctcgtctgttccatgccaaagcataggtttaaggcctggccctagtcgcggtcgtctcacatgggctacggtgccgttgtgtatgggtgagataggggtttggggagttttctcactgtccggtgcctgtcttacctcttaccctcgtaggtagagtttttttagattgtcacagtttcatgtgcaatcttgaaacccttgatatctgaaatttacctgccttaccaaatccatatatccttaaaaatgtttgtcatattccaaaccatgtaacctagtatatgtatgcgatacgcaggtggcatttcgtactaaggtgttccatccaaacatcaacagcaacgggagcatttgcctcgacatcttgaaggaccagtggagtccggcactaacaatctccaaggtgctgctgtccatctgttccctgctgactgatccgaaccccgacgaccctttggtccccgagatagctcacatgtacaagacggaccggcacaagtacgagaacaccgcgaggacctggacccagagtacagtgccgcgtgtggtgctgaatgcagaatgctgctgtattgtgtcacttggaagctgtaattctcagtgtcaaaaaaaactggtgcttggaaccattttgcgtcggatggcgctgcaggccagtcgatgcttgcgtccttcttcccttcaccagtcatcatgttggaagaaacataacgttctgtctcttgagtaactggtacgaaacaataatgatcgttggggatttggttgcagc

SEQ ID NO: 146190 - DNA, 761 bp, Zea mays
  unsure (1)..(761): unsure at all n locations
  Clone ID: MRT4577_64842C.1
tccgcatttacgtatatgctccttgtccacggttccttatccccatctcccaacttccattagtttgcgtgggatccttgagagagagaggaggaagactgagagctactaagtcgaagggagaaaagcagttcnttcagctagtgcaggagggcaccaggaaggatggagatgtgcgtcaatagaggattcagaagggagctcaaggatctgcagaaggaccctcccacctcgtgcagtgcaggtcctggtggtgaagacatgttccagagatggcgtcaaagaggattcagaaggagctcaaggatctgcagaaggaccctcccacctcgtgcagtgcaggtggcattccgcaccaaggtgttccatccaaacatcaacagcaacgggagcatttgccttgacatcctgaaggaccagtggagtccggcactaaccatctccaaggtgctgctgtccatctgctccctgctgactgatccaaaccccgacgatcctttggtccccgagatagctcacatgtacaagacggaccggcacaagtacgagaacaccgcgaggacctggacccagaggtacgccatgtagtagtacctggctggcctttggggccgccgggtctccggaatcgtcgctgctgctgctgcgttgtgttgccggacctggacgtgtctccatgttttcgatctgtcctgtataatgaatgatgaatcaaattgggtttgcagtacagtgcaccaccgtgtggtgctgaatgctgc

SEQ ID NO: 146191 - DNA, 852 bp, Zea mays
  Clone ID: MRT4577_64843C.1
cccgggcctggccctagtcgcggtcgtctcactgggctacggtgccgttgtgtatgggtgagataggggtttggggggttttctcactgtccggtgcctgtcttacctgttaccctcgtaggtcgagtttttttagattgtcacagtttcatgtgcaatcttgaaacccttgatatctgaaatttacctgccttaccaaatccatatatccttaaaaatgtttgtcacattccgaaccatgtaacctagtatatgtatgcgatacgcaggtggcatttcgcactaaggtgttccatccaaacatcaacagcaacgggagcatttgcctcgacatcttgaaggaccagtggagtccggcactaaccatctccaaggtgctgctgtccatctgttccctgctgactgatccgaaccccgacgaccctttggtccccgagatagctcacatgtacaagacggaccggcacaagtacgagaacaccgcgaggacctggacccagaggtatgccatgtagtattttctctacctggcctttggggtcgctgctgcgttgtgttgccgggacctggacgtgcctccatgtattcgttctatccttcctgtataatgatgaaccgaattgggtttgcagtacagtgccgcgtgtggtgctgaatgctgctgtattgtgtcacttggaagctgtaattctcagtgtcaaaaaaaaactggtacttggaaccattttgcgtcggatggcgctgcaggccagtccatgcttgcgtccttcttcccttcaccagtcatcgtgttggaagaaacattatcgtctgtctcttgagtaactggtacgaaacaaatatgatcgttgg

SEQ ID NO: 146192 - DNA, 331 bp, Zea mays
  unsure (1)..(331): unsure at all n locations
  Clone ID: MRT4577_64844C.1
gaacacaatatctatctgagagctctttatcgcttatgctttcccaaatgtctaacaatttctatgcatatgnnngcatgtatatatcctaatattacatcaactacagtcaccactagatggtcaatggaccataacatgtgttgtctccaacattaccattgggagggttcccattgaaatttgacatattatatcacccattggggattgccattgttaaaaccaacttcatctaatatggtgctgtatcttctcctgattgatggcttttctggctcctgagtgtgagcctgctttaatcctgcacaattggactggcctcaaatct

SEQ ID NO: 146193 - DNA, 296 bp, Zea mays
  Clone ID: MRT4577_64845C.1
ctggggaaaaccccccattttccatttctataaaaaggtatgatccccacccgataggccataacaggggacaatcccccttttacaaaagtttaacccattaacaggaaacaatacccgttatacaaaaatacaccctacaaaaccctaccatacactactttacttttattacacccttattcctggttgccatcaaccttgggggctttatcttgagggggtgggaggccagacgtcccccaaccttaaagaaggggggggcttaaaaagggttaactccccccccaaggccc

SEQ ID NO: 146194 - DNA, 473 bp, Zea mays
  Clone ID: MRT4577_64846C.1
ccgtgcgtaagctcggaattcggctcgaggggaggacgcctgctctgtggtgggacgccagcgctactgaggagggtggctatcatgtataacggacgcctgcaagatctcgcgcgtgcacatacacctgttgtggtgcgacacgcaggagcggacgtactgacgcatggcgctactactagtcagacctgctctgaaccactccgtctgactattgtgagagcacatgctcagcaagaaccacataaatttcatgactgagacgttgatatactacctggcgaccctaccgatagccacctgctccatcagcctctcctcttgcgctaccttctcgctaacctcgctcttaggaaggggcacggcgctctagacgctctgctgccagcccttgggggcgaggaagagctccacgctaggcgtgtacttgcagtggtcctgcatcatccttggcagcggctgaagcgtcatga

SEQ ID NO: 146195 - DNA, 1153 bp, Zea mays
  Clone ID: MRT4577_64847C.1
cggacgcgtgggcggacgcgtgggcggacgcgtgggtgagaagagagaggaagacgagagctagaagcgaaggagaaaagcagttcttcagctaggcaggagggcacaggaaggaggagatggcgtcaaagaggattcagaaggagctcaaggatctgcagaaggaccctcccacctcgtgcagtgcaggtcctgttggtgaagacatgttccactggcaggcaacaataatgggttcgtcggccggcgggtattcagaggtacccatttacgtatatgcccttgtcccggttcctttccccatccccaactctattatttgcttgatccttgagaagagagaggaagacgagagctagaagcgaaggagaaaagcagttcttcagctaggcaggagggcacaggaaggaggagatggcgtcaaagaggattcagaaggagctcaaggatctgcagaaggaccctcccacctcgtgcagtgcaggtcctgttggtgaagacatgttccactggcaggcaacaataatgggtccatctgatagcccatattctggtggagttttcctagtcacaatccattttcctcctgattatcctttcaaaccaccaaaggtggcatttcgtactaaggtgttccatccaaacatcaacagcaacgggagcatttgcctcgacatcttgaaggaccagtggagtccggcactaacaatctccaaggtgctgctgtccatctgttccctgctgactgatccgaaccccgacgaccctttggtccccgagatagctcacatgtacaagacggaccggcacaagtacgagaacaccgcgaggacctggacccagaggtatgccatgtagtattttctctacctggcctttggggtcgctgctgccgggacctggacgtgcctccatgtattcgttctatccttcctgtataatgatgaaccgaattgggtttgcagtacagtgccgcgtgtggtgctgaatgcagaatgctgctgtattgtgtcacttggaagctgtaattctcagtgtcaaaaaaaaactggtgcttggaaccattttgcgtcggatggcgctgcaggccagtcgatgcttgggtccttaaaccaaaaaaaaaaaaaaatgtaaaaagacacacccccccccc

SEQ ID NO: 146196 - DNA, 879 bp, Zea mays
  Clone ID: MRT4577_64848C.1
ggtacccccgggtccggccgggagaggaaacccatttacgtatatgcccttgtcccggttcctttccccatccccaactccattatttgcttgatccttgagaagagagaggaagacgagagctagaagcgaaggagaaaagcagttcttcagctaggcaggagggcacaggaaggaggagatggcgtcaaagaggattcagaaggagctcaaggatctgcagaaggaccctcccacctcgtgcagtgcaggtcctgttggtgaagacatgttccactggcaggcaacaataatgggtccatctgatagcccatattctggtggagttttcctagttacaatccattttcctcctgattatcctttcaaaccaccaaaggtggcatttcgcactaaggtgttccatccaaacatcaacagcaacgggagcatttgcctcgacatcttgaaggaccagtggagtccggcactaaccatctccaaggtgctgctgtccatctgttccctgctgactgatccgaaccccgacgaccctttggtccccgagatagctcacatgtacaagacggaccggcacaagtacgagaacaccgcgaggacctggacccagaggtatgccatgtagtattttctctacctggcctttggggtcgctgctgccgggacctggacgtgcctccatgtattcgttctatccttcctgtataatgatgaaccgaattgggtttgcagtacagtgccgcgtgtggtgctgaatgctgctgtattgtgtcacttggaagctgtaattctcagtgtcaaaaaaaactggtacttggaaacaaaaaaaaaaaagcggccgctgcaggccagtcatgcttgcgtccttcttccctcact

SEQ ID NO: 146197 - DNA, 1853 bp, Zea mays
  Clone ID: MRT4577_64849C.1
gggtccggcgaggccggggccggccgggagaggaaacccatttacgtatatgcccttgtcccggttcctttccccatccccaactccattatttgcttgattcttgagaagagagagggagagagagagagagagaggaagacgagagctagaagcgaaggagaaacagcagttcttcagctaggcaggagggcacaggaaggaggagatggcgtcaaagaggattcagaaggagctcaaggatctgcagaaggaccctcccacctcgtgcagtgcaggtcctgttggtgaagacatgttccactggcaggcaacaataatgggtccatctgatagcccatattctggtggagttttcctagttacaatccattttcctcctgattatcctttcaaaccaccaaaggtggcatttcgcactaaggtgttccatccaaacatcaacagcaacgggagtatttgcctcgacatcttgaaggaccagtggagtccggcactaacaatctccaaggtgctgctgtccatctgttccctgctgactgatccgaaccccgacgaccctttggtccccgagatagctcacatgtacaagacggaccggcacaagtacgagaacaccgcgaggacctggacccagaggtatgccatgtagtattttctctacctggcctttggggtcgctgctgccgggacctggacgtgcctccatgtattcgttctatccttcctgtataatgatgaaccgaattgggtttgcagtacagtgccgcgtgtggtgctgaatgctgctgtattgtgtcacttggaagctgtaattctcagtgtcaaaaaaaaactggtgcttggaaccaatttgcgtcggatggcgctgcaggccagtccatgcttgcgtccgtcttcccttcaccactcaccagtcatcatgttggaagaaacataacgatctgtctcttgagtaactggtacaaaacataatgatcgttgggaccggcacaagtacgagaactccgcgaggacctggacccagaggtatgccatgtagtattttctctacctggcctttggggtcgctgctgccgggacctggacgtgcctccatgtattcgttctatccttcctgtataatgatgaaccgaattgggtttgcagtacagtgccgcgtgtggtgctgaatgctgctgtattgtgtcacttggaagctgtaatccccagtgtcaaaaaaaaactggtgcttggaaccaaaaaaaaaaaaaaaaagcgtccatagacaaaggtcgcaagaagtgcctaattctttggttaaggatacaggattgggcaaatttcatatttaactttgtaaaggataacgggttggaagtaatgactatcgaagaaatacgctctggaattgatacacgtggaactgaactcgagggaattgatcgtggtgttctcatgcgggctctgcggcagttggagcaaaagggaaaggcagctatcttcaaaggcacctctgctgatgacgaaggcgtaaagttttcggtgtaattattttgcgatccttaaactggcagactaataatctcgttcagccggtgcccttgaacatggcatgacacacccatagcctcgatcattcagtgccctttgaaaatggcatgacacatccttgtaaaaagcagtagggctgatcacattcttcccgagtggtatcctcttcagtgctgcggtaaaatttcccaactcatcttttgttgtagtgaaaaatcgaccaagcctgattaaacattgtggagtggttggtaagaagttgaactggtcatgcctcttacgctgattgatttcccgatatctaagcaaaggtgttcatg

SEQ ID NO: 146198 - DNA, 1776 bp, Zea mays
  Clone ID: MRT4577_6484C.1
ccaccaccggatcgacacgaaacacccaggccccactccccaggcgcccagcaggtagcagccgcgccgccaaaagcgatcgcgcggcctcctccgtctccgtggctccgtccaaatccgctgggtcaagaggaggacgggtcgcgcggccccctcgccgagacccacgggccgacgcaaacccaggaaagaaacgaagcgagcggcaccaccggcgcgtcctcggctcctcgcgtgcgtgcttaccccggcgaatattcgaccacggaagccgcataacctccgtccatcccatccccgctcgcctctcctctcctcgccccgctctagacgatcgatggccgcgacggcggcggaggagatggagaggatggtggaggcggagtgggaggaggggaagcaggggatgaggaagaggaagcggtacgggctggtggagtaccgggcgctgccggcttacctgcgggacaacgagtacatccaccgccactaccgctgcgagtggccgctcccgcaggtgctgctctccgccttctccatccacaacgagaccctcaacgtctggacgcatcttataggatttttcatctttctcgctctgaccatatacacagcaacacaagttccaaatgcagtagatatccggagcttgcagcatttgccagatgtactgagaaaggctgatattcataagattcaggcagagcttgtgtcatgtcttccgtcgttacctcacctttcagatctacaaaagctgaaggatgagctgaagacctcttggaattctatggaggttcttccatctctgtcccgttggcatctcttggagttactcgcaaattgtctgccacacagatttacccatcccaatgaaacaagtttgtctgttcttcaaagcatgaaggaggatctagcaagcctgattgcaccgcaactgatcagaccaattgcgcggtggccattctatgccttcttgggaggagccatgttctgcctcctggccagcagcacttgccaccttctctcctgccattctcgccgcctagcatacattatgcttcggcttgattacgcaggcatcgcagctctaatcgccacatccttctaccctccagtatactattctttcatgtgctaccccttcttttgcaacctgtacctcagtttcataaccatcctaggagtggcaactatcgcgttctctctacttccggtcttccaaaatccggagttcagaaccatcagagcatgcctcttctttggcatgggtgcatctggcgtgatacctgttcttcacaagctagtactcttctggcaccaaccggaggcattgcacacgaccggatacgaaattctgatggggctcttctacgggctgggagcattggtatatgcggcacgggtacctgagcgctggatgcctgggaagtttgacatcgccgggcacagccaccagctgttccacgtcttggttgttgccggagcctacacacactaccacgcagggcttgtgtacctcaagtggagagacctgcaaggctgctgaaaggtactgcatcgttgaggatgtggatagattgtagattccgtgaattcaggctgaaggtcatggtctgttgtaaattgtaacagtaatcatgaaacaattgctacaagtctaccaggtagtcgggcttccattaataatcaattgaagactagtatttatgctattaaaaaaaaaaaaagggacggatgagatcgagactagttctctctctctctctctcctcgtgc

SEQ ID NO: 146199 - DNA, 1467 bp, Zea mays
  Clone ID: MRT4577_64850C.1
ttgggaccctcgaggccggccgggaaaaagagtacaaaaatgcctgcggtgagtaggtagtgtcgatagcaatttggcgctgatttgatgccggccactttcatcgatcagccatggtggggaaagaagcgctggttcgatgaagctgcataaataaagccagcacgcgaaccagcagcgttcaggggaagaccatttacatatatgcccttgccccggttcctttccccggccccaactccattatttgcttgatccttgacgagcgggagagagagagagaggaagacgagaggcagaagcgaaggaaacagtagttcttcagttaggcaggagggcacaggaggaggaagatggcgtcgaagaggatccagaaggagctcaaggatcttcagaaggaccctcccacctcgtgcagtgcaggtcctgttggtgaagatatattccactggcaggcaacaataatgggtccatctgatagcccatattctggtggagttttcctagttacaatccattttcctcccgattatcctttcaaaccaccaaaggtggcattccgcaccaaggtgttccatccaaacatcaacagcaacgggagcatctgccttgacatcctgaaggaccagtggagcccggcgctaaccatctccaaggtgctgctgtccatctgctccctgctgaccgatccgaaccccgacgatcctctggtccccgagatagcgcacatgtacaagacggaccggaacaagtacgagaacaccgcgaggacctggacccagaggtacgccatgtagggagggggtaccctacctggccctttgggggtccgccggaattgccgctgctgcgttgtgttcctggacctggacctggactggagactggacgtgtctccgtgtattcgatcctgtgctgtataatgatggatcagattgggtttgcagtgcagtgcgccgtgtggtgctgaatgctgtattgtgccgcttggaggctgtaattctgaatgccaaaaaactggtgattggaaccattttgcgttggatgctgctgcagacgaggccatgtttgcgtccgtcgtattggaagaaagggcgatccggagcaggtggtttcattttttcagaagggaaatcaagctattttcaaaggcacctctgctgatgacgaaggcgtaaagttttcggtgtaattcttttgcgatccttaaactggcagactaataatctcgttcagccggtgcccttgaacatggcatgacacacccatagcctcgatcattcagtgccctttgaaaatggcatgacacatccttgtaaaaagcagtagggctgatcacattcttcccgagtagtatcctcttcagtgctgtggtaaaatttcccaactcatcttttgttgtagtgaaaaatcggccaagcctgattaaacattgtggagtggttggtaagaagaagttgaactggt

SEQ ID NO: 146200 - DNA, 1454 bp, Zea mays
  Clone ID: MRT4577_64851C.1
ccgggcgctttcatagtcagccatggtaatggtatcgcatcgtagccactaaagtaagggagggccccaggaaagaagcgctggttcgatgaagctgcataaataaagccagcacgcaaaccagcagcgttcagaggaaacccatttacgtatatgcccttgtcccggttcctttccccatccccaactccattatttgcttgatccttgagaagagagaggaagacgagagctagaagcgaaggagaaaagcagttcttcagctaggcaggagggcacaggaaggaggagatggcgtcaaagaggattcagaaggagctcaaggatctgcagaaggaccctcccacctcgtgcagtgcaggtcctgttggtgaagacatgttccactggcaggcaacaataatgggtccatctgatagcccatattctggtggagttttcctagttacaatccattttcctcctgattatcctttcaaaccaccaaaggtggcatttcgcactaaggtgttccatccaaacatcaacagcaacgggagcatttgcctcgacatcttgaaggaccagtggagtccggcactaaccatctccaaggtgctgctgtccatctgttccctgctgactgatccgaaccccgacgaccctttggtccccgagatagctcacatgtacaagacggaccggcacaagtacgagaacaccgcgaggacctggacccagaggtatgccatgtagtattttctctacctggcctttggggtcgctgctgcgttgtgttgccgggacctggacgtgcctccatgtattcgttctatccttcctgtataatgatgaaccgaattgggtttgcagtacagtgccgcgtgtggtgctgaatgctgctgtattgtgtcacttggaagctgtaattctcagtgtcaaaaaaaactggtacttggaaccatgtagaaatgaaaaacactgcaggccaaaaaatactagagaacggagacaattcgcgatacaaagtgatgcaaaaaagaatttactctacctggcctttggggtcgctggagcgcttaggcgccgggagcctggacgtgcccccatggattcgttctatccttcctgtataatgatgaaccagaattgggttttcagttcagtgccgcgtgtggtgctgaaagcataatgctgctgtattgtgtcacttggaaactcgtaattctcaagtgtcaaaaaaaaaccctgatgcttggtcccacagtaaactataaaaatggcatgacacatccttgtaaaaagcagtagggctgatcacattcttcccgagtagtatcctcttcagtgctgcggtaaaatttcccaactcatcttttgttgtagtgaaaaatcggccaagccctattaaacattgtggagtggtggtaagaagaagtttaaaaaaaaaaaaaaaaaaaaaaaaaaaaaaaaaa

SEQ ID NO: 146201 - DNA, 626 bp, Zea mays
  Clone ID: MRT4577_64852C.1
aaaaaaaaaaaaaaaaaaaaaaaaaaaaaaaaaaaaaaaaaaaaaaaaaaaaaaaaaaaaaaaaaaaaaggttgtccctcggcgcgggacccccttagggggaattttggaaaaatttccttaaaaggggggcgcggttaccttcctttttaggggccactatccccccttggggggggccgtaaaaaattataggcgcggttttttaaacacgggaatgggaaaaaacccgggggttccacaatataaggcttttggaaaaatcccctttttccaagtggggggataaccaaaaaggcccccccgcttcgcctttccaaaaattggccaaccttaatggggaaagggcccccccttgaacggcctttccaaaaatggggggggggggggttcccccaggggccccctttaactgggcaaggcccttgggggccggggggttggtttttttcctttcttttttaattggcaaggcccgttttccccgtacttttggtttttgggctttcctttttggctcgcatgtcggggtttccccgtcatgtttaccatggggggttcctttaagggtcccaattaagggtttaagggaccttgaccccaaaaaaattggttagggggaaggg

SEQ ID NO: 146202 - DNA, 564 bp, Zea mays
  Clone ID: MRT4577_64853C.1
cgggattctacacgcgcccaccgtactagatgtgctatatctcgcgtcggctccgtgcatcggattagatcctcctagcgagggaaatccatatgagcgcgggagacgcgacataaggacaccatgtggacgaagtagggtgtggggcagggctgcgcggggcgcgcgctctaggtgagcacggacggggttcgtcagcatcgggcgccgcatccgaccggatcgcctactgcgacctgttgacgctctccctcttcgaatactgcgcgctgcgtgaggtctctatgcacatcctccagaacagcccatggattaaccagttgcacaagtagcgctaccgcaagagggtagagaccgacgcgcagctcagggtcagactagtgaacttgctgttgttcactattcttgccgtgatcatggacgggataaaggaccagatcgacccccgtgacaaggtccaccaacgcgggaaggatgtgcaagaacatgtgctgactcaccatagtcatcctcatgtgcttgaagcccaactgcgcactcaactgctattaatatatatacaag

SEQ ID NO: 146203 - DNA, 1533 bp, Zea mays
  Clone ID: MRT4577_64854C.1
tcagcctgtaaattctgataatcatgccaaatatgaagatggagatgaaagtgaaagtgtggaagcacggaacacccgacatcatcaacaatatgaatcgctaaataaaaaatcaagtttgaagaggcgaaaggataataatagaagcaacagctttcatgagctacacaaggacaatgttgacattgactgcaggtttgatacagacggcactgaaaacacctcaataggtgactgggataatagtccaccacaagggggtgatgtcaaagcagtgaaatctggtgctcgattgctaggcactaagaggtttagcaaggagaagggaagtaatggtttgtcaaatgtaaacaagaaattggtaaagatgggtaagaaaattagtactaagaagcaaaagaatgacaaaacaaataggcagtttcaagaaaatcacaaaaaagctgacattgtggatttgcttcatgaagatgatggagatgaaggcacatacatagactgtaatgaaattcgaaaacaaaaaacagatgacgtgagagtaaaatctagaggcaaaatgcaaagtggcaagaaaaaagtcagcagatgtcaggcaagtgatggttcgcacaatggaggcaaggaaatgaaattatcaagtgacatagaagtgtgcaacagaagaggagatggaacaacggcagccaattttgaagaaattccaaaagaaaaggccgatgctgtgaaagtgaaacccaagatgcaaggtgacaagaaaaaaaccagtaaacatcaggcaggcgatggagataaaggagcaaaattttcttgcgatatagaagggtgtgacatgagtttcagcacccagcatgacctgtcgctgcacaagagagacatctgtcctgtcaaaggatgcaagaagaagttcttctgccataaatacttgctccagcaccgcaaagtgcacctggatgaaaggccgctcatgtgctcattcccaggctgcgcgaagacattcaagtggccatgggcgaggacagagcacatgagggtgcatacaggggtgcgcccgtacgcatgcacggaacctggctgcacccagacgttccggtttgtgtcggacttcagccgccacaagaggaagactggcactcgtgtgacaagaaaaagaaacgcggcctttgactgctcgtgcacaagtacaggtttcttctctgacggcgagcgatcagaaggggatggatgctaatcgaataattgcgccaggttccattgtttgcagaattaatctgcattaggagtctaattcatttcattgtttattaccgctgcaacataacagctcattcactgtcgctttaggtccaactgacctgctggtgactgagattgtaccatgtcaattgtatcgttctttcgttcatacttagaaatcgggaagtttctgttgacaggaacgttggatttagtgtacggcgcctgttattaacatgcgtgtaattctgtactgaagtgctcctttcttatttttacattttttaaaatctggaaaaa

SEQ ID NO: 146204 - DNA, 349 bp, Zea mays
  Clone ID: MRT4577_64855C.1
aaagggccccaatcaaacatttataaagggggcttttttcggggctttccaacccttaaaaaccaacaaagggggattgctaaccctggggttaaattttaaacccattttcccagttttatagggcttaacataacatttggtcaccttaaggttcatgattcccacaagggaaaccgcaatatctccctccttacacccttttaaaccccgggatgggcttgctcaaattttccttaaattttttttgccccccttataaaaaacttttgtggcttggaaaaaagacacaaactttcttttaaacttttcctctattggggtatattctttttaaaatatttttttt

SEQ ID NO: 146205 - DNA, 788 bp, Zea mays
  Clone ID: MRT4577_64856C.1
caggttacattgggtacctcgaggccggccctaagcgtcagagcacaacaagtagtcaaagcatctagctcgttacaagtggctcttgtcgcctacaattttgccttcttccaagtcttgtttgaagttgctctctgcgaagagccggtagagaagttaatatcgtctagcaatggaccgggtgacgaaactggcttctcagcgcgcggtggtcatcttcagcacgagctcctgctgtatgtgccacacggtgacgcgcctgttccgcgagctcggggtgaacccgacggtggtggagctggacgaggaccccagggggaaggagatggagaaggcactggcgaggctgctcgggcgcaaccccgctgtgccggcagtgttcatcggcggcaggctcgtcggctccaccgacaaggtcatgtcgcttcacctgagcggcaacctcgttccgcttctgcgcaatgccggcgcgctctgggtgtagccgtgttgcatatatatgtagctagccgtgttccattccatatgcatgctatctatcaggaaaggagacacacggagggaagtacgtagtaataattaattaagcaggcctttttatctgcaccgtaataattttccatagaggacggagtgttagatcacggcctctttttcgtgatccgcatcaagttaaatatttcatcagagtatgtatcagaaagatatatatgaggtgaatatagcatcacgttggagtatcagaaggcgcctttttcctgactaaaaaaaaaaaaaaaaaagcggcc

SEQ ID NO: 146206 - DNA, 882 bp, Zea mays
  unsure (1)..(882): unsure at all n locations
  Clone ID: MRT4577_64857C.1
ccacgcgtccgcaagaaaagctgcaactgccaagaagttcaagcactttgggagaaatgctttcccttcggggagtcaagaaagaagctggtggtatgggttctgtttcaagtagtaggccatgtgatgccgagaaagagatgaccctgcgagctacgtgtataactgctcttagagagaacgaaggagatgggcagaggtctccaacgactttagcaagatcaaaatctgtcccagtgtcatcgtccatgtttgatgacatagcaccaaatgccccgtcatccaattgtgaaggctgtaaaacaccaaactcggccacaaggtctgataaagcaaagtcatcattcaaagggagagtttcgagttttttcttccctaaaagtaaaaggcagtcaaaagagaaaatcatcccatctgctagctttgatgggaaagtcgaagtcacttgttttggcagcatgaaaccacaggggtggtcataatattggtcctatgccattntgtgaggacacagatgatagttctgctactcaaacaatatgttcttcaaaagatgtcgtttctattgaagtacctatttcttctgcctgtccaagtgaacatcttgatggatcgagatcaggtggtctgaattgtagctgtgataagcctagccctacttcaattcttgatgtatcatttgaagatagcaacattaatggatctgaatcgtcaagaagcattccttgtagcaacgagagaattgccttacgatccgatgcaattgaatctgtcacgcgctcattatcatgggaggaggatatgagctcaccttcgcctttacttgattcgacaaacttaacccccatctcaagcgtggacgacgatgaacttgaatgtgtt

SEQ ID NO: 146207 - DNA, 190 bp, Zea mays
  Clone ID: MRT4577_64858C.1
aagcatgccacattctcgtatttttcttcaacttattcatgtcaaaagcagccaaccatgtggacctctggttgagatgaacaattgttaacaaagaccagagaagtaacttattgatgtggctgtagaagcatgccgagtttgcactgtgaatgctttgagtgtacaacgtcatatactatggtaagat

SEQ ID NO: 146208 - DNA, 266 bp, Zea mays
  Clone ID: MRT4577_64859C.1
aaacacgttcacatggaatacccttagcaagaagaaggtcaagccacttgagcgcgagggcttacttgattgtgcgcctagctttctatacatgtcatacttgcacgacattgcctcgtcctggctgacgatctaatatcgctgtacatcttgcctgatactatgactgaattctagcttgcgtatgagcaaacccaggattactaccatacaggctggaccaggcaatatgaataagcaacatacctaaatcgtacacttgttga

SEQ ID NO: 146209 - DNA, 793 bp, Zea mays
  unsure (1)..(793): unsure at all n locations
  Clone ID: MRT4577_6485C.1
cggccgggatcctctgcatgttcagctcttggtcactgtggcgcttgccattggcgctctctgccaatactctcctcctgccaactcgacctcgactttcaccaaccccatcgtcgacacgggtgctgatccttggatgttccgccatggtggcttctactacatgacctacaccaacaacgtcaacataaccctctggcgcagcaagtcgataacagactggaacggcgcagagtcaaagaccatctttcacccggagcccaacaagccctactcaactgacctgtgggctccggaaatccaccagattggcggtgcttggtgggtcatcttcactgccgatcccaattacgactcaccaccgcctgaggtcgaaatgtggtgcgaatacaactgtcccgccgtcaatcaccgcatgttcgtcgtggctggtgaaggtcaagacccgtggactgctacctaccggtaccatagccaactcgagacttatgaccagttcgctatagacgggacatacttccaggacaagaatcagctgtatcacatctactcctgctggtaccgtaagtacgatggctggccagccaacctttgcatcaccaaaatgtcagatccctctacaacgacctcgcccttctcagagcgccaggtcatctcggtgccagagtatgcgtgggagaagacgccttttggtcgcgcaagcaacgatcgcctctcgtctaacgagggtcctcaacagcttaccaaccctaccacgggnccaaaacttcctcatttacagcgccgcccgctc

SEQ ID NO: 146210 - DNA, 644 bp, Zea mays
  Clone ID: MRT4577_64860C.1
gccggccggtccgggagctatacaaagcccttcatgactccaatgatcatggcgacatttgtcctttgtgcgaaaatccttccagccatttactggctaggttatacaagacggtgtacaaatatcaccggaaatacccaagactggaggtgatatacatgcaccagtaccggggattttatcaaaagacgcaacaggtgggaatgaggacattgatctcagcataatgtcaatgataaaaattaaaaagcaatttgatctttgcaatgtgatggcttctgatataatgggacataacaactgcccactttctgcaggagatattagcttagatgctacaggtttattttacaaaaaggatttcttgaatttttattgaaaagtaataacctttttttttttaaaaacaaagcatgtataccaaaagaattacctaggctaccacttgcaggcaatattctaatatcatatcaagagaataacacgctaacatgcattcatttaaactttagacttgaatgattttatttacacattagtataaattaatacgtcattttaagcgtgtcaacagatgaatacttttgttgaacacctaataatgaactaataactcggaaaaaaaaaaactataaaggccccta

SEQ ID NO: 146211 - DNA, 216 bp, Zea mays
  unsure (1)..(216): unsure at all n locations
  Clone ID: MRT4577_64861C.1
ctgacgcgtgggaacaaaaagccgcgttgaaacacttgaaagacaggcacggatagcttctgctgnangnnnccacccagagctacctataataattactggttcaaaggatgggacagctccaatgtggcaatctaacaaccacaagcctgagaacacccctaactaaggccctgagccaggttgggccttaaggtatataaaaagggtcaagaa

SEQ ID NO: 146212 - DNA, 709 bp, Zea mays
  unsure (1)..(709): unsure at all n locations
  Clone ID: MRT4577_64862C.1
aattcggcacgaggcttttatccattctctttttctttttaaaagaaataatatccttttcctatttactacttcctaaaaaaaaactagatgatggtttctgcagccaacgaacaagcggttcttgtgaacgaccttttgagcaagatcaacactgctcctacatctgaagaagttgaacaagcagctcaagatctagcaaaaactgtacaagaaaagggatttattatgatcaaacaatacaaaattttggatcaacttttagcttctgttaaaaacaaaaagtctggattagaaagagagggaggtttgataggtttcaatgctatggaagaagttttgcgacatgaaattgaacctttgatgatacaacacttggctaccttccttgatctttatgctgataagggtggtgttgttcaagaggcagcccagactgcttctcgtactttggtggatatgatcccacctgaagccaccaaggttctcttgcctgctcttttagaaggtatgggacacaacagctcgagctcgaaaaagtggcaaacaaagattggtgcactcaagctgcttgaacgttttactgaaagagcccctgatcaaaatcgtgaatgtttgccagagatcatccctgctgtttccgattgtttgtctgataccaaaaaggaagttgcagctgcagctgnaaaggccatgatgaaagtttgct

SEQ ID NO: 146213 - DNA, 1519 bp, Zea mays
  Clone ID: MRT4577_64863C.1
cagcactcagaatataaagtccttagaaacagcccttgcatctcagtcttttctccagctgggactgcttacaggattgcctatggtgatggagctaggtttggaaaagggtttccgtgcagctctgagtgattttatcctcatgcaattgcagttagcatcagttttcttcacattctcacttggaacaaaagcacactactacggccgtactattctccatgggggtgctaaataccggcctacagggcgtaaatttgttgttttccatgcaagctttactgagaattatcagttgtattccagaagtcattttgtcaaaggatttgagttgatcttccttttgatagtctaccacatctttaggagatcttatgttagcaatgtcgtgcatgtgatgatcacatactcaacatggtttatggcagtggcttggctgtttactccttttctttttaacccagctggttttgcttggcaaaaaattgttgacgactgggctgactggaataggtggatgaagaatcaaggaggcataggagtgcaaccagagaaaagctgggagtcatggtggaatagtgagaatgcacatctacgttactcagtattgagttctagaattcttgaagtgttgctctcactacgcttcttcatatatcaatatggacttgtttatcacctgaatatctctcaagacaacaagaatttccttgtctacctgctttcatgggtcgtaattattgccattattggttttgttaagcttgtcaattgtgctagccgtcgtttgagcacaaagcaccaactcgtcttcaggctcataaaacttttgacattcctctcagtggttacttctttggtccttctctattgtctctgtcgattatctatcatggatttgatcatctgttgtctcgcattcataccaactggctggggtctcctccttattgttcaagttttgagacccaaaatagagtactacgcagtatgggagcctattcaggtcatagctcacgcttacgactatggaatgggatctctgcttttcttcccgatcgctgtgcttgcatggatgcctgttatctcggccattcaaacccgggttcttttcaacagagcattttcccggcaactacagatccagccttttattgcaggcaaaactaaacggagatagcataaccgatggttttacatcgcatattggggatttgtgaatatgatctattggttggtcatcagagcaataagtttctgtactctggtagcataaatgtcgtgtgcagtgtgatccatgattctttggcctaagcctgtgccacatctaacatagtaataccttggtttcggtttttattgccgtgtaactttacatatcatttctgtaaaaaagaaacagctctagcattgctcttagatgagttgagactgatgaatctcatgatacctacacagttacaaaggtactaccttattttcatgtgaaatacgacacttattgtactagtgtattatt

SEQ ID NO: 146214 - DNA, 428 bp, Zea mays
  Clone ID: MRT4577_64864C.1
ctctattcgttcggtctggaagaatgatgaattattttcgttgctttgggtggcgatgcctccgtttaacgaaaggaccgtgaacgagcatcgttcggttgtgaaaagggttaagaccctggagtgcccgacaggttataaccaatgagcggggaccgtgtgggaccacagtgcagtgataaataggcgggggccggtgccttgttaaagggccacggacgccctcggggtaaaattctgattagggactaatcgttcgaggatgacgaagggttaacctgtggagggcggaacgttctttcgccattgaggggggtttaagtctgatcttgcgcttttggggtaagggaaatgttttatattctttcctaacggaccgcttggtgtttctccggaaccggaggcgggggccggccggggaatcaggt

SEQ ID NO: 146215 - DNA, 1986 bp, Zea mays
  Clone ID: MRT4577_64865C.1
agtgagaagacaccctatgataatttgataaaggacagggataggccgggcgcgaactgttataaatacacgtacagaaggcacgaaccaagctgtgaaatgaactagaccaatttccttgcagagagtactgttttggcgatggacgttgccttaagcaccattgtgtttgtcatcgccattttcatcccggcactgctgacgctggtgcaaagaagccgtagccggcacgccggccataacccaccacctccgccggagcccagagccattcccctggtcggccacctccaccacctcctgagaaagaagccactccaccgctgcctcgcccacctcgctgagcgccatggagacgtcctggggctccggttcggttccagccgagtcgcagttgtgtcctctgcctcagtcgcccagcagtgccttgtcgcactggacacctcgttcggcaaccgtccacggctgccgtccgcgaggatcctctcctatgagtggtcgaccatgggccattccaactgcgggccgtactggcgccaagctcggcgcaccaccagcacggagttctcctccgtggaacgagtgcagcacttcgctgatgtccacgagcaggcggcccgggccatggcacgcagcctttgtcgtctggcacttgcttctggccggggacgcgctcttgtagacgtcaagccacggctattcgagatgctaatgaacggcttactggacatgctcttcaaggggacagcctctcggagcgggagtagtgacgaaaaggacgaggccgtggaagtgagcgaggaggcccgatgcttcatggctatggcggaggagacgatggagctcacgctgacggtgtgggacttcctgccgccactggcgcggtggctggacgtcgacgcggtgggccgccggttgcagcgactgcaagcaaacaggacggagtttttgcagaggttgatcgaggaacacaaggagatggagaagggcggtcaagtcacacgcaggacgttggtcggggtgatgctggagctgcaggacaaggatcccgaagcctacacggatcagctcatccgctccttgtgtgttagtgcactcgaagctgggacactcagtacaggctatacaatcgagtgggtgatgtctctcttgctaaacaaccctcacatcatgaagaaagctcgcgacgaaattgacgcatgcgtcggggaacccaaacgcctactggacgcgactgatctcccaaagctgccgtaccttcgatgcattatcctggagacgcttcggctgtaccctgtggtaccccttctagttcctcgtgaatcatctaccaactgcacggtcaacgggtttaatatcgccaaaggaacgatgcttcttgtgaatacgtttgctatccatagggatcctaggacatgggatgacccagaaaccttcctcccggaaaggtttgaggatggcagtaaccaatcagggaagacgacgatggatctgtcgtttggcatggggagacgacgctgcccagcagagaacctggggatgcagctggcaggcattgctttggggactatgattcagtgcttcaactgggaacgagtgggcacggaacttgtggacatggctgagggctctggcctaaccatggcaaagaaggttcctttggaggccttctgtcaacctcgtgcttctatggtcgatctccttgcaaacatctagctgctatatatacaagttgtactaataaggcaagcacgtcgtgttattctcgttgttaattgttactattacagaataaatcaaaagtgttgctactttgatatctgctgcttttatataaaatcaccctagctatgtatgtatgttcatgtagaaacctactatcaaataatgtgtcgtgtacagcctcatatagcatgaaatgaaagtatattgtaggcagagaaaatgattctatcgtaaaaaaaaaaaaaaaaaaaaaaaaaaaaa

SEQ ID NO: 146216 - DNA, 442 bp, Zea mays
  Clone ID: MRT4577_64866C.1
ccggccgggcccaacctcatgcacagcaccttggtttaccgaaacggtcctcccaacggtgcggctcaaggccatgatgccaacggaaacggcacccgaggtagaggaggacgtggtcgcggccgtggcagccaccacggttctcccgctcctgatggcgctcctcaggaacagatgtatggtaacgttccaccacccgctagtcttgaccaaccccgaggcagaggccgtggtagaggacgtggaggcagaggacgcggaggacctaatcgtgggcgtggcaacggaggagctggcggtaacggaagccagggctaggtgtccagtcgctccgtcgtggcatggcggtactgaagggcggtctcctgtgatatcacgtcttataacctgtcatcgaaatgcttgcattgtttccagaaaaaaaaaaaaaaaacccgcggcc

SEQ ID NO: 146217 - DNA, 440 bp, Zea mays
  Clone ID: MRT4577_64867C.1
atggatctgtcgtttggcatggggagacgacgctgcccagcagagaacctggggatgcagttggcaggcattgctttgggtactatgatccagtgcttcaactgggaacgagtgggcacggagcttgtggacatggctgagggctctggcctaaccatggcaaagaaggttcctttggaggccttctgtcaacctcgtgcttctatggtcgatctccttgcatatatatatatatatatatacaagttgtactaccaagacaatgcaagcacacgtcattatgaattctcgttgttattacagaataagtcaaaagcgctgctgcttttatataaaatcaccctagctatgtatgtatgttcatgtagaaacctactatcaaataatgtgtcgtgtacagcctcatatagcatgaaatgaaagtatattgtgaggccacc

SEQ ID NO: 146218 - DNA, 748 bp, Zea mays
  Clone ID: MRT4577_64868C.1
attgggtccctcgaggccggccgggatcaaccaaacagtcacttcatcaagcactccaccaaacccacaaatcaaaccatcaacatgcgtttctccaccattgccatgatcgccggtgccggccttgcctccgcccaggtcgactctaccctctcctctgttgccagccaggtccagtctgccatccccggaggcagcgctgcttcgtctgtcatcaactctgttgagtcctccatcggctctgctgtctcttctcgcgtcagctccgtcgctggtggtgcttcctccgccctttcctccatcaacgccagcgcttcctccgcgcttgccagcatcagctctgaggcttccacccttaccggctctgctgctgcctctgcttccagcaaagaatcctccatcaggtccgctgcctcgagcgctgctgcctccgccagccgctccgctagcggtgcctcctcttccggcatggccgctgctacccaggctcccgtcgcgatgggtgccctcgctggtggcctcttccttgctgctggtcttttgtaagtggttcgcactttcgacgatcagtcgacgaccatatcaaaagttccacaatagctctttcgaatggataataccacgcttcgtctcgacaagagagaggcactgccgggtacggaaatgatacatggcgttggcatacctccggtaccgaacatacttttctaatacattttcacggaatgtactcaagctaccatgatac

SEQ ID NO: 146219 - DNA, 316 bp, Zea mays
  Clone ID: MRT4577_64869C.1
atccatcccagagaaaagaaacctggacgcacaaacacagatctgggcaggcgccagtaccaaccaagaaacgagagaccggattccttactatgggcaaacatgtgtggactacactgcagcagtgggatctgaactaagaaacccttcaacaaagggcatagatcgacctagggacagaaatcagaagggggggccaccaaggtggctgaagggagacaaaacccctcgaataaggataacaaaatgggggctgatgagaataattggcgggccggggccaacaaaagaagggccccagattgaatgccaagtt

SEQ ID NO: 146220 - DNA, 324 bp, Zea mays
  Clone ID: MRT4577_6486C.1
tcgtggcagagaggagaccgaagatcaaggaggcgtctcatgagtgggcatcggttaacaagctaaagcccatattgatgacgaagccagaagaaatcacaaaagaagaatatgctgacttctataagagcttgacaaatgactgggaagagcatctcgctgtgaagcactgttatgtgtggggtcaactgtgggtgaaggctgttatatttgttgctaagagggcactgtttgattttctttgacaccaagctgaagcgccacatcatttagctctatgtgcacagcgcggtcataatggacaactgctaagagctgatccct

SEQ ID NO: 146221 - DNA, 266 bp, Zea mays
  unsure (1)..(266): unsure at all n locations
  Clone ID: MRT4577_64870C.1
gacccacgcgggcgggcaaggctctgcgacgncaggaacgggcagggggggggcgccaccaacaaccncaagccgcgcaggggcgncggcaccnncaccgagcagnccancngcnacgacgngcaggacggcagcaacgccgacgggggcaccnacnncnacnacggcgggcccgggaagaacncaaacngnccanagccgaagacggacagaaaatttcttcttccnancacacncacnaccagagccgccnaaccnnaacacac

SEQ ID NO: 146222 - DNA, 215 bp, Zea mays
  Clone ID: MRT4577_64871C.1
gtaatattgttcatgaaggtggatgtagggaatggtcgtttccttcacatgaaagtcctcagaggcctttctggagacgatgatttgaaacttcttgattaccagactaacaaaaccaagaatgatgagctgactgacttctaagcagctaattctaaagtgacctgattcctatcactgtaaagaaatgcagccatcaataaagaaacattctt

SEQ ID NO: 146223 - DNA, 517 bp, Zea mays
  unsure (1)..(517): unsure at all n locations
  Clone ID: MRT4577_64872C.1
ttagggagggggcgcgagcgccgccagacactccgtagtctgtaccccaagcaccggcgcggcggcggcggctaccatggcagtcgggaagaacaagaggatctccaagggaaagaagggtggtaacgaaaaagaccggcgggggggggttttttaagaaggacctggtatgacatcaacgggcccatcgggcttcagtgtgcgcaacnattgggaagactctcgtgtccaggacacagggtaccaggattgcctctgatggtctgaagcacagagtctttgagggttgtctaggctggatcttcaaggggtggaccgagggatcaagggcttacccagggaaaatcagggcttccggtgcctgaagnatggtgcaagggcagggaatggtgctcacnaaacttctggggccatggaattttacccaccggataaggctcaagaatctctaggtaaaggaagnntgggcagacattggatctggaaggcccatggttggatgtgcaaggacaaccgg

SEQ ID NO: 146224 - DNA, 568 bp, Zea mays
  Clone ID: MRT4577_64873C.1
gattcctggtcctatgcatactgatgcgtgcattgcggccgcgtggctgtgcatctcctccattgggaatacgcgagctcctgcgtaaaccatatcactggaactaaagcacgctgctcctcctccaagtctcaccgccagcgatgatgtccacgcggtactgcatcgtgaatctgatcatgcaggcgcctgccgtcatcctattctcgctcgtggactcgtattgagaaactaccatatcccgccactccttcaacactcacgatctactgctccactgcgaggatttccgcatcagaaccctctactcaattctcaccctcagggactacctctccaagtcgaatggtttctcgaatggagcgtcatactagatccgcaggtagatcgaagacctcaagagatgcagaagggtcgagagtgggacactcaccgccaatggtgatgctgtcgactcctacctcagcagtctcgtgtgctatgactgcaaatgacgccactatgtctccgcgtcgatgataatgttgtaaatatccaatcacaagttgacaacagtgaggatgatatg

SEQ ID NO: 146225 - DNA, 525 bp, Zea mays
  unsure (1)..(525): unsure at all n locations
  Clone ID: MRT4577_64874C.1
ccgggccggaccttccggggcgaccgaaacgcttcgccacgcgancgggccaccgcagnagagcaccgnaaagaaggagangccgaggaggcaccgacaccgaagaagncctgttgtccatgactggctcagctggaactttgtttacccataaagaactttaaacaanctttcctgagggttttgnnaannngnnagaaattttagnatatatgaagcccgnaggtgaggatgggcaggacacgagtttcttatggatgagattgaaggaagaggtcaccctgcacaacacactggttctggggaggctaaaactggcaagcaagaaaacataaacaatgaacgtgtgggaagacttgcatcagtcgaaggggtcagagagcaactaaatgtacattctgatcctataccaaatggcaggcagcatgattggattcccaaccttgatgtgctatcatcaaagaccaatccagagaaaatgctggctaacatatataatgaaggtggatatagaggattatcaag

SEQ ID NO: 146226 - DNA, 983 bp, Zea mays
  Clone ID: MRT4577_64875C.1
ctcgaggccggccgggcccgggcaacatacaccacccgacgcgctaacaagcacaacaagtcacaagctaagaagctccgtagctaaattcaaatattacaaacacaaaagtggagtgcagaaccaaaatggctgcctcgaccttccttctcgttgcttttctagcattggtcacttctcatgccattgcctctgatcctagcccgctccaagacttctgtgttgccgacaaagactctccagtgaaggtgaatggatttgtttgcaaggaccctatggctgtgaacgctgacgacttcttcaaggctgcaaaacttgatcagccaagggacaccaccaaaagcaaggtgggatccaacgttactttgatcaatgtcatgcagctgcctggactcaacacgttggggatctcgttggctcgcattgactacgcaccattaggtcagaatcctccacacacacacccacgtgccactgagatcctcaccgtgcttgaggggacactctacgtcggatttgtcacctccaaccaagctgacagaagcaacaagctatttgccaaggttctcaacaagggcgatgtgtttgtattcccccaaggactaatccacttccagttcaacccagtacatgacaagccagcagtcgcgctcgctgctctaagtagccagaaccctggagctattactattgccaatgcagtctttggatcaaagccacctatctcggatgatgtcctagctaaggcctttcaggtgcaaaaggggacaattgattggcttcaagctcagttctgggagaacaaccactactgaaaaaatcaagtctgagttcaatatatgagaataaagaaatgtacttgtattttacatactactctatgtgttaacctttttctaggttgcgactgataataaaataaatgtttagtatttaaaaaaaaaaaaaaaaaaaaaaaaaaaaaaaaaaaaaaaaaaaaaaaa

SEQ ID NO: 146227 - DNA, 488 bp, Zea mays
  Clone ID: MRT4577_64876C.1
tggcttggaacctttgggctgatttatgtgcttgtggatgtgcgggtgggttcgatgggaagtctaccggcttcttcacgggaaacttacggacgcatacgcatttcgagggtccgaaggactcttccacgactacgaagaataaacatggaaatttattcactcatactatggagaatggaactggggacgccgacattaaggagatattctcatttacggaggacgttccaaacgatcataaaaggtcagaccatacttagtgttatactgtcatctccaaggaactaacagatccgggactaaacgcgtaaggtcatcctgtccggctctcgtcggataatcccgaacggcctgttggtcctattgaatgccacggtaccgctcatgctgattgtaataacaatcgtatgtgtcatacgaaggagctcgttaagcggccgaaatagcctaatgttgtgaagaagtttagtaagaagacctccatt

SEQ ID NO: 146228 - DNA, 282 bp, Zea mays
  Clone ID: MRT4577_64877C.1
atattatttttttttttttttttttttttttggtctttttttattaatttgggggtaaaaaacactccccttttacaaaccctaattgctattctttaaactacattagtctaacacttaccactttggggtacgcacaccatcttccatttttaacaatccttaacctgatcaaacagctccccaacttaaccctgctatccccaagccaaagcctaaccgcatttttttcgatttttgctgtcccacccccactaaacacaaaacggtctgttcattttt

SEQ ID NO: 146229 - DNA, 678 bp, Zea mays
  unsure (1)..(678): unsure at all n locations
  Clone ID: MRT4577_64878C.1
aggtcagcccagagcccccgctcccaaaacctcacgagcaagcgcgcgcggccacgaacaccatacgcgctgctcgctccctgtccctgccgtcgccgcgcgaggcggagaaaagagagagcggagcgccgatccatgaaggaggcactcgcgctcgtgggcggcgcaaggcggctgtccgcgccggaggaggatgagctgctgggcctcctcgcgggcttccccgacgacgacggcggcggcggcggcggctccgaccgcgagctctccttctccgacctcgtcgaggccggcgccaggccggcgatcgcggacgcggacctcggcgccgccaaggcgccgtgcggggatcgcccttgcgcggccgtggcgctgccgtcgtcgcatgaggccgcggctgcggcgtccaagcagccggcggcgaggcagagggcggcgcggcggagcggcggcagcaggggcagctgcggcggaggcggcgacggcgtgctgctcaacttctacgtgccggggcttctcaccaggagcatgaccgcgccgaggcccagccgcgggccgccgtcgcccggggccgtgcagggcgcgccggcgaagcctgttgccgccgccggcaaagccagcagcaggacgcagacggccaggggcaatcggttgctggccggcgctgngggggacgcg

SEQ ID NO: 146230 - DNA, 1358 bp, Zea mays
  Clone ID: MRT4577_64879C.1
cccacgcgtccgcccacgcgtccgcccacgcgtccgcccacgcgtccgcggacgcgtgggccgccatcctgcccgtcatggagcgcgacgacgcggcctacgacggcttcgtcaagggttgcgccgacctctgccgctcccagggcgtcctcgtcaacacgttccgcctgctggagcagcgcgccgtcgagaccgtggccgcgggccactgcacgccccccggcctcccgaccccgcccatctactgcatcgggccgctcatcaaatcggaggaagtgctgggcaagggcggcgaggagtgcctggcgtggctggacgcgcagcccagggccagcgtggtgttcctctgcttcggcagcatcggccggttcagcgccgagcagataagggaggtggcggccggcctggaagccagccggcagcgcttcctgtgggtggtccgggcgccgcccagcgacgatccggccaagaagttcgagaagccgccggagccggacctggacgcgctcctcccggagggtttcttggccaggaccaaggacaggggcctcgtcgtcaagtcgtgggcaccgcagcgggacgtgctagcgcacgcgtccgttggcggcttcgtcacgcactgcggctggaactcggtcctggaggcgatcatggcgggcgtgccgatggtggcgtggccgctctacgcggagcagcggctcaatcgggtgttcctggagaaggagatgcagctggccgtggccgtggcagggtacgacagcgacaagggcctcgtgccggccgaggaggttgctgcgaaggtgcgttggatcatggactccgaaggcgggaggatgctccgggagcgcactctggcggccatgcggcaggccaaggacgcgctgcgcgagggcggtgaatcggaggccacactggccgggctggtggacaactggaaacgtacttgacgtggttgctgtggattatgttggaagggggtgggggttacgcgacactattcgccatttgtggactttacatcggaacgagaccttctagatgatcaattatgtcctgataccagaaactgttctagatgattaattattatataaattaaactattattcaaaaaaaaaaaaaaaaaaaaaaaattcgaggtactaatcatacttttataagctagccttaaatcatcgttacctatatggctatatgtacagttgtactacacgatcccgcataatcaatctactgcttttccattcagcagtgggccagtggcttttgttttctttcgtgattatgctctcccgtcagcttgcgtatccagcggaggatccgtattttgcgctaggatattctactattcatctttt

SEQ ID NO: 146231 - DNA, 370 bp, Zea mays
  Clone ID: MRT4577_6487C.1
ccgtatccaaggaaacacacactgtggcggggtgcctcaaattttattggtgggcaagcaagtatgcacaggtgaattacttctaattattgagtgttcataattaaaatagatctcataccagaagattgctcctatatatctggcagtacctcatacaattggttactattatttctgttggagtataatgcatagctcatctgctttatgtttagaggctctggtagcattcggaagatattgacagtgtttacctaggttctgtagtactatgtgccacatgatttttactttatcgttccatatttgtggcctctggacgcatttcaagatatttatgatgtttacttggggttctgtaatacta

SEQ ID NO: 146232 - DNA, 1828 bp, Zea mays
  Clone ID: MRT4577_64880C.1
accgggcgcggcggagatctgggggggcccgccccggactgattgtccacccaccactctacgcaagcaatccttcggacttcggtgggggaaatggaggccgccgccgccgccgagacggggctcgcccagaaaccggttgtgctgtacccttcgccggggatgggccacctggtctccatgatcgagcttggcaagatcctcggcgcgcggggactgtccgtaataattgtcgtcgtcgagcctcccttcaacacgggcgctacggcgcctttcctcgccggcgtctccgcggccaacccgtccatctccttccaccgcctgcccaaagtcgagcgcctcccgcccgtcaagaccaagcaccaggaggcgctcaccttcgaggtcacccgcgtctccaacccgcacctccgcgagttcctggccgccgcgtccccagccgtgctcgtcgtcgacttcttctgcagcatcgccctggacgtggcggaggagctccgcgtgcccgcctacttcttcttcacctcgggcgccgaggtcctggccttcttcctgcacctcccggcgatccacgagcggaccgccgcgagcttccaggacatggggaaggagctcgtgcacgtgccgggcatcccgtcgttcccggcgacgcactgcatcctgcccaccatggagcgcgacgacgtggcctacgacggcttcctaaagggctgtaccgacctctgccgctcccagggcatcatggtcaacacgttccgctcgctggagcagcgcgccgtcgagaccgtggccgcgggccactgcacgccccccggcctcccgaccccgcccatctactgcatcgggccactcatcaagtccgaggaggtgctgggcaagggcggcgaggagtgcctggcttggctggacgcgcagcccagggccagcgtggtgttcctctgcttcggcagcatcggccggttcagcgtggagcagatcagggaggtggcggccggcctggaagccagcgggcagcggttcttgtgggtggtccgagccccgcccagcgacgacccggccaagaagttcgagaggccgccggagccggaccttgacgcgctcctcccggaggggttcctggcccggaccaaggataggggtctcgtggtcaggtcgtgggcgccgcagcgggacgtgctggcgcacgcgtccgtgggcggcttcgtgacgcactgcggctggaactcggtcctggaggcggtgatggcgggcgtgccgatggtggcgtggccgctctacgcggagcagcggctcaaccgggtgttcctggagaaggagatgcagctggccgtggccgtggaagggtacgacagcgacgagggcatcgtggcggccgaggaggttgctgccaaggtgcgatggctcttggagtccgatggcgggaggatgctccggaagcgcacgctggcggccatgcggcaggccaaggacgcgctgcgtgagggcggtgagtcggaggccacactgaccggattggtggacgagtggaaacgcatttgacgcggtacgtggggattgggaacgggtgacgttacgcgacggatgaagtgccggtcatcatttcttttaaaaaaatatatattagtaatatattcatgtatttttcaataaaagatacaatttattgcattatactcgtgcgtgcggcgtgccaacaataataagatatctactctttattagatttaaaattcaatttgaaaaaactgttcgccatctatggactttacatcgggacgagaccttctagatgatcaattatgtcctggtaccagaaactggtctagatgat

SEQ ID NO: 146233 - DNA, 442 bp, Zea mays
  Clone ID: MRT4577_64881C.1
attgggaaaaaggggcggcaacattgggggaaccccttttttttaacctccaaaaaggaacggcggccccttttcggccggaaaaatatccaaatgggtccaagacacgggcctcatttttcaacccggcaaagggcccgtcgacagacaaaaaaaacacccctgccttccgtttgggggggtccttgcccccaaaaacccccatggctgacctaagggccaccccgggggctttagggacaactttcttaaaaacttgggactttgccctcattatgttcggcaaaggtgccaaccttggctgggtaagccccaaaaccggggggatcaccgggggcaaataaaggcataggggttaaattccaccataaactttttgcccaacaagagctttttggttctcgggggccaaaataaccctggaggcaaagggtccctgggg

SEQ ID NO: 146234 - DNA, 311 bp, Zea mays
  Clone ID: MRT4577_64882C.1
gggcaaggaacagtcttgattgactgacctccacaaaggctgggaaataaaacggatgggctaccaaaaaacatcactttataacgtaagcttgtcagttcaaaataccaaacttgcacatgttctaagcttcactttttgaacacccaaaccagtcctaccaaataaagcaattaacatcggaatgtacacccccaaaaaactttggttgaatggaaggttatgtcccaaatataccccctactgagccacatctttttttaaccaactgaaacctaattttcgatccgctggatatgcacatatgaaag

SEQ ID NO: 146235 - DNA, 395 bp, Zea mays
  Clone ID: MRT4577_64883C.1
ccacgcgtccggtcacatctccaagcagcagccagccaacctcaccacctcactcacatctggaaccgcaaacaagaatccttctccaagctcgtcgattatcctagctagatagaggctcaattggcgggccggggcacgccacgccatgatgaaggacgcggtgatcgagcacggggagagctccaaggcgcccctggtggcggcaccggtggcggcgggcggcgtcggccgcgcggtgtccatcgccgacgtcttcctcaggttccttgccatcgtggccaccatcggcagcgccgtctccatgggcaccaccaacgagacgctccccttcttcacgcagttcatccagttcgaggccaagtacagcgacctcccgtccttcaccttcttcg

SEQ ID NO: 146236 - DNA, 591 bp, Zea mays
  Clone ID: MRT4577_64884C.1
atgaaaaagtattggtttctatttttaatttgaacatataatttgaacacctaaagttacataccgttccctatcgggtcaaatcagcaggcacatgtcatgaactatcggtcactgagggagactcgctggacctcgcaagtagacttgcattgaacctgaagcgctagaaccagagttgttctgcagtgcctcattgtcatccagctaagtgtcgtcgttgttatcctgctgcaccacatcgatagtgacatgttgtgctgtgtcgtccaccagctggtgcacgtcctcatcctgtcatgcctcctatgtcctatgggtggtcctcctccccctcctcctcattctcattccgcagcccaccatctttgtccaatcatctataattaagagtaagcaaaagcacatataaaaaatacttatttagaaacagatgcgaaaaagtaaaatacaacattacaacgattaaaaatagtcttcatggttgggattagccagatcataagtctcatcatcactatcaaccatttcatagtcaacaccatctgaaggcacaagtttgtcattgtcattgcctaaatgtaatccttc

SEQ ID NO: 146237 - DNA, 181 bp, Zea mays
  unsure (1)..(181): unsure at all n locations
  Clone ID: MRT4577_64885C.1
cgccgccgacncctttcccaccagcgcgcgagctccgcgcgnccagcgagcgcgcgccgcaacgccacctttaaccccaacancgcgaacccnaccaccgggggccaaaagaagccggaaagcgaggacgaccagaagcggcgggaccgccacgaccgaagganaccccaggaggccagcg

SEQ ID NO: 146238 - DNA, 353 bp, Zea mays
  unsure (1)..(353): unsure at all n locations
  Clone ID: MRT4577_64886C.1
aagcagtggtaacaacgcagagtacgcgggcctcaggttctggtgcctcaggttggagaaacgtctacttgcaaggtcccgcgagtctccctcagcgttaaatacatcatgacatgcatccgctgattcgacccgatggggtgaggcatgtaactttagatgttttcgctgcttgttcatattatgggtttaagttcataatataaactaatactttttatttatcaaaaaaaaaaaaaaaaaaaaaaaaaaaaaaaaaaaaaaaaaaaaaaaaaaaaaaaaaaaaaaaaaaaccaaaaaaaaaaaaaaaaaaaaaaaanaaagaactttgggttgttcccactgtttaaggg

SEQ ID NO: 146239 - DNA, 487 bp, Zea mays
  unsure (1)..(487): unsure at all n locations
  Clone ID: MRT4577_64887C.1
aggcgccaagggcgaccggtacagggcctagggcgaagcgggcggcagcttcctgcctggtggtgggggtagtggcgcctagcatataaacatctgtgcgccaaccgggctctcgctacgtctcttacttcttctgtnncaacaccgggaaccgtccctttttgtggtgcggcggagcgccatattgcnnaccgccgnnctcccggccataaccggcgcaagtgcaagcgagcgcattccacnnttctcctgtaccgatcccgggaggtgaanntcttgcgnnccgattcgggtgcctgatnnttgcgcctatccnngcgaccgggaggcgttccgcgcgtggtctttgtggtgtcttnggcggggcggggcgctttcaggacaacgctgggcctctgctgtgattgggattctggggctgtgtcggcgccctccagcctcgcgatcttttcctgcgcggtttcgcgcgccgtctggttcaacctgg

SEQ ID NO: 146240 - DNA, 387 bp, Zea mays
  Clone ID: MRT4577_64888C.1
gcaactcctcctcccacgcctgccatcaacgcagccgccgcaaccgccacatcatccatgggcgcctgcgcagccaaacacaccacgcatcatgagcaagacgtagcagatgccgccgtctctacacccaaggttgctcccgaagcgactccaatctccgttaatgttgctcgctgaagaacatgtacctgagagtgtgctagtggaagaacctgatgcggctgccgatgttgaacatcataaagctaaagatgtggtcgctccacatgctgccgtagccgagcctcatcacactgaagaagatgccgtggagaagaacgtcgacaaagatgacaagccagtagctcccgcgaatgcagatcatcacgtcgctagcgccgccgagac

SEQ ID NO: 146241 - DNA, 1442 bp, Zea mays
  Clone ID: MRT4577_64889C.1
ccggaacccctcatacgtgtagtagtcactctttttcttctccacaccaccaatagcagtagcccgccccctggcagcagcaggaagcagcagcactgcggcagcagatgcttcgtcgtgtcccttctcctggtcctgctagctcttgtagcctcggacgtgtatctcagcttcccaaaccgacgacgggttcttccattgttcccccagcagcttttgtctcgcagacagcagcgaggcggcgagggcggctgtgacattttcaggggcgagtgggtgccggacccggacgcgccctactacaccaacgacacctgcaaggtgatccacgaacactacgactgcatggggtacggcaagccggacctgggctttgtcaactggaggtggcagcctgacggctgcgaccttccccgcttcaacccatggcgcttcctccacatgatgaggggcaagacccttgccttcgttggcgactccctcggcaggaaccacaaggactcgctcatctgcctcttgaccacggtcgcggagcctacgacgagctggccgagcagcaagcacaccgtgtactactacgccgactacaacttcaccgtggcccacttctgggcgccgtaccttgtccggcacgagcagatcgacgaggacggcccagcgcacacgggcgtctggaacctctacctggacgagccagacggcgtgtgggcggcgcacgtcgcggagttcgactacgccgtcgtgtccgcgtccagctggttctaccgcccctccatgctgtacgaggccggccggctcgtcggctgccactactgccggctgcccaacgtcaccgacctcacgctgcgctacgcgctgcgcatggccacgcgggccgcgctgcgggcgctgtccggcgccgacggccgcttccgcggcacggccctgctgcgcaccgtggacccgtcgcagtacgagggcggtgagtggaacaaggacggcaactgcgtccggacggcgccgttccgtcgcggccagaacgcggtccagggcctcgagcgtgagttccgcacgctgcagctggaggagttcgcgtcggcggagaaggcggcgacggacggtggcggtaaggtgaggatgctgctgatggacaccacggaagccatgatactgcgtgcggacgcgcacccgagcaagtaccgggggtggacgccggagaagcacttcaccctgcacaacgactgcgtgcactggtgcctgcccggggccattgatacgtggaacgacatgctgcttcatatgttgaaatgatcatcagtaatttgaattaataatgccaaaccagtgtggctgtgtagtgtgtacaatacggtgctccctctgttgacaagtatatgatgactttgacgttttttcttcaaaaaataaaaacaaccaaatgtgtatatacatacaaaaaacta

SEQ ID NO: 146242 - DNA, 414 bp, Zea mays
  Clone ID: MRT4577_6488C.1
gtaaaaaaaaaaaaaaaaaaaaaaaaaaaaaaaaaaaaaaaaaaaaaaaaaaaaaaaaaaaaaaaaaaaaaaaaaaaaaaaaaaaaaaaaaaaaattaaaaaaaaaaaaaaaaaaaaaaaaaaaaaagttttgtccctgccccggggggcccccggggggggaaaaacaaaattttttttttttaaaaggcacccccaccaaggggttgttgaaaaaacaggggggaaatcgccaggcccttggggtaaaacaaaaagggaacctggtgtggcaaaaaaattgggaaaacggggtccaagggactttggggatttatttttgggaaaatattcctgggaaaaaccttggggaacatattgctgggcattataaagggggacttattgttaggggtaataattgggggcttaatc

SEQ ID NO: 146243 - DNA, 272 bp, Zea mays
  Clone ID: MRT4577_64890C.1
atagactctcaacgagccagatgacgactcgacaaggtggatctatcggggcactacaacgccgagacggcggaggactctgtgatgccagtacctaaatctgttgtgacaaaaggaggtgttcaccagagcaaggctgttccgtcagcatcgattcatcatcacccactacaaggaggcataagatggactctgagtcttcaaacttggtaccccaatatggggatttcccatgtcgaacctcaattcaacaaaatgcacaaccaccaaat

SEQ ID NO: 146244 - DNA, 2098 bp, Zea mays
  Clone ID: MRT4577_64891C.1
cctagactatcatgcatattatcgttccagactcggtcccttcttgtatggacacaatacgcatttccgcaacaattatctattggacatgtagtcttttgtaggccaacattctgcaccgtacaacataaacttgtcttttagcttttgtggtactctcttgtcacatataacactagatggttgtcgccactttatccaccatgctttgattctatggttaatatcttcatcaatatccctgtctctctgtagcattgatactaaatatcgaaaggtattcttactagacactacttgaccttccaaactaacatctgcctcctcatgtgtagtagtgtcgaagtcacatttcgtatatttagttttaattctaaaaaactcgtctgaggagggaaagaccgccctcccggtattatattaagaagagactgaaacatggtccccgccgagaaaatcctcgaaccctgccccccccccccccccatcactagcggaacgtcaccgcccactctgcaacagcccagccagtgggtggcgcgcaggacgtaactcggaaacgggcggggcacaacgagggtttttttaaccaagctagaaatttgcccccgggggggattgaacccgagacctggaggtgctacttgaaagccttaaccattatgctagagaccctttctcttagttttaattctacaaagtctaaactaaaacctttgcactctagtatcctgccacaactctaccgtgcatttggttgcaatgacaggatgtgatgagacgcagggccgtgccagcaaaaaccgaggccctgtacgaaactattgaataaaggcttttctcatcaaatcactagaaaaataaaacgataacaatatagataaataaaataatcaataaattatttcattaacaaagtaagcaaataaatatgcatgcataccttaagttaagatattgtaggtaccttgtaatttgattggttttttcttaagtacctttgaacgtttaccatcaaagcttgaaagttaacaccttatagatgctatttgagtatctaatgaatctagataggataggataggatcaatgtgtttctgtagagtggagacatacctaggtctagggacctgccgcctggatgtatctttgatcttttcctatatgtaccgttccatagatgtgcaatgacgacactatggcagagcgagcaagatcggtgcagaacgataggagcgtgctggcggcaaacgaagatgatgcatcaagtattttaggttcccgctatatcctaatgacctaatcactaataggccttcatagatggaagtttagggggcccaaaaaaatgggggcccctgttcagaaagttgaaccaaacacaccctaagcagtgctccttgttgaatgtgtcagagctttttccgcctttgctatcctaattacccctaaatgttttttttaggttacatcaccctatggcaatactgtgcatcataatgaaaatgctacaacgggccagtttgcattcaccacttcagaagctggaaactaccttgcatgtttctggatagacagcgtggagaaaggatcaggaacatctctaaatcttgattggaagatagggattgctgcaaaggactgggatactattgctaagaaagagaaaattgagggcgtagaactagagcttaggaaacttgaagctgcagtcgagtccatccatcataacttgctgtatctcaaagcaagggaagcggacatgcgaacagtgagtgagagaacgaattctagagttgcctggttcagcatcctgtcactgggagtctgcgttgccgtctctgtgctgcagctgtggcaccttcaagggttcttccggaagaagaagctcatttaaattcacgttttatgagtgtgtacttcccgtgttaactaccttaggaggacaactgtcaaatttattttaaaaagggaactcgtatgatggacaaaacaggtcgttgatacaaactagcaacctatattccgtggaattgaggtcgaccttccattttgattgccttgcagctgctggtaaataatgagtgctacttgtgcc

SEQ ID NO: 146245 - DNA, 432 bp, Zea mays
  Clone ID: MRT4577_64892C.1
cccactcgtccgctgcctcattgcataattagcatcgaatatcgatgcgcatccgcggaatggagcgcggaggatgaggaataaggaggggtcgaggccaaatccggctgagagaagtggagctatggctaggctggcggtaccagcgaggtcgtcatcagatgagggctgcggacagggagtgtcaatagctcacggcgcgtccctgcggatcggcgctctgttcctgcgggatctgctgcgaggaagcggaggagaggcaagagctgatacgtaccgaggtgcagggttacatggccgagctccagaatgtgagccaggagcactcgcgctggcgcgtcagagctctgcatgctcgagttaccgaacagagcactatacactgacgtgcagcatgaatgacggatacacaaggctctctcgaccttctga

SEQ ID NO: 146246 - DNA, 1064 bp, Zea mays
  Clone ID: MRT4577_64893C.1
ccacgcgtccggctggacagtcttgggtaccctcgaggccggccgggttcgcgttcccaacctacccctgcaagccattgccctcgcctatcgcctcgtgcaagtccaagctcccacgactccaccgcgaccgggagagagtcagagagagacgcccgcctccagatcgtccggcggggatggcggcgtcggtctttccagcgctgctgctggccgtagcggcggtgcttctcctaccggtggcagaggccgtgtggctcgagctcccgccgtcggggaccaagtgcgtctccgaggagatccagcccaacgtcgtagtgctcgccgactacgctatcatgtacgagtcccaccccagctcgcatcccaccgtcgccgtcaaggttacatcaccctatggcaatactgtgcatcataatgaaaatgctacaacgggccagtttgcattcaccacttcagaagctggaaactaccttgcatgtttctggatagacagcgtggagaaaggatcaggaacatctctaaatcttgattggaagatagggattgctgcaaaggactgggatactattgctaagaaagagaaaattgagggcgtagaactagagcttaggaaacttgaagctgcagtcgagtccatccatcataacttgctgtatctcaaagcaagggaagctgacatgcgaacagtgagcgagagaacgaattctagagttgcctggttcagcatcctgtcattgggagtctgcgttgccgtctctgtgctgcagctgtggcaccttcaagggttcttccggaagaagaagctcatttaaattcacgttttatcagtgtgtacttcccgtgttaaataccttaggaggacaattgtcaaatttatttcaaaaggaaactcgtatgatggacaaaacatgtctttgatacatgacttgaaactagcaacctatattccgtggaattgaggtcgaccttccatcttgaaaaaaaaaaaaaaaagccttgcgtaaataatgagtgctacttgtgcaatttttctaaagaaaaaaaaaaaaaaaaaagcggcc

SEQ ID NO: 146247 - DNA, 658 bp, Zea mays
  Clone ID: MRT4577_64894C.1
ctcgaggccggccggggcaccttctggtcccctttcctacgcgcccaaatgattccagatgatacaacctgttatcatcatcatcttcataaaccatcgcgacccagcctcaaatcctggtccactcgcgagtcgcgatctcagagtccctcaccaatcactcactcgcctcgcctcactggcactgcgagcaaaatagcctcactaatcctgcgtcgctgcactgtgtagctagctagctagtgcaagcagcgatatgatgctggccgtgacagtgagccaggtcgtggcgctgctctcatcggctctctccggcaccgagggtggcagcggtgtggcggttgcggtcggtacggcaaaggcggtgggagccgagcagggcgagcgctggcggcggcgctgcggcgggcacgatgaccacccggcgtcggcggcggggtactgctgcgtgtgcatatcggcgtgccgcgacggggacgacgtccggagcctgccctgcggacacgccttccaccgggactgcgtcgaccgctggctggcgctttgccggcggacgtgcccgctctgccgtctccacgtcggcggacctgccgtcggtttggccgagcagcagcagcagctcagcgaggacctcgtcatctggttctcttcgctcttt

SEQ ID NO: 146248 - DNA, 1280 bp, Zea mays
  Clone ID: MRT4577_64895C.1
ttccggccatcctacctcctaccctctccacctctcctcccacccctcccctccccttccgtgtcctcccctcgcctggggatcgattcaggctacgcgtggggttgcgtccattgatgcgagggaggcaatggcggtgtcctcgccttcttctgctccggagaagaagaggaagtggctgctcagcaacaggaaggtgaccgacaagtacctgcgtgaggcgaggaagattcttgcggcggcgccagagtgtggcggcggtgacgcggtggcggcgctcggcctggtcgacgcggcgctggagctgtcgccgcggatggaggccgccctggagctgcgggcgcgcgcgctcctcgcgctgcgtcgctacagggaggtcgcggagatgctccgcgattacatccccagctgcggcaagtcgtgctctggcgaggacacctcctcgtcctcgtcggcgtccctcttgtccactggctccggtgatctcggcacgatctcccgcgccaagctcctctcgcccgaccgccaccgctccgacgacgcggaacctgacgcccgccccgtccgctccttccgctgcttcgacatctccgagctcaagcgccgcgtccttgccggcctctccaagaacccgaacaccgatacccagtggaggtacttggtcctcggccaagcttgcttccacctcggcctcatcgaggacgctatggtgctgctgcagaccggccgccgcctcgcttcggcggcgttccgccgcgagagcgtgtgctggtcggacgacagcttctcgtcgtcgtcgtcgtcctccgcgaccgccgcggctccctgcgtcccgtccggcaagacatccagctccggttgggcgttcataatcccggcgacggagtcggaggctgtgtcccagctcctggcgcacgtgaagctcctgctccggcgccgcgcggctgccatggccgcgctggacgctggcctccctgccgaggccgtgcgccatttctccaagatcctcgaggcgcgccgtggcgtgctgccgcacccgttcgccgccgcgtgcctcgtgggccgcgccgccgcgttccaggccagcggccgtccggccgacgccatcgcggactgcaaccgcgcgctcgctctggaccctgcctacatcccggcgctccgcgcccgcgccgacctcctgcagtccgtgggcgcgctcgcggactgcctgcgtgacctggaccacctcaagctcctgtacgacgccgcgctacgcgacggcaagctcccggggccccggt

SEQ ID NO: 146249 - DNA, 223 bp, Zea mays
  Clone ID: MRT4577_64896C.1
attcggctcgaggaccggcgggaaccacatttttttttgcaccccctggatggtaatactggtgcgagtgaattggggtgggactgtgatggtggccgctgagacccaatgcatactggtgctctgacaaggcggcataagtgcgtttacagtgagcgctctggggccctaattgtccaaaccatttgctgcccgatttcgtaccagccagcggagcgtattc

SEQ ID NO: 146250 - DNA, 1192 bp, Zea mays
  Clone ID: MRT4577_64897C.1
atctattgcccttccggcgttcctacctcctccccctccccatctcctcccaatccgtgtcctcccctcgcttggggatcgacacaggctacgcgtgggttgcgtcgattgatgcgagggaggcaatggcggtttcttctgctccggagaagaagaggaagtggctactcagctacaggaaggtcagtgctggttcccgtcctcctctgccgactccattcttgagctgggttccctttctcttccattccacctgaatgtttcttggtgttcaagaactgcacgaaagcccaaggtagtgtctttttgacttctggtgcagttgacgtccaaatgccaggagggcgtgaaaccgtttggatctctgaagctcgctgtgcgtgccttgtgtttgtttcgttcagcaacagcttggttccagcgcattctgtccggtggcttgtcctgttttggtttcctttgttttgtttgtcccccctccccaaaaagaatgatctcatctcagagtggtcaatcctgccctgttaagagggaagactactgttcttgctgcgggaaaaatctgatgtttccgttccgttctcgtcaggtgatcgacaagtacctgcgggaggcgaggaagattcttgcggcggcgccagagggtggcggaggcggcgatgcggcggcggcactcggcctggtcgacgcggcgctggagctgtcgccgcggatggaggccgccctggagctgcgggcgcgcgcgctcctcgcgctgcgacgctacagggaggtggcggagatgctccgggattacatccccagctgcggcaagtcgtgctctggggaggacacctcgtcgtcctcttcggcgtccctcctgtccaccggctccggtgacctcggcacgatttcccgtgccaagctcctctcgcccgaccgccaccgctccgacgacgcggaacctgacgctcgccctgtccgcttcttccgctgcttcgacgtctccgagctcaagcgccgcgtccttgccggcctctctaagaacccgaacacggacaccccagtggaggtacttggtcctcggccaagcttgcttccacctcgggctcatcgaggacgctatggtgctgctccagaccgggcgccgcctcgcttcggcggctttcgtcgcgaaagcgtgtgctggtcggacgacagttctcgtcgtcgt

SEQ ID NO: 146251 - DNA, 411 bp, Zea mays
  Clone ID: MRT4577_64898C.1
gcacgaggcccgctcggcctccgcgtgggcacgagcagagaactgctctgcctccgggcaagggcgcggcctcggcctcggatccggcgcaggggcaggcgtggtctggccccagcacccgcgcatcccggcgcggcgcgtgcccggccgcccgacctcggcggtcctcctcgggcgcggctccacggctggctcctcggcggtcctccaagcaagggcgcggcctcggcttcggatccggcgcaggggcgggcgcggtctggccccagcacccgtgcatcccggcgcggcgcgtacccgaccgcccggcctcggcggtcctcctcaggcgcggctccacggctggctcctcggcgatcctccaggcaagggcgcggcctcggcctcgaatccagcgcaggggcgggcgcg

SEQ ID NO: 146252 - DNA, 394 bp, Zea mays
  Clone ID: MRT4577_64899C.1
ttttcgcgtacgggttaatgcggctctgatgctctcctacctgagaatgtcagtgttagtgggcattccatttgcacaacatcctgctccacgcacgcaaatcatacaaaagggctgaatcggtggagatgaaggcagttggacgggtcaaagctgctcgtcgaccacgccttggctaacaaggccctgaacgggatggcgcccacggcgccggcgtaacccggctggtcccggtgcctgtggctggaggggtgcctggccttgtgcacctgggtgtccctcctgaccgtgctctccacggtgcgcgcctagggcggggcgccggcgtgccatgcggcgtcagtcacggaccgtgctgactgcgacaccgcggccggtctgccacggaacgtgt

SEQ ID NO: 146253 - DNA, 142 bp, Zea mays
  Clone ID: MRT4577_6489C.1
tcctgacacgtgggagctcgcatgaagcggggggcgctttaggtgtactagggccataagcgcatcttagaaaagtacctggagcttgtatcatccaaggataaccaagcggctcacggccagtttatgcccgagtacgacc

SEQ ID NO: 146254 - DNA, 169 bp, Zea mays
  Clone ID: MRT4577_648C.1
actggaccaaaacttgcctctctgaacctaagatttcattttaaatgtcatctttacacaaagctgcaacaagaaccgtcattaaaatggaggccttggcaagagggtacagccctgtgtagaaatcatggaaaagctgatataaggtcttccaaactagacacaatgc

SEQ ID NO: 146255 - DNA, 323 bp, Zea mays
  Clone ID: MRT4577_64900C.1
cgctacactagctgccatatctcacgatccactcgagcactaagccgatggaaggtgaggagcgatggcgcacgttctagtgtcggcgaagggcagcgcggtctcgggcatgtagaagaggtcggtttccttcacgatcgattgactcgagccagttgaggactaggtcatggaagttgcctcgactcgagaaattcctgcagtagcgcgtcaaggtcgctgtatgcaaggctggcaaactcggcgactcaggcaccatctctcgcgataagagcatagtcaccgtcagctctgacggacgcttctccaagaggtacctggag

SEQ ID NO: 146256 - DNA, 387 bp, Zea mays
  Clone ID: MRT4577_64901C.1
cggggcggaccacagccgtccgccacacccttccaaggaattcccggccaggattaaatttaaaaaaaaccgccaccaaccggggatgccttccttgaacttgtggaccaacataaacttgaaggggttggccacttccgccttcttggccgaagcttccaagtccgttgccaacataatgggaaagcccaaggcctacttaatggttgttttaaagggttcggtccttttggcttttggaggtccccagaacccaccactttacggggggctgttttccatcggaggcctgaaccctgttttgaccaaaaactttattgctggcttcgtttttatcctgaagtaaaagttgttttttccaaagtaacccttttacctaaagttttt

SEQ ID NO: 146257 - DNA, 308 bp, Zea mays
  Clone ID: MRT4577_64902C.1
ggcgggccaatttcttagccaaaaaacatttttcatgcaacatcgtacaggttggcctaaggggaaacagtcctccccatagagcaaaatttaagcttgtgttggcaaacaccgaaaaccgctcccccccccagagggggcttgcttcattgtggcccccccacaagggcccgcaaatgggcccccaaaaagacccctacaaacttctttccctcctaccgaccttttttcaagtgctttccgcggggaccggggaaacctccccaatgcgtccgattttcattcccgaacgagcaaccgcccttagg

SEQ ID NO: 146258 - DNA, 931 bp, Zea mays
  Clone ID: MRT4577_64903C.1
ctcgaggccggccggggtctatgtactatcccagggctttcctggattgacattactgaagagtgctgacctatcgcctgttagctggatgtcagttgcctggtaccctatataccacattccttaccagcgtagcgtgaaggatttatctgcatgcttcttgacttaccatactatttcctcctcgttccaagattacgggctcgagaccatgaccaatgattgttgccatccagttgccgacggcaagcagaatggccacatggataaaaagagtaacaccgtgtcactgcctccattcggcctcgcagcacacaaggtacatggttccctctggaccaaccccatgacaggagatcacagaaagatggacttcctcttcagtgcagcggactcctggttgaagcagcttggagtccagcatcatgacttcaacttcttcatcactcaccccatgtgaactgctgctctggagtggcttgcaaagaaccacatgggtacagtttgaagctagtgatattacctacccaccaccaacggggtagcaaaacgtttacagtacaatgcgctggtgaaatgagtctaacaatcgcaggatagatttatacttgagtttactgctgcagcgaataccaaacatgtcggcactcaaaaaggttttctgtttcttgtttcttggcagaaaaatgtaactgatctgtacagaagttttgcaactaatttggtatccaatgtgggggttgagctgttgcttgtgaaaaaaaaaaaaaaaaaaggcccctagggaatgttagttccaggatgaaactgtttacgcagactctagctggacctgaatctgccgatgacaattagttatcttctacagtaaggcagttgtccgcgtaataagaaagtttctcagttagttacagttaacttgggcggccgt

SEQ ID NO: 146259 - DNA, 274 bp, Zea mays
  Clone ID: MRT4577_64904C.1
ttgttcgctatcggtctctcgcctgtatttagccttgctcggtgtcggccggccgctgtggcctgcctttctccctgggctggctggctgccttttctttctcttgggcggctgtctgcgctgcgctctgctgcttttttgctgctgcttgtgttcctgttcgccggcttgctgctgcctactctccgctgcggccccttgttccttttatcctgttggctgtgctgttccccgctgcttttttgccgctgcgtgttctccgtccttttagcca

SEQ ID NO: 146260 - DNA, 684 bp, Zea mays
  Clone ID: MRT4577_64905C.1
cggtttcatatgagatcgcaccccgctgcgctgctgctcctccttcctccggctccctttcctccgcagctcgaataaagccccctcctcctcttccagtcttcctcctccgcgcttcagtcttcccagcgccacgattccggttcttgcagagtagcgcagagtgccggaggaatctgttggattctcctgctactggttcggttctttgggagttgttggcggtgtgccttgagcgatttggtgcgccgcggattgttgtggggtgagggtgatagcagagacaagggccgtgtggagagccgaggaggagggaagggaaagggggcgcaccgcgcatgggcgggcagtggctgggggaggggatgccgccgtccaacctgcagtgcttcttggactgcaccacccccaccgtggacacgcacattctccccaagacgaatggacgtttgccagccgatgcttggcaccacgctgagatggacagcgtcgagtacttcaatctttccgacctctgggaacagtactacgagtggagcgcgtacggcgccggagctacggtgcagctcccaggaggggagagagtagttcagtactatgttccatacctgtccgggatgcagctattcaccaacaaggtcctgacggcattcaggagtttggtgaagatatggcatggatttc

SEQ ID NO: 146261 - DNA, 454 bp, Zea mays
  unsure (1)..(454): unsure at all n locations
  Clone ID: MRT4577_64906C.1
ggggccacgcacgcgtccggaaatttgcgtaatacctcccatttgtgttttttataatccacattttttgctgttataacaccatgtacaccaatctttcatgtgcacaagatatgttctcttattatttatcagcaacttttttattcatgaaatactcaatgctatgttaccttgttctttatcttagtttgccttcgtagcgtaaatcattttgttctagagaccctgtatcatgcanagtcaaacgttgcagaaattgaaattctgaagagtttcacatagagtatgttaaaaaagttggttttataaataatggaacatttttttgcccagttgcctttcacttgaggtgttagtaatcatttcttattccagtattggtgtacanacaattgacagaaatattatttggcatggaaatattttgatggcacagtacgctttttctgcc

SEQ ID NO: 146262 - DNA, 1808 bp, Zea mays
  Clone ID: MRT4577_64907C.1
gccgtccagctcgaaaccggccggccgggaaggcaaagcgagagagaaggacacacagcgaagctaagcaaagcaaaccgaagccggtttcatatcgcaccccgcaccccgctcctccctcctcctgctccggctcccttcctccacagctcgaataaagtcccctcctcttccagtcttcctcctccgcgctccaatcttcccagcggcacggtttcggttcttgcagagtagcacggaggttccttcgttgggggttcttggtctgccttgagcgatttggtgcgccgcggattgttgtgtggttgtgagttgtgactgcagagacaagggccgtgtggagagtcgagccatcgaggtcgaggaggagggaagggaaaaggggggcgcatgggcggccagtggctgggggaggggatgccgtcgtccaacctgcagtgcttcttggactgcaccacccccaccgtcgagacgcacattctccccaagacgaatggacgattgccgaccgacgcctggcaccacgctgagatggacagcgtcgagtacttcaatcttgccgacctctgggaacagtactatgaatggagcgcgtacggcgccggagctacggtgcagctcccaggaggggacagagtagttcagtactatgttccatacctgtcagggatgcagctatacaccaacaaggtcctgactgcatccagaagttttggtgaagataatggcatggatttatggagtgatgatgaggacaacgagaagatgtcgagatcctggagttccacctctgatgaatcattgttcaactgtgatgtgttatggtccaacaggaagcgtccagggcacctgtactttgagttctttgaagtaggttcaccttatggaagggttcctctcattgacaaggtttatgaactatcccagggctttcctggattgacatcactgaagagtgctgagctttcgcctgttagctggatgtcagttgcctggtaccctatataccacattccttaccagcgcagcgtgaaggacttatctgcatgcttcctaacttaccataccatttcctcctcgtttcaagatcacgggcttgagaccatgaccactgattgttgccatccagttgcaaacggcaaacaaaatggccacatggataagaagagcaacaccgtatcactgcctccatttggcctcgcagcacacaagatacaaggttccctctggaccaaccccatgacaggagaccgcagaaagatggacttcctcttcagtgcggcagactcctggctgaagcagcttggagtccagcatcatgacttcaacttcttcatcactcaccccatgtgaactgctgatccggagtggcttgcaaagaaccacatgggtacagtttgaagctagtgatattacctacaccaccaccaacggggtagcaaaacgtttacagtacaatgcgctggtgaaatgagtctaacaatcgcaggatagatttatacttgagtttactgctgcagcgaataccaaacatgtcggcactcaaaaaggttttctgtttcttgtttcttggcagaaaaatgtaactgatctgtacagaagttttgcaactaatttggtatccaatgtgggggttggatccatactgtagctgttgcttgtgtgaacactttagtgccctagagaatgttagttccaggacgaaactgtttgcgcagactccagctggacctgaatctgtcgatgacaattagttatcttctaacagtaaggtagttgtacgcacacattttcattctgatcgttgc

SEQ ID NO: 146263 - DNA, 449 bp, Zea mays
  Clone ID: MRT4577_64908C.1
gaagtctgaacttaaaaactgcttgtttactcttcctctaggagctctgcattatacaaatcaaaaggtgctacgagctacaaatcaaatagtgctactagcgtaacgagaggggaaaaggaggctaccaaaaaaaaaactccctagagttattgtctaagctgtcagaaactcaaaatccgagaagagtctaaggggaaaaaaaggatgataaataatcgagagagaaacaaaaataaagattccagaaaagactgtctgatgaaaatgtagagagagagaaaccaatggagatgaaaaacacctaaaaaagatcgggttttttttggttttgcttgattattactgggctattcatgtatcaaactctaaagcgagcaaaaaaaaaaaccagacgacgacacgacgttcctagatgagctgccggaagtccggccctactatgtggc

SEQ ID NO: 146264 - DNA, 333 bp, Zea mays
  Clone ID: MRT4577_64909C.1
ctcacattttaacggccgtggagcgtttctttcttcgggggggtcgcctagggctagtgggcgcgctagcattccttacgccgccctacggctatagagggctgaaagacagtcacgtctacatcagggagggctccaccggcctagcactcgacatggccacaggggctgcgcaggcgggcgcacgagtatacatcactgcccgcaaccatgcccgccacgaggaggagctcgtcggcattcatcgcgacttggttcgcgaacacgatgcagtgaacgcggatgaagagcggtacttcaacgccgtggcccgtgctctccatgaagacgatc

SEQ ID NO: 146265 - DNA, 917 bp, Zea mays
  unsure (1)..(917): unsure at all n locations
  Clone ID: MRT4577_6490C.1
cacgtcttctactagcctgcccggggcgctcgtgcgatcgcgcatcgcctcctttcggaatcttctcctccgggctccggatgctccttcgcaagcatccgagccctacccgtccggggcgcacctgcctgcaaccaggcgttcctctcgttcgccctcgctcccgcatccccgcgacgacattatcagaacggcgacatctccttcggtcgtcggccgctgcctcctccagcttcccgtccagggattccccactctctgccgcgaaggggtcatcgcagaataagccgccggatgaaatcaggaggtggaaggcggtgtcgcctggaatgcacgagtccgctgaccctgaaactgaaactgaggacccatcaccgccgcggacggccctctggtcggcgaggcggagggcacgcgctgcgtggcggaaggtggtgtcttgggtgcccaggaaggcccggagcctcgtactactcaatctggtcactcttatattcgctagcaacatttcagttgtgaaacaggcagaggctcttttggaccctgaccttttcaatatgttaaggttcactatagcagccatcccttttgtgccgctgttactaaaatcgctgaggaatatgcaaatcctttttagaggactagagttgggcatttgggtaagcgtggcctaccttgctcaggctatggggttagttacggctggtgctggacgtgcatctttcatttctgcactcacagttatcatcgtcccgttcttggatggtcttattggagcagaagtacctgcccatacatggtttggggcatttttatcactttttggtgttattatgctggagctaagtggntctccaccatgtgttggtgatcttctgaacctcntgagcgccnntttctttgcaantcatatgctc

SEQ ID NO: 146266 - DNA, 376 bp, Zea mays
  Clone ID: MRT4577_64910C.1
ccacccgacaaatttacatttatttaagaagggggaaactgtccattatttggactacaaaaccacttgcagaaaaaaaaaggagacattgccccccaaaactttaaactgtttatttatcgcaaaaaaaaatatagaggggctttaattccttaaggagcccggatttctttgttttttttaaacacctacaaaaacggtgttggttgtgtggaaccacaggatacactgacaaacgaaaaactggctccagtttatgcaactatgccgaaaccggttgaacgagccctgtcccggagggagggctgtcgcctgtatcaacagcattctgatcatacctggacaggtacttgtctaccggtgaagaagcctgccg

SEQ ID NO: 146267 - DNA, 287 bp, Zea mays
  Clone ID: MRT4577_64911C.1
gtcaatcatgtaacttttctactttgcttaattgtacatgctgaacaaatttgctgcttatgactgctgagcagagctgtctaaacctcttctggtttggagtgctgccttatatatgaattgttctttggtcacataaaattggttaaatttaacttctctaaagttttgtattaaattgtatgtataacattggtagcacaatttggattcagatacccaaatattgactatgataatgtacataatccttaagcagactgatttacaaaggcctgaacaagttt

SEQ ID NO: 146268 - DNA, 317 bp, Zea mays
  unsure (1)..(317): unsure at all n locations
  Clone ID: MRT4577_64912C.1
gggcccactggtgccctagagaatgcctgcngtgcgcttggcgcccgngtgcctgccctggacagctctagccganntgctggcgctgtgctcgctcgtctcncgtctccttccngcaggncacgccncgcctccctcaccacagagctcactgggatgaggtctggcgcgtcttctcttgaggggcggcggggacactgcggacttcttcctttngccgntngtgctcctctcccctgacggctgctttcctcgggaggctcagctttagctcctttcatttcacttttccttgagaaacttgctctcctgctttg

SEQ ID NO: 146269 - DNA, 219 bp, Zea mays
  Clone ID: MRT4577_64913C.1
acccgtccgcccacgcgtacgcggacacatccacaacccaataaatttttcttttttagcagcacattacccacccagggacggattgcatgacagctatcaagaccactcctccagaagtaagaacaaaaatcgtgatcatcgtttcacaagaaaattctatgacaacagaaggtgataacggacttccctatgggaaaaattgatctaacacgcatg

SEQ ID NO: 146270 - DNA, 2011 bp, Zea mays
  unsure (1)..(2011): unsure at all n locations
  Clone ID: MRT4577_64915C.1
ccgtccgtnncttcttccttcttcccctgggctcggtctgctatcttcctactggggaacccagcccagcccagcacctgaaccccacaccacacacacagggttgcccacccacgccacgcacgcgcagccgcggcggaagccaccggggggtgggctccgatgggctgctgcggctcctcgcagcgggcggggacgcacccggagaagaagccgccgggggcgctccccccgcaccgtccctcctactcgctcaaccagcaccaggcgccggcgccgccgcctccctccgcggctcgcgccggcgcccgccaggtgccgccgctcaaggagttctcgctcgcggagctgcgcgccgccacggccggcttcgcggcggggaacatcgtgtcggagagcggcgagaaggcgcccaatttcgtgtacaggggccgcctcgacgccggccgccgcgcgatcgccgtcaagaagttcaccaagatggcgtggcccgatcccaagcagttcgcggaggaggccaagggcgtcgggaagctgcgccactgccgcctggccaacctcatcggctactgctgcgacggggacgagcggctgctcgtcgccgagttcatgcccaacgacacgctcgccaagcacctcttccactgggaaaaccagacaattgaatgggctatgcgtctgagagttgcatactacatcgctgaagcactggagtattgcagcactgagggaaggcctttgtaccatgacctaaatgcatatagggtcctctttgatgagaatggtgatcctcgcctttcatgctttggcctgatgaaaaacagtagggatgggaaaagctatagcacaaatcttgcatatacacctccagaatatttaagaaatggaagagtaacatcagaaagtgtcatattcagctttggcactatactgctggacctcctaagtggaaaacgtatacctccttcccgtgctcttgatatgataaaaggcaacaatatccaagtactgatggattcacatttggagggaaactactcaacagatgaggcaaccacattggttgacctggcctcccagtgcctacagtatgagcctagggatcgggccaacactaaaaagctggtttccgtactcgagcccttgcaaataaaatcagaggtaccatcctacgagatgcttggcattccaaaacatgaggaagaagcgcctccccctccacaaccgcagcgccctctctctcccatgggtgaagcctgttctaggacggatctgacagctatccatcaaattctagtgaacacgcattacagggacgatgaagggagcaacgagctatcgttccaggaatggacgcagcagatgagggacatgctggaagctaggaagcgtggggacttcgcctttcgcgataaagatttcaaggcagccatagattgctacacgcagttcgttgacgtggggacgatggtatcgccaacggtgtacgcgaggcggagcctgtgccacctcatgtgtgaccagcctgacgccgccctccgcgacgcaatgcaggcgcagtgcgtgtacccggactggccaaccgcgttctacatgcaagctgtcgcgctcgcgaagctgaacatgcagagcgatgccacggacatgttgaacgaggcatcgcagctcgaagagaagcggcagaagaacacaaaaccctgatgatggcttgttcctggtccaggggttgggaatgtagctgggggagtgtgctgcagagtcctgcgattgtaactacctggtttcgcatttctgtcatgcattttttttgggcccgtgtacatgttacatcgacgaaagtcgaaacaggcagaatgcaaggggatttttttttaaaaaaaaaaaaaaaaaaaaaaaaaaaaaaaaaaaaaaaaaaaaaaaaaaaaaaaaaaaaaaaaaaactcgaaatatggcccataataccttttatatataaaatttatattattaaaaatatttttttattataatt

SEQ ID NO: 146271 - DNA, 269 bp, Zea mays
  Clone ID: MRT4577_64916C.1
ccgtaatctaccttattaaaaaacccccaagggggggttcagggaagaaagggggcgaacaaacaccccaggaaacactggaacagccggaaacacgagaacacgcaaaccgagcggtacacgggaacacgcagggacatgggaggcaaaaaaaagcccggaacaaaagaccaccagggtacccgagacaaaggcagggggcgctccccgggagcagagagcaggggggccaggagcggacatgctccacccgagggccgggcaagggc

SEQ ID NO: 146272 - DNA, 394 bp, Zea mays
  Clone ID: MRT4577_64917C.1
ctcctactgtccggggaacccatcccagcccagcacctgaaccccacaccacacacacagggttgcccacccacgccacgcacgcgcagccgcggcggaagccaccggggggtgggctccgatgggctgctgcggctcctcgcagcgggcggggacgcacccggagaagaagccgccgggggcgctccccccgcaccgtccctcctactcgctcaaccggcgcccgccaggtgccgccgctcaaggagttctcgctcgcggagctgcgcgccgccacggccggcttcgcggcggggaacatcgtgtcggagagcggcgagaaggcgcccaatttcgtgtacaggggccgtctcgacgccggccgtcgcgcgatcgccgtcaagaaattcaccaa

SEQ ID NO: 146273 - DNA, 623 bp, Zea mays
  Clone ID: MRT4577_64918C.1
cgctgcccccgcgccgcccctcctactcgctgagccagaaccagaaccaggcgccgccggcagcccgcgcgggcgcccaccaggtgccgccgctcagggagttctcgctggcggagctgcgcgccgccacggccggcttcgcgccggacaacatcgtgtccgagagcggcgacaaggcgccgaatttcgtgtacaggggccgcctcgagcccagccgccgcgcgatcgccgtcaagaagttcgccaagatggcgtggcccgaccccaagcagttcgcggtacgcctccccccccctcccccccgtaggccgtagcagagcaggggagggcagggcagcctcgcggttcgactgtcgcccccctccccaccgattcgctgctctgatggctttgcttcttccttcgcttgcaggaggaggccgagggggtcgggaagctgcgccaccgccgcctggccaacctgatcggctactgctgcgacggcgaggagcgcctgctcgtcgccgagttcatgcccaacgacacgctcgccaagcacctcttccactgtacgttttcctcctccttaccgatcctttgcccgttggtccggttttgataaagccggtttttggatttctgct

SEQ ID NO: 146274 - DNA, 1085 bp, Zea mays
  Clone ID: MRT4577_64919C.1
gattgaagggatgggattaaagatgtgcatacgtgcacagccatacccatatgcataagatacgttgcctttggagaactggtctcagcacaatatgcagcctgtcaataacccttatctctatacaatatcgatatcacaataaaattaaatgttataaatgcctaattaagtcctcatcgtcatccagaagttcaatgatagattaaggcaagtgagccaaatgatgctgaggagtgagtgaagcacatattgagacttcagccatgctagctcgcagttgcaagtctgtaggacagacaagtagagtttctacttggagcctcaacgtgtggtgtcatccttaacatctgtaataatcttgagaaggtcaactggagttgcagcagggtccagctcatggcaaccttttggagcattatttctttcctcaccagtgagcaggcaagaaggaacccgatgagagaagcggaaaagctcttccttcggtattcttctgaccacactggagcccgtgagcctgtggaaaactgccctgaaaccagctaccttcaacaatgggacaacagtcacaccttgctcttcagtgaaatcatcgatcacttctactatctcatatttatatatcacatcatctggtgtaagttcattccaatcaggagaccagttccggtacacagcccatgtatcgcctttttggggaataatcctgataattccccgaggacctttactccagcaaactctgtgggaaaagatgttgactgtttcagtaatctggtatcttccaatcctaaaatcaccacatgtcttcgtaaaacctgatgcgatccaatttattggtgccagttcattgttggacttagaattgaggaagctcattcgtatttctcaagaagaagaccacgggtgtcaagttggaagatctccctcaagacattagcttttcttgcattcactgcagacctgaacttctcccctgatgtaccattaaatcttcctccatcggcaatcccagacatacctgcagttgcagccagattctgaccattaactaccaccccggccggcctcgaggtacccaa

SEQ ID NO: 146275 - DNA, 390 bp, Zea mays
  unsure (1)..(390): unsure at all n locations
  Clone ID: MRT4577_6491C.1
nnnnnnnnnnnttacaaaaaaagaggaaaaataccccaagccattgttcagccgagagctcctctgggctcctctcgtgtctgggccgaacaggcaagagcgaccnagtctcaaagagcgcttccccatggggcgtcaggagaatggcggcggcccctgggtcgttcagactggtggtgtctgaaggttgcctatccacgtgccatnggttgcaaagaagaaggtnccggaaggtgctcaggggcatcgaaggcgtgcaggacgtgacggtggacgcctcngccagccacannaagtgaacctggtggaccgggcaccgtggacgcccgacacgcctcatcaagaaggctgtacaagtccgggcaaggaagggagtggnccccccccccc

SEQ ID NO: 146276 - DNA, 184 bp, Zea mays
  Clone ID: MRT4577_64920C.1
tctcactcttcaactcacacaaacaacacttaccacttttttcgaagaccttcttcaccaacaactatcaacatgcctccctgctcttgctgtaaccacgaggcctctacctgcagctccagccgctcctgctgccagccccaaatcccttcctccatctccaacgaccactcgcccatgcaca

SEQ ID NO: 146277 - DNA, 396 bp, Zea mays
  unsure (1)..(396): unsure at all n locations
  Clone ID: MRT4577_64921C.1
cggaannctcgggtcgacccatcgcgtccgcggacgcgtgggcgcacggtcccaacgaccgcacgctcgcgctgtggctcaagggtgacccctcgtacctggagggggagctggacttgacgctggccacctacgggatcaacgccgngtgcactcacctaggctgagtcgagccgaggaacggcgctgagaacttgttcatctgcccctgccacggatccctgttcaactaccagggcaaggaggtccgaggaccggcgcctctgtcgctggccctggttcacgccgacgtcgacgacggctaggtcctcttcgccccgtgggtggatgaccgacttcaggtccggcgtggacccatggaggaaggcatgttgatgatccggaaccagcggtgct

SEQ ID NO: 146278 - DNA, 365 bp, Zea mays
  Clone ID: MRT4577_64922C.1
aaaatacaagagacgaactttctgcaaagagcccgtctttacacggctttctatacatattgtctcttaactgtatttaagattctaaaggctcagagttgtatcatgtagtcttttagctctctcttttttctataaaagagatccagtgtctcaaggttgtacatgtctttagactctctctaggagctcacccatcctatcctccatctcatctcttatttcaaactccactttacgaacagtacaatctacagtgcaaaacaatgttttgggtgactatatgaataatctgttgcatacggtcttagaccgaaacaaaaaaaaaaaaaaaaaaaaaaaaaaaaaacccccccccaccccca

SEQ ID NO: 146279 - DNA, 579 bp, Zea mays
  Clone ID: MRT4577_64923C.1
cccgggtcgtaccacgcttcggctactcggttttattctgacctttttggtcctgctcctggcaacatgtttcaagtggacagtgaagtatggtcagggctggagcatttaagtgatcttgtaataaaatatctgtaaggattttactgaggatgaaatccgcgatgctctttttcagatggagggaaataaggctgctgggcctgacagtattccagttgaattttatcaagtttgctggagtatagttaagaatgatatcatcaatctcttccatgactggatgtgagcagattaaactatggtattattacccttatccctaagaccaaggaagcttcaaagattcaacagttcaggccaatatgtctcctaaactgcttgtataagctgattacaaaggttctaaccattagaattgaaccttttgccgagaagctgatcagtgaacaccaatctgcttttcttaaaggcagaaacattatgaatggggtgctgatcttacacgaaattctcgatgaaaccaagaggaggaaagaaactggtatcatattaaagttagattttgaaaagcatact

SEQ ID NO: 146280 - DNA, 274 bp, Zea mays
  Clone ID: MRT4577_64924C.1
aaccacttactaatcagtttagtaaccaaggacatctgctttacataatacagagacatattaaaaaggcttttatgttgttcagaaattgtcaaagttaaaaaacctagtggtaaaatcagttgattctttgtgctccttttcaaacagctttacccttcaaacagtgactgtagaaagccacctatttgtgttgattcaaaatgtcttgaggaagtaagcccttcatagagcgtattccagaaggcttcctcacttgataaacggttattag

SEQ ID NO: 146281 - DNA, 468 bp, Zea mays
  Clone ID: MRT4577_64925C.1
cctatctctgacttcgtgggccaggtcgcaggccgcccctgctcagctcattctcgacgaggcccctctttgctcctcacacagatgcgactgcttccagaagctccagtttatcttcgaggcgacctacgatcacttgaacatgcttgaactcattggcaccacctacattttggcgctctctaacctccgtatggacaacgaacgtctgggcttcccgatcgccgccatacgcgagatcagatatcctggagaagcttcaccacctgcagctttatccagctgcaggagatcttctcctctcctcccccagatctggcactgattcctccaaccgattgtatgtaactagtacaaggctcagcatatatcatgattattccagcatatgcaccatgaactcaccgtgattgctgatcgctcatgaatgagcataactgtgccggaagttaagtgtcacttgaggca

SEQ ID NO: 146282 - DNA, 542 bp, Zea mays
  unsure (1)..(542): unsure at all n locations
  Clone ID: MRT4577_64926C.1
gaaacatagcgcatatcaaggtactgtgtagtagaccaaataatgcactagtataatatcgcntgatcgggtatgcagtgctgaagctatcgagtgcattatgctgaaggggggtatactacttggagaagaagctggccagacaactagctgagatgcccctgacattactgctgacacatgtgcccaaaactacaaatactacatcctctaccgagacaacagcaacatggtagaaaactaccgaaatagcttgctatgcatcatagatgatgcacattggtgacctgccccatgaaatctatagggaagcagatctgcaccatctgtctgatcacgcatctgttgagaacacctatgctattctgggtgaatggcattgaggtatgatgtcgatgtatttgagaccgtagacgcaaagaaccgaggcccttgcgctgaagaatgccagcacaatgcttgggaacacgatccggatctctttctacaacatgcatagtatataagcatgctaaagggataactcatgcgggcctctgtta

SEQ ID NO: 146283 - DNA, 2597 bp, Zea mays
  Clone ID: MRT4577_64927C.1
cacgctccatccaatggagcttactctccccttcgtcatcctcctcgcactcctcgcaagcccctcgcttccccatgccaatggcgacggcggcaacacgacgacgtacatcgtgttcatggatccggcgcgaatgccgtctgtgcaccggacaccggcgcactggcatgcggcgcacctcgagtccctgtccatcgacccggcccgccacttgctgtactcctactccgccgccgcgcacggattcgcggcggcgctgctaccgggccatttgcccctgctccgcagcagccccgaggtgctccaggttgtgccggacgagatgttccagctccacacgacgcgctccccagagttcttgggccttctcacgccggcctaccagcctgccacgggcaatctggaggcggccacgcacgacgtggtgataggggttcttgacaccggcgtatggccagagtcgccgagcttcgcgggcggcaacctgccgccaccgcccgctcactggaagggggtgtgcgaggctggcgtggatttcccgccgagcttgtgcgggaggaagctggtgggcgcgcgcagcttctcgcgcggcctccgtgcggcaaacggcggcgcaataggcgtggggaagaggacgttcaggtcggcccgggacagggacgggcacggcacgcacacggcgaccacggcggccggcgcggtggtggcgaacgcaagcctgctcgggtacgccacggggacggcgcgcgggatggcgcccggggcgcgcgtggccgcgtacaaggtgtgctggccggaggggtgcctcgggtccgacatcctggccggcattgacgccgctgttgctgatggcgtgggcgtgctgtcgctgtccctcggcggcggctcagcgccgtacttccgggacaccgtagcggtgggcgcctttggtgcggcggcggccggagtgttcgtctcttgctccgccgggaactccggcccatccggatccaccgtctcaaactccgctccgtgggtcgccaccgtcggcgccgggacactggaccgcgacttcccggcatacgtgatgctccccacgggcgcgcgcctggccggcgtgtccctctacgcggggccttctccctccccacgccccgccatgctcccgctcctctacggcagcgggcgtgacaacgccagcaagctgtgcctctccgggacgctggacccggccgccgtgcgcggcaaaatagttgtgtgcgaccgcggcgtcaacgcgcgcgtggagaagggcgccgtcgtgaaggcggccggcggcgccggcatgatactggcgaacacggcagccagcggagaggagctcgtggcggacagccacctgctccccgcggtggcggtgggacgcgcggtgggcgacaagatacgggagtacgcggcgcgcggcggcggtaggcccatggctatgctgagcttcggcggcacggttctgggcgtccggccgtctccggtcgtggcggcgttcagctcccgcggccccaacaccgtggtgccggagatcttgaagccggacatgattgggccgggggtaaacatcctggccgcctggacgggcgtcgctggaccgaccggactcgccaaagacggccgtcggactcgcttcaacatcatctcagggacttcgatgtcatgccctcacatcagcggggtggcggcgctgatgaaggcggcacacccagactggagcccagccgccatcaagtcggcgctgatgaccaccgcctacaccgtggacaacacgaactcgtcgctccgggacgcggcggacggctccgtcgccaacgcgttctcgtacggcgccggccacgtggacccgcagagggcgctttcgccgggcctcgtgtacgacatctccacgcacgactacgccgccttcctctgctccctcaactacagcgccccgcacgtccaagtgatcaccaaggcgtccaacgtctcgtgcggcgccccgaacaagtcccgccccggggacctcaactacccgtccttctcggtggtgttcggccagaagcggaagacgaagccggcggcggccctgcgtttcaggagggagctgaccaacgtcggccccgcggcgtcggtctacgacgtgaaggtggtcggccccgagtccgtcgccgtcacggtgacgccggcgaggctcacgttcaggcaggccggccagaagctcaggtactatgtcacctttgcgtccagggctcggcaaggccacgcgaagccggacttcgggtggatttcctgggtcaacgatgagcacgtcgtccgcagccccgtcgcgtatacgtggaagatgtgatgtgaggttccctgcctgcctaaaatctagctcgatgacgaaggaataggataggttggtgtagtttgctcaccgcttcgcaaagagaatcggcgtgaagctctctatctctctctctcggctgcagtgcagacctgtacttgtttcctatctttcttttcggacatcaagtaaccctgaatctgaatgacgaatccgccgtttggtgtttgccataaaaaaaaaaaaaaaaacatcgaaaaaaaaaccgctcgcgatctagaac

SEQ ID NO: 146284 - DNA, 577 bp, Zea mays
  unsure (1)..(577): unsure at all n locations
  Clone ID: MRT4577_64928C.1
ggnccaaccagaaataagaagttacatttccagattctaatgtgaaaaaaaaaaaaaaaaaaaaaaaaaaaaaaaaaaaaaaaaaaaaaaaaaaaaaaaaaaaaaaaaaaaaaaaaaaaaaaaaaaaaaaaaaaaaaaaaaaaaaaaaaaaaaaaaaaaaatttgggccatatttcccaaaaacccttaaggcgaaatttggaaaaaaccaacaaaattgggggcccatttagcctaaattaagggggccaaaaaccccttaggggggggtttaaaaaaattaagggggggaaatttaaaaagttccaaactgaaaaaaccttggggtcccccaccttattccctttggaggaaatccccttttgcccggtagggaaaatactaaaaaagccggaaccaacctcttttccaaaaggtccccccctcttaagggaaaataaaccccccttgtgggggcgttttaaccctgggaggggggttgtttccccccagcttaccccccaatttttaaaagtcctataccccctttttttccttttttcccttttttcttcaaaagttaaaagagttttcccct

SEQ ID NO: 146285 - DNA, 935 bp, Zea mays
  Clone ID: MRT4577_64929C.1
gtgcggcgctcgagccggccggtccggagttcggcctccatttccactttcgagcgcagaaacgagagggcaggagcagccgcagtcccggcgatcccgccgccggtcgccctcacacctcctcgtcactgccttcgtttctctttccaacaatcaagatgagccgtggcggtagcgcgggtggtggtcaaagttctctgggttacctctttggaagcggtgagcccccccaaaccagcagtggcaccaccagctgtaagtgctccacctgctgctgcaggtgctccacctgctgagaaaccacctgctgcaaagcctgatggcaccagtcagattgctgctggggttacctctttggaagcggtgagccccccaaaccagcagtggcaccagctgtaagtgctccacctgctgctgcaggtgctccacctgctgagaaaccacctgctgcaaagcctgatggcaccagtcagattgctgctggggttaccagccaaaccaataactaccacagggccgacggtcagaacaccggaaacttccttacggaccgtccttcgaccaaggtccacgctgctcctggcggtggctcttccctgggatacctgtttggtggcaactgatgccgctcaccaagctatcaccccccactgtcgccgcatgctttttctgaatcgtgaacagccgttgtcatttcatgtgtacccaaacctcccgtcccgcgtgggcccgtaagctgcgcctagatttcagggctaatcgtgtgcctgaaccctcatcataagtcgtctctgtacccagcttctcgtttcgtttgcacccgtgatggtatggtttggttgttgcccgctggacctatctattctttgcatttttcctttgaaaaaaaaaaaaaaaaaaaaaaaaaaaaagtactctgcgttgttaccactgct

SEQ ID NO: 146286 - DNA, 219 bp, Zea mays
  Clone ID: MRT4577_6492C.1
ttttttttttttttttttagcatccattcaaccatttagggtagtgttaaaaaatatcaagacaataaaaaattgtaattctataaccaaatcattacgaaaattgaagatgagaatcatttggaccctagccattgtcgtaataatgatattggttgccccaaactataagtgatcataattcttcttgtccaaacttctagcgccttgacgtgtcag

SEQ ID NO: 146287 - DNA, 485 bp, Zea mays
  Clone ID: MRT4577_64930C.1
aattcggcacgaggcttgtaggctcggtagtctgcactgaatggacagcatggcggtatgggcgacggaagccgcgctgctggcggccgatgacaaccatgaggcggctcccgtctgcgctggagggcgtgaacgatctcgacagggacgttttacctgaggtccaccgcagtttcgggggaggtgaacttttattttgctcatggaactcgatggcaagatgaacgtcgaaatgaatcactttttgttagcaataacgctattttcaagccttcaaaagctatgcgcggatgaataccaatatgctatgcgcagtactacatctttgggaatctctgaccacatggattcgccaggaatacgacatagagcgcataccataagacttaccattggcagcgccaaccttcaatagcgcttatattgacttgatcctcaaacctactgaaaatgatgagaagatctggcctcataattttgaatac

SEQ ID NO: 146288 - DNA, 399 bp, Zea mays
  Clone ID: MRT4577_64931C.1
ggaaggctgagattggtcgatggcttgctgggtgtcatgctaactcttcgtctgttgatgttactgaggccatgggtgcaaaacgctgcgagaaagactgcagtgctcgtggtgtttgcaactataatctgggagagtgcagatgctttcatggatattctggttgatcttacttctcagtattcactttctattaataagagtccatgcactaataattcaatacttgggatcttgaaaggctggcttttaagaacttaatactagaggctagagccaaataaaaaaaaggtaacaatatcatttgatagagttaggtagcacaaaatattaatcatgcattcttatattggatacagcaatgcaacctacaaatgtcttcctaaccatgtgtacagc

SEQ ID NO: 146289 - DNA, 1276 bp, Zea mays
  Clone ID: MRT4577_64932C.1
ccggccgggttttcttctctcgttcacctcgcgtgcgcgaaccaactagggcgaccgctgccgccctacggcctacgcccagctgctcaggtcttattcgggcctttggcggcgagaaccgactgcgccagatggactgactgcccaggctccagcactgatgcgccatggttccttcgctgcaggcagcctttctagccactcacctttggagtcttcatctacactggagatgctggagaacaagcttgccatgcaaactgcagaagtggaaaagcttatcatggagaatcagcggttagcatcaagccatgtggtcttgaggcaggacattgttgaaaaaacatttccactttcgagcgcagaaacgagagggcaggagcagccgcagtcccggcgatcccgccgccggtcgccctcatacttcctcgtcactgccttcgtttctctttccaacaatcaagatgagccgtggcggtagcgcgggtggtggtcaaagttctctgggttacctctttggaagcggtgagcccccccaaaccagcagtggcaccagctgtaagtgctccacctgctgctgcaggtgctccacctgctgagaaaccacctgctgcaaagcctgatggcaccagctgtaagtgctccacctgctgctgcaggtgctccacctgctgagaaaccacctgctgcaaagcctgatggcaccagtcagattgctgctggggttaccagccaaaccaataactaccacagggccgacggtcagaacaccggaaacttccttacgatgattgcaggaccgtccttcgaccaaggtccacgctgctcctggcggtggctcttccctgggatacctgtttggtggcaactgatgccgctcaccaagctatcaccccccactgtcgccgcatgctttttctgaatcgtgaacagccgttgtcatttcatgtgtacccaaacctcccgtcccgcgtgggcccgtaagctgcgcctagatttcagggctaatcgtgtgcctgaaccctcatcataagtcgtctctgtacccagcttctcgtttcgtttgcacccgtgatggtatggtttggttgttgcccgctggacctatctattctttgcatttttcctttgaaatgtatccttgcccatttcgaggaaaaaacaaaaaaaaaaaaaaaaaaaaaaaaaggtgcctttgggtggttcccatggttaagggggaatttttgaaattttcattacaattgcgggcggtttgggcttgcttttagggggc

SEQ ID NO: 146290 - DNA, 651 bp, Zea mays
  unsure (1)..(651): unsure at all n locations
  Clone ID: MRT4577_64933C.1
aaaaaatggactatttaaatatgatttgcttagcaagctaattattgccctaaaagaaaaggacttcacctatgaaatgaggacacctagtagtttagtgaagtgataaagttgcttaaagagttttaagcttttggataataactaagatggattagttctctaggtttacctaagcaagttcaatttggtcacttttatcaagtgttaagttaggtagaaatatgtgtattgttgtcatatgttttagtttgtgatatttatgttcctcgcctctccttgtgagagtttgcattccatatcattacataagcatacatgtatttgtaattgacttgtaaaacacctagaagaagtggtgtttgaaggaggagtctactccagtggctgctgatcaagtggaggagccatctaactgggtattggatagnagggatctgaagcctcttctctgcaacaaaagcaagccccggtgcattcaccccttacttgtatttttaaaaagacttttatacactttaagtctagtgaaatgtgcattaagtttataggaaattgcttgggaactatttgatgcatcgattaccttgatatccatttgctggtatagatacttctttgggaggatcaaattattgtttacaaaaatgc

SEQ ID NO: 146291 - DNA, 266 bp, Zea mays
  Clone ID: MRT4577_64934C.1
gctatttccagcaacggaaaatgccaacacgacgggggtgcgttagaaccagatcgggtaatccatacgattagcgatgagcgctggggttctgacgaactcttgttcaacacggtccatatcaaccagcaactaccctgaacaagcttggcagagattaacaggttcatcacatgggtctgaagttagcatctggctgaccaaggttctaggtgatgtggattaatctatagctggtgcaatttacattgactgccaagcatgac

SEQ ID NO: 146292 - DNA, 755 bp, Zea mays
  unsure (1)..(755): unsure at all n locations
  Clone ID: MRT4577_64935C.1
aaaggcaagtattggtaccctcgcaagcatatagatttttacaagttagtgatggatttgataatattggttgccgggacttgcaaaactactatcgaggacttagggagaaaataaagaatgtggatgctcaattatttgtggcacaaatggagagaaagaaagaggcaaattctgccttcttctataatttgttgtggattagcatggaaagttactctacatattttgggttgatgctacaagtagaaagaattatagtcattatggtgattagtgtcattcgatgcaacatatagtacaaaccaatacaatatgacatttgcaccttttacaggtgtgaaccatcatatgcaaagtgtttgctttggagcagcttttctgtaaatgagaaaatcgagtatatgagttgttgtttcgtactttcctgttaacaatgggagtaaaagcaccaaggcttatcataacagatgaagatgctagcatgaaatcaattattagaactattctctgagatacaattcatagattctgcatgtggcacattatggagaaggttggtcctcctatgaatcatgacaagngagttttgggctgctttgaacacttgtgtattggggttcagaaactagagaagagtttaagatgcgatggaatgctatcatagttgcatatggacttgagagcaatgaatggttggctaatagatatcaaattcgagagccatggattccagcattctttatggatatacc

SEQ ID NO: 146293 - DNA, 360 bp, Zea mays
  Clone ID: MRT4577_64936C.1
aaaaaaaaaaggcggtaatttttaccaaacggggggtcatttccataaaaccatcaaggaaaacctatgcctcctataaatcagtgctataaactacagggctgacaaactttatcataacatttttaaggaaaaatcccacccaatgggagtaataatatggtacccacaaccctcctttaataaaatttgacaaattgcaaaaccatccccaagtgaaactttaaaaaaagtttttttaagaaaaccattttccctttcccccacaccattaatttattcccagaggttaaccaccggaactccaccgactcttcccctttatgacttgttcagacttttcccgttaaaggtgaattc

SEQ ID NO: 146294 - DNA, 560 bp, Zea mays
  Clone ID: MRT4577_64937C.1
ccacacagggcttttttttttttttttttgttttacctgggggaaaaaaaaggggttttgggggggttaaaggaaaggaaccaaaacccgcgggaccttgtgaaaggcgaaacctacccaaccccccccccccgcacccgggaggggctccctcccttaacctgggcccgggggcccccccaaacgaaaaaaccccccctccaaccggggtttggggacccctttaagtttcgacctttttttttgccaagctgttcaacccgaaaatgcccccccgaccccggggggggcccctcccttttttttcgcccccggcccaaaggaaaggaactttcccctggcataaggaaggggaagggccaaatgggggaccccctccctgccccttgaaaacccctgggccattgggggggggggtaaaaccccttacccaaagccctcctggagagggttaagggccctttggttttttttttccatggccaaaaggagcgcctttttgacaacttcgggggggaaaaaagacatccccagttcacgggggcgggggggtgcccccc

SEQ ID NO: 146295 - DNA, 312 bp, Zea mays
  Clone ID: MRT4577_64938C.1
ttcacacataggctcccttaatgcttcgttagtgaatctgtagttttgggagaggtcggttgaagggtgaagggtggagtttcctaaatgccacaaccccctaccggctcccccagcgcctccgctccaaattgatttgatatacagtaccaaatacatccagatctagtgcttccctactgctatcccagccctatccattcaggtcccacacctccccgcccggtcatgtccaggataagtggggcctgcagcggcgccccacccgcccaggggagcgcgtcacggctcgcgggcgctggactgagagat

SEQ ID NO: 146296 - DNA, 1738 bp, Zea mays
  Clone ID: MRT4577_64939C.1
gtcatggccatcggagaggcttgtgattcaagtgctggacgactccacgaaccccgccatcagggagctggtggaggtggagtgcgcgcggtgggcgcgcaagggcgtgcgcatctgctacgagaaccgcagcaaccgcaacgggtacaaggcgggcgccatgcgcgagggcctcaagaagcactacgccagggactgcgagttcgtggccatcttcgacgccgacttccagccggactccgacttcctccgccgcaccgtgccgctgctgcagcgggaccccggggtggggctggtgcaggcgcgctggcgctacgtcaacgccgacgagtgcatcctcacgcgcatccaggagatgtccctcaactaccacttcgccgtggagcaggaggtgggctccgcctgccacgccttcttcggcttcaacggtacggccggggtgtggcgcgtcgccacgctggcggacgcgggcggctggaaggagcgcaccaccgtggaggacatggacctggccgtgcgcgccagcctccgcggctggcgcttcgtctacgtgggcgacctggtcgtgcgcaacgagctgcccagcaccttcaaggcgtaccgctaccagcagcaccggtggtcgtgcggccccgccaacctgttccgcaaggtgctcccggagatcctccacagcgaccgggtgtcgctggggaagaagttccacctcctctacgccttcttcttcgtcaggaaggtggtggcgcatctcgtcaccttcctcttctactgcgtcgtcatcccggcctgcgtgctggtgcagggagacgtgcacctgcccaagtacgtggccatgtacgtgccggcgctcatcacgctgctcaacgccgcctgcacacccaggtcctgccacctgctcatcttctggatcctcttcgagaacgtcatgtccatgcaccgctccaaggccgctgtcatcggcctgctggaggccagccgcgccaacgagtgggtggtcaccgacaagctcggcagtagcaaggcagctgctgcggtagtcgcgaagaagaagaaacatcagctggtccggagcaggtgctgcagcacgagacgggagatgcatgtgctggagctcgcgatgggggcgtgcttgctctattgcgctgtctacgacattgtcttcttcggccgcgaccactactacatgtacctgctcctgcaatcggcggcggcctttatcgtcggcttcggctacgttggcacctcggcaccctcctgagtctcatgagagtcaccaacacagcctcacgactgtcagtgctagggttaggctttgctgctagagataggatggcgcttgttatggtaaggttgatgagtgtagtggcttggcaccttcaaagaaaccttcagccacttctcatcctatcaaattctctccacctaaatctgccgtcccagatgtgagagatagaatgtttgaggagcctctaagagcaccacctcaaaaacaagtgtggtttctcaaacctaaccatctaaagaagccacttgataccttgcccgacatatctagtgatcccctttctagagcaccacaaccacccaaaatgaccctttcccacaaaaagactccacttaagagagaggtgaggtaccactaagagtattcactttgttttgttaggaggaagaaagatgagagggtagtagggacatgcaacactcttctcatgatgtgcatgatcctcctattcag

SEQ ID NO: 146297 - DNA, 516 bp, Zea mays
  Clone ID: MRT4577_6493C.1
atggattcagaaactaccacgacatatcttaccaacacgcagaaagaattagaagcagctcttgtggagaaagagagccatatcaaccaaatgaaagagaacacaattgcttcaaacccagatcagacgacaactataaaggaactcctgcagcagaaagaagctgagcctgatcttgacaaatccgaaaattccagtgatcccattcctgctacagtagaagataattccgacaatactacaatatcagagagcagccacaatgatgagagcattgtagtgggagcaaacaccgaaaatgcaacttctgaaacagtggtagacaaatatgaaaactccaacgattccatgcctgctccagaaaaaaattcaagcaacactaatgcatcagatagcagccaccggaatgagaacattatagtggaagcaaaagaagataatgcaacttctgaccttgtggtactcgacaaatctgaaagcaccaatggttttgtacctgttactacagaagaataa

SEQ ID NO: 146298 - DNA, 278 bp, Zea mays
  Clone ID: MRT4577_64940C.1
ctcctccgccgacaacagcgtactgtagtgtaattcccgagagggctggggagagtggtaatgatcctcaatgtcgacggaggaggctgttgtccctgaagtcccggtgaccgaggtgccagcggaggtccctgcggcccatgtggtcgatgcgcccaatgcgaataaggctcccaacgagaagaaggcgcctaatgagaataagccgtccgctggcgaataagccggcggcgcaccctccctacgctgagatgattgtagaggcgatcgctgccctc

SEQ ID NO: 146299 - DNA, 390 bp, Zea mays
  Clone ID: MRT4577_64941C.1
actagcatccagtaaattggataagtttactcaccacataccgagggacaagcccatcgggggacatgacatgacttttatccaatacaatgcaggtgctggaaaaaaacaccagtccggatataagaaacacgatgttttgagtaccaataagggagagatacatatatcccaatgatggtatcggcatgccatgaacttagcccagggaaagctttaatctacgtccaaaccatcacctctggtacctttagccctctacaggattcttttaattaaggacaatcaaccttctaattagcccgtggctgtcttgacagcaccatgattgacataaaaatagtcattgaacattgctaaaccaacgaagcaaaccttcacccttcaacc

SEQ ID NO: 146300 - DNA, 227 bp, Zea mays
  unsure (1)..(227): unsure at all n locations
  Clone ID: MRT4577_64942C.1
gagctcactagtcggctggccgccctttttttttttttttntttaaggggaccaagataaaaaggtgaaaccacagattagtcccaaaacttcttggatttaagaatacgcagtgtaagaaccacgggaaccctccttaaagaaaacctataagtccataaccccactttaaaaaaaacaattcttagtgcacaaataccgtacataagaaaattaagaatcaaggg

SEQ ID NO: 146301 - DNA, 176 bp, Zea mays
  Clone ID: MRT4577_64943C.1
cttggttctcttctaaagggccgcctctttttttttttatttggctctacaaacaaccgaggatcactagttgcaaaatctcatgaaggaagagctagagtccagacagaacacgatatctgcagtactatgggcgtgccaagatctgatggactagcagtatggatagcagcatt

SEQ ID NO: 146302 - DNA, 1105 bp, Zea mays
  Clone ID: MRT4577_64944C.1
ttgaaaaaccggctcgaccgcacgcgtccgcggacgcgtggggctcaggtgaggagaacaaagatcagtgagcgaatccgaaagctgcaagaactcgttccgaacatggacaagcaaaccaacacatctgacatgctagatttggctgtcgactacatcaaggaactccagaagcaggttaaggtaagcaatccagtaagttctctgcagatgagcacttgtcaggccctgtttggaacctaggtctaatagttagccggctaacaaattgttagctgggctgagccaactaatgagctctagaggttccaaacatggccttatttagaaagacaaccagccctaagcagtaaggtctaaaaccaaactatacttacttgttgcccttcaactgaaaggagaaagtcacatacagcgttctgttaaacttatctgaaatagacactctaaaacagactttgagagtccctttctgttctgtggtctgttcattgaaggtgttaaaggagacccaagctaattgcacctgcccagcaagcaagagccagcagcactcttgctgaagccctgatgcacgctatacatgacctgcagaactcgaaagcatcttcacttgggatagaaaaagatgtaagacagctctcattttttttgtgggtttgaactgtagcatttgaggcttatctaccagacagtgtgtagctttatatgagcacaggggaatggaacaatggcatcatcctcaagcattcaagtgatagggagaagggtaaaattggggagatatataggagaaacaactgtatagtttcgttgtagctttgctatatgtatactacactttcggtataaagtggttaatttacctctattgctagttgtagcagctgtaaatgtgccgcagataagttgtagaaaaacttggatgcgttcaatgcgagcgatagtgtttcgactcaaaaaacatatcatcgttgggttaaaaaaaaaaaaaaaaggaaaaaaaaaaaaaaaaaagggggctcttaaacctaaaattttggttccttttaaaaaaggtgaatccctcgctctccaaattttggtccttttagggagccttaat

SEQ ID NO: 146303 - DNA, 136 bp, Zea mays
  Clone ID: MRT4577_64945C.1
ggtaattgaaatgcattggatgctagatgataacggattcacatagtacagaatgaaccatgctttcactatatataaagctaaccttgttttgctagtacacctacattaggagtagtaacaaagaccagctcgg

SEQ ID NO: 146304 - DNA, 653 bp, Zea mays
  unsure (1)..(653): unsure at all n locations
  Clone ID: MRT4577_64946C.1
gggtacctcgaggccggccgggccggngacagcacgagcgtatgccggtcatcgcctgtcgctactctcggaagaacagctgagacatagagagtaactatatctagctagcatgctatagagccaacaacaaggcatgagccgcagcgctggcgctgctgtttctacagctgatgtcactttcgattactgctcgcctcctgcagcacgtgtatacctcccccgcgccacggctgctacatcagggcgagggagtttgcacatccatatgcagccatcccctgtgctgaatcctgtgtcttcataccatgagctacctgagtctttggatgcagatgcaaaaacaaaatctgcgacgcacgacatagaagaatctcttcttcagtcgcggacagaaacgaggccatatatctgatctctgactcgtcatttgcgtgctaagaaccagctcacaaattggtgatgctcagaatacagaaagatcggaggtgatcaacttattgtgtacagggatttattaataatatataataaaaggtatacgccgcatgtgagcaaaaaaagaaaactataaggccccataggggcatcgatctacaatttttgatcactttatggagggtaaactgagagcatggcgcaaacatggtcat

SEQ ID NO: 146305 - DNA, 315 bp, Zea mays
  Clone ID: MRT4577_64947C.1
ccaaaacccaaaacgaatattagcatcgaccacacagaaattccactgttgcaagtgtcagtgattagtttccttaagatttcagggctgacgaggactgaccgccatctgtttgggattcagtttgctccgtagggagaggggcaaacctgggatgcgccagcgtgctcatccgccgcttgcagaccctaattttgcgtatccagtgaagcgttagaacgaagagtgcaagagaggaaacaagggacagggttaggggtgggaatgccctcacgggacaaaggagagcggccggtcaccggcaggagatggact

SEQ ID NO: 146306 - DNA, 714 bp, Zea mays
  unsure (1)..(714): unsure at all n locations
  Clone ID: MRT4577_64948C.1
taccggcncccccctctcggtttttttttttttttttttttttttttttttttttttttttttttttttttttttttttttttttttttttttttaaacagaaaaacggggccaaaaaacccctttttaaaaaacgggggagttcacaattttggccccaaaaaaaaacccgaaaaaaagcccggttttttttgccccagggaaaaaaaaaaaaccttcaaatggaccccctagttttggggggggggctttaacggtttttttggccgaaaaaaaaaaatttttgggggggaaaaaagccttccccttttcctaaaaaaccctttttcctgggccaacaggggggccttccacccgaacaaaaaggggaattttggggccacccggggggggaaaataaaaaatccccctggttttcacatcacttttaaaagggcccccaaaaggggccacaaaaagggccttccctttttcatgggagggcggtttttaaaaagctcccccacccggccccttgggggcccttcccccgacaaaaaaaaaaggggggggcgccccccccggcacttttataaaacccgggggcgccggggccaatccggttcctttccccaggcaaccaatttttccataaaaacaaatatagttaaaatttgtttgggcagcaccccccccccgggggcctcccggggtggaccccccagggaaaatttt

SEQ ID NO: 146307 - DNA, 290 bp, Zea mays
  Clone ID: MRT4577_64949C.1
ccggacacagtcccgctccggatcctcctcctctcgagcgtcgtagatctcccactcctctcacctagcttcaagatgtagacgttcgtgaagaccctcaacggcaagactatgacgctcgagatggagtctctctggcaccattgtcgctgtcaaggctaagatccaggtcatggtgggcatcgctcctgactagcagcggctgatcttcgcgggtaagcagcttcgaggtcggttgcagacttgctgactatcacatccagttggcttacagccttaatgtggtgctg

SEQ ID NO: 146308 - DNA, 281 bp, Zea mays
  unsure (1)..(281): unsure at all n locations
  Clone ID: MRT4577_6494C.1
ctctcgatcatggtgaagggtggtagcaagaaggaggtggtggtggccatactgctggttctgcagctcatggcagctccaccgacggccatggccgcccgctcgccgcgcggagccgtgccggatggctccctcgccacgacgcccaaggtgacgatgctggcagncacgcctgtgctacacgggggagacatgcaaatacattacctgcctaactcctgctggctcctggaactatgatgatcgccgttgctacataatattaactcctggtgcttctt

SEQ ID NO: 146309 - DNA, 409 bp, Zea mays
  Clone ID: MRT4577_64950C.1
cgagggccaaatcaacttttcaagggctattaggctgttaactcagacgacagcggtgcagagcacgcgagtagctaggcccagtacatactacgttgcttgttggtcgtcgtgccctcattgcgccagcgtctctgaatgtgaaaggaggagcttctgatttttcaacgctgtttccaaccaccgatttgtagcttcattgagctggtggttcataacatgtctctacaagttatatacagaatcctagccacaagaacagtaatacaggggccagaacggcagaacgtgcgacgtctccacaaataaagacgcctccatggcacgagctgtgcctccacagaccatccgaaatgcaggtcaagatctacgctcgcgcatccaaaccaaatcccttctataggttctg

SEQ ID NO: 146310 - DNA, 209 bp, Zea mays
  Clone ID: MRT4577_64951C.1
aaaaaaaaaaaaaaaagaacaaaaaaaaactcaaaaaaaaacacaaaaaaaaagggaataggaaataataaagggccatacaaactcctcaaaccacaatttcctacccctccatccaaaacaataagactggtacaacgatcccaaaagacaatcaaatccccgttttctaacaacggaattactgaaataaccttaaaactaccaaa

SEQ ID NO: 146311 - DNA, 201 bp, Zea mays
  Clone ID: MRT4577_64952C.1
gaatattaggtatgggtgtttttaattgttacgtatcctgtttatttattaatgtttttggttacattaaactctcattttattagtatttagtcttaatgatcagaacaaaaacattggtaagtgcattttgtaccgcaaaaaaaaatagatttctttactagcttcaaggcttcaaaaaaaaaagcttgcttttagaac

SEQ ID NO: 146312 - DNA, 552 bp, Zea mays
  Clone ID: MRT4577_64953C.1
gcggggaagctgctttcagttagactatgctgtcattctgctgaatatatatcagatttcttgaaaaaaaaaaaaaaaaaaaaaaaaaaaaaaaaaaaaaaaaaaaaaaaaaaaaaaaaaaaaaaaaaaaaaaaaaaaaaaaaaaaaaaaaaaaaaaaaaaaaaaaaaatttccctccctggccgcccgttaaaaagggcaaattttgaaaaaatcaataaaacggggggccgttcaacaatgcattaaaaggcccaaattcccccaaaagggagccgaataaaaataaacggcccgaggtttaaaaacgtgggaacgggaaaaaccctggggtaaccaaattaaatcgcttggaaaaaaatccccttttcccaagttggggaaaaaccaaaaaggcccgaaccaatcgcccttccaaaaatttgcccaccctaaatggcaaaggaaccccccctgaaccggcccataaaccccggggggtggggggttaaccccaaggggaaccgttacattggcaagcccctaagcccccgctcttttcgtttttttcct

SEQ ID NO: 146313 - DNA, 589 bp, Zea mays
  Clone ID: MRT4577_64954C.1
tgcacgtcgacagctgccatatgctcactatctatgtcacatttttgctcagctgattcggcctccacagttccagggcacacttgaggcctcacgtctcgtctttgggtcctaccgtccagcgcctgaggatcctgtgggcgggggggggggcagtatttgacacttgacactcgggctgaggatactgcccttcatcagttcgaagctcaggacgcagcagttgatgatgatgatgatgattttgggattccgcctccgcctcctatgcctccacgctcacatgatcatgaggctgagagttctcgtgctacccctgctgcccctcctgccattgaccctgctcttgcttcgattctccagacacttactcaccaggcagcagcccatcagcagttgttcgagaggatgctctcgatgtttcagacaatacaggacaagcaggattctcttcagcagcagcttcttcaggatcgggctgagagcagggcattcatgactcttatgctacaacattatggtatatcgattcccccggttcagtcagtcccgcctccacctcttcaggctcctgttgtgccagcgattt

SEQ ID NO: 146314 - DNA, 323 bp, Zea mays
  Clone ID: MRT4577_64955C.1
accctgcttggttccataccttttgttcggcccgccacggagccccgacccacccacaagcatcaggaaggcgaaccgaaacccaccgggggctcctcccatagggacgcctggcggacacgcacccctgccaggcccagatgtttggatgggacctcggcccatccgggggtccttcctgatgcacgcccctcgaatagctcttctacgggtgccatgatcatccccttaacccgcccccccaatagagcctccccagatggcgggccaccggggctcgtcttgccctggggtttgcaaccccttggtttgcccagctgcta

SEQ ID NO: 146315 - DNA, 216 bp, Zea mays
  Clone ID: MRT4577_64956C.1
gacgcactgtcaacattgtttgaacgacccttcacttgagcaacacaagaaatttagtcatgacaggcctagctggcggctcccaaatcttaaaggagtaggaggagatttaccacatgacgtagacatctattagctaacccgtgaaagatgcgtaggtaatcaacataacactgaggagaaaacgaaagggagatggttggaatcctatgtcat

SEQ ID NO: 146316 - DNA, 243 bp, Zea mays
  Clone ID: MRT4577_64957C.1
tttttggggttttttgagcgaatgaatgggtatgccacatgaatgggtgctttttgacgtaatgaaagtggcattggtaaccagaaaaaaaaaaattccggcgtttcatttcgaaagggggcctgaacaagattttccaaatatatgcacaacaaaaaatatttgcttacgtactcggaggttgttgtccaagcgattcacgcttcagccaaatgatggaacccacccccaaaaaaaaagaaa

SEQ ID NO: 146317 - DNA, 419 bp, Zea mays
  Clone ID: MRT4577_64959C.1
acgacctcgtcatcacacacgcgctcgaatggccttccctcaccgtgcagtggcttcccgaacgcaccgagccgccggggaaggaccactgggtccagaagatgatcctcggcacgcacacctccgataacgagcccaactacctcatgctcgcgcaggtccagctgccccacgaagacaccgaggccgacgtgcgccactacgacgatgagcactccgacaacgggttgttcggcgcggccaccggcgagtatggaggatgcatttcagctgctgaatattggtggactaattgttctgagccggccaagcccacgacaaaggtgcaaattgttcagcagataaatcatgatggagaggtcaatcgagctcgctatatgccccaaaattcatttataattgctactaaaacagttagt

SEQ ID NO: 146318 - DNA, 796 bp, Zea mays
  Clone ID: MRT4577_6495C.1
ccgggtaccaatcctcttgcaaacgaagaagggctcaagaggaaggacacaaagacagaatatggaagtgggatgtgcatcggcaggggaaagggtgatggtggcgatatacagcaggaggcacgaccagttaattaggagaaaccggaagcgcacaaaattgatgataataagattgcattatactccctcattcctaaaaatacatgtcacctattttgagacggaggtcggaggatgtacatggacaaatatggtgtagtaattttttttttcgttttgaaaaacaatcaagaaaatatttactagagatataacagataagactacttcatccgtcctaaaaataagcgtaatatattctatgagcgtttttgcacaaattagtgatagaagaaaatggcgcatgtgcccctacaaaaggtgtcatgacatgtagtgtctgtactttgaaaactaaaaaaaataactaaaccactactactggttatgtatgggacaagaaccataattgcacttatcgtgggataaaaatattgaacattagaagtagatttattctaaacggagagagagagagtagaatattggatcttggtataacagccagagatggtagcgatagttagtatgcctgagtgttatctagactgatcctttttttacgttttttatatgtagagcacattcattatgctgattttttcaaccataccaaatgaaacagtgatgataggccgagactcgaaggtggcttttgggtgctgaaatggcaatggaaaatgcaaagggagca

SEQ ID NO: 146319 - DNA, 704 bp, Zea mays
  Clone ID: MRT4577_64960C.1
cccacgcgtccggatgatgcaaaagtcgcagacatggaggaaataactgagatgatgaatatgttgttgtaatcattgtcccagatgggtggtgtgctgatgtcgtgctgtttatgtgttgcttatttctatccagctgtggtggatatgtatctgaatctgaagaagctgcaagtttttcaagttggatggagtccaaagaatgaaactatacttgcatcctgttgtctgggcagaaggctcatggtctgggatctaagcaggatcggccaagaacaaacaccagaggatgctgaagatggtcctccagagctcatgttcatccacggaggccataccagcaagatctctgatttctcctggaacccctgcgaggactgggtggttgctagcgtcgctgaagacgacatcctccagatatggcagatggctgagaacatctaccatgacgaagatgatctgccaattagcgatgagccggcaaaaacttcttgaagcaacacagcacaaaaggaatcttaacttctatcgactgttggtgttcctagatcggaaccctgctcgccggagaatcttcatcgagtgagagttggctgtaggttgcttccgtggtcgtaactttatgcttgacgggttcgtcgtttcttcgaccgtctgtatgtgtattcggcgaacctttagcaatatacatatcccgattgact

SEQ ID NO: 146320 - DNA, 2814 bp, Zea mays
  Clone ID: MRT4577_64961C.1
atggagacttctcttaaggccgaggtcaggtttgtgcctaggcacgcagtcacgctgggagtggtcagaatagtagtcggagtggtctccttcgagatttgtggggagtttgtggcatttaatgcgccattgccaaggcagttggccgagactgagctcgggcgaagtggagttttctctcgagaccgaggccgacctcaggcgaggcggagtttcttctcgaggctgaggccgtgtctagtcatcgtattcgtaccggttgcatttaatgcgtacgtcttgtggttcctaaatattttggtcgaggctgggctcgaggctgaccttcgtctgagatgctctcgggcgaggcggatttttgcttctcgtaaaagagcgctcctcgggaatggatcaattaaggactacaccgaccgcttcaacgctatgctcgaccacacacgcaagctcgacgcgccgcagaaggccaaactcttcgtcggcggcctccccgaccacatccgggctgatgtggccatccgagacccccaggaccttcaatcggtgatgtacttggcgcatgctttcgagcagcgtgcagcagcgcagaccactctgcctctagcgcgcaggttccaacagtctcacccgggactgccagcaccgccgtgtcccctgccggggccgctgactgctccgccagccgctgcagcgcaaccagcaggggtgcatacaccgaacgccatgctgctgctcgtctccatcaatggccaccgtcttgtggccctcgtcgactccggttccaccaccaacttcatgttggtgggtcttatgagccgcctgcagctgccatccacgccacaccccaccatcaaagtgcaggtggccaacggtgacaacatatcgtgccaaggtatggcgcggagcgttgacctgcgggtgggcaccgaacagttttccatcgattgcatcggcctcaccctcggcgccttcaacgtcattttgggcttcgagttcctgcgactgttggggccgatcctttgggactgcgaccgcttttccatgtccttcaccaaggggggtcgccgcatcatttgcacgcccacacagcccctcctcgatgatcttcttcggcagtttgagctagtctttgccgagccgcaagggctgccacccgccctcccctacgaccaccgcattcatcttcttccgggggcagcaccggtggtggtttggccctaccgttatccccagctccagaagtatgagctagagcgacagtgcagagccatgcttgcccaagggatcattcgccccaacatgtcaccattttctgcccaagtcttgctggtccgcaagcccgacaactcgtggcggttctacatcgactataggaccctgaatgccaacgcatcgaaggacaatttccttattccggtggtagatgagttgctcgatgagctgcatggcgcccacttcttcaccaagctcgacttgcgcttgggctaccaccaggtgcgcatgcaccctgctgatgttgagaagacggcgttccggacacacgaggggcactatgagttcttggtcatgccatttggcctctccaacactccggttgccttccagcagctaaagacagccttgaccacaggtccggtccttcagatgctggacttcgagaagaccttcgccatggactgctactgcgacgcctccgtgccccagcaccaatggctgagcaagctcttcgactttgacttcgaggttgagtatcgtccgggccgtctcaatgtcgccgcggacgcgttgtcccgccgcgacgctgagctactccagccagccgcaggggagctaggggcagtagcagccctggccctctttggcccttcattcgcctttctcgatgacatctgtcacgccatggcaacgtccacggacagcagccgcctatgccagcagctccaggatggcaccttgaccaccccatggcacctggaggatggcctccttcttcacggctcacgcgtctacgtaccaaaccacggcgacctccaacatcaggccatcctcctagcccacttggtgtgggtcgacatctccatgtacttcatcgaggggctgtctaaggtgggcggcacatcggtcatcctcatggtggtcgatcgcttctccatgtacgcccacttcattccgctcggccacccgtatacggcggcatcggtcgcacgggccttcttcgatagcgtcgtccggttacacaagttcccctactccatcatcagcgaccgggaccctgtgtttaccggacacgtctggcgcgacctcttcaagtgcgtcggcgttccacccgcagacggacggccagttagaggttgtcaacaaggtgatcgccattccctggagccatgcgccaaagggaagctcgaccctcgctacgccgggccattccgagtcctagaatgcatcggcaaggtggcataccggctggagctaccagagggagcctgtctgcacgacgtatttcatgtgggcctcctcaagcgccacaagggtgaaccgccggagcagcgtgcgaggttgccccctgtccaggatggcatactactaccggcgccactgaaggtgttgcgtgctcaacagcggcatggaatatggcacattttggtgcaatggcaggtcctatcttcggaggaagctacatggaaggcgctcgaagactttcggggcccccaacttctagctcgaggacgagatgtttgcgcaggaggggagagatgttctgaccggccgccactacaggcgccggacaacagcataggcatgcagattagttag

SEQ ID NO: 146321 - DNA, 763 bp, Zea mays
  unsure (1)..(763): unsure at all n locations
  Clone ID: MRT4577_64962C.1
ccggccgacccggacatctccctcgcccgcttccacctggggcacgtctccgtcgtggcgcgccccgccgtcgccgtcaccatatccgccgcgctcaaggtccgcgtccgcaacccggacctcttcgcgctcgactacacccgcctcgacgtcgccatcggctaccgcggcaagccgcttggcctggtaacgtccggcggcggacgggtccaggcgcgcgctgtctcgtacgtcgacgccaacctgcagctcgacggcatacgcgtcgtcgaggacgcgatctacctgctcaaggacctcgcgcggggatccgtgccctttgacgccctcgccgaggtcgagggtcaccttcacttcttcttcctcagtatcccggtcaaggtccatacgatgtctaatgcattatagagagaaaccaatacaggacggtgcagcacaaaaattgtgaggaaagaagatctacacaatcttcttgcattgatctagataccattcatctgtcagacatggggagaatatcttgcgtggttcatgttaatccacacaaccaaactatagtacatcaggactgctaccccgagtgaaatgcttacggcgtggaaggatgtgtgctatcttgcctcgcgaatgaatcgtttggntcgtttctaagcttcgcttggagccgntgtaaaagtaagaaaacaactaactctactggataatgtgcctattgtaaagccgntacacgtcatgtaatatccatcagtttccctaccatgag

SEQ ID NO: 146322 - DNA, 687 bp, Zea mays
  Clone ID: MRT4577_64963C.1
gcagtggcagatttcttcactaaagctcaaactcgggagcatcatcgactacatttactcaaactcaatgtctctgatccgacttgagtttgaaggggtgtgttaaggctcatattggcccatacctatctatatatatgagagtcatcaggggactgcatcatcattctgaaatctctcggtacgtagtatatgtaacaagcatctcttctgctttgtgttgcttcaataagaattctccagctcatcgcttatcggcagatcagcttcgtcaaggtagatgttatcagccatctgccatatctggaggatgttgtcttcagcgacgctagcaatcacccagtcctcgcaggggttccaggagaaatcagagatcttgctggtatggcctccgtggatgaacaagagctctggagggccatcttgtgcatcctgcggtgtttgttcttgatcgatcctgcttaggtcccagaccatgagtcttctgcccagacaacaggacgcaagtataggttcattctttggactccatccaacttgaaaaacttcttctttgtgacagtcaaaggtgtgcagagaagtatgaatcttcctaagatcaaataatttgacagtcttgtcagtagaaccagttgcaacaacccattcattgaacgggttgaaagcccaggcagttcaccccgccct

SEQ ID NO: 146323 - DNA, 704 bp, Zea mays
  Clone ID: MRT4577_64964C.1
ccggccgacccggacatctccctcgcccgcttccacctggggcacgtctccgtcgtggcgcgccccgccgtcgccgtcaccatatccgccgcgctcaaggtccgcgtccgcaacccggacctcttcgcgctcgactacacccgcctcgacgtcgccatcggctaccgcggcaagccgcttggcctggtaacgtccggcggcggacgggtccaggcgcgcgctgtctcgtacgtcgacgccaacctgcagctcgacggcatccgcgtcgtcgaggacgcgatctacctgctcaaggacctcgcgcggggatccgtgccctttgacgccctcgccgaggtcgagggtcaccttcacttcttcttcctcagtatcccggtcaaggggagaatatcttgcgtggtgcatgttaatccacacaaccaaactatagtacatcaggactgctaccccgagtgaaatgcttacggcgtggaaggctgtgtgctatcttgccttgcgaatgggttgtttggttcgtttctaagcttcgcttggagccgttgtaaaagtaagaaacaactaaactctactgggtaatgtgcctattgtaaagccgttaacacgtcatgttaatatcaatcagtttccctactatgagaaaaataaaaaaaaaaaaaaaaaaagccctcgcattttttttattttttgtgatggttgagttcacc

SEQ ID NO: 146324 - DNA, 516 bp, Zea mays
  Clone ID: MRT4577_64965C.1
cttgtcccccaccatggttcatcgttgcgtgagtatatcgtgtcgtctatttccgatctgtggacgaggcagaaaaggctttccacggatcatctagcttgcaaactgaagcagaaatgcaaggattgctcttggcgtttccatggacggcgacaagtctaagcagcttctctgtccatggcatgtgattatgtgaaggttgcgatcagatgaggggcgcagcaaggcgtctggtgcagagcgcaaccaaaaccaggcaaatcaatcctgtcaatggactagcaaggatgccggcgatcactactcctcagaggcatgggaacgagaatacttccagtgaatctgtcgtcacgaaagacgaaaacgttgagccccttgtcgccttcagcaggccacctcctttgccgcctgttctgggtccgctcgtcgtgctctcggttttcgagatgtcgtccggtggcggcgacgaagacaccgaatgaggcagcaaatgggcacccatggaaattagctttt

SEQ ID NO: 146325 - DNA, 768 bp, Zea mays
  unsure (1)..(768): unsure at all n locations
  Clone ID: MRT4577_64966C.1
cttgcccattcccaccatcgcccctttgctcaatctccatcccacctgccaatcaaatccctgcgcctcctcccgccatttcgcccccgctcaccagcctacccccccccccaaaccctaacccataccgacgatgccgaaggccggcagcggggtggcggacgaggaggacttccgcgccgaggtggacgagcgcctcatcaacgaggagtacaagatctggaagaagaacacacccttcctctacgacctcgtcatcacacacgcgctcgaatggccttccctcaccgtgcagtggcttcccgaacgcaccgagccgccggggaaggaccactgggtccagaagatgatcctcggcacgcacacctccgataacgagcccaactacctcatgctcgcgcaggtccagctgccccacgaagacaccgaggccgacgtgcgccactacgacgatgagcactccgacaacgggttgttcggcgcggccacggncgaggtggactttccgaccccgcccttcccataaactctcctctctggatccgcgtgttcgctcctagcctcctatgtgggggcgggcacctgcaaatttgtataacaaaaacaggatgttttttgtggtcgatttgttccgttatgcttcgactaaggatgtttgctacaacacacaattagtatgggaggatgcatttcagctgctgaatatttggtggactaaattgttttgagccggccaagcccacgacaaaggtgcaaattggtcagcag

SEQ ID NO: 146326 - DNA, 286 bp, Zea mays
  Clone ID: MRT4577_64967C.1
gagattaaggaatggcacttcttgccttaatccaaacacatgcttatgctacttgtatctgacacattccttttaaaccagacttccaaacaggaaccgttcatgaggtgctaccaatacaatcgggagcccatagtaactgaacgccgtcatctgttccatgttctctaacccttaaccttcacaccttccacccgtttacgagttacagactcctgcattacactatagcgcaatctgtaagctgcaatttctccgcccactgtactaataccttgcccttcat

SEQ ID NO: 146327 - DNA, 721 bp, Zea mays
  Clone ID: MRT4577_64968C.1
acccggacatctccctcgcccgcttccacctggggcacgtctccgtcgtggcgcgccccgccgtcgccgtaccatatccgccgcgctcaaggtccgcgtccgcaacccggacctcttcgcgctcgacacacccgcctcgacgtcgccatcggctaccgcggcgcgccgcttggcctggtaacgtccggcggcggacgggtccaggcgcgcgctgtctcgtacgtcgacgccaacctgcagctcgacggcatccgcgtcgtcgaggacgcgatctacctgctcaaggacctcgcgcggggatccgtgccctttgacgccctcgccgaggtcgagggtcaccttcacttcttcttcctcagtatcccggtcaaggtgaagtgtcgatttcttgtttgttagtatattgttatatgcagatctcatgaattggattacatcctgtatcagtgttgattttctcttatggtaatgcgaattgcgaaagccccatatgtctatgacgataaatttggtaggatgaggtgaagcaagttggaatttctgctgcggacaagggtttagcattgcccgcacagtttatctgatatgattcttaactcttaaggtccatacgatgtctaatgcattatagagagaaaccaatacaggacgttgcagcacaaaaaattgtgaggaaagaagatctacgcaatcttcttgcattgatctagataccattcat

SEQ ID NO: 146328 - DNA, 658 bp, Zea mays
  unsure (1)..(658): unsure at all n locations
  Clone ID: MRT4577_64969C.1
cctcgagccggccggaggactcgccactcgcacatcgactacaactcaacgatccgagccaagcgacgcgtgtgttctcttcctctccgaggccatcatccttcgcgcgaattagccgctcagcgaccgggattcaagattactggctacagggttacgatcagatgaggggcgcagcaaggcttctggtgcagcgcgcaacgaaaaccaggcaaatcaatcctgtcaatggactagcaaggatgccggcgatcactactcctcagaggcatgggaacgagaatacttccagtgaatctgtcgtcacgaaagacgaaaacgttgagccccttgtcgccttcagcaggccacctcctttgcctccagttctgggtccgctggtcgtgctctcggttttcgagatgtcgtccggcggcggcgacgaagacaccaaatgaggcagcaaatgggcacccatggaaattagctttgtgttgtctgttaagtttgcaccgtcctacccctgtggacataaggttcgcacgagggggctgatcttccctgagcagctccgaattaggccttgtacagaactacagactacagactaagatgtactgttagctatatcaactaggtcgcgtttggataaaaaaaaaaaaaaaaaagcggcccctan

SEQ ID NO: 146329 - DNA, 379 bp, Zea mays
  Clone ID: MRT4577_6496C.1
cttgggggattataattaacaaaaagggactacaacagacaggggggcgcccgccgagttcaacaaacgcacccttgggggataccaaccctgaaataccaaaactaacaccggctttttgctaggggacaggggcttcaaccttttttgccacttccaaccaaaaaaaaacaaatcttggggaaaaaaaggcccccaaatgggacaaagcgagggatccctttgtccttacggcccttaaaccctctttgatacctggtggggacgaaacctacttctggcccttcattattgagggaataaaacggatcgcactttatcggtgtgctgattatagggaaggacaggggggccaaagggttttgttctcaccgtagca

SEQ ID NO: 146330 - DNA, 2473 bp, Zea mays
  Clone ID: MRT4577_64970C.1
cggaattaaaggaatgcaacgttggaatgggcttgttttgaaaattgacgattgacatgttgtgcgagccttgatattggcgatatattttgttttctgtcgtgttttcactttgtttttcttactacaacttgcagcttcttatgatgatgatgcaaaagtcgcagacatggaggaaataactgagatgatgaatatgttgttgtaatcattgtcccaaatgggtggtgtgctgatgtcgtgctgtttatgtgttgcttatttctatccagctgtggtggatatgtatctgaatttgaatgtatcgactttcgcccctttcttcgcccaatttttctcccacccctgcccctcctctcgcgattctgcctttgtcccccgctcaccaacctaaatcgagagaattcgatatttgccatcatcaccaaacacgatagtaaaaatgtcacagagtggcaaaattccaattattatttcacctaaacccctctgctctcaaacctagctcgctcccggcggaccgacgatgccgaaggcaggcggcggggcggcggacgaagaggagttccgcgccgaggtggaggagcgcctcatcaacgaggagtacaagatctggaagaagaacacacccttcctctacgacctcgtcatcacccacgcgctcgaatggccctcccttaccgtgcagtggctccccgaccgcaccgagccgccggggaaggaccactccgtccagaagatgatcctcggcacgcacacctctgacaacgagcccaactacctcatgctcgcgcaggtccagctgcccctcgatgacgccgaggccgacgcccgccactacgacgatgaccacgccgacatcggtgggtttggcgccgcctccggcaaggtgcaaattgttcagcagataaatcatgatggagaggtcaatcgagctcgctatatgccccaaaattcatttgtaattgctactaagacagttagcgcagaagtatatgttttcgactatagcaagcacccatctaagcctccactagatggtgcatgcaaccctgatttacggctgaagggacataattctgaaggatatggcttatcatggagtatttttaaagagggacatttgttaagtgggtctgacgatgctcaaatttgcttgtgggacattaaagcaaatagtagaaacaaaagtcttgacgccttgcagatttttaagcatcatgatggtgttgttgaagatgttgcttggcacttgaggcatgagtacttatttgggtcagttggtgacgattatcatcttttgatttgggacctgcggtctcccgcccctactaaacctgttcagtcagtggtggcgcaccagggtgaggtgaactgcctggcttttcacccgttcaacgaatgggttgttgcaactggttctactgacaagactgtcaaattatttgatcttaggaagattgatacttctctgcacacctttgactgtcacaaagaggaagtttttcaagttggatggagtccaaagaatgaaactatacttgcatcctgttgtctgggcagaaggctcatggtctgggatctaagcaggatcggccaagaacaaacaccagaggatgctgaagatggtcctccagagctcatgttcatccacggaggccataccagcaagatctctgatttctcctggaacccctgcgaggactgggtggttgctagcgtcgctgaagacaacatcctccagatatggcagatggctgagaacatctaccatgacgaagatgatctgccaattagcgatgagccggcaaaaacttcttgaagcaacacagcacaaaaggaatcttaacttctatcgactgttggtgttcctagatcggaaccctgctcgccggagaatcttcaccgagtgagagttggctgtaggttgcttccgtggtcgtaactttatgcttgacgggttggtcgtttcttcgaccgtctgtatgtgtattcgtcgaacctttagcattatacatatgctgattgactagatctgtacgtcgcagttgtgttttgtagtattgttttgcagccagtaggatcatgttcgtgatgtgatttgtaacgggaacaaaataatattcactccgcttgttacatatactacgtaccgagagatttcagaatgatgatgcagtcccctgatgactctcatatatatagataggtattgggccaatatgagccttaacacaccccctcaaactcaaggcggatcagagacattgagtttgagtaaatgtagtcgatgatgctcccgagtttgagctttagtgaagaaatctgtcacttgcaaatctgaaggtacatattgtagagtaagtcttctgacggcaatgaccagtaaagaaggcatctacacctaaaaaaaaaaaaaaaaaaaaaaaaaaaaaaaaaaaaaaaaaacaaaaaaaaaaaaaaaaaagcggcc

SEQ ID NO: 146331 - DNA, 452 bp, Zea mays
  Clone ID: MRT4577_64971C.1
ggtcgatacaaccctctaatctgtctcgcgatatagccgctcagcgaccgggattcaaggtacgtcctgctcaccttcgggaaccctcttcctcgtttgcccccttctcttctctcatgtggaccaggaataagacgcaagcttgtcccccaccatggtcccccagacccccaccatggttcatcgttgccctgagtatatcgtgccgtctatttccgatctgtggacgaggcagaaaaggcttttcacggatcatccagcttgcaaactgaagcagaaatgcagggattgttcttggcgtttccatggacggcgacaagtctaagcagcttctctgtccgtgacatgcgattatgtgaagtaaatcgccttctctgtttagctagtacaaaaccttggtttgtgtttccttattccgttgacgcggaacacgtacgatacaatcagaaacg

SEQ ID NO: 146332 - DNA, 340 bp, Zea mays
  Clone ID: MRT4577_64972C.1
caactaatgcgttcattattccacagtgctcacttgttgctatcaccaaagggacccaaaatttttgcgctgcttacacttcttgctcttttagcaagtggtgctaccccgactattattccacaatgctcacaacaatacctctatccaatgatagccatgagatttgaatacccatctatacaattctacaggctacaagaggccatgacagtatgcatcttacggtccttagcattgaccgtgcaacaaccatatgccctattgcaacaacgcatccttagtgaatatgtatctccaaagaatcacagcactaacaactacaacaacggttgctttc

SEQ ID NO: 146333 - DNA, 363 bp, Zea mays
  Clone ID: MRT4577_64973C.1
agggaacgccggagcctcatgctccctctcgtcctcaatgccgcagtgctatgagtctacaagttgcactggatgaccatgctagtcacatcagtgtctttcatgagcgaggtggtcaattccacctgagctcgatcagctcataatgtatatcggactgtaatatatgccgttctctcacatcttatgatgagagatgtgctacacggattcagatgacccaaagcctttgcggcccttcaataatgcttagcgataggatcaatgtaccagtcatacagagacctctctgtgctaatgtgcatactgagaaacgcggcgggaacttcatgactgaattcatgatgggctgtgttgcagctg

SEQ ID NO: 146334 - DNA, 1350 bp, Zea mays
  Clone ID: MRT4577_64974C.1
aaggcgagaactttccagagcactcgccactcgcacatcgactacaactcaacgatccgagccaagcgacgcgtgtgttctcttcttctccgaggccatcatccttcgcgcgaattagccgctcagcgaccgggattcaaggtacgtcattgctcacctccgggacccctcttcctcgtttgcgcccttctcttctctcatgtggaccaggaataagacgcaagcttgtcccccaccatggttcatcgttgcgcgagaatatcgtgtcgtctatttccgatctgtggacgaggcagaaaaggcttttcacggatcatccagcttgcaaactgaagcagaaatgcagggatcgctcttggcgtttccatggacggcgacaagtctaagcagcttctctgtccatgacatgtgattatgtgaagtaaatcgccttctctgtttagctagtacaaaaccttggtttgtgtttcgttatttccgttgacgcggagcacgatacaatcagaaacgaactcgattcagtaatcctcttcatggcttgatgggctacattgccattatctaatttgtagaatcccaggatggaggaaccaaacacttttcaggttgtgcaaatgcaatcgaacaatcggtagtatgagctaactgaacatgaccaaacgtgcgaagaatattaattaatcaaattgaaatagagtaaattgtgcaaaaatctcacactataggtctaactgtgttgcaaaccttatttaggatgaacaccgggaatttatctgtacagtgaaaagattttgacaggcaaagttacctgttggacaagttttggagaaactgaaccctttgcttctttcatctgaagattactggctgcagggttgcgatcagatgaggggcgcagcaaggcttctggtgcagagcgcgaccaaaaccaagcaaatcaatcctgtcaatggactagcaaggatgccggcgatcgctactcctcagaggcatgggaacgagaatacttccagtgaatctgtcgtcacgaaagacgaaaacgttgagccccttgtcgccttcagcaggccacctcctttgcctccagttctgggtccgctcgtcgtgctctcggttttcgagatgtcgtccggcggcggtgatgatgacaccgaatgaggcagcaaatgggcacccatggaaattagctttgtgttgtctgttaagtttgcaccgtcctacccctgtggacataaggttcgcacgagggggctgatcttccctgagcagctccgaattaggccttgtacagaactacagactacagactaagatgtactgttagctatatcaactaggtggcgtttggat

SEQ ID NO: 146335 - DNA, 340 bp, Zea mays
  Clone ID: MRT4577_64975C.1
acaaacctgcttgcatataaattttttttgttcgccccacaaattacaaaaaaccaactatttttttgccaagcccaacaaaaaggccaaaaaaccaaaaaacaaccccccccaaaaatccaaagtttttttccaacaatggcccccacacacccttatctattgtcccaaaccaaccaaaaaaaaaaaccgttccatccaaaaaacaacgtcttaaaccccccccaaagtaaaaacaaccgtttttctttaaaaccccaatttaaaccgcccccccttattcaaagaaccccccaaaaccaggtttttaaaaaaaaccccacccaccctcctttaaaaa

SEQ ID NO: 146336 - DNA, 1800 bp, Zea mays
  Clone ID: MRT4577_64976C.1
ctctcatctccatgcatgccagctccaaccttacgctgaatcctgccgccaaagcgccaaaaccgtcgcaaaaacctgcaagctcttacccggccagccactcccgcggtcccgccccgccccgatcgagcacacaggagaagtagaaatggcgggagaagtgctcgttccggtggagggaggccgggcgcgcgactacggcggcggcgtgacgttctccgtcgcggtcaccagcctcatggccgcttcctgcggcctcatcttcggctacgacgttggcgtctcaggcggtgtgacgcaaatggactcgttcctgaacaagttcttccctgaggtgctccgggggatgaagagcgcaaagcgcgacgcctactgcaaatatgacaaccagctgctcacggcattcacgtcgtcgatgtacatcgccgccatgctggcgtcgctggtggcgagcagcgtgacgaggagggtgggccgcaaggccgtcatgctgatcggcggcatcatgtttctcgccggttccgtcatcaacgccggggccgtcaacgttgccatgctcatcgtcggccggatcctgctcggcttcggtgtggggttcacagcgcaggcggctccgctgtatctggccgagatatcacccaccagatggcgcggcggcttcaccacggcctaccatttcttcctcgtcgccggcacgctcgccgccaacgtcgccaactacgtcacgaaccggattcccgactggggctggcgcgtctccctcggcctcgccgccgtgccgtccgccgtcatcgtcatgggcgcgctcctcgtctcggacacgcccagcagcctcgtgctgcgcggcgagccgtacgcagcccgcgcgtcgctgcagcgcgtccgcggggcgggcgccgacgtggaggccgagctcaaggacatcatctgcgccgtggaggcggcgcgccgggacgaggaggagggcgcgttcaggaggctgcgcgccgaggggtaccggcactacctggtgatgatggtggccatccccgcgttcttcgacctcaccggtatggtcgtgatctccgtcttctcgccggtgctgttccgcacggtcgggttcgacagccagagggccatcttcggcgccgttataattagcctcgtcagcctgtgcggcgtggcgctgtccaccctcgccgtggaccgctgcggccggaggttcttgttcctcgccggcggcaccgccatgttgcttttccaggtggcggtgtcatgggtgttggcggatcacctcgggaagcaccaggcggtgacgatgcccaagaactacgcgatgggcgtggtggtgctggtgtgcctgtacacgttcagcttcagcatgtcgtgggggccgctgaagtgggtggtgccgagcgagatctaccccgtggagatcaggtcggcggggcaggccattaccctatcggtcgcgctcaccctctccttcacgcagacgcaagtgttcatctccatgctctgcgccatgaagtacgccatattcctcttctactccggatgggtcctggccatgacgcttttcgtcgcggcgttcttgccggagacgaaaggcgtgccgctggagaccatgcggtcggtgtgggcacggcattggttctggaggaagttcgtcgtcttggacgctgccaggtaggaggttcaggatcaaccgtatgtaacaagaatcatatcaacgtacacttaagcaagtgacaagtcgaattactgttatatcatggtggtcatatgcaataattaatacaacgtctcacttgtatggtt

SEQ ID NO: 146337 - DNA, 597 bp, Zea mays
  unsure (1)..(597): unsure at all n locations
  Clone ID: MRT4577_64977C.1
ctgcagtaccgtccgnattcccggtcgcccacctccgtcacatgaatccantggaagagtacgggcgtgatgggatttctgaattgaccttgcattccattttgttcaacgttcaagtagttccctcgctgaaatattgtggcacaagcaaactttctgttgngaaaatctttaccatgtccctgtttgtttgaactaaaaggctttccatcttgagtagccaatagtagattttcgaagatatttttagctttctggactcaagaacctcatgaaagctcagaaaagtgagcttttaagctttccgtataaactcaggttcttcgggattctggcttttcgaaagctagatgaaaaagcctattgacttttcacactaaaaagctgtccagaagctcatacaaacagggctgattcaagagcttctttccttgctttgagtattgatagatactgctagttactgtagaattacgagaccaattcaaagggcgttgaaatattctggaagagttggctgccaagagagggcactgcaactaaggctgcacttttcttctgccatggatatggggatacctgcactttcttttttga

SEQ ID NO: 146338 - DNA, 159 bp, Zea mays
  Clone ID: MRT4577_64978C.1
cccggaaaagccagcaccaaggaaagctgaggaaggagcacaaccaggctcccatgacgcgggataaagctccacatgatacaagaaggcacaggagagactgacactgtggagttcctgcacaggggccgagaatggacccaggcgcaccaagcgccg

SEQ ID NO: 146339 - DNA, 272 bp, Zea mays
  unsure (1)..(272): unsure at all n locations
  Clone ID: MRT4577_64979C.1
aacatccctataattaacgcgcgccccaaaaccagaggcggggagggagaacagaaaacagcacggggggcaacaccccaagaagagggggcaaacagagaccaaaggccgccgcaaacaagcaccaacaagaangcaagacaaaaaaaaacagccgaggcggnacggagaaaaacgggacgaaaacgggagccacggacaaaacccggcaggggggacaaagaccgagaagggaacgaaagccaagaggacgcgcgaagaaaccacgcggg

SEQ ID NO: 146340 - DNA, 377 bp, Zea mays
  Clone ID: MRT4577_6497C.1
aaaaaaaaaaaaattaaaaaaaaaaaaaaaaaaaaaaaaaaaaaaaaaaaaaaaaaaaaaaaaaaggggaaaaaaataaaaaggtgtgttccatatttaaaaataaaataattaataagggcggccctttttaatggatccaatttattttacccttccttccactatttataatctttttattgttacacctaatatcaatttactgcccttttttataaaatatatataatttttaaaacctttctgtaacttatataaatctttttttaaataaaattcctcttttacccagctgtttaattaacataaaaggccccctacatatcttcttcccaaccattttttaaacttaaatggaaatatggtcccctcct

SEQ ID NO: 146341 - DNA, 322 bp, Zea mays
  Clone ID: MRT4577_64980C.1
cgctggtgattagttatgtctgaccgaactgcagagtcctggtaccggctcactctccccaaacaggttctcaacgtcctacacagacgttgcactcctcatccaacttccacagggtgtaattacctaccaggacgtaccccccgagcagaccccaggatctctttgttcgctccgttgcactgctcgccaccttagtctacctcctacatgttgatatcggcggcggatcctccctaggaggatatgggggtcaccctccagaacctccttgaaatggtcacatgctcacgcccaacttgagcatgccggggatgctatt

SEQ ID NO: 146342 - DNA, 391 bp, Zea mays
  Clone ID: MRT4577_64981C.1
tcgttggggttctacctcgcgcccgttttcgtactggcagcggttgcgtcggctatctccgtccgtggggtcttcgtgggttttgggccgggctgcgggacatttgtaggaggctgcggatggcccgcgtacccgaccatgaggccggggttctgcggtctcttcgaccacgtacacccgcctggtggacctcaatctcctgttctgcaattgcggggccttcagtcgggtcgacttgtagtttggctttgctttcatttcctttggagatgaccgtgacgcagcggatgctttgaggtgtctcgctctgtgtgttttggtttccccggcgctggctctttttggcgtgggctggtgttgtttaccctgtgcccgtgtgccgtgcttggtc

SEQ ID NO: 146343 - DNA, 120 bp, Zea mays
  Clone ID: MRT4577_64982C.1
gcacaaagcacacccacgaccttaccaacaccagagaaacatctaagcaatagaacggaagactaaccaagatttggacattagaatgtttactgctattctctacgagactaacaactg

SEQ ID NO: 146344 - DNA, 112 bp, Zea mays
  Clone ID: MRT4577_64983C.1
tcattcgtaactacttgtactcgcgcccgtgccttgcgcacgctgcgcacgcgcaaactctatctatccgatccgatccggaactgtgccggccagccatggcgactagggt

SEQ ID NO: 146345 - DNA, 265 bp, Zea mays
  Clone ID: MRT4577_64984C.1
cgacagctcagggaagaccaccacgctgtacaagctgcagcttatctagggcggtaccgccgcacccaccattggaagtaacgttgaggaggtcgcatccaagaacctgcgctactaggactggcatctaggctgtcatgaaagactgtacactgctgatgcgacatactaccggggaacacacaccttgatcgctgagatcgacagtcaagacacgtgccctgatcaacatgataaaggacgagctgtacaagatgctgcagga

SEQ ID NO: 146346 - DNA, 462 bp, Zea mays
  Clone ID: MRT4577_64985C.1
gacaaaacccggccacccgggggtggatcccaagggatcgggggaaaaagggccctttgccacttacaaagccccggcgggttttaaggcccctgcaaaggattcaacccccccccccttgggaagggagctttaagggggccccccccggggcgttggccgggcgggcttaaccaaaggcacgggcccttggggggcgaaccccccaaccggggtcggggcgggcgggaaacaaaagcccccgttgctaacttggattctgacctaaagggggtcaaacaaaaacccgcacacgggaactttccccccctgggttttaaaccaaacccgaagaccaaatgggggaaaaaacgggtcccctcggaccagggggaaatactaacggggggcgggcattaaaaggggaaaactaacctgtttcaccaagggttaaacccaactcacgttccctattgggggggg

SEQ ID NO: 146347 - DNA, 406 bp, Zea mays
  Clone ID: MRT4577_64986C.1
cagcaatccacacaagcactttgacgtcacacgggcgctgcttacatacacaccaagcgtcggcaccaatggcggactgccattaggtggactactgctcggatgacgtgaggaccgtggccccagccggcttcagacgacacgggggaggcgtgcatcacaacgtcgtcaaagagaagttcgaggaggttaacacggtctcacgcgccggcgccaaccaccaccaccaccatggttaccacggcggccactgcttcctggtgcgcgagaccagcgtccgaagaggacatcaacacctgcaccggcgaggatcacaagcgcagggagagctttctctccagggctaactgagcctcccggcggccggcatccacgcccgatcgtgcttgtatgcacgccttatgta

SEQ ID NO: 146348 - DNA, 314 bp, Zea mays
  Clone ID: MRT4577_64987C.1
ttttgttttttttttttttttttttttttttttggttttttttttataaacgagagaaaatttctctatttatataggttggggccacaaacacctaaatggcggggcacaaaccacattttttatatgcgctggacactatacaacgacgctggtgagcaacagcctgaaaagggaaaaaccccaacagctagctacttttggatggttatgggtggggggtcccgttgtttattttgcacgagccatcgtttaacgacctgggggcgggccaacgaccaaccctaagggccaccggccatgcccgcgggatt

SEQ ID NO: 146349 - DNA, 981 bp, Zea mays
  unsure (1)..(981): unsure at all n locations
  Clone ID: MRT4577_64988C.1
cnccgtgacgcgcgggttcgcacacacgggacgggggacactggacacggcacgccgcaggccgcaccgcgcgcgagagggagccggagccggctgcctgcttgaacgcctggtaacgcggnctctcgcttcccctcccaaactttccctaccccgaccgccgatccttctcgccttgacgtccaagagccccggtccgatgggtcgtccgccgagcaccactggtgctccggccttccgcttcctcccttccgaggtggcggagatggaggcgcgcttgctgcagctcaacaacggcatccccacccgcgccatgctccagactctcgccgataagttctccgcctcagccctcttctgtcgctattgctcaccatggctcctcctcgacagggaagaaccctatggaaggtgtctcagttgagtttgaggccaagtcagctcgtgatggtgcatggtatgatgttgctgcctttctgtcacataggttgtttgaatccggtgacccggaagtgcgggttcgtttttctggatttggggcagaggaggatgaatggatcaatgttcgcaaatgtgtgcgacaacgttctcttccatgcgaggccacagaatgcgttgctgtgcttcctggggacctcattctttgttttcaggaagataaagagcaggctctctattttgatgctcgtgtccttgatgctcaaaggagaaggcatgatgttagaggttgccgttgtagatttcttgttcgctatgatcatgactcttctgaggaaattgttccactgaggaaggtgtgccgccgaccagaaactgactacaggcttcagattctgcatgctgcgagagcggcagccgccagtgcagatattcacactccacccagagagggtaaagtggagttggcatccaatgctaggagcccatatgagcaaaaccccagaagcagcacaagatgatggacgtgaacactgatgagga

SEQ ID NO: 146350 - DNA, 782 bp, Zea mays
  Clone ID: MRT4577_64989C.1
gtacccctcgggtcggccgggacgcccgggtgcgtgcgtggcctacaccgttgagccggagccggaaccggttgcctgcccggagccatgaacgcctacctccactaactcacacttctcctaaagtttccccacccccgtccgccgatccaccaccgatctggtctcactgcatcctcctcccctcgccgtccaagagcgccggtccgatgggtcgtccgccgagcaccactggtgctccggccttccgcttcctcccttccgaggtggcggagatggaggcgcgcttgctgcagctcaacaacggcatccccacccgcgccatgctccagactctcgccgataagttctccgcctcgcccgagcgcgccggcaaggtggccatccagcccaagcaggtgtggaactggtttcagaacaggcgttactcgcatcgggccaagaccaccagggtcgtgccgtctccaccggctaagatgaccccctcgggggccgatcaccaccagcacgccgctaacgcctccgccttcagggccgctcagccctcttctgtcgctgttgctcaccatggctcctcctcgacagggaagaaccctatggaaggtgtctcagttgagtttgaggccaagtcagctcgtgatggtgcatggaagtgcgggttcgtttttctggatttggggcagaggaggatgaatggatcaatgttcgcaaatgtgtgcgacaacgttctcttccatgcgaggccacagaatgcgttgctgtgctttctggggacctcattc

SEQ ID NO: 146351 - DNA, 553 bp, Zea mays
  Clone ID: MRT4577_6498C.1
gcggtcgtccttttttttttttttagacaagcacatatttattcaattgttttggaagcagaggtgtttttaattgtaaccgagttcgatgtaacaaagcacagcgcaaccaatttgttccttccgattggtttggatcatacaagatgctgaaatccccggaaatgatgggtacacccgctcgccacggatgcggggggcaagctggatttccttgggcatgatggggacccgcttatcggggatggcccataggttggtgccccctaaaagaccgacgagggaggccttgggggcctcctggaacgccagcacggggtggttttgaaaccggagggctgttttgaagtcctgggggatctcgcgcaccaagcgctgaaagggcaatttggggatcaccagctcctggcttttttggaacttggggatctcgcgcagcgccacggttccgggcctgtacctggggggctttttcacgccgccggtcgtgggggccaacttcctcgcccccttggtggcaaactgcttgcggggggccttgcctcccgtggac

SEQ ID NO: 146352 - DNA, 148 bp, Zea mays
  Clone ID: MRT4577_64990C.1
ctgatgcttttaattctcctccctttacaacagcaccatcgtgccgagcgcccggtgcgcgtgcggctgcagcggacaccgaagccacgcgggttcaggcggttacatataaaggggactccaagcgcgcgctgtaagacggggtgaa

SEQ ID NO: 146353 - DNA, 1656 bp, Zea mays
  Clone ID: MRT4577_64991C.1
gcacgaggtcaaacacgcccgggtgcgtgcgtggcctacaccgttgagccggagccggaaccggttgcctgcccggagccatgaacgcctacctccactaactcacacttctcctaaagtttccccacccccgtccgccgatccaccaccgatctggtctcactgcatcctcctcccctcgccgtccaagagcgccggtccgatgggtcgtccgccgagcaccactggtgctccggccttccgcttcctcccttccgaggtggcggagatggaggcgcgcttgctgcagctcaacaacggcatccccacccgcgccatgctccagactctcgccgataagttctccgcctcgcccgagcgcgccggcaaggtggccatccagcccaagcaggtgtggaactggtttcagaacaggcgttactcgcatcgggccaagaccaccagggtcgtgccgtctccaccggctaagatgaccccctcgggggccgatcaccaccagcacgccgctaacgcctccgccttcagggccgctcagccctcttctgtcgctgttgctcaccatggctcctcctcgacagggaagaaccctatggaaggtgtctcagttgagtttgaggccaagtcagctcgtgatggtgcatggtatgatgttgctgcctttctgtcacataggttgtttgaatccggtgacccggaagtgcgggttcgtttttctggatttggggcagaggaggatgaatggatcaatgttcgcaaatgtgtgcgacaacgttctcttccatgcgaggccacagaatgcgttgctgtgcttcctggggacctcattctttgttttcaggaagataaagagcaggctctctattttgatgctcgtgtccttgatgctcaaaggagaaggcatgatgttagaggttgccgttgtagatttcttgttcgctatgatcatgactcttctgaggaaattgttccactgaggaaggtgtgccgccgaccagaaactgactacaggcttcagattctgcatgctgctagagcggcagccgccagtgcagatattcacactccacccagagaggctaaagtggagttggcatccaatgctaagagcccatatgagcaaaaaccccagaagcagtacaagatgatggacgtgaacactgatgaggaggtgaccatggtctccaccttggaacaggatgagacacaaggcaagactgtagcccccgtaccgtcagcaactgcagaaacccgcaattcaagttcagacgcggtgatgaaggatgcggaggcttcgtccgtggctcaagacgatgatgaagtgcaggtggttgacaagatgaaagaggggtagctttttttcgcactttttgtgtttggaggacttgatgttgtcgtacagagttttctaatttagtttgtagtatatgtttttctaattaagtactccttccattcttttttatttgttatggtttagtttagaaatgaactaacgctcgttcttttttatttgtcacgttagtttaaaaatgaactagcggacgacaagtattgagaacggaggtaatacagtacttgtcgtaattaccgtgtggcctcttaaaaaaaaaaaaaaaaaaaaaaaaaaaaaaagtactctgcgttgttaccactgct

SEQ ID NO: 146354 - DNA, 276 bp, Zea mays
  Clone ID: MRT4577_64992C.1
agagtgcgaaaagcatttttaaacgttttctccccgcgcccccgaaagggggggatcgagctccgcgaaagagagagagaacatcacgcaatggcgacagctcggaaggtgatcaagtgcaaaaccaccgtggcgtggaaagccagcaaaccgctgaccatcgaggatgtggaggtaaggcccccgcaggccacggaggtgcctatcaaaaaccctatacaccgcgctctgccacaaccgaccatccacattcagggaagaaaaagggcaaaaccc

SEQ ID NO: 146355 - DNA, 1761 bp, Zea mays
  Clone ID: MRT4577_64993C.1
atcaagctaggatagagaatcgaatccgatccacaatccaaatcccaccgaggctctggcgcagcgcagtaggccatcgttcactgttggcacacacgggacacggcacgccgcaggccgcagcgcgcgcgagagggagccggagccggctgcctgcttgaacgcctggtaacacggcctctcgcttcccctcccaaactttccctaccccgaccgccgatcctcctcgccttgacgtccaagagccccggtccgatgggtcgtccgccgagcgccggtgctccggcgttccgcttcctcccgtccgaggtggcggagatggaggcgcgcctgctgcagctcaacaacggcatccccacccgcgccgtgctgcagaccctcgcggataagttctccgcttcgcccgagcgcgctggcaaggtggccatccagcccaagcaggtgtggaactggtttcagaacagacggtactcacaccgggccaaaactcccagggccgcgtcgtcaccgccggctaagatgacgccctcgggagctgatcaccaccagcatgccgctaacgcctccgccttcagggctgctcagctctcttctgtcgctgctgcgcaccacggttcctcctctacagggaagaatcctgtggaaagtgtctcagttgagtttgaggccaagtcagctcgtgatggtgcatggtatgatgttgctgcctttctttcacataggttgtttgaatccggtgacccggaggtgcgggttcgtttttctggatttggggcagaggaggatgaatggatcaatgttcgcaaatgtgtgcgacaacgttctcttccatgcgaggccacagaatgtgttgctgtgcttcctggggacctgattctttgttttcaggaaggtaaagatcaggctctctattatgatgctcatgtccttgatgctcaaaggagaaggcatgatgttagaggttgccgttgtagatttcttgttcgctacgaccatgattcttctgaggaaattgttccactgaggaaggtgtgccgccgaccggaaactgactacaggcttcagattctgcatgctgctagagcggcagccactaatgcagatgttcacactccacccaaagaggttaaggtggagttggcgtccactgctaagagcccagacgagcagaaaccccagaagcagcacaagatgatggacgtgaacactgatgagggtgaccatggtctccaccttggagcaagatgagacaccaggcaagactgtagcccccgtaccgtcagcaactgcagaaacccgcaattcaagttcggacacagtgatgaaaggtgctgaggcttcctcggtcgttgaagatgacgatgaagtgcaggcagttgacaagatgaaagaggggtagggtttttttttttctgtcaccttttgttatctaggtcagtgcctgtcttaattaccatgtagcatcttaatggcctcagaagcttgtttgaaggcctatgtgagcctttgccttgcctatacctttttgtttgttatgatatggtgaaatggaactggcgctggttctgttttagttgctgcttcaccgagggacttttgttatctgtggtcttccttctccagcgtgggcagaggggcgccagagactgcgggtttcgcttcaggatctcagggtaaaatgtgtagctgttcgattgattgtttgcttcactccattgagcgttgttcgtcaataataatttattggagtaaaaaaaaaaa

SEQ ID NO: 146356 - DNA, 530 bp, Zea mays
  unsure (1)..(530): unsure at all n locations
  Clone ID: MRT4577_64994C.1
ctctttattctctttggtggtgtgtgcacttgctgctccttattcccttttccctttatgcttccattctcctctcttttttcttacctcacctttcctttcatcttttctttctcctttttctccaataccctttgggtcgacggggcggcatccatcacgcacccacatctgccatcttacctttatcacccttcatactccatcattcatctccctttttcaatcattttccttcacttcatttctcgacacttatcatcntcactcattcactccatcacctcgctctatctaacctttctccctcctcctatcatcacctatttctttcattcatccctctctgcttattgaactctncttcttttttttcccatcaaccaataccattcactcatcctccttnttcctacccccttcactttcttcccttcaaccaactttcatcattcaacttttcttcttatttacattattnccttctactacctttcaaccatctaccttncttcatcccttctacctta

SEQ ID NO: 146357 - DNA, 425 bp, Zea mays
  Clone ID: MRT4577_64995C.1
agtccagccagttaccaaaaagaaagaggggtagggtttttttttttctgtcaccttttgttatctaggtcagtgcctgtcttaattaccatgtagcatcttaatggcctcagaagcttgtttgaaggcctatgtgagcctttgccttgcctacacctttttgtttggtcgatgatttggtgaaatggaacctggctgggatggttctgtttctccgagggacttttgttatctgtggtcttccttctccagcgtgggcagaggggcgccagagactgcgggtttcgcttcaggatctcagggtaaaatgtgtagctgttcgattgattgtttgcttcactccattgagcgttgttcgtcaatattactcctatttattgtgttcaatgttgtcagcatgatttaatggagtaatttattggagt

SEQ ID NO: 146358 - DNA, 461 bp, Zea mays
  Clone ID: MRT4577_64996C.1
ggacgggacaaaaccaacacccattttacgtatctaatttgtcaacagaaggcgttcaggggggtttaaaaggaaaaaaccacatggcggtggaccaaatcagtttacagggggaaaaacccaaaacttggcgttggaccaaatcagttgacggggggaaaaaaccaaaacaagcttcaggcgggctgctcaaaagggaggctgctatttttgttggaaacagtaaatcttcaacaaacaacttacccccccttttccaaaaaacccttgatctctaaggggctaaaaactttgaacccacaggcggctcaaaaaattccgatttcaagggggggggaggaaatttccccctcatatccttctttaaaagcaaaaatggcgggggggagggcatcaacaagtcccaaatcctcggggaatcttttttccaaaaaggcttttgaattagacacattttttcc

SEQ ID NO: 146359 - DNA, 233 bp, Zea mays
  Clone ID: MRT4577_64997C.1
tgctcacctgggtgcggagcgtcattcggacacggagatacagcgagcattgcgacgatggagttcgtgaaccctttcaccggtttgcgtgtctgcggtcgccgtcccaacgagaatcggcaactaaaggtcgagggctgctatagtttgcgttcataccgggtacgctctgatcaggaggggctacagcatgggaaaagccaatgtttacagcctacaagaggctaaaagca

SEQ ID NO: 146360 - DNA, 433 bp, Zea mays
  Clone ID: MRT4577_64998C.1
tcgtgggccgatacaagcctctatagtaagtcgcatgaaaggctgttgctacttaaaagaagtgtacggatattcaagcttggaggactcgcgggactagaatgaggcatggaggtgctagaagaattgccttgttttgcaactttggtgccacaatcaggaagctcccctgcaagtagattgtctgatagatcaagaactcgcagctgcttccactgacaaatctgattaggaataagcccagtaattcggttggagtagagaaccaccagctgtagtagtggggcttcaaaattcagtgacagtggtccattcaaagagttccttgagatgtcaaacgtcacaatgcttcttggcagccgtggtaccgagccagtgagctggtttgaactgagctgaaagattcccactgacatgaactcaaaatcacggg

SEQ ID NO: 146361 - DNA, 325 bp, Zea mays
  unsure (1)..(325): unsure at all n locations
  Clone ID: MRT4577_64999C.1
nctaatccttcgacgccacgctgacgaactcgggggttattttaaatagtcagggccgtatgatcaccacaagtaattgtcacggcaaaaaactcaccgcgcgccatcaatctattgatgtccccgtcacggcggcaaggtggtagggtcgattcgcggaggactacgtgttgctctgcgccagggagcccgtctacgagcttgttgaagtgagataaattggaggatggtcatcaagaaaataagcatgctggtagctactgaaattctagtggtctcccgcctacgagatactagaagtgttgaccccatcactttgggtaaa

SEQ ID NO: 146362 - DNA, 166 bp, Zea mays
  Clone ID: MRT4577_6499C.1
tacgtaagctcggaattcggctcgaggtcaaatcgagctgcctattctttcttatagatttaacaggagatctggggaccatcctgtccctactcagctatctttggaccgtggggggtgggtctcctcaacttgagtttccttacgactgcttatgacctctatc

SEQ ID NO: 146363 - DNA, 129 bp, Zea mays
  Clone ID: MRT4577_649C.1
gacacccacaacgacgtagccgcccgaagcaccaacacatctaccgcaattcaacttaaaacatactgcggcagtggggacaatcgtatatccaaaaatcgggtcttctccttaaataatgaattaatt

SEQ ID NO: 146364 - DNA, 136 bp, Zea mays
  Clone ID: MRT4577_64C.1
ttccactcttccgaccacgctgtcctaaaggattcagcacgcctcccgttgggaagggagcttcgtggcggcccgcctcggctcgtaatcctgtcattctgagctgattccctcttttccttgttgtgcgtacgcc

SEQ ID NO: 146365 - DNA, 607 bp, Zea mays
  Clone ID: MRT4577_65000C.1
tgctaaatagctgttaagttaaattttagctatttaatagtataatagccagggcggagcgctcggtatggcgagctatggcgctcgccataccttactcgactgctgggagccagagcttggtagcgaggtagacgtggacgggtatggaacttcggcgaggcaaagatgtcgatgaagaagcgcgtttatgtcggcggctccgcgttcaagctgctccgcacggtcatcgtcttcgcgctcgccgcctccctccatgcctccttgtcctgttcgccatgggtcctcgtgctcatggggccggaacgctcgcaccctacctcgccgagcccggctccgcctatgtgctcagctccgcggccccacctgacgacgcttctacctccgcgtcatgcgcagctctgcagccccgcccgacggcgtgagtgccctgcctggctgcctcagcccacgcgcaactccacagcaccactcgaccgacagcaacggaacagctccattgcctgagcgtctccactgccataccttattatctgtttgcgctccgccactgataatagctctccaacagactagctatttaactttctaatctatctggctctct

SEQ ID NO: 146366 - DNA, 168 bp, Zea mays
  unsure (1)..(168): unsure at all n locations
  Clone ID: MRT4577_65001C.1
gaccatnaaacgcccagacggggaagactatgtctgggagcagggaaccgcagatcaaccaagaacaggacagagggactttacataggtagataactgcaaagccaaataacccctaaacagggaacccgaaaaatatgggtttacacaacatagcccacatgcaaa

SEQ ID NO: 146367 - DNA, 516 bp, Zea mays
  unsure (1)..(516): unsure at all n locations
  Clone ID: MRT4577_65002C.1
ctgtcgaatcagaatgttagtgctgcaaatgttgtgcgcataccaccagttcagcaacaacttcctccaggagctccacgccctcagcaacagcttttggtccctgcccgtgcaccaccgttcccgcagaacaacatttctgaacaagcgacaggttgacaaggacgccagaaagtgacgaattttaggcatcctatagtctgcagcaggactaagaaaagtcgtaccgctaaattgggcggcatgcttttttttcttgcaaattgttttcttttgcactctaaaggttgtccttatccatggttacctgaacttcatataatgggggggggggatctgctcccccggatggggcaggaaagctcgagtgtgggaagatgaagcccctcttgttcagcttctgtcagngtctgtacattccccatcttctgccagaaattctgagagctggggggctgtgcatggaccaaagtgggtgccggaaatggagggcggactgcaacctgtgtgtgatgt

SEQ ID NO: 146368 - DNA, 405 bp, Zea mays
  Clone ID: MRT4577_65003C.1
aggggaagaccagaaaggatttccgggtccaaaaaaaaaaggtaaggaaaaaaaaattacaaaggggggaaacccccccttgtcaaaatttaaagggattgaaaaaaaggggttttttttgttttgggggcccccaaaaaaaaaacaccggggggggtttggggaaaacacccccatactttttttgggcccggaaaaaaattggaaaaaaagggagcagggggcttttttagccccaaaaaaaaacaaccccatccctttccttttttaaaaggggcccacgggggcccaaaaatttgttccggggaaaaccggggaataaccaaactttttcttaaacctgaaaaagtggttgtttttggccaggcccccaaaccgggaagggggcccccttttgttttggcc

SEQ ID NO: 146369 - DNA, 316 bp, Zea mays
  Clone ID: MRT4577_65004C.1
ggaaagaaactggaataaacctttaaattttaagccctttaggtttggggccggggccaattgccctgaattaaatttttcaagggccctgaatgaagttaaatggggcttgaaatagctaaccccgcaaatttttggtggtggggggaactttcaaccccgggggggttttgccttaaacacgatttcacccttgctgttttgttgggcacgattttgttttttgtttccagctccataactcgttttgggttggcggcaaactcacccctgggatgttcagggtaaagcgtccgccacttggggaattttgcaa

SEQ ID NO: 146370 - DNA, 435 bp, Zea mays
  Clone ID: MRT4577_65005C.1
cccacgcgtccgatttcaaatccgcgtcagagctcaggtctgggtctcctccttcgccggcagttgcctcctccagtcgagatccgccgtcggggagaccactgaccatggaggccatggaggagctatcggagctcgccgagtcgatgcgccaggcggcgtcactcctcgccgacgacgacccctccgacgacgcgggcgccgatagtggttgacctgcagagggagccggggctcagcagcaagtccatcgtgctgcagatcgacagcaagtcgcagcaggtttccgcaagtgctctccggcattcactgcaggacagactcagcaggggagcatctggtggatcagggaggggccgtgttgatgagatttacctcaaactgcggaccagtacagctccctcattaaagctgattgatttacctgggatagac

SEQ ID NO: 146371 - DNA, 3367 bp, Zea mays
  Clone ID: MRT4577_65006C.1
cggtggcccccgcgagcccgggcggggagttcgttgatgtgttcctcgcctcctccagtccctccttctccgaattaggcacgtcggtccctctcgtgtgtcgcccaaatccatcaccccccacgtctctcccatcccatccccgtgtagatttcaaatccgcgtcagagctcaggtctgggtctcctccttcgccgccagttgcctcctccagtcgagatccgccgtcggggagaccactgaccatggaggccatggaggagctatcggagctcgccgagtcgatgcgccaggcggcgtcactcctcgccgacgacgacccctccgacgacgccgcgccgcgtcgccccaccaccttcctcaacgccgtcgccctcggcaacgtcggcgctggcaagtcggccgtgctgaacagcctcatcggccacccggtcttgccgacgggggagaacggggcgacgcgggcgccgatagtggttgacctgcagagggagccggggctcagcagcaagtccatcgtgctgcagatcgacagcaagtcgcagcaggtttccgcaagtgctctccggcattcactgcaggacagactcagcaggggagcatctggtggatcagggaggggccgtgctgatgagatttacctcaagctgcggaccagtacagctccctcattaaagctgattgatttacctgggatagaccagcgagctgttgatgattccatgatcaatgagtatgctgggcacaatgatgcaatactgctcattgtcataccggcaatgcaagctgctgatgttgcatcatctcgagctctgaggttggccaaggatatcgattcagatgggacaagaactgttggtgttataagcaaagttgatcaagcaaatggagatgcaaaagttatagcctgtgttcaggccctactgtcaaacaagggcccaaaaaaccttcctgacattgagtgggttgctctaattggacaatctgttgcaattgcgtcagcacaatcagttgggtctgaaaactcactagaaacagcctggagagctgaagctgaaagcctgaaaaacatcttaactggatctcctcagaataagcttggtagaattgctttggttgacacaattgctaagcaaatccgtaaaagaatgaaagtgcgggttcctaacctattgagtggacttcagggtaagtctcaaatggtgcaagatgaactggcaaggctgggagaatctatggtacaaagtgccgaaggaacccgagcagttgctttggagctgtgccgagaatttgaggacaagtttcttgctcacataacatctggtgagggatctggttggaaaattgttgcaagttttgaaggcaagtttccagacagaattaaacagctaccgttggaccgacatttcgatctcaacaacgtcaaaaggattgtcttggaagcagatggttatcaaccatatttgatatctccagagaaagggttgagatccttaataaaaatagtactggaaatggcaaaggagccatcacgactatgtgttgaagaggttcatcgtgtattgttagacatagtcaatgcttccgcaaatgccacaccaggacttgggagatatcctccattcaagcgtgaggttgttgcaatagcatcaaatgcattggagaccttcaaaaacgacgccaaaaagatggtcgttgcgcttgttgatatggaacgtgcttttgttcctccccaacatttcatccgcttagtacaaagaagaatggaaagacagcgtcgggaggatgagttgagaaatcgatcttctaagaaaacacaagaagctgaacagccaacatctaagagggcctcaagtccccaaacagatgctgagcaaggtggtggcagcttaaaatcaatgaaagacaaatctggccagcaagataaagacacaaaagagggatcaaatttgcaagttgctggtcctgctggtgaaattactgcaggttaccttttaaagaaaagcgcaaaaactaatgggtggagcaaaagatggtttgttcttaatgagaagagtggaaagcttgggtacacaaagaaacaagaggagagacattttcgtggtgtcatcactcttgaggagtgcaaccttgaggaggtagaggaggaagagccttctaaaagttcaaaggactcaaaaaaggcaaatggatcagaaaaaatctcaagtcttgtatttaagattactaatagggttgcatacaaaacggtcctcaaagctcacagtgctgttgtgttaaaggctgagagcatggccgacaaggttgagtgggtaaataagatcaaagctgttattcagagcaaagggggttctttcaagggtccaagtactgagggtagttcaatgaggcaaagcaattcggatggcgctttagatactatggcacgtagacctgctgatcctgaagaagaacttagatggatgtctcaagaagttcgtggttatgtcgaggctgttttgaatagtctggcagcaaatgttccaaaggctattgtgctttgtcaagtggagaaagcaaaggaagacatgcttaaccagctatacagctcgataagcgggcaaagcaatgctaagattgaagagctgcttcaagaggaccataatgctaagcgcagaagggagaagtaccaaaaacaatcatctctcctgtcaaaacttactcgtcaactcagtatccatgataacagggcatctgtttcctcttattctaatgacaccactgaagccgagagccctcgaacaccaacccgctcaggtgaggactggaggtcagcttttgattccgcttcaaatggtcctgttgctggaagcacaaacagtcaatcaaggtccaaaagtgctgacggtcgcagtcggcgctatgagaacggggacgtgagctcaggtgccaactctggcagccggcgcacaccaaaccggttgccaccagcaccgccaaaatactaatcgtgctgattggtattcatgaacatttatgtattcttgcctggcacatgcgcccagatcggctgctagagattgtggtgtagtggatggagtatcgggtgattgcgtgaacattgtgttcgcaggtcgctgcgtctcagatgagctgtttatagaaaaatatacaggtaaccgtggtttctactgtttattatctctgtatatttatgacgtccctgccttttaattaaaaaaaaaaaaaaaaaaaaaaaaaaaaaaaaaaagaagaaaaaaaaaaaaaaaaaaaaaaaaaaaaaaaatctgcgttgttaccactgctaaaaaaaaaaaaaaaaaaaaaaaaaaaaaaaaaaaaaaaaaaaaaaaactcgaggaagggc

SEQ ID NO: 146372 - DNA, 847 bp, Zea mays
  Clone ID: MRT4577_65007C.1
ttgggacccggccggggaaccgctatcttctatcaccacctcggagcccgagtggaaggggaaggcaggaatcgccccgcacgcgcccccatccgcctgccggcgacggcccacatgccgaccgcctacagcctccgcgcgccgccctccaccgcgcagcagcgcctcaggctgcccccgccaccgctgccgctttgcccggcgggtggaggggccgcccgccggaggagggttgtcagggtagcgtccgcgtccgcgtcgcccttcgacgagctgtacgcgcgggggaggcccgcacatggaccctccaagaaatccatgctctggaacttgatccaggatatagagcctctggaccttagtgtcattcagaaagatgttgctcctgaaacggtagatgcaatgaagaggactatttcgggcatgttgggtctgcttccatctgatcagttccgtgtcattgtagaagctctttggaatcccttcttcaagttattggtatcttcaattatgactgggtatactctgcgaaatgctgaatacaggctttcttttgaaagaaatcttgaactgtctgaagaagttgcagaatgccaaaaaagtgatgtcattgaagataatcatcatgacatcaatttgggtacacctgtcactatttttagattagcagaagaagacatgccccaggaccctgaaaaaactgatgacgaatcatcatatgaaaatatgggagaagagctcggcgacttaaccctgcaggcagaagagtatattattcagatgcaatctcgtttggatgccatgaaaaagagctacatgatctcaggagaaagattctgctctgcaa

SEQ ID NO: 146373 - DNA, 754 bp, Zea mays
  unsure (1)..(754): unsure at all n locations
  Clone ID: MRT4577_65008C.1
aattcggcacgagggtctcttccatcccatccccgtgacgccgtctagatttcaaatccgcgtcaggccagggcagagctcatggctcggtctcccccttcgccgccagttgccgcagcctccaacccctcgagatccgccgcgtgggagaccgccgaccatggaggccatggaggagctgtcagagctcgccgagtcgatgcgccaggcggcgtcgctcctcgccgacgacgacccctccgacgccgccgcgccgcgccggcccaccaccttcctcaacgccgtcgccctcggcaacgtcagctctggcaagtcggccgtgctaaacagcctcatcggtcacccggttttgccgacgggggagaacggggcgacgcgggcgccaatagtggttgacctgcagagggatccggggctcagcagcaagtccatcgtgctgcagatcgacagcaagtcgcagcaggtttcggcaagtgccctccggcattcactgcaggacagactcagcaaggggacgtctggtggatcagggaggggccgtgctgatgagatttacctcaagcctgcggacgagtacagctccctcattaaagctgattgatttacctgggatagaccagcgagctgttgatgattccatgatcaatgagtatgctgggcacantgatgncatactgctcgttgtcataccggcaatgcaagctgctgatgttgcatcatctcgagctctgagggtggccaaggatatcgattc

SEQ ID NO: 146374 - DNA, 1873 bp, Zea mays
  Clone ID: MRT4577_65009C.1
ggggcgaagaatcgcaccgcgggagaccgagacaggcagccagcgcggagcagctgaagcctatcttgtaggagtatcttctatcaccacctcggtaccccgagggaaagaagaagcggaggggaggcaggaatcgcccgcccgcgcctccatcgccctgccggcgacggcccacatgccgaccgcctacagcctccgcgcgccgccctccgcctcgcagcagcgcctcaggctgcccctaccgccgcccccgccgccgctgccgttttgcccgggtggaggggccgcccgccgcaggaggggtgtcggggtggcgtctgcgtccgcgtcgcccttcgacgagctgcacgcacgggggaggcccgtacatggaccctccaagaaatccatgctctggaacttgatccaggatatagagcccttggacctaagtgtcatccagaaagatgttgctcctgaaacagtagatgcaatgaagaggactatttctggcatgttgggtcttcttccatctgatcagttccgtgtcattgtagaagccctttggaatcccttcttcaagttattggtatcttcaattatgactgggtatactctgcgaaatgctgaatacaggctttcttttgaaagaaatctagaactgcctgaagaaggtgtagaatgcctaaaaagtgatgtcactgaagataatcatcataacatcaatttgggaagacctgtcactatttttagattatccgaagaagacatgcctcaggaccctggaaaaaccgatgaagcatcatcttatgaaaatatgggagaagagcttggtgacttaacaccacaggcagaggagtatattattcagatgcaatctcatttgaatgccatgaaaaaggagttacatgatctcaggagaaagaattctgccttacagatgcagcagtttgttggggaggaaaaaaacgacttgctggactatttgaggtcattaacaccagagaaggttgctgaactatcagaatcgacgtctcccggtgtgcaagaaactattcattctgtggttcatggtttgcttgctactctttcccccaaggtacattcaaaggcccctccaccgctagataacatttctggtggtgttctaaaccttgggggcgaggatgatgatcgtgcagaacttgtggagaatgcttccctcccatttcagcccctaatatctgttccccgtgattatcttgcacgtttgctgttctggtgcatgctgctgggtcactacattcggggtctggagtaccggttagagcttgctcggcttctgcgaatatccagcgtgggttctttctctggtggagatgatcatgttgtttgagggtaccacgtctactgatattcctcaccgggaagaatggaaaggaaagccctggtcaagaaatgggccatatggcagagctgcagaggtgtccgttacactgctgagctatatagttgtagttcctgtatattcagaaaacagtcactcggttgtaaagctagtgttacatatgcacgtgaaccattttctttttcttcctttgatgttgtgccgtataaaaagaatttggtggttcgttggtgtttatctcgtggtagcataataggcatccttgtattctagttgtatgtttctggtggttgtgactgctgtccagtgtccatttagcttttttgtctattcttgattcgagtaaagcttaacttctcattttggaggtcgcaagcacaaactttcattgaaaaaatttgagccagccaccgtcgcctacctcggggacatcgcccgaacgaccagagcctcttttccccaaaaatgaatagcagttggtggggattatcggatgctactgcatga

SEQ ID NO: 146375 - DNA, 379 bp, Zea mays
  Clone ID: MRT4577_6500C.1
ttcaagcgaacggatgctactgctttattagagaggcataagttaggcatctaggcagacttactgatgatgtttatgcctaagtatgggtggttatgctaagttgaagactctattactaccaattactaggatcgcgcgtatgctccgctatgtaaacacgtgggacgacacaattgggcatgttttagtggcgtccttttatgctgtgatactgagttgaattggatcttacatgatcatgtatcagaagctggtgattcatactcaggtagagctactgcttccttacatgaaaatgcataagcaggtcaggcatatagctctactgactgtaacaagcacacattatgcacgcgacgtgattcttattcctact

SEQ ID NO: 146376 - DNA, 518 bp, Zea mays
  Clone ID: MRT4577_65010C.1
aaaaaaaaaaaaaaaaaaaaaaaaaaaaaaaaaaaaaaaaaaaaaaaaaaaaaaaaaaaaaaaaaaaaaaaaaaaaaaaaaaaaaaaaaaaaaggacgacccccccttccgggctccagcctttccccatgatttcgccgacaaatttcctccgggggcggaaaatcacccttgtttaaaaggggggggcagggacgggaacccctttttttccctggggggccgaacggccacgggaactcctttaaggcctccaatttgggactggtaaagggaaggtttccttggcagccatcactttaaaggattaccttccaaggcaaaccactgaagggaaaaaccggacttcaacagatgacttcacagggttgaaactaatcacagcagttaaaaccccttttttgccaaatgggaggttcgatctgaaagcatatgattttttcataaacatgcaaatagaggggggggccaaaggcttaatatttgggggaccaacaggagagggtcacctcatgagc

SEQ ID NO: 146377 - DNA, 528 bp, Zea mays
  Clone ID: MRT4577_65011C.1
atggaggacaagacattgaagaagacagcgccagacaaatctgaagttcatcccttgaacgtgatcaaagtcatgatggaagaccttacagaggcggacaggaaggagattgaagaagaaatcgtgagagagatggaggagaaacggaacgagaggttggcttgcttccgaaaaaccaagaatggtgtgatcaaacagactgttggggcaagcacgtccggcaagaagccatattaccaaagtgtggcctatggaccatctatccatcccataggaaacggagtgccgcaaggatctgccccaaacaggcatgtggcaggggcgcagggagcattgtgttcagccccttttgcgacacctgtgacttatgatggtgaatcatttgaaaatgttagggagcaggtagctaggactcttagggaatttggttttgagcctaaagggcatactagatcctataagaagccttaccctgattttttgatacagtgtcgtaccctcgaggttttagaattccagattttgtga

SEQ ID NO: 146378 - DNA, 237 bp, Zea mays
  Clone ID: MRT4577_65012C.1
ccgacgcgtccgttcacgcgatcagatctgagagcgtgcactcgatgtggcgtcaccgatattatcgtcgtcctggtactgtttgcagggtgcaacccaatgggggctggcatccttccaacagtattcggcttcaacgatattcatcatgcataccggctgaagtcgctcatcggtagtgatacataatgatgacaaccaaacttgttctggggacatgcaaaccggggtgtgtgc

SEQ ID NO: 146379 - DNA, 347 bp, Zea mays
  Clone ID: MRT4577_65013C.1
ttcaggacgagcatgcatgcatttttaattaaacaaatggaaaaatttagtaaggacttaaattatgaccaactaagttccccagtaccattttgttttaattagagagaagttgagtcttatttttttcttgttctttttataattcttttcttttacttacgcttaaccgtacacagatggcttcccacggatccttagacgacggaaatgcactatcccacactgacaggcttgcacgtgagggctttccccgcattttgtgggaggtacttcagggggccggatacacgacgccttcttagtatgcggtgcagcagttctagaagcaccgagtgccccgttgt

SEQ ID NO: 146380 - DNA, 741 bp, Zea mays
  Clone ID: MRT4577_65014C.1
atggaggacaagacagcgaagaaagcggcgccagacaaatctgaagttcatcccttgaacgtgatcaaagtcacgatggaagatcttacagaggcagacaggaaggagattgaagaagaaatcgcacgagagatggaagagaaacggaacgagaggttggctttcttccgaaaaaccaagaatggtgtgatcaaacagaccgttggggcaagcacgtccggcaaaaaggtaagttcatctgtcacttgcgaagagctagctcacatgattgatacttatgtagctagcaagtatggggctgatgtcacaaaaattccgcgtatgatttctgagggagtgcataattctttcgatgcatttagatctgaatttaagcaagatataagcaacaacatgcctagacagattcgatctatagttcaacagatacaagaagagaatcagggtaaacgtgcagcgaattcgccaggcacatctagctttggaatagcagttgcacccaacaccatagatgcatcggctaagggtatgagtgggagtgcagtagcaaattctaatctgcagcagccatattaccaaagtgtggcttatggaccatctattaatcccataggaaacggagtgccgcaaggatctgtgccaaacaggcatgtggtaggggcacagggagcattgtgttcaaccccttttgtgacacctgtgacttatgatggtgaagcatttgaaaatgttagggagcag

SEQ ID NO: 146381 - DNA, 173 bp, Zea mays
  Clone ID: MRT4577_65015C.1
cagcccgccgctgacctgctctctgcgcctccgtcggctccccgcacgagctgctgccgcgtgggtggccctccgccagctacccgtagagcgccgccacatatgcccacgcagctcgtccgacgatcgcaccttccggcattcgtgcctcgtcagaccccataccgaaagcc

SEQ ID NO: 146382 - DNA, 424 bp, Zea mays
  Clone ID: MRT4577_65016C.1
atatttttttttaatataacattttttttttttttttttttttttttttttttcaccaaagcaaaaaaaaaattttttgtttcatgaaatatgggtaaaggcaaaagggtcacatatgtccaacagccccttttatataatatggccccttcagaattggttatggggggctttacagtttacccgggtttcccatattaaggaaaaaaaattgggtgccgtctttattggaaattttaactatgatttactaaccaggctatccaaacttttaatgaacagggggggtcgaaacctgatttgccttggcacataccttagtttccttttcaattccaaaattgccttttgtctttcccgaacaaagtattttattgccccttttcggtggaccttgattgatcttgggagcgctttttttttt

SEQ ID NO: 146383 - DNA, 1416 bp, Zea mays
  Clone ID: MRT4577_65017C.1
acgcccacgcgtccgcgaggaccgcccctttgcgccacactacttcggccgagggaaaaagaagcgcgtttaggtaccaccaccagatccttgttgctggattctttctttgctactagctaggtgtcccttctcctatcagacagactataagggcaggcccgccctcaccgttccgccgccgcctcgaactggaggagcgagcatgtatcccgcaccgaaacacacacgcaaacggcaccaccaccaccaccaccgtccggcgaggtagggaggcagcggcgccatgggttgctatcctcccctggccaagatcgtgtctagagcgctcggaaaatgcaacggcgggcgcgagagatggcgggaagggaggctggagctggactttgatcacgccttgggctgtcagcccacggagacccactacatgcggccggtggcgcgcacggtgaccttcgccagcaacaactccatctacgtgatcccaccgtcgccgtcgccacaaccgcagcagcagagcgcaccaccagagccacagcgaccccaaacgccgccccggcacgagcccgagcagcacgacggtgcacccgaatcccaaccccaagccgagcaacccgaggcacccgcgcaaacggaagacgcgccgccacaggccgccggcgccgagccgaagccaccaaagggcccaaacccaaagcgaggcaagagcaagaaggggcagccgggccgcgtccggttcggccccgagcctccctctccgcagcaggaggaacggcaaaagcaggagcacgcgcaggggcaggggccaggcaacagcagcgagagcgagaaagcgccgccgccgccgggtcaggagcctcatcatcacggcgcggcgcccgcgcccgcgcaggggcaggcgcagggatacctgatccggtacacgccgtcgccgctgccgaggtgggaggcgacgccgcggcggcacgagtacttctccggggagtaccggagctactacccgacgccggtgcgcgagggcatctaccgcatcgccaccgacgccaacaggctcaccaccatcttcagcgaggagaatcccaacgcctgcaccatcgtctgagactgagagcgacggccaggaaggaataacccgttgttccgttcgggcaacggctcgtcttccttttggttcttggttgattggtgatggaatcattagccaagaatccggttcttcttgtagggagtgttgtagataagaaaaaagcaggaaactttcggttcggccggtatgatgagatgtaaacttccttgtgctgctctgctgctcgccttggattgtcaatttgtcgttgtcctcttacgtttaaagcagctacttccttccaataataaataaactagaattagcagcgccctatagggcgctatgaa

SEQ ID NO: 146384 - DNA, 501 bp, Zea mays
  Clone ID: MRT4577_65018C.1
aaggcccgctgcggacacaggccagaagaaaagcggccgcaatgagcgccagcaccagagccgcggccaacgggcgccccccgcgggggggggaacaccccgacggaacacccaagagcaccacggccgcgacaagagacgcaagacggctggccaggaacgagccagcggaaccggcccagagagcagagtgaagagccgacggcggagcgcaccagggggcactgcaccgagaagcaccgagctacggccgaagagacccacagggcgactaccgccgaaacaaccaaggagcacatagaatacccggaagacaatcgctacaaacgagccgcaccgggtgatacaaggccacggaagggacctgggggacaacacacgcgagcgcgcccaccagctggcgcctaacggagtcaatgaaagtgaagccgaatggtcaatgaccagcacccaaaagctccgggagccacgggagcacagctacaaaacactgagcgacag

SEQ ID NO: 146385 - DNA, 171 bp, Zea mays
  Clone ID: MRT4577_65019C.1
ctgacgcgtcatcacagatgctcgtgtaccacacgtggcgattaggtgccctattctgaaggtcactgaacttctaatctgctgcaacattacatacgcttccttggacaatctttaacaaagcttgcccattctgaacactgtaaaccgtatctctcacatggtcattat

SEQ ID NO: 146386 - DNA, 363 bp, Zea mays
  Clone ID: MRT4577_6501C.1
ctgattattctttttttatccttatatttgcttgggggttcttatttttttttgtttcacccccaaaagcccctgtataaacccttacctttttttattttttttaaagattttctttatcgtcaaaaccagaaattatccctctattgtggaattaaaaaacacttttacaccccttaaacgttccatttatattgacagggacctttccttccaaattattatcgaggggcacattaaaatccacaagttggacccacaaaaatactttatttatcgcaggccctcctaaccattcccaaccaaaccaaatgcttttttcaaaacaaaaaaaggccctctttcaaaaaaaggttttctccc

SEQ ID NO: 146387 - DNA, 484 bp, Zea mays
  Clone ID: MRT4577_65020C.1
ggccgggcagctctcgtgtccacgctacctcagtggggaagcgaagcagatcgagtggagcaagatccagacccctacggatgaggtggtggtgccctacgataccgccgcgtcggctcccgaagatctcagaggagaccaagaagctgctgtataagctcgttgagctcaagcttaacgacgggctcgatacgaccatggggctgactgaccccaagtctgccattgaagaacgcaatggtttcacattccttgaccttattgtgatttaaattgagttcctgaacaagaaatgtggatgctatgggcctttactattgatgaactgttgcacacccgtgctgtcactcaagagattgtctgacagcgtgtgctctaaggcatatgaaaaagggactttttactggggtcaccccatctttgatgttacccagcgctctgcgaagacggtcaccacttgcagacgacatttgttggggggtta

SEQ ID NO: 146388 - DNA, 1218 bp, Zea mays
  Clone ID: MRT4577_65021C.1
atgtcaaaacccaatccagaaaaatcaccaaggaaattctggagggttggtctgaagataccggcgacagtgacagttatgatgtggacagtggtggtgaagactccgaagatcgtccctggcgacctagccattcagtttatggtgctgaaaatcttcaaagtctatcttcaccaacttacccctgaggcaatcataaggctgaatatcttcgtgtgggccgtaagaagccaaggtctgaagcctgatgcaaaaagcttctgcaatatacacgaattatcatacgaaacaaaaccttggggtaaggaacaatatcataataattttggctgctacagtttcgtttctcggtccgggtcaagctgtcccgtgccaacctttcggaagagatggcccggagactggatgacagaatggttttatgtgaagaatgacctgtcagtacgagaagatatcaaaggtgtaattatgcgccctatttggcaaagcttcggccttcggaggccgaaggttgaaatgaatgaagctgccgaagaatgccagagggccttcggcgttatctgttcttttattggaacaagagatttagtacaagagcatattgccttcagggtatggccgctcgcggagaaatgggaaatgccacaagaaaccataaaggaggccgacgaaggtggacttatcaggctgaagtacacttttaagttcggggataaattcgttgagccagatgatgactggttaaaaagtattgaaaatttaagtgatgaactgcttggggcttattcgaaggccgaagataatgcaatgtcagcagccttcggaggccgaaaaaagaagaggctgaatcggatatttgatgcaatcgggttcgtctaccctgactattgctatcccattcgaaggcagaagagaaaaaacacaacctctgcaaaagaagaaactgcaactgctcctagcgagccagaaccgaaaagaaagaagattaaggtcctcacacatcggccacgctatattgaaccagcttcggtgcctgagtttaccggagaaacttcttcggccaccgaggctaaaaagccaaccaaaccaaccttgctgccagaagttgcagaaatggccgaaacgccaaggaggatagaattggaagaaccgaagatttcgctactagaaaccgaagaaatggccgaagcgccatccacagaaaaatggaaaaagtga

SEQ ID NO: 146389 - DNA, 383 bp, Zea mays
  Clone ID: MRT4577_65022C.1
gaggaggaggaggaggctgtaagcacggaccaggcgctcgtaatgatggggctggccataatacactgcttggacgacgccctgcccaccaagtaagatgattggttctatgctaatacactctctgtttctgatctgatgtaccggtagtattagtaactgctgatactgataggtgttgttctcttatactatgcggctagaaaaggatggtgcaaaaccgcccgcatctgaagacagcatgcacgcatggataaaaatgcgaatgtagcaactgagctgagaaaatcaaagtggtacgcagcgaaattataacaggctggttgatatccaacgtgagtaccttgctttgacaggcgatgttttcatggaagacatagact

SEQ ID NO: 146390 - DNA, 2142 bp, Zea mays
  Clone ID: MRT4577_65023C.1
atgtctgaagataaaaaggctgctgtcgagatgaagctgagcctctctgaagagaaaaacctggggtttcttgtagcaatgtcgaagaccaatacagaaaagatcaccaaagagattttagaaggtttatctgaagatactgatgacagcgacagttatgatgtggatagtggtggtgaagactccgaagatcgcccttggcgaccaagccatgcggttttcggcaaatcaagtgtcaaagaaaatcatcttgtcaacatgaggggaagatattttcgggacttatccattgtgagggccgatgaaggagagaagacctgtccgtcccctgaggaaaatgaagtcgtagtctttgtcgtagaggtgctgaagatctttgaaatctaccttcaccaacttacccccgaagcaatcataaagatgaatatcttcgtgtgggccgcgagaagccaaggtctggaacctgatgcaaaaagtttctgcaatatacacgagttgtcatacgagacaaaaccctggggtaaggagcagtatcacaataatttcggctgctacagtttcgtctctcggtctgggtcaagctgtcccgtgccaacctttcagaagagatggcccggcgactggatgacagaatggttttatgtgaagaacgaccttaaaactcgggaagatattaaaggtataattatgcgccctatttggcaaagcttcggcctacggaggccgaaggttgaaatgaatgaagctgccgaagaatgccagagagccttcagagttatttgctcttttattggaacgatggatttggtccaagagcatattgccttcagagtatggccgctcgcggaaaaatgggaaatgccgcaagagaccataaaggaggctgacgaaggtggacttatcaggctgaagtatactttcaagtttggagataaattcgttgagccagatgatgactggctaaaaagcattgaaaatgtaagtgatgaactacttggggtttactcaaaggccgaagatactgcattgtcggcaaccttcggaggccggaaaaagaaaagactgaaccgagtgtttgacgcaattgggtttgtctaccctgactatcgttatcccattcgagggcagaaaagaaaaggcacaacttctgcgaaagaagaagctgcagctgctcctagtgagccagcatcgaaaagaaaaaggataaaggtcctcacacatcggccacgctatattgaaccagcctcggtgcctgagttcaccggagagacctcttcggccaccgaggctgaagagccaaccttgcagccagaagtcgcggaactggccgaagcgccaacaacaacagaattggaggaaccaaagattttattaccagaaaccaaagagatggccgaagcgccatcgatagaaaagatggaagaaacaaaaggatcaactgagggatcaaaaatatcagaaattttaagtccttcagtagaaattgaagtagcgagaattaaaaagggcccagtggtgactccgaaaagaaaaagaatggtcaatgtgctagatgttctggagacaattaagtcctcaagcacaactccgaagaaaactgttgaaacttccgaagcggaaactgaaatttttgatactaaagctccaaagcaacaaactgaggctgaagctgggccttcagagcccacgaagggccttatacttagcaatgccctcagggcccaaaaagatgccgaagacgaaggggggattgccaccattttggagaaaaagggctgcgagcatgtaaaaattttagcgcaatccgaagctactttgtccttcgaagatgcaaaagatccttcagccgaagctagcatggttggtggaaaatttttcaccgatgtctgggacaatggtggtcgagaaatggcccgagaaattatccaaaaaagcgaaaagggcatccatgatgctagaaaagtagcagaagctgttgagaaaagcgcagagcccgaagggcaaatagatcctactaaagcgtctccgggccctcacccgaaaggagacgacgaaattaaaaagatggctgaagctatcatggatgaagttgtcaatcgactcctgaacgaagctgcagaagttgtacttagggaagactaa

SEQ ID NO: 146391 - DNA, 986 bp, Zea mays
  unsure (1)..(986): unsure at all n locations
  Clone ID: MRT4577_65024C.1
gaggggcacttttaaatttggagataaattcgttgagccagatgatgactggttaaaaagtattgaaaatttaagcgatgaactgcttggggcttattcaaaggccgaagatactgcaatgtcagcagccttcggaggccgaaaaaagaaaaggctgaatcgggtatttgatgcaatcgggtttgtctaccctgactattgctatcccattcgaaggcagaagagaaaaagcacagcctctgcaaaagaagaagctgcaattgctcctagcgagtcagaaccgaaaagaaagaagataaaagtcctcacacatcggccgcgctatattgaaccagcttcggtgcctgagtttaccggagaaactccttcggccgccgaagctgaaaaaccagccgagccaaccttgctgccagaagtcgcagaaacggccaaagtgccaacaaagatagaattggaacaatcgaagattttgttatcagaaacgaaagagaaggccgaagcgctgtccacagaaaaaatggaagaggtaaaagaagcaactaagggctccaaaacatcaggagttttgagtcccgcagcaaacgttgagatagtaaaaaatcaaaaagtgccagcaatgactccgaaaagaaagaggatggccaatgtgctagatgtactggaaacaatcaaatcttcaagcacacctccgaagaaggctgctgtcactcctgaaacagcaactgaaatttctggttctacagctccagagcaagagattgaagccgaagctgggccctcagagcccgcaaaggtaaaacccttggaaagtgaggcagaaaaaaataacaaagccaacttttgttgaagaaaccggtgttgttgcccccgaagcatcccccaaaattcgtgattatattttccgtcatgcttcggngaaaaaattatcagaaaaagaagaacaagaggcccagcactatgcccaaaaactgaaatatccaaagggg

SEQ ID NO: 146392 - DNA, 504 bp, Zea mays
  Clone ID: MRT4577_65025C.1
cccacgcgtccgcggacgcgtgggccgaagctgctctgtcctttgaagatacaaaagatgcttgggccgaagctagcataattggtggaaaattttttaccgatatctgggataatggtggccgagagatggccggagaaattattcgaagaagtgagaagggcattcacgatgctagagaagtagctgaggctgctgacaagagcgcagaagccgaaggtcaattaggtactaaataatagttcttatcgtgttgtaatctttaggcttttaagatctgtttgcgatttgtaatagcaatgtagccgggtcctgcttcagatccgactaaagcgccttcgggccctcagccgaagggggacgacgaaattaaaaagatggccgaagatattatggacgaagtcgtcaatcggcttctgaatgaagctgcaggagtcgttttgagagaggattaaacatttttgtaaaaaacttcggaaatgtaatataatgtaacatttttgt

SEQ ID NO: 146393 - DNA, 1443 bp, Zea mays
  Clone ID: MRT4577_65026C.1
atggctaatgtgctagatgtactggaaacaatcaaatcttcaagcacacctccgaagaaggctgctgtcattcctgaaacaacaactgaaatttctgatactaaaactccagagcaagaacctgaagccgaagctggttccttagagcccgcaaagataaaatccttggaaagtgaggcagaaaaaataacaaagccaacttttgttgaagaaatcggtgtcattgcccccgaagcatcccccaaagttcgcgattatattgttcgtcatgcttcggggaaaaaactatcagaaaaagaagagcaagaggcccagcgctacgcccaaaaactgaagtatccaaagggggcgttaatattcaatggcagtggagaagaagactttttgtattgtctccctgacagcaaagaaatttctgtctgccgggagatgagcaagagcttcggattcccaacactggaagacggtctctcagtgttatcgaaaaatgatttggccgacagcctagcatataatagcttaaagggcttgatacttagcaatgccctcagggcacagaaagatgctgaagacgaagggtgtactatagccctaagcaaccttcgttccgaagtaattgaactgaggaacgaaggtctcgaaaaagataagatattacattcattgataaataaaataaaagaagacgaagctgcttttaaaagtcaagctgaagcacagaagcgcgaaattgaagatcttcggaaacaactggccagagccaaggaagaacgcatacttgaagaaacaaagcgagaactcagcgatcaatgggcagatcacttagaaggaactgttgaagagcttcggtcatccaagaagagatgctataacaaatctatagagtgtgttaagaagttaaaggctagcttcgccagggtcggcgccttctcaagcgaagaaaactttataagaggcaatcccgaaggtcccatcgaatggatcgaccacgaagctgaggccttcgaagaaattttaaatagccgtggagacatatgtgctttctctggtgccagaggaattgccaccattttagagaagaagggttgcgaacatgtaaaaattttagcacaatccgaagctgctttgtcctttgaagatgcaagagatccttcgaccgaagctagcatgatcggtggaaaatttttcaccgatatctgggataatggtggccgagaaatggccggagaaattattcaaaaaagtgaaaagggcattcacgatgctagagaagtggctgaggctgctgaaaagagcgcagagcccgaagattctgctaaagcgtcttcgggccctcagccgaaaggagatgacgaaataaaaaagatggctgaagctattatggacgaagtcgtcaatcggctcctgaacgaggctgcagaagtcgttttgagagaggattaa

SEQ ID NO: 146394 - DNA, 2946 bp, Zea mays
  Clone ID: MRT4577_65027C.1
atgtctgaagataagaaggctattgctgagatgaagctgagccttgacgaagagaaaaacctggggtttcttatagcgatgtcaaagaccaatacagaaaagattactaaggagattctggaaggtttgtccgaagatactggtgacagtgacagctatgatgtggacagtggtggcgaggactccgaagatcgtccatggcgaccaagccattcagtttatggcgaaaaaacttgcccacaccctgaagagaatgaagtcgtagtgtaccgaagctttctgaaagctggactgcgatttcctttgagcagcttcgttgtggaggtactgaaaatattcgaagtttatctccaccaacttacgcccgaggcaattataaaactgaatgtcttcgtgtgggccgtgagaagccaaggtctgaagcctgacgcaaaaagcttctgcaatatacatgaattatcatatgaaacaaaaccttggggtaaggaacagtatcacaacaattttggctgctacagttttgtttctcggtctgggtcaagctgccccgtgccgacctttcggaaaagatggcccggagactggatgacagaatggttctatgtgaaaaatgacctgagcgcgcgagaagatatcgaaggcataattatgcaccctatttggcaaagcttcggccttcggaggccgaaggttgaaatgaatgaagctgccgaagaatgccagagggccttcggcgcagtgtgctctttcattggaacaagagatttagttcaagaacatattgccttcagggtatggccacttgcggagaaatgggaaatgcctcaagaaaccgtaaaagaggccgacgaaggtggtcttatcaggttaaagtacacttttaaatttggagataaattcgtcgagccagatgacgactggttaaaaagtattgaaaatttaagtgatgaactgcttggggcttattcgaaggccaaagatactgcaatgtcggcagccttcggaggccgaaagaagaagaggctgaatcgggtattcgatgcaatcgggtttgtctaccctgactattgctatcccattcaaaggcagaagagaaaaaacacaacctctgcaaaagaagaagctacaattgcttttgacgagccagaaccaaaaagaaagaaaataaaggttctcacacatcggccgcgctatattgaaccagcttcggtgcctgagtttactggagaaattccttcggccaccgaagctgaaaaaccaaccgagccaactttgctgccagaagtcgcagaagcggccaaagtgccaacagagacaaaattggagcaatcaaagattttgatatcagaaacgaaagagaaggccgaagcgccatccacagaaaaaatggaagaggtaaaggaagtaactgggagttccaaaacatcagaagttttgaatcctgcagcaagcattgggagggcaaaaaatgaaaaagtgccagccgtaactccgaaaagaaagagaatggcgaatgtgttagatgtactggaaacgattaaatcgtcaagcacacctccgaagaaggctgctgctactcccgaaacaactgaaatttctgattctaaagctccaagtcaagagactgaaaccgaagctgggccttcagagcccgcaaagataaaacccttggaaagtgaggcagaaaaaataacaaagccaacatttgctgaagaaaccggtgttattgcccccgaagcatcctccaaaattcgtgactatattattcgtcatgcttcggggaaaaaactatcagaaaaagaagaacaagaggcccagcactatgcccaaagactgaaatatccaaagggggcattaatattcaatggcagtggagaagaagacttcttgtattgtctccccgacagcaaggaaatttctgtctgtcgggagatgagcaggagcttcggatttccaactttagaagacggactttcggtgctgtcaaagaatgatctggctgacagcctagcttacaatagcttaaagggcctgatactcagcaatgccctcagggcgcagaaagatgctgaggacgaagggtgtactatagccctgagcaaccttcgttctgaagtaattgaactgaggaacgaaggtctcgaaaaagataaaatattatactcattgataaataagataaaggaagacgaagctgcttttaaaagtcaagctgaagttcagaaacgcgaaattgaagaccttcggaagcaactggccagagccaaggaagagcgcattcttgaagaaacaaaacgtgaactcagcgaccaatgggcggatcacctagaagtgactgttgaagagcttcgttcgtccaaaaagcgatgctacaacaagtctatagattgtgttaagaaattaaaggctagcttcgccaaggttggcgcgttctcaagtgaggaaaacttttcgagaggcaatcccgaaggtgttattgaatggattggccacgaagctgaagctttcgaagaaattttaagtagccgaggagatatatgtgccttctctggcgccagagggattgccaccatcttagagaaaaagggctgtgaacacataaaaattttggcacagtccgaagctgctttgtcctttgaagatacaaaagatccttcggccgaagctagcataattggtggaaagttttttactgatatctgggataatggtggccgagagatggccggagaaattattcgaagaagtgaaaagggcattcacgatgctagagaagtagctgaggctgctaaaaagagcgcagaggccgaagatccgactaaagcgccttcggacccccagccgaagggggacgacgaaattaaaaagatggccgaagatattatggacgaagtcgtcaatcggctcctgaatgaggctgcagaagtcgttttgagagaggattaa

SEQ ID NO: 146395 - DNA, 137 bp, Zea mays
  Clone ID: MRT4577_65028C.1
aggggggcaacctggtgtagcagtaagagcatagattttacagtttggctactgattaaggggaaaacatacttaattctagtagaaggttaaacttactattttaaataccttcttagattatctaggatttcatg

SEQ ID NO: 146396 - DNA, 3120 bp, Zea mays
  Clone ID: MRT4577_65029C.1
atgtctggagacaagaaagctgttgctgagacgaagctgtctcttgatgaagagaaaaagaaaactgctggtgagacgaagctgactcttgatgaggagaaaaacttggggtttcttatagcgatgtcgaagacaaacacggaaaaaattaccaaggaaattctggaaggcttgtctgaggatactggtgacagtgacagttatgatgtggacagcggtagcgaagactccgaagatcgtccctggcgaccaagccattcagtttatggtaaatcaactatcaaagagaatcatcttgtcaacatgagaggaaggtattttcgggatttgtccattgtgagggccgatgaaggagagaagacttgtccacaccctgaagaaaatgaagtcgtagtataccgaagctttctgaaagctgggctacgatttcccttgagtagcttcgtcgtggaggtgttgaaaatcttcgaagtctatcttcatcaacttactcccgaggcaattataaggctaaatatcttcgtgtgggccgcgagaagccaaggtctgaagcctgatgcaagaagcttctgtaatatacacgaattattatatgaaacaaagccttggggcaaagaacagtaccataataactttggctgctacagtttcgtctctcggtccggggcaagctgtcccgtaccaacctttcggaagagatggcccggggattggatgacagaatggttttatgtgaagaatgacctatcagcacgagaagatatcaaaggtataattatgcgtcctatttggcaaagcttcggccttcggaggccgaaggtggaaatgaatgaagctgccgaagaatgccagagggccttcggcgtcatctgctcttttattggaacaagagatttagtacaagagcatattgccttccgggtttggcctcttgcggagaaatgggaaatgcctcaagaaaccataaaagaggccgacgaaggtgggcttgtgagactgaagtacaccttcaagtttggagataaatttactgagccagatgatgactggctaaagagtattgaaaatttaagtgacgaattgcttggtgcttattcaaaggccgaagatactgcgatgtcagcagccttcggaggccgaaaaaagaaaaggctgaatcgggtatttgatgcaattgggtttgtttaccctgactattgctaccccgtccgaaggcagaaaagaaagaacacaacctctgcaaaagaagaagctgcaactgctcctagcgagccagagcctgaaagaaagaaaataaaagtcctcactcaccggccgcgctatatcgaaccagcttcggtgccggagtttaccgaaaaatcttcttcggctaccgaggctaaaaagccaaccagaccagtcacgccacctgcagctgcagggatgaccgaaacggcgaaaaagacagaactagaagaaccgaaggtttcgctgccagaaacaaaagaaatggccgaagcgccatccacagaaaaaattggagaagtgaaaaaaccaactgaagaaaaagttccagaaattgtgagtcctgcagcaaatgttgagacaataaaaaatcaaaaagtgccagcagtgactccaaaaagaagaagaatggccaatgtgctagatgtactagaaacaattaaaacttcaagcacacctccgaagaaggctgctgccattcctgaaacgacaactgaaatttctgataacaaatctccagtgcaagggactgaagccgaagctgggtcctcagagcccgcgaagatagaatccttggaaactgaggaaaaaataacaaagccaacttttgttgaagagatcggagtcattgcccccgaagcatccatcagagctcgtgattatattgttcgtcatgcttcggggaaaaaactttcagaaaaagaggagcaagaggcccagcattacgcccaaaagctgaagtatccaaagggggcgttaatattcaatggtagtggagaagaagactttttgtattgtctccctgacaacaaggaaatttctgtttgccgggagatgagcaagagcttcggattcccaaccttagaagacgggctctcggtgctgtcgaagaacgatttggccgacagcctggcctacaatagcttaaagggcctgatacttagtaatgccctcagggcacaaaaagatgctgaagacgaagggtgtactatagccctgagcaaccttcgttccgaagtaattgaactgaggaacgaaggcctcgaaaaagataaaatattacactcattggtaaataaaataaaggaagacgaagctgcgttcaagagtcaggctgaagctcagagacgcgaaatagaagatcttcggaaacaactggccagagccagggaagaacgtatacttgaagaaacaaggcgagagctcagcgaccaatgggcggatcacttggaagcaactgttgaagagcttcgttcatccaagaagaggtgctacaacaaatctatagaatgtgttaagaagttgagggctagcttcgccagggtcggcgccttctctagtgaagaaaactttataagaggcaatcccgaaggtcctattgaatggatcgaccacgaagctgaagccttcgaagaaattttaaatagccgtggggatatatgtgctttctctggggccagaggaattgccaccattctagagaagaagggctgtgaacacgtaaaaatcttagcacaatccgaaactgctttgtcctttgaagacgcaaaagacccttcggccgaagcaagcataattggtggaaagttttttactgatatctgggataatggtggccgagaaatggcaggagatattattcaaagaagtgaaaagggcattcacgatgctagagaagtggctaaggctgctgaaaagagcacagagcccgaagcttcgttttccgtttgtaatagcagcatagccgtgtcctgtccttcagatcctgctgaagcgtctccaggccctcagccgaaaggagacgatgaaattaaaaagatggccgaagcaatcatggacgaagtcgtcaatcgactcctgaatgaggctgcagaagttgttctaaaagaaaattga

SEQ ID NO: 146397 - DNA, 387 bp, Zea mays
  Clone ID: MRT4577_6502C.1
cggacgcgtggggaacgctcaatgagaggataacaaagcttgctggtgcaatcgctgtcagtcaggtgggagcacaaactgaaactgaactaatagagaagaagttgaaagtcgtggatgccctaaatgcaaccaagggtgtatgttgatgaaggtattgctgcgggtggacgatgcaccctttatctgatcgcagcttacgatgatgccatcaagagatgcactgaataactatcagcagcaagagggagcggaaatagatgggaggccccggagctacccactaaaactgagatctacaaatgacaggatcaatggcaggcgctgcagtgagacggtcctttctaacgagaactgcaagtatggttacagtgcggctactggaca

SEQ ID NO: 146398 - DNA, 2868 bp, Zea mays
  Clone ID: MRT4577_65030C.1
atgtctgaggataagaagactgctgctgagatgaagctgagcctggacgaagagaaaaacttggggtttcttatagcgatgtcaaagaccaatacagaaaaaatcaccaaggagattctggaaggtttgtctgaagatactggtgacagtgacagctatgatgtggacagtggtggtgaagactccgaagatcgtccctggcgaccaagccattcagtttatggtaaatcaactatcaaagagaatcatcttatcaacatgagaggaaggtatttccgggatttatccattgtgagggccgacgaaggggaaaaaacgtgcccacaccctgaagagaatgaagtcgtagtgtaccgaagctttttgaaagctggactgcgatttcccttgagcagcttcgtcgtggaggtgttgaaaatcttcgaagtctatcttcaccaacttacccccgaagcaatcataaggttgaatatcttcgtgtgggccgtgagaagccaaggtctgaagcctgatgcaaaaagcttctgcaatatacacgaattatcatacgaaacaaaaccttggggtaaggaacagtatcacaataattttggctgctacagtttcgtttctcggtccgggtcaagctgccccgtgccaacctttcggaagagatggcccggcgactggatgacagaatggttttatgtgaagaatgatctgacagtacgagaagatatcaaaggtataattatgcgccctatttggcaaagcttcggccttcggaggccgaaggttgaaatgaatgaagctgccgaagaatgccagagggccttcggcgttatctgttcttttattggaacgagggacttagtacaagagcatatcgccttcagggtatggccgctcgcggagaaatgggaaatgccacaagaaaccataaaagaggccgacgaaggtggacttatcaggttgaaatacacttttaaatttggagataaattcgttgagccagatgatgactggcagaagagaaaaaacacaacctctgcaaaagaagaagctgcaactgctcctagcgagccagaaccgaaaagaaagaagataaaggtcctcacacatcggccgcgctatattgaaccggcttcggtgcctgagtttaccggagaaacctcttcggccaccgaagctgaaaaaccaaccgagccaaccttgctgccagaagtcacagaaacggccgaaatgccaacaaaaatagaattggaacaatcaaagactttgttatcagaaacgaaagagaaggccgaagcgccgtccacagaaaaaatggaagaagtaaaagaagcaacgaagggatcaaaaacatcagaagttttgagtcctgcagcaaatattgaggcagtaaaaaaccaaaaggtgccagcagtgactccgaaaaggaagagaatggtcaacgtgctagatgttctggagacagttaaatcttcaagcacacctccgaaggagactgctgtcatccccgaaggaaaaactgaaatctctgatactaaggctccagaacaagaaactgaagccgaagctgggtcctcagaacccacgaaaataaaatccctggaattcgaagaagaaaaaattgcagagccaacttttgttgaagaaatcagtgctgctatccccgaagcatctcccaaagtccttgattatattattcgccatgcttcggggaaacaactatcagaaaaagaaaaacaagaggcccaactttacgcccaaaaactgaagtatccaaagggggcattaatattcaatggcaatggagaagaagactttttgtattgtctccctgacagcaaagagatttctgtctgtcgggagatgagcaagagcttcggattcccaacactggaagacgggctctcagtgctgtcgaaaaatgatttggccgacagcctggcgtataatagcttgaagggcctgatacttagcaatgccctcagggcacagaaagatgctgaagacgaagggtgtactatagccctgagcaaccttcgtttcgaagtacttgaactgaggaacgaaggtctcgagaaagataaaatattacactcattgataaataaaataaaggaagacgaagctgcttttaaaggtcaagctgaagctcataaacgcgaacttgaagatcttcggaaacaactggccagagccaaggaagaacgtatacttgaagaaacaaagcgagaactcagcgaccaatgggcagatcacttagaaggaactgttgaagagcttcagtcgtccaagaagagatgctataacaaatctatagaatgtgtcaagaagttaagggctagcttcgccaaggtcggcgcattctcaagtgaggaaaactttacgagaggcaatcccgaaggtcccatcgaatggatcgaccacgaagctgaagcctttgaagaaattttaaatagccgtggagatatatgtgccttctcgggtgccagaggaattgccactattttagagaaaaaaggctgcgaacatgtaaagattctagcgcaatccaaaggtgctttgtccttcgaagatgcaagggatccatcggccgaagctagcatggttggtggaaaatttttcaccgatatctgggataatggtggccgagaaatggcccgagagattattcaaagaagcgaaaagggcattcacgatgctagagaagtagctgaggctgctgagaagagcgcagagcccgaagattctgctaaagccccttcggaccctcagccgaaaggagacgacgaaataaaaaagatggctgaagctattatggacgaagtcgtcaatcggctcctaaacgaggctgcagaagtcgttttgagagaggattaa

SEQ ID NO: 146399 - DNA, 3033 bp, Zea mays
  Clone ID: MRT4577_65031C.1
atgtctgaagataagaaggctgctgccgagatgaagctgagtctctctgaagagaaaaacctgggatttcttatagcaatgtcgaagaccaatacagaaaaaatcaccaaagagattttagaaggtttgtctgaagatactgatgacagcgacagttatgatgtggatagtggtggtgaagactccgaagatcgcccttggcgaccaagccatgcggttttcggcaaatcaagtatcaaagaaaatcatcttgtcaacatgaggggaagatatttccgggacttgtccattgtgagggccgacgaaggagaaaagacttgtccgaaccctgaagaaaatgaagtcgtagtgtaccgaagctttttgaaagccggacttcgatttcccctgagcaactttgtcgtagaggtgctgaaaatatttgaagtctatcttcaccaacttacccccgaagcaatcataaggctgaatatcttcgtgtgggccgtgagaagccaaggtctggaacctgatgcgaaaagtttctgcaacatacacgaattatcatacgagacaaaaccctggggtaaggaacagtatcacaataattttggctgctacagtttcgtttctcggtctgggtcaagctgtcccgtgccaacctttcagaagagatggctcggcgactggatgacagaatggttttatgtgaagaatgacctgaaaacacgggaagatattaaaggtataattatgcgccctatttggcaaagcttcggcctgcggaggccgaaggttgaaatgaatgaagctgccgaagaatgccagagagccttcggagttatttgttcttttattggaacgagagatttggtccaagagcacattgccttcagagtatggccgctcgcggaaaaatgggaaatgccgcaagagaccataaaggaggctaacgaaggtggacttatcaggctgaagtatactttcaagttcggagataaattcgttgagccagatgatgactggctaaaaagcattgaaaatgtaagtgatgaactacttggggcttattcgaaggccgaagatactgcattatcagcagccttcggaggtcggaaaaagaaaagactgaaccgagtgtttgacgcaatcgggttcgtctaccctgactatcgttatcccattcgagggcagaaaagaaaaggcgcgacttctgcgaaagaagaagctgcagctgctcctagtgtgttagcaccgaaaagagaaaggataaaggtcctcacacatcgaccacgctatattgaaccagcctcggtgcctgagttcaccagagagacatcttcggccaccgaggctgaagagccaaccttgctgccagaagtcgcagaaatggccgaagcgccaacaagaacagaattggaagaaccaaagattttgttaccagaaaccaaagagatggccgaagcgccatcgacagaaaaaatggaagaagcaaaaggatcaactgagggatcaaaaatatcagaagttttaagtccttcagcaaatgttgagacaataaaaaaccaaaagggtccagcggtgactccgaaaagaaaaagaatggtcaatgtgctagatgttctggagacaattaagtcctcaagcacaactccgaagaagactgttgaaacttccgaagcgaaaactgaaatttttgatactaaggctccaaagcaagaaactgaggctgaagctgggccctcagagcccacgaaggtaaaatccttggaaaccgaggaagaaaaaatgacggagccaattcttgttgaagaaatcagtgttgttgcccccgaagcatcccccaaagtccttgattatattgttcgacatgcttcggggaaaaaattatcagaaaaagaaaagcaagaggcccagctttacgcccaaaaactgaagtatccaaagggggcgttaatattcaacggcagcggagaagaagacttcttgtattgtctccctgacagcaaggagatttctgtctgtcgggagatgagcaagagcttcggattcccaatactagaagacgggctctcggtgctgtcgaaaaacgaactggccgacagcctggcgtacaatagcttaaagggccttatacttagcaatgccctcagggcccaaaaagatgccgaagacgaagggtgcgttatagccctgagcaaccttcgttccgaagtaattgaactaaggaacgaaggtctcgaaaaagataaaatattacattcattgataaatagaataaaagaagacgaagctacttttaaaggtcaagctgaggctcagaagcgtgaaattaaagatcttcgaaaacaactggccagagctaaagaggaacgcatacttgaagaaacgaagcgagaacttagcgaccaatgggcaaatcatttagaaggaactgttgaagagcttcgttcgtccaagaaaagatgctatgataaatctatggagtgtgttaagaagatgaaagctagcttcgccagcgtcggcgcattctcgagcgaagaaaactttacaagaggcaaccccgaaggtcccatcgaatggattaatcacgaagctgaggcctttgaggaaattttaaatagccgtggagacatatgtgctttctcgggtgccagggggattgtcaccattttggagaaaaagggctgcgagcatgtaaagattttagcgcaatccgaagctaccttgtccttcgaagatgcaaaagatccttcagctgaagctagcatgattggtggaaaatttttcaccgatgtctgggataatggtggtcgagaaatggcccaagaaattatccaaaaaagcgaaaagggcatccatgatgctaaaaaagtagcagaggctgctgagaaaagcgcaaagcccgaagggcaaatagatcctactaaagcgtctctgggccctcacccgaaaggagacgacgaaattaaaaagatggctgaagctatcatggatgaagttgttaatcgactcctgaacgaagctgcggaagttgtacttagagaagattaa

SEQ ID NO: 146400 - DNA, 3030 bp, Zea mays
  Clone ID: MRT4577_65032C.1
atgtctggagataagaaggctgctgctgagacgaagctgagtcttgacgaagagaaaaacttggggtttcttatagcgatgtcgaagaccaacacggaaaaaatcaccaaggagattctagaaggtttgtctgaggatactggtgacagcgacagttatgatgtggacagcggtggtgaagactccgaagatcgtccctggcgaccaagccattcagtttatggtaaatcaactatcaaagagaatcatcttgtcaacatgagaggaaggtatttccgggatttgtccattgtgagggtcgacgaaggggagaagacttgtccacaccctgaagagaatgaagtcgtagtgtaccgaagctttttgaaagctgggctacgatttcccttgagcagcttcgtcgtggaggtgttgaaaatcttcgaagtctatcttcaccaacttacccccgaggcaattataaggctaaatatcttcgtgtgggccgtgagaagccaaggtctgaagcctgatgcaaaaagcttctacaatatacacgaattatcatacgaaacaaaaccttggggtaaggaacagtatcataataattttggctgctacagtttcgtttctcggtccggatcaagctgtcccgtgccaacctttcggaagagatggcccggcgactggatgacagaatggttttatgtgaagaatgacctgtcagtacgagaagatatcaaaggtataattatgcgccctatttggcaaagcttcggccttcggaggccgaaggttgaaatgaatgaagctgccgaagaatgccagagggccttcggcgttatctgttcttttattggaacgagagatttagtacaagagcatattgccttccgggtatggccgctcgcggagaaatgggaaatgccgcaagaaaccataaaagaggccgacgaaggtggacttgtcagactgaagtacaccttcaagttcggagataaatttgttgagccagatgatgactggttaaaaagcattgaaaatttaagtgatgagctgcttggggcttattcgaaggccgaagatactgcgatgtcagcagccttcggaggccgaaaaaagaagaggctgaatcgggtatttgatgcaattgggtttgtctaccctgactattgctatcccattcgaaggcagaagagaaaaaacacaacctctgcaaaagaagaagctgcaactgctcctagcgagccagaaccggaaagaaagaagataaaggtcctcacacatcggccgcgctatattgaaccagcttcggtgcctgagtttaccggagaaacttcttcggccaccgaggctaaaaagccaaccaaaccaaccttgctgccagcagctgcagaaatggccgaagcgccaaaaaggatagaattggaagaaccgaagattttgctaccggaaaccgaagaaatggccgaagcgccatccacagaaaaaattgaagaagtgaaaaaaccatctgaagaaaaagcatcagaagttgtgagtcctgcggcaaatgttgagacagtaaaaaatcaaaaagtgccagtagtgactccgaaaagaaagagaatggctaatgtgctagatgtactggaaacaatcaaatcttcaagcacacctccgaagaaggctgctgccactcctgaaacaacaactgaaatttctgatacaaaagctccagagcaagaaactgaagccgaagctgggtcctcagagcccgtaaagataaaatccttggaaactgaggaagaaaaaataacaaagccaacttttgttgaagaaatcggtgtcgttgcccccgaagcatcctccaaagttcgtgattatattgttcgtcatgcttcggggaaaaaactatcagaaaaagaagagcaagaggcccagcgctacgcccaaaaactgaagtatccaaagggggcgttaatattcaatggtagtggagaagaagactttttgtattgtctccctgacagcaaggagatttctgtctgccgggagatgagcaagagcttcggattcccaactttagaagacgggctctcggtgctgtcgaagaacgatctggccgacagcctggcctataatagcttaaagggcctgatacttagcaatgccctcagggcacaaaaagatgctgaagacgaagggtgtgctatagccctgagcaaccttcgttccgaagtaattgaactgaggaacgaaggcctcgaaaaagataagatattacactcattgataaataaaataaaggaagacgaagctgcttttaagggtcaagctgaagctcagaagcgcgaaattgaagatcttcggaaacaactggccagagccaaggaagaacgcatacttgaagaaacaaggcgagaactcagcgaccaatgggcagatcacttagaagtaactgttgaagagcttcgttcgtccaagaagagatgctataacaaatctatagagtgtgttaagaagttaaaagctagcttcgccagggtcggcgccttctcaagcgaagaaaactttacgagaggcaatcccgaaagtcccatcgaatggatcggccacgaagctgaggccttcgaagaaattttaaatagccgtggagatatatgtgctttctctggtgccagaggaattgccaccattttagagaagaagggctgcgaacatgtaaaaattttagcacaatccaaagctgctttgtcctttgaagatgcaagagatccttcggccgaagctagcatgatcggtggaaaatttttcatcgatatctgggataatggtggccgagaaatggcaggagaaattattcaaaaaagtgaaaagggcattcacgatgctagagaagtggctgaggctgctgaaaagagcgcagagcccgaagatcctgctaaagcgtctccgggccctcagccgaaaggagacgacgaaattaaaaagatggctgaagccattatggacgaagtcgtcaatcggctcctgaatgaggctgcagaagttgttctgagagaagattaa

SEQ ID NO: 146401 - DNA, 749 bp, Zea mays
  unsure (1)..(749): unsure at all n locations
  Clone ID: MRT4577_65033C.1
cattgggtacctcgaggccggccggaggtgacgacgtgggccaatcgccggcgcggacttcaaaccggcggtgacccaggatcatcgccaccagagggcagggtaccacgcggctgcagctgacgctgcacgagatgtggcagaagctggcggccacgctcaacttcgaggtaggatgcgcctcatggtcctgggccggaactaccacttccacggcacgctggccaaggactccgaggcgcacgcgactcgtcatcgagatcatcaccacattctacctaatgttagaaatatcaggcgtacaacaaagcacaaaagaggaatcggcggagcgtagaatgaggtggacgtgcccgctaccattctgcttaatgaggatcattgacaggaaccgcgtaccagaacgtcgatgaagacgggacgtagcgcgatcccggggcggtggacggcgaagcactggtcgataagaactgatgatcatcgccgacgagccatatccatggatcccatccagcagccgaaagtgcacggcgcatctacctaacctgctacccaacgggacatgcacattattactatttactacgtactactgtgtcaactcgtctgtcgcattatatcgcttattattattattcacagcaaccacatcgactagaccaaccaactgaagggaagcacaaaccacccgaagatataggaacaaagaggacgatgatctactaccttgagagngagagaaagcggtc

SEQ ID NO: 146402 - DNA, 436 bp, Zea mays
  Clone ID: MRT4577_65034C.1
gggcccaaaacaagacggggggtaaccaaacaaccgggccccttttcatatttccaatcgggaaagggggaacattctgatacattttattcatgcctaccccccatgcccttttttttaccagcaatttattggaaccaagcccacccatccattttttggggacgggcatgcccccctgacatggcccaggtattcattttatagattggattcccaacccatggggggggcccccccgacggggtccaccaaaatgccaaccccggtggggcggaaatccatgggcaccggggggcccacgggcaacaccaccatttcggggtcgggcttgtcccacaagatcacccccttgggtttttccagggtgggcccgaccactttcgggcaagaatttttggggccatcgtccccccctggggggcccaaggggccc

SEQ ID NO: 146403 - DNA, 215 bp, Zea mays
  Clone ID: MRT4577_65035C.1
gttgttaccgcacggctccaccacgggtgtaccgcgtagcgccaccgtctcctatacgctgccctcccggggaacccacaccccgccgagaaatgtaacgttaggtacgcctgacattaccgccacgagtagcggttctacggacctgttcaaccacagatattgcacctatggcccaccaggttgctggctactgtctacccatctaaatagtc

SEQ ID NO: 146404 - DNA, 681 bp, Zea mays
  Clone ID: MRT4577_65036C.1
ctttttgcaatctgtctggcagttaatttcattatttgctatgtgtttgatggtctctgtgtgcccatattttaggttgcaaaagttcgggaaatcaagctctctgactgcgaaatttacgtgtcctgcgagccatgcccaatgtgctttggtgcagttcatctctcccgaatcaaggttcatattttactgttttgattgcctaaactggtataggcacagctagacattactgagcgctgtctaacgttcctacctgacctgcaatgcagaagctggtttatggggccaaggcggaggctgccatcgccattgacctgcaatgcactactctcttatgatcatgtgtgtactgccacattctgatatgagtactcaactttaaattaatcaatctactgtaagtcacaacttttggataaaatttcttcctagatgaaccacttccagagttccagatacttactcttaccgagatgggactgggcagaagagagttatccatgttaatttctaacaaatgatgaacatgcttattatttgcttgctcattatttgcttcctcggagttttttatatgtggactgtacaatgaaaacacaacctatcatgatgccaggtccctcatggatgtgttcattctcttgtaatctacgcaattctgttaaagttagtcgaacc

SEQ ID NO: 146405 - DNA, 372 bp, Zea mays
  Clone ID: MRT4577_65037C.1
aaggacaacaatggtgcgaacactatctatcagttctgcttacacagtggcgcgttttttcgtggggctaacacacctgcatgcccaagactacatcggcatgaccctcattagatgttacgggtgagtctggttcacttacagccatctgtgcgacataccgagttcacgcacagattcgtgaggggagggactatcgatccgttatcgagaaaaggaatagatgactggccaactcagcacttgaatgcgagaatgggtgagtgcgggtgactgtgatatatattggtggtggccgcttcctgcgagaagtcctcttcttctcacaattgcacaggcacccgttccggcagctgttagtcggctgccatg

SEQ ID NO: 146406 - DNA, 214 bp, Zea mays
  Clone ID: MRT4577_65038C.1
ggtcaaagagatggttacagtcttggtcttattatgcataattatacccctgtcctcagggaggctaaacattgcatatctaatgcacttacaatgattagcaagaaacatttacagtccatagcatatccaaacacaggcgctgtactgtgaaagaagcctactgcttgatgaaatctagatacagcatttctacaaatcacatttcacctgc

SEQ ID NO: 146407 - DNA, 326 bp, Zea mays
  Clone ID: MRT4577_65039C.1
attcggctcgaggcgcaccccagcgcgcgttatccttgctcaatgaggcccgcgtactgctcggctggtgaccgccgtgactgagactaccgtgccgcagggggctgcggtccctaaggaatccacccacaccggagtggcgcctgttgcatactccaagccggccaaggtcaaccaggccacagtgcccaagaagcacgccagcccgacccatgtcgacctacgcgcgagatggtcacggacgtgatcgcctacatcaatcgcgaggacggacaccatcaactttgctatcggcaagtacttggacgacatgcacaaggacaagc

SEQ ID NO: 146408 - DNA, 1504 bp, Zea mays
  Clone ID: MRT4577_6503C.1
tcgtccaggccccgctcgctcctaccagtggcccgtgcgtgcggccgccggcgccctgatcgatcgacccgcgcctcggccggatggaggcgtcagcagcagcaggaggtgggggaggcagcgccgccacgcggagcagcccggcggccgtgcaggccaccaacgacgacgccgcggccagcaagctgtcctgtgttaacaaaggatacatgaaggatgattatgtgcggttttttgttaggcgaccaacaagaagggctccaataatcaatcgtgggtattatgcgcgttggtctgttctcaggacgcttctgcatcaattcctcaatgcggggaagaatagtaacaatgacaagcctaaacaaatattatcccttggtgctggctttgacacaacattcttccagttgcaagatgaaggaatggctccacactgttatgtagaattggatttcaaggaggtaaccagcaaaaaagccgccatcattaaccattatagtgaaatgaaggaaaagttaggctcagaagcttcaatttcaatcgaaaaaggtgaagtgataagcacacattacaagctattttccgctgatattcgtgacataccaaaactggattcagttattcgcatggctgaaatggatcctagcttgccgacctttataattgcagagtgtgtgcttatttacctggacccaactgccactggtgctattgtgagttgggcatctcaaaagttctccactgctgtctttttcttatatgagcagattcatcctgatgatgcatttggggagcaaatgattagaaatcttgagagtagaggatgcccccttctcggtataaatgctacaccaaccctgagtcacaaggagaaactttttcttggcaatggatggcagagagccgttgcatgggatatgctgaaaatctataatgacttcattgacagtcaagaaagacgcaggatcgaacggttagaactgtttgatgagtttgaagagtggtatatgatgcaggaacactactgtgtggcctatggaatcaacgacgccgagggcatatttgacagttttggatttggggagacatagcagcactggtgccttttcttctgtgggtaccagctgcacttgttgtaaaccgacaccattaattcaagtattactcgaagtaaactttgcttgataaaagaaggaacgattgcttgataaaagaaggaacggacaggggtaggatacctaaacatctcctgatgttggagcttgctttgataggctgttaaagttcaacggcgttgtgcttggtttaaggtctttggtgccagtcgcagtggtgtttgatgtcaagcatgccaggctgccagttcgtcacaatatgaacagaacagtggtgctttccattttactgtttgcagatttaggttaaatctggtagcacatgtttgcagaataaatccgatgtagtttccttcagcctcttcagatccccgaggagatgacatatc

SEQ ID NO: 146409 - DNA, 794 bp, Zea mays
  unsure (1)..(794): unsure at all n locations
  Clone ID: MRT4577_65040C.1
cattgggtacctcgaggccggccgggacgcctccccagcaacctctgctccgccgcctccggcgaccgccggagcccgtggtggaggaggacgtggagagggaagatctcgacagatccaaggaggtggggacgagatggtgagctcctcgtcgtcggtggttaacgtgtacccgctcgccaactacacgttcggcaccaaggagcccaagatggagaaggacacctccgtcgccgaccgcctcgcccgcatgaaggtcaagtaagtgcgccccgcctgtgctcggttcggaccccctccgccgccccgaccctaaccctaggtttcgcactctcgccgcaaaccctaaaccctagcgctcagatcacagaagaactacttggtttagcttctaagttggcgcggagtgttgcttcaaccgaagaggattggacagcgtttcttagtctactgttctcagcgacgttgctgcacggacccggatcatttctgtaaactacttgaatgggacatagcatgttagatggggttattgtgcattcgtgcgacatggatccttgaagaaaaaaaaaagaatagttgccatatatgacaacatagtactgaggttgcatattgttgcttcttttgtcttgtttgttgaagtttttagttgagttgagactggagagtatattaggtggtgggtagcagggttttacactgctttttgaataacagcagagccagtcaagttagaattctttactttttgaattangacatttccctgcctgctttaggctgggttactt

SEQ ID NO: 146410 - DNA, 1139 bp, Zea mays
  Clone ID: MRT4577_65041C.1
gactcctatagggcgattgggaccctcgaggccggccgcgggggtcgagggaatacgaacgtcgtacgagaacctttctccctcctccacctttctccttttcttgccacggcaaaacaccttcgccggcgagagcatggcgatggcgtaccgtgtcctggaggtcaccctggtgtcggcaaatgacctcaagaaagtgtcgctcttctcccggactcgcatctacgccgtggcttccatctccggattcgacctccgcatcccttcccacagcacccaagcagaccacagcaacggctgcaacccctgctggaacgccgtggtacacttccccatcccggctgccgctgacacccgcggcctcgcactccacgtgaggctccgcgcccagcgtctatacctgggcgatcgcgacatcggcgaggtgtttgtgcccatcgacgacctcctggccggcgccgacaagggtggcgatccgaggcccgtgagctaccaggtgcgcaggccgcactctggccgcgcccacggcgtcctctacttctgctataagttcaccgaggtccccgccgtctcttgtgtctcggaaccggaaagcaaacaagtccagtacgccaagaagtacgtgcaggactccaagaacacgacggacaagactatggtgccgcccaccgtgtacccaccgccgcaggccatggcgtccgcatacccgccgcagcaatattgttcgccgtacgcggcgtacccgcggcagccttacgggtaccctgctccgccaccgtacgggtacaatgctgcttccccacaaccggcgatgtacaactacgcagcacagccggtagctgcaccggcgaggcatggcggaggtatggggatggggctcggcctagggctcctaggcggtgcggtcggggggatgatgctcggagaggcgatcggtgactatgagaccgacgccgcttatgatgccgggttcaacgatgcattggcattttagatctatgttgtcgtgcagtcatggagattattgtccttgtaaatctctaattaatacgaaacgatgaaatagaatttgcattttgtatctcttatcataaggctatctatattttttcaaaaaaaaaaaaaaaaaatttgcggcc

SEQ ID NO: 146411 - DNA, 248 bp, Zea mays
  Clone ID: MRT4577_65042C.1
aaaaaggcaacaaaaaaccaggtttttttggttgggacttaaaaaatttggggggaaccggccccttgctcccaaaaaaaagtaattgtctctttttacgaggctgaaaaaattaccgaatttttttaattttttttgctgggggggttaaccccagggggggaacaaacatgggacgggtccccttttttgccccggaggggccccccctcggatgttattgaggggggaggaaaaagccagcccaa

SEQ ID NO: 146412 - DNA, 630 bp, Zea mays
  Clone ID: MRT4577_65043C.1
ccggccgggccgcttcttttcctgtcctctcctctgtccctctacgtcgcttctgctcgccgtcccccaatcggctcatcgacgacagccctttcaaagatcccgtctccatgagtctcctctcagacacgattggcagggagagcctcaaggcgggggatcatatctactcctgcagggcggtgagtgtctacttcgtatcacggcaatatatgtcgtgcgattatacggtgatccatttcacgagaggaagaggacaggaggtgcggaacaggaattgtcgtctatattattcttgcgagctccaccccaaaatgaatcaacacgccttggccggtgtgcaccgacgacaccattgacagcagcacagagacgaacggcgagaaatcctcctgcctcaacatgctttgtagctgggggtagctctctaccgtttcgagtacacatgcaacccggcgctcttcctcgccaaacggcgaagagggacgtgcacgatcgctccctctgaccctgacaactgagtgagtcgacgatgcagatacctgctgagcaactacttcgagagctacaacctggttaagaataactgctatgacttcgcgatatactgcgacagtgctcttcttgtcg

SEQ ID NO: 146413 - DNA, 447 bp, Zea mays
  Clone ID: MRT4577_65044C.1
ccatccactagaccgccctcccttttttttttttttttttatatttttttttttttttttttaaaaaggcaagattttttttaaaaaacctgacccaacacaccccaaatcaaaaatcaacaattcaaaacacaaaacttcatacattctatgaagtaatatcccacctatatttatttccaccaatccaaatttcaaatacaaccctgtaaaacaaaaacatcaccaccctttataaaaaaaattaatggctccctaactttttaattattttgttttcaagattaataaccccacccccttcaaattcaaagcctttaaaaaccttaaacccaacactcctgcaaatgccccacattttaaaaattactgcccgtgtgtggctcgctccttttaactacttcccacaatttccccaaaagaccctccaccccaccaattacattc

SEQ ID NO: 146414 - DNA, 659 bp, Zea mays
  Clone ID: MRT4577_65045C.1
ttgggtacctcgaggccggccgggatgattttccgatcctccgccactgcccaacggagtatctacatctggatctggtaactcaggggacctgcgagcacctgttggcccccctgacatacctcgtggagctctacttcacctaccatcgagctccactagcgccactcctactgtctcggatcgaggacaaatcggcacacccaaagaccctgttgaagtagacgttcataacgatccatccgacgagggggaggccgaacatcaacgctactccttatcccctccaccgggataaaatacgtgacacattccaactactacaacatcctccttctaaccaaaagtccttcgttcttcttacataacaacaatacatcactaatctcactggtacggtagactctaagcacatgaactcacatgcaccagagtctccagggaacgaccaccatactccttacttggctaagggaccctcaatctttttatgtagagacccttgattgacatgcagccatgcacttcgcctattacttggacccctgacccagaccgacatgcccccaattctctcatggctctaaaacgatataccgcgatatgatgtacacatgctaggaacaagatgtgtccgattctgatatactaccctataa

SEQ ID NO: 146415 - DNA, 433 bp, Zea mays
  Clone ID: MRT4577_65046C.1
tgggaccctcgaggccgggccgggctggcacgtcaaccctcggatggagcactatctgcttgcacttatatggaagcacctgccctctcgccctgctaaaccgctcgctgccctatcatcgcgtaccgcgccaacgccgtgcaagtggagtcgccgccgcctggcatgaaagggtcgccgtggtggaaatcccggcgagcgcactattgaggcacgccttttgccgtggggctttgcctatctgcggggaagtcgcacggaccctctgcgggtggcgcttgggtcaggagaaccaccagttgctcgtcggcgtgctgaatccatcccgggctgcaccgagatgtagacgggtgtccacgggacttccttcgtttcggagaagaataggtggcagaagaggagccgacaaacactgaggctttcgacttgatct

SEQ ID NO: 146416 - DNA, 549 bp, Zea mays
  Clone ID: MRT4577_65047C.1
tcatcgatgagggtctctcttccttgcggactcctaacactgctaatgtcattcgttacttccctactctggctttgaactttgcatgtagggactacttcgacagcgtgcttaacttcgataaggatagggatgcgtattgtgaagggattgctagcaccctggcctctggcgatgctgctgccgcttcactctctgtcttgtgtgtactccttggactacgcgagaaccagcgtggtcactgatgcgaagactgccaaggtatgaggcgacagcgggttcaatgagcttgaggatgtctaccgcaagacgctcatatgtgatggtatggctggactttaccgaggatttatcatctcctgcggtgcaatcaatgcctatcgtgatctggactttggactctatgattccatcgagccagttgtgcttactgggaacctccactacaatttcttgtgcagcctcgctctgtattgtctgatcacgaatgtagctgtgcttgcgtcataccccaatgataccgtccgcagcactgatgatgatgacatc

SEQ ID NO: 146417 - DNA, 3033 bp, Zea mays
  Clone ID: MRT4577_65048C.1
atgtccgaggataagaaaactgctgctgagacgaagctgagcctcgacgaagagaaaaatttggggtttcttatagcgatgtcaaagaccaacacggaaaaaatcaccaaggagattctggaaggtttgtctgaggacactggcgacagtgacagctacgatgtggacagtggtggtgaagactccgaagatcgtccatggcgaccaagccattcagtttatggtaaatcaactatcaaagaaaatcatcttgtcaatatgagaggaaggtattttcgggatttgtccattgtgagggccgacgaaggggaaaaaacttgcccacaccctgaagagaatgaggtcgtagtgtaccgaagctttttgaaagctggactgcgatttcctttgagcagcttcgttgtggaggtactgaaaatattcgaagtctatctccatcaacttacccccgaggcaattataacgctgaatatcttcgtgtgggccgcgagaagccaaggtctgaagcctcacgcaaaaagcttctgcaatatacatgaattatcatatgaaacaaaaccttggggtaaggaacagtatcacaataattttggctgctacagtttcgtttctcggtccgggtcaagctgccccgtgccaacctttcggaagagatggcccggagactggatgaaggaatggttctatgtgaaaaatgatctgacaatacgagaagatatcaagggtataattatgcgccctatttggcaaagcttcggccttcggaggccgaaggttgaaatgaatgaggctgccgaagaatgccagagggccttcggcgcagtctgctctttcattggaacaagagacttagttcaagagcatattgccttcagggtatggccgcttgcggagaaatgggaaatgccacaagaaaccgtaaaagagaccgacgaaggtggacttatcaggttgaagtacacttttaaatttggagataaattcgttgagccagatgacgactggttaaaaagtattgaaaatttaagtgatgaactgcttggggcttattcgaaggccgaagacactgcaatgtcagcagccttcggaggccgaaaaaagaagaggctgaatcgggtatttgatgcaatcgggtttgtctaccctgactattgctatcccattcgaaggcagaagagaaaaaacacaacctctgcaaaagaagaagctacaactgctcctagcgagccagaaccgaaaagaaagaagataaaggtcttcacacatcggccgcgctatattgaaccagcttcggtgcctgagtttactggagaaactccttcggccaccgaagctgaaaaaccaaccgagccaactttgctgccagaagtcgcagaaacggccgaagtgccaacaaaggcagaattggagcaatcaaagattttgttatcagaaacgaaagagaaggccgaagcgccgtccacagaaaaaatggaagaggtaaaggaagcaactgagggctccaaaacatcagaagttttgagtcctgcagcaaacattgagacagtaaaaaatcaaaaagtgccagcagtgactccaaaaagaaagagaatggctaatgtgctagatgtactggaaacgatcaaatcttcaagcacacctccgaagagggttgctgtcattcctgaaacaacaactgaaatttctggttctaaagctccggggcaagagactgaagccgaagctgggccctcagagcccgcaaagataaaacccttggaaagtgaggcagaaaaaataacaaagccagcttttgttgaagaaaccggtgttattgcccccgaagcatcccccaaagttcgtgattatattgttcgtcatgcttcggggaaaaaactatcagaaaaagaagagcaagaggcccaacactacgcccaaaaactgaaatacccaaggggggcgttaatattcaatggcagtggagaagaagacttcttgtattgtcttcccgacagcaaggaaatttctgtctgtcgggagatgagcaagagcttcggattcccaactttagaagacgggctctcggtgctgtcgaagaacgacctggccgacagcctggcttacaatagcttaaagggcctgatacttagcaatgccctcaaggcacagaaagatgctgaagacgaagggtgttctatagccctgagcaaccttcgttccgaagttattgaactgaggaacgaaggtcttgaaaaagataaaatattacactcattgataaataaaataaaggaagacgaagctgcttttaaaagccaagctgaagctcagaagcgggaaattgaagaccttcggaaacaactggccagagccaaggaagaacgcatacttgaagaaacaaagcgtgaactcagcgaccaatgggcagatcacctagaaataactgttgaagagcttcgttcgtccaaaaagagatgctataacaaatctatagagtgtgttaaaaagttaaaggctagcttcgccaaggtcggcgccttctcaagcgaggagaacttttcgagaggcaatcccgaaggtcctatcgaatggatcgaccacgaagctgaggccttcgaagaaattttaaatagccgaggagatatatgtgccttttctggtgccagagggattgccaccatcttagagaagaagggctgcgaacatgtaaaaatcttagcacaatccgaagctgctttgtcccttgaagatgcaagagatccctcggccgaagctagcctaattggtgggaaattttttaccgatatctgggataatggtggccgagaaatggccggagaaattattcgaagaagtgaaaagggcattcacgatgctagagaagtagctgaggctgctgaaaagagcgcagaggccgaagatccggctaaagcgtcttcgggccctcagccgaagggagacgacgaaattaaaaagatggctgaagatattatggacgaagtcgtcaaccggctcctgaacgaggctgcagaagtcgttttgagagaagattaa

SEQ ID NO: 146418 - DNA, 417 bp, Zea mays
  Clone ID: MRT4577_65049C.1
gtcagacaaacttatcaacattcctagggactgatgaatctgactgaccgaccgtgcaggagcacactaagtgaggtacattatcaacaacgtaacaccattggctaccaagataatatccatccttgcgcttgttgcgctttatgtgagcgcaacaaatacgtccattattgcacaatgctcactcgctccaagcgtcattattacacagatcctcccaccagttactctaatgggcttcaaacagccacctgtgcaagcctataggctacaacaagtaattgcgactagcgttttacaacaaccaatttaccagttgcaacaacagtccttggcacatctaacaattcaaaccatcgtaacgcaacaataacaacaatgtctaccagtactgagccacctagccatggtgaaccc

SEQ ID NO: 146419 - DNA, 957 bp, Zea mays
  Clone ID: MRT4577_6504C.1
ctacagtttgtgcaaccttacacggccagtgcaacagaaatttcaaaggagggagggaagccccacggttgcaactaccatttgaaagttggagggaaaaatcgaacacaaaagggggcttgccggcaaggtgagagactgaagaaccgaactggttacctactggcctactaggctacacaaggtgtttctctccattacctcctaaaatctgctattccaaggaggcagaagctctctctcaattcaaagtttttacaagaaaaaacaattaaaaagaagacaggggaaacccaccatatttctgttcctgctgcctcctcctgctgctgctgatcttgctgcttacttctagctgaagaagggggagggagggatccatgtacattggctgctccatcacttgtgcttgaagggcctcaagtcctcaacaccgtcatcctcactgtcatcaccactgcctgacagatcatcatcatctctcttccgcttggctccatgcgaggatgaaggctgatctgtggccccatcatcatcgttgtcgacttcttccttgtcctcgtcagcatcatcagggtcaactccatctaattcacttccaatagccatggcttgaggctgagcgattggttgcacaagatattcagtatcttcatcctcatcatccgcatctgcgtcgtcttcgtcgtcatcattccccacctccaatccctcctcatcctcttcaccaatctcaccattttcatcctcatcgtccccttctcctcatcctcatcgtccccttctccatgttcatgcccatctatctcttctccttcatcctcgcctgtcatcatggcaaccctaccactgctctgtggctccgcctcttcaccttcatcctcaacctcctcctcttcttcatcatcttcgtcctcatcctcttcttcctcatcctcctccacgccatcttcctcc

SEQ ID NO: 146420 - DNA, 2961 bp, Zea mays
  Clone ID: MRT4577_65050C.1
atgtctgaagacaaaaaggctgctatcaagatgaagctgagtctctctgaagagaaaaacctggggtttcttgaagcgatgtcgaaaaccaacacagaaaagatcaccaaagagattttagaaggtttgtctgaagatactgatgacagcgacagttatgatgcggatagcggtgatgaagactccgaagatcgcccttggcgaccaagccatgcggttttcggcaaatcaagtatcaaagaaaatcatcttgtcaatatgaggggaagatatttccgggacttgtccattgtgaggaccgacgaaggagaaaagacttgtccgacccctgaggaaaatgaagtcgtagtgttccgaagctttttgaaagctggattacgatttcccctgagcagctttttcgtagaggtgctgaaaatatttgaaatctatcttcaccaacttacccccgaagcaatcataaggatgaatatcttcgtgtgggccgtgagaagccaaggtctggaacctgatgcgaaaagtttctgcaacatacacgaattgttatacgagacaaaaccctggggtaaggagcaatatcacaataatttcggctgctacagtttcgtctctcggtctgggtcaagctgtcctgtgccaacctttcggaagagatggcccggcgactggatgacagaatggttttatgtgaagaatgacctgaaaacacgggaagatattaaaggtataattatgtgccctatttggcaacgcttcggcctacggaggccgaaggttgaaatgaatgaagctgccgaagaatgccagagagccttcggagttgtttgctcttttattggaacgagggatctggtccaagagcatattgccttcagagtatggccgctcgcggaaaaatgggaaatgccgcaagagaccataaaagaggctgacgaaggtggacttatcaggctgaagtatactttcaagttcggagataaattcgttgagccagatgatgactggctaaaaagcattgaaaatttaagtgatgaactacttggggtttattcaaaggccgaagatactgcattgtcagcagccttcggaggccggaaaaagaaaagactgaaccgagtgtttgacgcaattgggttcgtgtaccccgactaccactatccagcgcggggccaaaaaagaaaaagcgcaacttctgcacaggaaactgcttcagctgctcccagcgagccagcgccaaagagacaaagggtaaaggttctcacacaccggccacgctacattgaaccagcttcagtgcctgagttcgccggtgaaacttcttcggccaccgatattaaagaaccaacttcagtgtcgaagatcgaagaaaaagctgaagcaccctcagcagagaaagcagaaaaaccgagtactgaaggaacgaaaatattggaaattttaagtccttcagcaagtgttgagacattaaaaaaccaaaagggcccagcagtgaccccgaaaagaaaaagaatggtcaatgtgctagatgtattggagacaattaagtcctcaagcacgactccgaagaagactgttgaaacttccgaagcggaaattgaaatctttgatactaaagctccaaagcaacaagccgagactgaagctgggccttcagagcctacgaaggtaaaatccttggaaaccgaggaagaaaaaatgacggagccaattcttgttgaagaagtcagtgctgttgcccccgaagcatcccccaaagtccttgattatattgttcgacatgcttcggggaaaaagttatcagaagaagaaatttttgaagctaatcactatgccaaagagttgaaatatccgaagggggcactagtgttcaatggtacaaatgaagaagatttcctatactgcctcccggataacaaagaattactcgtctgccgggaaatggcccgaagcatggggtttctgaaactggaggctggcctctgcgcgatgtcaaaggacgatcttgcggacagccttacgtataatagcctgaagggtttaatactaagcaacgcgctgagagcgcaaaagaatgccgaagacgagagctatgaaattgctttcaacaacctccgaacagaggttatcagactaagaaacgaagccatggaaaaggacaaaattctagttacattggtggataaaataaaggaggacgaagctgcctctaaagcacaagctgcagctcaaaagcacgagattgacgatcttcggaagcaattagcccgagctaaagaagaacgcatacttgaagaaacgaagcgagaacttagcgaccaatgggcaaatcatttagaaggaactgttgaagagcttcgttcgtccaagaaaagatgctatgagaaatctatggagtgtgttaagaaaatgaaagctagcttcgccagcgttggcgcattttcgagcgaagaaaactttagaagaggcaaccccgaaggtcccatcgaatggattaatcacgaagctgaggcctttgaggaaattttaaatagccgcggagacatatgcgctttttcgggtgccagggggattgccaccattttggagagaaagggctgtgagcatataaagattttagcacagtccgaagctactttgtccttcgaagatgcaaaagatccttcagccgaagctagcgtggttggtggaaaatttttcaccgatatctgggacaatggtggccgagaaatggcccgagaaattatccagaaaagcgagaaaggcatccatgacgctagaaaagtagcagaggctgttgagaaaaccgcagagcccgaagggcaaatagatcctactaaagcgcctccaggccctcagccgaaagatgacgatgaaattaaaaagatggctgaagctatcatggatcaagttgtcaatcaactcctgaacgaagctgcggaagtagtacttagggaagactag

SEQ ID NO: 146421 - DNA, 1683 bp, Zea mays
  Clone ID: MRT4577_65051C.1
atggccgaagcgccaacaaggatagaattggaagaaccgaagattttgataccagaaaccaaagagatggccgaagcgccatccacagaaaaaatggaaaaagtgaaaaaaccaactgaggaaaaaacatcagaagttttgagtcctgcagcaaatgttgagacagtaaaaaatcaaaaggtgccagcagcgactccgaaaagaaagagaatggtcaatgtgctagatgttctggaaacaattaaatcttcaagcacacctccaaagaagattgttgccattcctgaagcgaaaactaaaattcctgatactaaagctccagagcaagaaactgaagccgaagctgggtcctcagagcccacgaagataaaatccttggaaaccgaggaagaaaaaataacagagccaacttttgttgaagaaatcagtgccattgcccccgaagcatcccccaaagtccttgattatattgttcgtcatgcttcggggaaacaattatcagaaaaagaaaaacaagaggcccagctttacgcccaaaaactgaagtatccaaagggggcgttaatattcaatggcagtggagaagaagactttttgtattgtctccctgacagcaaggagatttctgtctgtcgggagatgagcaagagcttcggattcccaacactagaagacgggctctcggtgctgtcgaaaaacgatctggccgacaacctggcatacaatagcttaaagggccttatacttagcaatgccctcagggcccaaaaatatgccgaagacgaagggtgcgctattgccctgagcaaccttcgttccgaagtaattgaactaaggaacgaaggtctcgaaaaagataaaatattacattcattgataaatagaataaaagaagacgaggctacttttaagggtcaagctgaggctcagaaacttgaaattgaagatcttcgaaaacaactggccagagccaaagaagaacgcatacttgaagaaacgaagcgagaacttagcgaccaatgggcaaatcatttagagggaactgttgaagagcttcgttcgtccaagaaaagatgctacaacaaatctatggagtgtgtcaagaagttaaaagctagcttcgccagcgtcggcgcattctcaagcgaagaaaactttacaagaggcaaccccgaaggtcccatcgaatggatcgatcacgaagctgaggcctttgaggaaattttaaatagccgcggagacatatgtgctttctcgggtgccaggggaattgccaccattttagagaaaaagggctgcgagcatgtaaagattttagcgcaatccgaagctgccttgtccttcgaagatgcaagagatccttcggccgaagctagcatggtcggtggaaaatttttcaccgacgtctgggacaatggtggccgagaaatggctcgagaaattattcgaaaaagcgaaaagggcattcacgatgctagagaagtagctgaggctgctgagaagagcgcagagcccgaagggcaactagccgtatcctgtcctccttcaaatcatgctaaagcgtctccgggctctcagccgaaaggagacgacgaaattaaaaagatggctgaagctattatggacgaagttgtcaatcggctcctgaatgaggctgcagaagttgttctgagagaagattaa

SEQ ID NO: 146422 - DNA, 631 bp, Zea mays
  Clone ID: MRT4577_65053C.1
taaagctccagagcaagaaactgaagccgaagctgggtcctcagagtccgcaaagataaaatccttggaaagtgaggcggaaaaaataacaaagccaacttttgttgaagaaatcggtgtcattgcccccgaagcatcccccaaaattcgtgattatattgttcgtcatgcttcggggaaaaaactatcagaaaaagaagagcaagaggcccagcgctatgcccaaaaactgaagtatccaaagggggcgttaatattcaatggcagtggagaagaagactttttgtattgtctccctgacagcaaggagatttctgtctgtcgggagatgagcaagagcttcggattcccaactttagaagacgggctctcggtgctgtcgaagaacgatctggccgacagcctggcttacaatagcttaaaggtgcgacaaatgagatccttgtattttttgttgagtccaaaatttttcgtttgtttaaacctattgacgcacacatatttctctttgcagggtctgatacttagcaatgccctcagagcacagaaagatgctgaagacgaagggtgttctatagccctgagcaaccttcgttccgaagttattgaactgaggaacgaagtcttgaaa

SEQ ID NO: 146423 - DNA, 309 bp, Zea mays
  unsure (1)..(309): unsure at all n locations
  Clone ID: MRT4577_65054C.1
tgttttggggtttttttttttcgttttcttctttttttttttattattctattatgaaaatataatttaaaaaccccgggggggcgaactgtaaagggggctttttatagagctgcctgcacggcagttgctgagggcgatattctgcatatagagctttcattgtaggctattaaatcattcttttggggggatcaaaacaacctaacaataagctattaaaaatagggtgagggaatagtctcaaatataacaagaaaggaaaaaatgaaaaaaggcagcggaactacagaaancgcgcgcccttgg

SEQ ID NO: 146424 - DNA, 463 bp, Zea mays
  Clone ID: MRT4577_65055C.1
gcgttcgcaagcatcattacgcggatcaacgtgctcgcctcgtcctatctctgacctttgctggggggggtggccatctcatcgacggggggggcgcggtcgttcgccagggggcttcagcgatggagaacatcgatgtggaggtggacatggagctgaaccggctcaaactctggaggatacctcgccgacctctctttgccgcagaggagccccggactgtccatcccgcgacatgccggaacatcgcggcgcggctcaccgaggaatggtgtgccattgtcgatgactccttcacactgagctttaagtcactattctccagacaatggcaatggaacatatatctgctccgctaatggtgctttggtgtataataagatatggagaactcttcccacagaggtccttaacgctcgcaataggatggctagcattttttgctgccttttactcctgtcca

SEQ ID NO: 146425 - DNA, 1077 bp, Zea mays
  Clone ID: MRT4577_65056C.1
atggcctacacggtcacacggagttatacggaccaggttcggccgttctgccaatatgctgcaacccaacggtttcttccaacattaacccccagcgggcagcggccgcgcactccctcagtccctccccgctcaccaccagtcaccaacgcccaccgggcctcgtccctcgtggcggcaactgggcggccgtcgctgccgccctacgccagaagcaagagcaagagcagaagtaggagccgcagtcgcagcaggagcaggagccgcagtcctcggcgaagagataggttgcgcagtgaacgtgcaccccaccgcagtcgtagccggagccgcagcccataccgtcgcagagaacgacgtggtcacagggattttgcatgcaagaactgccggagacctgggcacttcgctaaggagtgtccatctgcacctatgtgcaataactgtaaccttccaggccactttgcagcagaatgcaccttacaaactgtttgctggaactgcaaagagtctgggcacattgccagtgagtgcaagaacgaggccctatgccacgcctgcaacaagacaggtcacttggcacgtgactgccctacttcaggtgctaacgtcaagctatgcaacaaatgctttaaatcaggccacatcgccgttgactgcaccaacgaacgggcctgcaacaactgccgtcagccagggcacatagctcgggagtgcaagaacgacccggtctgcaacctgtgcaatgtctccggccacgtcgcgcgcgtctgcccaaagacgactctggcttcagtgtatacagggcggcccgttccgagatatcctgtgccgcatctgcggtcagccggggcacatcagccgcaactgcatggcgaccatcatctgcgacacatgcggtgggagggggcacatgtcttatgagtgcccatcggcaagaatattcgggctccgccggctctgagagcctttcaccgctttgtttctgatggtttgagtttcgccaggatgtttaatttgtttctgacaatattggaacaattttccctatggttgttgaggaatgattctgtgagg

SEQ ID NO: 146426 - DNA, 2838 bp, Zea mays
  Clone ID: MRT4577_65057C.1
atgtctgaagataaaaaggctgttgtcgagatgaagctgagcctctctgaagagaaaaacctggggtttcttgaagcaatgtcgaagaccaatacagaaaagatcaccagagagattttagaaggtttatctaaagatactgatgacagcgacagttatgatgtggatagtggtggtgaagactccgaagatcgcccttggcgaccaagtcacgcggtttttggcaaatcaagtatcaaggaaaatcatcttgtcaacatgaggggaagatatttccgggacttatccattgtgagggccgacgaaggagagaaaacttgtccgtcccctgaggaaaatgaagtcgtagtgttccgaagctttttgaaagctggactacgatttcccctgagcagctttgtcgtagaggtgttgaaaatatttgaagtctaccttcaccaacttacccccgaagcaatcataaagatgaatatcttcgtgtgggccgcgagaagccaaggtctggaacctgatgcaaaaagtttctgcaacatacacgaattgttatacgagacaaaaccctggggtaaggagcagtatcacaataatttcgggtgctacagtttcgtttctcggtctgggtccagctgtcccgtgccaacatttcggaagagatggcccggtgactggatgacagaatggttttatgtaaagaatgacctgaaaacacgggaagatattaaaggtataattatgcgccctatttggcaaagcttcggcttacggaagccgaaggttgaaatgaatgaagctgccgaagaatgccagagagccttcggagttatttgctcttttattggaacgagggatttggtccaagagcatattgccttcagagtatggccgctcgcggaaaaatgggaaatgccgcaagagaccataaaggaggctgacgaaggtggacttatcaggctgaagtatactttcaagttcggagataaattcgttgagctagatgatgactggctaaaaagcattgaaaatttaagtgatgaactacttggggtttattcaaaggccgaagatactgcattgtcagcagccttcggaggccggaaaaagaaaagactgaaccgagtgtttgacgcaattgggttcgtgtaccctgactaccactatccagcgcggggccaaaaaagaagaagcgcaacttctgcacagaaaactgcttcagccgctcctagcgagccagcgccgaagagacaaagggtaaaggttctcacacaccggccacgctacattgaaccagctacagtgcctgagttcgccggtgaaacttcttcggccaccaaaattaaagaaccaactttagtgtcgaagatcgaagaaaaaactgaagcaccctcagcagagaaagcagaagaaccgaaaactgaaggaacgaaaatattggaaattttgagtccttcagcaagtgttgagacaataaaaaaccaaaaggatccagcgatgactccgaaaagaaaaagaatggtcaatgtgctagatgttctggagacaattaagtcctcaagcacaactccgaagaagactgttgaaacttccaaagcggaaactgaaatttttgatactaaagctccaaagcagcaaactgaagctgaagctgggccttcagagcccacgaaggtaaaatccttggaaaccgaggaagaaaaaatgacagagccaattcttgttgaagaaatcagtgctgttgcccccgaagcatcccccaaagtccttgattatattgttcgacatgcttcagggaaaaagttgtctgaaaaagaaaaggaagaagcccagttttacgcccaaaaactgaaatatccaaagggggcgttgatattcaacggcagcggagaagaagacttcttgtattgtctccctgacagcaaggagatttctgtctgtcgggagataagcaagagcttccgattcccaacactagaagacgggctctcagtgttgtcgaaaaacgagctggccgacagcttggcatacaatagcttaaagggccttatacttagcaatgctctcagggcccaaaaagatgccgaagacgaagggtgtgttatggccctgagcaaccttcgttccgaagtaattgaactaaggaacgaaggtctcgaaaaagataaaatattacattcattgataaatagaataaaagaagacgaagctacttttaaaggtcaagctgaggctcagaagcgtgaaattgaagatcttcgaaaacaactagccagagctaaagaggaacgcatacttaaagaaacgaagcgagaacttagcgaccaatgggcaaatcatttagaaggaactgttgaagagcttcgttcgtccaagaaaagattctataacaaatctatggaatgtgttaagaaaatgaaagctagcttcgccagcgttggcgcattctcgagcgaagaaaactttacaagaggcaaccctgaaggtcccatcgaatggattaatcacgaagctgaggcctttgaggaaattttaaatagccgcggagacatatgtgctttttcgggtgccagggggattgccactattttggagaaaaagggctacgagcatgtaaagattttagcgcaatccgaagctaccttgtccttcgaagatgcaaaagatccttcagccgaagctagcatggttggtggaaaatttttcaccgatgtctgggacaatggtggtcgagaaatggcccgagaaattatccaaaaaagcgagaagggcatccatgatgctagaaaagtagcagaggctgctgagaaaagcgcagagcccgaagggcaaataggtattaactaa

SEQ ID NO: 146427 - DNA, 2614 bp, Zea mays
  Clone ID: MRT4577_65058C.1
atgctgcactatccgaagggcaggcctggtgcagtggtgagagctgtcccactgagtcaccaggtcgcagggatctcgtatgcaagaactgccggagacctgggcactttgctaaggagtgcccatctgcgcctacgtgcaataactgtaaccttccaggtggaccataaccccatcccctttattttctacagccacttcgcagcagaatgcacctcaaaaactgtttgctggaactgcaaagagcctgggcacattgcgagtgagtgcaagaacgaggccctgtgccacacctgcaacaaaacaggtcacttggcgcgtgattgccctacttcaggggctaacgtcaagctatgcaacaaatgttttaaatcaggccacatcgccgttgactgcaccaacgaacgggcatgcaacaactgccgtcagccagggcacatagctcgagagtgcaagaacgatcctgtttgcaacctgtgcaatgtctctggccatgtcgcgcgcgtctgtccaaagacgactctggcttcagagatacacatacagggtggcccgttccgtgatatcctgtgccgcatctgtggtcagccagggcacatcagccgcaactgcatggccaccgtcatctgtgacacatgtggcgggagggggcacatgtcttacgagtgcccgtcggcaaggattttcgggttccgcaggctctgaagagcttttcgccaagggctccgctttggtctgatggctgagaattcgccaggatgtttcatttgtttctgacagtattggaacagtttccttctgccgttgtagttgaggaatgattctgtaggatgtgttgcgggtgaaaacttcttttttccccccttttaatcaggatagccctttgtgggctcaaacattgctgtaacggctcgtgtgaaaattgccaggtcatgatttaactcttgtgctcgtgctctgctgtgtcttttgaaaaaaaagggtacacccccagggcccgcggggcgcaccccctcagtccctccccgctcaccaccagtcaccaacgcccaccgggcctcgtccctcgtggcggcaactgggcggccgtcgctgccgccctacgccaggtgccgaggcgaccttcaggcccttggctggcgacgagcaccagtgcaccaccaatactctgagcctggctgccgaaagtgccttttggggttcttgtaatcttgttacattaggattcatttttgatgacttcatcaagaagcaagagcaagagcagaagtaggagccgcagtcgcagcaggagcaggagccgcagtcctcggcgaagagatagattgcgcagtgaacgtgcaccccaccgcagtcgcagccggagccgcagcccataccgtcgcagagaacggcgtggtcacagggattttgcatgcaagaactgccggagacctgggcacttcgctaaggagtgtccatctgcgcctatgtgcaataactgtaaccttccaggccactttgcagcagaatgcaccttacaaactgtttgctggaactgcaaagagtctgggcacattgccagtgagtgcaagaacgaggccctatgccacgcctgcaacaagacaggtcacttggcacgtgactgccctacttcaggtgctaacgtcaagctatgcaacaaatgctttaaatcaggccacatcgccgttgactgcaccaacgaacgggcctgcaacaactgccgtcagccagggcacatagctcgggagtgcaagaacgacccggtctgcaacctgtgcaatgtctccggccacgtcgcgcgcgtctgcccaaagacgactctggcttcagtgatacagggcggcccgttccgagatatcctgtgccgcatctgcggtcagccggggcacatcagccgcaactgcatggcgaccatcatctgcgacacatgcggtgggagggggcacatgtcttatgagtgcccttcggcaagaatattcgggctccgcaggctctgaagagcttttcgccaagagctccgctttgttctgatggctgagaattcgccaggatgtttcatttgtttctgacagtattggaacagttttccttctgccgttgtagttgaggaatgattctgtaggatgtgttgcgggtgaaaacttccttttttccccccttttaatcaggatagccctttgtgggctcaaacattgctgtaacggctcgtgtgaaaattgccaggtcatggtttaactcttgtgctcgtgctctgctgtgtcttttgaacgctaaaaaaaaaagcggtgttttgtgtactcacttatactgtattgtaacgtcacgtagaactgtgaaatttgtatggtgacgttggtggtttgatctggactccttttttactttttgttcggttactctagtatttccctcaatacacatggattaatacacatggattgaggtgtattggggtagcttacccctcaatacacatcaatacatgtgttgtattgaggtaaatcctagagcacccaaacaaagcttaatccctaatcaggatatagggccctttgtgggctaacagtgctgtaacggctcatgtgaaaattgccaggtcatgtttaactct

SEQ ID NO: 146428 - DNA, 2925 bp, Zea mays
  Clone ID: MRT4577_65059C.1
atgtctggagataagaaggctgttgctgagatgaagctgagccttgacgaagagaaaaacctggggtttcttatagcgatgtcaaagaccaatacagaaaagattactaaggagattctggaaggtttgtccgaagatactggtgacagtgacagctatgatgcggacagtggtggcgaggactccgaagatcgtccatggcgaccaagccattcagtttatggtaaatcaactatcaaaaagaatcatcttgtcaacatgagaggaaggtatttccgggatttgtccattgtgagggccgatgaaggcgaaaaaacttgcccacaccctgaagagaatgaagtcgtagtgtaccgaagctttctgaaagctggactgcgatttcctttgagcagcttcgttgtggaggtactgaaaatattcgaagtttatctccaccaacttacgcccgaggcaattataaagctgaatgtcttcgtgtgggccgtgagaagccaaggtctgaagcctgacgcaaaaagcttctgcaatatacatgaactatcatatgaaacaaaaccttggggtaaggaacagtatcacaacaattttggctgctacagttttgtttctcggtctgggtcaagctgccccgtgccgacctttcggaaaagatggcccggagactggatgacagaatggttctatgtgaaaaatgacctaagcgcgcgagaagatatcaaaggcataattatgcgccctatttggcaaagcttcggccttcggaggccgaaggttgaaatgaatgaagctgccgaagaatgccagagggccttcggcgcagtgtgctctttcattggaacaagagatttagttcaagaacatattgccttcagggtatggccacttgcggagaaatgggaaatgcctcaagaaaccgtaaaagaggccgacgaaggtggtcttatcaggttgaagtacacttttaaatttggagataaattcgtcgagccagatgacgactggttaaaaagtattgaaaatttaagtgatgaactgcttggggcttattcgaaggccgaagatactgcaatgtcggcagccttcggaggccgaaagaagaagaggctgaatcgggtattcgatgcaatcgggtttgtctaccctgactattgctatcccattcaaaggcagaagagaaaaaacacaacctctgcaaaagaagaagctacaattgcttttgacgagccagaaccaaaaagaaagaaaataaaggttctcacacatcggccgcgctatattgaaccagcttcggtgcctgagtttactggagaaattccttcggccaccgaagctgaaaaaccaaccgagccaactttgctgccagaagtcgcagaagcggccaaagtgccaacagagacaaaattggagcaatcaaagattttgatatcagaaacgaaagagaaggccgaagcgccatccacagaaaaaatggaggaggtaaaggaagtaactgggagttccaaaacatcagaagtttttagtcctgcagcaagcattgggagggcaaaaaatgaaaaagtgccagccgtaactccgaaaagaaagagaatggcgaatgtgctagatgtactggaaacgattaaatcttcaagcacacctccgaagaaggctgctgctactcccgaaacaactgaaatttctgattctaaagctccaagtcaagagactgaaaccgaagctaggccttcagatcccgcaaagataaaacccttggaaagtgaggcagaaaaaataacaaagccaacatttgctgaagaaaccggtgttattgcccccaaagcatcctccaaaattcgtgactatattattcgtcatgcttcggggaaaaaactatcagaaaaagaagaacaagaggcccagcactatgcccaaagactgaaatatccaaagggggcattaatattcaatggcagtggagaagaagacttcttgtattgtctccccgacagcaaggaaatttctgtctgtcgggagatgagcaggagcttcggatttccaactttagaagacggactttcggtgctgtcaaagaatgatctggctgacagcctagcttacaatagcttaaagggcctgatactcagcaatgccctcagggcgcagaaagatgctgaggacgaagggaagacgaagctgcttttaaaagtcaagctgaagttcagaaacgcgaaattgaagaccttcggaagcaactggccagagccaaggaagagcgcattcttgaagacaaaacgtgaactcagcgaccaatgggcggatcacctagaagtgactgttgaagagcttcgttcgtccaaaaagcgatgctacaacaagtctatagattgtgttaagaaattaaaggctagcttcaccaaggttggcgcgttctcaagtgaggaaaacttttcgagaggcaatcccgaaggtgttattgaatggattggccacgaagctgaagctttcgaagaaattttaagtagccgaggagatatatgtgccttctctggcgccagagggattgccaccatcttagagaaaaagggctgtgaacatataaaaattttggcacagtccgaagctgctttgtcctttgaagatacaaaagatccttcggccgaagctagcataattggtggaaaattttttactgatatctgggataatggtggccgagagatggccggagaaattattcgaagaagtgaaaagggcattcacgatgctagagaagtagctgaggctgctaaaaagagcgcagaggccgaagatccgactaaagcgccttcggacccccagccgaagggggacgacgaaattaaaaagatggccgaagatattatggacgaagtcgtcaatcggctcctgaatgaggctgcagaagtcgttttgagagaggattaa

SEQ ID NO: 146429 - DNA, 945 bp, Zea mays
  Clone ID: MRT4577_6505C.1
ccacggcaatcgatcgatcggtgctttgatctctgagcctgagcaagcggtcgagctcaccaaccgccacgctcaagacaggtcgagtagctagctagctgccggagtggaaaaggaggcggtgcagtggcatggggaggccgccgtgctgcgacaagatgggggtgaagaaaggcccgtggacccccgaggaggacctcatgctcgtctcctatgtccaggagcacggccccgggaactggcgcgccgtgccgaccaacaccgggctgatgcggtgcagcaagagctgccgattgcggtggacaaactacctccggccgggaatcaagcgcggcaactttaccgagcaggaggagaagctcatcgtccacctccaggctctccttggcaacaggtgatggtcactcgcctgtcgtcgtcttaaagcttttgttcccgttttgttttttccgctgtaacaaatggatcggacaaaccaaatcatccacggcacgaggtgatcgtgtgctgagcttgttgatctgcatgccgtgcacttgttgatgtgtcgtgcaggtgggcggccatagcatcctacttgccgaagaggacggacaacgatatcaagaactactggaacacgcatcttaagaagaagctgaagaacatgcagggcggcgaagggggcgcgggagggaagcgcccggccgttcccaaggggcagtgggagcggcggctgcagactgacatccacacggcgcggcaggctctgcgcgacgcgctctcgctggagccttcggcgacgccgctggccaaggtggagcctctgccgacggctccggggtgcgcgacgtacgcgtctagcgccgacaacatcgcgcggctgctggaggggtggctgcgcccgggcagcggcaaggggccggaggcgtcgggttcgacgtcgacgacggccacgacgcgcca

SEQ ID NO: 146430 - DNA, 3039 bp, Zea mays
  Clone ID: MRT4577_65060C.1
atgtctgaagataagaaggctgttaccgagatgaaacttagtcttgatgaagagaaaaatctggggtttcttatagcaatgtcgaagaccaacacagaaaaaatcaccaaggagattctagaaggtttgtctgaggatactggtgacagcgacagttatgatgtggacagcggtggtgaagactccgaagatcgtccctggcgaccaagccattcagtttatggtaaatcaactatcaaagagaatcatcttgtcaacatgagaggaaggtatttccgggatttgtccgttgtgagggccgacgaaggggagaagacttgtccacaccctgaagagaatgaagtcgtagtgtaccgaagctttttgaaagctgggctgcgatttcctttgagcagcttcgtcgtggaggtgctgaaaatgtttgaagtctatcttcatcaacttacccccgaagcaattataaggctgaatatcttcgtatgggccgtgagaagccaaggtctggaacctgatgcgaaaagcttctgcaacatacacgaattatcatacgagacaaaaccttggggtaaggaacagtatcacaataactttggctgctacaattttgtttctcggtctaggtcaagctgtcccgtgccaacctttcagaagagatggcccggcgactggatgacagaatggttttacgtgaaaaatgatctgaaagcacgagaagatatcaaaggtataattatgcgccctatttggcaaagcttcggccttcggaggccgaaggttgaaatgaatgaagctgccgaagaatgccagagggccttcggcgctgtctgttcttttattggaacgagagatttagtacaagagcatattgccttcagggtatggccgctcatggagaaatgggaaatgccgcaagaaaccataaaagaggccgacgaaggtggacttatcaggctgaagtacacttttaagttcggagataaattcgttgagccagatgatgactggttaaaaagcattgaaaatttaagtgatgaactgcttggggcttattcgaaggccgaagatactgcactgtcagcagccttcgaaggccgaaaaaagaagaggctgaatcgggtgtttgatgcaatcgggttcgtctaccctgactatcgttatcccattcgagggcagaagagaaaaaacacaatctctgcaaaagaagaagttgcaactgctcctagcgagccagaaccgaaaagaaaaaggataaaggtcctcacacatcggccgcgctatattgaaccagcttcggtgcccgagttcgccggagaaacttcttcggccaccgaggctgaaaagccaaccaaaccaaccttgctgccaaaagttgcagaaatggccgaagcgccaacaaggatagaattgaaagaaccgaagattttgctaccagaaaccaaagagatggccgaagcgccatccacagaaaaaatggaagaagtgaaaaaaccaactgaagaaaaaacatcagaagttttgagtcctgcagcaaatgttgagacagtaaaaaatcaaaaagtgccagcagtgactccgaaaagaaagagaatgacaaatgtgctagatgtactggaaacaattaaatcttcaagcacacctccgaagaagactactgccattcccgaagcgaaaactgaaatttctgatactaaagctccagagcaagaaactgaagccgaagctgggtcctcagagcccgcgaagataaaatccttggaaactgaggaagaaaaaataacagagccaacttttgttgaagaaatcggtgtcattgcccccgaagcatcctccaaagtccgtgattatattgttcgtcatgcttcggggaaaaaactatcagaaaaagaagagcaagaggcccagcgctacgcccaaaaactgaagtatccaaagggggcgttaatattcaatggcagtggagaagaagactttttgtattgtctccctgacagcaaggagatttctgtctgtcgggagatgagcaagagcttcggattcccaacattagaggacgggctctcagtgctgtcgaagaacgatctggccgacagcctggcatacaatagcttaaagggcctgatacttagcaatgccctcagggcacagaaagatgctgaagacgaagggtgtgctatagccctgagcaaccttcgttccgaagtaattgaactaaggaacgaaggtctcaaaaaagataaaatattacactcattgataaataaaataaaggaagacgaagctgcttttaaaggtcaagctgaagctcagaagcgcgaaattgaagatcttcggaaacaactggccagagccaaggaagaacgcatacttgaagaaacaaagcgagaactcagcgaccaatgggcagatcacttagaaggaactgttgaagagcttcgttcgtccaagaagagatgctataacaaatctatagagtgtgttaagaagttaaaagctagcttcgccagagtcggcgcattctcaagcgaagaaaacttcacaagaggcaatcccgaaggtcccatcgaatggatcgaccacgaagctgaggccttcgaggaaattttgaatagccgtggagatatatgtgctttctcgggtgccagaggaattgccaccattttagagaaaaagggctgcgaacatgtaaaaattttagcgcaatccgaagctgctttgtccttcgaagatgcaagagatccttcggccgaagctagcatggttggtggaaaatttttcaccgatatctgggataatggtggccgagaaatggccggagaaattattcaaaaaagtgaaaagggcattcacgatgctagagaagtggctgaggctgctaaaaaaagcgcagagcccgaagggcaaatagatcctactaaagcgtcttcgggtcctcccccgaaaggagacgacgaaattaaagagatggctgaagctatcatggatgaagttgttaatcggctcctgaacgaggctgcagaagtcgttttgagagaagattaa

SEQ ID NO: 146431 - DNA, 478 bp, Zea mays
  Clone ID: MRT4577_65061C.1
tatattttttttttttttttttttttttttttgttggttttttttttttttttgggggacaaaactaaatttcggtccaaagccgattaatggataccctaatgactgacagcgcatacagattataccacaaggcagggggtaaatagctgctaatagcaggggggagagtatgaaatggagagctaacatgagcagtttgggggggtgacacaaacacagacacatttattacagtattgcatgcaactgatgcaaatgaaactttaacgagggcgtttgttttatttttacagttccaagcaagcattctttttcgttttggttttggttggaagagacactgaccaggggtttatttcaggagttgttgttgtcaacggcgtgcactgggtaggaaggtttcggctccgaaaagacggcgggggggggcacaaccccaacgggatccactttgccgccgttcttggggatgaag

SEQ ID NO: 146432 - DNA, 999 bp, Zea mays
  unsure (1)..(999): unsure at all n locations
  Clone ID: MRT4577_65062C.1
nnnnnctcctttttttttttttttttttagaaggtggaatcgacatttcgaatctgaaagtttcgaagaaaacaattgttgtggctcctcaaaaaaaaaaaagtaacagtttctgaaatataatgtaaaggattgctaagccataccaccagcgaaaacttgaacacatttgttaagggagtaaataaatttctaagtttctttgcactcacaggtctaccacaacagtggtggtgtcttgtaacattgcagcacgccactagcgaaccttgtgggtggagtaacactacagatgaatttcacaattgctggattccatcaaactcagtatgttcatacaacaggcaacagaagcccaccacaaacatcaaccttcaggaatacaaagccgttgggtggaaccaccagaggatttcttttctttcctcaagtgttgttttttttttaattttcgatcaagggtttgggaatactaaaatggttagacccagctccggaagctcccgcatgaggccttgtttgggtaatctcttattggagtggattgaggtggtatggagtgcattaaagtgtaacatgaactaatttcccttttaatcctttcaatacacctcaatccacttcagttcctctttacccaaacaaagcctgagtggggtttgggaacacatttctgaagcagtgaggctcagttctcactgggaccaaattgtttctgtatatcaccgaatgatatggtcgcagaaccccttctcttagccttttgctgtgatggatgctccctccagccagtcatgtaaattacttgaaaggttgctggaatagatccgtcttctaacccaaacattgactggtaaattgctgaagttgccaaggccggatcccttttcaacacaggatctctttgaaagagagcatttgttttccccattgctctaagatgttcaacaagttccaaagcattattgtatctaacggcatactgatcaacatcaactc

SEQ ID NO: 146433 - DNA, 2841 bp, Zea mays
  Clone ID: MRT4577_65063C.1
atgtctgaggataagagggctgctgtcgagatgaagctaagtctatctgaagagaaaaacctggggtttcttgaagccatgtcgaagacaaatacagaaaagatcaccaaagagattttagaaggtttatctgaagatactgatgatagcgacagttatgatgtggatagtggtggtgaagactccgaagatcgcccttggcgaccaagccatgcggttttcggcaaatcaagtatcaaagaaaatcatcttgtcagcatgaggggaagatatttccgggacttgtccgttgtgagggccgacgaaggagaaaagacttgtccgactcctgaggaaaatgaagtcgtagtgttccgaagctttttgaaagctggactacgatttcccctgagcagctttgtcgtagaagtactgaaaacatttgaaatctatcttcaccaacttatccccgaagcgatcataaggatgaatatcttcgtgtgggccgtgagaagccaaggtctggaacctgatgcgaagagtttctgcaacatacacgaattgttatacgagacaaagccctggggtaaggaacagtatcacaataatttctgctgctacagtttcgtctctcggtccgggtcaagctgtcccgtgccaacctttcggaagagatggcccggcgactggatgacagaatggttttatgtgaagaatgacctgaaaacacgggaagatattaaaggtataattatgcgccctatttggcaaagcttcggcctgcggaagccgaaggttgaaatgaacgaggctgccgaagaatgccaaagagccttcaggattatttgctcttttattggaacgagagatctggttcaagagcatattgccttcagagtatggccgctcgcggaaaaatgggaaatgccgcaagagaccataaaggaggctgacgaaggtggacttatcaggctgaagtatactttcaaatttggagataaattcgttgagccagatgatgactggctgaaaagcattgaaaatttaagtgatgaactacttgggggccaaaaaagaaaaaacgcaacttctgcacaggaaactgcttcagccgctcccagcgagccaacgccgaagagacaaagggtaaaggttctcacacaccggccacgctacattgaaccagctacagtgcctgagttcgccggtgaaacctcttcggccactgatattaaagaaccaacttcagtgtcgaagatcgaagaaaaagctgaaacgccctcagcagagaaagcagaaaaaccgagtactgagggaacaaaaatattggaaattttaagtccttcagcaagtgttgagacattaaaaaaccaaaagggcccagcggtgactccgaaaagaaaaagaatggtcaatgtgctagatgttctggagacaattaagtcctcaagcacaactccgaagaagactgttgaaacttccgaagcggaaactaaaatttttgatactaaagctccaaagcaacaaactgaggctgaagctgggccttcagaacccacgaaggtaaaatccttggaaaccgaggaagaagaaaaaattacggagccaattcttgttgaagaaatcagtgctgttgcccccgaagcatcccccaaagtccttgattatactattcgacatgcttcggggaaaaagttgtctgaaaaagaaaagcaagaggcccagttttacgcccaaaaactgaaatatctaaagggggcattgatattcaacgacagcggagaagaagacttcttgtattgtctccctgacagcaaggagatttctgtctgtcgggagatgagcaagagcttcggtttcccaacactagaagacgggctctcggcattgtcgaaaaacgagctggccgacagcttggcatacaatagcttgaagggccttatacttagcaatgccctcagggcccaaaaagatgccgaagacaaagggtgtgttatggccctgagcaaccttcgttccgaagtaattgaactaaggaacgaaggtctcgaaaaagataaaatattacattcattgataaatagaataaaagaagacgaagctacttttaaagttcaagctgaggctcagaagcgtgaaattgaagatcttcgaaaacaactagccagagctaaagaggaacgcatacttgaagaaacgaagcgagaacttagtgaccaatgggcaaatcatttagaaggaactgttgaagagcttcgttcgtccaagaaaagatgttatgacaaatctatggagtgtgttaagaaaatgaaagctagcttcgccagcgttggcgcattctcgagcgaagaaaactttacaagaggcaaccctgaaggtctcatcgaatggattaatcacgaagctgaggccttcgaggaaattttaaatagccgcggagacatatgcgctttttcgggtgccagggggattgccaccattttggagagaaagggctgtgagcatataaagattttagcacagtccgaagctactttgtccttcgaagatgcaaaagatccttcggccgaggctagcatggttggtggaaaatttttcaccgatatctgggataatggtggccgagaaatggcccgagaaattatccagaaaagcgaaaaaggcatccatgacgctagaaaagtagcagaggctgctgagaaaaccgcagagcccgaagggcaaatagatcctactaaagcgcctccaggccctcagccgaaagatgacgatgaaattaaaaagatggctgaagctatcatggatcaagttgtcaatcaactcctgaacgaagctgcggaagtagtacttagggaagactag

SEQ ID NO: 146434 - DNA, 282 bp, Zea mays
  Clone ID: MRT4577_65064C.1
gaaaaaaaaaaaaaaaaaaaaaaaaaaaaaaaaaaaaaaattgagctcaaagataaagaatcatgttaccagaggataaaggggaaagctgagcgctagtcagggttatagggggtaccctgggtgaaatgggaaaggggttacaattccaaacaacatacaaaacaggaggcctaaagagtatagcctgcggtgtgtaatgagtgatttaacacatattaattacggggggcttattgcccaatgtccacacggcaaacctgaaatcccttttgccccaat

SEQ ID NO: 146435 - DNA, 346 bp, Zea mays
  Clone ID: MRT4577_65065C.1
cttgctcacagtaccataatctctttttttatcccaccagttacttcaatgggaggtgttctcctagctgtgcatgccaacatgcatcaacaagccctcgaagggagcgattaacaacaactaattgcccaattgcaacaacaattacttgccacatttaacaaaacaagccattaaatcgcatcagaaccaccagttgcgacaatctatgagccacataacgatgttgaaccctgccgtctacatgcaacgaactagtcatgtgaaacaaacaatctgcgcacatataagaattgcaaacatgcaacgcaacagctacaacagttttttccaacacttagtcaac

SEQ ID NO: 146436 - DNA, 626 bp, Zea mays
  Clone ID: MRT4577_65066C.1
tgattatggagatttacgagttacctacccatgctgatggttttgctacttctgtcaactagctttggaacttgttgaacatcttagagcaatgggggaaacaaatgctctctttcaaagaaatcctgtgttgaaaagggatacggccttggcaactgcagcaatttaccagtcaatgtttgggttagaagacggatctattccagcaacctttcaagttctgtactattggaataactctacctttatttgaaccagaactgatccagtaaaatcttctttttagaaaaaatgaactaatctggtctagagctaattaatccctgtaaatgatacacaaactgggctactgattgccaaatatgttcttgtttgtgcaggtaatttacatgactggctggagggagcatccatcacagcaaaaggctaagagaaggggttctgcgaccatatcattcggtgatatacagaaacaatttggtcccagtgagaactgagcctcactgcttcagaaatgtgttcccaaaccccactcaggctttgtttgggtaaagaggaactgaagtggattgaggtgtattgaaaggattaaaagggaaatagttcatgttacactttaatgcact

SEQ ID NO: 146437 - DNA, 2350 bp, Zea mays
  unsure (1)..(2350): unsure at all n locations
  Clone ID: MRT4577_65067C.1
atggccgtcaccttccacagcaagatcaccctccgccccgggtctgtgttctgctttggaacaatctcatccgtggcagacgaagaaggaactctacatcgcatcgcagatccgccaaagaagaagtctcctccaacaaactccgagaatgtcggagtaaggaaggaaaaagcgcaacctccggcgctccgaaaagagagcaccttcagcaatccagggaccgagggcccgctgacccggagaactccgctgtctacttcccctacgaaagaatggacacgaatcgcaaagaagaaagaaacaaacgaaaccgggaggaagcaagttgttctttccgcgcctctgccctcgaaggggaacggaaaaaagactgccaagacagccacaccattctaccccgacgttcttttcatcgggagagtggaatcgccccctgtctccgacgacgaaccgaccacgcccggagaagaaccacctcagcgggaatcccgtcgacgaagaaaccagcgccgaaatatccggcggcatcacgaggccggagagcggaatccgaagcagcctgtctcgcgagacgaggcctcagagataggagaaaccccggaggaacgcgtcttcagagaacaaaggaactcccgacggcgcgatcgccggcgagctcaagaacaagccgagcaggaggcaaggcaacgccaggaaaatccactcttcgggcgtaatctgaatcccgacttcgcccgagccatgaacacgccgagtgaagtcggaggaccaaccatcttctacctcttgctcacccgccgaatgacctacgacacgccatcaacagccgccgggacgcgtgaagctccatcaatgcttcacgcgaacgacgacatgagaacgagatccgccaccgggaggagtacgacagggatcacgacgtcccagctcggagtcatgccgccagaactaagtcggcaacggcctcgactggcgggactacccggggacggtcgagggaccacgacaactactcccctccccgggacagacatcatcccccgacaacaggaggacacatgtggagtgtctgcccttactccacgccttagggccattcagtggccccctaacttcaaggtatccaatgtcgacaagtatgaacctaagcaggatccaggaggctggctggccgtctacaccaccgccgctcgagccgccggagcgtccgaggacgtgatgactgcatacttacccattgtcctcgggcaagacgcactacaatggctgcgacatctaccccgacactgcatcgacgactggagcgatttcagtcgacgcttcaccgccaactttcagtccctctccgacaaaccggcgcaaccatgggacctcaaatccatcaagtgccggggggacgaaactctccggtcgtacctcaaaaggttccagaccatgagaaatcgtatccccgaggtcacggaggcggccgtgatcgaggacttctacagaggatccaatgactcggccttcgtccgagccatattgcagaaagcgccgactacctccgagcagctgttccaggaagccgacctctacatcaccgttgatgagcgagctcaagacctcatcggaggagcgaagcccgcaccggcagcaccacgacgcgacgtgaaccagcaacccttcttggatggtttagttgcagatgagctcaagacctcttggccttcttggatggtttagnaatccttggaaaccgaggaagaaanaatgacagagccaattcttgttgaagaaatcagtgctgttgcccccgaagcatcccccaaagtccttgattatattgttcaacatgcttcggggaaaaagttgtctgaaaaagaaaagcaagaggcccagttttacgcccaaaaactgaaatatccaaagggggcgttgatattcaacggcagcggagaagacgacttcttgtattgtctccctgacagcaaggagatttctgtctgtcgggagatgagcaagagcttcggattcccaacacttgaagacgggctctcagtgttgtcgaaaaacgagctggccgacagcttgccgtacaatagcttaaaggtgcaaaaaatgaggtctttgtattttttcttgaaaccaaaatttttcgtttgcttaaatttattgacgcacatacatttttctttgcagggccttatacttagtaatgcccttagggcccaaaaagatgccgaagatgaagggtgtgttatggccctgagcaaccttcgttccgaagtaattaactaaggaacgaaggtcttaaaaagataaaataatgcattcattgataaatagaataaaagaagacgaagctccc

SEQ ID NO: 146438 - DNA, 2724 bp, Zea mays
  Clone ID: MRT4577_65068C.1
atgtctgaagataagaaagctgctgccgagatgaagctgagtctctctgaagagaaaaacctggggtttcttatagcaatgtcgaaggccaatacagaaaaaatcaccaaagagattttagaaggtttatctgaagatactggtgacagcgacagttatgatgtggagagcggtggtgaagactccgaagatcgaccctggcgaccaagccatgcggtttttggcaaatcaagtatcaaagaaaaccatcttgtcaacatgaggggaagatatttccggggcttatccattgtgagggccgacgaaggagagaagacttgcccgtcccctgaggaaaatgaagtcgtagtgtaccgaagctttttgaaagctggactacgatttcccctgagcagctttgtcgtagaggtgctgaaaatatttgaagtctatcttcaccaacttacccccgaagcaatcataaggatgaatatcttcgtgtgggccgcgagaagccaaggtctggaacctgacgcaaaaagtttctgcaacatacatgaattattatacgagacgaaaccctggggtaaggagcagtatcccaataatttcggctgctacagtttcggctctcggactgggtcaagctgtcccgtgccaacctttcggaagagatggcccggcgactggatgacagaatggttttatgtgaagaatgacctgaaaacacaagaagatattaagggtataattatgtgccctatttggcaaagcttcggcctacggaggccgaaggttgaaatgaatgaagctgccgaagaatgccagagagccttcggagttatttgctcttttattggaacgagagatttggtccaagagcatattgccttcagagtatggccgctcgcggaaaaatgggaaatgccacaagagactataaaggaggctgacgaaggtggacttatcaggctgaagtatactttcaaattcggagacaaattcgtagagccagatgataactggctaaaaagcattgaaaatgtaagtgatgaactacttggggtttattcaaaggccgaagatactgcattgtcagcagccttcgaaggccggaaaaagaaaagactgaaccgagtgtttgacgcaattgggttcgtgtaccccgactaccactatccagcgtggggccaaaaaagaaaaagcgcgacttctgcacaggaaactgcttcagccgctcccagcaagccagcgccgaagagacaaagggtaaaagttctcacacaccggccactctacattgaaccagctacagtgcctgagttcgccggtgaaacctcttcggccaccgaaattaaagaaccaacttcagtgccgaagaacgaagaaaaagcttcagcagagaaggcagaaaaaccgagtactgaaggaccgaaaatattggaaattttaagtccttcagcaagtgttgagacaataaaaagccaaaagggcccagcggtgaccccaaaaagaaaaagaatggtcactgtgctagatgttctggagacaattgagtcctcaagcacgactccgaagaaggctgttgaaacttccgaagcagaaactgaaatctttgatgctgaagctccaaagcaacaaactgagactgaagctgggccttcagagcccacgaagccgcggaggtccgccaccgtcgacccgggccgccgtcgcgccattgccgccaccgaggagtccctggagttcgccttgagggggctcaggctgtttcctgagtacctctccgttgtccgcattgtaaccactgttcaggagaagatggctcgtcttagacacactgcacgtaagtcggtgattcctttcctgccgtctcgacttgcggagcgtcctctgcgccgcaccgtgtccggtcagtcgagtcacctggagagactgcaccaccgcctgcgtgaggagcaggaacgccggcgccagcacagggagcagcagggctcttcctccccaccccagcaagaggtggagtccgtgaggccccgttcctctgttgcccagctggaggcgccccctgcaccaccgcgggacgtcctggctgttggaggagatcctggaggagaccccgacgacgacgactcagaccacagcacggagtcctctgagccgcaagaggcggaaggatgggtcgcccgacccatcacccgtgacgccgctcgcgtctaccagcacagtcgtgggaggtacccggaccgctgggaggctacctgcctagtttgccgtccggaggatgacctccagggtgcggaggccgtttcggagcactattccatctccgagagggacactgcggaggcggctatgcaggatgcagcacaacgtgcactctcccagtactgttctttgttcggtggggtggccaacggtcttaaccttcggtactaccctcgccgtcctactggtagcaccgagagtgtggttgtctcacctgttggtgagggtaaccctaggttgagcagcacagtcaacctagtcgcggtgcttaacactgagctggatcactctctggatgagctgagcagggctcgaacggagattgccgggttgcgtgctgagctagcagagcgccgccaccaggagggtggttctcccgctcctgctgggactcagcacccataccgctcgccgccacgtggtcaccacacttatggttcccctgcctgtaagaccaggatagatctggatccttag

SEQ ID NO: 146439 - DNA, 403 bp, Zea mays
  unsure (1)..(403): unsure at all n locations
  Clone ID: MRT4577_65069C.1
ggagcgagcaggctgtcttttgcggaggcaaacaggatcggctaaaaacccgaaaatccacgactggcaccacacaacccaaatcaattacatgccgcccttcacccagggcctagtcaggcatatcttcnctgtggtggccaaggtctaaacaggaaacaaagcgctgatacctcaagtgtcaccaaaggcaccagtgccnacaccataaaaaggggcatcctgtactttatgggccagggattcgaccacatcaccggtgacgggtatacagaaacttcaacagccggtttcattagcgctctggtgactggattcgctatggcttctaacgctgaagcattatgtctgtaccaaagaaaccgctacgttggggacctttttctttttgtttgtcccgccc

SEQ ID NO: 146440 - DNA, 307 bp, Zea mays
  Clone ID: MRT4577_6506C.1
tcgagcggccgcccgggcaggtcaagcttttttttttttttttttttttttttttttttttttttttttggtttttttttttttttttttttttttttttttttttttttttttttttttttaaaaggtcccaaacaacccttttccctaaaaataaatcccttccatttaaaggggtcattcagggcattgcccaccccgccccccaggggggggggggacaccccggtacccaacgccgctaaacgagggaaccaactttagggagctaggcaggggccccattacattattaccacaggccccg

SEQ ID NO: 146441 - DNA, 378 bp, Zea mays
  Clone ID: MRT4577_65070C.1
gaagcaaagcaaagccaataaagagccatgaattcattctgagaagggagatcagaactcatacatagtatgaatagagtagagacatacgacgtaatcagaacttaataatgcagcacactatgaccaggcccttctcttgagtgagggaccacacttcctacaacaagctgggtgacaaatggtggaacactagtcgcacacagactggttgagtgactcaaacaccactcgagaagtccgagatgcatagcactcggcctgttttattttggtgtgggcgaagccaacacaattattatttgggtaccagatagaagttactttataacgttcactcaaggaggatctttcagggatggacgtcgccctctggcc

SEQ ID NO: 146442 - DNA, 563 bp, Zea mays
  unsure (1)..(563): unsure at all n locations
  Clone ID: MRT4577_65071C.1
ttatctaggtccttgccgccttcagtgcggtggggaaggtgaggggctcagggcttttcggtgggagcttgactcgcttcgacgtgaaagcttgcctttctcgcggtaaattcggatcttttggggtttcgcgcgccctgctgttcgtgttcggttcctctcggtacggttggctttgcctgaggttttgttctgggggtccgggtttctggctggttttgcgcagcgactgtggaagaggtgccaggctcagtcttcccgtttgtgtctcggccttccggtgagtcgttccctgctgaacgcttacttgatcgagtgcccaaggatagaagttgccacacgaagcttggtttctgtgccaacgcccctttcttcttctgtgaagaaattgccgtttacggcgaagacttgtgcgctggctcagtttcacctagttcgtgcttatttttactcgatccactccaaatcttggatgcttgaatcctgctaattcgtggtgaagacgggattttctctttttttttctgacgacattaagcagtgggactgngagctatcttgtt

SEQ ID NO: 146443 - DNA, 2007 bp, Zea mays
  Clone ID: MRT4577_65072C.1
ggaccctcgggttgccaaccaaggaggaggagaagatgtcattccaccaccaggggcctcccctttccacctgttcgtcgcgtgcgcattcgttcgcgcagccagccaccaccggcccccatcgatcgatatcctcctcctgctagctctcgcagttccgtccgatcgactatactgatccagctcctgctatgcgcggcggcggctagctcctcgacgacgacgagcagctgatcaatccgagtccgccggcgcggatcgtcgttcgatcggtcaccagaccatggggactccggtgaacatcatcgtcggctcgcacgtgtggctggaggaccccggcgaggcgtgggtcgacggcgtcgtcaccgagatcaaaggcggcgacgccaccatcgccaccaccaacggcaaaacggtcgtggcgagccttggcagcgtataccccaaggacacggaggcgccgccggcaggagtggacgacatgaccaagctggcctacctccacgagccgggcgtcctgcacaacctctcctgccggtacggcctcaacgagatatacacgtacaccgggaacatcttgatcgcggtgaatcccttccagaggctgccgtatctgtacgacgtgcacatgatggagcagtacaagggcgccagcttcggggagctcagccctcatctcttcgccatcgcggacgcctgctacagggcgctcatcaatgaccaggcgagccaagcgatcctggtgagcggcgagagtggcgctggcaagacggagaccaccaagatgctcatgaggtacctcgcattcatgggaggacggtccggcaccgagggacggaccgttgagcagcaggttctagagtctaacccggtacttgaagcatttggtaacgccaagacagtgaagaacaacaactcaagtcgattcggcaagttcgtggagatccagttcgacaagaatggcaagatatccggggctgccgttcgcacgtatctcctcgagcgatcgcgagtgtgtcaggtctccgatcctgagaggaactaccactgcttctacatgctctgctccgcgccccccgaggacgtgaagaggttcaaggtgggggacccaaggtcgttccattacctgaaccagacgaactgctatgaggtggccaacgtggacgacgcgagagagtacatagaaactagaaacgctatggatatcgttggcatcgatcaagatgaacaggacgcgatcttcagagtagtagcggcgatcctccacctaggaaacgtcaacttttccaaagggcaggagatcgactcgtccaagctgagagacgataaatcggtccatcacctgaaaacagttgcggaactgctaatgtgtgacgagaaggccctcgaagactccctctgccagcgtgttattgttacgcctgatgggaacatcacgaagccccttgatccaggctctgcggcgttaagccgagatgccttggcaaagacagtgtattcacgactgtttgactggatcgtagacaagatcaataactcgattggccaagatccagatgcgaccaatataataggcgtgcttgatatctatggatttgagagcttcaagatcaacagtttcgagcaactgtgcatcaatttgacaaacgagaagctgcagcaacacttcaatcagcatgtgtttaagatggagcaagaagaatacacaagggaggaaatagactggagctatgttgaatttgtagacaatcaggatgtgctggacctgattgaaaagaaacctggaggaataattgcactcctggatgaggcatggtatggcttgtggtacttcgagagattcgttttacttaaaaaaatggagaagagctttgagaaacatgtagctttgtgtacaaactgacacaaaacttaaaacatatttaagtatattttgttgttactaaatattaacatatagcatagttttttcctagcgaacatgcaatttgaaggaaaacataagtg

SEQ ID NO: 146444 - DNA, 1916 bp, Zea mays
  Clone ID: MRT4577_65073C.1
cgctttttttcctttgttttcgttatcattcctgaaccccgggaattcaactcatcatgctaagaaagcacagcacacccttctcaagtaccaaaaaataacaaaaaatcatgctaataactatgtaatgggaattcacatcgtcctgctaaaaaggcacagcacatcattctcaagagccgaaaaccaccaatgaatattgtggactgagcatacaacaccccacctaaattacgacgaatagccttcgccctcgacacccttcatgacgacggagcacagcacttgcttcgagatgtgggtctccagatccctcgacacctcggcgagcctcaggtcgaagttgctcctgtatctctgcggcttaggcgacgatgaccctgagaatcgcctcctggggctcgagatcctcgctgtgggcgacaccgacaggccagctcttggtgaagaccggtacgatctctttcccggtcgtgatgtgttttctctctgggttcagagggcctcgctttgtctccaccggcagtggtttcatgggtgatgttggcagcttctgtctgatccgctcacgtgcgcgctcagcggcagccatcgccttctctttgctcatcttgatcaatgtccatgggttgatttggatgtcatccttccttcctgaagcatccatttggtcgctctcgaccctgatcgacagcttccgcgcactttcattcacttcatcttttctgcaaaagacccttgaaaggaaagatggcttctccggtgagtcaaagtcgatgctctcgtcagaatcagagtcttcgaatgggtcaaatgctgctcctgcttctctcatcgcaagaatgtagtcgtaggtcctcatgccctttctaatgagaaccatgtggaaaaagaagagctggcccagtgctgcagtgctgtaaattgtgaagatgacaaaaaccactgatagtgctgcatgagctccttttgggagcctcaggtgcagcctgtgctccatttccattttcacccctttgctgtcgacaaaacagcggatgaagatcgcaattgctgttcctccctcaatgacaagcatcagcaagacaaagaacataagcagaataaacgttgcatagttccttcttccaatgcaattgtttagccacctgcagtggtgatcaaatccatcaacgcaacgctcacaggtcttgcagtgcttgctacgcaacttcacctcgcagtcgcagatggggcagaaagagatgtcgtgcccgtcggcagtggcgcatggcgagacgatgtcatcgaggctggtgaaggcgaaggggagcatgggatcgagctgaacgctggtgttccactgctccaggtagctccgccgcacccagcggttggtgacccgcgcctcaacccgccgcagcaaccgcaccgcgtagcgccacaggatgtagccataccgcagccgcggcaacttcgccgtgcccccaccgccccgagcgagctgccgccgccgcttggtcttcttcgcgtcagtccggtctgacgggtccaccgctgtgcagcgcacgtagagcgccgctgtcgctgcggccgagaaagagaaggtgattaggaggatattgccggcgagggtgttcccgatgtagggccccaggacgacgtagaacgcggccacgagaagcgcgaataccgctgcggccaccagctgaagcgggtgtagggggagctgccatccgtggcggcggcgccagggctgccgcgccatcgccgccgtgacgatgtctctatcaccgcagcgggccatctttggcggtgagatctgtgggtcgacgcgacgagagtgaggtgctctgcgcgctccgctccggtcgagtaaagtcaagcggcgtgcgcgcggatcgtgtgactgatatgtggggtagggtcccggccgg

SEQ ID NO: 146445 - DNA, 238 bp, Zea mays
  Clone ID: MRT4577_65074C.1
gggagtgtgaagactagcatcaggactaaaatattattgaatcagggacacacgttcggcattcaccaaaacaccatacctggcccatgggtcatattataaatatcatggcttcctggaatgggaatggatcggagtacctgcttaaccataatcagctcacacttttactttcggaggggcgggggcttcccgggggaacgccgggcaaataattaaaagctgcaatttttaacca

SEQ ID NO: 146446 - DNA, 373 bp, Zea mays
  Clone ID: MRT4577_65075C.1
tatcttctattttatctgatgctttctattatggggtgggtttttttttatttttctacatagaaacaatttttcctgaggcccagggttaaaacaccatatacaaacgggaacttatgatgcagagtcaaccgaagaaaccgtgctaaccgacgcattgggaacgggcgcgccggaactccaggagtcacccacgaaaccggggaacaagcagatgcgaaaatgcatacatggtgggctaccggaaaccaaaaaaaaaaatgctttggccacaatagggggggaagccccaaccaaattgccgcctaaaaagggacccgtcacgggccccctcctcatactaaacctaagcataaaacgcccagcccggggc

SEQ ID NO: 146447 - DNA, 303 bp, Zea mays
  Clone ID: MRT4577_65076C.1
cgggggggccgaacgaaaaaactagacaaattccaaaactttttttttttttctgccctacaaacttttgatactggaacactggcggccctccaaaccctgtatagttgtcccactcggccattgggtccaaggggggcttggtggtcccctttttgtttttgttgcaagactaaaacactttctgggcgggttgccccccaacgcccattccttgaagagcagaatttcttccttttaccgacggaggggctgtaaggggcttaggcccatctgcccatgtacccaacgtttttttatttt

SEQ ID NO: 146448 - DNA, 439 bp, Zea mays
  Clone ID: MRT4577_65077C.1
gaacctttggtctgatttatgtgcttgtttatgtgcttgtttatgtgcttgtttatcctgcttgggtacgtaaaaacggattcggggtgaccgatcggcataaagggtcgtagttcccagcgagctacgtcagaataaagggcctcataagggccaaatcctatagggaaccggtcgtaccgtcggaagaggagtccctctgtaggggaatcctagcgccattagtgggcgaataacccgggaaacggaaaggatcgtaagaaagtatcgactgcgagacagcgcggttattaacggccaccgccacgaacattcctccggaaaaagacgaagacgacaagcggaagggtacgggaaattaagagtcttccgaccaccccggagaacacgaagtaagcaaagtatgctacgttcacggctttctcgggtattgcggcac

SEQ ID NO: 146449 - DNA, 648 bp, Zea mays
  unsure (1)..(648): unsure at all n locations
  Clone ID: MRT4577_65078C.1
ctccgggntgcggtcgtggtgtcccgccgggattacccgatgtcaaggcggtgcaagtggttgccggattgtatggaaggggaatatgcacgggccactcaatgtgtcgagaagggaatactaaaatctgtcgacgagagcattgttggcagggagcatgttgtgccaagcattgttcaggtggcttttcgcctgttagaagtctcagaaggtgatcaaggtgaggaagctggcttaggtgaaggagtaatgagcaccgaagaaataggcattaatatgctcaaatcattgtttgaggtccatgaaatggcacggactgagataattgaacagtgcaagttccggattctctcggcaaagcctcagcaaagtgtgccagttctcaggttgcttggatgcttgattttgagtcatccatttccaatgctggaattcattgcacatttaaaggagttgttggattatttttcttttatgaatgacaagatatcaactgctttgatcagttgcatcttgccactcacaaagttcagccgtgatctgaaggattacgtaatactggttgtaagaaaggcgatgttcaagagggaggacatggttcgaattgctgctacaaatgctataattgagctgattattgcagaaaac

SEQ ID NO: 146450 - DNA, 735 bp, Zea mays
  Clone ID: MRT4577_65079C.1
cctgcaggttccggtccggaattcccgggtcgacccacgcgtccggcggagtgtgtgctccgggctcggaacacacatttattattaaaaaatccaaaaaaaatctaaaaaatcctttgaaaaaacccaaaaaaaatttacaaaaaaatccgcgtctcccccgccggagacttttattttttttcttcctcttttataaaataacccggtgaagcagccgagaccgacccgcccgcccgcggccccgcagctccaagcaggaacccagagaccgaggccttcctgccgcccggacccagcaccgccagcctcgctcccccggttccacggccgttgagtacgcgtcgattccggttgaattttgtccctctgcgctcgcccccgctcccctccccccggctccgtcccccggccccgcactcgctctcctcctctcacgggaaaggtcgcggcctgcggccccgcgggcagccgtgccgagatgaaccccagcgcccccagctaccccatggcctctctgtacgtgggggacctgcaccccgacgtgaccgaggcgatgctctacgagaagttcagcccggccgggcccatcctctccatccgggtctgcagggacatgatcacccgccgctccttgggctacgcgtacgtgaacttccagcagccggcggacgcggaacgtgctttggacaccatgaattttgatgttataaagggcaagccagtacgcatcat

SEQ ID NO: 146451 - DNA, 452 bp, Zea mays
  Clone ID: MRT4577_6507C.1
gccacgcgtccagtttcactctctcactatattgcaggttctgtcgcccgttctctaacatctccttcgcctctcacatgggtagacctgggacgtggacacagaggcggatgcggctccagaaatagtggctgaagccactgaaaacatgtcctggtcggcaagcaaagttacagttgaataagtcctacgaggaactgaaagagaaaaaggcacacattgtgacaaacaggtgcaagactttgcacacactcatgctagggatggagatcttgggggagcacagatcaaatctggctctcagaacggagccatgattgagagcattataaaaggaggaaagattgctcatcggatgagactataaagcaagcgcagagatgctctgatataaaagtgaaaacgacacactactgatcgacggatgctcaaggagatgaggagaatcgagc

SEQ ID NO: 146452 - DNA, 377 bp, Zea mays
  Clone ID: MRT4577_65080C.1
acccgaaaacccagatttaaacttccattccacagggtggatttattaccgggggggtttacaaagaagaggggcaaccctaattggggggccaaaatcgcccgggcacaaaagggggggtcaaaattaaaggctcagcaaaaggggaaggggataaagctaactaaaattttacattaccatccctccggaaatgggaagcacctggccaggaataaagctaggtgggggggtaagggccaggaactcgaccaaccctggaacttcctgggggggggcatatctccctaacggaaggggggacaagatttttttttaaaggttttttccaaggtggggaggcatataaaaggcaaggaacccgggggcaatagcat

SEQ ID NO: 146453 - DNA, 432 bp, Zea mays
  unsure (1)..(432): unsure at all n locations
  Clone ID: MRT4577_65081C.1
cgttttggggggttatacttttcttttattcttttttttttgttttatttaactttcatattctgcgggcgagggcgcataaacattgaacagggcttcatgaacaaaacgtacaactcacaccgctttaacaaaaatacatccccctcccaagggggggcaaaacttaaatggttcacccatatcccccttcttattacaaacaaatacccanacccctgggccgggagtatctaaagctcctaaaaccgcccccctagttgataatctcattggtattaccatgctaactaaaaaggggaaaggaaaatgcactactggcatattctgatctacaaacttcctcaactaatngatgatttccatgggtacctggaaacctcccatcatgcccttagctcaaaataggaacctgagatcccttaggggcca

SEQ ID NO: 146454 - DNA, 464 bp, Zea mays
  unsure (1)..(464): unsure at all n locations
  Clone ID: MRT4577_65082C.1
ttatttcttttctcttttttattggggctttttttttgagtntgggttttttttaaccaagggcaacacaactnccgggccaaaaaaaaacaaaactagtttggtgatacaggcagcaggccggccctgcctgaatcatgaccgatgcaacgcttcagggtcctttacaacacgcatgcctttagctttccacaaaaaacaactgggggggggggcagcaggtatgctgaagcaccaaccttttaggggaacttgaggctggggaacccctctttgttgacggggtccgcgagggggacaaacaggttctggaacgggcccacccccgggacgagcccccggaagaaaaaacccggggtggggagcatggcgagcccgcccgtcttgaacccctagggactaggcaaaatttattttctttttgggcttgcccaaaacaagcgggttaaaaaagggcccccccg

SEQ ID NO: 146455 - DNA, 286 bp, Zea mays
  Clone ID: MRT4577_65083C.1
cgacggaggcagctacagtaatacatgctggaatggcaccaggtgacatgcggctgggtcagctatctaacgagagaacctacatggaccagagcatagaacggagcaatggatattgaaatataagcaatcgaatgagatatgcctacggacaagttaccgaataaccctgtccaatcctacaacatgcaacagaggaacaagacagctatgaccagttcaagaagcgacttatggcgaccatatgcactcgtccggctcacaatagatgtgtatgcataaattg

SEQ ID NO: 146456 - DNA, 129 bp, Zea mays
  Clone ID: MRT4577_65084C.1
ctggtttgtttcacatctcgatcatgaacaggtacaggagcacagtgggcaggatgagctacggattgtacaccatgatcacggaacagcacgtgcaccatcatcgtctaggagcggtttcttccagtt

SEQ ID NO: 146457 - DNA, 328 bp, Zea mays
  Clone ID: MRT4577_65085C.1
gctacacgtcagcgcaggcatccgtccacacgaccacccactcatttgtagccgtaaccagcgctgggagcgtcggacgatggtacgtctacaacattcatcaccgacagacggtctatgtggagctgggtctcacgggcaggatttctgtcgtcccgcaaactcgtactttcatcataatcacccttgttgtcgaatcttcagacatcagttacactgtcactgtcaagattcaagaataagagggaatccctccataacactagcggctcacttttgccggtaatcatctctacgacggacccacactgagctactagaacattca

SEQ ID NO: 146458 - DNA, 2943 bp, Zea mays
  Clone ID: MRT4577_65086C.1
atgtctgaagataagaaggctgctgccgagatgaagctgagtctcgatgaagagaagaatctggggtttcttatagcaatgtcgaagaccaatacagaaaaaatcaccaaagagattttagaaggtttatctgaagatactgatgacagcgacagttatgatgcggatagtggtggtgaagactccgaagatcgctcatggcgaccaagccatgcggttttcggcaaatcaagcatcaaagaaaatcatcttgccaatatgagaggaaggtatttccgggacttgtccgttgtgagggccgatgaaggagaaaagacttgtccgacccctgaagaaaatgaagtcgtagtgtaccgaagctttttgaaagctggactacgatttcccctgagaaactttgtcgtagaggtgctgaaaatattcgaagtctaccttcaccaacttacccccgaagcaatcataaggctgaatatcttcgtgtgggccgtgagaagccaaggtctggagcctgatgcaaaaagtttctgcaacatacacgaattatcatacaaaacaaaaccttggggtaaggaacagtatcacaataattttggctgctacagtttcgtttctcggtctgggtcaagctgtcccgtgccaacctttcggaagagatggcccggcgactggatgacggaatggttttatgtgaagaatgacctgaaaacacgggaagacattaaaggtataattatgcgccctatttggcaaagcttcggcctgcggaggccgaaggttgaaatgactgaagctgccaaagaatgccaaagagccttcagagttatttgttctttcattggaacgagagatttggttcaagagcacattgccttcagagtatggccgctcgcagaaaaatgggacatgccacaagaggctataaaggaggctgatgaaggtggacttatcaggctgaagtatactttcaaatttggagacaaattcgtagagccagatgacgactggctaaaaagcattgaaaatttaagtgatgaactgctcggggtttattcaaaggccgaagatactgcattgtcagcagccttcggggggcagaaaagaaaaggcacaacctctgcgaaagaagaagttgcagctgctcctagtgagccagcaccggaaagaaaaaggataaaggtcctcacacatcggccacgctttattgaaccagcttcggtgcctgagttcaccggagagacctcttcggccaccgaagctgaaaagccaaccgagccaaccttgctgccagaagtcgcagaaatggccgaagctccaacaagaatagaattgaaagaaccaaaggttttattaccagaaaccaaagagatggctgaagcgccattgacagaaaaaatggaaaaagcaaaaggattcactgagggatcagaaatatcagaagttttaagtccttcagcaaatgttgaatcaataaaaaaccaaaagggccgagcggtgaccccaaaaagaaaaagaatggtcactgtgctagatgttctggagacaattgagtcctcgaacacaactccgaagaagactgctgaaacatccgaaacagagactaaagtcttcgatgctgaagctccaaggcaacaggctgagaccgaagctgggccttcaaagcccacgaaagaagtaaaaatatcagagtcaattcctattgaagaaatcagtgctgttgcccccgaagcatcccccacagtccctgactatattgttcgacatgcttcgggaaaaaagttgtctgaaaaagaaaaacaagaggcccagttttacgcccaaaaactaaaatatccaaagggggcgttgatgttcaacggcagcggagaagaagacttcttgtactgtctcccggacagcaaggagatttctgtctgccgggagatgagcaagagcttcggattcccaactctagaagatggactctcggtgctgtcgaaagacgagttggccgacagcttggcgtataatagtttaaagggccttatacttagcaatgccctcagggcccaaaaagatgccgaagatgaaggatgcgctatagccctgagcaaccttcgttccgaagttattgaactacggaacgaaggtttcgaaaaagataaaatattgcattccttgataaataaaataaaggaagacgaagctatttttagaggtcaagccgaagcccagaagcgtgaaattgaagatcttcgaaaacaactagccagagctaaagaggaatgcatacttgaagaaacgaggcgagaacttagcgatcaatgggcaaatcatttagaagaaactgttaaagagcttcgttcgtccaagaaaaagtgctatgacaaatctatggagtgtgttaagaaaataaaagctagcttcgccagcgttggcgcgttctcgagcgaagaaaactttaaaagaggcaaccccgaaggccccatcgaatggattaatcacgaggcagaggcctttgaagaaattttaaatagccgcggagacatctgcgctttttcaggtgccagagggattgccaccattttggagggaaaaggctgcgaacatgtaaagattttatcgcaatccgaagccaccttgtccgttgaagatgtaaaagatccttcagccgaagctagcatggttggggggaaatttttcaccgatatctgggacaatggtggtagagaaatggcccgagaaatcatccagaaaagcgaaaaagggatccacgaagctagaaaagtagcagaggctgctgagaaaagcgcagagcccgaagggcaaatagatcctactgaagcgtcttcgggccctcatcctaaagatgacgatgaaattaaaaagatggctgaagccatcatggatcaagttgtcgatcgactcctgaacgaagctgcagaagtagtacttagggaagactag

SEQ ID NO: 146459 - DNA, 2700 bp, Zea mays
  Clone ID: MRT4577_65087C.1
atgtctgaagataagaaggctaccgccgagatgaagctgagtctctctgaagagaaaaacctggggtttcttatagcaatgtcgaagaccaatacagaaaaaatcaccaaagagattttagaaggtttgtctgaagatactgatgacagcgacagttatgatgtggatagtggtggtgaagactccgaagatcgcccttggcgaccaagccatgcggttttcggcaaatcaagtatcaaagaaaatcatcttgtcaacatgaggggaagatatttccgggacttgtccgttgtgagggccgacgaaggagaaaagacttgtccgaaccctgaagaaaatgaagtcgtagtgtaccgaagctttttgaaagctggactacgatttcccctgagcaactttgtcgtagaggtgttgaaaatatttgaagtctatcttcaccaacttacccccgaagcaatcataaggttgaatatcttcgtgtgggccgtgagaagccaaggtctggaacctgatgcgaaaagtttctgcaacatacacgaattatcatacgagacaaaaccctggggtaaggaacaatatcacaataattttggctgctacagtttcgtttctcggtctgggtcaagctgtcccgtgccaacctttcggaagagatggcccggcgactggatgacagaatggttttatgtgaagaatgacctgaaaacacgggaagatattaaaggtataattatgcgccctatttggcaaagcttcggcctgcggaggtcgaaggttgaaatgaatgaagctgccgaagaatgccagagagccttcggagttatttgttcttttattggaacgagagatttggtccaagagcatattgccttcagagtatggccgctcgcggaaaaatgggaaatgccacaagagactataaaggaggctgatgaaggtggacttatcaggctgaagtatactttcaaattcggagacaaattcgtagagccagatgatgactggctaaaaagcattgaaaattatccaacgcggggccaaaaaagaaaaagtgcaacttctgcacaggaaactgcttcagccgctcccagcgagccagcgccgaagagacaaagggtaaaagttctcacacaccggccacgctacattgaaccagctatagtgcctgagttcgccggtgaaacctcttcggccaccgaaattaaagaactaacttcagagctgaagttcgaagaaaaagctgaagcaccttcagcagagaaagcaaaagaaccgagtactgaaggaacgaaaatactggaaattttaagtccttcagcaagtgttgagacaacaaaaaaccaaaagggcccagcggtgaccccaaaaagaaaaagaatggtcactgtgctagatgttctggagacaattgagtcctcaagcatgactctgaagaagactgttgaaacttccaaagcggaaactgaaatctttgatgctgaagctccaaagcgacaaactgagactgaagctgggccttcagagcccacgaagttgtctgaaaaagaaaagcaagaggcccagttttacgcccaaaaactgaaatatccaaagggggcgttgatattcaacggcagcggagaagaagacttcttgtattgtctccctgacagcaaggagatttctgtctgtcgggagatgagcaagagcttcggattcccaacacttgaagacgggctctcggtgttgtcgaaaaacgagctgggcgacagcttggcgtacaatagcttaaagggccttatacttagtaatgcccttagggcccaaaaagatgccgaagatgaagggtgtgttatggccctgagcaaccttcgttccgaagtaattgaactaaggaacgaaggtctcgaaaaagataaaatattgcattcattgataaatagaataaaagaagacgaagctacttttaaaggtcaagctgaggctcagaagcgtgaaattgaagatcttcgaaaacaactagccagagctaaagaggaacgcatacttgaagaaacgaggcgagaacttagcgaccaatgggcaaatcatttagaaggaactgttgaagagcttcgttcgtctaagaaaagatgctacgacaaatctatggagtgtgttaagaaaatgaaagctagcttcgccagcgttggcgcattttcgagcgaagaaaactttacaagaggcaaccccgaagatcccatcgaatggattaatcacgaagctgaggccttcgaggaaattttaaatagccgtggggacatatgtgctttttcgggtgccagggggattgccaccattttggagaaaaagggctgcgagcatgtaaagattttagcgcaatctgaagctaccttgtccttcgaagatgcaaaagatccttcagccgaagctagcatggttggtggaaaatttttcaccgatgtctgggacaatggtggtcgagaaatggcccgagaaattatccaaaaaagcgaaaagggcatccatgatgctagaaaagtaacagaggctgctgagaaaagcgcagagcccgaagggcaaatagatcctactaaagcgtctccgggccctcccccgaaagatgacgatgaaattaaaaagatggctgaagctatcatggatcaagttgttaatcaactcctgaatgaagctgcggaagtagtacttagggaagactag

SEQ ID NO: 146460 - DNA, 996 bp, Zea mays
  Clone ID: MRT4577_65088C.1
atgccgccgtggataggccggagcacacgccgccgacgagctcgcccgcctgctcacgtggaccgggcgattccggccatccccgacgacgagccgtacctcgacgtgatcgccagaccctccccgagccaaccctacccttcgccggacctccctcgccgccggttctctggaggagatggttgctgggattacttggccgaccaccctgccaccggaataaaagaagacgaagctacttttaaaggtcaagctgaggctcagaagcgtgaaattgaagatcttcgaaaacaactagccagagctagagaagaacgcatacttgaagaaacaaagcgagaacttagcgaccaatgggcaaatcatttagaaggaactgttgaagagcttcatgcgtccaagaagagatgttataataaatctatagaatgtgttaagaaaatgaaaactagcttcgccagcgttggcgcattttcgagtgaagaaaactttacgagaggcaaccccgaaggccccattgaatggattagccacgaagctgaggccttcgaagaaattttaaatagccgcggagatatatgtgctttttcgggtgccaggggaattgccaccattttggagaaaaagggctgtgagcatgtaaaaattttggcgcaatccgaagctaccttacccttcgaagatgcaaaggatccttcagccgaagctagaacggttggtggaaaattttttaccgatatctgggataatggtggccgagaaatggcccgagagattatccaaaaaagcgaaaagggtatccatgatgctagaaaagtagcagaggctgctgagaagagcgtggagcccgaagggcaaatagatcctactaaagcgtctccgggtcctcccccgaaagatgatgatgaaattaaaaagatggctgaagctatcatggatcaagttgtcaatcaactcctgaacgaagctgcagaagtagtacttagggaagactag

SEQ ID NO: 146461 - DNA, 798 bp, Zea mays
  Clone ID: MRT4577_65089C.1
ctccttttatttcttttacaaaatgggtgttacaaatgggcaaatcatttagaaggaactgttgaagagcttcgttcgtccaagaaaagatgctatgacaaatctatggagtgtgttaagaaaatgaaagctagcttcgccagcgttggcgcattatcgagcgaagaaaactttacaagaggcaaccccgaaggtcccatcgaatggattaatcatgaagctgaggcttttgaggaaattttacatagccgcggagacatatgcgctttttcgggtgccagggggattgccaccattttggagagaaagggctgtgagcatataaagattttagcgcaatccgaagctactttgtccttcgaagatgcaaaagatccttcggctgaagctagtataattggtggaaaatttttttaccgatatctgggataatggtggccgagaaatggccggagaaattgttcgaagaagtgaaaagggcattcacgatgctagagaagtagctgaggctgctgaaaagagcgcagaggccgaaggtcaattagatcctactgaagtatctccgggtgcaaggcctaggggtgacgatgagattaaaaaagatggctgaagctattatggatgaagttgtcgatcgactgttgaacgaagctgcagaggtagtacttagggaagactaaatgctgttgtaaaaacattttaaatgtaatatatgtaatatcttgtaatcctgcatgtaatatacttgttttatttttctttgtggttcaattctttacgatgcatgaaactttacat

SEQ ID NO: 146462 - DNA, 1680 bp, Zea mays
  Clone ID: MRT4577_6508C.1
cccgggggattattagctcagcattctcccggggtcaaactgtgttccagacttccagtgtgtgtgtgccagccactactgtacaatagctctcttctttctctcgccgtagcttcgctcgtgctgtgcgtgtgtgtatatataagcatcctgcccccactccttttatctctctactcgtctccacggaatcgatcgatcggtgctttgatctctgagcctgagcaagcggtcgagctcaccaaccgccacgctcaagacaggtcgagtagctagctagctgccggagcggaaaaggaggcggtgcagtggcatggggaggccgccgtgctgcgacaagatgggggtgaagaaaggcccgtggacccccgaggaggacctcatgctcgtctcctatgtccaggagcacggccccgggaactggcgcgccgtgccgaccaacaccgggctgatgcggtgcagcaagagctgccgattgcggtggacaaactacctccggccgggaatcaagcgcggcaactttaccgagcaggaggagaagctcatcgtccacctccaggctctccttggcaacaggtgggcggccatagcatcctacttgccgaagaggacggacaacgatatcaagaactactggaacacgcatcttaagaagaagctgaagaacatgcagggcggcgaagggggcgcgggagggaagcgcccggccgttcccaaggggcagtgggagcggcggctgcagactgacatccacacggcgcggcaggctctgcgcgacgcgctctcgctggaaccttcgccttcggcgccgccgccggctaaggtggagcctctgccggcgaccgccccggggtacaagacgtacgcgtctagcgccgagaacatcgcgcggctgctggagggctggctgcgccccggcagcggagggggcaaggggcccgaggcgtcgggctcgacgtcgacgacggccacgacgcagcagcggccgcagtgctccggtgagggcgcggcgtccgcgtcggcgagccacagtggcggagcgcccgcgaacgcggcggcgcagacgcccgagtgctcgacggagaccagtaagatggccggcagctcggtcggcgcgggctccgcgccggcgttctcgatgctggagagatggctgctggacgacggcatggggcacgctgaggtggggctcatgaccgacgtggtgccattaggggaccccagtgagttcttttaatcaaggccgctgtacaagtaccactaaaagcaaattaatcaagtagagatgcaagaacaaaagggaaaaaataatcgccgagttattaggtaataactagttaagcagaaatccaacaaaactaaatgtatttgaattctcggtgaatttgatcgagttggatgtcgatatagtttttgttttagtcccttcttttatttttttctctgttgtttctctgatgttagggtttgtaactgatcatgtaagcttatactaatgacaggttcctaaatggaccctgcatgaaaatacatcttataaattaaaagatctatacaaaaaaaaaaaaaaaaaactatatatttagaagttataatagatgctcaatcctcaattatattactccaatatttttccttcatcaagctctatatatttttcgtgttattcttactctacta

SEQ ID NO: 146463 - DNA, 407 bp, Zea mays
  Clone ID: MRT4577_65090C.1
aaaaaaaaacccgaaaaagcacccggggtggccccccgggggttaacaactcaacaaaaacccagaaaccaaataacttaggaggcggtttcgggcaagggttacaaaaaggggccccaaccaaaaagctaaacaaaaactagggaacaaaagggactcgctaaggaggccacagaagcccagttaaaacaaaaaaggcacaccccctagttttcactcccgggaggactgggggaccagggacttggaaagggggggaaaaacccccccgccgggaagggggccctgggggaggggggccaacccccggctcccaagaatagctagctgaaaaggggggggggggaaacccttaaccttaaaaacctgggtagcattcccagccagctccaaaacctggggaggaa

SEQ ID NO: 146464 - DNA, 1708 bp, Zea mays
  Clone ID: MRT4577_65091C.1
cattgggtacctcgaggccggccgggcaaacaacactcacatcttacaccagccgcactcccgtgtcctcctctccgagacgagacggacgggacggcaggcaccaccgcaccggcgccaccccacccgccggctcagagcgggggcccggccacccgaatcacacagatcggaacgccggaggaggagcaacgcgggcgcggagaggcccgccagcgaaggcgcagtgcaagctctgggttcccggatccgataccaccggcctctcggcgagtgtgtaatccagcgagcgagcgctcggttttagccgtgagagcgggagatgagtgctctgaagaaatccgacaagaaagccgccctcgacttcgcggcatggagcttcaatgtcaccacgtcggtcggactcatcatggtcaacaaggcgttgatggctacgtatggattcagttttgccacgacattaactgggcttcattttgtgaccactaccttgatgactatcgtatttcgatggttaggcctgagccagccatcccacttacccctagcagatctagttaaatttgtgatattttcgaacttgtcaattgttgggatgaatgtgagcttgatgtggaactctgtgggcttttatcagatagcaaagctgtgcatgatacctgcatcatgtcttctggaggttgtctttgatcatgtacattattcccgggacacaaagctgagcataatggtcgtgcttataggagttgcagtctgcacagttactgatgtcagtgtgaatgcaagaggtctaatcgcggctgttatagctgtttggagcacagctttgcaacaatattatgtccattttctccaacgcaagtactctctgaactcattcaacctgctgggccacactgctccagcccaagctgggtcactcctgctagtgggaccatttgcagattacttgttgacaggcaaaagggtggatcacttcagtttctcatcgcttgctctgtttttcctggcactctcatgcttcatcgccattggtgttaatctgagccaattcatctgcatcgggcggttctctgccgtatccttccaagtcctaggccacatgaagaccgtacttgttctgtcccttgggttccttttctttggcaaggagggcctgaaccttcaggtagtccttgggatggtcctggccgttctcggaatgatatggtacgggaacgcgtctgctaaaccaggtggcaaagagcggcgcagcatcctgccggtgaggtctgcgagtctcaagggaagttccgaagaaaaggccggtgccgagaaatagtcttgctatatctgactgcaaactttttatttagatggggaatttttcgttccgaaggttaaatttctggtgaggtgacgcgagtatcacagattgggagctctgcattatgtttgacgcgcacaaaacaaactcgttccttgtagaaactcaggattgttatagttacaggtatactgtaaaggttcatttttttttggcgctctgaatcatttgcagtgaggggaaagacagacatggttgttacgagtcttcaagacagtttttttatcgaatatataatgcagttgtttgaggaacatgctcctatatttttcgtggtgatgtactgtaggatgttttgatttgcagtaagatattaatgaaagtatagggctgggtttcctg

SEQ ID NO: 146465 - DNA, 2653 bp, Zea mays
  Clone ID: MRT4577_65092C.1
atgtctgaagataagaagactgctaccgagatgaagctgagtctcgatgaagagaagaatctggggtttcttatagcaatgtcgaagaccaatacagaaaaaatcaccaaagagattttagaaggtttatctgaagatactgatgacaacgacagttatgatgtggatagtggtggtgaagactccgaagatcgcccttggcgaccaagccatgcggttttcggagaaaagacttgtccgaaccctgaagaaaatgaagtcatagtgtaccgaagctttttgaaagctggacttagatttcccctcagcaactttgtcgtagaggtgctgaaaatattcgaagtctatcttcaccaacttacccccaaagcaatcataaggctgaatatcttcgtgtgggccgtgagaagccaaggtctggagcctgatgcaaaaagtttctgcaacatacacgaattatcatacgaaacaaaaccttggggtaaggaacagtatcacaataattttggctgctacagtttcgtttctcggtctgggtcaagctgtcccgtgccaacctttcggaagagatggcccggcgactggatgacagaatggttttatgtgaagaatgacctgacagtgcgggaagatatcaaaggtataattatgcgccctatttggcaaagctttggcctgcggaggccgaaggttgaaatgaatgaagctgccgaagaatgccagagagccttcggtgttatttgttcttttattggaacgagagatttggtccaagagcatattgccttcagagtatggccgcttgcggagaaatgggaaatgtcgcaagagaccataaagaaggctgacgaaggtggccttatcaggctgaagtatacttccaagtttggagataaattcgttgagccagatgatgactggctaaaaagtattgaaaatttaagtgatgagctgcttggggtttactcgaaggctgaagatactgcattgtcagcagccttcggaggccgaaaaaagaaaagactgaatcgggtatttgatgcaatcgggtttgtctaccctgactatcgttatcccattcgagggcagaaaagaacaaacacaacctctgcaaaagaagaagctgcaactgctcctagcgagccagaaccgaaaagaaaaaggataaaggtccttacacatcggccacgttatattgaaccagcctcggtgcctaagttcaccggagagactccttcggccaccgaagctgaaaagccaaccaagccaaccttgctgccagaagtcgcagagatggccgaagcgccaacaaggatagaattggaagaaccaaagattttgttaccagaaaccaaagagatggccaaagcgccatcgacagaaaaaatggaagaagtgccggcggtgactcctaaaagaaagagaatggtcaatgtgctagatgttctggaaacaattaaatcctcaagcacacctccgaaaaagactgttgccattcccgaagcgaaaactgaaatttctgatactaaggctccagagcaagaaactgaagctgaagctggaccctcagagcccacgaaggtaaaatccttggaaaccgaggaagaaaaaataacggagccaattctttctgaagaaatcagtgctattgcccccgaagcatcccccaaagtccttgattatattgttcgtcatgcttcggggaaaaaattatcagaaaaagaaaagcaagaggcccagctttacgcccaaaaactgaagtatccaaagggggcgttaatattcaatggcagtggagaagaagactttttgtattgtctccctgacagcaaggagatttctgtctgtcgggagatgagcaagagcttcggattcccaacactagaagacgggctctcggtgctgtcgaaaaacgatctggccgacagcctggcatataatagcttaaagggtctgatacttagcaatgccctcagggcccaaaaagatgccgaagacgaagggtgcgctatagccctgagcaaccttcgttccgaagtaattgaactgaggaacgaaggtctcgaaaaagataaaatattacattcattgataaatagaataaaagaaggcgaagctactattaaagggaactgccgaagagcttcgttcatccaagaaaagatgctacaacaaatcgatcacgaagctgaggccttcgaggaaattttaaatagccgcggagacatatgtgctttctcgggtgccaggggaattgccaccattttggagaaaaagggctgcgagcatgtaaagattttagcgcaatccgaagctgccttgtccttcgaagatgcaagagatccttcggccgaagctagcatggttggtggaaagtttttcaccgatgtctgggataatggtggtcgagaaatagcccgagaaatcattcgaaaaagcgaaaagggtattcacgatgctagagaagtagctgaggctgctgaaaaaagcacagagcccgaagggcaaatagatcctactaaagcgtctccgggccctcacccgaaaggagacgacgaaattaaaaagatggctgaaactatcatggatgaagttgttaatcggctcctgaacgaggctgcagaggttgttttgagagaagattaagtactcg

SEQ ID NO: 146466 - DNA, 2133 bp, Zea mays
  unsure (1)..(2133): unsure at all n locations
  Clone ID: MRT4577_65093C.1
ttttttttttttttttttccccctcactgcaaacgattcagagcgccaaaaaaaaatgaagctttacagtatacctgtaactataacaatccagagtctctacaagggacgcgtttgttttgtgcgcgtcagacataatgcagagctcccaatctgtgatactcgcgtcacctcaccagaaatttaaccttcggaacgaaaaattccccatctaaataaaaagtttgcagtcagatatagcaagactatttctcggcaccggccttttcttcggaacttcccttgagactcgcagacctcaccggcaggatgctgcgccgctctttgccacctggtttagcagacgcgttcccgtaccatatcattccgagaacggccaggaccatcccaaggactacctgaagattcaggccctccttgccaaagaaaaggaacccaagggacagaacaagtacggtcttcatgtggcctaggacttggaaggatacagcagagaagcgcccaatacagatgaattggctcagattaacaccaatggcggaagcatgagagtgccaggaaaaactgcagaaccagagacatggcatggtaagtaagggcactcgagtctgaattccgatccagggaaggatgaaacttatagttgctaacttaatgctaacagtcaataagtaaaatggacgaagtttcagcaacaagaacaaacgatatcattgacaatttgtggaagtttcttgcatagcattcacaagactgtgtggcggactcatgaatcatcacagtactgcaaacattcgaccagatttgtgtcccgggaatcacgtacatgatcaaaaaccaaccttcccagaagnacagagcaggtatcatgcacagctttgctatctgataaaagccaacagagttccacatcaagctcacattcatcccaaccaattgacaagttcgaaaatatcacaaatttaactagatctgctaggggtaagtgggatggctgactcaggcctaaccaacgaaataagatgtcatcaaggtaaatttgtgatattttcgaacttgtcaattgttgggatgaatgtgagcttgatgtggaactctgttggcttttatcagatagcaaagctgtgcatgatacctgcatcatgtcttctggaggttgtatttgatcatgtacattattcccgggacacaaagctgagcataatggtcgtgcttataggagttgcagtctgcacggttactgatgtcagtgtgaatgcaagaggtctaattgctgctgttatagctgtttggagcacagctttgcaacaatactatgtccattttctccaacgcaagtactccctgaactcattcaacctcctgggccacacagctccagcccaagctgggtcactgctgctagtgggaccatttgcggattacttgttgacaggcaaaagggtggatcagttcagtttgtcatcgcttgctctgtttttcctggcactctcatgcttcatcgccattggtgttaatctgagccaattcatctgcatcgggcggttctctgccgtatccttccaagtcctaggccacatgaagaccgtacttgttctgtcccttgggttccttttctttggcaaggagggcctgaaccttcaggtagtccttgggatggtcctggccgttctcggaatgatatggtacgggaacgcgtctgctaaaccaggtggcaaagagcggcgcagcatcctgccggtgaggtctgcgagtctcaagggaagttccgaagaaaaggccggtgccgagaaatagtcttgctatatctgactgcaaactttttatttagatggggaatttttcgttccgaaggttaaatttctggtgaggtgacgcgagtatcacagattgggagctctgcattatgtctgacgcgcacaaaacaaacgcgtcccttgtagagactctggattgttatagttacaggtatactgtaaagcttcatttttttttggcgctctgaatcgtttgcagtgagggggaaagacggacatggtttacggcccgttcggttcttccggaaccgtagcctggaatggttcctagctcaattgtttacctaatttatataagttttgatcaacccgaatg

SEQ ID NO: 146467 - DNA, 136 bp, Zea mays
  unsure (1)..(136): unsure at all n locations
  Clone ID: MRT4577_65094C.1
agnaacatgcctatcatataagttaaaaaccccaggccccattgaacccccttaaacaggggggccctcctncaggcccttcctaaatggaaccttccggggccttaggcccatngtggatttttcaactttcnaa

SEQ ID NO: 146468 - DNA, 250 bp, Zea mays
  unsure (1)..(250): unsure at all n locations
  Clone ID: MRT4577_65095C.1
ccggttcgacctangcgtccgcccagctttcggccggctcaagggaggggttggcctcataacaccnccnncaccnaagtcgggcctcttcgtgggcatcaacaagggccatgtcgtcaccaagcgcgagctgcctctgcgcccgtcccaccgcaaggggaaagcaacgaagagggtgtccattttcatngngcgggggtgggagannttnctnnctttnctccttataaaaancntatcaccnancttc

SEQ ID NO: 146469 - DNA, 838 bp, Zea mays
  Clone ID: MRT4577_65096C.1
gggtaccctcgggttcggccccccaaaccccaatcacttcctcgcacgcatacaccacgctgcctcgcgtcgccgccgcctccgtccactgccatgccttcccgccttctccagcagcccctccctccagctgctccaccgccgcctcccttgcttgcccatagtcaacaccgccgccacgccctcctcaccgccaccatcgcttccgcagtggccgcagtagctttgttgctcttgctcgttgtcctcctccggcggcggaggctccggatccccacactcccgtgctccccgctgttggactccggtcgcccgctccggcgttactcccgccgcacgcttcgccgcgccacgggcgggttccacccgtcccgcctcctcggcagtggcgccgcctcgcccgtctacctcgccaccttccccgacgcctcgctcgccgctgtgaagacgtgcgcgtcggcgcacgagctccacctcctcgcgtcgctccctgaatcccctcgcctcgtttccctccatggctactcgcccggcccgggctccggcggcggcgctgccgagcgcccgctcctccttgtcttcgagtacatgccacagggatcccttcagggcgcgctattcggaggcggcgacgccgctgcccgcgatggccagttcctggactggcagaagcggctcgccatcatccgtgacgtggcgcgcgcgctcgcctttctccacgttgagtgccagccgcccgtcgtgcacggcgacctcaagcccagcaacgtcctcctcgacgctaacttccgcgccaaggtcgtcgatttcggcctcgcgcgcttcaagactcccgatg

SEQ ID NO: 146470 - DNA, 419 bp, Zea mays
  Clone ID: MRT4577_65097C.1
cgccccaccgggggggcggggggcaaggcttcccttgagccaaacaaaggataaggcctctaatcttatattttgcacaccgtacgcacacgcaaaggtttggtatggtcacgcaatcgaagactttctctaatcacacacagattaacaatttgtatggaggctcacccagtagggataactaggggccacctgaaaagggctactccaaaagccgcttacaccccgagcgcacatgtccggccaccaaccaagggcaggactgcactgactgtaatgctccaacgagccattctgtagcatgtgcacaaactaacacacgtgctgaacctaggtcaataacgactcttgacgctgatccccccattgagatgacgcactttattcagcgcttccttgagaaacttcatgacatggac

SEQ ID NO: 146471 - DNA, 122 bp, Zea mays
  Clone ID: MRT4577_65098C.1
agaagtcgcctaattctctcgatcgaattaggcaccatcatcgactcacgctacgtctatagctagtctctcaagcgtataggaatatttcattggatcatggaccgagtgataaggatcat

SEQ ID NO: 146472 - DNA, 264 bp, Zea mays
  Clone ID: MRT4577_65099C.1
aaacaaaactagtaaccttatatggctcaccagatgttcggataagtcttaaataacactttggttttaacgaaaataacctttttaaatcgaccaggcaaacgttgcgagcttagttcagacaatgccgtgaacaagacgagattttttatgtttccactaggtttcccttaagcaaacacagaaccagccagacccattattttttttttggggcagcctttggcaccttggttccaggtggaaccttttttttcacacttt

SEQ ID NO: 146473 - DNA, 270 bp, Zea mays
  Clone ID: MRT4577_6509C.1
atcaccctcaaatactacgacatccacggcggcatcggcctcgatctctactacagcgggcgcttccaccctgtgtgggtgacgtccaagactatccagatcctgaatatatccctactgtaaaactccagctcatggcacgcatacatggtggtcggatagaccattacgggattataggcgtaaagctgagccatgctcatctgatggcacaggacactcagcacctaccagaccctacccatggcagctatggtcacgagctcaacg

SEQ ID NO: 146474 - DNA, 2604 bp, Zea mays
  Clone ID: MRT4577_650C.1
ccggccggttaagttctgcttctgctttgtcttgtcagtctggggctcctgtctgcgttccccaaccagatccaacatctacatctaattcaaggaagattgatgcaaccatggatcagcatagaacatgccagcctgacacatcaagtgtatcatttgatcttcttcatgagcctaaaagtggctcactcttttccttgaaaactcaagatcttgagtttgagtaccctagtcctatcccaaaacaggaggggaaggggatttctgtgaaccagtcaggctcaacatcagtagcacatgagaatttagctacaaagacatgtgtccacccacctactagtaaaattgatagcttgcaaccacttaaggaaagatcatgtccaacagaaagggactcaatcactcaattagagcatctgtttgaagagaatgtggtaaagagaaataacgaagtggtcaatcctgtatctgatgctgaagggattgctgtatcagatgtgttggaatcgttaacagaacaagagggtgaaaaatacagtacacatggagcagattgtgaaaaatacagtacacatggagcagcgcctttacaaaatttggtgccagcttcagccgaggaagaacaaccacaatgctccagtcctattgcattgtccccttggggggaaccaagttactatcagggtgaagctgttgattctgctctatggggcgtccaggatggtaatgacatgtggtcaatgccttcaccaacacctggtctccagccttcatcagaggaggcgagagcggaccatggagatggtgcatttgtcgaaacattaccaagacaaggggacgaaaagacggaacatgcaaactcaagtgcctcaggttctggagtgccagaacaggtaaaaccaaaagcaagcactgcatcaggtccatctctagatgggagcacaaaagctttgggttggcaactgctgggctcatctttagaggggagtgcaaaagcttcaggctggaaaccgccagctttatcgattgaagggattgctaatgcctcaggttcgcaagcattgtatcctacgcaagggagcacaaaatcttcaggttgtcagcgatcaagttcatccccagatgggaatagaaaagccccaggttggcaacagtcaagtacatcaccggtggggagtggaaaagctcatggctggcaacgatcaggttcttttacccagggtggtacaaaagctgcaggttggcaaccctctggttcttctacagatcggagtgcaaaagttgatggctggcaacgaacaagttcatctccggagggaaacagaaaagcttcaggctggcattcatcaggtcgtgagagctcaaagatcacatatggtgccagtgaaaaccgtaaatcattttctagccaccaagcgacgacaccaacagggagacactctttggcaaggaggcagggaagcagcgacaagggtgctgctggttgggaagagactctggggaacacttgggaagcatcaaagagacaacagggaaacagcgacaagaatgcaggctgcggagaggctctcggaagcaacaggacctggcacccatcgtctggtaaccccagtcggagcagccaggggaatcaccaacatgacaggcattctcacggcagtgattcgcggcggggtagctcaaactaccctcggaggtccgaccatcgtcatgaccatggcagtggtggttcgtcaagaccctcgtcaagagggcagccccagaggggagtttgtaaatactacgagaatggccactgctggaagggctccaaatgccagtacctgcaccggtgactgccgtggccgtgggaagcggaacgccctattgcctggtcgccctcacatttttgtatagcagcatatggtctcatcgtagtcagtgaaaggaggaaccgtatcggcgggaccactagttcgtagtagtacatatccttaagagcaggagcatgactaaagattctccgctttggtgcaggaatgcgccccttttgttcagttaaacggagctgtgggcatttgcaaacatggattttctccgtaagccagggtgttgtgcaatcgtacggaatgactactgaagagctgcacgttccattgagaatgacactacggaagaggcgcatgcaaattgtccgaatgcctacagaagagcggctatcggctggcggtagacatgtgaatggagtgctgtccccaaagtgacgcggctaatgggacgaaacctacctcaaacccatccaaacccattgcaaataacttatttttttaacccgacctaatctaataatttaactgaataacccacccggacctatagccagtgggttaaacccattatctaaatccatagaagattcatgtttattaaggccttgttcggttagctctcaatccatgtagattgagtaagattaggtgggtttaaatcccaattaagtcaaagttcttctaaattttttccaatctcattcaatccatgtataatgggaataaccgaacaagccctaaagtggattcgctaccatattctgactttaatttttttacaaaattaattgatttc

SEQ ID NO: 146475 - DNA, 317 bp, Zea mays
  Clone ID: MRT4577_65100C.1
cacgctctcttcgacctcctattctcgctccgtcaacgccgcctccaccaccacagcgcgcaggactccctccacctcgcagaggggttcaggcgtcgtatgtgagactagatggcgctctcaggctccatggagggcatatgggatggctcgctgtatctcggcttggacctctgcgctggcgaactggagtacataaccctccgggtcggcgaggacttcggcctcatctgtgatgacgcggaggctcttcatagtgcggaccttacaaatcttgaaatgggttggcccaacaccattgtcagggacaatacccc

SEQ ID NO: 146476 - DNA, 201 bp, Zea mays
  unsure (1)..(201): unsure at all n locations
  Clone ID: MRT4577_65101C.1
nnntttttnnnttttttttttttttcgaagaaactgaaatggagtaaaaaagttttcttgccttcttacaatcgtaccaaatttacctgtggaaaatactactatgtaaagataatcgtactaaactctgcagcttttttagagcacattacatgaatcacacccatcatacaagtctggatcgggtgctcttatgttact

SEQ ID NO: 146477 - DNA, 130 bp, Zea mays
  unsure (1)..(130): unsure at all n locations
  Clone ID: MRT4577_65102C.1
gcgcggcaggcggncgcccccaccaccagcactgacagttggccaggatcgaccagaagccccgtaccagcgccatcgactcaatctacagattgaagcattgaacgaaggacgatgagagtcagggagg

SEQ ID NO: 146478 - DNA, 397 bp, Zea mays
  Clone ID: MRT4577_65103C.1
ctcgaggccggccggggtatacgggagtcgaccaaccaaccaactccccgggagccgtgaatccttccgcgccaccgggaacatacctctccctctgacgttgtggtctactcacctctcccggatccctttccaccccacctcccagatgcggctggggacgacagcgacagatgctccgcctccaagatgcgctgatctaggtgctgctgctcgaccgaggccaggatgacgtggaacgaggaggcgaacaggagacgatggtctggaaggacaacagcaagtactggtggagctacctgcaccgaagcttagcgctagctcgtgctgcggacagggacggggaatccccaatggcaactcaaggggtgcgagatcatcattgcggcatcatctt

SEQ ID NO: 146479 - DNA, 340 bp, Zea mays
  Clone ID: MRT4577_65104C.1
gccggccgggtccggatcattaacgtagacctcttgtgtccttcctagcttcccctctccaccaccgtgtcatccactcctctcgaccgcgattgtatcgtcgaacctccgccctggagtttactccggctcgcggcacctgctgtgcatagggccagctagcctcgctaattattagtgctataacgacgtgcatgtattatgacatatgaaccatataatgtactccgctagacctgttgctctatccgtcatcaccactgtgtatattcctaatgatgatgtacgtgtttttgacctccgaaaaaaagaaagcttcaaaaccctaattgcgcgcgcc

SEQ ID NO: 146480 - DNA, 949 bp, Zea mays
  Clone ID: MRT4577_65105C.1
ccggccgggaaccatcttttccttatcccctctccctcccttcgttcgccatggcaaccgtgttcctccgttccctcgccatggccatggccgacaccgcgctcccgcccacccacaagctcctccctacggtttccctgccgctcctcccctcgtccacccgcgccgcgccgctcctcctctgcgccagccgccgcctgccgcccgcgcccctcgttgcctcctccgacgccgtcgagacgagcattgaatgggttgacgacgaggaggaggaggctggagaagccttcgacgaggagggtgaggatgttgaggaggaggtgctggcctcaggcgacgagggggaaggggagtacgccgcggtggagccgcccgaggaggcaaaggtctacgttgggaacctcccctacgacatcgaaagcgagggactcgcgcagctcttcgaccaggccggcgtcgtcgaggtcgccgaggttatttacaacaaagagactggccagagccgtgggtttggctttgttaccatgagcactattgaggaagctgataaagccattgagatgttcaaccgctatagaaaccgggcgctcacgaggattcggttttgtaacgatggtgtcgaaggaggaactcgacgacgctatctctgccctggatggacaggaattggacggccgccctcttcgggtgaacgttgcagcagagcgaccacagaggggcttttgatgcggcggtacgagagagatggctgcttgtttgtgatgagagcacggagacacaatggactgaatggaggagcaatggtacaaattagcggaagcggatgctgtcacaagttgctagatctttctcccttagctgcttgacatttggttcttgccacagctttttgatgcttctcttggcagctggacttaatgttttgctattcttgtcgacatcacgagtt

SEQ ID NO: 146481 - DNA, 1325 bp, Zea mays
  Clone ID: MRT4577_65106C.1
cattgggtcattcgaggcctcgaggccgggccggggacttcgccaaaaacgaaaaacctcaccggctccattccaatccatcttttccttatcccctctccctcccttcgttcgccatggcaaccgtgttcctccgttccctcgccatggccatggccgacaccgcgctcccgcccacccacaagctcctccctacggtttccctgccgctcctcccctcgtccacccgcgccgcgccgctcctcctctgcgccagccgccgcctgccgcccgcgcccctcgttgcctcctccgacgccgtcgagacgagcattgaatgggttgacgacgaggaggaggaggctggagaagccttcgacgaggagggtgaggatgttgaggaggaggtgctggcctcaggcgacgagggggaaggggagtacgccgcggtggagccgcccgaggaggcaaaggtctacgttgggaacctcccctacgacatcgaaagcgagggactcgcgcagctcttcgaccaggccggcgtcgtcgaggtcgccgaggttatttacaacaaagagactggccagagccgtgggtttggctttgttaccatgagcactattgaggaagctgataaagccattgagatgttcaaccgctatgacattagtgggaggcttctgaatgtaaacagggcatctcctaggggcactcgcatggaaaggcctccgagacaatttgcgcctgctttcagagcttatgttggcaacttgccatggcaagctgatgactctaggctggtgcaattgttcagcgagtacggagaagtcgttaatgctgcggttgtctatgatagagaaaccgggcgctcacgaggattcggttttgtaacgatggtgtcgaaggaggaactcgacgacgctatctctgccctggatggacaggaattggacggccgccctcttcgggtgaacgttgcagcagagcgaccacagaggggcttttgatgcggcggtacgagagagatggctgcttgtttgtgatgagagcacggagacacaacgcaggaggaacggtacaaattagcggaagctgatgctgtcacaagttgctagatccctcccttagcttcctgattttggttcttgtcgacatcatcatgagttaaattatccaagtaggcttctatgtttgatctatcccgattcccgatgccttatcaatttatcatcgtggcaaatgttttgttggtaaaaccataggagcaaacggagattatttatatctgacgtataaaaccgtacccagtgtgttgcatttaacaaaaaaaaaaaaaaaggccccta

SEQ ID NO: 146482 - DNA, 1440 bp, Zea mays
  Clone ID: MRT4577_65107C.1
tccattgggtacctcgaggccgggccgggattggtttcgccaaaaacctcaccggctccattcgaccattccatcctttccttatcccctcccacttcgtctcccttcctggcttcctttcttcgccatggcaaccatgtccctccgctccctcgccatggccatggccgacaccgcgctcccgcccgcccacaagctcctccccacagtttccctcccgctcctctcctcgtccacccgcgccgcgccgctcctcctcttcgccaggcgccgcctgccgctcgcgcccctcgttacctcctccgacgccgttgaggccaagtcggcagacgaggaggaggagaaggccggagagcccgtcgacatggaagctggggagtttgaggaggtgctagcctcaggcggcgagggtgaggggcagtacgctgcggtggagccgccagaggaggccaaggtctacgttgggaaccttccctacgacgtcgacagcgagggactcgcgcagatcttcgaccaggccggcgtcgtcgaggtcgccgaggttatctacaacagagaaactggccagagccgtgggtttggctttgttaccatgagcactgttgaggaagctgacaaagccattgagatgttcaaccgctatgatattagcgggaggcttctgaatgtaaacagggcatcttctaggggcactcgcatggaaagacctcagagacaatttgcaccagctttcagagcttatgttggcaacttgccatggcaagttgatgactctaggctggtgcagttgttcagcgagcatggagaagttgttgatgctaaggttgtctacgacagagaaactgggcgctcacgaggattcggttttgtatcaatggtgtcaaaggaggaactcaatgatgctatttcggccctagatggacaggaattggacggccgccctcttcgagtgaatgttgcagcagagcggccacagaggggcttttgatggttgtaggatgactgtttgtttgtaatgagcatggagacacagagacacaatggaggagcaatggtacaaattagcggaagcggatgctgtcacaagttgctagatctttctcccttagcttcctgacatttggtgccgctacagctttttgatgcttctcttggcagctggacttaatggtttgctattcttgtcgacatcacgagttgaattgtcaaactagtctcttatgttctatgctgatttgccttaaccagattatcagcatggcaaaatgttttgttggtgaaattaggggtggaaaaaaagaaagaggcgcgagccaagccgagtttgtttttcgagctcgtcgaatgagcgagccgagccgttcaggcttgctaggcttgcgcccggctcgcgagctgtaccaaattaattaatttataaaataacaatggatattgaat

SEQ ID NO: 146483 - DNA, 661 bp, Zea mays
  Clone ID: MRT4577_65108C.1
cgaggccggccgggccgggattcttcgcattacttgattactttactccacataactatcctgcgatcctcaaatgcttcggctagtactctattgtgatgaactactgtgcaaagcatcctgatgttatcatccacatagctggctacatcgatgccactgtctagggtatccttgctgctgatgcatctactcggcaccattaggcaagagcctttccattcatctatgctacacaacgctggaagagaaccggagcaatctgcgagagctccggttctgctgtcctgaagccctccaagacattggcggcgcgatgatcttccatgagacgctctaacttaagagcaccgaagtgaaggcttttgtcaatgaccatcaaagagggaagagtccttgctgtcatttctgccgacaacgtcaccatatgaagactgtgcgaccgacaatgagaccatcacagcagaattccgaccgtactgcaccaaacggtgggctaattgctacaaggaatgtgcctggtttgacatatggtctctatctcttgagactgaatactgccgaacggaaccaattgacgatgtattaaaccgtcagggattgagtacttacgaaatcttctgaacttggtgctagaaaacggcatatagtcatatgtaac

SEQ ID NO: 146484 - DNA, 1232 bp, Zea mays
  unsure (1)..(1232): unsure at all n locations
  Clone ID: MRT4577_65109C.1
ngccggccgggaaaaaaaaaaaataaaaaaaaaaaaaaaaaaaaaaaaaagcgccaccatggcctcctccgtcgcggtgtccctccgcgccctcgctgccgccccgctccccaagtccagccccgccacttcctgccccttcttcgtgctccttgcgccggcgctgccccgacgcctgctccgcctccgctccgcacgccgcctgccgctcgccccgctcgccgcctccgattccgccttcgagtcctccgtcggagttaactacgcggagcccgacgactcggagaaggataaggaggtggagttgttcggatcgggtgacgacgagggggcgggtgagttggtggatgaccattccgtagaggtctcagccgctgtcgaggacgaggtggaggaggaggtcggggagtacgttgagccgcccgaggaggccaaggtctacgtcggaaacctgccctacgacgtcgacagcgagcgcctcgctcagctcttcgaccaggccggcgtcgtcgaggtcgcagaggtcatttacaacagagaaacagatcaaagtcgtgggtttgggtttgtcactatgagcactgtcgaggaggctgacaaagctattgagatgttccatcgctatgatattagtgggaggcttctgactgtaaataaggcagctcctaggggcactcgcatggaaagacctcagagacaatttgcaccagctttcagagcttatgttggcaacttgccatggcaagttgatgactctaggctggtgcagttgttcagcgagcatggagaagttgttgatgctaaggttgtctacgacagagaaactgggcgctcacgaggattcggttttgtatcaatggtgtcaaaggaggaactcaatgatgctatttcggccctagatggacaggaattggacggccgccctcttcgagtgaatgttgcagcagagcggccacagaggggcttttgatgcggttgtatgagagagatgactgcttgtttgtaatgagcatggagacacagagacacaatggactgaatggaggagcaatggtacaaattagcggaagcggatgctgtcacaagttgctagatctttctcccttagcttcttgacatttggttcttgccacagctttttgatgcttctcttggcagctggacttaatgttttgctattcttgtcgacatcacgagttgaattgtcgaaaaaaaaaaaaaaaaaagcggcc

SEQ ID NO: 146485 - DNA, 355 bp, Zea mays
  Clone ID: MRT4577_6510C.1
ctccttatccaaaattattgtaatttaaaatattgtaaaattctaggggggttataaaattccgtttataaacaaacccccccccaaaaaaaaagggggcccttaaaaattgacacaaaaaaaagggggcggggaaacccccccaaaggggaatcaaagaaggggaaaaccccggaacccttattgaaaaaggcgaaaacccctaagttgcccccccaaaaacggggcccctgaaaaagaaacccccttttaataaccccccccttgaggggcaccccaaaaaccccacctctgaaatggcccatcctcaaaaaaggaaccccgccttattttctgggggcccacccaaacgggg

SEQ ID NO: 146486 - DNA, 309 bp, Zea mays
  Clone ID: MRT4577_65110C.1
taattcccgtttctaccgactcttcctcccactcttccttccacacccactctaaagatttcccattatgatatcaatctaattataatgctctttcatacagtctcatacttcattcacatcttaaaccttacaacaacatctcaaccgatacataactgacatactcaacctctacaatgtactataactcactcacatacaccttcactacctcgtcccacatctcacacctcccattgtaatactactacttattctaatcaatcctaatactagcgtacacaatatatctctacactccactta

SEQ ID NO: 146487 - DNA, 304 bp, Zea mays
  Clone ID: MRT4577_65111C.1
agataaacccgactcaacaccatgatttctactagaaccctcctcaggtgggttctctgccagcgccacctccataaaacaacgaggctgcagctgccaccaacccatcttcactaccagcatcgccattaccacctaccttcacctccactcgtacatcaccacccatccactcctcaccggacacctgcaccgacgtccatgtcccgcagccgcttcatctgccgctcccaccatgccactaccctactcaaccgcccacaactcagcctcatgcccatccacacccatacccgcgccaaca

SEQ ID NO: 146488 - DNA, 385 bp, Zea mays
  unsure (1)..(385): unsure at all n locations
  Clone ID: MRT4577_65112C.1
aggttcgtcgcgagggcggacgcagggggaggggggggctttatggaggaagagcctgagacacaccgcccgcgacacagagngcaagaggacaaggacaccaccctcaaaagaagccgcggggatccctgtgaccgagaactgcacaagggtagggcaactacgcttgctgactgggaagtgagctattgcgacgcgatcacacgcgacgcggagggagggtacaccgtggttgcacagaatacacggaaggtgtctgctaacgaggcacccatcatgaagggaagctataaggcacgggagcctggaacacttgtgctaactgtgaacaaccgtgtgtccaataagacgacgctactcgacagatcgaaggtgaagagcacca

SEQ ID NO: 146489 - DNA, 2841 bp, Zea mays
  Clone ID: MRT4577_65113C.1
gccgggtgcggtgtgtgtgtgtgtgtgtgtgtgtgtgtcaccgagggtccgaggcggtcctactccctctgtcttggtgtcttcttgcgcacgccgcttggtggttctcctcctcacggttccatctccgggtccttgggtctggatggaactggagacacggtagaggagcccgcggtttcccttttcccctcccaacaaggtattcctgggttcttgcttgcctttcgagctctgcgggattgacaattctgacaggaccggcgtggaggaagggttgatagggaggattttttggattgatctataagccttttggtggctaacggttgggagctttggaggagaactcgagtccttgggctctaggttggtctggacgaggccggaggaagttgccaatggagccgccgactgggttctgggcctcgcttctgagcttcctcaagttcctcccctacttctgcggcctcctcgtccttggactcatcaaaggtgttttgttgtgcccttgggcatgtctgattatggcgattggaatatctgccctggtcctgggcttatggcctatgcatctgatttggacatactactgcattgtcagaaccaagctggttggacctgtggtaaagcttctgcttcttattgctgcgactgcagtcttgatcatatggttgataattggcatcccgggaagcatatttgctggattggtatatggttttctagcacccataatggctacatttgatgctgtaggagaaggcaaagaaaagccatttgttcattgctttgtggatggaacatggagtactatcactggaagctgtacagtagtcagggacgtgaaagatttgcttttccactcctatttttcacttatggatgaccttcgtcttcagaaacctcctgacggggagccatatgagataagattgcttgatattcctggtgcactaatagcggctgcatttgggcttctacttgatggaataatgttcacattaattgccttctataagtgccccgtgatgcttttcaaaggatggaaacgactgatccaggacatgattgggagagaagggccctttctggagactgcttgtgtgccatttgctggtcttgctattcttctttggccatttgctgtagtaggagccgttctggcatccatactctccagtgcccctttaggtgcttatgctgcagttgtagcttatcaggaatcctcccttatcctgggaattgcctatgtgttctcgtcggtgtctatatttgatgaatacacaaatgatgttcttgacatggcgcctggttcttgttttccaagatttaaatatcggaagggcaaagatgagtcttcacacgggcacagtgttccattatccagaccagcctcattcaatagggagaagcaagaagggaaaaggcctccgtctcgtgttacttcatttaagaacagcattgatgatttcaatccattcaagctgctggaccacctatttgccgaatgcaggaaccagggggaggatttggttaacagaggagtgataacaatgaaggacattgaagaaacgaagtctggcaaagttggcagcggtgttcttaatgttggtctaccagcgtatgttattcttaatgcactccttcggtctgcgaaagctgattctgtcgggctaatcttaagtgacggctctgagattacatctgacaatagacctaaaaacaccatctttgattggttctttgaccctcttatggttataaaggaacagatcaaagctgagaatctcactgacgaagaggaagagtatctgaaaatgcgagtgctattggctggtgatcccagtcgcctgaaaggctctctgcctcatgttccatccttgactgaacgtaaaaaggcagatatagacgcattcgctcgcaggttgcaaggaatcacaaagtcgatatctagatatcctacatcaaagcgccgcttcgacgtccttgtgaaggcgctcttgtcagagctggagaggacgatgggccaatctggcaatggatcccagtcccaggcgcagaggctgcgaaactcggtagcccggatgttgagccagaaatctatgggcaagactgccaacattagggatgaagacccagaagcgcagatgacgagactgtctcgcaccccgtgatcgtctgtttgttagtttgacgatgccgtatcacatgctattccagccttgtacaaatgatgagtagatagaatgctgcggcttgaactgatgctcttacatctcatgtatgatctgtatattttaggcactatatgtatcgtgtatgcaatgtttttttgctcccgaaaagaagtatgcacagaggagcacaataaataaaaatctcaaacaacaaaaaaaaaaaaaaaaaggcccctacgcgcatgtgttttagacaaattgtgggaggttaagctacagcaattgcaaagcacaccggctttggggctcgcatgaaacttgcaccgtattaggtggataattgcaaaaggttgacgcatgttcaaccccgaagaccatccgtgggctggctatcaggcacaatggtgtcatcatcgtctaacagctcctccagcttctttcttgccttcttatagctacgggaaccacggaggatggagctaatgtgcagaccacctttgagactcttctgggcgtgccgtatggccccatcatcatcggaagcctcactttcatcataggctgtagatgaaatacctgagtcagcagaggtagatgaactatcagatgatccttccatgacagttgtggtgtccaattcatcaccacaaccctccctgat

SEQ ID NO: 146490 - DNA, 566 bp, Zea mays
  Clone ID: MRT4577_65114C.1
aaaaacggaagcctcccccaaatattaggggtaaaaattacaaggctccgaaggcccaaagcttaagggtcctatcacccccccagctaaaatcgaaaacaggggcgcccaaacatttttgggggggttttgaatattaagaaacggacggggggtttttacaattttatcattaaggagggggcgggacaaaagcccccatttactttttcgggccaaaaaaacgggcaacgctggccctgtttccggggaacataaaccataaaaggcccccccttattacttggaggcgggaaaccccataagaaagtttcacccccctcaccccggggggaagattcatatccccccctaaggccccgttaagcaaaaatatccccaaaaaccctcccggtgattcatcatgggacaaaaacaggggggagctttttaaagcgggagctacttgctttattggaaaaagggaccgccctatccttcgaagcagggcctaaagcaaattctgaaaaattcgatgggggattggtttccctctgctctgggccaacccaaattttgatgaggcc

SEQ ID NO: 146491 - DNA, 281 bp, Zea mays
  Clone ID: MRT4577_65115C.1
gcagcgcgtccgcggccctccgccctcgccctcgcccctccccacaactctcgcctcctcacccaacgccatcagcgctgcactccgctccatccctgtagcgcagaccttcgccaccgtccctgcccttcctcaccgcgcaatcaccgcccttcccgacgtgcctcggccgccatccacggcatcaccttccttctccacgcgcgcgcgccctcctctgtgcgtgctccgcccccgttctttgctcacccgatgctccgccacctccgtcgcgatagctc

SEQ ID NO: 146492 - DNA, 881 bp, Zea mays
  Clone ID: MRT4577_65116C.1
gtccgctctcctccaacctcctgccaacagcacgcctgcctctctctctctgtgtgtgtgtgtgtgtgtgtgtgtgtgtcaccgagggtccgaggcggtcctactccctctgtcttggtgtcttcttgcgcacgccgcttggtggttctcctcctcacggttccatctccgggtccttgggtctggatggaactggagacacggtagaggagcccgcggtttcccttttcccctcccaacaagggttgatagggaggattttttggattgatctataagccttttggtggctaacggttgggagctttggaggagaactcgagtccttgggctctaggttggtctggacgaggccggaggaagttgccaatggagccgccgactgggttctgggcctcgcttctgagcttcctcaagttcctcccctacttctgcggcctcctcgtccttggactcatcaaaggtgttttgttgtgcccttgggcatgtctgattatggcgattggaatatctgccctggtcctgggcttatggcctatgcatctgatttggacatactactgcattgtcagaaccaagctggttggacctgtggtaaagcttctgcttcttattgctgcgactgcagtcttgatcatatggttgataattggcatcccgggaagcatatttgctggattggtatatggttttctagcacccataatggctacatttgatgctgtaggagaaggcaaagaaaagccatttgttcattgctttgtggatggaacatggagtactatcactggaagctgtacagtagtcagggacgtgaaagatttgcttttccactcctatttttcacttatggatgaccttcgtcttcagaaacctcctga

SEQ ID NO: 146493 - DNA, 1083 bp, Zea mays
  Clone ID: MRT4577_65117C.1
aaatgcgagtgctattggctggtgatcccagtcgcctgaaaggctctctgcctcatgttccatccttgactgaacgtaaaaaggcagatatagacgcattcgctcgcaggtaccgtatctcgtcctcccccttaacagcaatttagccttctttgctttgtgacggcgatgcaaacatccacagttgataatcttttcactctgctgctgcaaaggttgcaaggaatcacaaagtcgatatctagatatcctacatcaaagcgccgcttcgacgtccttgtgaaggcgctcttgtcagagctggagaggacgatgggccaatctggcaatggatcccagtcccaggcgcagaggctgcgaaactcggtagcccggatgttgagccagaaatctatgggcaagactgccaacattagggatgaagacccagaagcgcagatgacgagactgtctcgcaccccgtgatcgtctgtttgttagtttgacgatcccgtatcacatgctattccagccttgtacaaatgatgagtagatagaattttgcggcttgaactgatgctcttacatctcatgtatgatctgtatattttaggcactatatgtatcgtgtatgcaatgtttttttgctcccgaaaagaaaagagtatgcacagaggagaacaataaataaaaatacgcaatcctcaacggataacgccggcgcgcatgtgttttagacaaattgtgggaggttaagctacagcaattgcaaagcacaccggctttggggctcgcatgaaacttgcaccgtattaggtggataattgcaaaaggttgacgcatgttcaaccccgaagaccatccgtgggctggctatcaggcacaatggtgtcatcatcgtctaacagctcctccagcttctttcttgccttcttatagctacgggaaccacggaggatggagctaatgtgcagaccacctttgagactcttctgagatagtgatatggccccatcatcatcggaagcctcactttcatcataggctgtagatgaaatacctgagtcagcagaggtagatgaactatcagatgatccttccatg

SEQ ID NO: 146494 - DNA, 358 bp, Zea mays
  Clone ID: MRT4577_65118C.1
ctagcggctagccacaggttgggcgcctcctcctcttcttggtgcgtttcttattagatacgctggttcatgagtttattattcaaatccttgaatcgaatcgaatgcattgatggatgatcttgctggtttggtttgaagatgagataccccctctatgatttcggtcctagtctgtcatgctttgcggaatggtggtggtgtctgccatgaatcaagtgcttgaacacatgtggatgagaagccgctaagccttcaagtgctggaacacattgttcttgtactctgtactcagtaccttcaaaatactctgtttcatggaatgatattttttcatcttgctaaaacttaagaaaaa

SEQ ID NO: 146495 - DNA, 525 bp, Zea mays
  unsure (1)..(525): unsure at all n locations
  Clone ID: MRT4577_65119C.1
cattgactgaattatgatcctggatggataaaaatcacagttattctatctgatgctaatgttcctggcgaaggggagctttnaataatgtcgtatattcgtggtcaacggaatctccctggatttaatccagacacacgccattgcttatatggcctggatgcagacctcataatgttagtttagcaactcatgaagtacacttctctatattgagagatgtagtctttacacctgggcagcaggacaaatgcttcttatgtggtcaggtggggcatctagccgctaattgtgaaggaaaggcaaagagaaaagctggggaatacgatgagaaaggtgaagctattgttccaaagaaaccataccagttcttgaataactggaaccttcgggagtacttaggatatgagttcagaatggccaatccggctttccagattgattttggacggattgttgatgatttcatcttcatgtgctttttcgttggcaacgattttcttccgcatatggcaacactaggga

SEQ ID NO: 146496 - DNA, 351 bp, Zea mays
  Clone ID: MRT4577_6511C.1
cggggcggacccagccgtccgcccacccttccgataaattttttcaaggagtgtcccagggccaaaaacctaagaaatttgatatggtttggcaactctttggggggatttgttgttgcaaaatttgccctaaagcaccctgaacacgttcaacagttgattttggtgggtcctgctggcttttaataaaaaacagagcttagttttgaggggttaaccaagtttcgggcaccatggaagggcttgctaatgaatcgtttttgggggtccaattttactccccaaagggtatttaggggatggggtccttggggtccaggtttagtccagagatttaccagtgccaggttt

SEQ ID NO: 146497 - DNA, 250 bp, Zea mays
  Clone ID: MRT4577_65120C.1
gaaaataaatttttttttttttttttttttttttttttttatcagacaattgggtttaaattgggtaaaaacttaaaagtcatacccttacgtggaatatatattcgggggatgcagagaatttatggattaaagggggttgggacttgggcacctatttttttactgccgaaattatgtggggtggcacccggaggcgttttttaaaagtgaggattgtccccttgaaacaacgggggggggttacaaa

SEQ ID NO: 146498 - DNA, 1686 bp, Zea mays
  Clone ID: MRT4577_65121C.1
ccggccgggaaaaaaaaaaaaaaaaaaaaaaaaaaaaaaaaaaaaaaaaaaaagaccgggccagggagcctaaaaacttgcccagagcgcctgaacctgcctccgctccactcttgcccccccctggcaccacactagcctagtgagtagtgcagcagtcttgctcggttgctcctacctgtcctgcacagcacaggagcagagcccaggaccgtcggcaaaaggggagcggccatgaagtacgtgctggtgaccggaggggtggtgagcggcctcggcaagggcgtgacggccagcagcatcggcgtcgtgctcaaggcctgcggcctccgcgtcaccaccatcaagatcgatccatacctcaacactgatgctggaaccatgtctccattcgagcatggagaggtgtttgttttggacgatggtggagaggtggatttggaccttggaaattatgagcgttttctggatatcaaattgacccgtgacaataatataaccacaggaaagatctatcaggctgtcattaacaaagaaaggagaggtgactacctaggaaaaaccgtccaggtagtgccacatattacagacgaaatacaagattggattgaacgcgtcgcagtgattccagtcgacggcaaagaaggacctcctgatgtttgtgtcattgaacttgggggcactataggggatatcgagtcaatgcctttcattgaagcattaggtcaattttcataccgtgttggacctggaaacttctgtctcgttcatgtcagtcttgttccggttataaatgtagtcggtgaacagaaaactaagcctacacaacatagtgttcgagggcttagaggacttgggctagcaccggatgttttagcatgtcgcagtacacagccacttgaagaacacgtgaaaagatccatgaagctattttgttagacccagtgcgcgagtaaaggctcgagaacccaattgtgaatggactgaaagagtcgacactgcactgcattgagtcaagcaagctctccgcttttcttaggattggtagcagcgtcatcaggtcagcttgatcacctgctccaacctggtcttatcagttcgactggcagacacacctgcagcaaaggaggagcgcaaaaactaaaggctgggcacgtcatgaagccactgaatggcctggtgaacgcacactattcagcaaccggcaatggcgccattcccatctagcagcgcagagctgcgacgcgtcgcgtgcttgtttgggatttctcttctaccgttactgcttgttctttttttttccctttccttcgagggtgttcttccgtacgttctaccaggccaactgagaagaagagaagggctgtttgctctagcgacacgggcagccgcgtttccgatgttttaacgtggaagcatttggcatggaagctgtcgcatgcatcaagaggcaaatctagcaggttagctagagtttgattagtagtggtaatccgatatatatgctggttgatttgttcgtttgtttgctaagattacaagggccggtgatgtgcagctagctggtagtgtagcctgccgtctcgcctcatttgtacattgtaaaacaactgctactctccattgactgactgaatggacgagtataaacgtattggaccaacatgccgtgtgtgtgtttagttt

SEQ ID NO: 146499 - DNA, 1101 bp, Zea mays
  unsure (1)..(1101): unsure at all n locations
  Clone ID: MRT4577_65122C.1
cgaggctggcacggatatgtagattttaatcccacaaccagcaccttgaagacaactgaggttctatttaaccccctcgtctcccccgcgcccgggagcctaaaaacttgcccagagcgcctgaacctgcctccgctccactcttgcccccccctggcaccacactagcctagtgagtagtgcagcagtcttgctcggttgctcctacctgtcctgcacagcacaggagcagagcccaggaccgtcggcaaaaggggagcggccatgaagtacgtgctggtgaccggaggggtggtgagcggcctcggcaagggcgtgacggccagcagcatcggcgtcgtgctcaaggcctgcggcctccgcgtcaccaccatcaagatcgatccatacctcaacactgatgctggaaccatgtctccattcgagcatggagaggtgtttgttttggacgatggtggagaggtggatttggaccttggaaattatgagcgttttctggatatcaaattgacccgtgacaataatataaccacaggaaagatctatcaggctgtcattaacaaagaaaggagaggtgactacctaggaaaaaccgtccaggtagtgccacatattacagacgaaatacaagattggattgaacgcgtcgcagtgattccagtcgacggcaaagaaggacctcctgatgtttgtgtcattgaacttgggggcactatagggggcaaaatcttttcgccgaataacgccagtggcattcttggtgcaggggatatcgagtcaatgcctttcattgaagcattaggtcaattttcataccgtgttggacctggaaacttctgtctcgttcatgtcagtcttgttccggttataaatgtagtcggtgaacagaaaactaagcctacacaacatagtgttcgagggcttagaggacttgggctagcaccggatgtttangcatgtcgcagtactgagccactggaggaacatgtgaagatcaagctttcacaattttgtcatgttccgatctcaaatatagtgaacctccatgacgtgacaaacatttggcacatccccttgctgctaagggaccagaagaccatg

SEQ ID NO: 146500 - DNA, 344 bp, Zea mays
  Clone ID: MRT4577_65123C.1
caaggcaaaagggggaaacaccagccggaaaaacagggggggaataaaagggccgggggaaaaaacaaatttaaggggggggggggggaacaggagggaggccttcccttttaatggaaagagatttcccaagaagcaacagtgcccttgaacagggttttttgggggggggggaaacaaccgaaagggcaggggggggggcccccaaggaatgaagggggattctgccaacgggcccccggggggggagggggaggtcccagagcccgcgcacctttgcgtgaggcccccaagcgccctcggggcctgtagggcattcgggcccggggggcccgagccgcccc

SEQ ID NO: 146501 - DNA, 264 bp, Zea mays
  Clone ID: MRT4577_65124C.1
gtcctctgaaggggataggcccgctttttcccttttaccggggttttttgttaaaaacaggtccccctaacccctaaaacacttctcaaaacccacagccggagcgtaaaacgttatgcctaacataacaggttattcctcagtcccttatttagcacagtttgccccacataccaggtgggttcctttttccccatttttacccaccgttaaatttatgggaggacaccacctcattttttaaaaattacagggccttttttt

SEQ ID NO: 146502 - DNA, 757 bp, Zea mays
  Clone ID: MRT4577_65125C.1
aattcggcacgaggcctgcaccagtccccccgccccttgcacttccaggcctctccagtaccattcgggcggctaagctctgagctaaaccccgacggagtgagcgaggaaacgttctccgtttcactttcccagcacccagaatcctgcagaaatcaccctttccacccccacccagcgctgctcggatccccgggcgagcacatcctccggtcctcgcttgtcggcctctcctcccggggccggtccagcgggttgcatggtgcgcggccgctggttgtgagcccaatcgatggcctcggcggaggcgcgccgcctcgcggtcgtgccgcagctagatatcgagcagatactgaaggaagctcaacaccgatggttacgccctgctgaaatatgtgaaatactgaaaaactacaggaacttccgtattgctccagaaccaccaaacagaccaccaagtggctcactttttttatttgatcggaaagtgttgagatacttcaggaaggatggtcataattggaggaagaaaaatgatcagaagactgtcaaggaagcccatgaaaggttgaagtctggaagtattgatgtacttcactgttactatgcccatggggaagagaatataaacttccaaaggaggacttactggatgctggaagaggactatatgcacattgtacttgtgcattatcttgagactaagggtggcaagtcgtctcgtgctagaggaaacaacatgattcaagaagctgct

SEQ ID NO: 146503 - DNA, 338 bp, Zea mays
  Clone ID: MRT4577_65126C.1
aaatgggaccgaaaaaaaaatcggccggaaacccttgtataggaacttttccgaacgggagggcgggggccacgggactacaaacccaaattccggggaggggaaaacggaaatgggcgagagctttattggcccctgcccttccaggaggggggttcttttggggggggggacccccaccgcctttgggaggaattactaaatggggactgaatttggaggccatttttctacccggccccttttgggagggttttaaaaaccccaccatggggggggcccctccctggggaaaaccctattcaaagggggcctttgggggggaaccctttttaaaa

SEQ ID NO: 146504 - DNA, 432 bp, Zea mays
  Clone ID: MRT4577_65127C.1
gagcggtcgtccttttttttttttttttttttttttatactctaaaggtgacattattttggggttattttttttattttaacctttgtgctttaattatgcatgcatatgctacacctatagtatacgcatacaaaaagatgccccccgttttaaaaaaacaatatgggggataaaaaaaaaaaaaacccccacgaaagcaaaggggggccgaccaacacgcacacccaacaatccccagaacaagcgcgcggggcaacatgtactgatgaaccctgaaccgaccaaaggagacgaacgtacttcacaggtcgaagctgtggctgttgaaaaggaaaaacgcgccggtcctgcttttggccgcccccaaacacggggggcggaggggccgcgccctgcactccctcggtacgctaaaaagcaaaccctggg

SEQ ID NO: 146505 - DNA, 273 bp, Zea mays
  Clone ID: MRT4577_65129C.1
cggctcgagcaaggcagctaagcgagagttcaagagcaaagagtttgtgtctagtgatgagagctcttcgggagagaacaagagcaaaaagaagaggaggaggagcgaggactctgaagaagaagaactagccagtactcccccagctcagaggactcagcgtcaggatccgatgagtagaaacggaggaaggttctctttgcgcttgccttctcacaccccccgactccccacccatattttggtaccagtttctcctcatgaaatgcagtc

SEQ ID NO: 146506 - DNA, 757 bp, Zea mays
  Clone ID: MRT4577_6512C.1
ccggccaggaaaaaatacatcatcaactctaactactccaaaaagcccttcgaagcagccaccaattgagtgccgcgacaacaccacaagaatcctcaaaagacttcaaaatggcctcaattgcgcgttcctctctgcttaggcagaccgctatggcttctcgattggccactgctgctatcccagcgacccggagcacttccatgcctagcatccgaactcagcttaagggcgttgctgctttccacaacacgacccgacgatctgctattctccctcccggacctcagcgcattgagggtggaatcaacgaacctgctcccgttcccgagcccagctccacccacggttcttaccactggactttcgagcgtttcctcgctgccggcctcgtccccttgaccgtcgctccctttgctgctggctctctcaaccctaccctcgacgccatcctctgcagtgtcctcctcctccactcccatatgggcttccagcaggtcgtcatcgactacatcccctcaaggacctaccccggtctccgcaagactttcaactggcttctcaacattgctacggttcttgtcggcgtgggactgtacgagttcgagaccaacgacgttggtatcaccgaggctgtccgacgagtctggaaggcgtaagttggtagatggctaattgatgtatgtatatgaagggagcatattattggcagttttacttgccgcgcaggtttatgactgcgggcatctgtatagaa

SEQ ID NO: 146507 - DNA, 405 bp, Zea mays
  Clone ID: MRT4577_65130C.1
acgcggacgcgtgggcagaggctagcaacgaacgcgatcgcgcgccgacgacgacgcgcggtgccggtgcctggtggtgccacgttgcggactccgctgcatctcctcgttcggccggcgtcatatcatgggtgttccattgtcggtggcgtggtacgccgtgctggccctcatcttgcgggcggccttgtcccaggcgtgctcttccatgttaaagttgggggactggatggtggacgccacccacctggcgcaggagggaatgccggactagctatccactgcgcgactgacctaccgaatgtgcgacttagggtacctcaccagtcactggttcgacaggcggctcgaccatgacttcatatttgaggagctgcgcgtgcccctggtgaaggggtccatggc

SEQ ID NO: 146508 - DNA, 461 bp, Zea mays
  Clone ID: MRT4577_65131C.1
cccaaccatctctctctagccgccagccatctcctatcccaacgctagcttcttttcccagccacaacatgtgagctcctcctcttaagccgttgccatctccctcctcggccacctttaccggccccctctacttcctggctcccaagcttcagccatggagcacgacccctccttgcctctctgtagcgtcaggacctcctccgagctcgacaaggatgtgctgtgtctcccccagtaccgaccatgtcgagctccggtgaccccttcccacagcacagcacgccgacgcccctgcatatgctcctccaccggggttctcctccagcagcacttccccgtagcgtgagcttcgtcgagccgttgctcccttcgtccccagcttcggcagccgagctccaaccagggacgtctagcgcccaggacgtacggccccctgctcctctatccacgacgcagag

SEQ ID NO: 146509 - DNA, 162 bp, Zea mays
  Clone ID: MRT4577_65132C.1
aatgaaatgacgagcaccgttatctcattggtgggctttttctttgccaccggggctatcagagaacatgacagcttcatgtatgtgtactataccataaaatgcagacatgccagtacgaagatttatgcggaattgtaacccttgagctttgtaacattc

SEQ ID NO: 146510 - DNA, 362 bp, Zea mays
  unsure (1)..(362): unsure at all n locations
  Clone ID: MRT4577_65133C.1
ttttcctttttttcctccctnngctaaaaaaaacaaagcgaggagcatattcaatttgaggggcgcctcctttaactatccaagctttcttacgcattcatgcctcatgtcaactattacctatgcttcattaaaaacaagtcctggtcaactactgatcaaagcctcaacgatgaaaacaccaaattctccaaccttactgaggcaaaggtggatcttgacaaatcttcatgacgttctcgtgaatagggctttacaacttttcattacaaacaagccattaacgatactattgaaggaaacaatccactgtacttcgacataaagaacatcactgttgattaaactcacccacaaacacc

SEQ ID NO: 146511 - DNA, 390 bp, Zea mays
  Clone ID: MRT4577_65134C.1
gtacctcgaggccggccgggacagcatcacatcacgggtggagactcaagactagctgacacgggcgagaggcatgttgcactcagccgcgtcatacgtgcgccgaagctcttagtactaccagttgatcgtagcgactatggtgacaacgacggtgctggcggcgctgctggtggacgccgccctcgccggcggcgcgcgggcgcagctcaaggaggggttctacgactactcctgcccacaggcggagaagatcgtcaaggactacctgaaggggcacatcccccacgcgcccgacgtcgcctccaccctgctccgcagccacttccacgactgcttcgtcagcggctgcgacccggcctggctgctcaacgcgatgggcctgagcga

SEQ ID NO: 146512 - DNA, 727 bp, Zea mays
  Clone ID: MRT4577_65135C.1
catggagaaactcgttgagcagattccttgttcctgcagtaaccctgtccaacccccgcagcggcggcaaccacagaaacactgcctgtaaattccattcctccgcgttcggcctccctcatcgcgcgaccgttccctctgctcgaatcggcaagcccgcatttcgagccccggaggtggccgcgaaccctaaccctacagcgaggcgtcgccggagttgtgggggccccgttggccatgtcgatggactcggacagctcgtcgcacagcggcgccgactacaggagtttccgccagatcacccgagaccgtttgttagttgaaatgctgagatcgactcgaaagagctcaaaatcatcatggaaggttctaatcatggacaaacttactgtcaagataatgtcattttcatgcaagatggcagatatcacagaagaaggggtttcattggttgaagacctatacaaacggaggcagccattgccttcaatggatgcaatttattttatgcagcctactaaagaaaatgttgacatattcatgtcggacatgtcaggaaaaaattcattgtacaagaaagcttatgtatttttcagttctcctgtacagagggagttggtagctcatataaaaaaggattcgactgtgctaacacgcatcagtgcacttagtgagatgaacttagaatactttgctattgacagtcagggcttcataactggacatg

SEQ ID NO: 146513 - DNA, 254 bp, Zea mays
  Clone ID: MRT4577_65137C.1
cgtacgaaagcgttcatgacacagctgtgaaggtggtttatattgatgacacattccgtctacaggagcggcctccttatgacaagaaatcatttgtgtcttacatcaaaatatacatcaagaatctcactgctgtgttctagccagacaaagctgttgagttcaaaaccggtgttgagggtgcaaccaagattatccttagctagctgaacgacctgcaattttaatgcggccagtacatcaactatgattca

SEQ ID NO: 146514 - DNA, 263 bp, Zea mays
  Clone ID: MRT4577_65138C.1
aagatgtggttgctggtagtgtctacagctcttttgctttcagtcagcctaggagacttctcatgcgaggcgtttacttggcaaggcgacatttactttcgatcttactacaacggccaaggtctcttcgattacaccatcggtgcaggaggagacattttctccatgcgtgataatcttcgtaactacgctctgctgttatctcctccctacatccccggtcttgaaacagacagggtgatccaattagtatggtgggatgg

SEQ ID NO: 146515 - DNA, 403 bp, Zea mays
  Clone ID: MRT4577_65139C.1
agccaacaaggcaacaacaaacacctccctccttcttcactttcctgccgatgttgcacgaagcaagctagggcacacaaaccgacaaggccgtctacgcgcgcgttggtcgttgtcgttgccgaccagcatgcatgcagcatggtcgtgaacaacaaggtggacagcttgtcttacgacgtctaggccacgccatcctttttcgacggcgacggctctgtgcaagggacaactccggcgtacccagcttcggcgcctgcaccagcaacccaagcgcccgtgtcgcgggaaggctgcgccgcgttggtgcttgagcttcacaaggtgtcgctgttcgagcggtggactacagcaaaggcgctgtggcagcgcctggacgatgtgttctttccggacgacccgt

SEQ ID NO: 146516 - DNA, 268 bp, Zea mays
  Clone ID: MRT4577_6513C.1
gaggaatcctacttggttacaacatccctcccaaccaactctgactctaaatgaattggatgcacgcagttctattctgttttatatctaactcaaatcatagttggtttctaatatagcctaagagaatcctggacaactaagaccgtagcctatgtataacatattctaacaaaagctgcctggcctaagcagctgagattgtgctgcctggccagggcaaccaagctgcctggcctagttgtaacatattctaacaacgtttact

SEQ ID NO: 146517 - DNA, 2145 bp, Zea mays
  Clone ID: MRT4577_65140C.1
ccgccgccgccccccaccggccgccaccaccacgggaacccgctgcctttgccaaaacccaaagccaaatcctttgccaaacccaccgccgccgccgccaccacctccgccgccgccgccaccaagaccaccacccttgccgaatccggcacccatgccatgcccacttccaccgccaaggccatcgccgccgccaagaccaccacccttccctctccttcctcacatcttccttcgtcagccgcagatgcgccagcatctctcccacgggcaggaggaggaggagcgagaggcacagtgacagacagagagagagcgcgcgcggggggagcccagcacagcacctacactagctagccaccggccaccaccaccaccaccaccgaccgaatcgggtgcgcgcggcgcgctgctcgtcagctccggccggccggccgctttataaagccacccacccagccccgcccgatcgccatcgccatacccccgcctccgtccacggacacacacccgccttgccagccggcaccctcccggcctcccccacctgtgtcctccggcctcgccgccgcaaaacccgccgcgcaggccggttgctccgattgggagtgccaatcggagccaacagcgagggaagcacatgctgccgttcgtcctagagttcctcattgatgtcgcctgtgatcagtgagatcctcctctcggggtttatgatcaactccacactccggcgccgcacccacctggtccagtccttctccgtcgtcttcctctactggttctatgtcttctcatgaactactcgcccccatcatagccacgccccttctctcccactcctcctcctcctctttcccttccatctagtagcatctaccgtcctcctcttctctccgtgtcagtctctgccttcgtcgtcgccgtttcagtcgttccctaaaccttctttagcttgcatgcacttccctactgctgctagcaaagacctttattactagtgtcaattaagttacgaaagaagaagaaagaaagaaaatttcgaggccgagaaaaaagacggctttgatctctgctagtgtggtgtggtagtgtgtgcttctagtaagtaagcgagccagggatcaagaagcagagagctgctctgtctcttttgtctcttgcaagaatggcttcctccagcgggagcgggagctcgggctccctctcggcggcaacggcggccctggccgccgcggcgggcacggaggaggagctgcgcgcgctcatggagcagcgccgcgcgaagcggatgctgtccaaccgcgagtccgcgcggcggtcgcggatgcgcaagcagcgccacctcgacgagctgaccgcgcaggcggcgcacctgcgccgcgagaacgcgcacgtggccaccgcgctcggcctcaccgcgcagggcctcctcgccgtggacgccgagaacgccgtcctccgcacccagaccgccgagctcgccgcgcgcctcggctccctcaacgacatcctcgcctgcatgaacaccaacgccgtcggcgccgtcgccgtctccctcacagccgccgccgccgccgccgccgcttcctccgacccctgcctcgccttcgacggcgccaccgccctggacgacctcctcagatcctgccccgagaacatgttccagtaccagctctgctagctccagaccgcgcgaagtcaccatggcagcgcaaaacaccttcttttgttttgttttgtttttgtttttttttcttcttcttcttctggtgtttcaggtttagtaatctgctagtgagatggaagaactgaggtcagatcagacgtggtggtgactagccatgaaagtgaactttactgttactgtactgtgcgatcaactggtgggggtaattagctagctagctagctgctggggttatggttaatgcatgaactgctattagttaccaggtgtaagtgtaactctcgagtcctgctcttgttactgtttgtgtactgactgtgtcactccactactatgtaagaatcagagcagtaagtttactagtgtctctgctgtcaaacaaaggaagtgcaccatataatctacactttaattactcttgcctgtgtgccctgcagcgatcaaaaaaaaaaaaaaaa

SEQ ID NO: 146518 - DNA, 304 bp, Zea mays
  Clone ID: MRT4577_65141C.1
atgcgttcgatcatacgtacgatctagactgcctcatcgggctcgccggtggtgacaggatgatgtctgcgaccgatggcaggaagggcaaggacatcactgacgcggctaacagaagcagcagaatcacggagcacactgcttctaacaagaacatgcatgtctggataccccacatcgattctgcgattccacaacgcctaccacatagttagatacgcgtaccaggacacaaacaagccatgtaagacatctgacacagtaaacgcttgtaatcagtcagggaaaaaacatgcaagccgtg

SEQ ID NO: 146519 - DNA, 285 bp, Zea mays
  Clone ID: MRT4577_65142C.1
ttttcttgttccactcacgtaagtttctatcttgagagcatagtccaaagtgcaaaacttggtgtttacaaggaaaattgtcttccagaactccactgtcatcactttcaccaaagtggaagtttgcatgaatatgctcagaatctaatattcaatgttctggtacattgtaagtgaaggccagctacaaaatagatttaatatattgaatttatttgtacatatgcagagtaacggtatttctgtatggaatctgctttattcctatttttcccaactctgatg

SEQ ID NO: 146520 - DNA, 500 bp, Zea mays
  Clone ID: MRT4577_65143C.1
gggacccctcgagccggccgcgctgcagcctgcctgtcaatctcgatcgatcaaggggtggcgtgccgagatggcggaccggccgtcgcttcctgctctcattattgctatcgccgttcttgctggcagttactgccgcgtggcgagctcggcctcgccggcggtggaagatgagctgcgcggtggaggaggagccggcggtccgacgacgatgcggcggcgcgcggcgtcggtgatggtgcccatcaccatcctcaagtccgctgttagcgacggagctgtgtgcatggatggaacgccacctgcttaccacttggatcctggctccggagcgggcagcagaagctggattgtgaacttagagggaggtgcgtggtgcaacagcgccaagacatgccggctcaccaggagctccggccgtggctcgtcggaccacatggacaaagagatccccttcaccggcatcatgagcagcagccgtaccgtgaatcctgatttct

SEQ ID NO: 146521 - DNA, 675 bp, Zea mays
  Clone ID: MRT4577_65144C.1
ccaggcccaacccaaactgaactcttctccccccgacccaaaccccagccccgccgccggccaactccagtcccttcgccgccgccgccgccgccgcgtagacgcgaggacgcacacgcatccgctaccaccgcggccatggtcctctcccaccgccgcttcctccttccaccccggcctctttgccatcggcgccgtcgcaccactgccggcccctgctcgagctggtcaggcggcgtgcagatccgccactgccacagcgtcgtcgtcctccacaaccacgcagcggctcctcgcccgcgaccctcttctccagtttgggggcaaggaaggagaagcctttctcgctcgatctggcgaggatggatgcgcagcaaggtgcaccaccgtgatgatggggattcattcttgctgccacgattcgtctcgtcgtcctccccggcattcgcataggtcaggctcgtggggacggtgagtggcaaggcggggaggaacacggatatgtcacttcatcagatggcaggtaggaggtacaacggccagcgaccgggacgacaccaacagccaaaggaagcttgaggtctgctccttctccaccagtagagaggagcctcctttttgggttccgcgtgtctgctccgagcctaccagcgccgatgccatggaagatttact

SEQ ID NO: 146522 - DNA, 258 bp, Zea mays
  Clone ID: MRT4577_65145C.1
ctcatttggtccccggtgtgccgcaacgacatttcctggcactttgagacgttcctggtaggtccagacggtgttccagtgcgcagatacagcaggcgctttcgcaccatcgacatcgaacccgatatagaagccctgctgtccacgcagcctagcaacccctaaggcattcctggtatctgggcttggtgatggctggctgccctccggggggaggtttttccatgacggtgtttcctctaaatttacatggagaaa

SEQ ID NO: 146523 - DNA, 581 bp, Zea mays
  Clone ID: MRT4577_65146C.1
ttttcaggatgaagtgcaaatgatttgtactcgtcatttgtttgttctttagtaatacagcaacattgtacagttgttattatagaaaaaatgaacagtggtgttgtttcttcgtccccgcttcgggccctggactaattttatgtacaggcgagacagctatactccagtttctgttatatttacacgcaaaaactacagcagccgtggcgtgggcatgtttgttcagtcatctgttcaaacattcccactgtacatgagcacgaaagctcctagaccttggaattcgcaaaggaaaccatttaatggatggcaaccagatagcgagactcctggcacagcatctctgtacgtacagaaggtgtttcaaagcaggttctgcactgccgcaaattatactgcaggtcctctttgtcagtccagcacgacagcttcacaaagatgcaactttggcagagcagcagtctcattccaaaccttatttagcagacacacttgccttttctttttccttttccagtttctttttctcagcctcagcgtttcgagcattttcatcacgtgattttttgaacatattc

SEQ ID NO: 146524 - DNA, 835 bp, Zea mays
  unsure (1)..(835): unsure at all n locations
  Clone ID: MRT4577_65147C.1
agaacacgtacacttgacatgaaaatggctcttctaacaagcagatgtgcccctcggctgcctctgcggatctgtcacactgctagggctaggggagggctgctggtgccgcctcagctgctgctgcctcgtcaggataactggaagaagctgctaccactgcagcgcccgcccgcccctgcgcacccgcggcggctgttctgctcgttcagcgattttctgaaggcagcggaagccggtccagcgcgtcatggcgcgctactgtcgttcgccgtggcccggaacaggctccaggacgccgtggcggggaaccaccgggaccgggcgctggaagcccttgcggagctcaaggcgttcgccggcagcgagcactactacggcgacggctacagagcgacggagcttctcttggcggcactgtcgcctttggctcggctgtgcaagggccaaggactagtagtcgacgacgacggcgccgtggtgactaaggaatcactggcggtggcatgcctgctgctgcggaacgcttctgcggagatcggcgccacactgtgcgaggaaatctcgcaggaggaggacgtcaaatccagcttggagaggatccgagaccgaagtggttgtgattgtgacgaggtgcgcgagctagcaaacgagattctcgcacggctaccctcaactcccaattaactaggctcagtctgtctattgcttacgcgatttcacctccatcgtgtgcttcgatcgagagcctcacttgtatttttccctttcttttttctaataaaaaagtcgaccatcgnntgtgaaaaaaaaaaaanaaaaggcccctaagggc

SEQ ID NO: 146525 - DNA, 291 bp, Zea mays
  unsure (1)..(291): unsure at all n locations
  Clone ID: MRT4577_65148C.1
gtacaagnncttttttttttctttttttttttcttttttttttttaagaaaaatcatttactttcttgtattattcctaatcaaggagaaaaatgcgatggcacgccgacttcaccatgggcaacaacacaaaggctaagatcgagcaagcaccaccggcggggcggccgaagaacaaacatggagaaggccgccccgacagaggggcggcgcccaaaacagggggagaggcgcagggcccgggggcggcccccgctaaagaaagctttcgggtggccccggggcggggcc

SEQ ID NO: 146526 - DNA, 937 bp, Zea mays
  Clone ID: MRT4577_65149C.1
ctcgagccggcgccagaacacgtacacttgacatgaaaatggctcttctaacaagcagatgtgcccctcggctgcctctgtggatctgtcacactgctagagctaggggagggctgctggtgccgcctcagctgctgcctcgtcaggataactggggctcagcacccgtcgtctcagcatgctcggcggtggtggccgccgcaagaggcgctagtgctactgctgcagagaagaagaagctgctaccactgcagcgcccgtgcgccccagcgcacccgcggcggctgttctgctcgttcagcgattttctgaaggcagcggaagccggtccagcgcgtcatggcgcgctactgtcgttcgccgtggcccggaacaggctccaggacgccgtggcggggaaccaccgggaccgggcgctggaagcccttgcggagctcaaggcgttcgccggcagcgagcactactacggcgacggctacagagcgacggagcttctcttggcggcactgtcgcctttggctcggctgtgcaagggccaaggactagtagtcgacgacgacggcgccgtggtgactaaggaatcactggcggtggcatgcctgctgctgcggaacgcttctgcggagatcggcgccacactgtgcgaggaaatctcgcaggaggaggacgtcaaatccagcttggagaggatccgagaccgaagtggttgtgattgtgacgaggtgcgcgagctagcaaacgagattctcgcacggctaccctcaactccaaattaactaggctcagtctgtctattgcttacgcgatttcacctccatcgtgtgcttcgatcgagagcctcacttgtattttccctttcttttttctaataaaaaagtcgaccatcgtgtgatatatatatataaaaaaaaatatatatatatatatatatatatat

SEQ ID NO: 146527 - DNA, 935 bp, Zea mays
  Clone ID: MRT4577_6514C.1
tctcgccctcgctcacctacagctccgtccgccagcgtcagccaggctgccccgggaggccgggaggaagcagatcggagaaggtgatctgttgtgatggctcgattgtacatcggcaacctggatccccgggtgaccgctcgggagctggaggacgagttccgcacgttcggggttcttcgcagtgtctgggttgctcggaaaccacctggctttgcgtttattgattttgatgataagagggacgcagaggatgcaatccgtgacctagatggcaagaatggatggagagttgagttatctcgtaatgccagcggtggtcgtggaggtcgtgaccggcatggtgggtctgagtccaagtgttacgagtgtggtgagactggtcactttgctcgtgagtgccgtttgaggattggttctggaggtctaggcagcggaaggcgccgaagccgtagccgtagccgcagtcgcagtcccagatatcgccggagtccaagttacggtagaaggagttacagtcctgcagcacgctctccaaggcgtcgtagcgtctcaccagctcgtggacgcagctatagcaggtcaccacagcacaagggtgcacgtgaagaatctccctatgataatggataccgccgcagcaggagctagagccagatcgttgtatccgacgacgagcgttatgtgacagatattgggaaagctatggtcaataacctgcttgacagatccttcgtcgactgcttgactttggttaaggttctcataactttctatatacctattatcttgtgtctactttataagtagcagtaaaaccttttgatgagtgtatttgttgaactaagacctactgtcttttcttgtgtggtaaaaaggcatcgtcctgcactgcttaaacgactcggccgactacggctttcagttcccaacac

SEQ ID NO: 146528 - DNA, 497 bp, Zea mays
  Clone ID: MRT4577_65150C.1
ggggggaacacctgaatttggtgaattttaaaaaaaaaatttatacccccaaattcagggggttacattagttcaaatgactcaacctgaaacactacacgttgataattacttattaaaaaccgaactacaagaaataaatcaactttgggctttcatgtttttaaaaactttgttttattgagggttttgtttaaagggttttttggcccccaataaaaattgtaccaagttcccaaaataaaccactccaaaaaaaaaccctttgggggtaaattttttgttgggtaccctttgtcgagtgtatttgccgctgattccaatagggattaaaggttttggaaaaacttattatttttctcatgaaatttgatgcaaaatggacctcccataagggtttgtttggaaaaaagggatcggacgggattaaatgagctaaaatttttactattcaaaattaaatagggagggattttagtcccttcaatttttccaaa

SEQ ID NO: 146529 - DNA, 162 bp, Zea mays
  Clone ID: MRT4577_65151C.1
cagcccagcccgccctgcaccaaacctgctcctgctgcttctgctcgccctcgccccctgctgcgctttgtgccatcgccatttgcgatatctctcgaggacatagggcaagacgagcggaggagagtccacagacaccgctcacctagcgctccgcgaagg

SEQ ID NO: 146530 - DNA, 170 bp, Zea mays
  unsure (1)..(170): unsure at all n locations
  Clone ID: MRT4577_65152C.1
aaccgcttttgttgattactgtattccgttcgtaagttacgtcgcgggagctacgctaagtctacgcccatcagcccctgttttcctaatccgcttctcctgctntcggngatcttcccgcgccgcttcacgccaggactccttctacgcgtcttccttacgtcgtctct

SEQ ID NO: 146531 - DNA, 534 bp, Zea mays
  Clone ID: MRT4577_65153C.1
aattcttgattctagactatctatgaagagctaattataaatataactggatgaaaagagagagcgcgcgctatggccctctacctatgacctatgccatacatcgcatcagtatcgagctaacaggcaaattgactacttattattccataatatgctcatgaccagaacatataaatggcggccgcatgctgaacggacatgatatataactgagcaacatggacagcaggaagctggagagcgtgaacaagacgtgtacattcaacctgatgggcggagacatcacaccctctgtgttgggatggaagcttgtgcagggaagcctcggtctctttgttactgatggtagtgctcccggtctgagctaggcgacaagcacgacttacgggctcaagcggagctgaagtagagatcgacgggagacttaactggtacggccgtcatgggtcacgcgaggatgtgacacacgcgcagaaccatcggtgccagaaccgatgttgacttgaaggtgctaaggaacgatatctattg

SEQ ID NO: 146532 - DNA, 2415 bp, Zea mays
  Clone ID: MRT4577_65154C.1
agaattcccgcgactccaccgccgccgggaggatccgcgactccaccgccgccgggaggatccgcgcctccacctctgcccccaccggccggatccgcgcctcctccactgcctccaccggccggatccgcgcctccaccaccgccggcgggatccgccactgcgccgccaccggtgtctccagccccgtcgcgcacctcatccccgtcgagcccctactctccacctccgcatgatgaggtcctcggcgcgcccagtgcagtggcgagctgttcatcgcaggaggccacggcggcgagctctgatgggcggatccagctacaggagggaaaggtgttcgtgcagctcggcgcgaaggagcagcgggaccctacgtcctggatctgcgacaccggggccacgaaccacatgacggggtctcgggcggcgttcgcggatctggacacggcggtgtctgggtcggtgcggttcggcgatgactccatggcggagattgaagggcgcgggaccgtgctgttcaagtgcaagaatggcgagcatcgctctttcaccggcgtttactacatcccgcgactcacggcgaatatcgtgagcttgagcctcggccagttggaggaggccgactacgacgtccacctccggcgcggtggcatggaggaccgggagcctgaggggcgactgctggcaaggatcccacgcgcaggcaaccggctgtatgtgctcaacgtcgacgtggcacggccggtgtgcctggcagcgcgcggcgaagaaagtgcctggcggtggcatgccaggctcggccacatcaacatgcccgcgctgaggaagatggcgcgggaggagctcgtccgtggactgccgtccatcgagcaggtggaccaactctgtgaggcgtgtctcgccggcaagcagcgacagtcggcgttccctgaccagacacagtggcgggcggagcgcgcactggagctggtccacggggacttatgtggacccgtgacgccggcgacaccgagcgggaacacctacttcctgcttctcgtcgacgatcggagccgctacatgtggctgacactgctgcggtccaaggatcgagcggcggctgccatcaaggagttccaggcacgtgcagaagctgagtccggctgcaagctactggcgctccggacggatcgtggtggcgagttcacatccaaggagttcatggagtactgcgcggcggacggcgtgcaccggcagctgacagcgccgtattccccacaacagaacggcgtcgtcgagcgccggaacgccatggtggccggcacagcacgctgtctgctcaaggcaaaggggctgccggcttggttctggggagaggcagtgaacactgccgtgtatctcctgaaccgggtaccgacgaaggcagtagaaggcaagactccgttcgaggcgtggtacgggaagaagccggcggtacaccacctgaagaccttcgggtgcattgtctatgtcaagaatacgacaccgcacctgaagaagatggaggatcgtggccgcaagatgatttccgtcgggtacgagcgcgggtctaaggcatatcgagcctacgatccggccacgaagcgcgtgcacgtgacgcgcgacgtggtctttgatgagtccgcccagtgggactggccggagggagctaaggccggcactggcgcggatcatggcggcgacgacaccttcaccatccaatctggggtggtggcggggcaaggaggtctccaggcgggggcaccggtggctgctatgcagcatatgacgccaccaggaacgccaggggaggccggagtagcttctccgggtgtgcagttcgccacaccacctgctgcgttagacgaagacctggacgccgaccacgacgacgacgcaccactacggttccgaaaggtggaggacgtcaccggcgctgcgtcgacaccggggtacgccgcgcgcgcactgtggaacgagcaactttttgcagtgagtgcggaggagcctaggtcgcttgcacatgctgggcaggacccatgctggcgacgggcgatggaggaggagctgcgtgccatcgaggacaaccacacctggacgctcactgagctgcctcctggccggcgagccatcgggctcaagtgggtgttcaaggtcaagaaggacgagcacggtgccgtggtgcggcacaaggcacggctcgtcgcaaagggctacgctcaacgccaagggattgactatgacgaggtgtttgcaccggtggctcacttggaagttgtgcggctgctgctggcgttggcggcgcaggaaggatggcaagtccatcatatggacgtgaagacgacgttcttgaatggcgatctccaggatgagatggagctgaaaaactggtggtgggagtttatgttgatgatctaa

SEQ ID NO: 146533 - DNA, 183 bp, Zea mays
  Clone ID: MRT4577_65155C.1
atttgatacctgttctctgccaaagcatgtcaatgagatacttcttgccttgaagaactttgtttactgagagagacagatgatctaggaaagatattattacaaaaagtagaaagagataaatgccagatattaggacatgctatgtttgtgggaatgtggaggtgggatggagagtgacta

SEQ ID NO: 146534 - DNA, 823 bp, Zea mays
  Clone ID: MRT4577_65156C.1
attccgcctccgccctttaaccccacaaaaccctagacttcgcagcgagcagccgtcgtccgatccccacagaaacaccaaagcccgagccatgtcgtcggcgtccctcgccgccaggctcctccgccgcgccgcctcttcgtcgcgggcctccaccctatcccgacgctgcgcccactcctccgcgacgtcccgcgcgcccgtttcgcttgcccgtttccaccccgccgccgcctccccttcagggaccactgcccgccgcttcctgtcgtcgcagtccccggcgtcttcctccaagatctccccggacgagaacctgaggcgggtcatcgactccgagatcgagtgcgtcgtcgaatcggaggagggctccgcgcagcaaattgatccaccagaagacttcccctttgagataattgataaccctggtgatcagtccatcgttctcaaaagagagcttgcaggagagactattaaagctactgtctacacaaattttgatactgaggaaaatttgaacaatgaggactctggtgctgagaatgatgatgactcatttaagccagcacttcagatggttgtcactgttgagaaaccaggaggctcaatcctggaatttgagtgcaactttaatgatgatgaactggcaattgaaaatatgaggttgctgaatcgcgatgccaagtttactgagaatgcatatgaggggccacaattctctgatctggacgagagcttgcagaagtcctttcacaggtatcttgaggtgagggggatcaagcactcgctgcatgactggctgcacgagtacatgatgagcaag

SEQ ID NO: 146535 - DNA, 276 bp, Zea mays
  Clone ID: MRT4577_65157C.1
ataaagatttaatttcatttcttcaatttgctctcctcttctaagtttatagctttcgtgctagcttcatcgatgttccccactaaataaaaagcctgttcggccaggccgtccaatgattcggaaaggcttagttgaaagacgctcactgtggggcggcgacactcaaaagggtcctgaggtaagactgatattatttgggatctgcatgtgctgtttggatgcgagcgggtgaaggaagtgtggggtttgcggagggaagggccgggggggggg

SEQ ID NO: 146536 - DNA, 399 bp, Zea mays
  Clone ID: MRT4577_65158C.1
ggcccctcccgcaataagttaaagacccactttccacatatttttctggcccgaacaatacaaaaaataccccacccccggaaaaatggttaaaattatgggtttgttcttgggcaacgacaactggccggaaacccttttttaaaaaaatctcccggcccttattttggcaccatggacaaataaaatgcgggaagggcccaaaaaaacttgctgggcgggggggggaccaaccaaattaaagatggtttcaaacaaaacccgacgggaaaagcctgcctcccccgctcgttttaattttaattacccagtcggtctgtgcatccccctgtatttaggggtcgcttttaaactgcaaccgccggggggaaaccccatcttgttgtttttgacctcgta

SEQ ID NO: 146537 - DNA, 551 bp, Zea mays
  Clone ID: MRT4577_65159C.1
cttggatttatgtaacacttcaatgtggctaatttttttatgctatctccatttcatttgcatatttatttgttatcgactcacaacacgtgattgttgttagaaatataaataagagtcatcggaatatcctagatctaattcaataaggacttttcttgtactccaaatctacatatatgtaaattaattaataggtggtcgaggtggaggcgctcgtgggtaagctagatgcgatcggctgcaacagacaacctgcgatggacggggtctataggtgatcaagcgggtacgatcaagtgtcaacgtcctggtctagaaaggcaagccacatccgactccaccaagtgcatagatcaactccaacaatattaactacaccatctatatcgataaccttgttcaccattagcctacgtttatcatcaccgatgatcttcatcaacatcatgagcagcgagaccaaatgcaacatatcataaggggtatgcataatgattataaaagactagtacgtacttttgataaatctactattacaaattttcctt

SEQ ID NO: 146538 - DNA, 409 bp, Zea mays
  unsure (1)..(409): unsure at all n locations
  Clone ID: MRT4577_6515C.1
aggcgaaacatctctcaaacgatacgaaacggcctcgccgctcagtctcacgctaatccccgccggcaccgatcgcccgcactaagcagacagcgcgcacgtcgacgggcggcaatgcgccgcagacgcatctggcgaccaacgcggcgcgcaagatggacccggccactcggggcttgaagaatccgcaccgcttcctcccgggcaacgtggcgctgcgggagatccccacgtattagacgagcactgacctgctgatacggaagctgccgttccagctgctggtgcaggagatcacgcangacttcaacacggacatccggttccaatcctcagccgtggccacgctgcaggatgccacccaggcctagctcgtgagcctcttcgaggacaccgacctctgctccat

SEQ ID NO: 146539 - DNA, 345 bp, Zea mays
  Clone ID: MRT4577_65160C.1
cgttagtttgtgtggagaacagagaccgacactacattctccagttgtctaagcttaggattcgaggcatcaaggtccacatcgtggctgcagcaacaagtggggaatattttgtcgaccagtctaccttgcttataccagtcagccatgtagaaagctttcttgaaatgctttgtttttctcggataccttttttttgaaaggtttctttggttaactgaagcggtggaaaatctgctgctgcatcatgcaagttaacgatagaatatttttaattgtttagatggtaaaggttagggcttgtttggttcctttagtgtgtgtttggtttagctgtgagctttg

SEQ ID NO: 146540 - DNA, 532 bp, Zea mays
  Clone ID: MRT4577_65161C.1
cgctattgatataattttatatggcgtccattgatgataaaccttatactaacacctcctgacctgttacatatgctgcagatagcataacattcattcataaagctggtcaccacctttcatccccttatacaccaagatcgcgccctcatttcacagttctaccacatgcctaccatgtcgccaaacgccctgatgctcgaggcccattttcataaggcggaacgacagatgctaaccgaagtgccttaaaccatgctggtctaacaaccggggaccagagggtatatcgccagatctgaatgcccttactatcaagctttttaacaccctgcttgggtacccagactggaaggaaaaagatacccatagaaccacttttttgaatacaaatatgcggcattagacaaacaaaacctagagctgtaacctcgcgctgcttctatcttacctactaccaggccggcagtttatatctatctgctccttgacatactcaatgctttatctaaaagcacggaaatgcactcca

SEQ ID NO: 146541 - DNA, 395 bp, Zea mays
  Clone ID: MRT4577_65162C.1
ggaccgcggtaactaggcgcgtccaaaagcggtagagtcgactgaccacatgaccgtcttcgtcttgcaaaatcctatattatccagccgaaatgggtcgtattgatttgccttgcctatattttctttgatctcgctgttctcattgcatttgattcttcatggggccgtatactcgcctgctttccttcctgattataatgtacatatgcctctaatgcaataccgtctcaatcaaatttagacccctcctagagtcctagttgccacttgccagccgactaccccatgatgatgactgcgcatcattccttcgtttcgggctttcggcttcggcatggaactgtatgtgatggcttcggcatggaatattttaagtccagagagagagagag

SEQ ID NO: 146542 - DNA, 123 bp, Zea mays
  Clone ID: MRT4577_65163C.1
gaaattttaattccaaaaacattccattgtttagctgataattattttgagtcactcttataaatctgcaactttgatgtttaatctgcttacattattatgaaatagttccttgtcaacatc

SEQ ID NO: 146543 - DNA, 367 bp, Zea mays
  Clone ID: MRT4577_65164C.1
ggcttgcaaccaaccttcgtcgtaccaacatattttttaaacattgtcttacagttccactggcaacaaaggcatagacccccgttgtgttggtgataggttgccatacataaccactaaaccaccgggacaaaaggtaacgcatacgactggtttgggtttcctgcatcatcaccacaagccggagacctggcataaaaaaaaattaaaagcaaaacgaaggtgggaaacactccattcacgggagaacaagtaacgcgggtagcacatgctaatgcgatgcacatagtttttttaaggaagccccaggggccatgagcagattgtcaaggttccaaatatcggcggcggctccgccaccaccacc

SEQ ID NO: 146544 - DNA, 242 bp, Zea mays
  unsure (1)..(242): unsure at all n locations
  Clone ID: MRT4577_65165C.1
gatttataactagtgcctttgatgctgctggctgttcttgcgtgagagtttattatttccatcggcaccattcactgcagggcggtgcgcggcgcgcggtcagcgagtttacagacccttttgtctttctcgctcgctttcaacgctcgcgaccggctgtncctgcgcacgtttccggcggccgaagcgagtttagaaccccttttcgaggctcccgagcgagacctacgggcgatgcgggc

SEQ ID NO: 146545 - DNA, 866 bp, Zea mays
  Clone ID: MRT4577_65166C.1
cccaaccaatgagacgctgcttaatgggcattacaacatagtgtttgtagtgttttttgcgcgaagctaattgcggtccgtctcttcattggaactcatagcagtaccacacaaccagtgagaccataccactaattttattataccactagaaccagcttctcactagcttctcaccaggggtttgactttgtaacataggagatacagtgtgctcttctggaacttcatccccaacatcatcctcactgatcttgtgcagtacttggcacttcagtgacggcttcaaatacaacattatctcctggattgtgactctgttttggggtcgtggctatatcagtttgcatattatctggagccttctgaggcaactcttttattatagcatcagaatgtaaggtttctatctctatgggtagatcactgactgacgcttccttttgagtgtaagcttgctcaatgtcgcccacttgctgagatgattcttcagatacagatgtagcttctgcaccttccccaatctgattcacatggacaattagctcaacatcaatatttactgctttctcaagcctgtcaacttcactgacaaatgtcaacttccatggaatccttaggagctttggacatattcaaacctagaggaaagacatgatcacatggcagcaacaatcatttacttttgtggaagttgtagagtagctttattaaatactccctccatttatttttctaaagtgtatttggattcgaaaaaagaatgtagagtatactttgactatcaattactctcatgtaatatgccatatattgcagtaaagccaacttgtgttaactaaaaaaaaaaaaaaaaaaaactcgag

SEQ ID NO: 146546 - DNA, 374 bp, Zea mays
  Clone ID: MRT4577_65167C.1
gacacacgaatctacactcatgccgctaaccctcgcactagtggcggcaatagcaccacaagtaacggcagcacgaaacagtacagcggagaacagcggtactgacaacagcggcggtgatggtaaggcaggtattcgacacaatagcgcaccagccgaagccgaagacaacggcactgggttgccgccatcactgcaatggatcaagagcttgttctcacgcatcggcacaatcctccggtcattccagcggcagatcgcatcattgggagaattgagcaatacctcaatataacgataggcgactgttactgcttgagcccattggtgccaatgtacatacgaacatcacgagcagttctgcatgcaaattt

SEQ ID NO: 146547 - DNA, 404 bp, Zea mays
  Clone ID: MRT4577_65168C.1
aattagactcgagggcttttacagttatagagagcccatatgctgcacggcttgagttagaggcacctactgatcaattctaataagcgccactgtatcactgcatgcctgatactggcggtggcacacaactgcttatggtggtgatggccactcagacagcgtccgcgacgacgtgccaccaacgcggagcatcacgccggctgctgtggcaagtgacctgccactacagcgcctgtaactgccgcactttcccgacatatggctgggcgtgctgcagcacttgctggtagctagctagctagctagctagtgtgaattcttccgtgcgcgcgcgcgcgcagcctttgcataaccctcttgcttagctcatgttcagtaatagccggatgcttgcctcgtcg

SEQ ID NO: 146548 - DNA, 263 bp, Zea mays
  Clone ID: MRT4577_65169C.1
ggaacataataaaaggataacatcagttgctccaatggaacacacatgactgttcaaagcttggaaagggcaaaaaatttttagggaatggaaatttttctagacagaccatgtggagggataaaaacttgggatgtgtaatgggcgggttttttgaccaaatacatggaaataccatgccttgtttcggtatcttagtaaataaaccttttcaggttgttttatacaaaaaaaaagtcgctctttttatttcccacgttttt

SEQ ID NO: 146549 - DNA, 1089 bp, Zea mays
  unsure (1)..(1089): unsure at all n locations
  Clone ID: MRT4577_6516C.1
cattgggtacctcgaggccggccgggcggcatctcgccctcgctcacctacatctccgtccgcaagcgtcagccaggctgcccccgggaggccgggaggaagcagatcggagaaggcaagccacggatttccttctcgccttctggaccccatgtgatctgttgtaatggctcgattgtacatcggcaacctggatccccgggtgaccgctcgggagctggaggacgagttccgcacgttcggggttcttcgcagtgtctgggttgctcggaaaccacctggctttgcgtttattgattttgatgataagagggacgcagaggatgcaatccgtgacctagatggcaagaatggatggagagttgagttatctcgtaatgccagcggtggtcgtggaggtcgtgaccggcatggtgggtctgagtccaagtgttacgagtgtggtgagactggccactttgctcgtgagtgccgtttgaggattggttctggaggtctaggcagcggaaggcgccgaagccgtagccgtagccgcagtcgcagtcccagatatcgccggagtccaagttacggtagaaggagttacagtcctgcagcacgctctccaaggcgtcgtagcgtctcaccagctcgtggacgcagctatagcaggtcaccacagcacaagggtgcacgtgaagaatctccctatgataatggataccgccgcagcaggagctagagccagatcgttgtatccgacgacgagcgttatgtgacagatattgggaaagctatggtcaataacctgcttgacagatccttcgtcgactgcttgactttggttaaggttctcataactttctatatacctattatcttgtgtctactttataagtagcagtaaaaccttttgatgagtgtatttgttgaactaagacctactgtcttttcttgtgtggtaaaaaggcatcgtcctgcactgcttaaacgactcggccgactacggctttcagttctgtcttcatgggntntgttctgcgctctacattcttcgcacgccctcgcatgcttcattcagtctgccgtgtgttaacctgcctgcgtatc

SEQ ID NO: 146550 - DNA, 313 bp, Zea mays
  Clone ID: MRT4577_65170C.1
ccggccgggaagccaacaatcaaacctgcagaaatctccttcataaacactatactcaacaacagccagctcgggaaaataatgaagaggcgcataatgcaatcatcggccgcgctcttgtagctagaccgtcgagctagtgacgtgcaccgtcccataggaagcgtaggttaagaagaacagagcggcgaagacggcgagcgctgcacgggaacaactccaggacaacttctgctcgacgctgtgggacgacaagaaggatacggacctgctcggggggaacgagtactgagggctctgccagcagtgcaac

SEQ ID NO: 146551 - DNA, 366 bp, Zea mays
  unsure (1)..(366): unsure at all n locations
  Clone ID: MRT4577_65171C.1
gtggnaatttgtatcgagtagttcaatcattagggcgcgaaccattttattttgtatgccaccaaccaaaaagagaccagcaccgccacgcaggccaccgtaaacctctgcgtggcccccgaaaaaaaggccaagcccaaggaaatccaggccccggaacagaacggcgagaacgcccacagctgcagctgcggtgacaactgcaagtgcaacccctacaacaactgatcacatcgatcgacgaccatggatatgattataatccatctaacaagaacaagtagtcgaacaataataagccaggcctaactggctgccatacataggtattgtgtggtgtatgagagagagagagaaaccctcttc

SEQ ID NO: 146552 - DNA, 609 bp, Zea mays
  unsure (1)..(609): unsure at all n locations
  Clone ID: MRT4577_65172C.1
gtgcggcgctcgaggcggccgggtgcgactatcccacttctatacacatccacaccgagctcataaacacacaccgatctagaatctatctgacaaacttcggcatcccatcacccacgcataacacctccaaactaccgccaaaatttccttcctgcgtcacttcttcacgcgcgccccctcgcccgccacaatgtccgctacaaagaccaaggtccagtccatcatcgacgagaaccccgtcgccgtcttctcaaagtcttactgcccttactgtcgccaggccaagcagttgctcagcgacagtggcgcaaagttctacgcgattgagttggaccaagttgatgacggctcagctatccagtctactctcggcgaaatgactggccagaccaccgtacccaacatcttcatcgctcagaagcacattggtggaaacagcgatttgcagtccaagaagggtcagctcaacaaccttctcaaggaggctggtgccgtttgactacctgcaacctcaacggccaagctatagctattacaccatggcataatgcgaatgaaaataaatcatcaacgtcaaaaaannnnnnnnnnnnnnnnnnnnnnnng

SEQ ID NO: 146553 - DNA, 733 bp, Zea mays
  Clone ID: MRT4577_65173C.1
cattgggtacctcgagggccggccgggaaaaaaatacaaaaaaaaaaaaaaaaaaaaaaaaaaaaaaaaaaaaaaaaaaaaaaaaaaaaaaaaaaaaaaaaaaaaaaaaaaaaaaaaaaaaaaaaaaaaaaaattttttaaagggggggttgggttttcccctccccctccggttcggggttcggggttcgtggaggtttctccggggttccggtttcggggggggaagggaatcgaaaatggggggcgtcggaattgttaagaaccgcttgttttcgtcggggggctctcccttggggccacggaaaaaccacttctctccaaaacgcttttaagaacttaggggagaggtcctcgaagtcaaaaatcatcctcaatcgggaaaacgaaaaggtcccggggttttcggtttcgtcactttttccacggaggaggggatgggaaaccccatcaagggaatgaacggaaaggagttggacggccgaaaaatcaccgtaaacaaggcccagtcccgcggcgcccgtgaaggcggcggcgggggtaacgggggggcccgggaaggcggggtttacggggggggggggccccttaatggcggcggcgtttacggggggggggggggttacggggggggggggggttacgggggggggggggggggttacggggggggaaaccggggggggggttacggaaactccgacgggaattggaggaattgagggggggggcc

SEQ ID NO: 146554 - DNA, 1022 bp, Zea mays
  Clone ID: MRT4577_65174C.1
gtggggggtttgttttttttttttttttttttttttttttttttttttttttttttttttttttttatcgagcaatcagccatcaacgcttgtggtgaaacaccacaatgcgttagcacctgacagacagccttgtatttgcaaatctaacaacaattactgtatgtgacttcacaaagatcaaaagccatagttgcagtgactcttcataacagttcattgatctctctatggtagtacaacatgcaaatgggaagtggaatacatcgtcttcatctgctccatgcagcctttggagcatctaatttatacctcagcaacatccatacaaaaatctcatcttgaaccatcaataaagaacaaattgggtaacatgaacaatttaacataaaatgccaagtcgccgatcacaaggctgatggatcgatctagacgacctttggaggcgcctccagcatgagcttctcgatgaggtctgcagcgtcctgcaccgtcgcgatgtcctgtgcgcttgtttcgtcgacggttatgttgaacgccctcctcgaggcccatcacaatctcaaccgtatccagtgaatcagcaccaagttcggcgaattttgattcaccagtgatagcagtcccatcgggaagagccagctgctccttcactatactacagaccttgtcgactgtctccttcttagccgaacagcaaatcttgaaccgaagagaacttggtcttgaacggatggatacagaagtcatcctgtggctctggaaggaaaccgagctccggcttgaaatcacatttgtcacctggcgccgcgcggcggccggcgagaaggaggcggcgagggagtgcgccatgctcgtcgctctcggatagggggcggcggcgagggaaagaggcgctagctgcagctagtctagtgggacaggacagaggtggccgtgaggtcgtagcaggccaggagcagcagctatcacacggtgggagcgtagtgcggcgggcgccccgcccggcctcgaggtaccca

SEQ ID NO: 146555 - DNA, 391 bp, Zea mays
  Clone ID: MRT4577_65175C.1
tttttttttttttttttttttttttttttgtttggtttttttttttttttttttgttcgtaattcaaatttttcgtttattttgtgggtccagtcataagttttacaagtaggttgattttagtagagccatctttcacccaaacaaaatttattttgaaggggggcagaaagcacaagtaaagcaaccgttggggggggcccgacaacaaccccccgatggacgacccattaactggcgccatgcacaacccaaaaaaaacgcacgcatcggggatgagagacatacacatgccccgcccggggggtttttggctgaacaccacccgcctgagcttaacgagcaaaatctttggcggccaaagaactctttcttggcaaggctgaggagg

SEQ ID NO: 146556 - DNA, 192 bp, Zea mays
  unsure (1)..(192): unsure at all n locations
  Clone ID: MRT4577_65176C.1
cgacccacgggnccgccctcttggggcccgcgnncgncccgcgcgcggagacgcacanncnancngncaagcgacgccgcggccccgaccagagncggaggcgaacacccccanggcggcggccggcggcggcgcaggagggaaggcaccnncaagaccanccccacctccgaccccaagctccctttcaaa

SEQ ID NO: 146557 - DNA, 542 bp, Zea mays
  Clone ID: MRT4577_65177C.1
gcatccccacccctcctcctacagtgctttccggcgtgcattgcatcgctctcgatcagtagctcttggcagatcgtgcgtcgatcagccgttgcctccacgggctaggccgtaaagaagaatccgggagagagctgcagcaatggcactgcagatgcaggccccgtcgctgacgcgcgcgccggcggggagccccgcgcggctccggtcggcgttctgcgcgccgccgctgcttgtgcgggtccggctgccagcgccgggcagggcgaggtccgcggcggcggcgcggatcacgatgcggttcggccgcgttgagacgaagcaggcctacatctgccgggactgcgggtacatatacaaggacaagaccccgtttgagaagctgtccgatgactactactgccctgtctgtgccgctcccaagagaagattcaggccttacgaaccaccggtggccaagaacgccaacgccactgatgcccggaaggcgaggaaggagcagctcaaaaaggacgagaccgtggggaaagctttgcctattg

SEQ ID NO: 146558 - DNA, 700 bp, Zea mays
  Clone ID: MRT4577_65178C.1
ttttttttttttttttttttttttttttttttttttttttttttttttttttttttttttttttttttttttttttttttttttttgggccaacaaaaaaaaacccttttccttctcggccaaacacggaggtcccggggggggggaacccggaaatacccccaaccttttttcagccgggggtcctaaaaaaccctaaccatgccggcccccaaggggccagggcctccttttcacccagcccatccccctttccagaaaaaaccaaagcatcatggggccggggcccaaacaaaaataacgggggagtttttgggggcccccaacccaccttgtttgcccgggcaaaagaggaaaggggggacctttttgggacggaaagctaaaaagctttttttaaaagggccccaaggcaaaaataagggccagtacccctgcctgcttaaaggggggaccctcccgttgttacggctcctgtttaaccagaaaaaaaaatttgcctcaaggggcaaagctcgattttgggaccaggcaaacctttgaaattccagaaaaggcccaaaagaaaggttgaaaaaaccttcaagtataaggggggctggagagcatttactgggctgaccattaacggcgccctattggggggcctcccccaggaggaaacccggtttcccgtggaccttataaaaaccccgcacat

SEQ ID NO: 146559 - DNA, 135 bp, Zea mays
  Clone ID: MRT4577_65179C.1
catatatctcatatggcagcatcgtctacgtgatatttcaatcggctctgaagaaaaatctcggggaggcggttctttgaagacgaacaagccatacaatacatatggtgcttctcgtgagcgtcattaccttac

SEQ ID NO: 146560 - DNA, 278 bp, Zea mays
  Clone ID: MRT4577_6517C.1
cgcgcacctcctcctctggttgggcctcctcgtcggcttcctacgggtacggccatggcggcggttcgtggcgacggactcctacgggtgcaggtgccggcgccggcgcctcggtggggtcaattgattgggaattcttactgaaggcggtcactcggcgagggttccttatcaatctttgattagccagtgtattgctatctggggcaacttttcttgattggactattttagaaatttggaagatgaataacaccgggaggatgcgatggagaagg

SEQ ID NO: 146561 - DNA, 714 bp, Zea mays
  Clone ID: MRT4577_65180C.1
tcctccttccttctttccctcgtccgcttcgcttgtgcgcggtacgccgctcccgctcatgcctcggttatgcagctggtaccagcagggcctggccgcgcacccgtggcgcacttaggacgtcagctccggaatcctctgggcgctgcaggacatcgagcgcccagaccgtcacctactactccgctaggcccgaccgtctcggccacgacggcagccctcccgaccccgaggtgaaggagaatgactacactgcagagtgtagagctgcttgccacagggtgggtctcactagctccgtcatgattcgctatgtgctggaccggttgtgtcttactggtatgagtacctgaatcgcatactcctgctgaggattccacctaacacgtcctgactccactcctgatcatgaggcgcggatgcattcctcttcggaccactagacctcctcctgatcatctcatatggtggcctgaaccacggataggactctaaaataagtgaaggcggactgtgaagatgcgacctcattccgaggtctgctgctacgcgctactcatctgaccagctgtgcagatcgggaacttccgcttcgataccgcgccctaccaggtcccgtctgtgaacttggtctgacttccggacagatgatgcctgcctggtagtgatcatcatgctgacgcctcctggaagcggtgccccacttccctccag

SEQ ID NO: 146562 - DNA, 162 bp, Zea mays
  unsure (1)..(162): unsure at all n locations
  Clone ID: MRT4577_65181C.1
cgtcgtagcttggtcctctgngcggccgctcgcgatctagggtggactccgacgacctgtcgcagcgcgccaactggctgcgcgcggcggtgcttggcgccaacgacgggctggtgtcgacggcgtcgctgatgctgggcgtgggcgccgngnnggcggncg

SEQ ID NO: 146563 - DNA, 248 bp, Zea mays
  Clone ID: MRT4577_65182C.1
cccgagcaggtacatagagcatccgagacctcgtcgaggggcgacgagcatacgtcggcccggcacgcgtctcgccttccttcaagctacacccgaggcaggtgctcgatgcttgcacgttcgcgcaagggagaagcattgagaacaggcggaccgacgacgaacaagggtggtgtacgtacaagacgtggtggacgagcgagcatggcggaccttctacaacgaacttcaagatcacgcctgaaggt

SEQ ID NO: 146564 - DNA, 184 bp, Zea mays
  Clone ID: MRT4577_65183C.1
cgtaatgcagctcgagctcttgtccgagcgtttcgtaccgacctcatttagaacagaacatgaacagcagcctctgcgtgagatccgtctcgttcctgatcctatgggttggactagtagcgtgcttagtcttcgttgcacccctcaagaccgagaatgaagccatgcccgcgccagtctgtcg

SEQ ID NO: 146565 - DNA, 594 bp, Zea mays
  Clone ID: MRT4577_65184C.1
taaatgttgcacattgtacattaagtacccggaagcacattacagatttggaggtcctacatgaagtagtggactcaccattttcaggagttatatagagcactcctcaattgtacaataattgcattaacatttgagaaatccgaaattataagaagtgtttcagaaattatgaaaattgcaaagatacacacgtatgcattgatgatgtcataaaaggatcataggattaaaggtaatttaatggaattatttatgaccttttatgcaatacatttataatattactagtgtaattttttttgcatggctagtgaatttcatgagaaacataacatataccatcgttgctgactagcagtcgccgacaagtagtcgatcgaggtataacatattattgttgccgatttaaatcgccgacttctacgtcgatcaataaatatgcacaagtttcatgaagtggacatatggtcaataattctcttgacctagttgaaaatattttacaagaagtctaatactagcatataaacaacaataatcatccatataaaccatagaaggtcatcttgttgccctaatatgccaaccgct

SEQ ID NO: 146566 - DNA, 303 bp, Zea mays
  Clone ID: MRT4577_65185C.1
tcggcggtcttccccattccaaacgggcgtgttcgtcacttcttaacttcgacctttacggggcccacggggcccgacgcttggcgggtttacttaatggaccatgggctttttttcggcactggcggcggtctttccaacttttggaacctttcgagcccattccgcttggagggttcgggcccatgcaccccggagaatcgtggcgttctggttggccccttccgacctcgtggtgacccccgagccaggaaaggacccccggcttattttcgcgcttgaaaagcataatgtacacccttt

SEQ ID NO: 146567 - DNA, 717 bp, Zea mays
  Clone ID: MRT4577_65186C.1
tatgtgctttttttttttactggaatggttctacgtactcgtcattatcattaccatcttagatgcaacaactgaattacggtcgcatacaaccacggtcttaagcttcgtctgcaccaacgcatgcatagatcgatcgaactcacgggtcaggctgaacaaaaatacagtcgtagctaggaataatcgacggatgagttcagagcgagaggccggagtcgtcgtcctcgtcgagcgtggaggtgtagacggtgtagagggaccagatgaggccgaagacgcccagcaggatccaccccagcaggttgttgctgagccccaggctgagcccggtgccctccgtcgacatccgctcgtccaccagcgccagcgcgggcgacgtggtcaccgcgctggtggccacggccagaagcgacgacgacgcgccgttgttgccgtcccgccgctggctcggccgcctcgagtgggcggcgccgcaccgcgccttctcggctctcaccctcagctgcggcaaaccttgagcctgacacggcctggcgacggcggccgcgccgacgaggggggcggcgctgagggttgccattgctcgctcgctcgctgggctacctcagtctgttgcctgctgtgtctagaactcgctactccggatgcagatgcaatgcatgtgaccgacgtacgcaacacaagtgcgttcccggccggtcgagcgcggccggc

SEQ ID NO: 146568 - DNA, 639 bp, Zea mays
  Clone ID: MRT4577_65187C.1
acgagccctgcagcccgcccatggagtgagctgggtggcgtcgcgagcgacccaatgtgcggtgggttcttggtgacatctcacgagtgacccggtgcacgatgcgtgagcttaggacaacatatgccagacgcggtgttagccagacgacggtcgcatcgcatgaggacccagtgtgggacgcaagctccgcagcgtctcgcgagcggcctggctctcatgtgaacgacaaagtgagtgcgagcatggcgttcggtgccattggcggagctatcatgcatcatggttgggagatataacgaagataggtgagagaaaggtaagatgtgggacccaccttgaaaagtttgcgctagactactgaggctactggagagtatgactcatgtactcagatgacgtgataatatatgagctagcaggctgactcaaccgttgaggttgcccttatagtttggtgcatacattgaacaacacggtaaagagccacaataacttttacccatctcagttctgacaatcatatcttattagtgatgatctgatgatacaatattgcagcaatttgctatttgtttaaaattgttgaaggaatttgtatttaatgtacacatttttgttcaagagatgtcaagtata

SEQ ID NO: 146569 - DNA, 896 bp, Zea mays
  Clone ID: MRT4577_65188C.1
gccggccgggctcaaataggtggtaacgacctgatcaaattgctcaggcacttgccatctatcttcattgttcaactctttgatgaaaagaaaagatgaaaaaaccaaaaaaaagctctgcccttccatctcttggataaatagagagggagggcagagtgcagcaatttggctgaacgcccaccggagaacaacgcacttgtgttgcgtacgtcggtcacatgcattgcatctgcatccggagtagcgagttctagacacagcaggcaacagactgaggtagcccagcgagcgagcgagcaatggcaaccctcagcgccgcccccctcgtcggcgcggccgccgtcgccaggccgtgtcaggctcaaggtttgccgcagctgagggtgagagccgagaaggcgaggtgcggcgccgcccactcgaggcggccgagccagcggcgggacggcaacaacggcgcatcgtcgtcgcttctggccgtggccaccagcgcggtgaccacgtcgcccgcgctggcgctggtggacgagcggatgtcgacggagggcaccgggctcagcctggggctcagcaacaacctgctggggtggatcctgctgggcgtcttcggcctcatctggtccctctacaccgtctacacctccacgctcgacgaggacgacgactccggcctctcgctctgaactcatccgtcgattattcctagctactgtattttttgttcagcctgacccgtgagttcgatcgatctatgcatgcgttggtgcagacgaagcttaagaccgtggttgtatgcgaccgtaattcagttgttgcatctcagatggtaatgataatgacgagtacgtagaaccattccagcaaaaaaaaaaaaaaaaaaggcccctagggcc

SEQ ID NO: 146570 - DNA, 308 bp, Zea mays
  unsure (1)..(308): unsure at all n locations
  Clone ID: MRT4577_65189C.1
cagcgggcgggccgaccccccgcacccccgnggccgaccgaacacggcgggccaccggaagaccgcnacgcccggcgcgccctggaacgganagcgggggggggaggcgncncaggncggagggggccacgcggccacagagacagggggagcgcgccgcgagccgcaccnggaaagagnggagncnggaccgaaacaaaccccgnnggagcggggnnnnnngnngcagcgcaganccgcgcagaaaaaaggacncaagaagaccccgaccnncgcgggnccgcgcgcagggaacaaaaccacgggaa

SEQ ID NO: 146571 - DNA, 220 bp, Zea mays
  Clone ID: MRT4577_6518C.1
gctgcggaagctgggctttttggcgtgcacggtggtggggttcagctacggcggtatggtgtcgttcaagatggcggaggcgcacccggacctggtccggtagctggtggtgtcggggtccgtggttggccatgaccccactccctcagcgcggcgactcctggaggggatcggcctgatgtctttcggacgagaatctgctgtcggtgccagttaatgg

SEQ ID NO: 146572 - DNA, 103 bp, Zea mays
  Clone ID: MRT4577_65190C.1
cgcacacgtcctgagatggctaccatttatgatcaacacctatactgagagggttgccgtcacttggacactgtccatcacttacatacatcaccttacacat

SEQ ID NO: 146573 - DNA, 222 bp, Zea mays
  Clone ID: MRT4577_65191C.1
acgcgactgcatcaacacgaggctgctgtccactccacctgcccgctctgccgccgcagcctcctcgccgacttccccacctgcggcggcgcctgcagcccgctggtgttcgacctcgaggccggataataaggctcggggtgcgaccgccacgacgcggcgacctccgcgcgcctaagcaaaggcatggagcaggagcaggcagggcaagatcggaaacac

SEQ ID NO: 146574 - DNA, 596 bp, Zea mays
  Clone ID: MRT4577_65192C.1
gataggtaaaccattcttattcatctcctctttttatttcttttttctttgttgttgttgttgggtgaaatctccatggctgctccattattgctccctcgtaccctcaattcagaaacagacaccgcgtgatggaccgcgcacgctagtccaggggatccatgagccactcaaggtgctcccataaatctcatactctggttaatgcatgcctaaacgacagccgtttatacggcctgctggagatggagatggcctcataggagtcaggcctgggcgtcctcgcaaatgccaaaaagcctactgttccattccatcccatcccatcccacacggacacggccccgtgtcgcgcggagtgccgctgccgccgaaagaaggtgccggacgggcgggtgcagtcggtgcgccaggatctggatgccgccactgctgcttgccgttggcgtcagggtcaggctctccagtcatatgaattatggatggaccacaaacgcgtctctctttccctggatctatgcggcggcccttccatcccacccaccatcagcgtctctctaattgctgcaaacatacaggacagagaaagaaacacc

SEQ ID NO: 146575 - DNA, 350 bp, Zea mays
  Clone ID: MRT4577_65193C.1
aaaaaactgctgtgatggtagctttttcaagaacttatgctagcattttcaagaactctctctctctctctctctcgctcactcactcactctgagtttgtgtgtttccatccattcctcctcttttccccattaacaagttcttgttaagcatgcattgctagtatgatgatgatattcatttgaataataagctgctgagcgctaacaaacatcggggcacactatacatacacttaacaacaacacggtgggtccgatggtggcgtgatggatggtagagccacctgtcagggtcgagagagtggtgggttgacgtgatgggatctgcatggggggtgcgtgcattg

SEQ ID NO: 146576 - DNA, 432 bp, Zea mays
  Clone ID: MRT4577_65194C.1
aaacttagtagattgatgtgaattgagaaaaactttatgaaactctgcggttgtggtgattggaagaagaggatgatgatggatggagtggtgacggtgcgttttgtatccgtttcttgtctttcgtcttcttttgatttgtcatattgttccttggttgtggtgttattcgcccggagagtgctttgtggcggttgttgcttgtattcttgtcgtcgtcttggtggtgggggtggcgagtttgggtagttgttgtaagaagtcgcgtctgaggttacacttaagacagtaaggctcaaaggaagggccgtatctataataaacacggctacgggcggcatcgcgatcgatgacgtaagcgacgaacggtccgcctcggactagaaggcaaaccttcattttatagacagaggacccatagtaaccggtatc

SEQ ID NO: 146577 - DNA, 369 bp, Zea mays
  Clone ID: MRT4577_65195C.1
gtatgatattgttgtttttgtattacgtattgcttcacttggacgcccaattttgaaaagcttttttttggggaaccactgcaaaaaagggcgggggggcccccccctttaaaaattggccaaaggcccaaaaaggggaattcccaaagccaactttttcaaaaaaaaaccttccaagtctcgcggggaaaaacacccaaataaaaacctacggacgcccttgacccaaagggggggggacaaaattgaggaaataaaaacttcacaaggtaaaaggggcgggcgggaacaacaaaaggccgggggggcaggacaaaaaaaactgacgggtttcaaacaggcggggaaaaacagggggggggggggggt

SEQ ID NO: 146578 - DNA, 358 bp, Zea mays
  Clone ID: MRT4577_65196C.1
gggaacaaaatcgaccaaacgtttttttccccatttaaaaattgtgttcaaatggggggggcaaaaaaataacccggtttaccaaatttttttgtcacaaattgttcccgaccttttaaaacaaaaatttttttttccccaaatttgttgacaaagcccatttctttattttttgttgggggcaaaattttccaattgaaaccccattttttcttgggttgctttttgggccttgacacccagtttggccattttttttttctttttggaggcaaccttggccttttctttccttttttcctaaagttccctgaggggggcaggggagtcccccccgccctctttaaaaagctccccg

SEQ ID NO: 146579 - DNA, 356 bp, Zea mays
  unsure (1)..(356): unsure at all n locations
  Clone ID: MRT4577_65197C.1
ggggggggggggacaagctttattttttttttttgtgttttttttttcttttttttgtttttttttgggggaacagaggtttgttatttggaacagagtacacacttgagggggattccacactcaatctatccatacaaccaataggggggggaagaggggggtttttttttanaacccccncnnnanncnncacccaggaggagcaagcaacccnnacccccccangacacagagaaagacccaccggacngaaagagcaaggctgggggccagccacaccatggnacacacccaccacggaagcacccccgccgcgcgcacgccaagggcgaaaccccccccacggggggacc

SEQ ID NO: 146580 - DNA, 154 bp, Zea mays
  Clone ID: MRT4577_65198C.1
gcctgtaatgtctataaacactagtgcacatagcgctgacatagagcaatatccgtggtataaccggaagcatcgctgtgtgtatactatgattgtgacacaataagctagaaactgggactaatatacataatggactcgaccttattgatca

SEQ ID NO: 146581 - DNA, 526 bp, Zea mays
  Clone ID: MRT4577_65199C.1
ccggccggggaaaccactttccatacaaaagcccccaatatcactctctcactggcctcgcctggtggcattgtatagtacaataccacgcaaccgcgacggctgctgtcgccctggccatcgaataccgaccgtctgcgtgctcacacgagaaaacctgcacaccgggtagcttgacagcagggggacaggatctgctggttgtctgcgcagccacaggacgcggccggccagcactactccggatacaccaacctccaatacaaggtcgaggaggcgatcttccactacttcggggaggccaacagctgatccgcctacgaaaccggttcctctctgcttcaccgcaagcgctgcatggtcttcatttgcaaccccaccattccggaacataagggcgtccccagcgcgcacatatggctagacactcagtaaccgtacatacgcctggaacacagcgacgaacctgctgcatctggagagccccgtgggacgtgtgctacacgtacgccgacaacctggactg

SEQ ID NO: 146582 - DNA, 106 bp, Zea mays
  Clone ID: MRT4577_6519C.1
atccggaatagcgggcgcgctccacgcgtccggttcttcagaccattagctgtataaactcaagagacgggtaagaacctcgatctgacgcaacagagggttgttg

SEQ ID NO: 146583 - DNA, 342 bp, Zea mays
  Clone ID: MRT4577_651C.1
cttaaagattcacattttgacttatgttattcacataccacaatgatccatgtagggtctgcgcgcagaaacttgacatactattcgttgaaggagaacattgtgcggcaacatatagcaccttattatgagggccactttcctttaatacaggggggtaaaaaatgcatggggaaaaaaaggggatttcaaagtcccaagccacagggtgcgaagaagttgcattcaagggggggggggcccaattctcaacgccgccctatcgtgcatagaggcaccgggggggtccccagcgtcgaaggcagctcacaccgaacaaccaggatgatataaagggaccac

SEQ ID NO: 146584 - DNA, 375 bp, Zea mays
  Clone ID: MRT4577_65200C.1
gggacggccaatggcacctcagtttcagtggagaatgttggtttactcactttgacacatgttggcagcaggagagtagtgcaaatatctgctggttgcatgatcttcttggctatccttggaaaatttggagcacttttcgcatccattccattgcctatatgtgcgggcatgtactggattttcttagcttatgcaggagcctgtgggtggagtttgcttgagttttgcaacctaaacagcttcaggaccaaattcatcttgggtttcgctttcttcatggggagctcagttccttagtacttcaatgaggacacagctgctgctggttatggaccagtgcacactggtgccagatggttcaatgataggata

SEQ ID NO: 146585 - DNA, 440 bp, Zea mays
  Clone ID: MRT4577_65201C.1
gtgaagcggttgccatcgcttgagatggatctggctgcagcaaaccatgaatgtcgggggtgcaattatactcgcgagacaaatttaactcattctgggaaaaagccactggttgttattgcaataatgactacctttgggatgaaaaactaccctgatactgtcaggaaatcatcgcttcccacatgttcaatgttcaaaaaactataagaagaaaaatgcattctagtacatttcctactttgaagaacctcaaatccttgacatactattgatagggagatcgattacaaaaatatgagcaccaaggattacttgattttggatgatcatctagagccaaatcaatagctttctaaaaaacaaaaaattgttttactaattcatcaaatacattctattctgcactccattgctatgtcaatgatcaaatatacata

SEQ ID NO: 146586 - DNA, 257 bp, Zea mays
  Clone ID: MRT4577_65202C.1
tatattttttttcttcacaatttacacttacatgggcctttttatacctttccggggttttcccacaatcctgactaaagcacaggcattcctatgaaacctgggttacaacccaaggaagaaaaaaaagctaaaacgaaaaaaaacaaatgtgaaaatatacgccccccagggtatagctccaaaaccaaaagccctgaagacaaaactgggtcaaaaaaataggctccccaataaaagtacccccccttttcaag

SEQ ID NO: 146587 - DNA, 221 bp, Zea mays
  Clone ID: MRT4577_65203C.1
aaaaaaatcctacacaacacactattgattaggcactgcgcatagacaatatagtaccttctcacacaaaaaggactggaggaatgttggtaaacaccgcatacctaatactcaccaggcctttaatggaaactgtgcatgctataaggtgccaaggaaaaaccctgggccattgctgctctatcactcgatacatgccctggatgaacatcatgatgtta

SEQ ID NO: 146588 - DNA, 637 bp, Zea mays
  Clone ID: MRT4577_65204C.1
cggacgcgtgggatcaaagggtcgcaaacgccatagcggccaatcacttggcggcggcggcggcgatggggcggctgaccgaggagcaggcggcgcgcgaggcgggctcggcggggaccaacgccacgtccctcaagctcacacaccgcgctctctccgacgtgtcgtgcctgagcagcttcaagaacctggagcacctcgacctcggcttcaactgcctcgtcaccctcgagggtttgtcctcctgtgccaatttgaagtggctttcggttaaggaaaacaagcttgtgagcttaaaaggtgttgaggggctctcaaagctgcaggtactgaatgctggcaagaacgaacttacaaaaatggacgaggtcacatctttaacaagcctgggagcattgattcttaatgataacaatatttcttccatctgcaagcttgatcagttgcaacagttgaatacacttgttctctctaagaatcctgtttttactattggcaatgctttggtcaaggctaagtctatgaaaaagctatccttgtctcactgccaaatagaaaatattggatcttctcttgttaagtgtgtggaactgaaggaacttaggctttctcacaacaagatcagtacaatcccttc

SEQ ID NO: 146589 - DNA, 610 bp, Zea mays
  Clone ID: MRT4577_65205C.1
cccccctcgagttttttttttttttttttttttttttttttttttttttttttttttttttttttttttttttttttttttttttcccccacccccctttcataaaaaaaacccagggggaaatttacctttaaagggcctagccaggggcccccaaacccaaaggggttaagggggccaaaaccccctttttttttaaaattgaaaaagggggatttaaccccccccaacccttttgggtttgggcccccccaaccacccccaaaaaagccccccccccctaaaaaaaaaaacccccaggggaaaccttattcccaaggtggccaccaaaaaaccaaaaaaatattgggaagaaaggttctacctaaaccaaattttaacccaaggggccctggttttcccggcctccctgaaaaaaaaaggccctccccggtttccaaaaattttggaaccaccttaataatgtttggaaccatcgccccggggaactacccaaatcccgagaattttggaacccgctcaaggattttcggaaataccgccccggggcccccaagggcaatccaaaaatcccccagactgtgggggcaaaccccgcttggcccacccc

SEQ ID NO: 146590 - DNA, 340 bp, Zea mays
  Clone ID: MRT4577_65206C.1
tatatcttctttcctatcttactctggtttcagtgctattcgatacgatattcttttgattcctatgacacctcctcagctgccggctgcccagcactcctgggctcaccacgtcaatgacgccctccatgacatactccgcggctcctacggcgtcgactccgacacacagtacctcgtcgaaccgatcctcgtcgccgactgccgtgtttcgaacgcctgagctagctcataaggatagtcatggacttgtatccctggagccacatctaaaatactgaccctgatctgagcttgcaagaccatgagcgaaactgcaaaaaactgctgctacatactt

SEQ ID NO: 146591 - DNA, 479 bp, Zea mays
  Clone ID: MRT4577_65207C.1
aaaggaataaacctttgggggaggcattttaaggccaaaacccaggttttaaaaagaaaaaaagggggggggggggcatgattccaagatgggccttacacagggaaaaaccaaagctcctttgggggggggaaaaacagggaaaacctattggggggcacaaaatccctaacggggggacacggggaaatataggaaaaaaatttggcctggttaacgacccaagaaaaaaactcaggccaaaaaggattttaagggcccaaacagggccggcctggggggtccaaattattttaagcccccggaactttgggggggggggggggggttttggcccagctaaataggggggaaaaggctttggactttttcattgaacggcaaaaacggaagctttttttggagttcctaaaagcctttaaccgggttggaaatctcgggaaaacaaaggggggaactggcactatttaatttttttt

SEQ ID NO: 146592 - DNA, 928 bp, Zea mays
  unsure (1)..(928): unsure at all n locations
  Clone ID: MRT4577_65208C.1
ccggggncaccacactcccgaacgccgaaaccccaccccgcaccaatcatggacgccgccgacgcgcgtccatcggcaccgtcggccgctgctgccgcagtcgccggggcctccgtcgcggacgagccccgggacgcgcgggtggtgcgggagctcctgcgctcgatgggtctcggtgagggcgagtacgagccccgcgtcgtgcaccagttcctggacctggcctaccgatacgtcggagacgtgctaggggacgcccaagtctacgccgaccacgccgggaaggctcagatcgacgccgatgacgtccgcctcgccatccaggccaaggttctccttgagctggcccgcagccgaaacagaatgccgctgcccaaatcaattgctcctcctggctcaattccgctcccgcctgagcaggacacactgttggcccagaactaccaactcctgcctccgttgaagccgccacctcaatttgaggaaaccgaggatgagaatgaagaatccaacccaagtctgacaccgaacccggcaaattctaatccaaccttctcgcaggatcagcggagtaacgagcaacagcacactccccagcatggccagagggtttcgttccaactcaatgctgtggcagctgctgctgcaaagcgacctcggatgaccgtcgaccagctgaacatcggctaaccagttatcgttggttagactgtagtatcattttccccatcttttagtctggtgaatcatgtttcgaagagatttagtgttgtagtggtatgatcttatttaccacccacctatttaaccacgagatgtgcagtacagcagcagcatcataaagtttctgactgcaagaacgttgatgtagggaaggaaagtaactgtgctagtagtgtacttgcttacttcaaggttaatatctgat

SEQ ID NO: 146593 - DNA, 443 bp, Zea mays
  Clone ID: MRT4577_65209C.1
gaaccgtaccagattccgtcgcatctcatgctctaccacacatctcgtccgccgccaattcgaaccgggacctcctatataagcttcaggttgcaaactaggaggaccgcgatgaccctccgcaaggtgcctccgaaggtccaaaaaatagtacggtccgccaacatacgataccgcggtcgacaacgacatgaagttctcgactgaccctgatcgagctctccagcctcttcatcgagtgcgtcatcaaaaaggtcgccaagggtctgatcagcaagcccatggggctcatcaaaaatgcccccggagaacaagtatgctcctgcttgttgaaaagtctgaggcagtccttaaagtctccgtaacgtggtccttggacctgataggagaggaagcattgaaggtgtctaccactttgacacaatgcacaagtctgagaccaa

SEQ ID NO: 146594 - DNA, 249 bp, Zea mays
  Clone ID: MRT4577_6520C.1
cgccatggcaagtactatgtgcatgctgcctcatgtacctgtgggtgatgtggtggcccaaggaacgatagaacagctgctgtggccacatatcaagaccaagcgcaccatctcagttctgtgggactgggtgcctcgactggcgttcaagtgctggaatcaactaccagctctcccagcgatcgtcccaggcgggagatctggccaaggtggaggggtgcgcgtgtgtatgatcttgcaacttcacca

SEQ ID NO: 146595 - DNA, 198 bp, Zea mays
  unsure (1)..(198): unsure at all n locations
  Clone ID: MRT4577_65210C.1
cttcagnccaggaaccagatcgaagggaacgcacaaggtgtggaatgtctgangcgacatctngtctancagctcccttaggggactgtaggctggcgnctgatatanngngggacagntacttntgccgatttcnggnaatcatgggaaaatttngaaaagnanaangttggncgncgcnttgnagcnngngtgttt

SEQ ID NO: 146596 - DNA, 1280 bp, Zea mays
  unsure (1)..(1280): unsure at all n locations
  Clone ID: MRT4577_65211C.1
gctgcgggccagctcaaggagaacctcacgcggcggcattctgtttcggctgcgggccggctcaaggagaacctcacgcggacgcctganagattcgaactctcgcggggaaaccccatgtacttagcaggcacacgccttaaccactcggccaaagcgtcagttggtgcagtacagaatatttgannnnnnnnnnnnnnaaaaaaaaatctctccgtgtgctgaagcaggttgcctgagcccctgacccggtgacaccacactcccgaaacgccgaaaccccaccccgcaccaatcatggacgccgccgacgcgcgtccatcggcaccgtcggccgctgctgccgcagtcgccggggcctccgtcgcggacgagccccgggacgcgcgggtggtgcgggagctcctgcgctcgatgggtctcggtgagggcgagtacgagccccgcgtcgtgcaccagttcctggacctggcctaccgatacgtcggagacgtgctaggggacgcccaagtctacgccgaccacgccgggaaggctcagatcgacgccgatgacgtccgcctcgccatccaggccaaggtcaatttctccttctcccagccgccgccgcgtgaggttctccttgagctggcccgcagccgaaacagaatgccgctgcccaaatcaattgctcctcctggctcaattcccctcccgcctgagcaggacacactgttggcccagaactaccaactcctgcctccgttgaagccgccacctcaatatgaggaaaccgaggatgagaatgaagaatccaacccaagtctgacaccgaacccggcaaattctaatccaaccttctcgcaggatcagcggagtaacgagcaacagcacactccccagcatggccagagggtttcattccaactcaatgctgtggcagctgctgctgcaaagcgacctcggatgaccgtcgaccagctgaacatcggctaaccagttatcgttggttagactgtagtatctttttccccatcttttagtctggtgaatcatgtttcgaagagatttagtgttgtagtggtatgatcttatttaccacccacctatttaaccacgagatgtgcagtacagcagcagcatcataaagtttctgactgcaagaacgttgctgtagggaaggaaagtaactgtgctagtagtgtacttgcttacttcaaggttaatatctgccaaaattgtatctgggtctacatgttcttgacaaaaatggcatcaccattcatcagtaaaacccaaac

SEQ ID NO: 146597 - DNA, 208 bp, Zea mays
  unsure (1)..(208): unsure at all n locations
  Clone ID: MRT4577_65212C.1
acgaggcatgcacgcgnacaaagctcggaattcggctcaaggtatttcgtgtgcgtcgctcgcttacacgccggcgtgccggacaccgcgcgcgtggcccacactctagaaactcttactggcgccttgttccagctatcatcgattatatgcgaggtgaatcgtcagcttatgttacggactatttacgagagcaagcacctggatc

SEQ ID NO: 146598 - DNA, 549 bp, Zea mays
  Clone ID: MRT4577_65213C.1
cacgcaaggagccaaggacccacgagaagcgaagctagtcggagagcagaggaggggccctaccaacaacgacggaccaaggtagttgtgcgagtgtgacggcggcggcgatggtagtgctcacggaggagttccacggcctgtcgctgaagcggaagggcgcctacgagccgggcctcttcgacggcgccgacgaccgctcctccgggctctcgctcccctgccgcgccaccaagatgcggcgcctctcgtgtcctgatggccctagcgacggggacgaccagaccgtgacggcggcgtcggaggatgacgttgcgatgggcgacgcggcgccgtctcattcgcctggcaccgttggcggcgacaagagggcggtggtggtgtacggagacggcagcagcagcaggcagatcgacgccccgcgcctcgccctgcgcgccggtgtggacgcggattggatccgtgtcatgttccgggaggcgaacagcaggaccgtgcgtgagctgctcgccggcgccgccttggaacggagatctgagcccgatctcg

SEQ ID NO: 146599 - DNA, 257 bp, Zea mays
  unsure (1)..(257): unsure at all n locations
  Clone ID: MRT4577_65214C.1
tacgacgcgctcctcctcccgggcgacctgtcgtacgcngacttcgtgcagccccggtgggactcgtacggcngcctcntgganncgntngcgagcncgcggccctggatggtgacgnagggcaaccacgnggtngatcgcctgccgctgctggagccgcggcccttcaaggcgtacaacgcgcggtggngcatgcnctacgactatgccgcnganggtacaccgccgtcggacgacaacctcttctactccttcga

SEQ ID NO: 146600 - DNA, 158 bp, Zea mays
  Clone ID: MRT4577_65215C.1
tccggattccgggatccgtccagggagcaaacagcagcagtaaatcgcagggctggatagaggccgcgaccgaacaaccccatggagcccgcttagagagagcaagctcagatggtgggttgtcgcgcagcacggcggcgacactctggcaacccgag

SEQ ID NO: 146601 - DNA, 563 bp, Zea mays
  Clone ID: MRT4577_65216C.1
tcttctctcctgctcctcctctcctaccctcgttgcctcccaccaaaccctaaaccaagctccgaatccctcccgtctctacccccaccgagctcgcaagttcttgattggagcagccgagcccagctcagattccccgcggggtcccgggagtattcgaggtcttggcgggaagccaagaaatggcggagggggaggagaccaaggtggagggaacgagagaggaagagagagcggatgcaggggcgggagcggaggaggaggaggtagaggtgaagttccggctcttcgacggctctgacatcggccccatccgctgcaacgccgctgctaccaccgtcgccgcactcaaggaccgcgtcgttgccgattggcccaaagataaaacaattgtcccaaagagtgctaatgatgtgaaactgataagtggaggcaaaattctagaaaatgacaagaatattgcacagtgcagagcaccttttggtgatcttcccagcactgttataacaatgcatgttgttgtccagccatcatccgcaaagtcaaaaccagacaagaagacg

SEQ ID NO: 146602 - DNA, 684 bp, Zea mays
  Clone ID: MRT4577_65218C.1
cattgggaccctcgaggccggccgggaaaacttccctgtcacgagagtacgagaccacgccttccgtgggatcaatcggctagggtttcggagatgttcggccgcgcgccgaagaagagcgacaacacccggtactacgagatcctgggggtttccaaggacgcgtcacaggatgacctcaagaaggcctaccgcaaggccgccatcaagaaccaccccgacaagggcggcgaccccgagaaggtgagcgcgcgagctggtcatttcgtctggctccgacctgtccgcggcggggagtagtaggcgggttgtcaggtttgcggcgatgttgagacggtttggctgggtcgatttcatatggtgctggtgcttgtgggttcggagcggtggtttcgatctgaggcggcgtggatttagatgagtttaatgtgttggggtagtggagggaattcgtatgggcaaggagatgttgcatggaaactgttatgaatattggttgcgaggaaagtgttaggattgttgtctgccacggagacgcatctagagctgttcatggacatgcctctggaaattgtcgctctatgtggtatcgttagtcggataattagtaattaattattagaaactcgttgataatgctagaatccttgattcgttctcaaaaaaaaaaaaaaaaaagcggcc

SEQ ID NO: 146603 - DNA, 412 bp, Zea mays
  Clone ID: MRT4577_65219C.1
ggggggaaagatttaaaatgtttaatttcaccccccattggagaggaaacttaggggccaacaacagatcagtccccttgacccttgacaggagcttcattggtcctgtttccaggacagcttttttgaacaggtttcaaaaccaataggggggggcttttaccaagcttcaaaccacatcccaaacataatttgaaaaggccaagaggggcccctaccatggcaaaacattcaggtttttggttcataacccttagacgggataacaatttttttcccagagattcaaagctcacaaatcccatccaatttgggacaggcctccttggttaagctttaaaaactgggggcaactgaaagacggggacctaagcccttttttttgatgattttttggggggtttcttttggg

SEQ ID NO: 146604 - DNA, 456 bp, Zea mays
  Clone ID: MRT4577_6521C.1
cccctcggatttttttttttttttttttttttttttttttttttttttttttttttttttttgtgtgctgttgttttttcgtttattgttcatgttctgtgattgattccttgtgtactgtgcttgattaactgggctgctcggaaaacagattttatacagataacaactaggggcaacccgaaaaacacattaggaccacaacttagggaaaatgagaggggggaatcattctccaaagcatgaaataacgggacaaataacgcttgactggtgggttttacaaccacggagcctaaccagttttggttacatctacctagacaaaagtccatccgaaaatgataagccgcccacattacatcggctggatgcgagctaccactagtacagggggcccgtccaaaccagcaagcctaggccaagagcagaacacacagtggcataatccaaggc

SEQ ID NO: 146605 - DNA, 196 bp, Zea mays
  Clone ID: MRT4577_65220C.1
cccacgcgtccgcacacgcgtacgttccggcctctctcacttgaaggtgcggcacagcaacccaggattcgccggcatcctaatccgatcgcgagatggacgaagacgatgttcggtctagagacccccctgataggtagtactaaaggagacttctcgacgtacgcaaaagatacacccgcactggcgtaacaca

SEQ ID NO: 146606 - DNA, 2025 bp, Zea mays
  unsure (1)..(2025): unsure at all n locations
  Clone ID: MRT4577_65221C.1
gcgttggnactctccacgcgtgtcacactgctgcgccgctcgctagcctggggaccagctgcggttgctgctcctaccaggttatgtacagtcctaccagcagtcatgttcacatttaccttgtttcaacctttcttatagttaaaaaaaaaattgggtacctcgaggccggcccgggaattcactcctttcttcttctcctgcatcaggatcatcatcaggttctccgttccactccatggccttccctgctgtgcccctcctcgccgctctgctcctggtcgccgccacgcggctgtgggactacgtcttcgtgcgcctcgtatggcggccgtacgccatcaccaaggggttcagagagcaaggtatccatggaccctcctacaggttcttcaagggctgcaacgaggagatcaggagcatgaaggagaagaccgacggtctcgtgctggacgtcggcgaccacaagtacctcccgcggatcgcgccgcactacctcgaatggagggctcagtacggagaaccatttctatattggtacggggcacaagcccgaatttgcatatttgactacgaactagcaaggcaaatcctttcgagcaagtctgggcatttcgtgaagaacgatgcgcaccctactttgttggctctggtcggcaagggactcgggttcatggaaggctctgactgggtgcgccatcgcagggtgatcaaccctgctttcaccattgacaagcttaagattgtgaccgagacgatgctggacttcgccgatagcatggcaggtgagttggaagctgaagcatcccagaacgagaacggagaaacacaagtggatatatacaaacatttcagcgatctgacagttgacaatatcgcctacgccatctttggaagcagctacaagttaggcaaacaagtgttcgaggcacaaactgagctgctggggatcaccatggctactttccttgacgtgcccataccaggatccaaataccttccaacccaagcgaatcggcgaaaatggatgctggagacgaagctcaagagcttactcacgcggatcatacagccacggttagcaagcggtgagcacggaaacgatctgctgggcgtgatgctggactcctgcactgagaccaagcaaggagggaagcagcagcaagtggatcgtctgcgtctcagcttgagcatggaggagatcatacacgagtgcaagctgttcttcttcgctggccacgagaacacagcccttctcctcacgtggtccgtgtatttgctcagcatataccccgagtggcaagaaaggctccggaaggaggtcttgagggagttcgggagggacgctcctaaccccaacgcgctcaacagattgaaagagatgacaatggtgttgttcgagaccttgaggctctactcgcctgctctcttcatgcaaaggaagaccctggccgacatgaccgtggggccaataaaactgcccaaaggcactgcaattgtgatacccattccgatcatgcatcgagacaagcaggcatggggcgacgacgcagacgagttcagtccgatgagatttgcgaatgggatcacgggagcagcgaaagttcctcacggcctgctggcgttctcgatggggccaaggtcttgcatcggccagaacttgtcgatgctggaagccaagtcgacgctggccctgatgctccgcaagttctccttcgctctctcccctgactacgtgcacgcgcccgtggatctcttcactctcaaacctaagtttggccttcccgtcattctgaggccactggataatgttttgatttgagttgggcatatagtacaacaggaagtaacttaggtacatatcaaatttgctagctggtcaaaacgttatatgatgttctcaaccctccgttgttctatatcgttgaaaacaagtattttaatttaaaaaaaaaaaaaaaaaaaaaaaaaaggggcggtttggtttggcgctgcaagcgaaaaaaaaaaaaaaaaaaaaaaaaa

SEQ ID NO: 146607 - DNA, 154 bp, Zea mays
  Clone ID: MRT4577_65222C.1
accacgcgtccgcaactcagctccgccgcttgcccgcttttgctctctcgcacccgggtctcggcgtcgtcgacacgctagcgtctcacaggcgtggacgcccctcacggttcgcgcgatgtcgccagcggctcacgcccgctcgccgttcacc

SEQ ID NO: 146608 - DNA, 2184 bp, Zea mays
  Clone ID: MRT4577_65223C.1
gtcacactgctgcgccgctcgctagcctcggatccagctgcggttgctgctcctaccagtgatcatcatcaggttctccgttccactccatggccttccctgctgtgcccctcctcgccgctctgctcctggtcgccgccacgcggctgtgggactacgtcttcgtgcgcctcgtatggcggccgtacgccatcaccaaggggttcagagagcaaggtatccatggaccctcctacaggttcttcaagggctgcaacgaggagatcaggagcatgaaggagaagaccgacggtctcgtgctggacgtcggcgaccacaagtacctcccgcggatcgcgccgcactacctcgaatggagggctcagtacggagaaccatttctatattggtacggggcacaagcccgaatttgcatatttgactacgaactagcaaggcaaatcctttcgagcaagtctgggcatttcgtgaagaacgatgcgcaccctactttgttggctctggtcggcaagggactcgggttcatggaaggctctgactgggtgcgccatcgcagggtgatcaaccctgctttcaccattgacaagcttaagattgtgaccgagacgatgctggacttcgccgatagcatggcaggtgagttggaagctgaagcatcccagaacgagaacggagaaacacaagtggatatatacaaacatttcagcgatctgacagttgacaatatagcctacgccatctttggaagcagctacaagttaggcaaacaagtgttcgaggcacaaactgagctgctggggatcaccatggctactttccttgacgtgcccataccaggatccaaataccttccaacccaagcgaatcggcgaaaatggatgctggagacgaagctcaagagcttactcacgcggatcatacagccacggttagcaagcggtgagcacggaaacgatctgctgggcgtgatgctggactcctgcactgagaccaagcaaggagggaagcagcagcaagtggatcgtctgcgtctcagcttgagcatggaggagatcatacatgagtgcaagctgttcttcttcgctggccacgagaacacagcccttctcctcacgtggtcggtgtatttgctcagcatataccccgagtggcaagaaaggctccggaaggaggtcttgagggagttcgggagggaagctcctaaccccaacgcgctcaacagattgaaagaggcaagaaactagctagctgcgtctctctctcttgttagcatatatatgtgtactcacatttgatttgatgactatgttcctgattctcttgttagcatttctttctaatttgcagatgacaatggtgttgttcgagaccttgaggctctactcgcctgctctcttcatgcaaaggaagaccctggccgacatgaccgtggggccaataaaactgcccaaaggcactgcaattgtgatacccattccgatcatgcatcgagacaagcaggcctggggcgacgacgcagacgagttcagtccgatgagatttgcgaatgggatcacgggagcagcgaaagttcctcacggcctgctggcgttctcgatggggccaaggtcttgcatcggccagaacttgtcgatgctggaagccaagtcgacgctggccctgatgctccgcaagttctccttcgctctctcccctgactacgtgcacgcgcccgtggatctcttcactctcaaacctaagtttggccttcccgtcattctgaggccactggataatgttttgatttgagttgggcatatagtacaacaggaagtaacttaggtacatatcaaatttgctagctggtcaaaacgttatatgatgttctcaaccctccgttgttctatatcgttgaaaacaagtattttaatttaggtgcggtttggtttggcgctgcaagcgaaaatggggacgtaaatccggaattaattatagcaaaacatctcttcaagcttgaagtagttcataaatgaagactggtaaagtgtctgtaagttgctacagattctatttatgtctaagtatagaacataaaacataaaaacacggctgatttgttagctaggtggatgtaaatataggtttagagccaataactatggttcaaatcaccatttgtgcataattttaatatttttattattc

SEQ ID NO: 146609 - DNA, 203 bp, Zea mays
  Clone ID: MRT4577_65224C.1
agctcataatttgaggagacctcatttacatttttctgggtcaccctacaaccgatctggtcaattggagtttccaatcgggaccgggcccagaagcaacaatcgggcttactaatgggggaaatggccttctttctttttcaattgagaaatattgggcagggagggcgaaaaagaccaattgaacacttccccattggttt

SEQ ID NO: 146610 - DNA, 225 bp, Zea mays
  Clone ID: MRT4577_65225C.1
ctctcatcgacagagatagagcgagagtaacatgcgcgcgtggctgcagcgcacacgtgcggcgcggatcacaacaacagctgatcctcagaggtagggaagccatgttcagaaagtcgtgcaagaatgaagaattcgagaaatcctacgtgtatgacgaggcagatgagtggcagaaggacgacaaggataagtgagtaagttgcaagtgagactaggttaaag

SEQ ID NO: 146611 - DNA, 345 bp, Zea mays
  Clone ID: MRT4577_65226C.1
aaaaaaaaaaagggagcccccacaaggcccccctgaccaattcaatcatcaaaaaaaaggccgcgagctttgctcttgttaattaaataaaatagtatataggaaaaaaattcaccagcccagggcaacctttgcatcccgcatggggctataggacggacggacccctcccgctaacagggataaatcgaagggggttatgaggggggaaatggattcccacaaggccccccaaatttttgcccggccggccttttcccctccgggacccgaactgatacaaccacggccgcccccaccgccgctggggagtaattgattgtggccctttcttttttttccccc

SEQ ID NO: 146612 - DNA, 243 bp, Zea mays
  Clone ID: MRT4577_65227C.1
accgcacaggttagaggttaggaacgggggaaggtgcacgggggcgtctgctgagcctcatgcaccgcatcggggacctaattggtgactaactctatgagcacgccaatgagcttgccggggtgtaaaccagtctgaaggaccttgttaagggcctgctgaacattgaccagatcattgccgagtacaacaatgctatccctgaggatgttcgggagaaggttaaggatggtgctcttgggg

SEQ ID NO: 146613 - DNA, 738 bp, Zea mays
  Clone ID: MRT4577_65228C.1
cgggtacatctcacactcgcccatctctatccgccgatccacccatccccccatcccgcgaccccctcaaaaccccaccatcccgctgcaaccggcgccccgtcctccccgcccgcgcgcactcgtccttcacccccgtccctcagtgcggccacactcacctgacccacggaatgacgtccggtgcctctggccgcaccgccacggccggaaccgcggcgctgctgccgctgctgttcttgctgctgcaggtctccgcgggcgcgggcgcgggcgccgactgccatttcccggccgtgttcaacttcggggactccaactcggacacgggcgggctgtcggccgccttcggcgccgcgccgccgcccaacggcaggaccttcttcggcatgcccgccggccgctactgcgacggccgcctcgtcatcgacttcatcgctgaaaacctgggaataccttacctaagtgcgtacctcaactcaatagggagcaacttctcgcagggggccaatttcgcgacagccggctcgacaatcagccgacagaacacatccctgttcctctccgggttcagccccatctccttggacgtgcagtcctgggaattcgaacagttcatcaacagaagccagttcgtttacaacaacaaaggtggcatctacaggcagctcctgccaaaggccgagtacttctcccaggggctgtaccccttcgacatcgtcaaaaggactcaccgcg

SEQ ID NO: 146614 - DNA, 494 bp, Zea mays
  Clone ID: MRT4577_65229C.1
aaaaaagggacaaacccgggcaacggggggttggttctaaggggatgggggaaaaagggcccttttgccattaaaaaggccccggggggtttaaagccgtcggaaaaggattaacccccccccccgtgggaaagggattttgggggggcccccccggggggggtgggccggggggtttaacccaagggcccggcccttgggggcgcaaaccccctaagggggttgggggggggcggaaaaaaaaggccccggttgctacctgggattctgactaaaaggggttaaataaaaacccggcacacggaattttccccccattggtttttaaaccaagcgcgaaaaccaatgggggaaacaaacggtccctctcgaactaggggaaataactatggggggggggtaataaggggggaaaaacaaacctgtttaaagagggtttaaacccagttaacgttccttatgggggggggaacaacccaccactggggaaattc

SEQ ID NO: 146615 - DNA, 438 bp, Zea mays
  Clone ID: MRT4577_6522C.1
attaaaatgcatatgtttgtttttggaaattttttaacaaaacaagtgccacataacgactacaaggtttacagcaccatacagcagactcttgtctttgccctaacctgacttgaggtcgccacattgcctctacctattaacacaaacatctggcacgagcgtccagaatttgatttaatgaagctcctgtcacaatgcgaagcaagggccaactaccagcgcaatggacaacttacttacttggtttcttgctcctgggggcattctcaggggttgatgcattcaccttgccaaccttggcacagctgctttgcttttcttgcacccaccgcgggtcgcttaactttgctagcatttgctacagatacataacttttactatacttccctcgaatgctgggctgctggtttactttcacacttctttacaacacc

SEQ ID NO: 146616 - DNA, 160 bp, Zea mays
  unsure (1)..(160): unsure at all n locations
  Clone ID: MRT4577_65230C.1
gncnggccgcccnnttttttttnntttttttnnttttcttgatacatatatatggcggtatgtantctcttctnnttgttcacccctttnnttgatgtaggggtgccctggagnaanttttgcnttttgatggcntnntttgcnnttgagccccttttgc

SEQ ID NO: 146617 - DNA, 469 bp, Zea mays
  Clone ID: MRT4577_65231C.1
gaaccggaggttcgggctaggcgtacgcacgggtgcaagcaagacgacagtacgggtagaggtccgtggtcacggtgttgtgtggatcaatgatgacggcttcaaacgcaatgtcagctgagaatactatcactagtattacttcatttataataatgcgacgagtgcttggcattctattgtggctcatgtaactcatgcacgcatttctcgtttattcatcattctcctcttgccttgaattgaggatgggcaatgagaacgtgactactgaagaacaagaagtttctgactgtgcaagggctaccgatgagaacgccatgcctcactatgctgccacctctgctactgctatgcatgtccccctcatattcgctgctcaggttgaggtggttccggtacatagacctgatgagatgcatgttccaagttgatactggacggaaacaacttaaggtatgaagatgtg

SEQ ID NO: 146618 - DNA, 962 bp, Zea mays
  unsure (1)..(962): unsure at all n locations
  Clone ID: MRT4577_65232C.1
cattgggtacctcgaggccggccgggcatcaaaggttgccttaggaagaggagggagtgggctcaccttntttgaccaagcttcaaaagcgaacaggggaaagcaactcattgttacctgacgtaccggacgcagagaacataagaactggacctgatagggattcagaggggagtgctgatttgcatcaggataatctacctaggggcaaacgtaagtgtcggaaacgcaggcgacttgagctcaaaggtaggagagtcagggatacaaggaagagatccagcattgattcttcctcagaagatgctgctgcccccttgtctgattccagtagtgacagaaatagtaatcccagggacgacgagagcaaagaagataattctgttgcccaagaaattggcggttacatagacgctaagggtgcagcttcaagtacataatattcaactggtggtatatgcatatgactagaactgaatcttgtggtgaattttcaagttggtcagtgttcgatggatttctttatccatctacaaatctaggaccaaaaagaaaaatgggtactgcagtccgcatcaccaccagtcctttgaaagagcaggaaatggaggagtttgtctaacaaatctgttatgttcaacaatggtgtatatattattagtcagaatttagccttgcgctattatgatagaattagttgcctggtaaacagtggtaacaatgttgttttgtttatttaatgtattgatggaccatcttatgtatgagtgaattaagtagacattttcgtgtcgagtatgataaattgttagattgctaggttaaataaatctgttcttgtttttgaccacttgtctattcgataaggcatgtaacctgtaatatgcaatccactagtattcaattgctgtggctcgttttcattcagaaaaaaaaaaagaatcaattttaatcaataaaaa

SEQ ID NO: 146619 - DNA, 321 bp, Zea mays
  Clone ID: MRT4577_65233C.1
attatatcccacattggggcccgggatgcattttaaacacacaagggcgccccaaaagatttttttcgacccccacaaccaccaccattttgtttatttaaaggagagggggcaagcaaactctgggtgcatgaaacccgaaaacccccccaggggcccccatttgagcccttccctgaggggaagagggccacccctttggttgtccccggccctgaaaaaacacccggtcattaggagaggtaggtcacggaccaaccccttttatatgtttccaacatattcttttgctctttgggaacaccccgcaaaaatgatggg

SEQ ID NO: 146620 - DNA, 486 bp, Zea mays
  unsure (1)..(486): unsure at all n locations
  Clone ID: MRT4577_65234C.1
gcttggaactttgggctgatttatgtgcttgtttatgtgcttggcacttccgtcgtcgacgagcttatcggtattaccggtaagtgttcccttagtactaacgctgagaatgccgaggagaattgctgcgtttcttgcgagtcttcacctcgtcgtttcggcgtctcttagcatactagtggcgcgacttctcctgaggagatttcgcattagaagattaaggacggtaagttccccgccgacgcttctaaggagggaggtgcttctttcggtactaaggccgataagggtattaccgaggccgccggtatcgacaaggagattattatttaaggttacgatgattccggtaagtgtcgtgttaagcatcatgaggttggcgtttgtcccgttaagcggtgtgtcgcctctaagaccggttttaacgagttactatagtccgttactgattcgaatgtctanggctcggtctgtcacgttactact

SEQ ID NO: 146621 - DNA, 1164 bp, Zea mays
  unsure (1)..(1164): unsure at all n locations
  Clone ID: MRT4577_65235C.1
ggaattcccgggtcgacattcgcgtccgggagggcgcagcggcgacgagctcagcgatacagcggcaccggagagctagccgcggcctccatgctcgcggggatctgaactagtgccgctgcccaatcgcgccgacgactgaggcgcccactcctcatatcccatttccatcactcgtttctccatttcccaccttcctaaacgccacttaaaagagaaaggagagcatcgcagtggcacacgcgcaatggaaggctcgccggtgacgcgcctcccggaggctaactccctccccgacggcttcgttcctgactctgagagccctggcacggacgcgacgtttcccttctccgcgcccatcgttgatgatgcgctcaactccgatatccccggcgcgaccaaaccaacagaagaggagaccctagagcttggacttggtcctgagttaactcaacatcactagaccatttttttctccccttttgtcatttctttcaaaatatttatttaactatctacaaagtatgtgcttggtattttacatagttcgccttttaaaattatatttcttgtggcaattagccataatcatacatcagaaaagggcagtcccagtgcaggagactcccacatgagtgggggtctggaaagagataattggatttttgccactcacaatgttgtcttcttgttataattaccactgtgtctatgaattgtgggtccggctgggtctatgaaatgtgggcctgatggcaattttacaaacatgtttcttgctgatggcaaatatcaaaatctctcgtctgggaaaaggggtcaaacgaggcaagccttccctcgcaaatgcaaagagaatgctttgaacccgcgaaaaggaagttaatacataagtagccttttgaaattatgtttcctatagcagttagctagaagtctagaattataaatcagaaaaggaaatgaagtgcacaacctgactcttacatgtagaanacaacgcagctgagaatacagagaatacagggtccttttgactgagcataagaatgtcaattntaacatctngtatatatgtagctgtaatgaaggaatatagtttcgaggatggactgtgaagactaaactgcaatgagtatatttgtggcactaaagtgctggctg

SEQ ID NO: 146622 - DNA, 878 bp, Zea mays
  Clone ID: MRT4577_65236C.1
agcgtccgcggccgcgtgggcggccgcgtgggctactactcactagcggtagctcacaatggcaggcacaaagctagtatcactggggctcattgttctcatgagcatggggttagcaaatgctgtgagggtggctagattctctactgctgatgggagtggacaaggagggggagggggtggcggttacgtgaatggtgcgggatcaggggtcgggtctggcaccggagtaggtgacagtagtccggagggtgtccatgcaagtgctggagggggtggcgcaggcggtggaactagccagtatggtggatctgcatatggtgtagggttagggtcaggttcggcgagtagcacgtacagtggtagtgatggagggtcttccagtgctggtggtgctggcgggggcggtggtggcggaaaagctggaggttcttgggactccagcgctcaagggtctggtagtggcgtcggttctggctctgcctattctaacaggtatccgtatgggccaagatatgcaggtgcaactgctaatggcaacggtggcggcacggggaacagccagaatggcggtgctggcggcggtaaaggttctggatctgggttcggcgatgccattccctgatttctgtatcgagtgaatctaaagctggagcccatcgccctttcttgttttggagtcacaggattactgtttttgttttgttttttttcttttctagctgtgttgtgcttttgttagaatttgaattaataaagggcccggctgttcaagtaacagtagcagtctagtgtaagcctgtaaaggtgcagcttatgcgaagatgtaagcctgccagtttatgaaagaaatcatactcctttgtcatttggtccct

SEQ ID NO: 146623 - DNA, 471 bp, Zea mays
  Clone ID: MRT4577_65237C.1
tatcctagaacgtcgatgattatttattcgcctttcgatcgcatcggtagccgaccagcatgagtctcctcaggcggcgacgatggcgccaagaatgcttgaccggaagtggacgaactcagcctggaacaagccaagagggtgatctctgtgcagacaagcccagacgcacgacatctgtcgtgttgcccgtcggaacgccggagaccatggatttccgccccaaacgcgtccgcatcttcgtcgacaccggcgcggagggaccccacatcggctgaggttgatatctacaaaatgaataactcggacatgccatgcgcacgtgtccgacgccgaataatcgtatgagtgcgtgtgcttcgatcgttcctataaattgctagataaacataatgacatcgtacgttatgcatgaataaaaagtatcacaatattgttcaccctttcacgattgagctgaatataaaagaa

SEQ ID NO: 146624 - DNA, 518 bp, Zea mays
  Clone ID: MRT4577_65238C.1
agccagactagaccctcacatagtatgtcgctctcccatacatccagacttccgccgacgccgtcgcaagtgcaatatcccttttttcgtttgctccactcgcagcaaaacgtagatttctccaagtcacgctcccctgtctactctcgccgcttcctctgctactgcgggtgttcacgacgactataggatttcatccctgagtcaagtctccgcggcgctggggtcgaagagacgcaacaaggaaaaggccaaactcgttgacgtgctctcctcccactttcacatagtctactagaagtaacgccacaacgaacgcttctgatattatttacaaatcatagaagaagaaatttcgtctctgcatcttagacatcatctggtattctgccatgaagacacactgcgtagccggtgagaatgcgaggactgatccatgtcatcaagcatcttcagagaaattgatgtctatgctgtccaagtgcaaccattacacatggaagagatagtgacagtcg

SEQ ID NO: 146625 - DNA, 169 bp, Zea mays
  Clone ID: MRT4577_65239C.1
ccgattcacagaggtttcagggggacccaaatcactgctggttttcaattttttataacaatacatttttgtagtcagttccaacagcactgtccgtacttttaaaactggaatgacctccttcagatatcgtgcctcttagtgccaaacccacagtgagaccaaaagt

SEQ ID NO: 146626 - DNA, 279 bp, Zea mays
  Clone ID: MRT4577_6523C.1
aggttgttgagggtacataggttttgcactagatggcatagacttagcaacctttgcctctttgaagacatcttgactctgatcagtgtagggtcttcgagtcgtcctttctcgttcttgaaccaattccatgctcattggttcttgaggaacagaatgtgaggttgccagttctgaatcttgtgatgggtactgatgcacattttttcttgattttccttgttgagtagacactaagtgatcaccaggaagaggcttctttgttcgaggaactatgga

SEQ ID NO: 146627 - DNA, 394 bp, Zea mays
  Clone ID: MRT4577_65240C.1
accattttatccatttgaagttccctgtccaattagtattaatttattccaggattctgttgcaaaaaaatgcttatgctatactaccatattgaatgagattacacaataagcactaaatatacgtcaaggttttttttgtagccgcaattctgcaaatgtgtggttatgctcttttccttgttcatgtatcaggcatctcaatcacattgtactaatggtctaatactggtacttgataacgaggatgcgaagaacaaatttattctatgtcagaacaattcatcgtcatagttgaatttaccatccagtccataatctcaatggtagatgttctggtttttcatgttctccgtgttttcattggaggcgtggagtatgcattctgttcttc

SEQ ID NO: 146628 - DNA, 190 bp, Zea mays
  Clone ID: MRT4577_65241C.1
cccacgcgtccgcccactcttccgcagacttttaaacttacgcgtgcactgacaaggatgagccactcgatctacctcctcaccactggtgccacgaacagctctttcatgaacatcaaaaccattgctgagtgccttgcagatgacttgatcaactctgccaaaggctcttccaacagctactccatca

SEQ ID NO: 146629 - DNA, 333 bp, Zea mays
  Clone ID: MRT4577_65242C.1
gcagcaccttctagtagtcgtgggccggacattaattgtcatcaccccacaatgcaatttgccacagcatacatgccgtcctcctcctctctctagaaacacaaacaccgccaccaaacgcgtctctggaagctagcaggatatggaagaccatggcagccaccctttgctgcagtcgtccccagcagcaggtggcgccacgctcgcctacgcgtggggcttctaccaccagcagcagcccatcgctccgttcggcgagcatcatgccgtctgtggtgagctgctgctggtcctgacgactgcgcctgtgctgcggcgggcgctggtccgtgc

SEQ ID NO: 146630 - DNA, 235 bp, Zea mays
  Clone ID: MRT4577_65243C.1
ccggatcacccggttacacctgctgattcacgttcaggagctatcacagctagcggcgactccttttcagatgatatcatctcttacaccatcctacaagtactactgtagctccagcatgatcctgctgcagctcatgcaactgcatgagccctaacctggagaccgtcgtcgtcagcaacatcaaaaccactgtcctcgccgcgccgaccaccaaggccagctccctctgttt

SEQ ID NO: 146631 - DNA, 342 bp, Zea mays
  Clone ID: MRT4577_65244C.1
tttatcgaaacagtttcatgttccagttagagatacgctgagctcggataaagaaaaaaagaaatataaaacagatggagtttcagttacaggaaggacatatttgagtttttatacagcagccgaagcattcctctgaatcttgcaaagaacaagcaagctgaacaccagaatgcaggtgtgactgttcagcgaacctccgcgctgaaattgaaaactgtacagagtatcagcagaaacaagcgtgatcagtggcaggcaaaaaacaagatacagatcttccgtcccatcacagcggcaggagcgagctgcgtgcgcggcaatgccgctagaggagcgtcc

SEQ ID NO: 146632 - DNA, 138 bp, Zea mays
  Clone ID: MRT4577_65245C.1
cagtcgcatggctcgagcgaccatgcttcggcttggcaagggcgggaagggtctttgccaatgcgtagccaagcttcaccgtatggttctacgcgacaacatccatggcatcacgaaccggcagatgctcaggctgat

SEQ ID NO: 146633 - DNA, 394 bp, Zea mays
  Clone ID: MRT4577_65246C.1
tttttttttttttttttttttttttttttttttgtttttttttttttttttttttttttttttttttttttttttttttttttttttttaaaggaaactagtcccggcctctatttttttcacaacaaacaatgttctttaagccccccaatttttggcccaacataagggatgatcgtttttttttttttgggacggacagaccccaaccctccaggggaaatgaaacaagggctccccctccccttgttctacaaaattcgacgaaattgcttgttgacgaattattcattcatttcccacacgtttttcttaagggagagctccacaaccccgttctttggtgctgttattccaaccgggctaaacttctggaccacaggggggcaggctt

SEQ ID NO: 146634 - DNA, 475 bp, Zea mays
  unsure (1)..(475): unsure at all n locations
  Clone ID: MRT4577_65247C.1
gcggggggggggggggggttaaaaaaatttttttttttttttttttttttttttttttttttttttttttaaaaaataaacccccactggcctcggaaaatctgacccctaatctgaaaatcccacaaccccatggggatccccccccctgggggggggggggggggctaaaattaaaccnccccccctcctttcacgggatcgggacaggattcacgtaaacagtttacaactgaaaaaaaaaataaacggccctctgctaatcccctttacgagggcaaaagtttgggccccaggagcccaaagaccggcgctttgtatgacccaataacccaaaaggaaccaacgggtttcttttctatctcgctgcagttttttcaaacccccccgggcgggagccccagcacccgttgccccccttaaaccccttccatagangagcaaaaaacgcaagggggaatgtctggccatttcg

SEQ ID NO: 146635 - DNA, 250 bp, Zea mays
  Clone ID: MRT4577_65248C.1
actaatggtatcttttttgttcttatgtctttcacatgtgatcacggtacaaagtaagatttctggggtatgtggcaaactttccaaaaaaggggaaatcacgcggggggaaggggccaccagtaccccccggccaaggggctaaaaaagagccccgaatctgggtcaaaaatattttacggggtaaaaaaaccaaaaaaatgggggacgagagggggctacaaaaaaacaaaattggggccccccgccc

SEQ ID NO: 146636 - DNA, 163 bp, Zea mays
  Clone ID: MRT4577_65249C.1
tgttcgtcctcatggagccgccgcagacgaagtcgagactcttcgtgggcatcaacaagggccatgtcgtcaccaagagagagatgcctctgcgcccgtcccactgaatggcgacaagaacgaagagcgcgtccaccgtcataacatgtgtccccctggctgc

SEQ ID NO: 146637 - DNA, 496 bp, Zea mays
  Clone ID: MRT4577_6524C.1
ttcatccattcggccattccttaacatacttgctgccagcggcaccagcttgatcgcgctctctacgcagctgctacgctacaataaggatagtctctaatagaagactcggagggggaggccctgcgcaaggacgacgtggtccacagcggtgcgggcggaggaggagttagctgccaatgactacactgacccaccaccagcaccggtggtggacgctgctgacctgggttcatggcccctgtaccgaccggtgatacgtacaattaataccaacactaatactcctgtacgtgacagtagcaacagtgatcggatacaatcaccaaacacacgcatcttcgtcacgcgccagcgcagacgcctcatgcggacctgtacccgtactcttcatagactgggccttcggcggaatgatacttctgctggtctactggaccgctcgcatctatgggggccacatcaaccctggcgtaaccttatgctctcttactgg

SEQ ID NO: 146638 - DNA, 194 bp, Zea mays
  Clone ID: MRT4577_65250C.1
aatatttttctaccacacgaacctcagacggtttttttacaggaccacgggtgatactcacataatgccaagaagaagaagacaatgaaatccatcacttggtttagaaatctcggacaacggaaatcaagatcaaccgctaaacaggtactcattgatcagcacttcttgtctaccgctatcttaattcaatt

SEQ ID NO: 146639 - DNA, 308 bp, Zea mays
  Clone ID: MRT4577_65251C.1
tcaaccaacgggggcaaacttagaggtgtttggaggggactcaaaaaaaaacatacacaatggcgctcaagaaatcacagaagactttactgaccttacacaatgaaaccatctttgatgaccatccatataacatctcatttacaaaggaagcggtactctctgcaattgctgacgggaagacttaggaaggtgcatccggaccacattgcttgcttgatccgaacgaccgacctaaaggtaataccgaggctcgaccaatatgccattgcattgcatctgcttgatgaaggtaaacgagtcatggg

SEQ ID NO: 146640 - DNA, 714 bp, Zea mays
  unsure (1)..(714): unsure at all n locations
  Clone ID: MRT4577_65252C.1
caaaggccaccaccattccttccccaactctgcaggctgctcgtcgccctccctccacgccggacgcgccccgatccagatccaggggcgtaacatggcatcaaaacgtatcctcaaggaattaaaggacctgcaaaaggaccctccaacgtcatgcagtgctggtatgagcttgatttactaattgacttatgaatgatgccacatggtttgtatctgagtattgatgcattttgttacatttctggatactaattaaactgtactgttacagggtagaagctcatggtacaaaatacttattgtgctatagaattttgtcatgaacgtagacacgagtaattttttctgttatagatctctgtactttgagtgaacctaaatataactggaggtattcatgggtttggttctcacaggaattcattttgagatgtttcgttgaaaaatcagttatgaatatatatactgtactttgttagaaggacaggcctgatgcagtggtgacaagccttttcactgagccaaaggtcttggggttgatgcagcctctctgcaaaaatgcaggggtaaagcttgcctcggttatttcttccccagagcccactcatgtgggagccgccagcactggatttggcctttttaccgtagtttgtcagctgggaatgctatttgttgtaatcacagatttatctatgcatacaagnttttttt

SEQ ID NO: 146641 - DNA, 146 bp, Zea mays
  Clone ID: MRT4577_65253C.1
tgtagcggcggtctcaacatcaggcgtactcggctccggtcacccgttgatccacgcaatcatgtcgatgacgaatgccatggatcacaaggaggagaacgttactctatgacccattgtcctagaaggatagttattctttgttg

SEQ ID NO: 146642 - DNA, 387 bp, Zea mays
  Clone ID: MRT4577_65254C.1
actctgtcaaaatggtgtttatgtatttatttattattgtaatgtttcaccaagcatcacacgataacggaatcggctaaacaccaatttgcttgcagcagtcacaagcaggcaaacggctcacagcaggcaagaagcagcaatcttgcaacacgcgcgcctgcttcgatttcgatttctctcgcaaacaccaattcgctgtggctagtggctactggctactgcctctgcggctgggaggagagggaggtatcgaaggaccgccttctgacgaggaggcaggtgaccctcgcagctggctgctgctgctgctgctgctgccgcgtggcgtcgccgagcgtgcacagcacgaagtccgggcggtgcatcgagagcggtaggcggtcc

SEQ ID NO: 146643 - DNA, 277 bp, Zea mays
  Clone ID: MRT4577_65255C.1
gcgtcgatggcattgtggagatctcatggcgtccaggctcgtccactcctcgtcctccaggggactgtcgtcctcgccgacgccgccgttgcccaatcaacaccaccaccagaaccacaaccataccggggatggcctcctggctgccagcgggccggagcccatgaacgggctggatgcggacgaggtggataagtcggcgcccgtgccgtacctgccccagctggtcgtgctgtgcgagcagcgccacgagcctgaggggatcgatgaggctgcg

SEQ ID NO: 146644 - DNA, 399 bp, Zea mays
  Clone ID: MRT4577_65256C.1
aaaaaaaaaaaaaaaataaaaaaaaaaaaataaaaaaaaaaaaaaaaaaaaaaaaaagaggggggaaaattcaaacaatctatggaataactcaaatttactaacacgtgcactcgatcttgattaaggcaccatagatctattgtaacataaactattgtcaataatgcaacatcataatgacctggatatcccgatcgaaacccccctttataccacttcaacaactgatttttttaacggatttaaaaatggcttgttaagattaaaccgaagaggatttcccaacaatttcgcaaactgactttacccttttgctcgccctttaagttcatctaaacccccggatgatctgtacttttccgcaattttacgcctcgaatttcaatataattcaca

SEQ ID NO: 146645 - DNA, 301 bp, Zea mays
  Clone ID: MRT4577_65257C.1
aaaaacaacatatcaaacctttggtactcaaaaaatcccgacaggccagtcccattttcatacaaaattggaacaattcctcataagtttaaatggggggggtcgactgatgcaacacaaccgggggaggataagggtctttttagctgtaacaaaataggccttgaaaacatttcaaagcactttttattttttggcaaagggtggagaaaaaacccttggggggggagaaaactttaacctccttttgggcaagcttttactggggggggccctttttttttttaaacccttggggaaa

SEQ ID NO: 146646 - DNA, 224 bp, Zea mays
  unsure (1)..(224): unsure at all n locations
  Clone ID: MRT4577_65258C.1
aaaaaaaccgcagcctganaccccacctcaattcccccatttacattccctcattcacccaccactaaccatccacaccgtaaaaattaaaaatcattccgtccccaaaaaccccaaacactaaaccttttattaccatacaattctctccatttatcatatcccctcttctatcctcacacaccttctttataacccctttcccccaacacacatctctcttt

SEQ ID NO: 146647 - DNA, 405 bp, Zea mays
  Clone ID: MRT4577_65259C.1
tggcttggaactttgggctgatttatgtgcttgtttatgtgcttgtttatgtgcttgtcagtcacgcagtcgaacctggagttaggtctgagtgaggggggggtggaggtgagacggattatgtggtggatgtgtattggatggattcgacgattactatgtggtatgcgtcgaatgagtagagttggaattttgagctttgtggtgatcctattacttcgtctctttatactgcttctggtcgtaagcctgctgttcttgttgctaataaggttgggtctgtttagtctactgggtctgttggtgagattaatgcgtacggagaggagtagaagaagtcggatgcttcgcttaatgaggcgcctgctaaggtttctgctagtagtggctgtattcgtgcttccg

SEQ ID NO: 146648 - DNA, 475 bp, Zea mays
  Clone ID: MRT4577_6525C.1
gtacacaccactcaaagctgtactgacggcagacgcctaagaaccagacgacccatgagggtggtgctcgatgccctcgctctcctgactacgcgctgggagcgctacctacactcatacaagcggcaggtgtggattgtcagacacagacggcgggtgatgtaccgccaccggtacatgagacacctaggatgcacctgacacaagctgtgcatcaacctatcgccaattgcaggctgctcgcccacctgtacctagcgaacgccccagcagcatgagccagacttatgctaggtgacaacctgaacatctctagtaccaacacttagcaacgcgagcacgcagtctaagtcacaggcatgctatgggagagggatcagacggatgctattcacctgcttgagtaggcaaatgctctgaaagccaaggatgctgataccgtggcagtgcttcgatctgcccaggatttacagca

SEQ ID NO: 146649 - DNA, 315 bp, Zea mays
  Clone ID: MRT4577_65260C.1
atataaaaaaccggctggttttaattcgattcgacttctacaggttttacaatatttttgcccttatagataacaaccgctttaacaatttttttggctctttagattacatatggattcccaccggttctacaattttttgggctctatagattacaacgggggggggcaatccaacgcaaacagcccctttcatttccaacacccagtttgtaaaagggggtgccagtttttttctttttggctcttgatcccagccccccccccactttgggtaagcttttttcagccctacccctcccgggcgcggggggt

SEQ ID NO: 146650 - DNA, 609 bp, Zea mays
  unsure (1)..(609): unsure at all n locations
  Clone ID: MRT4577_65261C.1
cgaagtctaccaccaccctggaggaaaacccgaagtctaccgccatcccggaggaaaccccgaactctacagacgctccaaaggaaaccccgaagtttatctcaatgggcgcccttgagtgctccgctaacataacgatgacaaagccagcgcgcaagctgggcgctgttgttgaaggggtgtgcccggtgcggttcgaccacacgcgcgggatcagcgcggtggccggcagctgcagggaccggccgcgcccgtcgccggagcggtgctgcggggcactcaagaccttcgcgtgcccctacagcgacctcatcaacgacaacgaccacaacgggtgcgccagcgacatgttctaccagatcatcgtccgcggcaggctgcggccgggcctcttctcgcagatgtgcgtcgaaggcccgctgggcctctcgtgctgatcaactgcgtgcgtgagtgcgtgcccgacccaccggccggtatatatcgccgggtgattattacacctaagataagacgatgatgcctgtcacgtccagtgcgtgccattgattntgtgatgcatgtatgcggttntaactaatttgtaaacactctgtatcattttcccct

SEQ ID NO: 146651 - DNA, 806 bp, Zea mays
  Clone ID: MRT4577_65262C.1
ctcgaggccggccgggacccattcgcaggctgccttcatgcgcctccatttctggctctgtcccttgtaagcccatctaccctccttccatgcttacagagaagctccacatcaccattgcgcatattggccatggctactctgcgaagacgaccaccgcaggaccccttatcttacccgcttgaaggcattgactcgcgagggatcgagatgttcagaaagatgctgctgtatctgaataaacgtgccccctggaacccgcgactgctcagaatatgcctcacggactgagagtgaaagacgaatccccatcgatattgatcctgcggagacactcgagacccccaaaaactactgcccttgcattgatgcccatgcacgccgcgactgcatcttcaatgtgatcactggtacctcccactgtgactgcgcttgccttatccttgactccatctctgaccgtctactactgtggtatctcctgcggtggccggagccgctcacatgttctgccttgcgttctccctgtggagtgtgactgaagattctcctcgctgcaacaagatgcatgcccccactcccgaatactccaacgcacgcttatcaggagagttgtgagagaactctcgtcctacctcgagagagttgggtacaaccctgataagattgcctttgctcccatttctggatctgatggtgacaacatgattgagaggtccaccaaccttgactggtaccaaggccaaccctgcttgaggctcttgacagatcaccgagcccaagagccttcagactagccctgcgtc

SEQ ID NO: 146652 - DNA, 357 bp, Zea mays
  Clone ID: MRT4577_65263C.1
ggggggggggaccggggggatttaaccggggcctgccgggggggattggtttatgtaaacccccgggtttacattttaaattggcccccttggaggtcgcttaaaaaatgggatatttgcgggggaaaggaaaaaccagggattttccaggcccagttcttcaagagcacaaaaaggtttcaaaggttggggaaaaaaaaaaaagggttacccccccccccaaggaacccaagggcaggcaaaaggggttattttacggggaagggggccaataaaaacccggaaaagttttcccaaaacccccccccgaaaaactgacccccaggtttttcaggccctgggcgggggtgtcccaaa

SEQ ID NO: 146653 - DNA, 379 bp, Zea mays
  Clone ID: MRT4577_65264C.1
caaacgggcaaaccaaccatcggctactcggcgggtgggctagcacgctgcctaccaccatggcgggcgtcatgcctacccccgacaacctggacccgaagccggctactcccccaggcgccgctgcttgcgccacgctcaccccgactgccgacgacacctacacccagaccaacccgcttgacgccgggccccgcggcgcctagcccaaaccctaacctaccccctgcccctggccctgcccctgcccccgcccccggttgcacgcctccggcgtgagtcgcgccaccgatgcccccagattcgatctgcttcggtgctaactttcgttcactaggtgccgcagtgccaccgccgacgaccaggtcccgcagtacgt

SEQ ID NO: 146654 - DNA, 876 bp, Zea mays
  unsure (1)..(876): unsure at all n locations
  Clone ID: MRT4577_65265C.1
cattgggaccctcgaggcggcggccgggagcacgaggaactcccaatccgtataccccacccgacataaaaatggctgacgctcctgcccccgctcgcggcggattcggttctcgtggagaccgcggtggtgaccgtggccgtggtcgcggccgtggccgtggccgccgtggcggaaagtctgaagagaaggaatggcagcccgtcaccaagctcggccgtctcgtaaaggctggcaagatcaagagcatggaggagatctacctccactctctccccatcaaggagtaccaggtcgtcgacttcttccttcccaagctgaaggacgaggtcatgaagatcaagcccgtccagaagcagacccgtgccggtcagcgtacccgcttcaaggccatcgtcgtcatcggtgactccgagggtcacattggtctcggtatcaagacctccaaggaagtcgcgaccgccatccgcgccgccatcatcatcgccaagctctccgtcgtccccatccgaagaggttactggggtaccaaccttggtgagcctcactcgctccccaccaaggagagcggcaagtgcggttccgtcactgtccgtctcatccccgctccccgcggtaccggccttgtcgcatcgcccgccgtcaagcgtctcttgcaattgggctggtgtccaggatatctacaccgcgtcttccggttccaccaagactcttgagaacaccctgaaggctacccttcgtcgccgtcgcccacacctacggtttccttactcctaacctgtggacggagaacgcgctcacaccatccccgcttgaggagtacagcgacatcctccgtngagggtaagaggtactagagggtgtttctgcatgggt

SEQ ID NO: 146655 - DNA, 269 bp, Zea mays
  Clone ID: MRT4577_65266C.1
cctctcgagcgaatcaacgatactcgcaatgttctccgtcaacagacccgacgctagcacgacgcatttggacagattcgtatatctgatcagcactctctatcgacgagacagaatctccgaactcgtcagcatttacataatgcgaactcatgcgacgatgagactgacatggccaagctctacgaatctgttatgattgtccacatggtagtcctgctcttcgtcttatccaagcttgttccagtcggatacggtatcaacaatct

SEQ ID NO: 146656 - DNA, 294 bp, Zea mays
  Clone ID: MRT4577_65267C.1
accagtaatggggtgacaaaaaccaaagcagtagcagtagaagttaatacggattaaaaccaagtaaacaggttaagagaagattggcaatcgaaaacattgcgccacctttctttctccttttcttctttattttgtcccttttacaaatttacagtcttgtacgtgatggatggttggatgaacgagcgtatgagcactagacgaatgccttggtcctcagcgaaccaggatgacatgcggttgctggtgctgtccctggccgtgcagccaggccaaccggcttaacgcgtg

SEQ ID NO: 146657 - DNA, 1223 bp, Zea mays
  Clone ID: MRT4577_65268C.1
gaagttggttgtttctggtggctgtgctgattcaggtgtactcctcagtgacacatatcttcttgatgtagccatggataggccagtttggagagaagttcctgcatcctggaaaccaccttctaggctggggcactcaatgtctgtttatggtggcaggaagatcctgatgtttggtggtcttgctaagagcggccctctgcggctccggtctagtgatgtgtacacaatggacttgagtgaagaagagttttgctggcgatgcctcactggtagtggaatgcctggggctggaaatccagctggtgcaggcccacctcctcgcctcgatcatgttgctgtgagcctgccaggcggaagaattttgatatttggcggctcagtggcaggtcttcactcagcgtcacagctttatctgttggatccaactgaagaaaagccgacctggagaatattgaatattcctggtcgtcctccccgtttcgcctggggccacagcacctgtgttgttggaggaacaaaggcgatagtgcttggtggacaaactggagaagagtggatgcttacagaaatacatgagctttctttggtcagccgctcagtttgagttctggaatggtttgtagtcatgttccttgcaaattagatgcggcttcttatgcaacctgaagtttgattgccgtcttcagaagaactagaagaatgaatgctgggcatactgaatcttctggcagctacctggcggacttggaagatgaaatggcatcgactggtttgctcgctttgtgtagaaaaggggtagtgatatgttcatttttattgccgtttgtttggccttttttaccagataattacaattcataagctactactgttgtggaatgagtagcaaattttatatgtattctcagaagttcaagacttgcaatatgttaggaaaacaaaagactgcactgtatatagtttaatcttttgatgtacggtacgtggacaacttgatgctgctgtcttgtggcacaggcacacagctagatggcattatgtatggtgatcactgatcaaccatgtttttttttgtagaacttgtataatatgtagaagtttcaatctggtgagcttagctcagaatcggtttacttgtcttctgtttcacatgtttgcattatcatggacatgattatgaacagcggttatgtttatgcaacaatgccaaacttcgatgt

SEQ ID NO: 146658 - DNA, 365 bp, Zea mays
  Clone ID: MRT4577_65269C.1
atattcgcatctgctgcctccgcctgtcgagtctcgcccacccgacatcctcctagatactgtactcgccagtcaccatgggcaagatataacatccgactcaacggctcacggaaggatcggcaggctcgaggccagggtcgccctacacagcgaggatgtcgagctcgaccacgtgaacgaccccttcatcaccacggactacatgacctacatgttgcagtacgacaccgtccacggccactggaagcacagcgacttctcactcaaggactcccagacccttctcttgggtgacaagccgcgcaccagttttggcatgatgaaccctgaagagacccctggggtgaggctggcgctgagta

SEQ ID NO: 146659 - DNA, 567 bp, Zea mays
  Clone ID: MRT4577_6526C.1
gcccgacgggcacttgagatcacctataagcaggttggagcctgtcagaaaacacaaccttgctgaatctgcactatcatctagctggccacagagcttgcccttatcgcaaccctcattgcgcttgttgcgctcagtgttagcgcacctgaagcgtacattatggcagaccggtcaattgctcactatgccacaataccactgaggcttgcaacaggcactcctaagtccattctgacaccctatctgcgcaagcccacgagctacaaacaagctgataccgaggagatggataggacagactactgaccatatggaggaacgcttcctgtcctgtatacccgtacatgcacctggaacgcaaccacactaacagctactaccaccaatgagcctaatagatgtggcgaatcctgccgcctactatgagacaccagctgcttgtatacaacccacttgatatggcaatcgtcgctgcataccaacaacaacaactgttgcaacagtgtctgtacccagcttaatcgcctagccatggagaaccctgtcgtctacctacaacagtaa

SEQ ID NO: 146660 - DNA, 544 bp, Zea mays
  Clone ID: MRT4577_65270C.1
gtggtccgctacaagcctcaagagtgagtcggactacgccctccgcccaaaacccaatccagggccaggccaggccaggccaaccaaaccctaggcactgcgccacgcctagcgcgcgtggtatccatgggctgaccgcgtcccggtggggagcccggatccggagctagggttccgtcctaggcggcaccaccatggagtgggacagcgagtccgacggcgccggcagcgtcgacgccggctatgaggagcaggaggaggaggaggaggagcggggaggcgagggtggaggtggcgacgccgggggcggcggtgggatgttcacgttcgcgattgaaggcatgctgcgctcctccgggccctgcgggctagtcgtcaccgacgcgctcgagcccgattgccccatcatctacgtcaaccgcggcttcgaagaggccacgggctaccgcgccgaggaggtcctcggcaggaactgccgatttctgcagagcagagggccattcgctcgaaggaggcaccccctagttgatgctgcactggtttc

SEQ ID NO: 146661 - DNA, 2809 bp, Zea mays
  Clone ID: MRT4577_65271C.1
aacgacctccgcccattccgctcgcggttgcctccgcctccgcctccgcctccgcgcctaacccaatccagagccagggcagggcaaccaaaccctaggccctcgcgctcgtggtatccatgggctgaccgcgtcccggtggggagcccggatccagagctagggttccgtcctcggcggcaacgccatggagtgggacagcgagtccgacggcgccggcagcgtcggcgtcgacgagcaggaagaggagcaggagcaggaggaggaggaggaggagcggggaggcgagggaggaggtggcgacgccggtgggatgttcacgctcgcgattgaaggcatgctgcgcgcgtccggtccgtgcgggctcgtcgtcaccgacgcgctcgagcccgactgtcccatcatctacgtcaaccgcggcttcgaggaggtcacgggctaccgcgccgaggaggtcctcggcaggaactgccgatttctgcagtgcagagggccattcgctcgaaggaggcaccccctagttgatgctgcactggtttcagagattcgaagatgcatagacaatggcattgagttccgtggtgatttactaaatttcagaaaagatggatctccagtgatgaacagattgcatctgacccctatttatggagatgatgaaaccataacccattatatgggcattcaattcttcactgatgctaatgttgatttgggaccattgccctgttcaatgacaaaggaaccagtgaggtcaacacggtttgctctagataacacatttcgacccatttctacgaggccagagcacagcaatttctgccgggaatattctagtctcttccaattaacggatgaagtgctttgccaaagtatactgtcaagattgtcaccaagagatatagcatctgtgagctctgtgtgcaggcgattgtatgatttgacaagaaatgaagatctctggagaatggtttgccagaacgcttggggtagtgagaccactcgagctcttgagacagtgcctgccgcaagaaggctgggttggggtcggctggcaagagaactgacaaccctggaagctgttgcctggaggaaattgacagttgggggtgcagtggaaccatctcgatgcaatttcagtgcctgtgctgtagggaatcgtgttgttctctttggtggggaaggtgttaacatgcaaccgatgaatgacacatttgtattagatttaaacgctagcaatccagagtggaggcatatcgatgtgagtgcagctcctccaggtcgctggggccatactctatcatgcttaaatggctcttggttggttgtttttggtggatgtggaaggcagggtctgcttaatgatgtattcatgctggatttggatgcaaaacaaccaacctggcgtgagatacctggagttgcacccccagttccacgttcatggcacagctcctgcactttggatgggacgaagttagtagtttctggtggctgtgccgattcaggtgtacttctcagtgacacatatcttcttgatgtaaccatggataggccagtttggagagaggttcctgcatcctggaaaccgccttctaggctggggcactcaatgtctgtctatgatggtaggaagatcctgatgtttggtggtcttgctaagagcggccctctgcggctcaggtctagtgatgtgtacacaatggacttaagtgaagaagaaccttgctggcgatgcctcactggtagtggaatgcctggggctggaaatccagctggcgcaggtccacctcctcgcctcgatcatgttggtgtgagcctgccaggtggaagaattttgatatttggtggctcagtggcaggtcttcactcagcatcacagctttatctgttggatccaactgaagaaaagccgacctggagaattttgagtgttcctgggcaccctccccgattcgcctggggccacagcacctgtgttgttggaggaacaaaagcgatagtgcttggtggacaaactggggaagagtggatgcttacagaaatacatgagctctctttggcaaacaactcagtctgagttcatggtggacaaaccggggaagagtggatgcttacagaaatacatgagctctctttggcaagcaactcagtctgagttcagggtggccaaaccggggaagagtggatgcttacagaaatacatgagctctctttggcaagcaactcagtctgagttcagcaatggttcttagtcatgctcctaatcaggaatggttcttagtcatgctcctaatcaggaatggttcttagtcatgctccttgcaaactaattgcggcttcttatgcgacctgaagcttgattgccttcaccttcagagtatcatctggcagctacatggctttacttgggagatgaaatggttttcactggtttgctcgctttatgtaggcagagggtagcgatatgttcatttttattgccgtttgcttggccttctttttaccagataattacagttcataagctactattgtggaatgagtaccagattttatatgtattctcagatgtttccgacttgcaatatgttaggaaaacaaaggactaccttgtacatagtttaatcttttgatgtacggtacgtggacaacttgatgctgctgtcttgtggcacaggcacacagctagatggcattatgtatggtgatcactgatcaaccatgtttttttttgtagaacttgtataatatgtagaagtttcaatctggtgagcttagctcagaatcggtttacttgtcttctgtt

SEQ ID NO: 146662 - DNA, 496 bp, Zea mays
  Clone ID: MRT4577_65272C.1
cccaactctcaacatccaatacacatgggagagtgacacacactcatctacctatcccttacatatcgcccaaacccccggcctcaccaccataacctgtatcaagtcttcccaagccttagacttaactcccttcctacatttctgacaagagaacacataattcacgatggcgagagcagcacgagagtgccatcctccactactttcctccagctcccataacatctacacaagctccttttacatctcaaccatgagaatatgaccacatacacaatcatctacatgctcaaatgcaacgtcttaaagtcacctactccaaactccatccgctgtatatactactgccactttcatctctcttcaataatagggattaataaccgactatctgcagagatcacaaactcagaattcatcttgaacattatcgacactcctgggcttattgaaggtgggtgcattaattatcaagctatcaacattattaaca

SEQ ID NO: 146663 - DNA, 605 bp, Zea mays
  Clone ID: MRT4577_65273C.1
ccccatgcagagccttcatgtgaagcgtgccaaacaaccgtatccgataattattactgatcattaagagtcatcagtccggggcataaacccgtaccagattcaggccgcagatagtgcccacacagagcgccacccagggacacctgcccttgagcttggcattggagtagccaattcaagccacatggatatgcctgaaggaagccttggtacacttcctttttacatttatgttttgggattcagttttgcaatgcaggttaccgacgtggggacaacacccgggaccaacctgatttagtgctcacacttgctcctctggaatggcacagtgagaaccttgcccatgacactcgctgccttgaactggttcattggagtgggacacaataggattataagatgatacttaaagatcccatttgaagttggaatgcgaacaaagacagcctccgacttctacctctgatggaactcacaccgggtcccatgcacagtataactgctgaatgttgaaggtgcaagatcaagaaactttttcctgtagcttttgcctatggcaactgagtgggactaggaatgggcatgcttaccggtccttg

SEQ ID NO: 146664 - DNA, 372 bp, Zea mays
  Clone ID: MRT4577_65274C.1
ggccccggggaatttttaacttttttttttatttttaacaagggccccaccaaaaaaaaaaccctatttttttttcttaacaaagcccaataagaacaaaaacttgggaactccctaccggacggccggtttttattcaaaacccaaagggacccccgtgttcaaaacccagttggatccagcgtccaggggccccgttcacatttttctctaggaacaaccctcgatagggtgggggtgaaaccaaaggccattgggccacccctttttagggagggaaaaattcatttcttcaccacccttccgggtcccgaacatgtgggggaaccaggagaccacccggttgatgtgaccccacttgttgatcccccc

SEQ ID NO: 146665 - DNA, 282 bp, Zea mays
  Clone ID: MRT4577_65275C.1
gaaactcctccacacagagacaaggggatgcggcacatggtgggtcccgattggcgccagtcttcgatgtggtcattgtccaggcagacaagcccagcttcttcactgaccggcgcaacctttcagaaaactcgatgagaagggctcacttcagtgggaccggatcacccgctcggaaaagggcaagatctatcggcagggaaacctgtttgacttcttacgcttgacggaatggcgtggcccccgcgtgctctacttcggggaccactctatagtgatctg

SEQ ID NO: 146666 - DNA, 642 bp, Zea mays
  Clone ID: MRT4577_65276C.1
ggacctcaggcggcggcgggagcaacctagcgccacccagacacccactcgcttcagccgtctccgccgcgcggacaaagacgcggagacaggtatgtccggctgagcacgggctgcgctcgcgcacgcgagacctcttcgagcgcgcctttcgtgagaaggtgctacatgccgctcaccacctactttcgcacctactgaatctgagattactcggatgctcaggcgaacgctaggcatatcacacagggagatgcggcacaagtgctagaacggtcgcaccggaacgtcgcccggaacgtcagcaagcgcgcctagcggcaccaagatctacaagaagggctatgggcgtatcatcacgaagtgaatccatgcgcgtgggcaacatgtgcaggcgtgacgatgcacaaatattccgactgacgaaggcgaagaatgagcagttggaagtggcagccacaaagagctgccgaggctatcattaccaagaagataagcattgcctgcccaagtccagtgttcatgagtcgagggcaccaccattgagaccgcagctaccatcgcatatgatgagctgaatgatgtcagactggatactgatgttggttgtaccatctaccaggaggacccagctctacatct

SEQ ID NO: 146667 - DNA, 197 bp, Zea mays
  unsure (1)..(197): unsure at all n locations
  Clone ID: MRT4577_65277C.1
acttgcttctgacaaagccgcagcagcgctcctaccagcagcacatcattggaggggccctcttttagattgcttattacttgtgattcaataataaagttatttggatgatgtatgtgggctaccagaaataagaagttacattcccagagtctagtgtggncagagatcccgaaaaaactggtggtaatcggagc

SEQ ID NO: 146668 - DNA, 190 bp, Zea mays
  unsure (1)..(190): unsure at all n locations
  Clone ID: MRT4577_65278C.1
gttaatgaacaatcgtgttttaagacttcctcttgtgtgttaaaatttaagagtggacatcgctgcctgtttaaccactttatttnnacaccattgcgttttttttactttttgtaatgaaactttttttttgttcattaaattaacctcctgtgttaacaatgattttcttttgtataaactcttttct

SEQ ID NO: 146669 - DNA, 592 bp, Zea mays
  Clone ID: MRT4577_65279C.1
aaatctttaaatattaatagagctcctcagagatctggggggggggggggggggggggaatcctcaccggcggggtaggacagtagtcgggagccccgccccaacaattctgcacatatatgatcctaaccctagccacccacacgttctacccctccctacgtcaccggcagtgccttcggactattctaagttcttatccgttctagttcattagatcgagtgagctagtgattatcttcattgtatagagtaggataataatacgtgtcatcattgataagttactcctcgtcaaggtctagaaaaattttatattactagagtattacatttagatcatgattgtttatgttgaagttgtctatttacaattggaggtcctgcagaattatttaatattacatattataaagattattgtattggagttttctttactgatactggtcttggtcgttttacaaatctataatttacagtaaataataatcattaagtatttagtcaacaacgtttacatggtcctaatgatcatctctcacatagtgcttgttaagttgaacttggaaataatgatgttcatttcaag

SEQ ID NO: 146670 - DNA, 781 bp, Zea mays
  Clone ID: MRT4577_6527C.1
tgcccatctgatgatctcccgctagcttccttcttgctactcccgcagtccccagtccccacccgctgcgccctcgccatggatccgagctccgaaatcatactggacactccatacttccgcatctacagcgaccgccgcatcgaccgcttgatgggcaccgaaacggtgccggccggctttgatcccagcaccggcgtcacctccaaagatgtcgtcatagacagcgacgccggcctctacgtccgccaggcccagcctgcgggacatgccgtgcgagagggtgctcgtgtgcggggcggagctggactccctgctgccgagggacagggcctactacgaggccctcgcggcaagcgggtggagcggcacggtggagtggttcgagtcccagggccaggaccacgtcttcttcctcttcaaacccgactgcggtgagtccgtggcgctcatggatcgactcgtcgcgttcttcgctgcgaactgaaattcgtcatgtgcactcagtgttttatacatagtagttattgccgaggttttcaaatatgtaaaagtgccctataatttgaaaataggtatattttatataatatagggcaccaataaaatatctcgctgttgaaatgtcaaatctagattacagagcagtatgatgtagtatatttaagagcttgaaaaggtattttatatttttttaccaaattttatgaaacaagttattgttggagttgttttttctgtgtagaaccctatattttaatttaagacgtcagtttaaggt

SEQ ID NO: 146671 - DNA, 174 bp, Zea mays
  Clone ID: MRT4577_65280C.1
aaacaaggattctcagaggatattgcacaaattttaaataaccatactttattcgtatttaatggtactagatactaactcttacggttaagattgctgatccaaagaaaagtaaacaacactagcggcgccggaacaaaaacatcctgaaacagtctactatgcatgcacttg

SEQ ID NO: 146672 - DNA, 1921 bp, Zea mays
  Clone ID: MRT4577_65281C.1
cctcgaggccggccgggagttccgtaccaccaaatccctacctcctcagtcctcacccattcattcgtccatcccacctaccatggccaccgcctccggcactgacgccggcgcccagccgcgcgacgaccccagcctcctccccttcgcgtccttctcgctcggcctctccatccgcgcgccggccacccccacactcgcctccgtcccctccaccctccacctccccactcaaatctctacactcgccgtctgcctccacccctccgccgcgcagccctcctcccgccgcaccacccgcctcaattccgccacctcctccgtcatcgcctccaacctctccacctacaaagagcagctacgcgaggtcaagaagcttatcaaggagaagaaggatgatgctggaatttctgaatatattgatatggagaaagagcttcaagaggtcataacgttaaccgaagagattttggcaactgcaaagcaaactgagagtgcccagaatgttgcaggtctatcaccgccaagctattcagctggagtgcagtctgagggactggatgacctttcacattcccataagtttgccgttggtactagagttcaagctgtgtggagtgaagatggagaatggtataatgcaaccgttgaagctttgacaccaaatggatactatgtagcctacgatggctggggaaacagtgaagaggtggacccagataatgtgaggctgcttgaggaagaagcagctgatgccttgggacaagctgaaaaggaagctgaagctacaaaaatggcaataaagaggaaaattgaacaagcagcaacatctgattttcaggcgcgtagcttgccggccaaacttcgtatcgaaccaagtgaccctgaggatgttaaagctgcaaagcgtaagaaaatacatgctttcaaatcaaaatcccgctttgagcagcttgaatttgcccaaaacaaaaggcagaatgcatggcagcagtttcaaaccaaggggaaagccaaaaaggtggggttcttctccggtcgcaagaaggagagcatcttcaagtcaccggacgaccacagaggtaaggtgggtgtcactgggagtggcaagggcctgaccgacttccagaggagggagaagcatctgcaccttaaaggtgggtccggggatgcagcggatgatgacgaggagtaaactgaagaaccgagcctctgtttgtatcccgccgaacagacatttccatacctgttctttagcgccgacatggcctcgaggggactcttgacttaaaccagaaaatttcaatgtttgtcccattctcccaaaaaaaaaaaaaaaaaaaaaaaaaaaaaagtcatcgggcggacttaccactggaggatggagatgcaaatgcaccttaaaggtgggtccatgaatgttgctcacgttgtcgagagggtcctgatgaagcgatcttgtgttagagcagggcatttacagctttgtcccattcttgttctttagtctgtagcgaagtatagatccgactctggtcttacagttcatttcttattttatcctgtaatgtgatccctcatgctcgtgtagctacacgtcagatacatcggattaatgattttcacaaatggatgcttgatttctcctctgatttttggggcatgttgctatcgattcctttcttctttgttacaaggagccatgcccagcaaggtagcatgaaaaggccgcttgcaacagaagatttgttttggggaatttagatttttgtaaccttgaaaggtgagaaggttaattatggcaatggtagggactgtccgagcaaccatattaataatagtgaacaatatgtaaaaattcagtggcttcaaaggtgtccattaccctttatcttgatttattgcaggtttgtactactac

SEQ ID NO: 146673 - DNA, 1578 bp, Zea mays
  Clone ID: MRT4577_65282C.1
gaccgacgcgtccggtgggcagaatgttgcaggtctatcaccgtctagctattcagctggagtgcagtctgaagggctgggggacctttcacattggcataggtttgccgttggtactagagttcaagctgagtgcagtgaacatggataatggtataatgcaaccgttgaagctttaacgggaggggagaaaggcgaactcgaattgggggaagagagcgagagacgaatcgcatcgagccggagaggaagtcagagacagggaggagggcggcggaatcggcgccggcgggaggcaggcatggaggacctgagcgtggaggagctcgcctccaacctctccacctacaaagagcagctacgcgaggtcaagaagcttatcaaggagaagaaggatgatgctggaatttctgaatatattgatatggagaaggagcttcaagaggagccatgcccagcaaggtagcatgaaaaggccgcttgcaacagaagatttgttttggggaatttagatttttgtaaccttgaaaggtgagaaggttaattttggcaatggtttgtactactacaaatttcggtgttgctgctggtgttctaagttggatcttgaaatatgggcacatgtttaatactactgggaggttgcttgtgtttatgatgcttaatatcattttttgtgtttgctgcaggtcataacgttaaccgaagagattttggcaactgcaaagcaaactgagagtgcccagaatgttgcaggtctatcaccgccaagctattcagctggagtgcagtctgagggactggatgacctttcacattcccataagtttgccgttggtactagagttcaagctgtgtggagtgaagatggagaatgctgaattgccaggtataatgcaaccgttgaagctttgacaccaaatggatactatgtagcctacgatggctggggaaacagtgaagaggtggacccagataatgtgaggctgcttgaggaagaagcagctgatgccttgggacaagctgaaaaggaagctgaagctacaaaaatggcaataaagaggaaaattgaacaagcagcaacatctgattttcaggcgcgtagcttgccggccaaacttcgtatcgaaccaagtgaccctgaggatgttaaagctgcaaagcgtaagaaaatacatgctttcaaatcaaaatcccgctttgagcagcttgaatttgcccaaaacaaaaggcagaatgcatggcagcagtttcaaaccaaggggaaagccaaaaaggtggggttcttctccggtcgcaagaaggagagcatcttcaagtcaccggacgaccacagaggtaaggtgggtgtcactgggagtggcaagggcctgaccgacttccagaggagggagaagcatctgcaccttaaaggtgggtccggggatgcagcggatgatgacgaggagtaaactgaagaaccgagcctctgtttgtatcccgccgaacagacatttccatacctgttctttagcgccgacatggcctcgaggggactcttgacttaaaccagaaaatttcaatgtttgtcccattctc

SEQ ID NO: 146674 - DNA, 1248 bp, Zea mays
  Clone ID: MRT4577_65283C.1
ggcgaactcgaattgggggaagagagcgagagacgaatcgcatcgagccggagaggatcgtcagagacagggaggagggcggcggaatcggcgccggcgggaggcaggcatggaggacttgagcgtggaggagctcgcctccaacctctccacctacaaagagcagctacgcgaggtcaagaagcttatcaaggagaagaaggatgatgctggaatttctgaatatattgatatggagaaagagcttcaagaggagccatgcccagcaaggtcataacgttaaccgaagagattttggcaactgcaaagcaaactgagagtgcccagaatgttgcaggtctatcaccgccaagctattcagctggagtgcagtctgagggactggatgacctttcacattcccataagtttgccgttggtactagagttcaagctgtgtggagtgaagatggagaatggtgactttctctttgatatacctatcattgtttgtgtctagatgatcttacctttaatatttttcacatcatttcattacaacatgtttgattagctgaattgccaggtataatgcaaccgttgaagctttgacaccaaatggatactatgtagcctacgatggctggggaaacagtgaagaggtggacccagataatgtgaggctgcttgaggaagaagcagctgatgccttgggacaagctgaaaaggaagctgaagctacaaaaatggcaataaagaggaaaattgaacaagcagcaacatctgattttcaggcgcgtagcttgccggccaaacttcgtatcgaaccaagtgaccctgaggatgttaaagctgcaaagcgtaagaaaatacatgctttcaaatcaaaatcccgctttgagcagcttgaatttgcccaaaacaaaaggcagaatgcatggcagcagtttcaaaccaaagggaaagccaaaaaggtggggttcttctccggtcgcaagaaggagagcatcttcaagtcaccggacgaccacagaggtaaggtgggtgtcactgggagtggcaaaggcctgaccgacttccagaggagggagaagcatctgcaccttaaaggtgggtccggggatgcagcggatgatgacgaggagtaaactgaagaaccgagcttctgtttgtatctcgccgaacagacatttccatacctgttctttagcgccgacatggcctcgaggggactcttgacttaaaccagaaaatttcaatgtttgtccc

SEQ ID NO: 146675 - DNA, 533 bp, Zea mays
  Clone ID: MRT4577_65284C.1
ggccgcttttttttttttttttttctttttttttttttttttttttttttttttttttttttttttttttttttttttttttaaaacaaacaaaccccgcatgggtatttgaaatgaaatgaaatgaaatggtttatttagaacaacgaaatcgatgcgcttcctcaaccgaggggagcttccctgcatgaaaaacggattagtcattagggttcccctccgatcggggttttaaaaaaaactacccgagcagcagggcatatgcatccaggaatgcgaattaatttggcggggatgcatagctagcagttataaattttgttcgcaccacacattttccccgggggggccctttaccctttcatttgttttcgggccaatctgaatatgtatatgaaaattcggggaagggttccccagcatatcagaagggaaagttggtcagtcatcacgtttctggcgaagatcccacctgcctcgtcttccaaaggacgggggggatcttcatccatatgtacacgattgccgccaga

SEQ ID NO: 146676 - DNA, 388 bp, Zea mays
  Clone ID: MRT4577_65285C.1
gggaaaaaaagggtttttaggccggcctacctgaaatgggaacccgaagacaatttcacaaaagttacaggtgcaatgcttaaccaatctgccaaaaacaagccgcaacgacaaaaaaaaaacccagggggtccctttgtacaaaaatttaatctaccagggcttgtagtacttggggggccccaacgggattttggggaccaccgggttgtaggacttcccgggaaccaccacctttaactccgtcccaaccttgggcattcccgactttacgtagcccataacgatgtttttttttaagcacgggctgaaccctccggtggtaaactggccgatccttttccccgagccggttaccaatttgctgtggctccccgcgggcgggccc

SEQ ID NO: 146677 - DNA, 219 bp, Zea mays
  Clone ID: MRT4577_65286C.1
tactccccttttaaagatgaaaagaaggctaggactttataacattcctagggcttcaggagaagctagaatagggcagcacatgcacaagaagcgcttcctcctgctgctggtgctagttgaacaggtgcaggtaacagcatgatgtgctgctccggcataggtatagcttatgcacccacccaaggctctgctgcacacacaccaacagttactgct

SEQ ID NO: 146678 - DNA, 392 bp, Zea mays
  Clone ID: MRT4577_65287C.1
cagggaccttcggccttgggatgaaggtgtacacgatatgaaaggcgcgatctgggagaaggatgaaccagttccgaagctacgtaaggagaagctttggcttagcggtggaaaataaaaccgacttaaaggggaaaaggctgtctagtcctcgatagattatcccttagtcaatagtaaatgtcaagggtatggatgtaattttacataggatgcgtcatgtgcctataaatagatgaacaatagcatcgtactgttcacgctgatttgtattcactcgcacgtcacacttggattcataccttctgtcaagccgaaagtacaaatgtaatttaatatcgttactgcttattcgggattgttcaatgagaaattaaataatctaatgattt

SEQ ID NO: 146679 - DNA, 197 bp, Zea mays
  Clone ID: MRT4577_65288C.1
tctctcgaccctggcgttggcggcacaatggcgggttctactgcgaggacggtgaaggatgtgaacccccacgagtttgtcgaggactactccgcccatctcaaacgctacggcaagatggaacttcctgagcgccttgatcttgtgatgattgcgcggttcaaggcgccccctccttattaccctgactggcacta

SEQ ID NO: 146680 - DNA, 277 bp, Zea mays
  unsure (1)..(277): unsure at all n locations
  Clone ID: MRT4577_65289C.1
tgatatcccctctaatgttccacacttgtcgccggggtttttttaaataactacagaggcgccccgacgtgtggttcattcctaccaactctacactggtttttcaaaaaatcgtgggacgcggacgaggatcaaagcaggggctcggccttagaactaactcaccctcctacaatatactaactgaccgggggggtgggcctgaacattgcccaaaattaaaaaccccaacatgtgttccaacaccgtccccntcttaacttacattttacgcccc

SEQ ID NO: 146681 - DNA, 314 bp, Zea mays
  Clone ID: MRT4577_6528C.1
tctttctatcgacccctcttcctatcgaccggggggctttcatttacatgatacccaggcattttttctccgtttctctacttttccagttttataccaacacacccactttatcaatcctctcatgtgacctgaaacttgattctgaagacctgcccaacacctaaaataatatacctaaagttttacttaatccatctaatgctattattcttatatatacacatttacatgtaagacataaatataactctgactttctatttgttcatatattagcacgtcattctccttatccaaaactaatacattta

SEQ ID NO: 146682 - DNA, 424 bp, Zea mays
  unsure (1)..(424): unsure at all n locations
  Clone ID: MRT4577_65290C.1
cgcgggaacatatctccgagaccagcaacaacatagaaagtggaatccagtagcaaaatagagcaaacatggcgaccaagatattttccctccttatgatccttgctctttctacatgtgttgntaacgcgacaattttccctcaatgctcacaagctcctttagcttcccttcttcccccctacntcccatcaatgatagcttcagtatgtaaaaaacgcnctcttcaaccctataggctccaanaancacncgaagnaagcaacntacntttatcacccntgtttcnacaatcgacagccctgtctgtgtggcggtcattgggttcnnaccngcagggtatctttagctacagcaactcgtgctacctttgatcaaccgannagctttggcaaanntgtctccctactctcancaacaacaa

SEQ ID NO: 146683 - DNA, 1505 bp, Zea mays
  Clone ID: MRT4577_65291C.1
gatcgccatgcgcgcatatgcgcgcttcatacactagtattttaaaaaagtggagaatgttcagcgctcagcagacatgcttagacactataatcatgccacattgattaactgggatactagaactccttgtcaggtgaacatacaatacaatacaagttacaaaatgcagggagtcagattaatggacatgatacacaagccatggccgcaacggtgtgtttctgttgcaatgccgggactcgggccacagttttggctgaacaaacttagcagcgctccaggcgcagaagagaccggttcagtgcagcttgttggcgacgtagaggaggtggctgattttcgtcggtgggtaattctgcaggagcttaaggttggaggtgaagtcgccggccaggaggcgcttccggacaaggatcagcatcgcgcagcatattctgagcaaggtttcctgggggccaccaggatcacttaatagtgtgtcccagatgtgaatggtgtcggcgaagttgaattcctgagtcagcagtaaggttatccatctgaatgcgtagaactggggattaacttccgtagttatttccagatgttgctggagttctccatcatactttgctacaagctgtgataacttggctagtgtacctcgaatgccaacagcactgttgtccagtttctggcagaagttgtctctgaacccactaagcaactcgacgaagcaaaagaatgaatccgcttccgcgaattcagcatttttatcatccggatcactccgaaatacaaagaagaggggtgccaaaacttcattcatcccttgtacatatcttattccagcattcagcttggcaaagattaacagtacatttttcaaagattcctgattggactttgcaaaagacgagtcgccgcagaagaactgcatgtcagggtgggtgcgctttacatcgcggtcaatctgctccataatctctgagtactcaaaaaactgattccaagcactggtcttcccaaggcttaaagggtgctcctctcgggttacctctgacctgtgcaggaagccattgtcaacatgctctgcacttacgttgtggtggccttctgttggcacctgttgcgctctttctacagggtttgtaaggaactcatctttgaaagcagcgtactgccctctcttctttgccagctcctgctcccacagcgagcggtcattgggcagatagcccagtagcagcttccatacagttgctcggacgcccgccgcgtctgggactccctgagccgccagcatcctcagttcatcgagatctatcaccttcttggacagcgccgcaaagaggcgggactgccgagagatctcgaattccggcgtaggcgccggcggaggagatcgcggcgagctcgccatggatttgggcgtcgggatgcacccgtccgtgtggacgtgggttccgcgctgcacaagcgtgcaagttggccagatatgcatccgaatctctcccggccgg

SEQ ID NO: 146684 - DNA, 781 bp, Zea mays
  Clone ID: MRT4577_65292C.1
gcacgagctcgaccttttggctaagatcaagtgtagtatctgttcttatcaatttaatatctgatatgtggactatgtgttcactttgatattaaatttattttttgtgggggagagtccaccaccgtggcttgccactgggccccttgagcgtcgctcggactgggccccttgagcgtcgctcggccgttgcactactggctgagcctggcgcaccccaaccaatccaattcgagattttttccccaaccaatctaatttgagattttttattaactagctcagtgcccgtgggttgcaataggatcatataatagtttgataatttatatatataaatgtatgttatactattataagatagaggatgacatccacgagctgttcgggatgacgttgaagagaaactcgggcgtgagacgcacgagcactcacctagtcatgtagtatacaatatttaacaagacaatttaaaggcaaaaattcaagaatgatcttttatagactactataaattcttagctcactgtaattgacttgtttgaagaacacaataatacgcacgagcacgagcactcttgttaaatattgtatacaacatttaacaagacaatttaaaggcaaaaattcaagaatgatcttttatagactactataaattcttagctcactgtaattgacttgcttgaagaacacaataatactactgtgaatatgtgatataacttaatcacagtagtaaaattacatctgatgttgtatttggtaaaaaaaatatttt

SEQ ID NO: 146685 - DNA, 331 bp, Zea mays
  Clone ID: MRT4577_65293C.1
gcacccgcacgaaagcacggaaaacggctcgagcggagaaaccaccattatttgcacaagaaacgcaacaccgaaccaagccgagccagagaaagggcgcgggaacagccaccacggcgaggaaagaaaggggcgaggagggaccggaggcacggccggcagggccacgagcagggaaaccgccgaaccggcccgtgcaaccgggaaagacagcaagcgacaaagtagcaacgcgggcacagacgcagacagaggcaggaaccggcgcaagaacaaggagaggccagaggccaaaggcggacccgaaaaaaaaacgaagaggaaaggggaa

SEQ ID NO: 146686 - DNA, 396 bp, Zea mays
  Clone ID: MRT4577_65294C.1
atgtgtggtttttttttttttttttttggtggaagcgaaacaagcatttttacccaattcgctcgtttccccgacaaaaatctcgggatacaacccggatcatctccgggcttagggaggaagaacgcacaccggtttttcctacctccggagccgaccgaccagaccgggttatcgccgtccaaaggggaggggtttttgttttccccctggaggtcctccgggcttagaagacaaatgaagccgggcgaaacctacgggcagcaccgaaacgcataacaccctggggtttaaccaccccacgatgtcgtccattaccctgtccttttcgggttttattcaggaggttgtgcaacaacccgtggtagagtctgagggacttgtccgcggacaagg

SEQ ID NO: 146687 - DNA, 368 bp, Zea mays
  Clone ID: MRT4577_65295C.1
gaagcagcgcttcaaaacgcattaatagggacaactacagactgtcattgacccttgttactccagctaggcgacgcggcatggactgtcgacttgtgacttacgacacatccacgctacaggcgataagcttggcatcgtattcaatgacgctgctacaagatatcagggcttgtcagagcagtaaaatcattgcattgggaatacgtgacagatacaagaagtttgctgatcgattgacgccctatattgctggtaccaatcgtgtgctagatgaatttattactcataagaagatattactgatcgaaggcgggcaaacagatatgctggctacagattttggtactgaggacatatagtgactt

SEQ ID NO: 146688 - DNA, 424 bp, Zea mays
  Clone ID: MRT4577_65296C.1
gcctgcgtgtaccgggccgctattacacggccgacccacgcgttcgatttaaccaattggccgcactgtaagcccgctgcttatttgcagcatcaaatactactgccatttaccgagctagactgcactcaagtcgtgcttcctctcttgacacagcaacagaagctggcttcctacaatcattttgcggctaaccggaggaccctcttacaactacaacaattggtgcccttggcacaacttgctttgacaaacccaggaggctggctaccaacaacacattattggtggagcgctcttttagattgattattaagagggattcaataataaagttttttggatgatgtatgtgcgccaaccattaaataagaagatacattcccagattctcagtgcggccaattggttaaatcggacgcat

SEQ ID NO: 146689 - DNA, 645 bp, Zea mays
  Clone ID: MRT4577_65297C.1
ccggccggggcccccggcggccaaaaactccgacgtcgccatcatcttccaactcccttaaaaccacgcaagatggcctcaagagcaccttctatcgcccctgcagttctgcgacaactgcgttctcaaccacagcgcctctcttctttcctgcagacccctcttgcccgctcagtcgcaaacctaaatctgaaccaacagtccttccgtgcagcgcacaatattcccaggccatctcctcgaacatacgccaagccaaaatccgggcaggcgaacgtaggcgaatcggccaagagcgaaggtgaaaggccagagatcaaacccacgcattaccaactgtcatttacctgcgttccctgcggccatcgctcccaccacaacgtttccaagcaaggctaccactacggatctacgcttatcacatgtcctagttgtcgcaacagacatgttatcagtgaccacctccatatctttggcgataaaccatttaccatcgaggaacttatgaagaaaaagggtcaacttgtcaagcggggcaccctgggcgaagatggcgatatcgaattctggccagaggactctctcccaggaagtaagggatccaacaataacgagagctcagaatgatcggaagtattggcgggt

SEQ ID NO: 146690 - DNA, 432 bp, Zea mays
  unsure (1)..(432): unsure at all n locations
  Clone ID: MRT4577_65298C.1
ccttccactatccaaaaaanggaancancagttgatggattaagaaagagcacccgccgatacccaccaggggaaggctgtggacagcagcctcaactggcaagaccagcatccagtgaatgccactagagtgccaccggctgcaaaccgaaacacaggccaaggagcttcatcatcgagagcaggcagcttggagaacagaattccaggcagcaaagaggagcccagaaggaatgtggtgcctgccaactacaccgagacaagggagagagctggaggagacccgagaacgatgcagacagaaccaccaaaaaacaggtcagacggccgaggaaccgcaacaccaggaagaaacccgccaaaaataagagccaacaaaaaagcaaaccgcaacccacaaagaaagaggaagccaccaaaaccaaacccgga

SEQ ID NO: 146691 - DNA, 778 bp, Zea mays
  Clone ID: MRT4577_65299C.1
accgcactgcacgacagccatcctccgtgcggttccaagctcctactcccacgcccgtctcccccgagatcaggaggagcacgcccgctgcaccggagcgccgagacctcgaggccttcgtctccaccccggaggagagatggggctcacgttcaccaagctgttcagccgcctcttcgccaagaaggagatgaggattctcatggttggtctcgatgccgctggtaagaccaccatcctctacaagctcaagctcggcgagatcgtcaccaccatcccaaccatcggatttaacgtcgaaactgttgagtacaagaacatcagcttcactgtttgggatgtggggggccaagacaagatcaggcccctgtggaggcactacttccagaacacgcaagggctcatttttgttgttgacagcaatgatagggagcgtgttgttgaggctagagacgagctccacaggatgctgaatgaggatgagctgcgtgatgctgtgttgcttgtatttgcaaacaaacaagatcttcctaatgccatgaatgctgctgaaatcaccgacaagcttggtctgcactccctgcgccagcggcactggtacattcagagcacttgtgcgacgtctggcgaagggttgtacgagggacttgactggctctccaacaacattgccaacaaggcttgaagcgcctcgacaagtgcttcatcaagaaacaaacgtgctggatgtctcaacaactcactgctaccattttacatattgtgatatatatacact

SEQ ID NO: 146692 - DNA, 1395 bp, Zea mays
  Clone ID: MRT4577_6529C.1
tgactccccacgcgtccgctcgtggtcgctttgcccatctgatgatctcccgctagcttccttcttgctactcccgcagtccccagtccccacccgccgcgccctcgccatggatccgagctccgaaatcatactggacactccatacttccgcatctacagcgaccgccgcatcgaccgcttgatgggcaccgaaacggtgccggccggctttgatcccagcaccggcgtcacctccaaagatgtcgtcatagacagcgacgccggcctctacgtccgcctctacctcccgctcccggacacggtggctgccgccgcgtcaccgccgcccaacgttaacgacagcaagaccaagctcccggtgctggtctacttccacggcggcggcttcgtcacgcagtcggcggcgtctccgatctaccagcgcctcctcaacgcgctggccgcgagggccggcctgctcatcgtgtccgtgaactaccgcctcgcgccggagcacccgctgccggcaggctacgaggactccttccgcgcgctggagtgggtggcggcctccggcggggacccctggctgtcgcgccatggcgacctgcgccgcgtcttcctggccggcgacagcgccggcggcaacatcgtccacaacgtcgccatgatggccgccgcgtcggggccgcgggtcgagggcgccgtcctcctgcacgccgggttcgggggcaaggagcccgtccacggcgaggcgccggcgtctgtggcgctgatggagaggctgtggggcgtcgtgtgccccggggcgacggacggcgtggacgacccgcgggtgaatcccttggccgccgcggcgccgcccaggcccagcctgcgggacatgccgtgcgagagggtgctcgtgtgcggggcggagctggactccctgctgccgagggacagggcgtactacgaggccctcgcggcaagcgggtggggcggcacggtggagtggttcgagtcccagggccaggaccacgtcttcttcctcttcaaacccgactgcggtgagtccgtggcgctcatcgatcgactcgtcgcgttcttcgctgcgaactgaaattcgtcatgtgtgctccctattttatacatagtagtgacatataaaactgccctataattttaaaataagtatattttatataatttaagtcaccaataaaatatcttgctctaacagtaaaacgtcaaatctaaattatagagcagcttattatggtgtagtatatttgagtcatttgaaaatgtgtactataacttttttactaaattttatgaaacacgttattgttggagtagctttttctatgtagaactatatatttcaatttgagacatcagttatattattggagatgctcttacaatctt

SEQ ID NO: 146693 - DNA, 198 bp, Zea mays
  unsure (1)..(198): unsure at all n locations
  Clone ID: MRT4577_652C.1
acgatctcgaaaatgatgcagcacatatcctagcaacatgtagtacactctcnactaaaacgcgtggaactaagtataaatcggaaaagctggacaaaaaatcactgttcacatactcttcataaacggcacatgatgctgcgtcagtgacccatggacgtaacacaaactgaattgtctgattcttgctcataccct

SEQ ID NO: 146694 - DNA, 470 bp, Zea mays
  Clone ID: MRT4577_65300C.1
ggggggggggggatttttttttttttttgggggggggggggggggtttgttttggggggggaaaacgaggcccccccgggcgggacaagaagaggggctttcccaaactggccccgggaaaaaaaaaaaagagaaaaaaagggcgttggaaaaaaaaacccccccccacgttgacccctaaaaccaaagggcccccccaaaggttacaaaccctcctgggggcaattgccttgcctaaggcccaaaaaaccccctttcccccccgggaaaaaggaaaaaggccccggtcaccggagccccacacggggaaggcaggggaacacaaaaacggggctgggagggggaaaaaaaagggccaaaagggccttggggggccccttgttttccttccccccctttttgcccttaaaaaaagcaagggaccccctccgggccttttccgggtcccccccccctccctttcggggggc

SEQ ID NO: 146695 - DNA, 166 bp, Zea mays
  Clone ID: MRT4577_65301C.1
tggagcgatcaaaacattttcagcatatgcttggcttgacataacctcacaatttattttgcaggcgacacattactagttaggccggaccagatcccatccaaggtatggtctcatcgtccaagtaccaagcgaggatgattgccctcaaatacatgagctggag

SEQ ID NO: 146696 - DNA, 406 bp, Zea mays
  Clone ID: MRT4577_65302C.1
cccacgcgtccgcaagccccgcaccgtcccggccggccccgtccccggcccgggggaaggaaacgggtttggcaccgggcgattaagaacagcgaaggcatggagcttctgggcttaccttccttattcaagtccttccctttcgaggtggaaggttcgtttaaaaaaattgtgatggagtcccattctgatcgtgtcccaacgcatctgaaatagtaagcttagtcaaaatataaggggatatcgcaaacctatttttttttgaaggaccgaagaagatcaaggagtgggaaggaagattatgttatgcgttctggggtttccccttgcccctgaagatcaaaaagaaacgtgggtaaaaccccgcttttactcataatgtttgcagcagtttcttttggcgcct

SEQ ID NO: 146697 - DNA, 135 bp, Zea mays
  Clone ID: MRT4577_65303C.1
gatagtgtcactctcaccgactttgaaacagagtgggcatgaatggttgaccagtatagtctcaaagacaacaagtggtgctctgctttgtacagctgtcggaggcaatgggcacctgggtatgtgcgtcattca

SEQ ID NO: 146698 - DNA, 441 bp, Zea mays
  unsure (1)..(441): unsure at all n locations
  Clone ID: MRT4577_65304C.1
cgccccttttcgggcgctgggttcatgtggggggctgggcgcnaggctggcttaccttctgtgggagctcgtttttccggcttcagactccactcctgcttgtccgctattctgcgagctttctgttttggcttggctacgctggtcctgttggtggggggcctgtgtccctcgcgtctgggcccatttggtttgctgctcctggtntctctcccaggcccctaccgcctgagcgcatcgttggctttgggtctgcttctggcggtgctgtcggccggcgggcctttgcagtcccggccccgggtgtgctcaccttgtggcgtgggctcgtcctttcctctcactcgtgcgcccggtattccggctcctgggttcccggctggtcggccccttcggtctccccggcgctcctgcctttgccgcccttcctcttgtgtgcct

SEQ ID NO: 146699 - DNA, 766 bp, Zea mays
  Clone ID: MRT4577_65305C.1
cctcgaggccggccgggccgggatgcctttaaatgttgtttctgtgttgtgtttggctagggtttgctcgcgtctcctccttcccttggctgctgtcgtgccggtcggcggcgacagcaagggagggaacatgtcgaagaagaacaatcttgccaagaggaagaagcagtacgagttcgacctccaacgggagaaggaggccaaggagaagcaggccaagaagctgcaagccaagaaatccaagatgaagatagatggtgctgaaaagaaacgtaaaggtggccaatttaaggtcggcaagaaaaaggtgaagacgaaactttcagccttagcaaaagccaaagccgcgcaagccatggaggtcgacaagtgactgcggagcacaagcatcatcagcttaatcgtcgagccagagttggaactctgaattctgtgcccacatgaatagctcccgtcgggtgcagctgcagcttgttgaacctttctttctaaaaagaatgtcattcttgctttttttaagggtaatcaagctctagttataggttttggtgataacgactatgatgttagagaactaatgagatttatggagctaaatgaaaaagagaaaaatacatgtgatttttgatgcttcaattactaaagaaggacgcgacaactgattaaaggatatttaaattcatttaaaaaaaaaaatataagaaaagaaaaagcgaaaaataaaaaaaaaaaaaaaaaaacccctacccgggttgttaccactgct

SEQ ID NO: 146700 - DNA, 395 bp, Zea mays
  Clone ID: MRT4577_65306C.1
ggccgctttttttttttttttttcgtttattctaaaaaaaatattttattgcaccgaagatgtttcatcaaatttattttattgcagccagagatccaaaatggacattcctagatggatggaaaaacgtactaccagtagagtggagcatagcatagcatagcattacaaagtggcagttgaacatcacaagagaaaagattcttaaacgttgctatctatacctcctcttcttcaccgtgtcctctctatttttttttttatatatttctcgagacagcaactgagatgaagtgcaagtgtgcaacccgcgatgcagttggctgatcagactgcggcgacggcggccgatgaggtgagcgcgtgcagcctccagaacacctccccggggccgg

SEQ ID NO: 146701 - DNA, 654 bp, Zea mays
  Clone ID: MRT4577_65307C.1
gatcatggcgttgtcgtgctcctctctcacgaggggcacgtcgcgtactgccacagcagccaaggggtactacgcgctaatccgttaggggggaacgacgagatactatgactgtttgaaggtgagctggaaaacctagttcctgagattcatgaagagggtctgtaaagcatagaagcaaaccaagtgctactcgtacatggatgtctactataaagtgcaagatggggcgcgctagccggcaagatttgtggtagcccaggtcacaggatcctaccactacgttctcttacataaggccaccaaatctctgctcgacctatctcaccctgagggaagggcggcgctcttttgtcagataactggcgaagtctgcgtacgattctcccacgatatccacatgtgcaaaggctgatgatttaaattgctcgcaccactcccgcaagggtgcttctaataaaaaggcctcggagggctcaagtggtacgagaaccccaagctgaagggctgcagtgtgcccactaactaagaacagatctgctgtgcgagtttcaagatgatgaaatggtctactgtgatgacgagtgtgaactgatctatcatgatccatgcgatgcgatgtgatgaggatgcaaaatgttgaacatgctcagg

SEQ ID NO: 146702 - DNA, 159 bp, Zea mays
  Clone ID: MRT4577_65308C.1
ggccgggcgagaccctctctttctaagtcctcctccgattaaatcacgacacgccatctccgagcttcgcgttcgcctcgagcaggacatatattcagtgatggaacacaacgaggccggctgccagtaccggatggccaatgctatgcatcaataact

SEQ ID NO: 146703 - DNA, 296 bp, Zea mays
  Clone ID: MRT4577_65309C.1
ctcgcggcagctgtcacccgctgggactggccgacgacctctacgccttctgcgagctgggggcgagggagctcaagaacggtcggcttgtcatgatctgcatgatcagcattgtttgtaaggacatcgccaccggctagggcccgatatggaacctagcttgccacataggtgacccatgcaacaacaacacgtgggcctacgacaccaacttcaggcctggcgactaagcgcaactgctatgctatgcaacctcattgtctgtcctatcacaaagggtgtacgtacttggattg

SEQ ID NO: 146704 - DNA, 441 bp, Zea mays
  Clone ID: MRT4577_6530C.1
ctttgggctgatttatgtgcttgtttatgggcttgtttatgtgcttgtcctcctcgttcgttctggtatttgggttcccgttccgcgaataaaagctgctgtgccttctccggtcgacgaaacttctcctctgctcagactcgagttcttgttcgctccctggactagacgtccggcttgactgaataatggcgagctccgtctcgccacccgaccgcctcaaatgtacggccccgcccccgcgacgacgcgtaggccttgactcgccctgcccgaccgacgagccgatgtactggtctgaaatgaggtcgtacggcccccgcgttcggaggccctcgaccagtgcgcccaaggaaatcgggcgttataacccgccgtcagaagcgtctgacttgctgaaccgacactcgttgagtcgtgatgccttgggggactccgact

SEQ ID NO: 146705 - DNA, 418 bp, Zea mays
  Clone ID: MRT4577_65310C.1
accgtccggattcccgatggaggacgcgtccggaggagggcaggaagaccgaagaccgagccgtgcgggggctcgggacgggaacgggacaggggcccaaaatctcagagccttcctgcacacccgccaatgccacgtgacgcgtccttcttgccggccgcgccccacctacgccctctccttttccagggggatcggatactctacaagctgggcgaaggtgctgcaggtctttggctacggctactttatcaggaacccaaggcttttacttagacaacaaaattctcggatttattaagggctacaagcccacctttaatatagcttgcattgaccacacaaggtcaccggagcatacggggaggacctagacgcttgaaacctacgactaggccatatgctggggaattgcata

SEQ ID NO: 146706 - DNA, 701 bp, Zea mays
  Clone ID: MRT4577_65311C.1
cccacgcgtccgcccacgcgtccgggttctccagcggatcggcgtcggcatggtcctggccgtggtggccatggtcgccgcggcgctcgtcgagtcgcggcggctccgcgcggagcccgccctgctgagcatcttctggctcctgccgcagtacgtcctgctgggggtctccgacgtgttcaccgtggtggggatgcaggagttcttctactcgcaggtgccggcctccatgaggaccaccggcatcgggctctacctcagcgtcttcggcgtcggcggattcctcggcgcgtccctcatcaccctgctcgagatggccacggcgaggcccggcaacgcccgcggatggttctctgacgacccgcgggaggcgcggatagataacttctactggttcttggctctcctctgcttcgtcagctttgtcgtcttcacgcacttgtgcaagtactacaacgacagatctgcgtcagggaggtaggatcgacccgagtaattaagctgggggtggacgagaggatcttcgatcttgattttgcttgacaccttgagtgaaaactcattacttgtattttcagggcgattctagctagagatagttcgtctgtgtaatgttttcagaaagacatgtaattcaggactctagacgtaatggttgtgttccaacacttgtacaaagcttgtcttgtgatttgataggc

SEQ ID NO: 146707 - DNA, 348 bp, Zea mays
  unsure (1)..(348): unsure at all n locations
  Clone ID: MRT4577_65312C.1
agacctacacttttgttgcnttttaacttataatgaacaccagttacataatttgggactcggccattacaaacataatttggtacacgaccatgggggcgagagagatttattcaggcaatctacttgaccaaacattcaaattccctggtataacacgactaagttaccattattcgtgcaaataacacaatagggcacaactttagccaattgtttttaggttttaactttagatcacttttttgggaagtacttttggggtggttgggccttattttggatattatttgagatggtattgattgtcttttttaattttttgtttttttttagtgtttttttggg

SEQ ID NO: 146708 - DNA, 414 bp, Zea mays
  Clone ID: MRT4577_65313C.1
atggcaattgatgttccacaatgtactctcaaggccattgataagatccgcagaggttttctttggagaggtagtaaatacgctaaaggagggcattgtctcgtcacctgggcaaggaatatcgaaaaaaggacagttcaagaggctcttcagaataagagatggattgaggatatcaaaggggccctcactgttggcgttctggttgattaccttcaactttgggagatgctggaaggctttcaactgcaggctggcactcaagataagcatatttttactgtctcggccaatggactctactcggcaaaagctgcttatgaaggacttttcattagctcggtctcctttcctcattatgacagagtgtggaaaacatgggcgtcccaaaatgtcgtttcttcctctggttaa

SEQ ID NO: 146709 - DNA, 375 bp, Zea mays
  Clone ID: MRT4577_65314C.1
ccaacccctttttcataaccctcaaaggcaaaccaaaatccttttttaagggcaaaaaggggtgggcaatctgggctagggttacccctggggttggggccgggggatgagttcagcggccccactggggcagggggataaaaaaggaaaggcccgttgggaaaaaaaactatgcctgggggggttaacaaagctttaaacgttttgttccaagcaacataaagcctaaaatacccaggcccagttttggcgccaggaaccccgctttttgggtttacagagagagacatccccccgacccgggcggggttcatttccaacttggccgggatcacatttcccctccatggggggaaatagcgatcaagggggttt

SEQ ID NO: 146710 - DNA, 1233 bp, Zea mays
  Clone ID: MRT4577_65315C.1
caggtacatttttgggagtctctttaatggttttcttgtttggtctcataattagtggagtacttcaacttatgtgcattattatatcaatttgattaccaaactttattgtgtatagcgtcaaagctgttttgaatgtcttgtgtttgtgtatatttcattctaattccataaccagaggctgctcatatttttacactactctattgaaccaagaacctgaagatgtatttgcctgccaagaaaatatggagagcgaaaatgaggtcatggagtcaccaccattgaatgattcaaattcacagtcaaaaccaaagggtcgatccaagaattttaatgaagctgaagacattttgttgatgtcagcttatcttaacatacgtaaagatgcaattactggaagggatcaataagaaggcaacttttgggaaagagttgagaagtactttaacgttaacaggacatttgagtcagatcgtaactggtcatcgttgaagcatcggtggggtataattcacaaataagttagtagtttccaaggtttccatgacagtatcgaaaggaaaaatgaaagtgggaagacaagtgatgataagctggctgaagcaaatgtaatgttccatcaatttaaaaataaggccttttctttgttccatgcgtggaacattctcagacatgagccaaagtgggctgaagataaaacatctaatgaagggaatgcaaatggggacagtcatcccaatgctcaaagacctgcaggaaggaaagctgaaaaggaaaagatgaaagcaaaaaggcgcaacagtgatgaagagtctgatccttccattgaagaggtaaaaaaaaatgagagaatcgagagagaaaactgagagcgaacgaaaggagcgtgatgaaagatactttgagctgcataagaaaaaagtagacttggagcaagaccagcatgacaagttgataatggcacttgacacgagcacaatggatgaccaaggaaaacagtattttcagttgatgaaagaagagattttagctcgacgctttgggagtaggcagccatagttatttagtttttaatactttagacttttttccattcaaaacagattatcttgatgttcatgtgatgtaagaacatattttcattcaaaacagattatcttgatgtttgcaagaaaaaaaaaaaaaaaaagcggccgttactgtaaaagttgagttgaaattttgcttctg

SEQ ID NO: 146711 - DNA, 533 bp, Zea mays
  unsure (1)..(533): unsure at all n locations
  Clone ID: MRT4577_65316C.1
aaaaaaaaaaaaaaaaaaaaaaaaaaaaaaaaaaaaaaaaaaaaaaaaaaaaaaaaaaaaaaaaaaaaaaaaaaaaaaaaaaaacctcatcctttccataatccctttggaaggtatagtctttttgttaagcgaagcgaagcttaaagctagtctggggggttttaaaaaacaatgggcaaggacaacgtgatcaaaagcggccctggcgggggcaagttccttgccaaggactacacggaccctcccccggggccgttgatcgacccgggggagctggggtcctggtcgttgaaccgccccgggatccccgagttaatcgccacgctggtgttcctgtacataacgggggccaccgggatcgggtacaagcaccaaacggaccgcgttggggttgggccccaacccggcttgcgggggcgtggccctcctgggcatcgcctgggccttcgggggaaagatcttggncctcggttactgaaccgccggaatttgggggggccacataaaccccgccggaaccttgggccttt

SEQ ID NO: 146712 - DNA, 797 bp, Zea mays
  Clone ID: MRT4577_65317C.1
tcttccgcccttgaactccgccgccatccctcccctcgtcgccccctgagatcgccgcttgcgaggtagtattacattcctctggtcgtgccatgatcgttggagagccagtcttgccgtgccgggccgtgccgtccgtgcattttctggagcgccgccggtttgtgtttcgcccttcccctgggcggagcgccgccgatctgtggtctcatctcgcccctttctctggtgctccacccccgtcccatcctcccctggtcgcctctcgtcagatccgggcgttccctcgccggatctggtgctcgggcgccctcccggtcgtttcccggccagatcagggcagctccccgacggatcagctggaagcaagtggaaaccagctatctgtgtggtcattgtggaggtattcaacaccgggactatactgctaggcaagctagcacttgacggcggcatgttcgtattctccttgctctcatacagaagtgttcttggtgccgttttcatgttgccatttgccctattccttgaaagagggaggtggaaagagttgaacatgaaagctcttggatggctctttatcaatgcatttgttggatactctctgcccatggcattatactactacgggctccacgacacgactgcttcatatggtgtggtcttctccagtctgactcccctcttcacctttgtcctttcactattgcttggcatggagagcttgcgcctcaagtctaaggagggcagcgcaaaagtgggtggggcactggtgtgctttgctggggctcttctga

SEQ ID NO: 146713 - DNA, 314 bp, Zea mays
  Clone ID: MRT4577_65318C.1
attcggctcgagctatgctgagccttattatttttctatctagattgcactctcttgttaagatgtggattctgatggtcagccatccgaatgctgaggattccttagtgcctgatgagctgcattatgatgctccaaagtgactacttgagctattgatcacagtgacatcgaccttgtttgaccctttccagttggacagactttaggctgataacgtggatatgataaataacgccttggcctacaagagggaccgtggataattgtatatgtggtacataatggacatcacaccatctaatatatactgc

SEQ ID NO: 146714 - DNA, 207 bp, Zea mays
  Clone ID: MRT4577_65319C.1
agagctaaaacacttttcatgaccaatggggataggaatggacgggtagtgcaataatactctttaacgcttttggttccaaacgatctccacatctactcctacccataacggtcacgcctatgacgttacaccaatagggtacaaaccttaaggctgctagtttggccctccatggaacctttgggttctggccctccatacata

SEQ ID NO: 146715 - DNA, 319 bp, Zea mays
  Clone ID: MRT4577_6531C.1
gaggagagcggaaaagtgtgtgtgagagagaaattttggaacgaaagagtggtgcaccagcgcgagcgcgcgcggtgtggttttgtgagcatcgatcttggcacgcatccgggactgccgggcacgagaacaactatgtgccaattggtttttttttttttttttttttttggttcttggtttgtttgctgcatgttgggttgggctgttttacggcaggagttcgtctccgagtccttctccccattcgtctcctcctcctccttggccgacagagaaggtgggtccttgtttggttggagcaaggttaagacggaag

SEQ ID NO: 146716 - DNA, 729 bp, Zea mays
  Clone ID: MRT4577_65320C.1
cctcgtctacccacgcggggcagagcagagacggcggcggcaggccatcgcggactcccgctcaccctcgtctgccaccgcctcccaggtcctagcacgcaggggccgacggcgacgggtcgggaggggccgcaaaggtagtccgaggggaggctgtggagcgaagggcggagagaggccacgccgtccggagtctccagttccgtcgccacagcttcctgccgcgccggggccgaggtaaacgagagggatcgaggaagaagtatcccccggagccccttcccccgaacccgaaggctccggaatggcgcactgggttagcgacagtgatggcagtgacaactttgaatgggatagtgatggcaatggggaggagccagcgaacttcaatgctgctggtgccggttcatcagctctgagatcaacgaacactgatgctccaggtccatcaacacgggtaatccatctaactgatccgtacatatgctactatatgttcttcagttcatgttactcagggatgttcaaaccacttgtgccaacctggccggggtgggggtggatacatatggtcatcatgaacataatcaggatcatgattagcatacagcgacacgaacactctcaatgttattgctaccttgtttgtagtggctaccattgtaatcgctcctgcttgtttgtggggctgcttttaaagttgctaatggcaatgggaaggctgggcca

SEQ ID NO: 146717 - DNA, 273 bp, Zea mays
  Clone ID: MRT4577_65321C.1
caccaaggcaaccagcgtcggtgagaagaatgtccgcatctttgatcttgtaggcggtaccttcgatgtctccctccttactatcgacgcaggtatctttagatgtcaatgccacagctggcgacacccatcttatgtgttatgacctggactacaggatggtctgtcactctgtccaggagttcaagaggatgagcaatcaggatatcattggcaacccgatggcacacctgaggctgacgacctcttgtgagatggtcaagagaactctgt

SEQ ID NO: 146718 - DNA, 191 bp, Zea mays
  unsure (1)..(191): unsure at all n locations
  Clone ID: MRT4577_65322C.1
nngtatcatcagaagccaccggactattctccccctgatttccagcagcttccaaaactttctaaagaaacaaaagaagagtctaacacagctcgtgatccttccgccagggcagcagacggatggcttcgtcggtgccggcgccatcggggtcggtgatcaccgtggcgtcgtcttcttcctcagcagcc

SEQ ID NO: 146719 - DNA, 308 bp, Zea mays
  Clone ID: MRT4577_65323C.1
aaaggatttagcttgtggtttagcatgatggaggggatatggaggatgatgggtcttttgaggaacctaatgaagacacaatagccattcgtaagctagcagaagacaatagtcaagaattatatccgggctgtcaaaactactcaaagctacgtttcctagttcgtttgcttcacatcaaacttcttggaggatggacagatagcaagttttgatttgttggtagatttacttgttgatgcgcttcctaagggttcagcacttcctagaaactttcatgaagcaaagaaagtggtcaaatctgtagg

SEQ ID NO: 146720 - DNA, 248 bp, Zea mays
  Clone ID: MRT4577_65324C.1
atcttattcaccgacgactactaacagcgtccggcccgtacgccgagcagccaacccagcgggcacgatgcaggcccacggtatacacatccgcgcccgcgggccggtggtggcgacgcaggcctccgtgcgccgacggtaatgccgtatgactgcggcggtggtcggcgcgctcgccgcgcgagcttgtgtgacgcactctatgccggcggagaaggcggatgtgtaccgctcgctggagggatcgg

SEQ ID NO: 146721 - DNA, 1043 bp, Zea mays
  Clone ID: MRT4577_65325C.1
ctccatccactcactcccacgatgagcagaatagtagcaggatggccgccagtcacgtgcgaggcacgatgcctgcaaaatcgcgaccgcgtcgtgtggggacttccgctctgctcacgtgccgtgcccgtgtgcatcggggaaaaaacagcagcaggggccgaatcggagctccgccgccggcagatctgcgccggccggtctgctccgcccagcggacatggaccgcgacggccgcccggggtggctaccgtcgctgggcttcgccttcctcagcttcaactgcgggatggccgtctaccgctcctgggacgacccctacgccgtcgccttcgtcctcgccgcgtacgccgccctcgtcctcctcttccgctgcctccaccttctggagcgccgccgggaccagcgcctcaagctcgccgtctggggcctctccacgctcctcacactcatgttctcgtacaagatcgccgccgtgatgccgccctgggcccagctgctcgtctggggcatggggatcctcaccgtcgttgcgggattctacgccttcttcgtcgcccgcccggaggagccctgacccttcgttcgtctccatgccgccccccccgacatcaacatggatacctgatgagcatcactcaccgcatcggtctcagttatcttgtgtagtacgtatgtctttttgcagcatgccgaagaagttgacgaacgtaccgagaggcgcgtagcaagactcatcactcttttgaatgcaagagttggtagtagaataaagtaggggttccgtgtgtgtgtgcgtgtgggagagagatcgtgaaaaacggtttgcatctagcggtgacctctttacattggtttttccagtgcctgttgcggttagctatgtgttactaattggaatggatgcaagtaagtgaggatagagtcgttctaaacccactctccaaatcacccatgcatcatcatttgaacaaggtgctccataaaaaattgtttggggccttaatacatgttttagtttcttaaataaaaaaaaaaaaaaa

SEQ ID NO: 146722 - DNA, 453 bp, Zea mays
  Clone ID: MRT4577_65326C.1
ctccttttttttttttttttttattcactaaactaaacgcatactgttgaaaacttttgctgttgagacaaaggtgaaaagcgcggcctcagcccatgaggcccttagttagttccacaagctgctagtctgtgttccacgtaaccggcttacccaaaagaccaatcccagacggaagtatcgttggggctatattggccgaccaaggatatctacatgggcatccaacactcttgttctatttgacaaaaacaaagcctgggaatcaatgcgttggccacgatgaagcattagctcagctggcaatgacacctccagcaagagcgggggggccgaccacttgatgggggcgcatttgtgcgggggaccctcggctccaacccgtttgaaaggagaccacagcctttagaaacttgccgccttgcaaagttgctgtcccggggctccaccagg

SEQ ID NO: 146723 - DNA, 273 bp, Zea mays
  Clone ID: MRT4577_65327C.1
gtctaacctactgctgcggcggaagtgctgggacgtgtgaatcaccggatgttctacttaccttgtagaataccagacatcctgcactaccaccgtaaagaaaactgggaatatgctgcagctctaaccaacatagttgttacaagacaggactgatacatgggtctcggccaccaaccgcaaatttttaagctagcaatgcagtcttctcgtataatgcaagaagacaacacatgcggctatgttattatcaaaaggaattccagacccctg

SEQ ID NO: 146724 - DNA, 331 bp, Zea mays
  Clone ID: MRT4577_65328C.1
cttaatttacctcattgatgtggtagatgatatactcttctatataaacttagtcaaactgcactctcttatatttctagttggagggagcatttattactcttaacatattacattgttcgtgaatccttttattacatgatttatgttggtcaaattttaactggagactactgtacttttatcagccatatgtagtatactagtatgccatgtttaataggatcatagcaacttcagaccctggagggctccttgtatttgttccatttaagagctttcttgtttgcaatggccataccaataaaccccaccaaacttatcttttttg

SEQ ID NO: 146725 - DNA, 2225 bp, Zea mays
  Clone ID: MRT4577_65329C.1
gccggccggttcggggaagccagtgttgggcttgggcgtacctgacttccgaaaaaactccgccacgcccgcccggaggtccgaccgacgcctagaccgttccaaagggaagggagcacgcgcgcgaggtagagcagcggcggcggcggcggcaggagtgaggcaggatgtcttcggtatacgtgcttgagcccccgacgaaggggaaggtggtggtgcagacgacggccggcccgctcgatatcgagctgtggcccaaggaggcccccaaggcggcgcgcaacttcgtgcagctctgcctcgagggctactacgacggcaccctcttccaccgcgtcatcaagaatttcctcgttcagggtggcgaccccactggctccggcactgggggtgagagcatctatggggctccatttgcggatgagttccactcgcggctgaggtttaaccacaggggtttagtggcttgtgccaatgctggtacatctcattctaatgggagccaattctttatcacccttgaccgttgtgattggcttgataagaagaacaccatctttgggaaggttactggtgattctattttcaaccttctttccttggccgacgttgagactgataaggatgatcgacctgtgtacgtgcagaagattctttcagtcgaggttctctgggacccatttgaggatattgttccaaggcaacttaagaaggctgaatctgttgctaaggctgatgctgaggtgaaacccaagaagaaggcagttaagcaacttaacgtcctctcgtttggtgatgaagtagaagaggaggagaatgaagcagctacctctgttcaggccaaaataaaaagtattcatgatgtgttggacgatccccgttttcttaaaggggaaccggaggatgtacagttgtccaaggagcaagaggagatgaaaaagatgcctgatcaaactgtcagggatgctttgatctcaaagaaagttgaatcaagggagcaagagaatgctccattatctgatgattttcctgaaggactgaatgaagatgattggtagaacaggtttgtcgcacaaagccttaaaattcggcgtgagctttgatatgtttccctgtaagaaaaattgtaagctaatccattggttataagctcggtgttaacagagcgctcggcaaatctagctcattagagggacactgatgaggacgatgatcaggagcatgagctccaaaaagctaaaaaactatccttgaagaaaaaaggtgctggctcagaagcgagtgctgagaggatgtccaaagcagatgctaatttgcagctactaaatccagctgaacaagagagacatttgcaaaaacagaaaaaacgtcggctccaaggccgtgaagatgagactctagcgaagttacagaagttcaagtcttctttcctcagtaagaatcttgctaccaatcatgtcgaagaaaagaatccttctactgataaggcggaaaaggaagatgaagaggaggatgactacaaagggtggcacacaaacctactgtctttcttacccagttcttccaaggttgattgctagacctttcttgccctttatcacacaggaagtttatgtatcttgtaaagattaggaatgacattaaacctggttttcataggacggaatggctaggaaagatgatccagatgactatgtagtggtagacccacttctggagaaaggaaaagaaaaattcaacaagatgcaagcaaagcttaagcggagagagcgcgaatgggcaggcagatctctcacctgattggaaagcttaactcaaattatgtcaatgctccttacgtccttacctaccctggacggtacgggaccacctctcttaaatttccagttgctctcgttaacataatagtatctgcctcttattttccttaaggatatttgagtttccaaactagccctgaacattgcaaaattccggtgcatcttaacaggttggaaacactggaaatgatgcagttttggcatggtcttgggactgcgcgcaaatgattggtagtgaccgtttgtggactagtgttttcctttttggcatgtgtcatgattgcttacactgtaaatgcaattgtacaatagattggttataagctcactgtgaaagcagctctctgtatcactagctatttaatatccgtttcttcaaggagccgattggctgaagttgacact

SEQ ID NO: 146726 - DNA, 440 bp, Zea mays
  Clone ID: MRT4577_6532C.1
tcttctttcgctacatgtacgtacatgtatcatcgcacgcgctacatccgacgttggtgatcgggtgggctccttgttctcgttgtgtcctgttcctgctgcgtatctttctttagcatttgaccttactcttgttgttttgctcgtcttgtatttatttcttttttttcctggttttttgttcgtgttgtgtgtatggtcaggttttcttgtatctttttgtttgtttttttttttttttttttatttttggtatatttttttttttttttttttctcttttttgtcttttttttttttttttttttttttggttttttttttttttttttctttttttgtattttttatattattattttatttttgtatttttttattttttttattttttttttttttattttgtattttttcttttttcttattttatttttttt

SEQ ID NO: 146727 - DNA, 321 bp, Zea mays
  Clone ID: MRT4577_65330C.1
ccaaagattcatgcgaattgggacatgcgccgttcaggtgtgaatttttcggcttcatattcgcgtacacaagactaacaggatattttgctcgttcctgtaaatgactcaatttcaccattctactgttcttttgggtaacgatgctaatacagtttgttgagactgacacttagatagggatactgctttggtgatagttgccagatgacaggcaatcggtatctatacagatggtgctgcacaaggttcagaaggtgactacttgtagaatctgatacctagaggagcattcgttaacgatgacacattacatgatgg

SEQ ID NO: 146728 - DNA, 428 bp, Zea mays
  unsure (1)..(428): unsure at all n locations
  Clone ID: MRT4577_65331C.1
gatttgattacttgagtgtgtctagacttgaatgctagagctcttgtaagtagttggaaggtggaatacttggatgacttgactgtggggtggtntggngggtatttatagccccaaccaccaaactagccgtttggtggaggctgttgtcgcatggcgcaccggacagtccggtgcgccaccagacactgtccggngcgccagccacgncaccagggcggggggcaccatcttttgatgactctgactgagaacacccacttgcttattgacgctgctgacgtagcataccctgaccctatcgcgatacgttcagcccgatcgcttcatcaatatgcgtntggacacaccctgctactggctactccactcttgattgactcacaggataatatatctcctggaaagcaaaccaattngnataacaa

SEQ ID NO: 146729 - DNA, 333 bp, Zea mays
  Clone ID: MRT4577_65332C.1
gccggcggtcgttcttttttttttttgacccacacgtattaaatggggaccggggccacaacagaaagtcggggaggggtgctgaaacaagcaaattggtcccacggtcatggggaaattcacttattttaggatatttcattccattcaggccccatgaatagacgaactcacctaaatctgaaaacattacgtgctctatcccccacagttaaccaggcacccgtgaaaccggctattgcgctattgacgttacgttgaacatacacatccatttggggctcaagcctttcaagatatttctaagcgggcccaaccttggttgggaattaa

SEQ ID NO: 146730 - DNA, 1344 bp, Zea mays
  Clone ID: MRT4577_65333C.1
cataattgtacttttcttttctttttctatatactaaattttcttgtttttattaacacaattgtgaaggcttatcattacacgtccatgtgtcattgtgctcacttggatcttactaaagacaaagtatgggctgagaaagttcattggcatttgagtttgcatggctggccttattttggtcgtattttctgatgtgtgttcttcttatcgagcaagtatgaacaagcttcattttttatacatatggaattgcactattacagttctgatgtcatactgaatgcattttcttgaaaaaatgataatatgaatttacaacaacgaatgttcatctcacagtatttacatagatgagaataatgtccatattacctcactatgacatggttaaataaaatttatcacaggaaatgaaactgtcagctatgaaaacccaaagccaactgctggaatacattgccttgtctttgtagtctcctgctagtttatccagcaaacagtttatgcataagggtcttcttttggttaattagggttcttttggtcagttatcatatgatcacttgttgctttattaggatcctgtctggggaatcttcatccttttcacccttcacctgtttttgtttcgaatacaaatttgtatgttttgaatgggattgctaaagtgatattacagttactttctgtcggtttaaagtctgatgataaatggagtgtggagtatggactactaccatttattcctactgcaaaatcatttaaaatggatatagttttggccatgttactacaattgcaacgatggataagttatccctgcttgttctttatgggtatgtgttctagattctagaagattaatgcttgaacccatctaacaatgttgtggctttaaccgatttcaggtgtggatctgatttgtaatggcttattaggatttaggccagtcactgatgttctgaataaaatactactattttgtgacaatcttatagcatggccttcgagttgtgtatgaaattgaagaggactatagtctatagatcatatgctcatttcaacatcaagggcaatttgattcaattaagtctaggatgatgattttcagtacctaggatgaagtttcagagctgccacctaatttcagagctgcaagatttctacagaattggaagactatgctaccaaaaaagctttcctaatttacctaagatgaagttcagtattgtttaggacgagtcatatgtttatgtctttgtgtctccaaaaatatttgtacacgtatcaagtggtgattattttaagtttcgctactctatatattggctattttatttc

SEQ ID NO: 146731 - DNA, 540 bp, Zea mays
  Clone ID: MRT4577_65334C.1
agccggcctgccacatggcgacacggcactgacggaagaacgcacgaggactctacgtccgggtctccatcctgggcaccatgatgggcaacaagaagcacaacgagacccagtacgtgatcaagatcgtggtggagatcaccggggaggacaccaagggggacgctggctggcacgtggggtagatcttcgaggctatcaccaagggtaacaccaccagctacaagaccctctgcaggagggtctcccgcacggacagccgctcggacggcaactcggccatgttcaagtccaagctcaagtctaacctcatggctggcacggtgagagtgatggtgtacccgatcatgttctaaagctaggtttttggtggagttattgtgggctttaagggggcctgcttatggcttttctttgatcttatattggcatgtgtagtgccctgagatggctcctgtactggacctggtgctgatcttcctgaatttgttgcaaaactggtggacaatcggcctaacggtttgctttatgcagtgcttt

SEQ ID NO: 146732 - DNA, 292 bp, Zea mays
  Clone ID: MRT4577_65335C.1
gcgttacttacactatcgtgtgcctctagatcattagcagattcataccgctcgtagccagtgtgagatggatcctatatataacgaatcgaaattattgaacgcgcccatcgtgcgttgtcctatgaggatctgtcccatcatggttcacagacattcggacagacaccgacatgtgcgggtccacacggccagtacagctgcacgctctgcgaagagacacctgctgctctatgccgacgagcgaaacgaactgggtctgtcacacgaggggcatccctacgtataacag

SEQ ID NO: 146733 - DNA, 140 bp, Zea mays
  Clone ID: MRT4577_65336C.1
ttacaatacactaaagtgagtcgtattagacttccaagatatacatgtcttcgggcgcgagctcgccgaaatggccgcctgagggttccacgactacgaggtggtgggtcgcacgctggggacggcgaacgaggagcacg

SEQ ID NO: 146734 - DNA, 822 bp, Zea mays
  unsure (1)..(822): unsure at all n locations
  Clone ID: MRT4577_65337C.1
gccggccgggtcgggaaaaatcaacggaccaccggaacaggaagaacagcagcggggcgcgggtgccgtacccttcactcactccgcccctgaaagtgaaacgtacccagatctacaagctactccactcgacttccataaataccactcctgcgattccaccttgcagttggaccggccgttgttgctttgcgtcttcgccaaaaacagaataagcctgtcttgctccgatcaggtgtgttcttaggcttcgctgcccctaccgcgtcttcgccgggatcggtccatggccggcgccgagcgcgcggaggcggtcgcgctggaacaagggctcctcgatccggaggaatccaaccaactagtatacactggagatggatcagtcgacttttctggaaatcctgttgtcaaggaaagaacgggtagatggaaggcatgtccattcatattaggtaatgaatgctgtgaacgactggcctactatggcatctccacaaaccttgttacttacttgacaaaaaagctgcatgctggcaatgcctcggctgctagcagtgtgactacatggtcgggaacttgctacttaactccacttattggagcaatcttggctgatgcatactgggnnggaggggatgacactgctgactctttcagcatcagttcctatgctcatgcctcccatcttgtgaaggatccttttgcccagcagcaagcccttttcagnatactgggcttttttcttggnctttatctgattgccctggggtactggtggaattaagccgtgtgtctcgtcatttggagcggatcatttgatga

SEQ ID NO: 146735 - DNA, 126 bp, Zea mays
  unsure (1)..(126): unsure at all n locations
  Clone ID: MRT4577_65338C.1
accgtccgaaaaccccgggctgccactataatatagagtagggagaagaaattttccttccccgggaagtaccggctgtacatattaggtatntggtgtgtnnttgtgcaggcatttttgttggca

SEQ ID NO: 146736 - DNA, 1028 bp, Zea mays
  Clone ID: MRT4577_65339C.1
aattcggcacgaggctccgaaatcccggcaccaaccctagctcccgaaggggcagaacacaaaatcaacggaccaccggaacaggaagcaacagcagcggggcgcgggtgccgtacccttcactcattccgcccctgaaagtgaaacgtacccagatctacaagctactccactcgacttccataaataccactcctgcgattccaccttgcagttggaccggccgttgttgctttgcgtcttcgccaaaaacagaataagcctgtcttgctccgatcaggtgtgttcttaggcttcgctgcccctaccgcgtcttcgccgggatcggtccatggccggcgccgagcgcgcggaggcggtcgcgctggaacaagggctcctcgatccggaggaatccaaccaactagtatacactggagatggatcagtcgacttttctggaaatcctgttgtcaaggaaagaacgggtagatggaaggcatgtccattcatattaggtaatgaatgctgtgaacgactggcctactatggcatctccacaaaccttgttacttacttgacaaaaaagctgcatgctggcaatgcctctgctgctagcagtgtgactacatggtcgggaacttgctacttaactccacttattggagcaatcttggctgatgcatactgggggaggtactggacaattgcaacattttccacagtatacttcattgggatgacactgctgactctttcagcatcagttcctatgctcatgcctccatcttgtgaaggatccttttgcccagcagcaagcccttttcagtatactgtcttttttcttggtctttatctgattgccctgggtactggtggaattaagccgtgtgtctcatcctttggagcggatcaatttgatgatacagatccagctgagcgaatccagaagggctctttctttaattggttctatttttcaataaacattggtgctctcatatcaagcagctttctggttttgggtgcaagacaatgtaagatgggga

SEQ ID NO: 146737 - DNA, 849 bp, Zea mays
  unsure (1)..(849): unsure at all n locations
  Clone ID: MRT4577_65340C.1
aggccggccgggccgggatttccttggccccgtcgaagctccctggctgcatcgcttctctgcctccccaagcggatgtgccatctctcagtcgtcgtgctcgtcggagccagcctccaccaccgaccacagctaactggtgctcgcctgccacacctccccatgcttgaactccatggtcgttagctccggcctgccatggcgcttgccccagcaactcgcgctcgactccatgtccaggtcccctcatcgcctcgccctcgctctcactagtgaccgagcggccgccctggtgtctttcccaagccacctcgccatgcgctgccgcagggttcagctcagccctggtgtctttcccaagccacctcgctctcactatggatgacttgatcaagtgtgaggatttttgaggctcaccaagcggacatcatctaaccacactaacctagtgttattgcaggcaagcttcggtgcatttgccacctccttctgttttaaaaagttttatcaccttgaatgatgtattaggtgataggagttgtgtgatcaaatagttgatgcatttccttccttgattaaacaaccctaatacccgttttatgaaaatttagtgatgcttagccctgcttattaatttaggattgtttttaaaagatgatgtgtaacacgggatatgggagtttgtgaaataanataacatgtgatgatgaagccattgtggccgcgataatttcatcattcaagtagggtacctctctgaggtatcaagttttaggaaataatatgtaatgtagaccagacgttgagcaggaaagttcgctcgtctgtgtcgattaaggaccgttcgat

SEQ ID NO: 146738 - DNA, 178 bp, Zea mays
  Clone ID: MRT4577_65341C.1
cggacgcgtgggccaacccagctgggtagtcctagctgaacacgtggagtacctagtagcgacctgattgattattagtgtatagtgagggtaggggtctagctatcttggcggctggttgcaacagtcatggcgacttctactggtatgaatgcctagttgctggtgtgagagggcg

SEQ ID NO: 146739 - DNA, 382 bp, Zea mays
  Clone ID: MRT4577_65342C.1
aaccgccaagatgaagtattgaataataaccggagatcgactatgaaacggctacgtggcgtttttttttacagagagtgcatgatcgcagaacacgcttatttgaagaggtcaaaagaattatgggttggtttagacaagcactgctgtgcccaatctacatacactcgacataattttgccgaaacattataaaagctaactcaaacatatttaccttcattttctccgatgggcatagggacttaggcagtttggctggacttaaatacaatatgggtaatacggaccgagcatttaccacagggagccaaaacatacctttcgctggccggacaactgcaagcagcggtgctttatccgattgatcgggaacggacaa

SEQ ID NO: 146740 - DNA, 438 bp, Zea mays
  Clone ID: MRT4577_65343C.1
tctgagccatctcaacacggtaatgcagtgggcgcgatgagacagcgacaccaactgtcctcaatccagcagcccctcgaggctcgtccccggacttgagcggagagacgccagttcataccaccagcatgctacaccgggagagatgcacgtgcgtcagctcctgtccgctcgaggagacctggtggagctgagggccgtttcccgccctgaggacactaccgctatcgagggcacttgaggaggcgcccagcgcgcgcctatgactgatagagctctacactgcgtacactcatagaaaccgatgtctttctcaaagacgagggctaccgcacggcccttgagaccttcaccaatcaccggctgcagatctgtctagaggaggacgactggaatctcatgacggacagaatgggatgcgggcaagtctaggagctg

SEQ ID NO: 146741 - DNA, 367 bp, Zea mays
  unsure (1)..(367): unsure at all n locations
  Clone ID: MRT4577_65344C.1
ttccggtttcggaattcgccggctgcgacgccacgtcagtctcggtttttctctgtgccagtaaaccctatcggagtgtagtcttgctnnngccgccgnnctttaaacggtgaggaggtgagagtctgtcagtgatatattnnnttggcgaagtaaatacctgnncttcttgcntnnccgttcnnccgtgccttttgtgctggcngttgaccagtgtgaaatggctttaccatgttgctncatggtattcggctgtgaccgaccccgtcaanggtttctgcgcaatgattgtggaagccagctcnctcagcaaagcttnccctttaagtttgncggctctgcggggatttcggtgccagtgcagcaa

SEQ ID NO: 146742 - DNA, 201 bp, Zea mays
  Clone ID: MRT4577_65345C.1
aacacacgccagccgcctcgtccactggtgagctctgcactctgcttagctccgagcttaggccttcgttgttgctccacagtccacacaccccgtccagctgctgcactgaccaatggcgcgcgaggccggcccactgccgtcccgcgaggggtgccagtgccgcgggggggcgcacaccggaacaagagaccggtgctc

SEQ ID NO: 146743 - DNA, 432 bp, Zea mays
  Clone ID: MRT4577_65346C.1
gcaaggacgacaaaaaaaaaaaaaaaaaaaaaaaaaggaaaaaaaaaaaaaaaaaaaaaaaaaaaaaaaaaaaaaaaaaaaaaaaaaaaaaaaaaaaaaaaaaaaaaaaaaaaaaaaaaaaaaaaaaaaaaaaaaaaaaaaaaaaaaaaaaaaaaaaaggggggggccttttttggggttcaaattttccttcccgtggtttgcaaattaatattttttttttgggttccctaaatttaatttaattggccgttttttaaaaactttgggattggaaaaaccttgggtttcccaattttaatggctttgaaacaattccctttttcccaggttggttaaataaaaaaagggccccacccttttgcttttccaaaaatttcccaactttaattggaaattggccccccccttttagcgcccttttaagcgggg

SEQ ID NO: 146744 - DNA, 333 bp, Zea mays
  unsure (1)..(333): unsure at all n locations
  Clone ID: MRT4577_65347C.1
agcatataacagaggtgctaaatttgttcttaagcggaagccgaatatattgtccgtcgnggcgatcttcgaagaatgttcccaaggaatacggaactgacatgtaagagaggcatgacggagctgggccagccatccatcgggctcgcgtcgaagaagatcatatagccaccagcggtacactatgtgcagcataaaaacctatctatcatgcaggagcataggcaggagcgagagctagaatgactaaatcagtacaacggaacggcgcgctacaaaataggagacaaggcagcacaaggtctcgcctacgtacacgaagcatggagactg

SEQ ID NO: 146745 - DNA, 586 bp, Zea mays
  unsure (1)..(586): unsure at all n locations
  Clone ID: MRT4577_65348C.1
cggcacgagctgaaaannnnngttccaaggtgcagtttcagcaaatttatgagcgcaaacaaggtgctgagttccacaatgttagcttaatgttgcatatttnnnnnnnnnnnnnnnnnnnnnnnnnnnngatttgcaatcctgaagtttccttttgaatgaagtannnnnnnnnnnnnnnnnnnnnnnncacatgagtattgttttcggtgagaactggtccnnnnnccatttgacactagcagaagtctcttactctctagagccccagatgaagacatcatcgactatgtgtgtatctcctaccagccagcctttaaactttaatcattctctcctcaagaaccacacaatacagatgagccaatcagccctcaactcttcttcaggaatcaaaacaagcttatcattggtttatgtgtgcacccaccattttaactctcaccaaacctctaatcttttcagtttaggccacctaccaccttaaaggtctatacaatgatgtcaaaatcagtgtaagctcaaacagcgccagtgagaagccaatgctctagatgtggcatctaaatagcacgtgtcgaaggtc

SEQ ID NO: 146746 - DNA, 1324 bp, Zea mays
  Clone ID: MRT4577_65349C.1
cgagtatactgcatatagagacaatgaacgccgatgggtttctgcagactcagactcaagtttgattgattgctaccaagaaaaagtagctccagacaaggttacaaaagttggagatcattatgttctgaaggataatccaaacattcgtctgaatgctcgtgcctacaagatgagtaaaagtcgagggaatgtcatcaaccctgatgatgttgtttcagaatatggcgctgattctcttcgcttgtacgaaatgttcatggggccattgagagattcaaagacatggagcactgggggaatcgaaggtgtgcaccgcttccttggacgaacgtggagactcatagttggtccacaattatctgatggatcatataatgatggaaccatgactgccgaggatgaaccaaccttggatcagcttcgagttcttcacagatgtattgcaagggtcacggaggaaattcaggaaacaagatttaacactgcaatatctgcaatgatggagtttctgaatgctgcatacaagtgggaaacccagccaaaatctgttattgaatcctttgttctgctgctttcacccttcgcgccacacttggctgaggagctttggtttcgcctcggacatccacaatcattggcctatgaacagtttccagaggcaaaaagtgagtacctggaggaatcaaagcttgtactccctgtccaaatcaatggaaagaccaggggtacaatccttgttgacaaagcgtgctctgaggatgatgcttttcgaactgcagcctcggatgagaaactctccaaatatcttgatggaaaaggcatcaggaagaaaatttatgtgcctggaaggatcttgaatgttatcttagatcaacaaaagtcaaggacctgataattgctcttgcttgtccatttatctcgttatgagtcaggaatagagatcaataagacatgacagatctgtaaatttgttttttagcacttgcagtttactgtcaatctgccaacaacaacaacgtcgaacactcggtaggttaatgttaaaatccaacagaaaccgtcagtcaaggttaagcatatggatagttatttttatgcactctttagggtatttgaaactgctccaggttccagcttcagtgtggagctatagtttagaatacagatttaaatagttttaacaaatatttttaatcgaaataataaacaaaataaattatctaaatgtcttctaaagacttacagctctagctttatgattttctagagcatttaatgatctgcttcatcattttaccaaattttttagagctgaaatagt

SEQ ID NO: 146747 - DNA, 308 bp, Zea mays
  Clone ID: MRT4577_6534C.1
tgtgtctggcgatcgccgatcctaggtggccttgcggcgatgactcagtcataaatctcctacaccctcaaagctattcaagcaaacgctcgcagtgaaagcacctggagactccgaaaggggcgatacaaccgagagaaatacctgctaatcaaagacgagcgcagctagggagagtgattcaaggaagggaagaacgaatggaccttgccattagctgtgaagccggtgtggcaaatggtacgcactgtgttgcagcctataaatgaaggcaggtccagtgttgacacaaagaggaactcccactc

SEQ ID NO: 146748 - DNA, 220 bp, Zea mays
  Clone ID: MRT4577_65350C.1
gggggcgaaatcatacacgatcgaccaagagtcaatgcgtgtataccgagagaacaaaactacaattaccgcaaccaatgcatagaaaacacactagctcaaaataaaacaaaataatcaatctatcctcatacccaaacaaccaaatgacgaatcgcaataaaccttgcgtaaaaacatacaaacctcatacgcaatgatcactaaaaccttcacgtga

SEQ ID NO: 146749 - DNA, 260 bp, Zea mays
  unsure (1)..(260): unsure at all n locations
  Clone ID: MRT4577_65351C.1
ctactcactacccacaccactacattttcctacaaaaacgaccaatactatactaagcaaaacttaacaccatggaagaccnacccacccaccgtcatctccactctcatcttcctactccaccgccacgacctgagctctaccatcgctcactctctccactccacctacctatcctaccagtgaataaaccatgacatctttccccacgttcttctaccccctctactgccctcatcatcaccttcatctctaccacc

SEQ ID NO: 146750 - DNA, 532 bp, Zea mays
  Clone ID: MRT4577_65352C.1
ggagggcaagtctttttttgggggcccgagggaaccaaaaaaacaaaatttaagggctcggtttaaacaaccccaaaggggggccccaaaaatggaagaggatcccttttttttaatctatcaaaatggaaaaaatttcggcctgtctaaacagcctaaaattattatccgaaaaacttccatctcctattagttcgggacccaacaaaattccttgcatttttttgggactctacccaggattggcggccccgtttttgaaaagaaaaaatatttatcctttttgaatagttccgaggggggggatttcatatcgggaatatgggatgaaaaaaaggctgccttccaaaaaaaaacttcttttcagacctttggaatgggaaacccatgacaattttttttggggccctaagggcataattagaggctttaaaattggcaaaacctagtggccaaaagaaacaacttcagcaaaggacacccttgaaggccggaaaaggccattctctctgactactttgttaaaaacaac

SEQ ID NO: 146751 - DNA, 813 bp, Zea mays
  Clone ID: MRT4577_65353C.1
cctcgaggccggccgggccgggttctcactgccgagcgccttgccaaggccaagaacttgaagcttgctgttaccgccggtattggctccgaccacgtcgatctgaatgccgccaacaagaccaacggtggtatcactgtggctgaggttaccggctccaacgtcgtatctgtcgccgagcatgttctgatgactatcctgaccctggttcgcaacttcgtccccgcccatgaccagatccgcaatggcgagtgggatgttgctgctgttgccaagaacgaattcgacttggagaacaaggtggtgggaaccgtcggtgttggccgtattggcgagcgtgtccttcgccgtttgaagcccttcgactgcaaggagcttctctactacgactaccagggactgagcgctgagaccgagaaggaaatcggctgccgccgtgttgaggaccttgccgacatggtttcccagtgtgacattgtcactattaactgccccctccacgaaagcaccaagggtctcttcaacaaggagctcattgctaagatgaagcctggctcttggctcgtgaacaccgctcgtggcgccattgttgtcaaggaagatgtcgccgaggccctcaagtctggccacctccgcggatatggtgggagatgtctggttccctctgccagctcccaaggaccaccctctccgctacgctgagcacccatgggggtggcggtaacgccatggtccctcacatgtctggtacttccatcgatgctcaggtccgctatgccgagggtacgaagagcattttggacagctatttct

SEQ ID NO: 146752 - DNA, 130 bp, Zea mays
  Clone ID: MRT4577_65354C.1
tgcacgcctctaaaatgggtcgggttaactcgtctagttcgtctagatgctgctcaacgacagcggcgtcgtgtccatcgtgttggcctgcggtgctgggtatgacctcggccgcacatgtggtgctttc

SEQ ID NO: 146753 - DNA, 614 bp, Zea mays
  unsure (1)..(614): unsure at all n locations
  Clone ID: MRT4577_65355C.1
tcgagggcnncggccgggggaggtccattgctacaggagagaggaccaagctcctcgaggttgacgccgatgtcacctatctacagacgcgacacgctctcacctcatcgtgtcctgtaccaaaggaaccatggactgacggtcacaagctcaagtgggacgcacctcaacagattcctgagctctcccagaacacccatctactgcgacaaggagggatagaccggcacccaggccttcatcaagcctactataacatctatttctactgcatactcccaagcggacacatgataccactggacaacccttgaccctgtcctccagatgctgcttgtcattactcgatctcctggcgagtatgaacaccaacaaaaccaggcaacagaatggaacgatctgacaccaggacttcgacattcttctcttttcatacagctacacaagaatacagtcattgagtgcgagcattcatacatgcaacaataaacaccaacgaacaggtacatgatatgatcagacacatatatatttctaccatatattattgagaatcaccgctatataactctgcagactgaatttccaacatgatgatatgattgactgtgctt

SEQ ID NO: 146754 - DNA, 477 bp, Zea mays
  Clone ID: MRT4577_65356C.1
cacataaacatcaattaattcgaggcaggaaatacagccgacgttcccaagcccccacacaaagggggcaacctccttactttaatttcaggacggggagggaaccaaacttttatggactactacaacaagcgaactacgcgggggctctggctccccattcattcccatgggggcatacgaccccgaaaactattaagtgggggacctcgacaagctcaggacggaacagggcctcgggtatcggatcagggggcgagcagcaccggcagccgccagggacacccggggtggcagaacccccaccggaagggcgggaagccgccgccgccgccgccgccggaacccgggaagccgccgccgccggcccattcttgaacctccacctttttctccttttgggccgcctgggctggctctttaccggaggcggaaagaaaggtggcggcaaccaggacctgtaccacaaggagcccc

SEQ ID NO: 146755 - DNA, 365 bp, Zea mays
  Clone ID: MRT4577_65357C.1
agatgcagtgccattgcttttgtttggtacctctgagcatacgagacatgatttgtttcaacagttgatgcttgttcacaatgatcactcctttgtggagtacctgaaaaacacctacagatattcaaccacagatgataatgaggacaggcctcgagagaaaaaacaatcaagctcagcctcagggtcatcccaagatgcttaaaaatcaaattcaactaaccaaaggacaacacgtggaagtggtgggtagagcatcagatgaagcttctcgtgggaaaaataagttcttcttgacgaaatggtttggtcttggttcaaaatagtcttttttatcatttctattagttttattaacaatttaa

SEQ ID NO: 146756 - DNA, 679 bp, Zea mays
  Clone ID: MRT4577_65358C.1
cattgggtacctcgaggccggccgggaaaaaaataaaaaaaaaaaaacacacgcagcaaccgttcgtttccccagtcattggcgccaccgccactgcagcgcgcaagcacgcacgcacatttcaattcatccaaaaaaaaacttctctgggacgacggcgtcctgccggcgtcgccgtccggtgcgcgccgaacggcggtggcgtgcccgcagcgggcgacacgaaagcgaagctcaaggtgggctccccgatcatcatcgtcgaggcgcctgtgatgctcaagaccgccgcgtcggtgccgtcgctccggcacaacagcggtcaggtcaagcccggcgacgtcggaaggatcatggcgcggaagcccaaggacgtctgggtcgtgcggctcgccgtcggctcgtacctgctggatggcaagtttttcagtcccttggattctgacaacggagatgatggtgagccccaggcccaggatgaatgagtgatcaatgccttaacggtatgattgaatcgcatgtttactcacatgtcgtgcagacatgtccatgcctatatgcatgattgcaatttgcaatgtaaggtccatgatgtgtaacttctgccgacagcgagtgattactatctgtcttattatcaacttatcatagagggggaaaaaaaaaaaaaaaagcggcc

SEQ ID NO: 146757 - DNA, 902 bp, Zea mays
  Clone ID: MRT4577_65359C.1
gccggccgggccgggaagcaccgttcgtttccccagtcattggcgccaccgccactgcagcgcaaaagcacgcacgcacgtttcaattcatccaaaaaaaaagtgagtaccccatcatcttcatccaccccgtcggagccacacgttgattagagcggcagttgaagcgcctagctgcacaaacagtctgcacagtgcctgtttgttccatttggtatagcatgccacacccattgctcgcggcagtaagtgctgccgtctattcgtccttcctctcaccgccgcggcgagtcccagcttctctgggacgacggggtcctgccggcgtcgccgtccggtgcgcgccgaacggcggtggcgtgcccgcagcgggcgacacgaaagcgaagctcaaggtgggctccccgatcatcatcgtcgaggcgcctgtgatgctcaagaccgccgcgtcggtgccgtcgctccggcacaacagcggtcaggtcaagcccggcgacgtcggaaggatcatggcgcggaagcccaaggacgtctgggtcgtgcggctcgccgtcggctcgtacctgctggatggcaagtttttcagtcccttggattctgacaacggagatgatggtgagccccaggcccaggatgaatgagtgatcaatgccttaacggtatgattgaatcgcatgtttactcacatgtcgtgcagacatgtccatgcctatatgcatgattgcaatttgcaatgtaaggtccatgatgtgtaacttctgccgacagcgagtgattactatctgtcttattatcaacttatcatagaggggaaacacagcttcaatattctaattttgagtacaaaataaaaaaaaaaaaaagcaaatagagattgttatcctcgaaaaaaaaaaaaaaaa

SEQ ID NO: 146758 - DNA, 175 bp, Zea mays
  Clone ID: MRT4577_6535C.1
ttacacttgatgtatctattactcaaactcatcttgcttcaaatacatctaactcaatttatataaatactgacattgaccattttatatatgaagataataatgcagacaacattaaaataaatgaattgcattcttacattaaatataaaccatttcaaaagattgatcctac

SEQ ID NO: 146759 - DNA, 473 bp, Zea mays
  Clone ID: MRT4577_65360C.1
ccggccggaaatcgcgcctatagactcccatggccagctctttcgcgatgccctgctccaatcgactgccctcccctgcttctccctgcttctgctcagagctccaactcacatccctccgtgctccctcgacctttgccgcgtcagcttcttcctgagcgcgccgaacgccaaggtgtcttcaacctccagccccgtgatttcctgccgagcagcttcagtatctcgtgcgcttgtctcatctccataccgattacctctcctcctacctgtcctctgagtacgcgtgtgacacctgaccagtgctacgaataagcgcgaaccgtgctgcgagagctgcgagttataggtgaaccgctccactggaaccatgatacatatacatctgtctgtgtgcatccccgaaagtgcatacgccctaatagggaattatcaatagaatacttctcatgaaaaaaaaaaaaaatcccaca

SEQ ID NO: 146760 - DNA, 398 bp, Zea mays
  Clone ID: MRT4577_65361C.1
cggggcaacactttcacgctctatcgcttagctctagcaacggctgcctccaccatggggatctcatgcactgcatatcggcggtaccgaccatcaaggtgggctccttcagtgagggccgtatcaccatgcgcaagaccgtgggcaagcccaaggtggcggcgtgcggcagtccctgttacagtcccgaccgcgtgaagtacctcgaaccattgtgcggcgagcccccgagctacctaaccagcgagttccccggcgactacagatgggacacctccggactgtcctcctaccccgagaccttagccaagaaccgcgagctggaagtgacccactgccgctgagccattctccgggcgctcagctgattcttcccctagctgatctcacgcaactgt

SEQ ID NO: 146761 - DNA, 272 bp, Zea mays
  Clone ID: MRT4577_65362C.1
aaaaaaaaaccaggacacaagagcgggaaaggaaacaacaacacaaacacgcaaaaaaaagctttcaggcgaagcacaaaaaatccggggaaagacagacaacgaggacacaaacagaacgggcaaaccgtggcacacaaaaacaaaaaacgccaaaaagcagaatggccgccccatatttggtgggcccacagcaagaggcataaccaactgaacaaaaggtggccccactatccggggaagaagctaggggggaaaaaaaattcaaaggc

SEQ ID NO: 146762 - DNA, 382 bp, Zea mays
  Clone ID: MRT4577_65363C.1
ggcggatctatcgtttctatcaactgcgggactatggactattaagtaatgcctctcagctaactaccccgacgagtgatcacggtgcttgtatcccattgtgatgttcgaccaaatcctcattctcggggacggcggtcgctcgctgtccttcatcacccccagccaacaagctctcaattacctgtggccggatgatatcgcgccgaaacgattcttcctgcaagagtcgaagcgctcgcagtgtcgcaccaggatgtgttaggaactgagcgtactcgggcgtcttccagtaagagtagagataggcaaggtatgcttggaaagcgcgcgcttctttgcccgaggcaggcgatgtggtttcgtcgttggcattgtcatc

SEQ ID NO: 146763 - DNA, 433 bp, Zea mays
  Clone ID: MRT4577_65364C.1
cgatgtcgaagcgaggacgtggtgggtcctctggtgcgaaattccggatttccttgggtcttccggtaggagctgtaatcaattgtgctgacaacacaggagccaaaaacctgtatatcatctccgtgaaagggatcaagggacggctgaacagacttcccgctgctggtgtgggtgacatggtgatggccacagtcaagaaaggcaaaccagagctcagaaaaaaggtacatccagcagtggtcattcgacaacgaaagtcataccgtagaaaagatggcgtgtttctttattttgatgataatgcaggagtcatagtgaacaatataggcgagatgaaaggtctgccatacgagaccagtagcaaggagtgtgcagacttgtggccctgattgcatccaatgctgcacattgcatgatctccagatatttg

SEQ ID NO: 146764 - DNA, 114 bp, Zea mays
  Clone ID: MRT4577_65365C.1
gagcactcaagtcggcggccgcccatcataacctttgggttgactacagaagcggaggggttaaggaccacctacaactactgatgatgcatgaactgcaaacaaatccaaacg

SEQ ID NO: 146765 - DNA, 270 bp, Zea mays
  Clone ID: MRT4577_65366C.1
cttaaacgggaatttgagttctcatagcgttctcatgaatctgagagcataacaggaggaaacacgaatcacgcagaggcgccatggggctgacagatccacacctaaaccggtaaattaacctgtgagctatacatgatagggtaacaccacccctgggatcaccaccatctcatttagagccataggatcggtccccggaggagtccattattacggcgggaggggggcccagcagaccatatcaaagagatttaggaaagctgcccg

SEQ ID NO: 146766 - DNA, 282 bp, Zea mays
  Clone ID: MRT4577_65367C.1
gcgccacggtttagccactttcagcaggagccccagaaattgagcaaacagaggctgttccatggcctcaccaagccgaacaccatcgtctccaccggtgggagagcccatagagcacttctctcttttgagaccaatcgcgctgtctgagcccacctgcgacggataccttgtggccggagaacccacagccagctcacagctactgcccctgctacttcgcatcctcatactaagagtgatagctctcattgctcaactacgtatgacgtcggtgccaca

SEQ ID NO: 146767 - DNA, 367 bp, Zea mays
  unsure (1)..(367): unsure at all n locations
  Clone ID: MRT4577_65368C.1
ccagcgcgagagagcgatggcggtcgtctcaccactgatggcggtccttccgccacccttggcgggtggcgcgcgctcctctccgccgcggccaccttcccctgtggtcagggtccgccaagggtccaccgcttnccatgagggcgggggcgcacaccttgcngcggggctaggccattgcccgtccctctacccgacaccccgaccgtcatgctcacctgctgctgctgctgcggtgggagccatcnngcggctcctgcgccctcatggcgggccccaacaactgtaccccctacgcgaacaagaattacccggccatcttcataaccattcccaccatcaaggtttgccacaactgagcacccct

SEQ ID NO: 146768 - DNA, 312 bp, Zea mays
  Clone ID: MRT4577_65369C.1
ttaagacccgcaagcggtacatttcctttactttgtaccctgcttcattctctgaggcaacagaaccaaataaattgcgtagtggagattaacctggatctggtcgccaaatgaatttggtaaacccaccggcccttttaactgtgcggttacaccttttctgaggaggttcttgaaggaagacgcactcatgctgtgactgtaaaacctggagaaggagaccgccacccttagtctatgttagattgcgcgagaaagcgtgagacaacgaagcctttcttctctatatccagaatcattgacaggggcctt

SEQ ID NO: 146769 - DNA, 523 bp, Zea mays
  Clone ID: MRT4577_6536C.1
tttattcgccctttcgagcggccgcccgggcaggtacatttctagattcttaaaaaaaaaaaaaatacaaaaccaaaaaaagtttggcgctttggccgggaccgccttaagggtgaattcactcacattgatggccgtgccttgagtgtccgctttcgaaaccaaactcgtggcatgcctgctgaaagaatgtatctgccaaaactcggtgacaggccacatgcccacagagctctcttccgcatccttaatcactaactcgctgggctcctaaggagggatgtagctagcattattagcttactcatagttgccatatttctatccacaaaaccagtggagcacgctgcataaatcatgtgaccaacaacgccaggagaggcgcataactcattaaaggcctttctgcttccttgttcacagacgctctgccctcgtgacgaggattacagaaatccacactcagttcattggaggggggaacccgccgggactctaaaaataccaggatatcccagcaaaa

SEQ ID NO: 146770 - DNA, 1994 bp, Zea mays
  Clone ID: MRT4577_65370C.1
acactgcacacgcctcatccttcgtccagacgcgcccacgcctccgctgagagaagaggttctgtgcgagggctccctcgcactccgcaagcacgccaacctcagtcgccagccagccagccatggcgtctgattccggccccgcctcctcggacccgctcctccacggccgccgcgcgccgtccacgggcggctggaaatccgccctcttcataatttgggtagaggtggcggagcggttcgcgtactacggcatctcgtcgaacctgatcagctacctgaccgggccgctcggccagaccacggcggcggcagccgcggcggtgaacgcgtggtcgggcgccgcgtccatgctgccgctcctcggcgccgccgtcgccgactcctggctcgggcgctaccgcaccatcgtcgcctcctccgtgctctacatcacgggccttgggatgctgacgctgtcatcagttttctcatcgcctcagcaatgccgtgactccgccgacgacggagaaggtatatgcccgccttcctcgcttcagacggccttcttctacgcctccctctacttggtggccatagcccagagcaggcacaagccctgcgtgcaggccttcggcgccgaccagttcgacgcgacagaccccgacgaggccgtgtcccgggcgtccttcttcaactggtggtacatggggctgtgcaccagcgccaccgtgacaattgcgctcatgagctacgtgcaggacaacgtcggctgggccctcggcttcggcgtgccgtccatggccatgctactcgcgctcgccatcttcctgctcggcacgaggacctacaggttctacggctcccgcggtggtgctggtgccagtgccagtgccagtgccagcgcgtcgtcccttttccgcaacgccttcgtggcctggaggaaaaggtcgcgtgaagtggagctgggacatggtgagctcgcccaggacgatgccgtgctcgcggaagaggtgaaggggctggcgaggctgttcccgatatgggcgacgtgcctgctctacggcgcggtgttcgcgcagccgcccacgctcttcacgaagcaggcggcgacgctggaccggaggatcgggcggtcgttccaggtacctcccgcggcgctgcagtgcttcctcggcgccagcatcgtcacctgcatcgtgctgtacgaccgcgtcctggtgcccgtgacgcgcagggtctccggcgccgcctcgggcatcaccatgctgcagcggatcggcacggggatcgcgctgtcccttgtcactctagtcgtcgccgtgctggtggagatgaagcggctgcgagcggcaagggacgccggcggcggcggcctggtggatggctctggcgccggcacggcggcggtccccatgagcctgtggtggatcgtgccgcagtacgtgctgctcggcgccgcggacgtgttcacgatggtcggcatgcaggagttcttctacgaccaggtccccggggcgctcaagagcctcgggctggcgctctacctcagcgtcctcggcgtcggcagcttcatcagcagcttcctcatcacggtgattgatgccgttacgacgaggaacggaggcaccagctggttcgccgacgacctcaaccggggtcacctagactacttctacctgctccttgcagcgctcaccgcgctggagcttctcgctttcgcttacttctcaacgtcttacgtttacaagacaaaggcaggcaatctctaatctccgtggacagaggcatgcatgtcagcatatgtatgtttattttagatagaaggattgcatggcagcgttcttcagtgtccttgcaaactaaaatgggctgcgtttagcgcgcagacagcaaagtactagaggccatcgggaaattgtaaaatggaggtgtactacggtcacaagtggggcacaataataatgaagttacgtgcttcacaaaggataaaattgtgcaaaaaaaaaaaaaaa

SEQ ID NO: 146771 - DNA, 1181 bp, Zea mays
  Clone ID: MRT4577_65371C.1
ccccgcgtccgccccgcgtccgccccgcgtccgccccgcgtccgctcgcttccccaaaccctagccaaggacacggtggccggcgatggacggcgacggaggaggcgctggtgcgctgcaccaccacacgcgctcacccgaggacgtcttccgcgatttccgcgcgcgccgagccggcatcgtcaaggcgctcaccacggatgtggagaagttctatcagcagtgcgatccagagaaagagacttgtgcctttatggtttgccaaatgagacttgggaggtcactcttccagctgaggaagtacctcctgagcttccagaaccagcactggggataaactttgcccgtgatggaatggtcgaaaaagactggttgtctctagttgcagttcatagtgatgcatggctcctgtctgttgcattctattttggagctcgttttggatttgacaaagatgccaggagaaggctcttcaccatgattaacaacctgcccactgtttatgaagttgtgacgggggttgctaagaagcaatcgaaagcccccaacggcagcagcaaaagcagcaaacctaactctaaacccacccaaaagaagaggaggacagcggccgggaggacgcagaggaggaccaggcgtacctgtgtgggtcctgtggggagagctatgcgaacggggagttctggatctgctgcgatgtgtgcgagaagtggttccatggcaagtgtgtccgcatcacccctgccaaggcggagcacatcaagcagtacaagtgtcccagctgcagcaccaagcggagccgagaatgacggcaccctgggaacaggacctgctcccagttaacggaagcattttagaatcattaggagctatgaagcggtgtcattagaaccgcttcacctgtttagcgtaccggtgcgcgtgccggctgttgtatcttctctcgacgtgtgttgtaaactgggcagggacatggtagctagtggtgatgtgttgtgttagcaggctgactgctgtcatcgtagtgacggatgaactgctggcgtttgaaaaaaaaaaaaaaataacggcctgctgcttagtgtgataatttcctccggttaaaaaatgaagaaaaaatatttacttattatatgaacagaggtaggattatgactgcctgacattatgttttgtacaaa

SEQ ID NO: 146772 - DNA, 1235 bp, Zea mays
  Clone ID: MRT4577_65372C.1
cggacgcgtggctcgaggccggccgggaggcctacggtctcgcggtattgcgcttctcgtcttctctaatcctcttctgctccctccactaccagtccaccaccaccactgctaccatcggttccccaaaccctagccaagggacacggtggccagcgatggacggcgacagagaaggcgctgcggcggtgcaccaccacgcgcgctcccccgaggacgtcttccgcgatttccgcgcgcgccgcgccggcatcgtcaaggcactcaccacggatgtggagaagttctatcagcagtgcgatccagagaaagagaacttgtgcctttatggtttgccaaatgagacttgggaggttactcttccagctgaggaagtacctcctgagcttccagaaccagcactgggcataaactttgcccgtgatggaatggttgaaaaagactggttgtctctagttgcagttcatagtgatgcgtggctcctgtctgttgcattctactttggagctcgctttggatttgataaagatgcaaggagaaggctcttcaccatgattaataacctgcccactgtttatgaagttgtgaccggggttgctaagaagcaatcaaaagcccccaacggcagcagcaaaagcagcaaatctaactctaaaccatcaaaacagatcaattctaacagtaagcctgtgaagccagcccacccaaacgaagaggaggatagcggccgtgaggacgcagaggaggaccaggcgtacctgtgtgggtcctgtggggaaagctatgcgaatggggagttctggatctgctgcgatatctgcgagaagtggttccatggcaagtgtgtccgcatcacccctgcaaaggcagagcacatcaagcagtacaagtgtcccagctgcagcaccaagcggagccgggaatgacaggcgccctggggcaggactcgctcccacttgacgaagcatttagaatcattaggagcagtgaaagtgtgaaactgtgtcattagaatcacttcctctgtttagtggaccagtgcgtgtgctggctgttgtatttttctcgtcgtgtgttgtacactggtagtaatggacatggtagctagtggtgacgtgttgtgttagcaagcaggctgactgttgtcatcgtagagtcggatgaactgctggagtttggaaacacatgttcagtaattcagtgatgtttagcgtgtatgataattttcttcggct

SEQ ID NO: 146773 - DNA, 1299 bp, Zea mays
  Clone ID: MRT4577_65373C.1
ccggccaaaaaaaaaaaaaaaaaaaaaaaaaaaaaaaaaaaaaaaaaaaaaaaattctcgcaggcctccacgcgaccccggccgggccccgcggttttgcacttctcgccttctctaatctctttgcctccctccaccaccagtccaccaccactgctacccaaccctcgcttccccaaaccctagccaagggacacggtggccggcgatggacggcgacggaggaggcgctggtgcgctgcaccaccacacgcgctcacccgaggacgtcttccgcgatttccgcgcgcgccgagccggcatcgtcaaggcgctcaccacggatgtggagaagttctatcagcagtgcgatccagagaaagagaacttgtgcctttatggtttgccaaatgagacttgggaggtcactcttccagctgaggaagtacctcctgagcttccagaaccagcactggggataaactttgcccgtgatggaatggtcgaaaaagactggttgtctctagttgcagttcatagtgatgcatggctcctgtctgttgcattctattttggagctcgttttggatttgacaaagatgccaggagaaggctcttcaccatgattaacaacctgcccactgtttatgaagttgtgacgggggttgctaagaagcaatcgaaagcccccaacggcagcagcaaaagcagcaaacctaactctaaaccatcaaaactgaccaattctaacagtaagcccgcgaagccagcccacccaaaagaagaggaggacagcggccgggaggacgcagaggaggaccaggcgtacctgtgtgggtcctgtggggagagctatgcgaacggggagttctggatctgctgcgatgtgtgcgagaagtggttccatggcaagtgtgtccgcatcacccctgccaaggcggagcacatcaagcagtacaagtgtcccagctgcagcaccaagcggagccgagaatgacggcaccctgggaacaggacctgctcccagttaacggaagcattttagaatcattaggagctatgaagcggtgtcattagaaccgcttcacctgtttagcgtaccggtgcgcgtgccggctgttgtatcttctctcgacgtgtgttgtaaactgggcagggacatggtagctagtggtgatgtgttgtgttagcaggctgactgctgtcatcgtagtgacggatgaactgctggcgtttggaaactcgtgttcggtaattaagtgctgcttagtgtgataatggcttaaaaaaaacggtttaaaaaacaccccccccccagcc

SEQ ID NO: 146774 - DNA, 244 bp, Zea mays
  Clone ID: MRT4577_65374C.1
tggtcttcactccttgctgcgagccctgaggaggccttctttccccagacatggtcaacatgggtccttcctatggcatgagccgggaagtgcagcccaaaatcgagaagaagtgtgacgagcagctgtaggagcggctggtggtgtggatcatagtgcagtgtggccctgatgtgtgctgcccagaccgtggtcgcttgggcttccaggcctggctgaagaatggcgtgattctgagcaagct

SEQ ID NO: 146775 - DNA, 444 bp, Zea mays
  Clone ID: MRT4577_65375C.1
cgttgctgtcggcgggttaagcattcaattgaacataaatgaccaattgtcaactgaaaagaaggccaggatagaaataggatgtgtcatcctctggaagcagtcaatctcaaattctcagtctcaataaatctgcccatgagacactatagtaaaatcaaaataataagcagcaatgccaagattatctgcaatgaaatcaggcttgttgatgtttttttgtgttctgcaacagcaagcactcagtttaagtaccaccacacaggaatcgtggtgtatatgcaccagaagacaaaaaaaatgagataacacgaactgagaaaaagattcaggtgtcaaaccatcatattgctatgcaattgaagtgtagattcttctcaaccacgagtacaaactatacagcctcccagaactgtcagctattaacatttgcatcccccattt

SEQ ID NO: 146776 - DNA, 240 bp, Zea mays
  Clone ID: MRT4577_65376C.1
catgaaccaaactacccatttcttcctacatctcagagcagccttaccacacgcgcataggatgacactctactgactactctctctactccatcaatatgaccgcgatcaaggtcgctgcctatccactgtccttcatcacttcatctctactctatcctttcaaacatcatttaatccgtcacactgatcacactcctgcctacggacgtctactttgctcttagcactgcgttacca

SEQ ID NO: 146777 - DNA, 206 bp, Zea mays
  Clone ID: MRT4577_65377C.1
ccctcaccgtgcctggcacctacggcttttactgcgagccgcaccaaggagcatgaatgggcggcatgagcacagtcaactaaagctagctatccattccatgcatcttgatctgtatgtactccgcccgtcgatggatgatgcatccatctctacttgcttttctcacatgtacaacaattaatgcaacagattaagtgcttact

SEQ ID NO: 146778 - DNA, 361 bp, Zea mays
  Clone ID: MRT4577_65378C.1
agaaacacatgcaccgccgtatgcgctgcctggggttcacatgagccccttgtgcatgtaggcagctagctgcacggctgcaccactgatcgacaggagcaaggggcatagttgtcattagtgctagcttaagtacccaataatttctgcggcgatgtcttgtaaagactttgcacccttgcttggagcctttggacgcttgggggcccgtatgtaaattgttttggtacgccatgcagcatgctgatcgatgcggcccagcaagtcgagagtgcgtcggtgattaatactacgtcatcagtgctgcgctggctttatttgtctgactaaaataagtgggcaaataaagactattgggggg

SEQ ID NO: 146779 - DNA, 354 bp, Zea mays
  Clone ID: MRT4577_65379C.1
cacctttacccagcccagagcagacaagcgtgggaggtccaaccaaatcaactgagctgccagtccgggaagcctgagagacataggagaagcgcacagtcaccgttcgccggcgagaccgacgatggtccttctggaacaccgacttaaggcggtcgttttaattcattagaatcagtatgtacagactttgtatatggagatgtgtcacaaagcgatcatactgtacacacttgcttttatatttgataacctgaagacgatggcagccgtctttaagacttaggtttctattctgtagaatgagctggccgtactgattactgatgacaaaatacatgcccgtatagactt

SEQ ID NO: 146780 - DNA, 554 bp, Zea mays
  Clone ID: MRT4577_6537C.1
tatttttacaaatttttttagaattatttcggggcttcgatatggatcttgattgaagaaatggacaaaagaaccaatgcaaaaattgctctatgtacagtctgaagctatcctatacctctacaacaaagaattcaaaacaacgcaaacaatcatctacagccacccgttcaatctattcctcgtcactacttgaatcagaatctgcactatccttcatgaagtgcgctggcaggtttggaaatcttggcatgaccctctttcttttgctatctgcttcgggtggtttctgagctggtgctgtttgaccatcggtcgctgacgctgtcgctgctgttgtggccgcagccgctgtcacagccgccacggtgggggcagcagctgtgtttggctgcgatgacgacggcgctggtttcttctgctgcactttcctcttgatgtccacacatgcctgatcaaccatacccaggaagtccctcactacgatgaacagctgaaggggatgtgcgttccgttccttggaggcaccggcatggaagaactctgttgtcttc

SEQ ID NO: 146781 - DNA, 120 bp, Zea mays
  Clone ID: MRT4577_65380C.1
gttgggcaactggctctcctatatggcccaaaaagatatgctgaaggccgagaatatggacaggaaacagaccaaataagagggaggagacccacgcacatatataacacatcctcgccg

SEQ ID NO: 146782 - DNA, 626 bp, Zea mays
  Clone ID: MRT4577_65381C.1
ttattcggcacgaggccggacgctgtgggccggcgccggaaaaacgagtttattcacagaccgcgtatctccctcccactcttcgccatggaccccagcttccggttcgacccggacagctccgacgatgaggcgtcgggtgccccagcccggggtcgcctggcgcagtcgccgtgggagttctccttgtacgcggagtccgtggcggcggagcacgcgcggcgccgcaccacctctatcgacgagaagatcttgcacctgcgccagggatgcgggaagccggtcctctccgatggctcggagagcgacgtgagcggcagcggggaggatgacagcaacgagaaggagatagaggaggagagcggtgacgaggaggacgagcgggagatcgagggggttggcgacgaggaggagagcggagatcgggaggggggtgaggagggaggaagcgagctgggagaagagaaagatgcccatgaggaagaagatacggtcgagcagaatgaaacgagtggaccagttgatccttctaattttttcgcttcttcagagggggcaacttttcatgcaaattcgttccttgagcttaacttgtctcgtccgctagttcgagcttgtgaagcact

SEQ ID NO: 146783 - DNA, 222 bp, Zea mays
  Clone ID: MRT4577_65382C.1
gcgcgacccgccgaccggctgcgccctgtttggcatctacaacggcatgttccgccgccgccgctccgcattcatgacctgcctccaccggatcaacggggccgaggccgaggccgcggtgccgccgaaccagaagcccgccgcgcaccgcgactccttcctcgcgcgccgtcccagcgccatgcccgtgccggcggcggcgcataacggcaggagcaggcc

SEQ ID NO: 146784 - DNA, 167 bp, Zea mays
  Clone ID: MRT4577_65383C.1
aggacgacttgccccccatctcccagtctcgccccgtcgaaacgagcacactacatgcgacggaaaacctgctcccctcccccctggtgtcgtgcctcccagcgacagcgattggctcggctcgcgcgctccgctccgcacacgctagatccgcgatcgcttggggt

SEQ ID NO: 146785 - DNA, 2194 bp, Zea mays
  Clone ID: MRT4577_65384C.1
ggtaccggcgcccccttctcgagtttttttttttttttttttttttttttttgccctaggggcttttttttttttttttgacaagtaaatttgtctcaaatttagtgattgctcctcattgcaattagttcagtcatatagatctaactcggtatgggtatcctcttgttcccagtacgtaacacttcagctatggtctgttttgacagatgcaccagcacatactcacattttactagagcgcaggcgatggtaaaactactgcagaaattgcaccggcggcaacagtttgttatttgctccgacggcacccataagcggagcagcttattagagttaggtttgggatccgaccctaccgccacttcatttcatcattgcagttctccgacaggcgcttcgttgagccacaagaaatggatgaagtcatacagcttagcactcacgcttaccttgtaaggcgtcgggttcagccgcctcatatggtctggcctcattcggtccagatggtgaatacaccgagtcctaatctcatggatggatggaagctcctcccgtgaattcgatgaatttccaggccagtagcacttcaataattcctcaacatgctgtggaacaacgtacgctctctttgattcattgaaagggtgacgacataggagcctttcaccaatctttggacctggctcatcttctccggtcattatatcaaccaacggatacccttctttgccatacaatctgtagcattttttcttacatggtatcgataccttcatgacatcttcagaaagtttaatacgaggctgtttgttaatctcaactaatttgaatacacaaccaagtgcagcttgtgcatagcatgtaactaggtaggtgccaataccaaatgcatctacctcatggccctgcttgttcagagcatctatagtttcttcattaagatcattgcttgctgtgatacttgttttcccaaagccaacaactacaaattctttttcaactgcatggaagaacttgcgggcctcaacggataggtatgctaaatcaccagagtccaacctaattccgactgccttataccccatatcattgagggccaaagcaacagcacagaagtttggcactccgcttctcatgacatcatatgtgtcaaccaaggccaggaaggaatttggaaatgccagtgcatatgacgtgaatgcagccaactcactttggctcgtttctccaaaggtgccatgcaatgaactagaatcctgaatcctgatcagccagttctgcaccagagagataaaatcttcacatgtgtttgaaccatcagaactagtaagtgttttgtcagtaatttcatcaagacccatgaaggagctcacaaatgcatgtgaatgagtcccacgtattggtatcccaaacaatcttcctgctgcaacattgcttgttgcatcaaagcctcccatataacaatatcttgatgcactgattcctccatcaggcccttgagcccgtcgaagtccaaattcaagtaaattctttgacttcccagctacaagtcggtgccgtgccgcattcgtggtaaccagagaagcatagttgacaagacttagaaatggagtttcaagaagctggacaacagcaacaggtccttcaattctcatcagtggaactttagggaacacagcataaccctctggtatggcataaacctccacgtctgagcagtcaatcgaacggaggtactcaaagaagtcatcctcacatgcaggcatgacagatcgaagaaatttgatttcctcctccgtgaacttgaagttagcaatgaaccttatacattcctcgaggccaccgaagatggtgaactccccgccaaatggatttttccggaagtagagatcaaagactgcgcggtcgaggtgcttgccggccttccagtaggcgtaggccatggtgaactggtacaggtcggtgagcagcggcgtcaccatggggttcgtcgggcgcggcaccccgccgacgctgcggcacgcgtccccgttcgccgccgccatgttttttcccttccttcctgtggcgcgcgtcgcgtgctcctgtgatggagactggagaggaatggaggaacccagagcaagcaggggaagaagagcggcgtgcggacgtgcggtcccggccggccacgagtcagccaatgaatccg

SEQ ID NO: 146786 - DNA, 235 bp, Zea mays
  Clone ID: MRT4577_65385C.1
gctttgagaaggtagcgagcgctgaggatgatggcgctcgcgttcaggtaagctcttcagctcgggtctttcgccaacgacggagatgcgcattcttatggtcggtctcgacgccgccgagctaaccaccatcctctacaagctcaagctcggcgagatcgtcacaaccatccccaccatcggcttcaatgttgaaactgttgagtacaagaacattagcttcacggtctgggat

SEQ ID NO: 146787 - DNA, 317 bp, Zea mays
  Clone ID: MRT4577_65386C.1
gtaaaaaggctgcaaaaagggcagataagtcagccgcagcacgtgaaagatggaaattggcaaaagaacttatactgcggcatgaggtaagaaatgcctgtctttcaatacacctgagcaatcagctatgtcatccaatggagttctaaatggcactgaagctactcctaacagatccaaaaaccatgaaaatctaactcaggttcccactgaagggttcgggcatgcttataatcaggcagatacggatagagctatgaagacaaacaatgataaattaacattctctggagtggtgtctctagctactgaaatta

SEQ ID NO: 146788 - DNA, 942 bp, Zea mays
  unsure (1)..(942): unsure at all n locations
  Clone ID: MRT4577_65387C.1
ntnncgaggccggccggggaaaaaacagattcccaaaaattcgcggacggctctagataccctcaacccccgacatcaacacctcacagccggcaggatgaagtacattcactcccaggagctccttgagatccccgagggggtcaaggttgccattaagtcgcgaattgtcaccgtcgagggtccccgcggcaagctggtcaaggatctcagccacttggccgtcaacttcaccagcaccaagaagaaccagatctccatcgagatccaccacggtgtccgcaagaacgtcgctaccctccgaactgtccgaaccctcatcaacaacctgatcattggtgtcaccaagggcttcaagtacaagatgcgatacgtctacgcccatttccccatcaacgtcaacgtctcccagaactccgagaccgacttgtacgaggttgagatccgaaacttcatcggtgagaagctcgtccgccgaatcgtcatgcaccccggtgtcgatgttgaggcttccaccacccagaaggatgagctcgtcctctctggtaactctctcgagaacgtttcgcaaagtgctgccgatatccagcagatctgccgggtgcgaaacaaggatatccgaaagttcttggacggtctgtacgtctccgagaagggcaacgttgtccaggacgaataaacgcgaacacggacacggatcttgtttcttttgcgtttctgggtctcaggagtggcgaaggttcatcttgcatgtcatgtagcaaaaagaaagggctactaaacaaatttcaaaaagcaaagagatgatgactctggtgccgaccaaaaaaaaaaaaaaaaaaagcgaatcgtgtatgtgaccatttaaggagcgaaaagggccggctttagacgagggttcggggggtttttgcgataagacaaaaaatggcgttttcacgc

SEQ ID NO: 146789 - DNA, 727 bp, Zea mays
  unsure (1)..(727): unsure at all n locations
  Clone ID: MRT4577_65388C.1
aattcggcacgaggacggatcgagcgcctccccgagtccccgttcccctgccccagctgaccgccgccgagacgtgtgccacaccgcctccccctcccgccgccacaaccttcgcctccacgcaattggccgcactcctttccacctcccgctacaggatagcgtgggccggtcggcggcgccgacgggtggagaactggagatccacccgcacgcggactgcttccttcgctagtcgatgggaagtaagcgttgttaggtctcatgatttcttttgggagatccggagctgtggtgcctgtctgactcatcatctctgggacactgccaagtacgattaagagaggctgcgtcgaatccaagacctttggctcagtgggaagacttctcaccactgcatcagagattcagaagaacttttgcaagaagggaggtcttgtactttggaactactcgatagccatatttttagaggttagcaaaaggagatcagaatgactaatgaaactagaaaacatcgttccaagtgggacacaaaagaaggatctgatgtagttgagatcagtgatgatgagtctcctgataagacaggtgttcaccgtaaaggtggcgatttacacacanaacctgacacatccatgcaccacagaggcgctggacatgaggaggaacatgctgatgggtccaatgaagatatgaaggaaatgcaacataaagcaccctctga

SEQ ID NO: 146790 - DNA, 397 bp, Zea mays
  Clone ID: MRT4577_65389C.1
aaaaaaaaatttggggggggggggtttttttttttttttggcgggacagttttttgaaaaaaaactttggggttcttctaaaaccccccccccccttaaaatttaaaaaaaaaaaaaaatctttaaattatcctgcgccccccacctaaaaaaaaaagtccccacaatggggggcccataattgggtatttggcctgccccccccgccgggccccttcgcgggactgcgttttctcttggtaataaaattttacggtggcctttcccgacaacaaaaaaggggccatgttaattgaaaaacggtggggtgtgctagcggggtcacctctcaaattaactagccgtggcgcgcacgtgcacttttccgggggaaaaaacctggggccccccctttttt

SEQ ID NO: 146791 - DNA, 541 bp, Zea mays
  Clone ID: MRT4577_6538C.1
gataagtgtctgtggagaaaaatattttatatggccacaaatgattctatgagtacattaggctagaaacaatatttttctttcggggcgtttggatcccttcattttaaaggaattggaattctttttttttaataacttatttagtttggaatttggcattccaccactttccaaagttcagatataagcctatctgaaattcatagggtggaggataggaaatgattttatacatgattagaatttgtttctaatctgtaacttacatgacactcttcgttctactcctctataataaaaatgtagcacataaatatctaggacatcttgctaataatagtatacaaatatattttgtataaaagtgaattagcttaattgatatatgcataaattactattattagaatagaattcaattccagtgatccaaacggggccttaaagaaattaatactgtggctggccgtcccggataatgtttttcatctggccactgggaaccactagaatgaatgctataaccctatttgagggt

SEQ ID NO: 146792 - DNA, 542 bp, Zea mays
  unsure (1)..(542): unsure at all n locations
  Clone ID: MRT4577_65390C.1
agccaggccaaggacaaggacggaatcaacgggtccggaaggatcggcaggctcggggccaggacgcccggcacagcgagcgagggcgagctcgttcccgacaacgaccccttcatcaccacggattacagggcgggcggggtcaagtacgacaccgtgcacggcccaaggaaggagaggggcagagcccacaaggacgccaagacgcnncncnccggtgagaagccggtcactttttttggcaccaggaaccccgaggagaacccgaggggagaggcgggcgcngagcaagacggggagaaccaccggtgtcttcactgacaaggacaaggctgctgcacancttaagggtggtgcccaataaggcgcaaaaaaaaacctaattttccttgtttccaagancccagatggcgccaacgaggacaagcacacctccgaaggnaacatttggttccaatgctagctgcaccacaaactgccttgctacccttgctaagggcattcatgacaacttaggcattanagagggcttgatgacaact

SEQ ID NO: 146793 - DNA, 195 bp, Zea mays
  unsure (1)..(195): unsure at all n locations
  Clone ID: MRT4577_65391C.1
ccctgcacgtaccgctccggacagcgcacgcggacccacgcgttcgcctaatcaaattcgatttcgtaganataaatccggcattttaggccggggcgatactagcgagcgggggaggagatggcaccttaaatagcagcggcttgcaagaatgcggccgagggagttgtagggtaagaggtgggggctcgggac

SEQ ID NO: 146794 - DNA, 297 bp, Zea mays
  unsure (1)..(297): unsure at all n locations
  Clone ID: MRT4577_65392C.1
caatcccgggcaccactgccttttctctctgacctggacctccttgggggcgggcggcgagcactacaggcggcggcaggcacctccctcctcaggaacatggcccgcacgcagcagttggcagtagtggcgaccgccgtggtggccttggtgctgctggcggcggcgacctcggaggccgccatgggggtcggggggggggcntcnnccatcgcgccctgcatctcctacncgcgcggccngggctcggggccctcctccggctgctgcagcggcgtctggagcctcatcttcgcc

SEQ ID NO: 146795 - DNA, 1591 bp, Zea mays
  Clone ID: MRT4577_65393C.1
acagccagccagagaaaccggcaaaaccccaacacaggagccacacagcgtcgccggcggcgatggatcccctctccgtgctccgcgactacgctggccgcaacgagctggacaagatcatcttctccggcgacgagatccacttcggctctgactacaccttcccggcttccacccccaccgccttcgcctccaagcagtcaggccgcccctacccgctctccgctgccgtcttcctcgcgcagcaccacgacctcaagcacaccgacttcatccaggccgcgcgcctgcgccgcatcccgcccgtatcgctccccgaccgcaagaccttcctcgacttcctccgcttcggccacaactccctcccctccgccgatccgctcctcccctccgccttccagccgcaggagccccacctccacccgccctcgccgccgccggaggaccccgcagctgccgaagaggccaccacgggaaagcaaatccgcgcgctcgagcggcccttcaaggaccgcaacacaatcctcgacgcccgcggccgcgacttcctcgccgtcttccatgccgccgtgcgccgccaggacgagcagctcaagggcggcggcaaggatgcggcgccctcttcccgccccaactctggctccgtcgctgcagccctggccaagcccaaggtgctggacaggtccctgggcggacggcgtcgtgcccatcatccttgtgcccagcgcctcgcagacgctgattacgatctataacgtcaaggagttcctcgaggacggggtgttcgtgcccagcgaggagagggtgcgggcgaccaagggagggaagcctgagagcgtcacggtgcagaagaagctgattcgtacggagagagctggcggcgctgggggtgccgtctcctttgaggttagggacaagccggcttcgctcaagtcagacgattgggggcgggtggtggccgtgtttgtgctcggcaaggagtggcagttcaaagactggcccttcaaggaccatgtagagatcttcaacagagttattggtttctatgtgcgctttgaagatgatagtgtggaagcagccaaggtggtgaaacagtggaatgtgaaaatcatatctataagcaaaaataaaaggcatcaagacagaacagctgctcttgaagtatgggagcgcttggaggaatttatgcgggcacggacataattgatgtgcagtcatggaaaggataaaagacaaccattttactagattcattcgcaatattggtcggtgactgtagatggcagaatggaatggctgggagcccatgaagactgcaatctttgtacgctaggatgtatttgtaatgttgtacttgcaaactgctaacttatttctagtttaagtatatgagacaattttgcaagttgcgcctgaaagtatattttctttctacgtctctatgttctgggggtcgctggctctcatcctgccattatctgaggtctatgttttaatttgttttttctatataataacctgcttcagtttaacgttatattgtaaaatgaataccctgatgtgtgaataccatgatctgattcgtggcaaa

SEQ ID NO: 146796 - DNA, 378 bp, Zea mays
  Clone ID: MRT4577_65394C.1
tggcttggaacctttgggctgatttatgtgcttgtttatgtgcttgtttatgtgcttgtccccgctagccggataacttgtagtcttcttactctagctccttttttactttacttttaaggccgattggtgaaactagtagcttgagaattgtgagtcctcgttcgacttagttctactttgttacggatgaactcgaggagtatagtaatggtggtgggtatttttatttgtattatgggcatgagcggaagcctttggtggtgtcgagtgtgaatatgatgagtgcgtatgcgatggtgtcggatggtgcggcgaatgcgaatctgtcgcctatggcggttgcgcctgcggggtcgctgtcggtgatattggggt

SEQ ID NO: 146797 - DNA, 1135 bp, Zea mays
  Clone ID: MRT4577_65395C.1
gtttgtatcaaaacacttcttatagaagcgtactgaagagctggcgcgtttggctgtccgccctgattccccgaacccccaattcccggacgcgaccgctgaaccctagcatactccggccatctgctgccggccccggcgatcccccgccatggcctcccccgagggcacaacgtgggtcttcgactgtccccttatgcacgacctcgcggtcgccgccgacttcgcggcagcccccgcgggaggatttttctgggcagcgccgccgtcgctgcagccgcaggcgccagtgcagtctgtcgttgccgcgtcggctcccaacccatgtatggaaatcagtagctctgtggactgtggtcaggaaaaagaacagccaacaaataaacgtccaaggtcagaaagtactacagaatttggcacaaaatcatccacggagaaaatctagaagggacaagctgaacgagctatattgagtgatgctattcgtgtagtaggtgaattgcgtagtgaagcaaaaaagctcaaggattcaaatgagaatctccaagagaagattaaagagctgaaggccgagaagaatgagctgcgagacgagaagcaaaggctgaaggccgagaaggagagcctggagcagcagatcaagttcctgaatgcccggccaagcctcgtaccacaccacccagtgatcccagcctctgcgttccctgctccccaggggccagcagccgccgccaggcacaagctgatgatgcctgtgattggctaccctggattcccgatgtggcagttcatgccgccttcagatgttgacacctctgatgaccctaggtcttgtcctcctgtggcgtagaagccgtgcgaaatcctgttggaaagaggcgatgctgccttccattgattcaaatcttgatcggtccgcagtgttgttggtgtagttgattccagaactgaaggggatgttacatgtgtcggacggtgacatggggtgatctgatgacccctttgtatattatatatggtatggtataaataaattccgcgaccagaagctaatgtggatcggtggattagcttattcagaaacggcgtaaatacatggcaggaccagaatctaatcgctaaaataaaacacaaa

SEQ ID NO: 146798 - DNA, 485 bp, Zea mays
  Clone ID: MRT4577_65396C.1
cgggttctctttataacatagaataagaaggtgcaaagatggtagctctacacatactgctttgtgagaactagagtccggggagagcgcccggctgggcgagaccagaggtcatgaggaggagacggagccaagccgtgcagcagctcggcgaggtcgatccatcggcggggggctacaaactctacgagaagcacgaggcgaagaaggacccctagctcgcgcacaggcacatgatcacggaggaggttgctgccgtagcggacgggggcgccggcagctacgtattcaacgagcaccacgagaagaagaaggaccacaaggacgcctaggaggccagctgagagaagaagcaccaccacctcttcggctgaccgtagtaccgaccggggcgcgaccgagctagctagcttcggcgcacacaaccacacacttgttgaattctggactggatgcgcgtgtaagttgatggttcacagtaatga

SEQ ID NO: 146799 - DNA, 1297 bp, Zea mays
  Clone ID: MRT4577_65397C.1
cggctcgaccctactgtccccaagggccaccaaacctcttttcctcgctcgcgacggcctcggcctcccgccggcgagcgatggagcggcggtcctccgtccgctttgtgccatccgagattgcaaggatggagaaattggctgcagatagaaaagaccaagtctttgataacaagttctgccagaagcttgcagaagaatttaatcgttctgttggccgtgctggaagtaaagcgttacaagctacacaggttcaaggatggtttcttaataagtttccagcatcagccactaaacctacttgtgtgcccactgcttcccaagaaaagacttcagcctcagaaataaatgtatcagtttctgaaaaaaagatctgcagcttccgaagagaaacttttccctcttgatacaggtggattaaataatgaggatgaagtttctcctgtttttccattagaaactaaagatatgattcctgaacttgaagacctggagtttgaaggcgagtctacaaactctgcttcagggagggaaacgaggaggcattgcatttcgatgcacatgttcttgaggttcagcggaagcagcatgatattagggggtgcagatgtgtattccttgttgaatacgatcatgaccaaagccaggagagggttagcctgagaagattgtcccggcggccaaagtacttttgaaggctgctcctgttagcctgatgggcatatctattctggaactggaactaaccggagcgtgaaacttaggtgaagttagtttgtggcgtccttggtcatgtgtgtattagcaaccggcgggaatacgatcatgaccaaagccaggagagggttagcctgagaagattgtcccggcggccaaagtacttttgaaggctgctcctgttagcctgatgggcatatctattctggaactggaactaaccggagcgtgaaacttaggtgaagttagtttgtggcgtccttggtcatgtgtgtattagcaaccggcggcagcaagcatgggcttgcatctcaacccctttggcacaggactggctgactgaattttatagactcgttatcgtgcagaagagggaagagtacgcggcttgagcacttagggtgtcacttagggtgtgtttggttcgtgaagtcaccttatgcttcatgaggtcatgaggtgtatcatgagttcatcctataattttttgtggcatcaacctattcctcgtttatatattaattattagtttataacggagtaatggctcaactcattaaaaatccaccctagattttag

SEQ ID NO: 146800 - DNA, 695 bp, Zea mays
  Clone ID: MRT4577_65398C.1
attgggtacctcgaggccggccgggtatggacgacctcgcggtcgccgccgacttcgcggcagcccccgcgggaggatttttctgggcagcgccgccgtcgctgcagccgcaggcgccagtgcagtctgtcgttgccgcgtcggctcccaacccatgtatggaaatcagtagctctgtggactgtggtcaggaaaaagaacagccaacaaataaacgtacaaggtcagaaagtactacagaatcaagcacaaaagcatccagggagaaaattagaagggacaagctgaacgagaggtatgttccctggtgagacaagacaatgattgcattttagtttgcagtttaatctttttttctcttcatattatcgtatttgtcaactaccactgtacttatgatattctttttgttagattcctggaattgggtgccattttggagccagggaaaactcctaaaatggacaaaacagctatattgaatgatgctattcgtgtagtaggtgaattgcgtagtgaagcaaaaaagctcaaggattcaaatgagaatctccaagagaagattaaagagctgaaggtctatactatttcatgtggccaagttataaatggtgctgttcagatgggaggtggcacgtgaatgtgttgttaggcacttcatactgttccattttcttgatttatgatcccctttt

SEQ ID NO: 146801 - DNA, 1202 bp, Zea mays
  Clone ID: MRT4577_65399C.1
ggaccctcgagtccggcggggccgtccccctctcaaactctaatactgtcccctcggcctcccgccggtgagcgatggagcggcggtcctccgtccgctttgtgccatccgagattgcaaggatggagaaattggctgcagatagaaaagaccaagtctttgataacaagttctgccagaagctcgcagaagaatttaatcgttctgttggccgtgctggaagtaaagcgttacaagctacacaggttcaaggatggtttcttaataagtttccagcatcagccactaaacctacttgtgtgcccactgcttcccaagaaaagacttcagcctcagaaataaatgtatcagtttctgaaaaaagatctgcagcttccgaagagaaacttttccctcttgatacaggtgtttcaaataatgaggatgaggtttctcctgtttttccattagaaactaaagatatgattcctgaacttgaagacctggagtttgaggccaagtctacaaaggattttgcctggtatgacattgccctattcttggcacacaggaggaacagggcgggtgaagtagaagtccgggtgagattcgagggttttggggcggatgaggatgagtgggtgaatgtcaagaagttcatccgccagcgttccattcctctggagtcctcacagtgcaaaagcgttgttgaaggtgaccttgttctctgcttcagggagggaaacgaggaggcattgcatttcgatgcacatgttcttgaggttcagcggaagcagcatgatattagtgggtgcagatgtgtattccttgttgaatacgatcatgaccaaagccaggagagggttagcctgagaagattgtcccggcggccaaagtacttttgaaggctgctcctgttagcctgatgggcatatctattctggaactggaactaaccggagcgtgaaacttaggtgaagttagtttgtggcgtccttggtcatgtgtgtattagcaaccggcggcagcaagcatgggcttgcatctcaacccctttggcacaggactggctgactgaattttataaactcgttatcgtgcagaagagggaagagtacgcggcttgagcacttagggtgtcacttaggatgtgtttggttcgtgaagtcaccttatgcttcatgaggtgtatcatgaattcatcctatattttttgtggcatc

SEQ ID NO: 146802 - DNA, 227 bp, Zea mays
  Clone ID: MRT4577_6539C.1
cgcgtgcgcccaacgcccgcagttctcgtcattcatccatcgccggaaaactaacccctaagacgtctgtatccccgaggaggacaacaaaccctcgagggcggcgcccacatcaaccttaagtaaaggacagatggcaagaggtgtctttcgataaagaggtcacccactgaaaagctgataaccttattgtgaccccagtctgggacatgaatgccattgccgtt

SEQ ID NO: 146803 - DNA, 296 bp, Zea mays
  Clone ID: MRT4577_653C.1
atcatacctacagtcgctcacagaaccttctacatgttcgccgtggcgatatcacatgcttggcacggctacggggcgagtccttcgcttatacaggagctcgacctgggcgagaacctgctctccggcgtgcttcacccgacgcttttcggtcacctaaccaagcttttgaagctgtagattcgatgatctctagtgatctcgtctctagtataaccaactctatccttgcacctatgtgttaggtacggatcagtaaaaacagttgctgttcaattcgacatatgtgcataatt

SEQ ID NO: 146804 - DNA, 1192 bp, Zea mays
  Clone ID: MRT4577_65400C.1
ccacgcgtccgggctacacggcctatattccgtactcgtgaacctcgtgctgacgtgctcacacagtcactccgtttagctcaaatccttatcggcgactcggcgtcggagctcacgaccacgaccgcttccacgccctcgaccccgaacccccaatcccggacgcgaccgctgaaccctagcatactccggccatctgccgccggccccggcgatcccccgccatggcctcccccgagggcacaacgtgggtcttcgactgtccccttatggacgacctcgcggtcgccgccgacttcgcggcagcccccgcgggaggatttttctgggcagcgccgccgtcgctgcagccgcaggcgccagtgcagtctgtcgttgccgcgtcggctcccaacccatgtatggaaatcagtagctctgtggactgtggtcaggaaaaagaacagccaacaaataaacgtccaaggtcagaaagtactacagaatcaagcacaaaagcatccagggagaaaattagaagggacaagctgaacgagagattcttggaattgggtgccattttggagccagggaaaactcctaaaatggacaaaacagctatattgagtgatgctattcgtgtagtaggtgaattgcgtagtgaagcaaaaaagctcaaggattcaaatgagaatctccaagagaagattaaagagctgaaggccgagaagaatgagctgcgagacgagaagccaaaggctgaaggccgagaaggagagcctggagcagcagatcaagttcctgaatgcccggccaagcctcgtaccacaccacccagtgatcccagcctctgcgttccctgctccccaggggccagcagccgccgccaggcacaagctgatggtgcctgtgattggctaccctggattcccgatgtggcagttcatgccgccttcagatgttgacacctctgatgaccctaggtcttgtcctcctgtggcgtagaagccgtgcgaaatcctgttggaaagaggcgatgctgccctccattgattcaaatcttgatcggtccgcagtgttgctggtgtagttgattccagaactgaaggggatgttacatgtgtcggacggtgacatggggtgatctgatgacccctttgtatattatatatggtatggtataaataaattccgtgaccagaagctaatgtct

SEQ ID NO: 146805 - DNA, 333 bp, Zea mays
  Clone ID: MRT4577_65401C.1
aaacctaaggtgtaaagttagtttgtggccgtccttgatcatgtgtgtattagcaaccgacggcagcaagcatgggctttgcatctcaacccctttggcacaggactggctgactgaattttatagactcgttatcgtgcagaagagggaagagtacgcggcttgagcacttagggtgtcacttagggttcgtgaagtcaccttatgcttcatgtggcttcatgagttcatcttataattttttgtggcatcaacctattcctcgtttatatattaattattagtttatgaggtagtaatggatcaactcattatatttcatgaatcaatttt

SEQ ID NO: 146806 - DNA, 193 bp, Zea mays
  Clone ID: MRT4577_65402C.1
agggtcagttgcaaacagccaaatactccatatcatcgatcgagccaccgactacgaagtggatgatgaaaatacttgcatggctgctattgcatagcttgacaaattgttagacacggcatagtacatcacagtgcgtcaggctgctcaacgctagcctcatttctacaacctttaatagctgcatcctact

SEQ ID NO: 146807 - DNA, 367 bp, Zea mays
  Clone ID: MRT4577_65403C.1
taaatgtttgaaatatgcctttatcttacgtgggcgttttctgagagggtggagcatccagcattctgggattggcgtctgggcacgggtcacctttggttgtgaactcaaggacttcctgatgatgtgagcggacgcttatgaaactagagaggaagctgcaaagcgtctgttagctgctaaggctccagctggaatctggaaggaccacatagatgaggaactgagtcattgacagtgaatgctatggaatgggtagaacccggtgatcacaaacagcaagggcatccaagacgttgatcatccagcagaagggttctacatgaggtgtggaatagtggcgatcttgacgaatgcaaccatcaac

SEQ ID NO: 146808 - DNA, 397 bp, Zea mays
  Clone ID: MRT4577_65404C.1
ttcagtttctagatcggaccgacttcatctctatcgtgcacacgctggcagctccggcggcggtcgctcgcctacctggccacggtcgctgcggcacccgctcgctcacaagggtttggtgctggcgcggcggcgtccgctcgcccgcccgcctggccgtggtgccggcgccggtgccggcgtggcggcggtagcgcctgctcgtgtatagtggatgcgcgagcctccctgcctaggtgctttcatgcaagctattcttttctctcatccattactgatcgaagcaacgtacgcgcaaggcttgaaggtgcgttgtctcgcacacgcttggtcgacggcgacgcccaccctcacgggctgggctgaggaggagatcgcccgcgcgctatgtgcgctc

SEQ ID NO: 146809 - DNA, 248 bp, Zea mays
  Clone ID: MRT4577_65405C.1
gactagttctagatcgcggccttacgttctttaagatccaagccaacttatccaaacgtgtgactctttagtacgggtacctgaaatccaattactagtccatagttttacatctacttaattggaaaaaccttgactttcccaacttaaatcgctttcaacttattccccctttacctaattgccttataaccaataagcccttaaccatatgcctttccaaccaattgcccatcctcaatctcaat

SEQ ID NO: 146810 - DNA, 700 bp, Zea mays
  Clone ID: MRT4577_65406C.1
aaaggctttccaaccgagacacaagacacccgtagctttgcacggctttccctctcacacttaacattttgtgccgttgtgccagggcgccaccacacgagaggagagaggtgcgcaggggaagtctctccaaaaaaatgcgcgtgttccacagacactgttgcccctgccccctcaggaggacacagaggccccggcgccgctcttgctcacgatatctagcctgctgcgcgccatctcgaagatgctgtcctctgtgcccctcgccggcggtgatcgcgctcttcttcgccctcgtgacggcgtgcttcctgcgcagcagcgtggtcgtcgtgcggctggtcccgccgctgctggagatgctcggcgggctgatcctcctctgtctcgacgccgaggcgctgctggtggcgcactactactacctgctggcctccttcgttaacccgctggatcacctgtctgtctttctttacatcaacaactacatactgcttagtcagctggatcacggactgcttgctcggcacgtgcctggcccagcgccggcgcgcgtggccttcgtctgctccggtccgctcccgttgagctccctggtgctcgcgtcgcgccaccttacgttcgcctcctttgcttctacgacttctgcggggaggccaacgacccgggcgcggcggctggtgctcgggcgacggcgcgc

SEQ ID NO: 146811 - DNA, 584 bp, Zea mays
  Clone ID: MRT4577_65407C.1
gggggcttaaaaaacccttgcattcccgacccccccagtatttattttaaaaaatggggggttccccatatccggaaagggaggttgggggccaacacctttgggattggtggcccccctcggaaaaaggaaccaatttttgagaaaaaacccaatttttttttagcccggggggggaaactgacccggtttttcacccgggggaaaaaaatttggcccccaaaacccgcggtttaaccccccagggacccccccagggcccttaccagggccagggccattggggttataaaccttttccctttaagggggtttaaaaaacttgttggtgttaagggattttttcccccttttttttttttaaaaattttttttttttttaaagcctttgaaaaaccccattttgaaaaaccttttttccccttttttttaaacaaaaatttgtggaagggcctgaacccccttgaaaattaaaatttttttttcccaacctttaaggaaaaaaaaatttttttgttttccccccaacccttttttattttccccaaaagaaatttcttttccccaaggttcttttttttttt

SEQ ID NO: 146812 - DNA, 430 bp, Zea mays
  Clone ID: MRT4577_65408C.1
gcatcgcaaggcagcgacctacacggcttcgagctgaacgtcggatggcatcaacagtacctgagcaccagaagctacactagcttctaccggggctggcagagtaccatatcttggcatgaatatgtttctcaagagggagtgacaggctgatacatctgcattatagcagatgtgacctgcattgatgcgaatctcatcaagactgtgcagaacgtatagcatcgtactacaacgaatgatcaacaccagtgaaggtatctgaccttcatctatctgacatatcagaagctggccggctcacctgacatgctataacactgtatagactatgcttcaagagcatgatttcgccactgagagcgacagtttcatagacacatggtcaagtaatccgaaccatagcaatgtgtgtgatgctgacaatcat

SEQ ID NO: 146813 - DNA, 298 bp, Zea mays
  Clone ID: MRT4577_65409C.1
gagctcactagatggtggccgccctttgtttttttttttggccgtgatttagtgccaacacgtgccagaacctacgcaattctggaccagctctggcggatgactgaagccacaactgtagcgaacgggtttactgcatcttgttctttactacatacattatttacctgttggattttgactccacccttacaggactcgcagcctccataagcgggataagggagctatcatttcaatcatttggaatacggccatgttcatgaggagcacagacctacactctaggatagaaatt

SEQ ID NO: 146814 - DNA, 1908 bp, Zea mays
  unsure (1)..(1908): unsure at all n locations
  Clone ID: MRT4577_6540C.1
acgcagagagtccctgggactgctcttagagatttcggcaagagagcgggcgattgggtttcgggaagagggcaccggtaatgtcaacgacgacggaggcggcaaagagcggctcagccgcaccggtgcggtgccagcggatcggctgcgacgccgtattcaccgacgatgacaaccgcgagggctcctgccaataccacccctccgcacctatgtttcatgacggcatgaaagaatggagctgctgcaagcaaagaagccatgatttcagcttatttttgcagatacctggatgcacaacaggaaagcatacaaccgaaaaaccaatcacaaaagctgtttcatctaaccgtacaaaggcaacaccgatccagtcctctaagcagggtgtgggagttgatgtgtgtgcaaggtgtcgtcaaggtttcttttgctccgatcatggatcacagcccaagccacaaaagccagctgctaccgacgattcaaacaaggaacctgttgagaaatccgctgttccaccgcccaagaaaaggatcgatgtaaatgagctgaggacatgtaaaaataaaggatgtggtaaatcctacaaggagaaggataaccatgattctgcatgtgactaccatccaggtcctgccgttttccatgacaggatgagagggtggaaatgctgtgatgttcatgtcaaggagtttgacgagtttatggagatacctccgtgcacaaagggttggcataatgctgatgcggtgtgaattcacgccatgcttaaggctgttttcatgttgtatcgtcacctgccatgtaaacaccatttctgcagtttattgaggatttcatttggaagtgtgacaagagctttgaggatgggctgcctaagctttgcgcatggtggttgtctggaaatcttacgtgattctccttgcacatttggtgtctggattcaaattggggttttgtctgtttgaagccgaaggatgtcaatattttaaccctgtcaaagtcagaggagttagcgcatgctgtggagcagtagaggtgccgtgtttcttgtgtgtgttccatggctgctggagaagtcctgtccgtgtactggtttgctcggtttgagcaggcaaaagcctggaccatgcatcactagtttgttctacaatataatgaaaacgtagctgcactcttggaaagagaaaagcacaatctcttgatttattgaatgctgttttggcgtgcatacactagcattatcattatgtcatggatacatggacatgggattcaaatataagtagtactggtagtgctttggacacggcagcgtttaggttcaagggatgccgatgatcgggatgaacgggaagaagaagaagaagggaggcagtcctccaaaactgaagggcggcctgttgcctccacgggacggtggagtccacgccggcgtccgtgccgccggtggcatcggccttagcgctggctgctgctggcacggccacgtcgaagttgccgcgaccgtcggtctgcgccgcgtggaggcccgcgccgccgtcgtcgtcgccggcgcatttcaccgccacgaccacaccggagagatcgtgttcctcgtcgcagtcgaggcaggcgacggagccgcggaggcggagcgcggcgctctcgcacggcaccgcgccgagcgcgacggcgaggagcagcaggagcgccccggcgagggggagccgaggaggagccagcatagggaacgtacgacgagtgatctgcatggacaaggaaagctggcgcgtcgaccgttgagaccgcctgctgctcggtgctcgcttaccagatgtgttatgtgtacgcggctnagtatacgcactcaacgctgtcgcgggacttgtagtccgaggagagcagagctcgacccggccgnnc

SEQ ID NO: 146815 - DNA, 1786 bp, Zea mays
  Clone ID: MRT4577_65410C.1
ccggccgggactctagtatcatcgcgtcctttttctaaggccgaggcctccacgtctctggaaccgttttacccgccattttcctctcctctcctctccccctccatctaaggagaggagagatatgcagctcacgagctccaccaaatgctgacctcccaaagctgtggtcgcgatccaaacagaagggaaatgatcaggcgacaacccggcatggatcggttcctgcagctgctggccgccggcgtggccgtgctactgctagtggcaccgccggccttggctgacgacgacattgtagaagtcggcgtcaactggggttcgcagctctcgcacccgcttctccccggctccgtggtgaagatgctcaaggcgaaccgcatcgccagggtcaagatgttcgacgccgactcctggcccgtcggcgcgctcgtcgactccggcattgaggtcatgctcggcatccccaacgacatgctggagaccatgagcagcagctacggcaacgcccaggattgggtcaaggagaacgtcaccgcctacggtgacaagcttaagctcaagtatgtggcagtggggaacgagccatttctcaaggcatacaacgggtcattcatgaagaccaccttcccggcgctcaagaacatccagaaggcccttgacgaggccggcgtcggcgacaccgtgaaggcagtcgtcccgctcaacgccgacgtgtacgtctccccggacgacaagccatcttccggcgcgttccggcctgacatcaacggcctcatgaccgacatggtcaagttcctgcacgaccacggcgcgcccttcgtcgtcaacatctaccccttcctcagcctgtaccagagcgacaacttccccttcgagttcgccttcttcgacggcggcaagaacatccaggacaagggcggcgtcacctactccaatgtgttcgacgccaactacgacacgctcgtgcacgcgctgaagaaggccggcgtgcccgacctcaaggtcatcgtcggcgaggccggctggcctaccgatggcaacaagtacgccaacttcaagctggcgcggcggttctacgacgggctcctcaggaagctggccaagaacgaaggcaccccggtccggaagggcaagatggaggtctacctgttcggcctattcgacgaggacatgaagagcatcgcgccggggaacttcgagcggcactggggcatcttcacctacgacggcaagcccaagttccccatcgacctgacggggcagggccacgaaaagctcctctccccagttaccgacgttaagtacctcccgaaccagtggtgcgtgttcgacgacggggccgaggacaagtccaagctgcctagcaacgtccagtatgcatgtgcgagcggcgactgcacggcactcggctatggctgctcctgcaatgggctggacgagaagagcaacatctcctacgcgttcaacatgtacttccagatgcaggaccaggatgtgcgcgcctgcgacttcgaagggcttgccaagatcacagacaagaacgcctccacgcgcggctgcctgttcccggtccagataatcagtgccagtggtcgggtggcgccagctctattgctggcggcgctattggcattgcttgtgattgtgttcgtgtagagtggggatttcgtcacttcgtgtagaactgcgttcgcgtgaccaaaaaaataatatgaattccttgctggcaaaaaaaaaaaaaaaaaaaaagaaacccactgcgtcactataacaagtggtaaaa

SEQ ID NO: 146816 - DNA, 1084 bp, Zea mays
  Clone ID: MRT4577_65411C.1
gcaggccccggcagcacgtcccgccgccgccgccgctcgagccggccgccgcggaggaggcggaggcggaggaggaggaaggaggcggtggggagaggcggcagagccagcggaggaggaggagagcgcggaggaagcggcagcagcaggaggagggggcggcgtcggagggtggcggtggcgacggcgcggacggggccgccgcgaaggcgacggggaaggaggagctgctgccccgccggccgcagttcccgctagcctccgtggcgggcgcgctgcagcggcggatccacgcgcggtacgacgacctcgcgcgggccagcgaggcgcagtgcctcaccatcgagcaggttaacgagtttcttaactgtctcgtagatgctagaaacgagttgctgcagaggtacgagaatgtacaaagaagcttcaaaataaagaaggcgatgctatccaaccatcgaaactataggacttcatacgaccgcctctttgaacaggtacgtagactggaaaccgaaagcgatagcctaaagaaagacgccgccatctacaactttgtgcaagagcgtcttcagaagtcagcgccatacaaaatgatcatggagctgagtgcaatggagctggaggctcaagaaatatcgttcgaggagcttctggctcgggagaaggaggacaccgccttctggcagcgcaacgggaagatgagatcagtctcgtccaagtaggacacaatgcccctgctacttgggctcactgacgatagcagacctcaacatcggtagtgtctaggcatgaaacccttgggagcagctgctgtatgcctgcatcgaaccgtttggtgtaacgccgcggccttctgtcaagatcctgccctgattctgggcagattgagttgtgtcgtgatacatgccggccctgagggttctgtaccagcgagtgccggcatagggctgttttgatcgtgtggccatggacctcctgacccagccgcagcgccagcaattctgtgcaagctgaaagaactgtcgctaatatcaccacgttcgacaaaaaaaaaaaaaaaaaaaaaaaacggacgcgtggg

SEQ ID NO: 146817 - DNA, 1190 bp, Zea mays
  unsure (1)..(1190): unsure at all n locations
  Clone ID: MRT4577_65412C.1
tagtatagctgcaaaaaaagctgttgttaactacagtactgagaacttagatgctccaattttatccatagaggaggctgttaaaaggtgcagttatttcgaaaccccgccgtttcttcttcccctgaaaattggtgatttctcaaaaggaatggcagaagcagatcagaaaatctattctgaggttaaactcaattctcagtactacttttacatggaaacacaagctgctctggcaatacccgatgaggataactgcatggtagtgtatagctcaagccaatgccctgagacagcacagaatgtcattgcaaagtgccttggtttaccttgtcacaacgttcgtgttattaccagaagagttggtggtggatttggaggaaaggctgttagatcattacctgtggcaactgcttgtgcacttgcagcatttaagttgcaccgtcctgtccgtatgtatcttgaccgcaagactgacatgatagtgactggaggtcggcatcccatgaaaatatgctattcagtgggattcaaaccagatgggaaaatcactgctttgcatataggtttgttcataaatgcaggaatgacaaaagatattagcctcataatccctcataatttcattgaggcactgaagaaatataattggggtgccttttcttatgaagcaaaggtctgcagaacaaaccttgctacaaagtctgcgatgcgggggcctggagaagtacaaggttcttatgttgccgaagctataattgagcatgttgcttccacgctctccgctgatgctaatttggttagacgtaaaaatcttcacacggttgagagccttgctttgtttcacagtgagtgcactgaagatgccatgggttatacacttcactctatatgtgatcaagtgactgcatcagaaaactatcagcatcggcttgaaataatccagtctttcaacaaaaacaacaaatggaaaaagaggggcctctnttttgtgccaatagtacacaaaggattatctcgaccgacacctggaaaagtgtctattcttaatgatggatctgttgctgntgaagttggaggcattgagttaggccaggggctttggacaaaagtgaagcagatgacagcttttgggcttggacaactctggcctaatcgaagtcaagaactggtggagagaataagagtta

SEQ ID NO: 146818 - DNA, 461 bp, Zea mays
  Clone ID: MRT4577_65413C.1
gactctagagcgagaggactcctctgagctaagccacacgaaacacaccgcgcttgctagattattttgtatcgactgtcttactcaccgagctagagtatggtgcgctgaggcttcaagcatatagccaacacagcactcaagctagaccacgcagattcttatggccagatctagtgagcatcggacatagcactacgtaatactgcagaagatgaatagtgcctttggcgctaccacgaaaggcgtgtgcacaccccgagggttccaagaaggcgacctagagcctcggatacgacaatacaactgcgggcatcacatgctcactcctcgttgtgaaggacccttcatcatcaccaaggtgctaaagccatggacatacaagctctgtaacgaggaaggagaaagctacgacaatgcgtggaatataggatagttacgtcgcttttatccctaggaat

SEQ ID NO: 146819 - DNA, 201 bp, Zea mays
  Clone ID: MRT4577_65414C.1
cttagtcgaccaagatactggatctcactgtgagaaatttttccacattcaaacagagagcatacaacttgagacatgtacggtaaggctcgttcattattcctagttccaccattctacagccatacatggccttcatctcaatctatatcttcctcaagtttagttcatttattcattggaccgtatctaatcccttaa

SEQ ID NO: 146820 - DNA, 252 bp, Zea mays
  Clone ID: MRT4577_65415C.1
gaagccgccccaaccctcgatctgttctcacacactactccgtcagtcacagctccagatttccttccacatggttccgatcaagatcggcatcaacggtttcggtcggatcgccaggcttgtgaacagggatgcgctccagagccccgatgccgagctcgtcccgtgaacgacccctttcatcaccaccgactacatgacctacatgttcaagtatgaccactgtccacggacagaggaagcaccatgaag

SEQ ID NO: 146821 - DNA, 291 bp, Zea mays
  Clone ID: MRT4577_65416C.1
gccacgcgtacgccgagcatcttcctgcatgggacggtgactagggctgccgggaggctcatgttgctcgctatggctacaaccggggcgcagaccataaccgtaccgtcgttcgctccgaaggagtgtgacaacggcgcgccccgagtgagtgtgcgcgagagaggcatagacctggcggtcgctacccggacaggagagcccgagatggattatcagggggtagcgcacagagggtctgagctggacctagcgcatcttaacgacgcgctggatcaggatttcaagaag

SEQ ID NO: 146822 - DNA, 339 bp, Zea mays
  Clone ID: MRT4577_65417C.1
gcctgaaaaccagacacaaccctcgctttgttcttaccaaccagtcaagctgccaactggtcgagctgcgggaacaggagacagtgccatcctgtgatacgtgctcagaagatcgacaccgtttacagacactgcacaggtaccgagacgcaacgatgctaatgtcaacaagagactcacaaggggactgcacaatcattgtgctggctggtgcaaactagaaagagtaggcactaaatctgaaagacaaagtgaacgaagaggctagcagaatacctatgacggacaggcccatattgtgtatcgcagaaaaagccgaagctcacatgaggaagaaac

SEQ ID NO: 146823 - DNA, 256 bp, Zea mays
  Clone ID: MRT4577_65418C.1
aggagaaagctttctttggggggtctcaaccgaattacaaaggaaccacacacacaggtctcttcataggaaaactcattccggtagggaaagaatccacattctttggggatcaaaggaatgaaaacgggaaaaaattttaagaactgggaatttaaactgcaggaaaaacaagcggggccatcaggaggactttctattggggcgaaccaaaaccctactaaacggggggtgcggcagcaggaacactaggagg

SEQ ID NO: 146824 - DNA, 666 bp, Zea mays
  unsure (1)..(666): unsure at all n locations
  Clone ID: MRT4577_65419C.1
ccggngtcgacccacgccgtccggcggggcgcgggcgccgnggggacgcgctcctgggccgccgccgcgcctcgcgcggnctcgagggccgnnggctgcgcgaccgcannccggcgacccggnaccgcgcgcgtggnnccgacttcttcgacctcgcggctggcgnnccggcgcggnngcggagtgctcgcnncgcgatgctgttcctgagggggcgccgacggcgcggccgcgngtacaacggcccaacgaggcgctcgcgtntcgtggnccgggagcatcggcggngaagggctgggngaggggccgccggcgcgggnccgtggngcgaagctgttccgcgggcgccgcccgcggcggggcccggtncgttcttccgcagcgcgttcgngagacgcgacgctcagggacaccgtggcgccgctcctcgtgccgtgccacgacctcgccacggccgcgccgttcgtcttctcccgcgccgacgccgtcgagagcgacagcttcgacttccgactccgcgacgtgtgtgccgccacctaggccgcgggtggcgcgctcgcgagcgtgaggtcggtcgatggcgctacggccatcgccgcggcgtccgggggagtggcggccatgggcaacccggccgcggcggccatcacgcacgtgctccacaac

SEQ ID NO: 146825 - DNA, 837 bp, Zea mays
  Clone ID: MRT4577_6541C.1
gccggccgggctgcgagccgcgtaccataacacatctggtaagcgagcaccgagcagcaggcggtctcaacggtcgacgcgccagctttccttgtccatgcagatcactcgtcgtacgttccctatgctggctcctcctcggctccccctcgtcggggcgctcctgctgctcctcgccgtcgcgctcggcgcggtgccgtgcgagagcgccgcgctccgcctccgcggctccgtcgcctgcctcgactgcgacgaggaacacgatctctccggtgtggtcgtggcggtgaaatgcgccggcgacgacgacggcggcgcgggcctccacgcggcgcagaccgacggtcgcggcaacttcgacgtggccgtgccagcagcagcgtcagcctcgggcgcgcgtcgtcccggcccgggcgcctggctccgcctccttccccgcctcctatgttctgggctcccgcctcgccttcttcacgaggtgcgctgcggctagcggcggctccgctgtcgctgcgaccatggccgaccgtgaccaccagggtggtaacgccccgatggagccagcgcgaaggccgacgccaccggcggcgtggactccaccgttccgtggaggcaacaggccgcccttcggttttggaggactgcctcccttcttcttcttcccgttcatcccgatcatcggcatcccttgaaacctgacgctgccgtgtccaaagcactatcagtactacttacatttgaatcccatgtccatgtatccatgacataataatgataatgctagtgtatgcacgcaaaacagcatccaataaatcagagattgtgcttttctcttcc

SEQ ID NO: 146826 - DNA, 441 bp, Zea mays
  Clone ID: MRT4577_65420C.1
ataaaaaactatgtgctcgtggaaatgcacaaacaacacgaacatgcaagacttgtaacagcttgttgtgatgatgcacgataaaacagagtgatggagtctatttactgtcaacataagctgagctactcaaaactgaactacccttgcctgctaagtgagtgacgccgagcccctttgagaagtaatgaaactccgtgtagtcactgtccaagaccatggtcttgtaccatgccttgccagcagactaaaccttggcagtattcggggaaagattggtcctgttgtgagtagagcttctccttgctggccttaacactatcagtctcagcaagggtggccatgtatacggcagggccaacgtatgggttgagtatgagcacacaagccatgttcttgaaagagttcttgctctaatacgtgcggtatacctacttggtg

SEQ ID NO: 146827 - DNA, 110 bp, Zea mays
  Clone ID: MRT4577_65421C.1
acgcgtcggacagagctcgcagatagggtcgacctgcatgagacgatacacaccgcctagctatctcacacacgaggccgtctagattcgaacttcctgctgaccaattt

SEQ ID NO: 146828 - DNA, 120 bp, Zea mays
  Clone ID: MRT4577_65422C.1
ataattgatgatgtatcgaagggcagagtttttaaccatggagcacgttttatgccttacaggactggaaaaataagggagattgaataacagcaaatatgtgccctgggactatgtaat

SEQ ID NO: 146829 - DNA, 2424 bp, Zea mays
  unsure (1)..(2424): unsure at all n locations
  Clone ID: MRT4577_65423C.1
aattcggcacgaggcgccagtgagcgcctccccccgtcctctttccctgctggctggaactccgaatgaaatcgctgctccaccagctttctttaccttcaggaagcgagccggtagcatcaagctagatcgcggagaagctcctcgtttcccccatcggcgctgctctggcggggagaagcgtcctctcacggcggccgggaagaccaatccgcgccgccagtccctgcggcggcttccgtgaggtggtcttggctcctggggcggcgtgttcgtggtggccggcgagatgagcagcctcgcggttggaacaagcaacggcggatccggggatgcggccgccgggggcgcagccaggaggaacaccaggatgcccaagtattccaagttcacacagcaggagttgccagcttgcaagccgattcttactccaaatcttactccaaaatgggttgtctctgttttcttcatcgtcggggtcatctttgttcctattggtgttgtttcactgctagctgcgagagatgttgttgagattattgatcggtatgatgaggcatgtgtgccaggcaacatgactgagaacaagcttgcttacatccagaatgagaccttatccaaagagtgcataaggaatcttacggttacaaaggatatgaagcagcctatttttgtgtattatgaacttggtaacttctaccagaaccataggaggtatgtaaagagccgaaacgatgcacagctaagagatgctagtaaagctaaccagacatccgcttgtgaacctgagaagaccacagctaatgggcaaccaattgttccttgcggcctcattgcttggagcttgtttaatgatacatataatttcactcgtggtaatgagaacttgacagtggacaagaaagatatttcctggaagagcgatagggaacataaatttggtaaagatgtctatccgagcaacttccagaatggcgcacttaaaggtggagcaacacttgacccaaagatcccgttgagtgagcaagaggatctcatcgtttggatgcggactgcagcacttcctacattcagaaagttatatggcagactatactttgacctcaaggagaatgacacaataacagtgagattgaataacaactacaatacatatagctttggtggcaagaaaaagctggtcctctccactgcaacctggcttggggggaagaacgattttcttggctttgcataccttatagttggtgggctctgcattttcctggcatttgcattcaccttgctgtacttcgtaaaaccaaggaaactgggagaccacaactacttatcctggaacagacgctaggatgtttcggaacaccaagtgtccgtactactcgaaatgtagcttgtatgaaatgaaatgctctgaaccagaaatgtcgatgggcataagcaagcatggttcaggaaagaacttcatgtatattttttacgaaggggtctaggtggctacgttatttttgtttcttgtgttctttagtgtagcactgaacaggagaataccaattgatctctattagcttgcttcgtggtacaagcactctaaatggttgactgtgtggtgttgacgctttggctgccgaagaataccaattaatgatgttggttgactgtaatatcctcaagtgggaacagtaccaacttctgtataaattgattaccgtgtgatgtttgtttctcaaaaaaaaaaaaaaaaaaaaaaaaaaaaaaaaaacggaaaaaaaaaaaatcgactgcgacgactgcgccaccgccgccgtacgcgagacgcccaggtccgccaacgacgagcatccgggtagagaggaagaaattgcaaccgactggcgcgattccggcgctcgcagcttcctcgggccctggaaccaaccttgggggaggagggccgccatgcaggacgctaagatgttttggaaccccaagtgtcctaactacttaagtgcaacttgtatgaaatgaaatgccctgaaccagaaatctcgttgggcacagactggatcagactagaacttcatgtacatttttttacaaagggtctaggtggctacgtgattttgtttcggttgttctatagagctgcatgtagcagtgatcatgagaatacatattgatgtctaatggcttgcttcgtggtaaaacattgcaacaaaaaaaaaaaaagggcggacgctgtacactacaaccgtgcanctctgagggcgctgttcggtcccgtggatnttgagtcattcggaacgtactcctagtctggatctgcttgtctaatttatataaccgtttgattcggttggaactgatttttagtgaaatttcggtgtaaacgaacatgccggagaccggctccctctaatagtgttctgttttatgttcgctttgggg

SEQ ID NO: 146830 - DNA, 646 bp, Zea mays
  Clone ID: MRT4577_65424C.1
tagattccaagttcacacagcaggagttgccagcttgcaagccgattcttactccaaatgggtaggtttacgggttgtgaagattatgatgctactggttttggagatttaggaaggtaacatcggacaaggtcacaaatgttttgagctttgacatatgttttgtaggttgtctctgttttcttcatcgtcggggtcatctttgttcccattggtgttgtttcactgctagctgcgagagatgttgttgagattattgatcggtatgatgaggcatgtgtgccaggcaacatgactgagaacaagcttgcttacatccagaatgacaccttatccaaagagtgcataaggaatcttacggtgataagcttagacttatttactgtttggaatactacgtggcataggaaaagcaacagtgcaattaaacagtttctttaaatgactataaagtttgaacaaacttgcagttgtaacatacatgatacattttctatcagatttatcacaattttctttgctgaaaatttgaattaatttctttccaggttacaaaggatatgaagcagcctatttttgtgtattatgaacttggtaacttctaccagaaccatagaggtatgtaaagagccgaaagatgcacagc

SEQ ID NO: 146831 - DNA, 283 bp, Zea mays
  Clone ID: MRT4577_65425C.1
cggctggctaatctccctgccatctataagtacagagttcagggaagcggcactccatccacttactgaacgcacatggcgaaggtccacctctacatcgccgcggactgcgccgtcgtcctcgcgctcgccaccccggcactcgacggtgaccccgacatgctgcatgacgtctgcccggctgaatacgcctcgccggtgaagctgaactggtacgcgggcaaggcgaacttttcggcggacgactacatcttcgacgggctgaggaacctgggcaacatca

SEQ ID NO: 146832 - DNA, 748 bp, Zea mays
  Clone ID: MRT4577_65426C.1
cgagcacttccagatggcgcactaaaggtggagcaccggccgggacccaaagatcccgtgcaaagatcccgttgagtgagcaagaggatctcatcgtttggatgcggactgcagcacttcctacattcagaaagttatatgggagaatatacattgacctcaaggagaatgacacaataacagtgacattgaataacaactacaatacatatagcttcggtggcaagaaaaagctggtcctctccactgcaacttggcttggggggaagaacgattttcttggctttgcataccttatagttggcgggctctgcattttcctggcatttgcattcaccttgctgtacttcgtaaaaccaaggaaactgggagaccacaactacttatcctggaacagacgccatgcaggacgctaagatgttttggaaccccaagtgtcctaactacttaagtgcaacttgtatgaaatgaaatgccctgaaccagaaatctcgttgggcacagactggatcagactagaacttcatgtacattttttttacaaagggtctaggtggctacgtgattttgtttcttgtgttctatagagctgcatgtagcagtgattatgagaatacatattgatgtctaatggcttgcttcgtggtacgtgcactctgagggcctgttcggtccagtggattgagcatccggaacgactcctagctgattgttgtctaatttatataaggctgattgtttggaacgc

SEQ ID NO: 146833 - DNA, 733 bp, Zea mays
  unsure (1)..(733): unsure at all n locations
  Clone ID: MRT4577_65427C.1
tggcttggaacctttgggctgatttatgtgcttggccctaagcctctgctgccgtcctgagatcgttacggcggtcagcctgccgcgtatgtaggcttagaaaacataggccacgactgcataaaatccactactactcctcttgacttactaataactgttgagagtgactgagagacaaacaaagacgaagaaagcggtactactgctagttgcctctcctgcgtcagtttcgatgtcagcccgcgtcttgtcgacagtgggcgtaaagaagaacagggctgttgttgttgttgttgaggagaagaaggcgtaggataatcctcgtctgatgtcgcgtgagggtaggaaggggacggattcggcggcgcgtaaggagcttcgtgattctctatagtgtcttaattcggcgtcgcatggttggacttagcgtaagggtaagcgtattgagtagaagggtactattgtgttgtagacgaaggcgcgttaagaggtgcgtgataaggatcatgcggctaaggtggtcgaggctattaaggttcgtaatattattcgtgttaaggagaagtagttctcgtctagtgagaatcgtaggaggcttcgtattttcttcttccttcgaatgtagagtatgtntgttggctgctgctcctcgttcgtccgtgcgatatcgaactatcgacatactacatacgtacgtacgggacgtgacgatgacccgacgtacgtacgt

SEQ ID NO: 146834 - DNA, 1000 bp, Zea mays
  Clone ID: MRT4577_65428C.1
gccggccgggtcgggagttacaagaattctaacatcccattagaccatcttaattatcaggacatatattattagatagtacagttagaaaccaaaccactccatttggtctccatctctatccattccccaagtgtccaagtcatgcatctctgtctccccttttaaagcccaccacctctctccctccatcctcttcccgtctcccagggcgtcttcccgtctcccagtccgatcccagctgcgcgcgcccgtggacttgtcctgccatggaaggcctcatcccgttcatctacagggccgtcgtgcggtacaggaaggaggaagggcgggtctccctcggcgacctcttcttcgacgagccctcctcgccgacgtcctacttccgtctcccgggcggcgccgactccgcccggtaccagcaggtgacgtcgagcgacctgttgacatcccagacgactacgtcgacggccagctccggtgcagccggcgtggcgcgacgacgctctccgatgaggtgcccgtcgcaccgccggcgcccggtctccacggacccgtgactcgatcgtgaagtgaagctagccgcccgtgaggcaaaaaaagaaaagcaagcgaaggtttgtttgctcatggcctcacgtagcagatggagcgtgtggtacgtagtatgaggatgatgctgagtaattgtgaatattagcctctaagtagctgcgtgtaagtgtacataaattcttcatcttttttttactgtggtcctctataatgtaatgtaatgtaatggatgggtgcagcagggtcctccaaaaggagaggctttgtaccttggagtgaaaactgtgtgttgttcgttggaataaatatgccaggcaaacgatggaacgcatggattttaattcagaaatccatgctttttccaaaaaaaaaaaaaagggcggccttttctcctcgtccttttcctctttttttcggggggggggggggatcaaaaaattttttt

SEQ ID NO: 146835 - DNA, 585 bp, Zea mays
  unsure (1)..(585): unsure at all n locations
  Clone ID: MRT4577_65429C.1
ggggggggggggggggggggggggggggggggggccccacccntttcgggtctacgggacacaccagcgtacanatcccaattgacgcactaggccaaactgtcggtangacaggttgacactagacacttcgtagacctccacagttgcgcgcgcgcgcgcgnctggaacctggccgagcgcaagaaagcgagggtcgtccgagacggtaccgagccgtaggtcaacgtacccttagacagtgaccccagcttatagtagtttagacgtaccccggaaaggaccaagtggtaggtcaatggtttacgaattccacggggaccccgacggaacagaccgtagcgcaagggcctaatggtactaacgggtggcctgcacgcggaaccacccgcgagtccaagccaaccccgtcaagcgtcgtgaagaaccttgggcggactaaagacccagactgcgggaagggtaatgaagaagtattcctgctgtacgggtaggagttaacccccgtctttaacgcgagagtagtgcccctgaccgttcgggtccacgtccacgtaacactgaaacgaacggagaagtaccctt

SEQ ID NO: 146836 - DNA, 530 bp, Zea mays
  unsure (1)..(530): unsure at all n locations
  Clone ID: MRT4577_6542C.1
gacaaatggccagcgaccgagggcggcctcttgagtagggaaaccccaaaggcgaaaatccgccttcggagacacgccttactaacaaagcatgacatcgaagtctgcaacaatgactatgacgggctagaacacaagaacttgcctatgtcagaggagatagctagaaaaagactatgtcctacaaatcgccaggagaggcacccaaagctctataaaggaaagacaaacggatgctccacactgctgacacaacacatgacctccgatacagaactaaagaacagatcaaccaggaaatcaaaaaaaacgctgagactgcttgcaatactagagattactaacgatgaagataactgaagcactggacatgaactgaatgagaagaagatgaagaaaggaactggaaaccaaagctggaaacgtgatactgggacaactgtgaacgccaagagagaccatagaaaaaacactatccgaaaaggtaaaataatgaacatgtgctggnatcatacctacacagtgaactg

SEQ ID NO: 146837 - DNA, 1804 bp, Zea mays
  Clone ID: MRT4577_65430C.1
ggcgaattcggcacgaggtgaatacacactctctcgtggccactaaaaacaatggtgctcctagagctactcatcgtcggctcaacacttgttctatcgttgtatgttaggttctggagatcaaggaacggcccgttgcgccccgtggactggccgatagttggcgttctcccggccctcatttccatgctccacaacctacaccacgaagtcacagtcatccttgctgcctccggctgcaacttcaaggcacaaggaccagtaggaagtggcatgcggttcttcttcaccgctgacccggcaaatgtccgtcacattttcacatccaatcatgcaaactaccccaagggcgaggagctcgccgagatcttcgacatcgtgagcggcagcatcctcaccgtcgacggcgaggcctgccgccagcagcgagggatgttccagaccgtcctgagcaaccaacgggtacttgagctgatgttccgttgctgccgacacaaggtggtgcatgacctgctccccttcttagcccgcatggagagtagtgggacaccgttcgacatgcaggacttgatgacgaggctcatattcgacctcactgccaccccaatcttcggagtggaccctggttgcctgtctacaatgatgccgtcgatgcatgtctcggctgccatggacacggtcatggaggttggtcttttgcggcacactgtgcccacctcctgctggaaggtgatgagacagctgaacattggcccggagaggaagctggccgtggcgcacacactgctgcatgagttcatcacggagatgatggtgaagtcaaaagccaggtgctccgatcctgcaggcgagattgctgccatggacattatttctggtgacccggcgtacagcagcgacgcggccatgctgaggaaaatactcatcaactacatgatcgctggccgggacactgttggcacaacactaccgtgggttttctacaacctcgccaaggatccccgcgtcgtctccggcatccgcgaggaactggctcacatcgcatcactcaaggcttccggaacaaaaaacatggtgttctttgagccggaggagactaaagacctagtctaccttcaggcagccttattcgagactctgaggctgtacccgccaggtccgttcgagcgcaagatggtgcttgccgatgatgttctcccaagcggccaccggttgtgctccggcgaaaccatcctgatctccatctattccatgggcagaatggaagccctgtgggggaaggattgcgacgagtacaggcccgagaggtggttcactgaagatggcgctaagctgcggtacgtgccatctcacaaattcatggcttttaactcaggaccgaggatgtgccttgggaaggacatagcaatcacgcagatgaagacaatagttgccgcggtcgtatggaacttccatttggagatgttggaagggcagagcatccatcccaagctgtcgtgtattctacaaatgaagaacgggctcaagatgaaggttaagaagaggcaggaaaaacgtgatctacagtgattgttatcatgtgcaaaataagatacgtacgtgcagtacaactacaaccaaagccatgcgtctttaattcacgaggtttcaaacgtcaataccaaagagtatgtacagattatcgcgaagatgttttgagcaagaccgcgaaatgcgaacatgtaataacaataaatctatctatatatattacaaagcaaaaaaaaaaaaaaaaaaaaaaaaaaaaaaaaaactcgagaggggg

SEQ ID NO: 146838 - DNA, 208 bp, Zea mays
  Clone ID: MRT4577_65431C.1
cccggcctcggaaaaaacttgaatttacaacattttatttggcatgataacaaaaatactccctggattccagattataagctattttagaggtgcgggggagcttttttttcagcagccaaaggttttacccgggttctggaaaatgaactgggggtgaaccttcttgaatccatcttggcaataccccattcaaaataaaacaaac

SEQ ID NO: 146839 - DNA, 515 bp, Zea mays
  Clone ID: MRT4577_65432C.1
ccccacccaccggccccaccctccgcgcttgcctagttgccttgactgcctgcctcgtcttaccaccaagctaagctagcgcgttccttccttttttcctccctcgcttcctgttgctccgccacatgctcgacaggatgcggccggaggacgtgggcctgagcccggacctgagcttcttcagggctcgagacgccacacgtggcggtggcaccccgaccataacgcacacgacgatatacaaatgcccgaatttctcgatggtcatcctcttcctgccgcgaaacgcggtgatcccgctccacaaccaccctgggatgacggtgttcagcaagctgctcctggggtcgatgcacgtcaagtcgtacgactggctcaacactgctgaccccgatccttcttccgccacgagcaccaccagctcttcgtcctccgatggcccatgcctgaggctggcagaactggtggtggacgacgtcttcacggcgccgtgcgacacctccgtgctggacccg

SEQ ID NO: 146840 - DNA, 2322 bp, Zea mays
  Clone ID: MRT4577_65433C.1
atggtggttggacttttttttttacaccattatttttacgggtaaatttatggtattgggaacaggtcaagaacaacggaagggaggaggggggagaacatgacaaattggagccgtgcacgaacaccaacgaaaacaaatggggggacgatagaccctatggggatggacgaattgttaattgccaattattattgaacctgaggctggcgaaactggtggttgacgacgtcttcacggcgccctgcgacacctccgtgctgtacccgacggcgggagggaacatgcaccggttcaccgccatggcgccctgcgcgatcctcgacgtcctcgggcccccctactcccgcgagggtgatggggacggagctcactacgctgaagtaggggacgcggaccgctcgctcgtcgcggaggggccggacgcacaccgctcccgtgggcggccggatcggtcacatgatgagttcttgccgttgcactagagtagggactcacgtatgggagaccggttcgtgtctttgctctgcagtggtggctgcgggcgaggacgtggagcggggccagggccatggccatctggcgcggcttgaggagatcgacatggacaggatgcggccggaggacgtgggcctgagcccggacctgagcttcttcagagctcgagacgccacacgtggcggtggcaccccgaccataacgcacacgacgatatacaaatgcccgaatttctcgatggtcatcctcttcctgccgcgaaacgcggtgatcccgctccacaaccaccctgggatgacggtgttcagcaagctgctcctggggtcgatgcacgtcaagtcgtacgactggctcaacactgctgaccccgatccttcttccgccacgagcaccaccagcaccagttcttcgtcctccgatggcccatgcctgaggctagcggaactggtggtggacgacgtcttcacggcgccctgcgacacctccgtgctgtacccgacggcgggagggaacatgcaccggttcaccgccatggcgccctgcgcgatcctcgacgtcctcgggcccccctactccatagaggaggacagggactgcacgtactacgcggaattaccgtacgcacaccactcgctggtggctgcgggcgacgacgtggagcggggccagggccaaggccatctggcgtggcttgaggagatcgacatgccgagagagctcaagatgtgcagcgtccactatggcggaccgccgatctccgacgagtgacgtcgccggccgtcgtctccctcactggttgtactatgtctaactgatcgcggcacggcagagccgtgccgccgtctgacgttgtgtatagcaggcagcagcaagccataggctgtagttacacaaagtcccgatcgagtacaatgcttctcgcttgcctgcatcgttgttctctagatgccctttctttcttgttatttttgtttctactactacaagtagacgatgttttgtcctgacgatgaatgatacagataagtcatatatatccacatatttcatttttgtcgttaaaactaaaacaaaaaaaacaaagaaaaaaaaaaaaaaaaaatgggctattctggtcatagtttgtgcgtgttgcgccattttgtccaaatattttcatattatatctaatgtaggtaattcttatggatttcgtagcaacgtgggcttgggtttattgtgaatgatatcctcatcagcaaatctagcatatataagtaattaaaatgcaggagatatagactttgaaatattgaaggaaaccaaaacacctgccaatccacctatcttgtcatggtagagctgtgggagatggatatcctcggatccacacaagggcgaaaacttcgctcggggccacgtgacagttgcccctctcaagcgtcccatcatgggccagacgaacaaagacaatgaaagcaggccaatctagaggcgaaagaggcccacgtccaagctagtcgcggcatagacgtggatatgtcgggtctgtttgttcccgcgcccgacatcctaactaaaacgacggggatagctcgacatgaaaacaccggattctcctcgagatagtaaaagatgtttgctactaattaggagataagtaggaagactgcgatcgatacttgtgcgggaagacgcccatggttgtgtatataaggctaaggaggaccccatctatttttatctcataaaaaaaaaaaaaaaacagtaaaaaaaaactgtaatcggatccatatacaaagtcatcctaggaaggagggtatacggtcttaaaaaaaaaaaaaa

SEQ ID NO: 146841 - DNA, 428 bp, Zea mays
  unsure (1)..(428): unsure at all n locations
  Clone ID: MRT4577_65434C.1
ctcaatattggtggctttcagtaacgagtcgaggnaaaaggcaaaggtgagcatcttttttcaattcgccaaggtttttcttcttcagctgtggagaaaagggcgtgtgttagtaggaggatttgtttgtctttttggtggaacaggagggatcacgaccgatcctttcatttaaaattagtgtaatggcacacaaaaacaaatattacactttatcttaaaaaaaaaaaaaaaaaaaaaaaaaaaaaaaaaaaaaaaaaaaaaaaaaaaaaaaaaaaaaaaaaaaaaaaaaaaaaaaaaaaaaaaaaaaaaaaaaaaaaaaaaaaaaaaaaaaaggggcgccccttttaaaggtcccaattttacttccccgtgcttccaacgtaaaactttttttttggggcccccaaaataaaattacctgcccg

SEQ ID NO: 146842 - DNA, 838 bp, Zea mays
  Clone ID: MRT4577_65435C.1
cattgggtacctcgaggccggccgggataggcctgagacacgacggcgacgcacaggccagaggccacggcactaccctcctctatatcactgctcgccacgcaagacggcacgagcagccgtaacgccatggcaacggccacggccgcgttgggtcgcgtcgcctccccgcgcctcgtcatgggctaccttctcttcctcaccgtcgcctccctcctcctcttctcgccgcgggccgctgcgcaggcgtggcagctctgcgggaacaccggcaactacacggccaacagcacctaccagtccaacctcgaaagcctcgccaaggcgctctccgcgaacgcgtcccgctcgaggaacctcttcgcggagggcagcgtcggcgccgtcccgtatgtcgtctacgcgctcgcgctttgccgcggggacaccaacgccacggcctgcggctcctgcgtcgccacggggtttcaagacgcgcagcagctctgcccctacaagaatgacgcggccgtggtctacgacgactgctacctccgcttctccaaccaggatttcatcgccagcaccaccgacaacggcaatgataacatcatcctcatgaacactcagagcgtgagctcgccggtgcaggcgttcgacgccgccgtcgtcatgctcctcaacgccaccggcgactacgcggcggcgaaactcgtcgcggtttgccacggggggaagagggcttcgacgccagctaccccaccatctacgggctcacgcagtgcacgccggacatgtcgtccgcagactgccggagctgccttgggagcataatatcggcgatgccagggtctctcag

SEQ ID NO: 146843 - DNA, 309 bp, Zea mays
  Clone ID: MRT4577_65436C.1
tcgtttttttttttttttttttttttatatttttttttttttttttaataaaaaaaaaaaaaaaagggcgtccttttttaaaaatttaaaaattacggggggccgctttaaaggttccaactttactttcgggtgccttaaattttttttattgggggtggttttacataattgaaattgattggcccttgtttttccccgtcttaatctggtaaaacccttatattccttaacttaatggccttgaaaaaaataaccttttcaccagttggccttataagaaaaaggcccccctcaatggcctttgcc

SEQ ID NO: 146844 - DNA, 1475 bp, Zea mays
  Clone ID: MRT4577_65437C.1
cccacgcgtccgtccacagcgattcgtctcctctgctcttatctccgctgtgcctgtgcctgacttttcctcctcttcgtcccctcccacccgcaaccgcacagagaaaggggaggaggctctctacccagcgcagcccgagctcccgcccggccggggccctttccttttccttctccacagcgattcgtctcctctgctcttatctccgctgtgcctgtgcctgacttttcctcctcttcgtccctcccacccgcaaccgcacagagaaaggggaggaggctctctacccagcgcagcccgagcacccctcagccccggatcgggacccctgctctgcgcaatccacccatggcggaggaatcaggccgccccttgccaaaatttggcgattgggatgttaatgatccagcttctgcagacggattcactgtcatattcaacaaagccagagatgagaagaagggtgggaacggacaagacactgagtcaccttccaaggacaccaggactgagagggtggaatcttatgctgcaaagccaagcacgaagaaatggttttgttgtgtgacagccagccctacgcaatcctgaggaagacaactgcatgcgctttggaaatactgtccctttaattttctatacatactatccataagacaatgtaggggtacccaggcctctccgggctccaggatgggctatctcgtaaaactcttgcgtgcgtgtatgtatggtgtgagagaattcgcaaagtggacttctggttgtaattcttagtcgtctctctctctctctctttgggttggtcacggttctatgatccagcaatccactgaactgtttggtactgctaaaaaaaaaaaaaaaattttttccattgtaaaacaaacaaacaaacagacaagaacaaagttaatttggatcgagtagttcaatccatttgcgcgctgtccttttcagcaagaagtaccctgacctggaggagacgagcaccgccgcgcaggccaccgtcgtcctcggcgtggccccggagaagaaggccgcgcccgagttcgtcgaggccgcggcggagtccggcgaggccgcccacggctgcagctgcggtggcaactgcaagtgcgacccctgcaactgctgatcacatcgatcgacgaccatggatatgattattatctatctagcttgtggtggtggttgaacaataataagcgaggccgagctggctgccatacataggtattgtgtggtgtgtgtgagagagagagaaacagagttcttcagtttgctatctctctctgcatgtttggcgtcagtctttgtgctcatgtacgtacgtgtgtctacctgcatgttggttgatccgattgcatctgctgtaaccatatattaattggtccacgatgatatgatttgatactatatacatactaaaaccggacttcttattagaaaaaaaaaaaaaaaaagcggcc

SEQ ID NO: 146845 - DNA, 2009 bp, Zea mays
  Clone ID: MRT4577_65438C.1
gggtacctcgaagccggccgggacagttcaccagagcggcttttcctttccgtttcactccacatcgattcgcctcctccgccctttactctgccgtactcgtctcctcccacccgcaaccgcagggagagaaaggggaagcccgccgccgccccggcccccagcaaccagcagatcgggacctctgttctgcgcaatccatccatggcggaggaatcaggccgtcccttgccaaagtttggtgaatgggatgtcaacgatccggcttccgcagacggatttactgtcatattcaacattgccagagatgagaagggcggggtctcctctgctctttcttatctccgctgtgcctgtgcctgacttgtcctcctcttcgtcccctcccacccgcaaccgcacagagaaaggggaggaggctctctacccagcgcagcccgagcacccctcccccccggatcgggacccctgctctgcgcaatccacccatggcggaggaatcaggccgccccttgccaaagtttggcgattgggatgttaatgatccagcttctgcagacggattcactgtcatattcaacaaagccagagatgagaagaagggtgggaacggacaagacactgagtcaccttccaaggacaccaggactgagagggtggaatcttatgctgcaaagccaagcacgaagaaatggttttgttgtgtgacagccagccctacgcaatcctgaggaagacaactgcatgcgctttggaaatactgtccctttaattttctatacatactatccataagacaatgtaggggtacccaggcctctccgggctccaggatgggctatctcgtaaaactcttgcgtgcgtgtatgtatggtgtgagagaattcgcaaagtggacttctggttgtaattcttagtcgtctctctctctctctctttgggttggtcacggttctatgatccagcaatccactgaactgtttggtactgcaaaaaaaaaaaaaaaaaaaaaataagacgacttgtttcattgattcttcaagagatcgagcttcttttgcaccacaaggtcgaggatgtcttgcagctgcggatcaagctgcggctgcggctcaagctgcaagtgcggcaagaagtaccctgacctggaggagacgagcaccgccgcgcagcccaccgtcgtcctcggggtggccccggagaagaaggccgcgcccgagttcgtcgaggccgcggcggagtccggcgaggccgcccacggctgcagctgcggtagcggctgcaagtgcgacccctgcaactgctgatcacatcgatcgacgaccatggatatgattattatctatctagcttgtggtggtggttgaacaataataagcgaggccgagctggctgccatacataggtattgtgtggtgtgtgtgtgagagagagagaaacagagttcttcagtttgctatctctctctgcatgtttggcgtcagtctttgtgctcatgtacgtgtgtctacatgcatgttggttgatccgattgcgtctgctgtaaccatatattaattggtccacgatgatatgatttgatactatatatatatactaaaaccggacttattagggttgatgattgagatgttaatgatccaacttctgcagacgaattcactgacatattcaacaaagccagagacgataataaagctgggaacggacaagacactgagtcaccttctcaaggacaccaggactgacagggtgaaatcttatgctgcaaagccaagcacgaagaaatggctttgatgtgtgacagccagccctacgcaatcctgaggaagacaactgcatgcgctttggaaatactgtccctttaattttctatacatactatccataagacaatgtaggggtacccaggcctctccgggctccaggatgggctatctcgtaaaactcttgcgtgcgtgtatgtatggtgtgagagaattcacaaaaaaaaaaaaaaaaaagcggcc

SEQ ID NO: 146846 - DNA, 750 bp, Zea mays
  Clone ID: MRT4577_65439C.1
agacaagtgagttgtcagaccatgcaggaattattccaactggaattgatacaacttctgctctatcactcctaatgagaagaccattgagcatttgagcacctgtagagctataaatagtgagctagcaaattgcagattctgtcctaacggttgagactgggacccgtcttaactttctttcgctcagtgcgtgagtagtggttacgacttccttctgttcacccccccgctgcagcattttgatctccccatcagtcgtcgctaaagggtccctctccaggttggaggccggttctgtcgcacgcgaactcagccctccactccagtgcccttgttgtagccatgctgtccctggcgtccccgctgctgcgctaggactacgagactaaaaatctgtccatgtggtgatcccttcagtgccctatatcactccccacggttgttgcctttgtcctgtcactgcaggcgggcgcggcacttgttgccttagtgcacccctcccaacatcttatttgttaaacatggtaaacaattcatttttcacacaagtaaaataaagtgagtagtcagtaccagatagaccagataaaattcttaagatattgctaaaaccccttagtttggctctaggatcaagtataaaagcaaatgcatagagcataggtatatccctccagtacttaaggaacttagatttcataggagcaacagcatgtctaagcaatgcatcattttccgacagcaacg

SEQ ID NO: 146847 - DNA, 846 bp, Zea mays
  Clone ID: MRT4577_6543C.1
atgccaggttccgacgatgtgacgccaggatcagcaccacccatcacctccaccgttgtcacatctattgatgtgacgactgctgccaccaaccaatttcatagatgcacaacaggaaagcatacaaccgaaaaaccaatcacaaaagctgtttcatctaaccgtacaaaggcaacaccgatccagtcctctaagcagggtgtgggagttgatgtgtgtgcaaggtgtcgtcaaggtttcttttgctccgatcatggatcacagcccaagccacaaaagccagctgctaccgacgatacaaacaaggaacctgttgagaaatcagctgttccaccgcccaagaaaaggatcgatgtaaatgagctgaggacatgtaaaaataaaggatgtggtaaatcctacaaggagaaggataaccatgattctgcatgtgactaccatccaggtcctgccgttttccatgacaggatgagagggctattctcgccatccctaaaccccatatctgttctgttcttgcagtggaaatgctgtgatgttcatgtcaaggagtttgacgagtttatggagatacctacatgcacaaagggttggcataatgctgatgcgtttattgaggatttcatttggaagtgtgacaagagctttgaggatgggctccgggctgcgggctgcctaagctttgcgcacggtagctgtctggaaatcttacgtgattctccttgtactctggaccacatttggtgtctggattcaaattggggttttgtctgtttgaagccgaaggatgccaatattttaaccatgtctaagccagagaagttagcgcatgctgtggagcggtag

SEQ ID NO: 146848 - DNA, 309 bp, Zea mays
  Clone ID: MRT4577_65440C.1
gcgacggcgtgttctacgcgcatctcaatgagatgctgacgcgggagctcgctgacgacggctactccggcgtggcaggtcgcagcgtcagcaccgtatgtcgccagcggaggactcagtctatctcgcgaccatcgcgcaacgcacgaacgtgctctgcgcaaagggccgcagatcagggagctcacgtctgtcgtccataacacgttcaacttccccgagaacggcgtcgagctctacgccgagcaggtcgtcaaccgcggcctctgcaccatcgcagaagcatgcgtccctccgctacaagctcct

SEQ ID NO: 146849 - DNA, 619 bp, Zea mays
  Clone ID: MRT4577_65441C.1
ggccgcttttttttttttttttttgttcatgttattttccatgtttcatatgcttctgctttcattattacatactaagatgaggaaggtatgtccttcataaccttcgtctaaagatcattatatcctaagaaagataatgcttagtaggacgaagatctttaaccattaacattttgtgttgcattgttcttaacttatagcatttgagaacaagtcccaacaatcgtcggtgcgcgcaggacagcgtccacgacaaggttggaggttcgggcgttcaccagaggacggcggcaagctgagcggtggcgcgaatcagatgttggacgcggagatgaaggctctaccatacacgacgagctgttgaaggtgcatgagcaagcgtggtcgatggggatagcacccaggcgtgactttgacgaggaccgagcgcaggggcacgacggagctgagggcgagctcgagcacggagaggacgctcggcgtagggagatgggcgctagccaccaatagagagggggttgggcgagctcggccaccatgggagatggctggggtggccatgggagagagcgagagcagagatggagcaggaagacgagagaccgagtcccggccg

SEQ ID NO: 146850 - DNA, 398 bp, Zea mays
  Clone ID: MRT4577_65442C.1
caaaagttataaaacatatttaatttaactggccaaaacaatccaagtttataaaacataagcctatcctttcttggacaaaatcgggttccaggaaggccaacaaccccccaaaatgaaaaaagaccggcggttcaccccgctcagctgggattcaaaaccagacccagggctttttttcaccaacttaacttctaaaaaaaagcaagtccctttaaaccatttcatcctggggggttataaattaaggcccaacatgcatcagtttacagcagccccttccttaagggagttcaatggtttcaagactttttcccccatccgcttggatccaaccaaggttgttccaggaaaatatatcgccccagttcggaacccacgggttagggtttcaaaaa

SEQ ID NO: 146851 - DNA, 536 bp, Zea mays
  Clone ID: MRT4577_65443C.1
ttcagcgagatagttcaagagaatcagctctgttctttcagtaccgcaactttgcaagtccactactaccatacagaaggatcacaagtcagtgtccactctccagcagcgcagcaagaacaaggaggaggaggaggaggagagatggctgctccggcgaaggcgtcgtggatggtggccatgagcgtgggcgctgtggaggccctcaaggaccaggctggactctgccgctggaactacgcactcaggtccgtccaccggacagccaaggccaacgttcgaggcggcgcctcgcagggcaagaagcagctgcctgcctccgcggcagccgtggcagagaggcggcgagcggagaattccgaggaggggctgaggacggtcatgtacctcagctgttggggcccaaattaggagtactagtagctagggcataggggcgcttgtgttcgttgcagcaagagtaaccttgtacgaagacatggcctgagagacttcctggttgtccccatgatcggttgtaaagataccatgatgat

SEQ ID NO: 146852 - DNA, 245 bp, Zea mays
  unsure (1)..(245): unsure at all n locations
  Clone ID: MRT4577_65444C.1
cgcacgcatgatggctcctaccacctccttgctcgcgctcgtgttcctcttnctcctgcccgccgccgccgtngncgncccacccgctaccggcgacgctgccgccttcaacgtgacggagatcctcagccggtacccggagttcaagctcttcaacctcctcctcagcaagacccgcgtcgcgcgcgaggtgaaccgccggagcgccgtcaccgtgctggtcccggacaactcggccgtggact

SEQ ID NO: 146853 - DNA, 447 bp, Zea mays
  Clone ID: MRT4577_65445C.1
gggcagggaaaacagctcaaacccctcccaaacaaacaaaaagggtttgaaaaaaagggccccagggaaaaaacagggggaaccaaaactagaaagccctgggttctctaaacacaaaaaccccaaaccaaagggcaaaaaaagggaggccatctcaacaatcaaacatgacattatagaaaaccaaatatgagatgggtaaagcttaaaaaaaaacccttccagccacctgggccaaaacaccccttccctggggggggaagccccccccaccccggggaacgacaaaaaagaagcccaactcccgcaactgctggaggaagttgcggaaaaaggacgcccctgctcttgcaaaaaggaggggggcggaagccattcctctgggggccaccaaaaattttggggaagccccaacaccaaagccttggctcaaggaaaacttccttg

SEQ ID NO: 146854 - DNA, 425 bp, Zea mays
  Clone ID: MRT4577_65446C.1
tgtccttgcgtccggcagcccgcggcagcagcagcagctcctcctgctcctgctcgtcgctgtagtcgcctcgcatttaccactcactcactcgctcgctctgcccttcaccccctcgccttcttcctccttccatctcgatctcgtactctccttcgctcgcatcgcatcgcatcgcaccgacagacgcacagcaaggtcgaccgccgtcccacaagaacttggccttttattggcgccggatgccgctctcgccctccggcgccgccggcggatggatgcgccgctgcccgcacgctgacgcactccccggcgtcgccgtcgtcgcgacaacggctcgactcgaggcgatgcacatcggaggatatagcgggaaggagatgagaggtgaggagcacacggctccgctgaaacagaagagactt

SEQ ID NO: 146855 - DNA, 325 bp, Zea mays
  Clone ID: MRT4577_65447C.1
ttattttttgttttttttttttttcgggaaccggggggtttttggaaaattgtgggggttataccaagacgcgggtaacgaagaccgaacaccgccattcgaaacagcatttgaatccaattttaccagaaatccacaaaaaagcttgacatttcacacgcccacaaccaatattagacattgtgagggtaatcacaaggaagactgctaagatctgcaagcaatagcatcaagatggctgtactgcatgaggggtggatgccaaccatgttgaacacaccacgcccaactgggcgagtaaaccattgcggacataggtgggtaa

SEQ ID NO: 146856 - DNA, 674 bp, Zea mays
  Clone ID: MRT4577_65448C.1
ttgggtacctcgaggccggccgggaaccctatcctcaggatctcttcctcgatgctcggctccaccgtcttctgcgaagtcgtctccttcccctcgtcaagatatgggttcttgggagaagcaagttagacaatttttgttagatatgaattgaaaggaatggatggattaacaaccgaggacaaatcatacgctttggtgccttttgaatctacgataaatatagaggttttcttaacaacaacgaagcatgatgttagagaaatttggctcaagcgcaaaattaggttgcttagaagcagtgtacagtgatgcgaggcatggatgcgagagtgcaaagtggaagcaacacatgaagtcgacatggagaagaaaaatacaacgacagtccacatgaaacttgtgaaaaaagaattaaatcccaaagttcctaatgaagatacttgtattacagttttatgttatattgtctatctatttgtgtgaatggagatgaccttgatggatggattagcttcgctaatgctttagtttgctgctgctgcttcagtttgctactgatgatgcttctactgcaatttactactttattttgctcgacaaactattgtgatgatggataaagtgtgatgtgaatggtgggatgaaccagtttataaaaaaaaaaaaaaaaa

SEQ ID NO: 146857 - DNA, 625 bp, Zea mays
  Clone ID: MRT4577_65449C.1
tgcaataaatactctttaagtgggcatcaagtttttctaaagcatgtctttccgcttcttggcgtaaatagaacgtttttaatgctgctgataacggcgtcagaaaacggtcgagtatgagccggtcagccaacgtaaaatcttcaccttggccaaccaaaatagcaagtgtatgcccttgataaccaatagggagataaaacgcttttttcccagctaacgtatcggttcctgcaccagctggtaagccatgatgccagacccattgcatgacttcatgactagtcgcatccggtgtcggtatttggccaacaaattgttgccgttggaaataaatcgcgactggtcttttgaaataattcaaaatggcctgttgcgtcagtgcgcttaatgccgctggtttgccgtcagtcaacagctgtaaactcaggtcagataagacttggctttgtgtcgccgcagcaacagaagccgccatttgcgccgtcactttggacgttaaactactaattaacgttgccgtgacaaacatcgccaaaaagataatgccgtacccattttggtagaactgtaacgaataaaatggctgcacaaacaataagtcaaagagcaatacgctcaccgg

SEQ ID NO: 146858 - DNA, 333 bp, Zea mays
  Clone ID: MRT4577_6544C.1
ggccgccccttttttgagaacaacattttggtttttgtaccacacaggcagggcttatcaaaccattcggggtgttggagaaccaccgagatgcagacattctctacaatccgtaagcgggatacgttctgaaggcgaatagcccggcacaacgcacaccggtccaggcgccgataagataaggagaccttcactgcacaggacaaacaacaagcacccatctggaacatcttcctacatcccgacaacaaaaaactttaggctccaaaactaaaaagcctttaaaacgacgggccctttgtcacactggctgcgcctaaacaaagcggaaat

SEQ ID NO: 146859 - DNA, 252 bp, Zea mays
  Clone ID: MRT4577_65450C.1
ctgctatatttgattatattgcttggaatagatctttgcaaccaagtttattaaggcgtcacgtaagcggtaaggcgagcttggactcgtaaggcgtcctgttgacatcaaggcgaagcacagtggtggcgtgctggggatagggagacagaagagagcggtggtggcacggaggagagggacagagaggcaaacagcaactgcgatgacacagcggctgagagcctgagagagagatagacatgatagaca

SEQ ID NO: 146860 - DNA, 229 bp, Zea mays
  Clone ID: MRT4577_65451C.1
gatacacgcctctagtctgattcggaatagttccagattaaaagcaaatcacaagcaacataatgacaacgactttaatcgtggcgaattccactggatggggaatcatctgtataggagctatgtgtgggtgtcactaacgtgacatcccttctttgtgattccataacccatatgtcgtccacttggtcttcggtctacatagcacttggacgggaaaaccctcgcc

SEQ ID NO: 146861 - DNA, 363 bp, Zea mays
  Clone ID: MRT4577_65452C.1
gaaacagaacagagagcatatctctcgaagcaaagctctcacttcaccgtcgtcttccttccactacagactgacttacgacgctcaggcatcagggacatatatcaagctcctgcaacaattgaatcaccacacggatgcttcgcctctctcaaactcgctcacaggcgatctgtgcaaatacgccttcaccagaaggtgatcaccctcttgaacaactgtcttcacaatttcaagcccagctacacaatgccttccaagaaaacccacgtggttcaaaccgatgttactatcaaagatcgtgcatttaacactaagacatgcaacatttagaaccttcctaaggctttattgaccgttcaa

SEQ ID NO: 146862 - DNA, 218 bp, Zea mays
  unsure (1)..(218): unsure at all n locations
  Clone ID: MRT4577_65453C.1
cagcccatttattttccattgccaaactctaaaaagatgcgatgccatataaaattctttgggctcaaacatnacacgtcaactgcttttcttgcaaagagttttcttcaatgacaaaacaagactaccaacatcccaataaacgcaaggaacacacccgtacaatcatatattccaaccgaacatctgagaatcccaaacgtcttatattcacaaac

SEQ ID NO: 146863 - DNA, 159 bp, Zea mays
  unsure (1)..(159): unsure at all n locations
  Clone ID: MRT4577_65454C.1
cttgtcttcgatcctctggtccgtggccatggtgtcgtgcatgctctccgntaccaccgtgccactccagtaggggggcggtctgttcgagttcttcgggcttaggagctccgtgttgctgtccatgcgcnggaatgccatctccgacgattttatgtt

SEQ ID NO: 146864 - DNA, 568 bp, Zea mays
  Clone ID: MRT4577_65455C.1
attggtacctcgagccggccgggacctactgcgtgggctaagcttgtcttctatctccaaaactgcggcagagttgtatgctactcgctgcacatgatgacaggcctgatgatattgatcaactcactacttctggataaaaaggttgggtaccagtttactcataaggaactgaaatgaaaccttcacaaatagccaaaaacgcttcgaaggaggcaaaagcctgtaatgctggtgcaattataacgccacacggctggaacactgcaggcagataaagcacatgatgaatgatttgaaagaagtatcaaaaaggagtgaatcctacacaagtcttcttgtggatgatgtgcatgactgcccaagaagctgcagtgttgctcagctccttcagtgatgagactgggataactgtggctatactgacgatgctggatgtcgactcgagaggggcagcaacactgatagctctggaggtgtctgagaagccacttagatttgtaggacaaggagagcgtattgaacatcttgagactttctacccagatcgtatggtacatggtatctt

SEQ ID NO: 146865 - DNA, 268 bp, Zea mays
  unsure (1)..(268): unsure at all n locations
  Clone ID: MRT4577_65456C.1
cataattattattattagggtttncagggcccggcgggacgccagctactactacttatccgacacacgtgagcagcttatgtacagtacaggggggaagggggggtnggaactttactttccttttgtgggggggggggggggaactttttttaatnatattattttacgtacgggacctggtgctgtccggtgaccttttgaggggaaggggaaaaggggagtaggtgggatgggggagctaggtagaggaattttacagggaggg

SEQ ID NO: 146866 - DNA, 361 bp, Zea mays
  Clone ID: MRT4577_65457C.1
acaggcgaagccgccgccgctgcagtgggcatagccaccggaggagaccgggatcgggggttttgtcaagacccacaagaccaatgcgtactttaagcgctcacaggtgtacgccaagagaaggcgcgctggctagacagactactgcgccaccatcaggctgattaaccaagacaaaaacagctgcattacacccacaatcgacagtgccgttcgatttaccaaccaaggacatcacagccccaaatcatgtgtgctcgcattgagcgggacttggagctcgctctcacgtactggactgagcagtccctgaaccgcggtgaagttggtctgaccaactatgcagctgcctacagcactg

SEQ ID NO: 146867 - DNA, 176 bp, Zea mays
  unsure (1)..(176): unsure at all n locations
  Clone ID: MRT4577_65458C.1
agcagtggtaacaacgcagagtacgcgggacatgtcgtcacatacatcactggattaaattaaaactgaaaatgcctatttgttcaacaatccaaaaacctgatattagacatttttctgttagtggttntgctgctgcgttaaaaccaagtgatgaaccctttgatgggacattt

SEQ ID NO: 146868 - DNA, 761 bp, Zea mays
  unsure (1)..(761): unsure at all n locations
  Clone ID: MRT4577_65459C.1
cgggacttcaaagcagctcaaagctctagttctagctagctagcaaagggggggaaaaggggtgcggggggggctgctgacatgaaccacgctgcagcccatgctggccttaggagccacctagcaggacccaacaatgagagtgtctcacggcaccacctgccgtcttcttcttcacagagcagcaagcgaaggtgtaaccttagctttactacagggggtgcaagagtatgcagccaaaatggagtccaaatgctgagcccctcggaaatcccacacagggactggttcccctctgacttcaccttcggagccggcacttcagcgtaccagatagaaggcgcttggaatgaagatggaaagggggaaagcagctgcgatcacttctggcacaatcatgcggaaaggatactggacgggagcaattcagacattggagcgaattcgtaccatatgtacaaaacggacgtcagattgctcaaggaaatgggcatggacacatataggctctctatctcttggcccagaatactgccgaagggaacccaagaaggaggtattaacccggatggcatcaggtactacagaaacctcatcaacttgttgctggaaaacggcatagagccatatgtaacaattttccactgggatgtacctcaagcactagaagagaagtacggcggcttnctagantagagtcataagagcattgtagaagattacacctacttcgctaagggtgtgcttgataacttcggcga

SEQ ID NO: 146869 - DNA, 509 bp, Zea mays
  Clone ID: MRT4577_6545C.1
ccgggaacctgttgagaaatcagctgttccaccgcccaagaaaaggatcgatgtaaatgagctgaggacatgtaaaaataaaggatgtggtaaatcctacaaggagaaggataaccatgattctgcatgtgactaccatccaggtcctgccgttttccatgacaggatgagagggtggaaatgctgtgatgttcatgtcaaggagtttgacgagtttatggagatacctacatgcacaaagggttggcataatgctgatgcggtgtgaattcacgccatgcttaaggctgttttcatgttgtatcgtcacctgccatgtaaacaccatttctgcagtttattgaggatttcatttggaagtgtgacaagagctttgaggatgggctccgggctgcgggctgcctaagctttgcgcacggtagctgtctggaaatcttacgtgattctccttgtactctggaccacatttggtgtctggattcaaattggggttttgtctgtttgaaaaa

SEQ ID NO: 146870 - DNA, 374 bp, Zea mays
  Clone ID: MRT4577_65460C.1
gaataatattacaccccccttccagcctctgtctttgccaacttgttgcagttccatgcatctcacaaaaagtgctctcaaggcatcttgatgtttatgtagacttttcaaagtaaggaatgtggcaaaacgagtggctgctggtcttaaaggatccccctcctatcttctccctcattgcacttagaattcctccatgcctataaataaaagtggtgactcttttggcttgtgcaattagtctttcaaatatccaatatcctccaccatgaggtccaaacaatgtgcagtacaaggaccctagaacaatgttaaaatactatccattagaagcctacccactgccttatattttttttctcgaatacgcaagg

SEQ ID NO: 146871 - DNA, 143 bp, Zea mays
  Clone ID: MRT4577_65461C.1
tttacacttgagctagcacgatatgtcagtggactcgtcaaaattgcaaaggaggtatgtgagcttgcttgggtacaggcgatcccaggtgtggctcaaggaccagcggagagcgggggagttcacattgtacaactacaaca

SEQ ID NO: 146872 - DNA, 3177 bp, Zea mays
  unsure (1)..(3177): unsure at all n locations
  Clone ID: MRT4577_65462C.1
aaaatggctccgcttctcgctgctgccatgaaccacgctgcagcccatcctggccttaggagccatctagtaggacccaacaatgagagtttctcacgacaccacctaccgtcttcttctccacagagcagcaagcgaaggtgtaaccttagctttactacacgatctgcaagagtaggcagccaaaatggagtccaaatgttgagcccctcggaaatcccacaaagggactggttcccctctgacttcaccttcggtgccgccacttcagcgtaccaaattgaaggtgcttggaacgaagatggaaannnnnaaagcaactgggatcacttctgccacaatcatccggaaaggatactggacgggagcaattcagacattggagcgaattcgtaccatatgtacaaaacggacgtcagattgctcaaggaaatgggcatggacgcatataggttctctatctcttggcccagaatactgcctaagggaacggtcgaaggaggtattaacccggatggcatcaagtactacagaaacctcatcaacttgttgctggaaaacggcatagagccatatgtaacaattttccactgggatgtacctcaagcactagaagagaagtacggcggtttcctagataagagtcataagagcattgtagaagattacacctacttcgctaaggtgtgctttgataacttcggcgacaaggtgaagaattggttgacctttaatgagccccagacatttacttccttttcctacggaactggggtctttgccccagggcggtgctcacctggactagactgtgcctacccaactgggaattcactcgtcgagccttacactgctggccataacattctcctagcccacgctgaggctgttgatctttacaacaagcattacaagcgcgacgacacccgcatagggcttgcgtttgacgtaatgggtcgtgtgccatacggaacatcgtttctggataaacaggccgaagaaaggtcctgggacatcaacctaggatggttcttagagccagtggttcgtggtgactaccccttctccatgagatcattggctagggaacgactacccttcttcactgacaaagagcaagagaagctcgccggttcctataacatgttggggttaaactactacacctcacggttctccaaacacatcgacatctcaccaaactactcacctgtgctcaacactgacgacgcctacgccagtcaagaagttaacgggcctgacgggaagcccattggtcctcctatgggaaatccatggatctacatgtaccctgagggcttgaaggatctccttatgatcatgaagaacaaatacggaaacccacctatctacatcacggagaacggtaagtagtaaggttttacaatttaagtcataggttgtactaacttgtagctaactacaaacagctgtcttttttattcttctcatggacctttttttgtataaaggttttttttatatttttaaacaagcgaaacgtgacaagctagtaactaaacctttcgtgatcacaaagactcgatcacggtcacaactggtctggatttcgaaagaacacctctgttttctctgtttgaaagatgagcttaatcctataaacgcacacaagaggctaacttaagaagcgttcccatgcatacgcattagcttggctagatgagtcactatgacaatgaccgggtccagtgatgtgtctggtctaatcgggatcgtccggcaagaaaagaaatgaaatcaggtgcattgaacctgagcttgtcatatacccaccacatctcaaaatataaacatatattcatcaatcaatctacgaatgcaatttgtatgaacgtttatatttagtgggtgtttgtttgggattataatttacccagcttagagttagttcaaaagttgttggattatataatctgggtagattataatcccaaacaaacacccccttattatcattcattctaatatggacggaaaaaaaatgccacaaacaactatattttagcggaatgattaataatctaatggtatacatgacgtatgggcttctaagcaagccatgtgcagaaatgcagaatcggcccatagccggcatcgacggacctgggcatgttgggctggagtcctaagatgacctttttgcgagatatttgactcaaacaatctaaccaactcaactaaactagatacttttggctcttttatttcttttcacgaaactttttgtcaacgtaggtttttagtttggtatacttattaaacaaggaaaatattgaaaacataacatctggtgaaagtaactaaacttttcatgatccacgcttataaaagatatacgcaagctgggaccgtagcctgaataatggaactggttgcgctgtgtgttattttttatgaaataaaaatctagatggttgtgtttatgatagatgttactatacggtcgcacttgccgtcaattcaatttttatttgtgcaggaatcggggatgttgataccaaggagacacctctacccatggaggatgccttaaatgactacaaaaggctagattacatccagcgccacatcgctactcttaaggaatcaatagagtatgaatctacactagaacttatctctagtatatatttcgcctccgttttttattgctctttgttctgttgcaatcatttatatgtggcgcatgcatggttcaatcaagataatgcttgaattaatggatctgttcatgcagcttgggatcaaatgtgcaaggctacttcgcttggtctctgctggacaactttgaatggttcgccggcttcaccgaacgttatggcattgtctacgtcgaccgcaacaataactgcacgcgctacatgaaggagtctgccaagtggttgaaacagttcaacgccgcgaagaagcccagcaagaagattcttacgccagcttagaaatcgggggcctcatgatgtgggtgcagcccataaaaaactggtgtgtggtttcgaaccgaaaattttctgtttttttccgccacgagaggttctggaggcatactctccagcaccgtggctaataacgcattgttccaattcagtctggccttgtcatgcatgcaataaataaagtgatgggtttccctgtttc

SEQ ID NO: 146873 - DNA, 826 bp, Zea mays
  unsure (1)..(826): unsure at all n locations
  Clone ID: MRT4577_65463C.1
ctcgaggccggccgggccggaaacaagatcacagctctatttctagctaggtagctcaggggtggaaaataggctccgcttctctctgctgccatgaaccacgctggagaccatcctgtcctgaggacccacctactaggacccttcaatgagagtttctcacggcaccacctgccgtcttcttctcctcagagcatcattcgaatgcgtaatcttgagctttactacaccatctgcaagagtaggcacccacaatggagtccatatggtgagcccctcggaaaccccacaaagcgactgattcccctctgaccttcagctttggtgccgccacttcagcgtaccaaattgaaggtgcttgaaaagaagatggaaagggtgatagccactgggatcacctctgtcacaatcatccggaaaggatactggacgggagcaattcagacattggagcgaattctcaccatatgtacaaaacggacgtcaaattgctcacaggaaatgggcatggacgcatagtaggttctctatctcttggaccagaatactgccgaagggtaccaaagaatgaggtattatcccggatggcatcaagtactacagaaacctcatcaacttgttgctagaatacggcatagagccatatgtaacaattttccactgagatgtacctcaagcactagaagagaagtacagcggcttcctagataagagtcataagagcattgtagaagattacacatactttgctagggtgtgctttgataacttcggcgacaaggtgnagaattggttgacctttaatgagccccagacatttacttcc

SEQ ID NO: 146874 - DNA, 845 bp, Zea mays
  Clone ID: MRT4577_65464C.1
gtttccttcacaagcagctcaaagatctagttctatctagctagcaaagggggggaaaatggctccgcttctcgctgctgccatgaaccacgctgcatgccatcctggccttaggagccacctaccacgacccaacaatgagagtgtctcacggtaccacctgccgtcttcttctccacagagcagcaagagaaggtgtaaccttagctttactacacgatctgcaagagtaggcagccaaaatggagtccaaatgctgagcccctcgcaaatcccacaaagggactggctcccctctgacttcaccttcggtgccgccacttcagcgtaccaaattgaatgtgcttggaatgaagatggaaaggaggaaagcaactgggatcacttctgccacaatcatccggaaaggatactgcacgggagcaattcagacattggagcgaattcctaccatatgtacaaaacggacgtcagattgctcaaggaaatgggcatggacgcatataggttctctatctcttggcccagaatactgacgaacggaaccatagaaggaggtattaacccggatggcatcaagtactacataaacctcatcaacttgttgctagaaaacggcatagagccatatggaacaattttccactgagatgtacctcaagcactagaagagaagtacagcggcttcctatataagagtcataatagcattgcataagattacacatactttgctaatgtgtgctttgataacttcggcgactaagagaagaattgattgaccttttatgagacccagacatttacttccttttccctacggaactgaggtctctgccccaggt

SEQ ID NO: 146875 - DNA, 450 bp, Zea mays
  Clone ID: MRT4577_65465C.1
tttttttttttttgaattggaacaatgcgttattagccacggtgctggagagtatgcctccagaacctctcgtggcgcaaaaacagagaaaattttcggttccaaactacacaccagttttttatgggctgcacccacatcatgaggcccccgatttctaagctggcgtaagaaacttcttgctgggcttcttcgcggcgttgaactgtttgaaccacttggcaaactccttaatgtaacgcgtgcagatattgttgcggtcgacgtggacaatgccataacgttcggtgaagccggggaaccattcaaagttgtgcagcagataccaagcggaagagccttgcacatttgatcccaagctgtatgaacagatccattgattgaagcattagcttgagggaaccatgcatgcgccacatataaaggatggttacataacaaagaagcagt

SEQ ID NO: 146876 - DNA, 2252 bp, Zea mays
  Clone ID: MRT4577_65466C.1
ggaccctcgaggccggccgggccgggttccttcacaagcagctcaaagctctagttctagctagctagcaaagggggggaaaatggctccgcttctcgctgctgccatgaaccacgctgcagcccatcctggccttaggagccacctagtaggacccaacaatgagagtttctcacggcaccacctgccgtcttcttctccacagagcagcaagcgaaggtgtaaccttagctttactacacgatctgcaagagtaggcagccaaaatggagtccaaatgttgagcccctcggaaatcccacaaagggactggttcccctctgacttcaccttcggtgccgccacttcagcgtaccaagtataattttctagcgcgaatgttgtttattacgtctctgttagatatatacatatatgaaaagaaactactgtagttcactgttacataatggcagctgatttatatatatacctaaaccaaaaaggagttgatatatgtgtgtgtgcgcacgcgcgcgaaacgtattgtattctagctaattaattaattgtttgatacatgctaaagtgaaatgatatatcttggtagattgaaggtgcttggaatgaagatggaaagggggaaagcaactgggatcacttctgccacaatcatccggaaaggatactggacgggagcaattcagacattggagcgaattcgtaccatatgtacaaaacggacgtcagattgctcaaggaaatgggcatggacgcatataggttctctatctcttggcccagaatactgccgaagggaaccaaagaaggaggtattaacccggatggcatcaagtactacagaaacctcatcaacttgttgctggaaaacggcatagagccatatgtaacaattttccactgggatgtacctcaagcactagaagagaagtacggcggcttcctagataagagtcataagagcattgtagaagattacacctacttcgctaaggtgtgctttgataacttcggcgacaaggtgaagaattggttgacctttaatgagccccagacatttacttccttttcctacggaactggggtctttgccccagggcggtgctcacctggactagactgtgcctacccaactgggaattcactcgtcgagccttacactgctggccataacattctcctagcccacgctgaggctgttgatctttacaacaagcattacaagcgcgacgacacccgcatagggcttgcgtttgacgtaatgggtcgtgtgccatacggaacatcgtttctggataaacaggccgaagaaaggtcatgggacatcaacctaggatggttcttagagccagtggttcgtggtgactaccccttctccatgagatcattggctagggaacgactacccttcttcaaggacgagcagaaggagaagctcgccggttcctataacatgttggggttaaactactacacctcacggttctccaaaaacatcgacatctcaccaaactactcacctgtgctcaacactgacgacgcctacgccagtcaagaagttaacgggcctgacgggaagcccattggtcctcctatgggaaatccatggatctacatgtaccctgagggcttgaaggatctccttatgataatgaagaacaaatacggaaacccacctatctacatcaccgagaacggaatcggggatgttgataccaaagatacacctctacccatggaggctgccttaaatgactacaaaaggctagattacatccagcgccacatcgctactcttaaggaatcaatagacttgggatcaaatgtgcaaggctacttcgcttggtctctgctggacaactttgaatggtttgccggcttcaccgaacgttatggcattgtctacgtcgaccgcaacaataactgcacgcgctacatgaaggagtctgccaagtggttgaaagagttcaacaccgcgaaaaagcccagcaagaagattcttacgccagcttaaaaatcgggggcctcatgatgtgggtgcagcccataaaaactgtgtggtttggaaccgaagattttctcttttttttttctgccacgagaggttctctggaggcatactctccagcaccgtggctaataacgcgttgttccaattcagtctggacttgtcatgcatgcaataaataaagtgatgggtttccctgtttcaataaaaaaaaaaaaagaaaaaaaaaaaaaaaaaagcggcc

SEQ ID NO: 146877 - DNA, 212 bp, Zea mays
  Clone ID: MRT4577_65467C.1
ataatactggacacgcggccaccagggtcagttcttacatctgcttcaatctctcggcgcaccgctgctatctatctcgttggcggttaatggtacactactgccactgataagcggtgctgttcccctctccgtcttcatgattcagaaggacagcctgtgtacgaccacaacttacaacgagcgcaaaaaggtgtacatcataaacacag

SEQ ID NO: 146878 - DNA, 2043 bp, Zea mays
  Clone ID: MRT4577_65468C.1
ccaaagctctagttctagctagctagcaaagggggggaaaatggctccgcttctcgctgctgccatgaaccacgctgcagcccatcctggccttaggagccacctagtaggacccaacaatgagagtttctcaccggcaccacctgccgtcttcttctccacagagcagcaagcgaaggtgtaaccttagctttactacacgatctgcaagagtaggcagccaaaatggagtccaaatgttgagcccctcggaaatcccacaaagggactggttcccctctgacttcaccttcggtgccgccacttcagcgtaccaaattgaaggtgcttggaatgaagatggaaagggggaaagcaactgggatcacttctgccacaatcatccggaaaggatactggacgggagcaattcagacattggagcgaattcgtaccatatgtacaaaacggacgtcagattgctcaaggaaatgggcatggacgcatataggttctctatctcttggcccagaatactgccgaagggaaccaaagaaggaggtattaacccggatggcatcaagtactacagaaacctcatcaacttgttgctagaaaacggcatagagccatatgtaacaattttccactgggatgtacctcaagcactagaagagaagtacggcggcttcctagataagagtcataagagcattgtagaagattacacatactttgctaaggtgtgctttgataacttcggcgacaaggtgaagaattggttgacctttaatgagccccagacatttacttccttttcctacggaactggggtctttgccccaggtcggtgctcacctggactagactgtgcctacccaactgggaattcactcgtcgagccttacactgctggccataacattctcctagcccacgctgaggctgttgatctttacaacaagcattacaagcgcgacgacacccgcatagggcttgcgtttgacgtaatgggtcgtgtgccatacggaacatcgtttctggataaacaggccgaagaaaggtcctgggacatcaacctaggatggttcttagagccagtggttcgtggtgactaccccttctccatgagatcattggctagggaacgactacccttcttcaaggacgagcagaaggagaagctcgccggttcctataacatgttggggttaaactactacacctcacggttctccaaaaacatcgatatctcaccaaactactcacctgtgctcaacactgacgacgcctacgccagtcaagaagttaacgggcctgacgggaagcccattggtcctcctatgggaaatccatggatctacatgtaccctgagggcttgaaggatctccttatgatcatgaagaacaaatacggaaacccacctatctacatcacggagaacggaatcggggatgttgataccaaggagacacctctacccatggaggatgccttaaatgactacaaaaggctagattacatccagcgccacatcgctactcttaaggaatcaatagacttgggatcaaatgtgcaaggctacttcgcttggtctctgctggacaactttgaatggttcgccggcttcaccgaacgttatggcattgtctacgtcgaccgcaacaataactgcacgcgctacatgaaggagtctgccaagtggttgaaacagttcaacgccgcgaagaagcccagcaagaagattcttacgccagcttagaaatcgggggcctcatgatgtgggtgcagcccataaaaaactgggggtttccctgtttcaatatccctgtgtggtttcgaaccgaaaattttctgtttttttccgccacgagaggttctggaggcatactctccagcaccgtggctaataacgcattgttccaattcagtctggccttgtcatgcatgcaataaataaagtgatgggtttcccctgtttcaaaaaaaaaaaaaaaaaaaaaaaaaaaaaaaaaaaaaaaaaaaaaaaaaaaaaaaaaaaaaaaaaaaaaaaaaaaaaaaaa

SEQ ID NO: 146879 - DNA, 2010 bp, Zea mays
  Clone ID: MRT4577_65469C.1
aacacttcacaagcagctcaaagctctagctatagctagctagcaaaggggggaaaaaatggctccgcttctcgctgctgccatgaaccacgctgcagcccatcctggccttaggagccatctagtaggacccaacaatgagagtttctcacggcaccacctgccgtcttcttctccacagagcagcaagcgaaggtgtaacctgagctttactccacgatctgcaagagtaggcagccaaaatggagtccaaatgttgagcccctcggaaatcccacaaagggactggttcccctctgacttcaccttcggtgccgccacttcagcgtaccaaattgaaggtgcttggaatgaagatggaaagggggaaagcaactgggatcacttctgccacaatcatccggaaaggatactggacgggagcaattcagacattggagcgaattcgtaccatatgtacaaaacggacgtcagattgctcaaggaaatgggcatggacgcatataggttctctatctcttggcccagaatactgccgaatggaaccaaagaaggaggtattaacccggatggcatcaagtactacagaaacctcatcaacttgttgctggaaaacggcatagagccatatgtaacaattttccactgggatgtacctcaagcactagaagagaagtacggcggcttcctagataagagtcataagagcattgtagaagattacacctacttcgctaaggtgtgctttgataacttcggcgacaaggtgaagaattggttgacctttaatgagccccagacatttacttccttttcctacggaactggggtctttgccccagggcggtgctcacctggactagactgtgcctacccaactgggaattcactcgtcgagccttacactgctggccataacattctcctagcccacgctgaggctgttgatctttacaacaagcattacaagcgcgacgacacccgcatagggcttgcgtttgacgtaatgggtcgtgtgccatacggaacatcgtttctggataaacaggccgaagaaaggtcctgggacatcaacctaggatggttcttagagccagtggttcgtggtgactaccccttctccatgagatcattggctagggaacgactacccttcttcaaggacgaacagaaggagaagctcgccggttcctataacatgttggggttaaactactacacctcacggttctccaaaaacatcgacatctcaccaaactactcacctgtgctcaacactgacgacgcctacgccagtcaagaagttaacgggcctgacgggaagcccattggtcctcctatgggaaatccatggatctacatgtaccctgagggcttgaaggatctccttatgatcatgaagaacaaatacggaaacccacctatctacatcacggagaacggaatcggggatgttgataccaaggagacacctctacccatggaggatgccttaaatgactacaaaaggctagattacatccagcgccacatcgctactcttaaggaatcaatagacttgggatcaaatgtgcaaggctacttcgcttggtctctgctggacaactttgaatggttcgccggcttcaccgaacgttatggcattgtctacgtcgaccgcaacaataactgcacgcgctacatgaaggagtctgccaagtggttgaaacagttcaacgccgcgaagaagcccagcaagaagattcttacgccagcttagaaatcgggggcctcatgatgtgggtgcagcccataaaaaactggtgtgtggtttcgaaccgaaaattttctgtttttttccgccacgagaggttctggaggcatactctccagcaccgtggctaataacgcattgttccaattcagtctggccttgtcatgcatgcaataaataaagtgatgggtttccctgtttcaataaaaaaaaaaaaaaaaaaaaaaaaagaaaaaaaaaaaaaaaaaaggccccta

SEQ ID NO: 146880 - DNA, 2737 bp, Zea mays
  Clone ID: MRT4577_6546C.1
ccggccgggctccccagcccaggtagcttagctagcgtgataatcaccgcgctaaactgatcatacacaggaattggcgtgtgacaggacagaggaggaggggcaggctggtaatatctagcaaaagtacaagcgttcctccagtggcgtccagcgctatatagttcgctgtccggcgtcctttccgaccgagcgcgagagatgacggtgacgccgaggattacggtgggggatgggcggctgctggcgcacgggcggagcgtcctcaccggcgtgccggacaacatcgtgctcacgcacgcctccggggcggggctggtcgacggcgccttcgtcggcgccacggccgcggagcccagcagcatgcacgtcttcaccttcggcaccctccgggacctgcgctttgtgtgctgcttccggttcaagctgtggtggatgacccagcgcatgggcacctccggccgcgacgtcccgctggagacgcagttcatgctcctggagtgcggcccgggcgacggcgacggcgacgcggcggtgtacgtggcgatgctgccgctgctggagggccagttccgggcggcgctgcagggcaacgaccgcgacgagctggagatcaccctcgagagcggggacaaggcggtgcagactgcgcaggggacctgcatgctgtacgtgcacgccgggaccaaccctttcgacaccatcactcaggcggtcaaggtggtggagaggcacatgcagacgttccatcacagggagaagaaaaagctgccgtcgttcgtggactggttcggctggtgcacatgggacgccttctacaccgacgtcaccgccgagagcgtcaagcaaggcctcaagagcttggctgacggcggcacgccgccgcggttcctgatcatcgacgacgggtggcagcagatcggcagcgagaacaaggaggagtccgccaacgccgtcgtccaggaaggggcgcagttcgccagtaggctgacggggatcaaggagaacgccaagttccagaagaagacgaagacgaaggagagcggcggcggcggcggcgagcagcaggcgcaaacgccgggcctgaagctgctggtggaggaggcgaagcgcgagcacggcgtcaggtacgtgtacgtgtggcacgccatggcggggtactggggcggcgtgaagccggcggcggaggggatggagcactacgagagcgcgctggcgtacccggtgcagtcgccgggtgtgatgggcaaccagccggacatcgtcatggactcgctgtccgtgctgggcctggggctggtgcacccgcgcagggcgctgagcttctacgacgagctgcactcgtacctcgcctcctgcggcgtcgacggcgtcaaggtggacgtgcagaacatcatctagacgctcggcgccgggcacggcggccgggtcgcgctcacccgcgcctaccaccgcgcgctcgaggactccgtggcgcgcaacttccccgacaacggctgcatctcctgcatgtgccacaacaccgacatgctctacagcgcgcgccagaccgccgtcgtgcgcgcctccgacgacttctacccgcgcgacccggcgtcgcacaccgtccacgtctcctccgtcgcctacaacaccctcttcctcggcgagttcatgcagcccgactgggacatgttccatagcctgcacccggcggcggactaccacggcgcggcgagggcaatcggcggctgcccgatatacgtcagcgacaagccaggcaaccacaacttcgagctgctcaagaagctggtgctccccgacggctccgtgctccgcgcgcagctcccgggccgccccacccgcgactgcctcttcgccgacccggcgcgcgacggcacgagcctgctcaagatctggaacgtgaacaagtgcacgggcgtggtgggcgtgttcaactgccagggcgccgggtggtgccgcgtcaccaagaagacccgggtgcacgacgcggcgccggggacgctgacggggtcggtccgcgccgacgacgtggacgtgatcgccggcctcgccggggacggctggggcggcgaggccgtcgtgtacgcctacaggtcaggggagctagtcaggctgccccagggcgccacactgccggtgacgctcaaggtgctggagttcgaggtgttccacgtctcccccgtcagggcggtcgcgccgggcgtgtcgttcgcgcccatcggcctgctcgacatgttcaactccggcggggcggtggagcagtgcgaggtccgtggcggcggcggtggcgcgggcgccgtcgtcgcgctcagggtccgcggctgcggccggttcggcgcgtactgctcgcggaggcccgcgaggtgcaggctggacgcggcggaggtggacttcagctacgacgacgacacggggctcgtcgcgctccatatccccgtgccggagcaggagttctacagatgggacctggagatcgatgtctagaggttctccctgcctgtcgatctgtggcaatggtgctttccgcctattcattcttgagtggttttaccattaaacgcgtgtgtggtcggtgtgtgtgtgtgtgctcgtgtgcgacatggagaggcgtgtgcaatgcatgatctgatcatgaaatggacacggtccgccattgacgcgcctctcttcgtccctagaagaataagctagcctctgctgtactgtctttgctgcatcaatatctgcatgcaat

SEQ ID NO: 146881 - DNA, 163 bp, Zea mays
  Clone ID: MRT4577_65470C.1
actgtcaccagttccccattcgaatcgtgccgtctctgctgttcagttgcgttctcatgtggaagtgcagtttgacgaccatagtcctgtgttccacgttaacctcgctattcccgtgtatggatctcgcgatggtcgttgagtagcttcaactcccgacatc

SEQ ID NO: 146882 - DNA, 406 bp, Zea mays
  Clone ID: MRT4577_65471C.1
gccggggggggggggtttttttaaacacaatatatctgggggtatttgaggaactgaatagtagcgggaacacacacagcacactcacgtaactacttggggacggcgtactcggctataagaacagcacctctccagtgaaaaccacacttcaccaaacggggggggggggcgcaaacaactagtgcttctaccggacgttctaatccgagacagaacacacacggtgacgctccattgaaaagaccatggccgagatgacggctgcttccccctatacgccagtaggtgccggggtagagcaacatgtaggggaactctacacaacccggtgggggtcttgacactagggtcacggagcatggtgacgacgcgtttctcgatctctggagtcgggcgacgaacc

SEQ ID NO: 146883 - DNA, 2362 bp, Zea mays
  Clone ID: MRT4577_65472C.1
tggcttcgtcatctggtcgctgggattttcggtctccgatcgtttggttcccagtagactcgttcccttgaagcaacatcacctgttgtatcctgagttcgctctcaacttgtgccctcggatttttccggcgccgtagggcacgcggcgactcttacatacattattgggcctgatgccacgtctctgttagcgaacgcattgaccagagatgctatgattaggccaaaacaaagttgtttcaacatttcacatgttgataggaacctgggggctgcttctctatgtgtccacagagccggttaatgtgattacatgttacacacttcacaagcagctcaaagctctagttctagctagctagcaaagggggggaaaatggctccgcttctcgctgctgccatgaaccacgctgcagcccatcctggccttaggagccacctagtaggacccaacaatgagagtttctcacggcaccacctgccgtcttcttctccacagagcagcaagcgaaggtgtaaccttagctttactacacgatctgcaagagtaggcagccaaaatggagtccaaatgttgagcccctcggaaatcccacaaagggactggttcccctctgacttcaccttcggtgccgccacttcagcgtaccaaattgaaggtgcttggaatgaagatggaaagggggaaagcaactgggatcacttctgccacaatcatccggaaaggatactggacgggagcaattcagacattggagcgaattcgtaccatatgtacaaaacggacgtcagattgctcaaggaaatgggcatggacgcatataggttctctatctcttggcccagaatactgccgaagggaaccaaagaaggaggtattaacccggatggcatcaagtactacagaaacctcatcaacttgttgctggaaaacggcatagagccatatgtaacaattttccactgggatgtaccctcaagcactagaagagaagtacggcggcttcctagataagagtcataagagcattgtagaagattacacctacttcgctaaggtgtgctttgataacttcggcgacaaggtgaagaattggttgacctttaatgagccccagacatttacttccttttcctacggaactggggtctttgccccagggcggtgctcacctggactagactgtgcctacccaactgggaattcactcgtcgagccttacactgctggccataacattctcctagcccacgctgaggctgttgatctttacaacaagcattacaagcgcgacgacacccgcatagggcttgcgtttgacgtaatgggtcgtgtgccatacggaacatcgtttctggataaacaggccgaagaaaggtcatgggacatcaacctaggatggttcttagagccagtggttcgtggtgactaccccttctccatgagatcattggctagggaacgactacccttcttcaaggacgagcagaaggagaagctcgccggttcctataacatgttggggttaaactactacacctcacggttctccaaaaacatcgacatctcaccaaactactcacctgtgctcaacactgacgacgcctacgccagtcaagaagttaacgggcctgacgggaagcccattggtcctcctatgggaaatccatggatctacatgtaccctgagggcttgaaggatctccttatgataatgaagaacaaatacggaaacccacctatctacatcaccgagaacggaatcggggatgttgataccaaagagacacctctacccatggaggctgccttaaatgactacaaaaggctagattacatccagcgccacatcgctactcttaaggaatcaatagacttgggatcaaatgtgcaaggctacttcgcttggtctctgctggacaactttgaatggtttgccggcttcaccgaacgttatggcattgtctacgtcgaccgcaacaataactgcacgcgctacatgaaggagtctgccaagtggttgaaagagttcaacaccgcgaaaaagcccagcaagaagattcttacgccagcttaaaaatcgggggcctcatgatgtgggtgcagcccataaaaactgtgtggtttggaaccgaagattttctcttttttttttttttttctgccacgagaggttctctggaggcatactctccagcaccgtggctaataacgcgttgttccaattcagtctggccttgtcatgcatgcaataaataaagtgatgggtttccctgtttcaaaaaaaaaaaaaaaaaaaaaaaaaaaaaaaaaaaaaaaaaaaaaaaaaaaaaaaaaaaaaaaaaaaaaaaaagcggcc

SEQ ID NO: 146884 - DNA, 400 bp, Zea mays
  Clone ID: MRT4577_65473C.1
tttgggctggtttctgtgcttgtttatgtgcttgtttatgtgcttgaagccacacggtccggctccgcgtctgcttgacgagtacggtttctgtcgttgcttcttcgtcgcgtggtggtgtgcggtcgtagtaggtggtggaggtgtgtttttattatacggatattgatagtagtactgatacggattgtggtagtgatgatcctcctcttactgcggggcatctgttggaggattcgatgtagtatgattggtctgctaggtcgcctgaggagcgggcggttaagcattgtaaggtgcatggtagtcctgaggagaagtcgtgttggcctgaggcgcctaaggataattcgtattatactgatgaggttaataggaaggaggctattagtcatcggtc

SEQ ID NO: 146885 - DNA, 420 bp, Zea mays
  unsure (1)..(420): unsure at all n locations
  Clone ID: MRT4577_65474C.1
cgaatgggtaccnctcgggccggccgggagtccggactacccaggcgagcgatcgcgggggcagacagagacttcctcgcctccatcccatcccggcgacgccgtctctacggtcgctaataagccgccgcatccagggatggagatgaagaagatcgcctgcgccgtcctcgtcgccgcctcggccaccgtggcgctggacgcggaggcgccgggggggggggggaccagacgatcctacgacgtagcacccgtcattgaaggggccgcggtggccaccgtgctggcgaactccactgactgagaagccggggaactagccgggcccatactgaagagataggggcactggtagagagatgaaggcgatggcgaggtcgaaaaataccgacagggcaaaaatcatgggcgtgagctggt

SEQ ID NO: 146886 - DNA, 345 bp, Zea mays
  Clone ID: MRT4577_65475C.1
ccgatcaatcttttctttttttttttataaaaatgcaggaggcatggctcatgtaaagtcacttcattaacaatcttacaaaagtacaactaaacgtgattattatgacacatataatacaagaaaacaacatattttcgtaccttaaatgactagtaactaaattataaaaaaggaattggctcctttgaactaacccttccaacgaacaaaacatgtgatctcgtgcgtaacagactcatgtgctggttgaattagatatctttgtatcatataccataaatgggggagaccgtacctcgggcatagtggaacagaaaacaaattagtataagaatttgttat

SEQ ID NO: 146887 - DNA, 441 bp, Zea mays
  Clone ID: MRT4577_65476C.1
gctgggtggttgcctttgtatacagggaggaatttcgcaaggagttctatgtttaagaaccctaagaacaagtctgggggtgcggtaagaaccctgagagctgctttatgaccggccccatattattactatctactttgacttttcccttaatgacgacttattatttgatttactcgtcacgattcccctctcctggtcgaacttttcaggtggggaaagctgctggcgacaggtggaaatccctgagcgagtcggtaagctccatcttctgtactaaagtagtagttgattggactagaaatctcgtgctgattaattgttttacgcgtgcgtttgtgtggattgtaggacaaggctccctatgtagccaaggctaacaagctcaagctcgagtacaacaaggccattgctgcctacaacaagggcgagagcactgca

SEQ ID NO: 146888 - DNA, 396 bp, Zea mays
  Clone ID: MRT4577_65477C.1
attaagcgggcggaaaaaaaaaaaaaaaaatgttttttttaaaaaaaaaaaaaaaaaaaaaaaaaaggggaaaaaataaaaaaaaaaaaaaggggggggccgttttaaagaaccaaagttaccttcccctgcctggcaaggaaaaagttttttattggggcacccaaaattaaattaacggcccgggttttaaaaccgtgtggacgggaaaaccccggggttacccaaattaaatggcttggaagaaaatccccttttggcaagtggggtaaaaaccaaaaaggcccgaaccaatcgcctttccaaaaattggcccaccctaaagtggcaatgggacccccccctttacggcccctttaagcccggggggggggggggttcccccaagggtaccct

SEQ ID NO: 146889 - DNA, 327 bp, Zea mays
  Clone ID: MRT4577_65478C.1
tcaaggtgaaggactgggggacccttttctttggggggagtgtggttgctgtgttcggctgcaggaaccctgatgagatcccatggggagcggttggcgctgaatatgttgttgagtctactggtgttttcactgaccaggagaaggctgcagctcacttgaagggtggtgccaagaaggttgccatttctgctcctagcaagggtgccctcatgttcgtttgtttggtgcaaccagaaggagtacaagtctgacataaacattgtttctaaggctagctgcacaaccaactgccttgctccgcttgctaaggtcatcaatgacaag

SEQ ID NO: 146890 - DNA, 1942 bp, Zea mays
  unsure (1)..(1942): unsure at all n locations
  Clone ID: MRT4577_65479C.1
cggccgttttctacgggcggtgcagtggacgggagtagtaccctttctttctcttcgaagaaaatgcggcggcgtgtggtataaaccccgcccgtcacgccgggccgtccgtgcgtttccttttgtcttcgcttgcttgcttgcttcctttcgaaagtccttgcgtcacactcgccgatcgatcgagtctctccggattccagagaggcccaactgccgaagccatcgatcgccgccacctcttcgagcagaatagttgagaatggctgacgaggatatccagcctatcgtatgtgacaatggcactggaatggtcaaggccggtttcgctggtgatgatgcgccaagagctgtcttccccagcattgtgggaagaccacgccacaccggtgtcatggtcggcatgggccaaaaggatgcctacgtaggtgatgaggctcaggccaagagaggcatcctgacactgaagtacccgattgagcatggcattgtcaacaactgggatgacatggagaaaatctggcatcacaccttctacaacgagctccgtgtttcgcctgaagatcaccctgtgctgctgaccgaggcccctctcaaccccaaggccaacagagagaaaatgacgcagattatgtttgaaaccttcgaatgcccagcaatgtatgttgctatccaggctgttctttcgttgtacgctagtgggcgaacaactggtattgtgatggattccggtgatggtgtgagccacacggttccaatctatgaaggatacacacttcctcatgctattctccgtttggatcttgcggggcgtgacctcaccgaccacctaatgaagatcctcacagagagagggtactccctcactacgagcgctgagcggggagattgtcagggacataaaggagaagcttgcctacgttgcccttgattatgaacaggagctggagactgccaggagcagctcctctgtcgagaagagctacgagatgcctgatggtcaggtcatcaccattgggtcagaaaggtttaggtgccccgaggtgctgttccaaccatcccttgttggcatggaatcgcctggcgtccatgaggccacgtacaactccatcatgaagtgtgatgttgatatcaggaaggatttgtatggtaacgttgtcctcagtgggggatctaccatgttccctgggattgccgatcgtatgagcaaggagatcacgtccctggctcctagcagcatgaaggttaaagtgattgcgccacctgaaaggaagtacagtgtctggatcggtggctctattttggcttctctcagcacttttcagcagatgtggatctccaagggagagtatgacgaaactggtccgggcattgtccacatgaagtgcttctaagtttttttgggaaatttttccaaaaaaaaaaaagaagtttctggggaagttcgacatggtacgtcaggcgttaccggctcattgtgaaccaatacatgaactgccatgataaggttataagcagaaataacagtagcactggctccaattcctgaagatgagtctggtgctccctgctgtatgaaatggatcccactcgtatattcgtcaccgcgccgcactggtgtaacgtgttgcctcagagtttgcttttagctggttccttttttaaaaataagtactgtttttggttggctaccagtcattttgaacttcagtagcaaattatcttatttaatgcttgctttttcatatttgatgtttgatccgtcatagcaacccgcataaagaaactcttcagcacatcaaaaaaaaaaaaaaaaaaaaaaaaaaaaaaaaaaaaaaattaanaaaaaaaaaaaaaaaaaaaaaaaaaanaaaaaaaaggggtttctgacccctcctgaattacacattgggagacaggtctgcatatttttaagcatcgc

SEQ ID NO: 146891 - DNA, 343 bp, Zea mays
  unsure (1)..(343): unsure at all n locations
  Clone ID: MRT4577_6547C.1
cattacaatcctataaccatcttcttcatccttcaactatccccaaatttaatcgggctatctaggctaaagtataattgcctcctccaacaacttgaccctccatatctcatcncctgtgaccccacatctcctattcctctcctccttgatagacttgcacaccctggctcccaaggtctccttccacatgatctccatcacacatccctgtgatggctactttctcttttgcatcntgatgcatttcaacttcacctcancctttcctttcatcttcattaatgagcatctctatttcctccactctgacaatttctatttcaataacactctcatttaa

SEQ ID NO: 146892 - DNA, 257 bp, Zea mays
  Clone ID: MRT4577_65480C.1
tcttttttcaactacgactaatctaacgacgcagcgttttacgtaaacgaggaggacgaatctatcgactcaacgttgtgacgaaaacgacgtcggtttcaatgcgtgtgccaccggctgttttttgacgcaagaggaaattcgactacgttttacccagcgaagcgtatgcgatcgacgttatcgccggatggagccgtgtggcgccctcgcccaataaaaagttcgacggcagctgtttcccttgttttacattt

SEQ ID NO: 146893 - DNA, 483 bp, Zea mays
  Clone ID: MRT4577_65481C.1
ataacaatgttccatgactcacaatcaacaaaacctctgctgtgcaatttctcaagatagcttactgaatactgcagcctgtcatttctacacaaccatgtcaggagcacattatatggttctaattcagtgacaccattttcctctagaaagatcatagcgctgtggaacttggattttgtacagtagcaatttatcatgtccacatatgtaattcccattggagcatgacctgatgctaccatctctttgaacactatggtagcgtcatccagtagttcattctcacataaacacctaaccaaggcactggacaactgcagactcaactgaatgttgccttctttcattattcgatgcaacgtaatcacctccttaactttactgaacttgcaaaacagaggcatcacttgagcatggaagctgctatcaggggagcatctaagttgcagcatcttatcaaagagcttgaccgcttcatct

SEQ ID NO: 146894 - DNA, 299 bp, Zea mays
  Clone ID: MRT4577_65482C.1
acggcgtcaaaggtgaagcaggacatgcctccgccggggggctatgggcccatcgactacaaacggaacttgccgcgtcgaggactgtcgggctacagcatgctggccatagggattggaaccctgatctacgggcactggagcataatgaagtggaaccgtgagcgcaggcgcctacaaatcgaggacttcgaggctcgcatcgcgctgttgccactgttacaggcagaaaccgaccggaggaccttgcagatgcttcgggaggacctggaggaggaggccatcatcatgaaggacgt

SEQ ID NO: 146895 - DNA, 137 bp, Zea mays
  Clone ID: MRT4577_65483C.1
gccgttctaatattttttagtacacattatgctatgagtggattattatgacaatacttatttatgagacattggatgttatgtatctatagtacatcaatcatagtggtattccagtgaacatggtaagtcctcag

SEQ ID NO: 146896 - DNA, 237 bp, Zea mays
  Clone ID: MRT4577_65484C.1
cccacgcgtgccattcgttgttgggcgtggccaagagctaacaccgtggcttttgttgaatatcacgttcgttctctccctcctatgcacactgtgtctcaccaccgccccggactttctctcacaaccccaccattgttgctggccaagactagtcctcatgaggtcctggagcaaccgccgaatgtacaacacaagaactcgatctattctgcagagagaatgcccagcaacagc

SEQ ID NO: 146897 - DNA, 355 bp, Zea mays
  Clone ID: MRT4577_65485C.1
gttttgatcagctaatcctggcattgattcttaatactagtctgaacaaagacacattcgcttccaacttttgcttgtcagaatacgcgaggggtcatggcctagcgagacagagagaaggaataatcatatcatgcgcgcgtggctgtgggggccttgtcgaccgtacaatgttcgcgccaactgccaacgtaaaccttacgcgtgccgcgctcaaggaaacactcattctcagactctgatcagctatgcgaaagcgaagctcagactccgagattgcgtggtttgcctagcgcgccaagcagaaagccttagcttggtcgcttgactagcaacgctccatcgacagggtcag

SEQ ID NO: 146898 - DNA, 834 bp, Zea mays
  Clone ID: MRT4577_65486C.1
gatccgcgccgccgcatcctctctggtgccaaagatcgcggacgtcgcttcccacctcaccgaaccgtccgcaatctccgtctcctggccccgcgtcgttgcgtccgcgctctcctcctgccccgcgccgttgcgtccgtaatctcctcctccagccacgccgttgctctcgcgctccgctgctctcgcggaatcactcgcggaatcactgctccgctgctctatccgccatcagatttctggagtagtcatggaaggtgccgctcttgatttctaaacagtgcgccaccaatggcgcctgagcccccgccaccatttcatccccttcccgcccagtgtacacaccctacctcgccccgcgtctagatgcacgcgtgcccgcggatgtctctggtgcccccgctcccatcctcctcgcgtcccatccccgtcggcacgggcgcacgacccccatcctcgatgtcgtcctagctgctgcgtgtgcatctccacgcgaacccctaccatcctcgacgtcgtcccagttgcggctgtcgcgtctccgtgtgcatctccacccaaacatgcaaggtcaccgggggcccaaacctcaggagcagcgccgcccgcggatcgtgtggattcctgtcgcgtctgcctcggcgaggcctgccgagggatacgacaacgaggattatccatgtcggggccggtcgctttgcctccctgctggccgtctctgccccgccagctccgccttaacgccggatttctccgtgtctgcctccgcatcagggcacgccacgcgcatcgcctcggcggtgggccgcgttgctctctctacttgtcgcagca

SEQ ID NO: 146899 - DNA, 807 bp, Zea mays
  unsure (1)..(807): unsure at all n locations
  Clone ID: MRT4577_65487C.1
aactatccgagcagattacagaatgctggcatctctggtgcagaggaaagtgcagctcatgatcaccaacttcatatggtgctaccagataccaacaatgttgacatctctggtgcaaaggacagtgcagctcttcatcacgaactgaatatgggactaccagatggagctcacaacgttggcatctctggtgcaaatgacagtgcagctcttggtcaccaactaaatatgggactaccagatggagctcacaacgttggcatctctggtgcaaatgacagtgcagctcttgatcaccaactaaatatgggactaccagatggagctcacaacgttggtatctctggtgcaaatgacactgcagctcttgatctgggactaccagatggagctcacaacgctggcatctctggtgcaaatgacagtgcagctcttgatcaccaacttcatatgggactaccagatggtgctcaattagatgctacaccacaagaagcaactgatgcagttgacgctacagctgcatttggtttgcaaatgccatctgatgaacgtgataacaacattgaaaaagtaactgagtttggtgacgggaaagaaatcccacttgttgacgaaacaaatgctgctgcaaacattactgctcatgttgatacacgggataaggattgccatcaagatgcttcagcagatatgcagaggaatacaaatgctgatacacctctctttgtgcaagatgacataacccatgattctgctactatacagnatgctccagatgttgcttttgcatagttctggtccagc

SEQ ID NO: 146900 - DNA, 688 bp, Zea mays
  unsure (1)..(688): unsure at all n locations
  Clone ID: MRT4577_65488C.1
gtgcggcgctcgaggcggccgggctgcgaaaaatctctcccagccttatcctacgcgtcgctcgntgtgctttnggaaaaaaagatcgcgccgcttgtgtgctttgggaaaaaaagatcccaccactccggccatcttcttccccgagccgcctagaactctccctcggccttatcttcttcagccacttctctctccctcatctcggcagcctgcacgtcgattctccagcgccctcgtcttcttccccgcgccggccgagctggtccctgtcccagctctgctcgcccccagccaaggccttcccatggctctcggctagagctctgctcccccaactccgctgcgcttggatttctctctctgccgcgcgttgccgagtcgtctgcgcgtcctgagctcctccagtgccgcgccggcctggagctttcatggccgccgccctgccctgtcttccatggcgcgcggtggtggtgggttggtgttggtggcggtgactcactgacggcgacgcgccctgctcgtggaatccacgacttgcgctccctgcttgacagctgcgccgcttgcccagcccggccgaatcccctgcagactccatccatggcgcgctacctgctccagcccgggcgtccctcgctgcgcgtcttcaccatcgggctggccgtcccagctccactcggcaccc

SEQ ID NO: 146901 - DNA, 735 bp, Zea mays
  Clone ID: MRT4577_65489C.1
atgcctccgctcactgctcgggagggcatggccccacacaagtcagagctcaaaggctctcggaggatgcaaagccagccggccggggcctttccagcccggagaactccgttgtccacctcgcccactaaggagtggacacggatcactcggagaaaggaagtgaatatcccataccggggaaggaaaacacagcgagcaatcctcccggcacctccgcccttaaaggaggatgggaagaagcacaccgccatgcctgctcctttctacccccacgtcctcttcattcaggggagattggagtcatcacccgtatccgacgatgaacctaccatgcagggggaggaacctccccagcgtgatgcccgacgacggagaaacagacgtcggaatgtgcggccacatcacgaagccagtgaatggaacccagcgcaacccgtatcttgggacgaagcctcagaaataggagaaactcctgatgaacgagcacaccgagaaagacgcaactcccgccgccgcgatcgccgacaggctcaagaacgagagcgggaactagctgaacaagatgctagactccggtgggagaatcctcttctcgctcgaaacctgtacctcaacttcgcccgagcattaaatacgccgagtgaagtcggaggagtactggcgcagataaccgatggccttccgcggaccccagacgtggagggttattggcggctgagggtaacctattag

SEQ ID NO: 146902 - DNA, 403 bp, Zea mays
  Clone ID: MRT4577_6548C.1
gtttcagagagcgggcgattgggtttcgggatgagggtaccggcaatgtcaacgacgacggaggcggcaaagagcggctcagccgcaccggtgcggtgccagcggatcggctgcgacgccgtattcaccgacgatgacaaccgcgagggctcctgccaataccacccctccgcacctatgtttcatgacggcatgaaagaatggagctgctgcaagcaaagaagccatgatttcagcttatttttgcagatacctgggtaaggacccctcttcctcccttggtatgtgatgagccattgacaatatttggacttcaatattagtgtgtatgatatactgtgcattggcagtatggctgtctggttgagaattggcgtaaaccaaactaataattggtaatgtg

SEQ ID NO: 146903 - DNA, 165 bp, Zea mays
  Clone ID: MRT4577_65490C.1
ctccactatccttcccctgacaaacgcttcctccaccatctttgatttcatgtcggactgtgcgaacactctcctccggatcacacacatgacatcccaatcatagtcactattgagctacttaatcccgacgccaaagcccaccttcacatgcttcaatccacc

SEQ ID NO: 146904 - DNA, 561 bp, Zea mays
  Clone ID: MRT4577_65491C.1
attcggctcgagcctttatgatcacccttatttgacgcgagactgacatgggacacggcagcctggtcagcgttaccagtaagagaagcaggctcacctcatgcactctcatatacagctattggttaagggctgccttccgacttacaatgctgactaattgtgttgtgcgtgcatagatcagatacattaggacacacctttaccaatgcacccagtgatctatactggctacattgtgtctcgacgagcgatctaagtatggtttgacttgtgagacaagacccaatattactgcaccggctcgctttgccagacaaatcaggtactccatgtctagcctcattgtatatcactctcattgtgtctcccctgcatctgcacaagcgcgccggctacatgctcagatctctcgaaccaggctgactatatcaacccgagtcgtgtgctctatccaattgtatctaatgtgcagcaacagagaggcaggcgggactgcggccatcatgtattacggtgctagaatgggatggaatctcactatgtcctgcttatcaactc

SEQ ID NO: 146905 - DNA, 273 bp, Zea mays
  Clone ID: MRT4577_65492C.1
ttggctaccctcgtcgtcgtctcactcaccccggcttctcgcatcgctgaccaaatataggggccggccttttccgacattcacaggggggacacgaaatcagcggccatggtctctattccggcgacgaccttgagcgtcatcttatacgtcctcttgtgtgcctcggctggcaccggccttgacaacgacgctatgcgactacgtcatccagggccgcgtatactgcgacacctgccgcgccgaggttcgtgaccaatgtcaccgagtaca

SEQ ID NO: 146906 - DNA, 525 bp, Zea mays
  Clone ID: MRT4577_65493C.1
aagcagagtttattaagtgatcatgtgtactgggctattctgtcaacatgaacaaatgaacaatggtgtgtttttcctaaatcataatgaactttctctctgttaggttgttgattgcagaatttgtggtgatccccactcagttcttagggttgcattcattgagttctctgaggaaggtattacatattgacctactactcagattccttttttatgtaatcaaatcttcttttgatgaatggtggggtctgttttttttctgcagagggcgccagaactgcgcttaacctgggaggcacaatttttggtttctaccctggtagagatttgccggcaaagacagctatcttacctgttaatccaaaggttcttcccaggacggatgacgagaaggaaatggtcatgcgaactgtctattgtacaaacatagataagatgggtactcagttagatgtaaagaaattctttgtagaactttgcggggggggcatataatttgcctccttaatatatttcctttgc

SEQ ID NO: 146907 - DNA, 502 bp, Zea mays
  Clone ID: MRT4577_65494C.1
ccccgcgtccgcgagcactggcgggacctggtggtcgccgtcagggagggcgtcctcatcccgcgcccggagacggaggccatcatcgacatggtgcgcgccgtggaggacttcgccgacgggtggtgggccgacctcggcaccggcagtggcgccatcgccgaggggctcgccagggagctcgccgggcaagggagggtgttcgccacggatgtcatccaggtgggcatcgacgttgcgaggctcaacgtacagcaggtacggtgtgcaggataaagttgaaataatgcatgggtcatggatgaacctgtgcaagatcttaaaggaaaacttatgggtgtgattagtaacccttcgttcataccacccgacgacctacctggtctgcaacctgggggtggttgtcgtgcactcaaactggagcttgacgtcggcaaggatgggctcgaacatttggtgcgtctctgtgtacgggtatagttagttatgcaccctggatgtt

SEQ ID NO: 146908 - DNA, 196 bp, Zea mays
  unsure (1)..(196): unsure at all n locations
  Clone ID: MRT4577_65495C.1
cggcgtcnccgngcccgngcgngccnngggcggccngcggncncctccaccggccaccgcngccncgcaanggggcaaggcaancagaccgcncccaacaaccgcccngaccgcgcgagggagancaaacgcggaggccgnnccgcccncccgcgnnancgggangccaggccncgccgcagccgagcaggacgcc

SEQ ID NO: 146909 - DNA, 358 bp, Zea mays
  Clone ID: MRT4577_65497C.1
gaaggaaacagagcacaatagctgtaccaacatatggtgggccaaaagcagtttagcttcctgatgcgtcattgttctttctagcaggagctgctaccgaaccattattccacagtgctcacaagctcctattgctagcttgtttcgcccatacgtgtcaccagcggtgtctagagtatgtgaaaactcaattcttcaaccatacatgatccaacaggcaatagcagcaagcatcttacctttatcacccttgatactgcaacaaccagtagggctattacagggagtacatatggcgcatttgttggcacaaaatcataaggcacaacaactacaacaacttgcgctaggaaacctt

SEQ ID NO: 146910 - DNA, 347 bp, Zea mays
  unsure (1)..(347): unsure at all n locations
  Clone ID: MRT4577_65498C.1
gnccaccccccaaatctcacccccggtgctactcccgttcttccgccatcgccatggaggacgccgcgaacgccacccagaccacctccaccacctcgtcggtggccgccgtagccgcggcggcccagcaccagcagcttcagcgccagctctttctcatgcagcaggctcaggctcaggcgcaggcccagccccacccgcaggcgcagcagctgtcgcagcaggccatgtcccgcttcccgtccaacatcgacgcccacctccgccccctcggaccgcaccgcttccagcagccggcgccgtcgcagctcctaaccccaccccagccgcactcgcaggggcagccg

SEQ ID NO: 146911 - DNA, 2807 bp, Zea mays
  Clone ID: MRT4577_6549C.1
ctccaaccatctccgaggatctcgtcagtcgtcacgaaatctccatggctggagcacgcgagagaggccaggatacaccccaggtccccagccgcgcccgcgctatataaagctcccgccccccattcccttccccctcctcccccagctaggtagcttagctagcgtgataatcaccgcgctaaactgatcatcatacacagcaattggcgtgtgacaggacacaggaggagggggcaggctggtaatatatagcaaaagtacaagcgttcctccagtggcgtccagcgttatatagttcgctgtccggccggacgtccttcccccaggtacaaagaggatgacggtgacgcccatgattacggtgggggatgggcggctggtggcgcacgggcggagcgtcctcgccggcgtgccggacaacatcgtgctcacgcacgcctccggggcggggctggtcgacggcgccttcgtcggcgccacggccgccgagcccagcagcatgcacgtcttcaccttcggcaccctccgggacctgcgattcgtgtgctgcttccggttcaagctgtggtggatgacccagcgcatgggcacctccggccgcgacgtcccgctggagacgcagttcatgctcctggagtgcggcccgggcgacggccacggcgacggcgacgcggcggtgtacgtggcgatgctgccgctgctggagggccagttccgggcggcgctgcagggcaacgaccgcgacgagctggagatcaccttcgagagcggggacaaggcggtgcagactgcgcaggggacctgcatgctgtacgtgcacgccgggaccaaccctttcgacaccatcactcaggcggtcaaggtggtggagagacacatgcagacgttccatcacagggagaagaaaaagctgccgtcgttcgtggactggttcggctggtgcacgtgggacgccttctacaccgacgtcaccgccgagagcgtcaagcaaggcctcaagagcttggcggacggcggcacgccgccgcggttcctgatcatcgacgacgggtggcagcagatcggcagcgagaacaaggaggagtccgccaacgccgtcgtccaggaaggggcgcagttcgccagtaggctgacggggatcaaggagaacgccaagttccagaagaagacgaagacgaaggagagcggcggcggcggcggcgagcagcaggcgcaaacgccgggcctgaagctgctggtggaggaggcgaagcgcgagcacggcgtcaggtacgtgtacgtgtggcacgccatggcggggtactggggcggcgtgaagccggcggcggaggggatggagcactacgagagcgcgctggcgtacccggtgcagtcgccgggtgtgatgggcaaccagccggacatcgtcatggactctctgtccgtgctgggcctggggctggtgcacccgcgcagggcgctgagcttctacgacgagctgcactcgtacctcgcctcctgcggcgtcgatggcgtcaaggtggacgtgcagaacatcatcgagacgctcggcgccgggcacggcggccgggtcgcgctcacccgcgcctaccaccgcgcgctcgaggactccgtggcgcgcaacttccccgacaacggctgcatctcctgcatgtgccacaacaccgacatgctctacagcgcgcgccagaccgccgtcgtgcgcgcctccgacgacttctacccgcgcgacccggcgtcgcacaccgtccacgtctcctccgtcgcctacaacaccctcttcctcggcgagttcatgcagcccgactgggacatgttccatagcctgcacccggcggcggactaccacggcgcggcgagggcaatcggcggctgcccgatatacgtcaggtgagaccgacaaccagctcctgatcagaacgaacgacgtcgtggggttgccgaaatcgctgtcgatcgcggcgtccgtcccagacaagccggcacaaggatcgatccctcgagacaggggaaccgaatgatttggttgcctgcccttgcggcatggcagcggaggtgccagccccgaagacccgaccagtcgccgccgccgccatgattggccgtcgccatcagcgagcgcattataggcgcgcggccttgtctatctaactggcacacaagctgcagtagcaaagcccaacagcgactcgacggctgtggctgcttgcgtcgccctccggcacgccttccggcggacggcgcgcgagcccgtgtctgtgaacgacaagccaggcaaccacaacttcgagctgctcaagaagctggtgctccccgacggctccgtgctccgcgcgcagctcccgggccgccccacccgcgactgcctcttcgccgacccggcgcgcgacggcacgagcctgctcaagatctggaacgtgaacaagtgcacgggcgtggtgggcgtgttcaactgccagggcgccgggtggtgccgcgtcaccaagaagacccgggtgcacgacgcggcgccggggacgctgacggggtcggtccgcgccgacgacgtggacgtgatcgccggcctcgccggggacggctggggcggcgaggccgtcgtgtacgcctacaggtcaggggagctagtcaggctgccccagggcgccacactgccggtgacgctcaaggtgctggagttcgaggtgttccacgtctcccccgtcagggcggtcgcgccgggcgtgtcgttcgcgcccatcggcctgctcgacatgttcaactccggcggggcggtggagcagtgcgaggtccgtggcggcgcgaac

SEQ ID NO: 146912 - DNA, 269 bp, Zea mays
  Clone ID: MRT4577_654C.1
gagctcactattcggtggccgccctttttttttttttttttggggggggtacacacagaatggtgtgagctatcaacaaacagacgtacaacaaagccaacagcgcgacgctctacatggcgcattctccccagaagataccattttccacatttcgcgctcgattctattgaaggcgagaatccacgactgtaggaccaggaagctgatttgtcatgcaccatgttcaaacccaatgggagagacatccacatctgcatacctttttt

SEQ ID NO: 146913 - DNA, 206 bp, Zea mays
  Clone ID: MRT4577_65501C.1
tttcgcatcggtctcctccacgacaaaaaaacagatattctatcgtcaggaatcaatcagcaatcctgcgttgcctgcccgacggagctgcttccctcgttgctgcgttgcactgcggcggcgattccagctccatgcgcccatgatttactttacttgtgttttctcgagtctgtagcggtttgtatcagctgcttgccttctgc

SEQ ID NO: 146914 - DNA, 895 bp, Zea mays
  unsure (1)..(895): unsure at all n locations
  Clone ID: MRT4577_65502C.1
cgccctgctgaaaacaacacttgttgacgatactgtattggaccattttgtactttttggtgtctgatttgcgatccgtttgttttgctggtctcatgtgagtactagaaacattttttaatcgtgagatcactcgttcgctgatatgttcatggtttgagcacttgcttcatctcaattgaagtgaatagttcattttcagtgtttgtaagaaaaaactgattggctcccattcaccctcctctggtcgtcttaccggtcctacaattggtattagagccagttaaggatttcccttcccaaataggttcgaaatccatgtaggcgacatggaacaaggtgttggcaaacctccattcttcgatgggaccaattacccgtactggaagattcacatgtctgcgtatcttcagagcatccgttatcgggtttgggaaatttgcctcgatgcgaatttcgatgctacaagtgatcagatcactccaattcaaatggagttccatgattcgaacaacaaagctcgaaacactttgttctcatgtctctcgcttggtgagtttgagcgagttgggacatcctaactacggctntatcagatctggggtcctaccactcgagagatctccattgaaagggcaacgatnccattgtgaagaccagcacgtggttttgagacgggtacagcgcgagaaaggtacgaagaattctcanncacaatnntgcgctaagagacnnaccattgnnattataatagttactcttggggttccacgctcacattggtgaacaagatggggcgtgccaacaaggcacanntctaccctanntagtgatcatgnnagagagggcgccaaaacttatctacatgctccctagagtcgacnnctgcaggcat

SEQ ID NO: 146915 - DNA, 189 bp, Zea mays
  Clone ID: MRT4577_65504C.1
tcgcgacgcgtacgactaggtctagatccctcgccgtcgcgctcgtccgcgtgctccgcggcgtcgatcttcccacattggccttcatgacgcctcaattctacaccttcttcgtcgggcccatcggcgcgctctacgcgatgtcgctctgggtcttcaacttcggctatatctacctggccggggcat

SEQ ID NO: 146916 - DNA, 289 bp, Zea mays
  Clone ID: MRT4577_65506C.1
agctaatttttcattaaaaccacgaaaacggtaggggggttttttttttagttaattgggggggagcccaaaaaagaagctcattgtttttttcaaagggggataaaatggtccccttcaatggggaaaaaattcgctaacctttcacggggccaaaaaaaaaacccccgggggacaaacaaaccccaaaaatggccagggggtattgggaaaacccaaaaactttgaattcaacaatcaaaataacccaaacccccctgcttttttagccctgggttgtctttttaaa

SEQ ID NO: 146917 - DNA, 566 bp, Zea mays
  Clone ID: MRT4577_65507C.1
acttcgcactactcttacattaattttcaaaacgtactggttggtggtggtagtagctactagctactataaacgatggaccagatgctgggcaagcacctgcagatgccttccgtgactacgagcgccgcctgccagcagccgcagtcgccgccgccgtcgccgcagcagcagtaccggggcgtgcggaagcgcaagtggggcaagtgggtgtcggagatccggcagccgggcaccaagacgcgcatctggctcggcagcttcgagtcggccgagatggccgcggtggcgcacgacgtggcggcgctgcgcctgcggggccgcgacgcgcagctcaacttcccgggctgcgtcgcctggctgccgcgcccggcgacctcgcacgcgcgcgacgtccgcgccgcggcggccgaggccgcagaccgcgtgcgctgcgacccggcgctgctgctgctccagcaggcggcggcagcgcggtgccacgactacgaccacgaccacgagttcggggccgggccggcgccggtggtcgagctcgggagcgacgaggagttcgagctggacct

SEQ ID NO: 146918 - DNA, 494 bp, Zea mays
  unsure (1)..(494): unsure at all n locations
  Clone ID: MRT4577_65508C.1
gcaaaaaaaaattttgggtgcttatgctccttggtctttctgcaagtgctgctactgcgaccattttccctcaatgctcgcaagctcctatagcttcccttcttccccctttcctttcaccaaccccctcttttgtgttgtagggggaanncttcaaccctacannatccaacaaacaaaaacaaataacatcttacctttatcacccttgttcctccaacaatcatcacccctattacatcaattacctttagtgcatttattggcacaaaacatgatggtacaacaactacaacaacttgtgctagcaaaccttactgcctactttttataacaacattttcttctcattaaccaactagctgcattaaactcttttttttatttgcaacaacaacaactaccattcatccatctacctatttcctacccccatcaattcctttcattcaatcaactattcaacttataacttttctgcttatttacttcat

SEQ ID NO: 146919 - DNA, 324 bp, Zea mays
  Clone ID: MRT4577_65509C.1
gtgagttcgtcttttgttttggacttttattctgttttttcatttttgacctgggggaaaagacaattgctgggccttcaattctcttgcgcggaacagacctcaacttaccaaaaaaacccacgcgccccatataccacccccctgaaagggacaactcggaacgccccgggtcctgctgactaaaagaagaaataggggccgcagtgtttagatgtgcccccccttttgtccgtgccggaaggtcatggggggggccccccccagccaacgtccggggggtcatcggcgccaggcacaaaaataccggggccctatatctgg

SEQ ID NO: 146920 - DNA, 863 bp, Zea mays
  unsure (1)..(863): unsure at all n locations
  Clone ID: MRT4577_6550C.1
tccggatactcagccgcgtacacataacacttctggtaagcgagcaccgagcagcaggcggtctcaacggtcgacgcgccagctttccttgtccatgcagatcactcgtcgtacgttccctatgctggctcctcctcggctccccctcgtcggggcgctcctgctgctcctcgccgtcgcgctcggcgcggtgccgtgcgagagcgccgcgctccgcctccgcggctccgtcgcctgcctcgactgcgacgaggaacacgatctctccggtgtggtcgtggcggtgaaatgcgccggcgacgacgacggcggcgcgggcctccacgcggcgcagaccgacggtcgcggcaacttcgacgtggccgtgccagcagcagcgtcagcctcgggcgcgccgtgcgcggccagggtcctcggcgccacggagcagctctgcgcgccgtggggactcacggtcgcgcgcgtcgtcccggcccgggcgcctggctccgcctccttccccgcctcctatgttctgggctcccgcctcgccttcttcacgaggtgcgctgcggctagcggcggctccgctgtcgctgcgaccatggccgaccgtgaccaccagggtggtaacgccccgatggagccagcgcgaaggccgacgccaccggcggcacggacgccggcgtggactccaccgtcccgtggaggcaacaggccgcccttcagttttggaggactgcctcccttcttcttcttcttcccgttcatcccgatcatcggcatcccttgaacctgnacgctgccgtgtccaaagcactatcagtactacttacatttgaaatccatggtcatgtatccatgacatnnatatgataatgcta

SEQ ID NO: 146921 - DNA, 469 bp, Zea mays
  Clone ID: MRT4577_65510C.1
cttggatcgtccgccccggccgcgcggacggcttgccttgttggtggtttcagctgccgccgcttggtcttgggctgtggcgccttgtgattgtcttggaacttaaaaccttcaggcaaggttcactttttaacccttgccctcccagggccaaaactttggaatttttaaactttacagggccttccatttcccgggggggcaaagcagactaacctggtttttacggatcccccccccctccgttttttttttttagccactggatggggcaattttgccctttcgcccgcttcctaaaaaaacagggggggggggcttttaggccctaaataaacaaccatgccctgtgggtgcgctcccctatttattggggccccccgggccgaactgttacagtcccttttatgcagagccaaatgccttttgctctggggagaaacccgcccctcccgggggggggggtgtt

SEQ ID NO: 146922 - DNA, 775 bp, Zea mays
  unsure (1)..(775): unsure at all n locations
  Clone ID: MRT4577_65511C.1
gtacatcccgaggcgcaggccgggaaaatttcaacattatcgacgtcaccggccgggaacggccttataacctctaattcatcaaccacatcaccacacccaacccgccaaaatggatatgctttcagccgccgagcagcgcactcttgagcagcgcatgcagaagcgccaggtcaaggagtttatgggtgctttcggcggtcttgtcgagcactgcttcatgtcctgcgtcgatgacttcacctccaaggccatttccaaccgggaaagcggctgcatcaaccgctgcgtccagaagtggatggcctctcagcagcgcatcagcgaccgcttccaggagcacaacgcccagctcacagcccagatgaacaaataagtgcgacagactcggaatcgcggcgtgtacgaataggaagaaggatataccaacataaaaactccgcacgagatttactctatggcgtcagatgtataccggaaggtcgtctcccatgatgccggaaggggatgaaacgacgacgatgatattgggcgcggcaggtttctgtagcgccaaattgtacttctacatcaaaaaaaaaaaaaaaaaaaggggcggcagcttggaactaactaaaccccatggaatgaaaatatggcccatttctccttcactcaccaagttgataggaaggctcngctggtcgttngtattttatagcntcagtacgatcgctcatgctgaaacatatncacccgtgaaaaaaaacaaaaaaaaaaaaaaaaacccgcggcc

SEQ ID NO: 146923 - DNA, 666 bp, Zea mays
  Clone ID: MRT4577_65512C.1
aattgtcgcccctttctttcccccctccgctccggtcgatccgctccgctgtcgctccccgagaaaccctaaaccccgtaaccctcgccgccggcgatcgctggtcccctgcgtcggccgccatgttcgggacccccaactctccctccctcttcgggacgccctcttctacgccctctttcggaactccctccactacccctgccttcggcaccccttcctccacgccggcatttggcgcgccgtcgtccaccccggccttcggagtcccttcatccacccctgccttcggcgcaccctcctctacgccggcgttttggacgcccacttcgagcccgacgtttggcacgccatcgtcgaccccggcgttcggagcgccgccgtcgtcatcgccgtcaccctttgggttccagcagcaggtgactccgtccccttcgccttttggtttcggcggcggggctggcgggcagattaccacccagatggccccagttgcgccgctgccgctctcgccctccgaccgcgacattcaggctatggtggatgcgtacaaggaggacccaggcaaccctcgctatgcttttaggcatctgttgtttagcgtgacagatccttcacaaagggtgaagcctgtagcagcatctgatatcatgtgggcagaggcga

SEQ ID NO: 146924 - DNA, 502 bp, Zea mays
  Clone ID: MRT4577_65513C.1
gcgacggtgaaggagccgactctgctgccgaagatgagcccggtgatgcatcgcttcgcttggcagtcctacagcgaggacacgaactcgctggatgacagcgcgtttgcaagggatggcctgatcgagcagctcagcttgacatgggacaagtcggactacctgtggtacaccacccatgtcaacattggtgccaacgaacgattcctcaagtctggccagtggcctcagctcactgtgtactccgctggacactccatgcaggtgttcgtcaatgggaggtcatatggatctgtttacggcggctacgacaacccgaagctaacattcagtgggtatgtgaagatgtggcagggcagcaacaagatctccattctaagctcagcagtgggccttcctaacaacggtgaccatttcgagctgtggaacgtcggcgtcctcgggccagtgaccctctccggcctgaacgaggggaagagggacctgagccatcagagatgga

SEQ ID NO: 146925 - DNA, 321 bp, Zea mays
  Clone ID: MRT4577_65514C.1
agcattagaaagatagcactgtggcatacagaaggaacataggtgggtacaatgtacacatgcatgcagtttctcaagttcgtgatatacgaaggacacaagatctgatagatgcaaatacagttatatagtgttataagcgcacctagagagcgaacacacgcgtggaaaaataaacgctgagtcggtacgtagacacagacttggagtacgaactgtagctatgagaggagtttttccttgcatgacgactattgacagagtttgtgctacgcgaggcatgccttatacttcctttattaggagaatagtttgctgatc

SEQ ID NO: 146926 - DNA, 214 bp, Zea mays
  Clone ID: MRT4577_65515C.1
ggaaaacatgtgtgatcggtttcgtcttattttaattcgcagaaaacaagcactcaaatagggggggggcctcctgtctaaaaggtccaagcttaccttacgcttgcatactacaggcatatctgataatatagtgacaccaaacttgaattgactggctgaggctttacaactacgcgactgggaaaacgctgacaatattcaaattaataaa

SEQ ID NO: 146927 - DNA, 750 bp, Zea mays
  Clone ID: MRT4577_65516C.1
aattgatcgcgtgcgccggcgcctccgaatcgtcccttcgtccccacgagcaaccgataatccgccggtgttgatatgatggttcatcacgatctcctatctggagacgagctcctgccggattcattcacctacacgagctcgagaacggcgtcctgcgcgagctccaggcaaagtgctgcacccaaggacctgttgatgtggacattggtgccaatccatccgccgcagggtgatgaggacgagagcgttcgatgacacagctgcgaaggaggctgatattgctgacacattccgtctacatgagctacctccttttgacaagaaatcatttgtgtcttacatcagaaaatacatcaagaatctactactggtgtgtagcagccagagaaggcgtatgatttcgacaagggatgtgctagggtgcaaccaagtatctccttagcaagctgaaggaccatcgcaattatcttgttagatgagtccatgaaggatgatgcgtctgaggtattctgctattacaaggatgctgccactaagccgacattcctctatttctctcatggtcttaatgacatcaagtgctatgcgtgcggggaaattatatacccatgtggctacactatctatgtgactagtattatatgcaaaactatagttggcctggctgaattgaactcaaaagggcttgattgacaacaaattgtcccaagattgcattgcttggtagagctcaatattgttattgat

SEQ ID NO: 146928 - DNA, 374 bp, Zea mays
  Clone ID: MRT4577_65517C.1
gactagttctagatcgcgagcggctgcccttttttttttttttttttttttttttttgtttggttttttttttttttttttttttttttttttttttttggctaaaaaaaggttatttccacacgggacaagggggaaatccaataaaaataaaagcgacatttatttcttgggcataaaatcacaaggcatttccccgcaggaaaaacaattaccggattattccctgcccacttgacaaaaaccccaaccgaaaccaccggaccggggataaaatgtccatggggacccccggcaacttgaaaaggtcggcctcccggttaaaccgctggtttagcatccacttttttaaaggggggaaaaagaatcccctt

SEQ ID NO: 146929 - DNA, 617 bp, Zea mays
  Clone ID: MRT4577_65518C.1
accggcttgcgaggtctgcggcttgcggtctagctccccggagaccttctagcttacctacatcgcgcaggggaccagtgtcatgcacatatgctcggggcggcggctgcggacacgagacggccgggtccgaggctcagcagccctcctccaggagcgcagcggctgttcatgtgtccttggccgcaagccaccacctcattactacgagctacatgaacgagatggggaggtgccactcgcacgacacacgccattggaaaggcagtgacatggccatacgacgccagaaacgttaataagtgacaactggacacagcaccaggtatcacgtactactgcagtaaatacacaaggagaggctggcgcagaggacactcagtagcccatcggacattcgactgacaagagacagcgtgcgttgaacatagtaagggagagagcaagaatggggctatccataacacaaagccagaaccctcaatggaagagaagggtgtcaatgctgacgcagacacacttgcttgcaaacgctgctcacgaacctatcggacatacagacagcctggctaagggtgctgaggtactcattgacgatgaagatgatgactagggca

SEQ ID NO: 146930 - DNA, 928 bp, Zea mays
  Clone ID: MRT4577_65519C.1
ccggccgggccgtgtgcgaccttcgttgcgggccggcgggggaaaaaccagaagcccagaaaacaaaaggagcagcttcgattcgagatcgcggcgccatcgaccatgcagctcaagaatcgccgcgaagccgtgacggcgacagtgctcgtggccgtatcagtcctggcgaccctggcgcgcaccgacggcgccctctgcgacaagtccgacaaggcagccttgcttgccgtgaagtcggcgctgggcaacccaccggcgctctccggctggaactccaccgtggcctgctgctcctgggagggcatctcctgcaacgccaccaccggccgcgtcaccgacctgaccgtcttcgcgctcaacatctcggcgccggtcccggccgccatcgccaacctcaccgcgctgcagagcgtcaacctggcctacaaccagctgtacggcagcatcccggcgttcctgggcccgcgcgcgctgccggacctcaccttcctccgcctcgacggcaaccggctctcgggcgccatcccgcccacggcgaccgtcttcaacctcctcctcgtcggcaaccgcctcacggggccgatcccggccgccttcgccggcgcggcgttcggcgacgtggagctctcggacaaccagctcacgggcgacgcgtcggcgctgttcggcgccgagaagccgctgaacgcgctgtccctgtcgcgcaaccggttcaggttcgacctcggccgcgtggagctgccggaggcgatggacatcctggagatcgaccacaacatggtgtacgggagcatcccggccgccgcggcggagaggaagtggctggcgttcgacgtcagctacaaccagctgtgcgggcccataccgcaggggcggtacacgcaccggttcggggccaagcacttcgctggcctcgagccgaatt

SEQ ID NO: 146931 - DNA, 247 bp, Zea mays
  Clone ID: MRT4577_6551C.1
cagggactgtacttctgatccttcacctatgggtgccttcgccagctgggtgccttccagtctgagcctgttccccccagcaggctcttcagctgctccaatccagctatggttcccaaatgacattgcccctgcctctcactcggacccatctttgctgctgtcgttcttgtccttctcaccactcctgaggaccaagtgtaagcactcccctccatacaggcccctgtgacctctttccacacaa

SEQ ID NO: 146932 - DNA, 213 bp, Zea mays
  Clone ID: MRT4577_65520C.1
acaacttccccgttgaggtgcccaaggaggagagcttcctcaaagcctgactgtaacacccaccatggaccaatatgttttgcacggtttacactggagccaactattatatatatactcccccaaccggctaattcttggagtttttggcgatttaatacccaaagcggcctatttggagggtataaaaaaaacttttgaaaggctttaatt

SEQ ID NO: 146933 - DNA, 382 bp, Zea mays
  Clone ID: MRT4577_65521C.1
aaacctgacatgcttggattgattgaataggcaactccctgactcgctgcagcatactccgtctctcctgctgggagaatcccagtgatgtgctcgacagcgccaagctatgcgactgctccaacgccaataactgcaggagcaccttcagccagagtctgttctgctatcaacactctcaactacaacatgacacttatcactcacgcgacaagcattgctcatgctatagatcttgctccaataatcgcgtccctaaacttgacaacaattaattactatcgtctagaaataccctcaacattcctgagcacacttgttcagtcaataacatagcatcagacagtcatatactctaaaaatgattctctctacgctgaat

SEQ ID NO: 146934 - DNA, 488 bp, Zea mays
  Clone ID: MRT4577_65522C.1
tgcccgcgggacttcacgctcctccgccgcgtcggggccggggacatcggcaccgtctacctgtgccgtctcgagagccagagccaggcccccgaggggtccgcgtgcgagtacgccatgaaggtggtggaccggcgcgcgctcgccaagaaggggaagctggcgcgcgccgcggccgagaagcgcgtcctgcggcggctggaccacccgttcctgcccaccatgttcgcggacttcgacgccggcacggacctgtcgtgcatcgtgatggagttctgccggggcggcgacctccactccctccgccaccgcatgccgggccgccgcttcccgctcgcgtccgcgcggttctacggcgccgaggtgctcctggcgctggagtacctgcacatgatgggcatcgtgtaccgcgacctcaagccagagaacgtgctcatacgcggcgacggccacatcatgctcacggacttcgacctgtcgttggagtc

SEQ ID NO: 146935 - DNA, 566 bp, Zea mays
  Clone ID: MRT4577_65523C.1
aaaaaaaaaaaaaaaaaaaaaaaaaaaaaaaaaaaaaaaaaaaaaaaaaaaaaaaaaaaaaaaaattaaaaaaaaaaaaaaaaaaaaaaaaaaaaaaaaaacccaaaaaaaaaaaaaaaaaaaaaaaaaaggtttgtcccctgccccccaccccccctaggggcaatttttgaaattttccttccccctgggggccgttgggccttccttttaggggccccatttccccctttggggggccgttttacatttcccgggccgggtttttccaccgtggggccgggaaaacccctggggttccccaatttattccctttgaaaaaaatccccttttccccagttgggttattaccaaaagggccccccccgttcccccttcccaacatttgccccccctaattgggaaagggcccccccctttaccggccctttaaccccggggggtggggggtttccccccagggggcccgttacttttgccagccccttaacccccgctcttttggtttttttcctttcttttttcgccaggttggccggttttccccgtaaagttttaattgggg

SEQ ID NO: 146936 - DNA, 589 bp, Zea mays
  Clone ID: MRT4577_65524C.1
cattggtacctcgaggcggtcgcccatgatgctgcgagatggggagatacaaatatgcttctccggcacatcaagggcaggaaggggaacctggctcctctcgtgtggtgcgtccgtacagccacgccctcctgacccagcatcacaacaatctacggtcaaatagcacctaccaagaccccacaggagtatgagacaaaccaccagggtccacactgaagattccctccagcgcccacctgagacgaccatgcagatgaccgcatacctgttggcctccgacccttccttaagagcgtcgccgtctactagatcctattgtatgcatctaaaatggctgaatatgatatcgtatctgcgagcgctgaggcgacgagcgcacaaacatcccagaccagtctgcagcctctatgcacccaactagtcgcatgatcccaacccgtggaaactcgacatatcaacgctggtgaatggctgtgatgacacaggcttaccattgatgacatgattaccaagataaggagtgcctgtggcgctggcctatctacaaggactctaaaagaactgtactcggtatattgatgtcgga

SEQ ID NO: 146937 - DNA, 694 bp, Zea mays
  Clone ID: MRT4577_65525C.1
cgggctgtaaaaaaccctacacctctgttacttatacctgcttgatcactcccctcccattgaccgccaccgccaattgcataccgccctgcgccacctgtgctgagagcgagaagagatggcaggcaaggctgatggtccggctatcgggatcgatctcggcacgacgtactctggcgtgggctgtctggcaccatcgatccgtgtaggagatcatcgtcaacgaccagggtaacgcgctccacaccctcatacgttgccttaaccgactgcgagcgcctgatgggacatgcggacaagatccatgtcgtgatgacaccccatcaacaccgtttttgatgccaagcgtcttattggcaggaggtttacggacgcctgtgtccagagtgatattaagctgtggcccttaaaggtcattccagggcccgatgagaagccaatgatagttgttcagcacaaggtggaggagaaacagcttgcagcaccagagatctactatatggctctcatcaagatgcgtgagatcgctgaagcttaccttggcagtacgatcaagaatgctgatgtcacggtccctgcctcatttaacgactcgcaggggcaggccacaaaggatgctggggtgattgctggactcaatgtgctgcgtatcatcaatgagccaaccgctgctgctattgcctatggtcttgac

SEQ ID NO: 146938 - DNA, 287 bp, Zea mays
  Clone ID: MRT4577_65526C.1
ctggaaacccaattttatttcacggaacgaccggggcaaactgccgttcctaaaaccacgcaggtccaacaaccgaaaaccggggtttagccggaaatttaaatggactttattttaggctttttggggtccttcttgggcacagggactgtaagcaccccgttttccatgggggccgtgatctgctccgttttggcgttttcgggcaggcggaacctgggcaggaaccttccgttgtttcgtttcacgcggggccagggggccggcttttcctcccggtccttggg

SEQ ID NO: 146939 - DNA, 413 bp, Zea mays
  Clone ID: MRT4577_65527C.1
cccacgcgtccgcccacgcgtccgcccacgcgtccgcgctcctgccctctgcctggtggacacgctcgccctagcccccagcgtcgaccgcccctgctcccttctgcagcctcaactccctcacggctgctcccatgacctttcccatccatggccatcacccatctgaagtcgtggagcacgccatggcctccaatgtcgtcagtctccggagcgccgcgtggccgctgctctaccatttcctggtagattggaccggaacagactaacggagcggagttctgctattaatcattataggtacgctagatgattatgcgatatgaagggcatgaaccagactgaaccacaagatggatgatctgacccagtgccaggatgagagatgctcaccgagtggtcctcgttttgac

SEQ ID NO: 146940 - DNA, 326 bp, Zea mays
  unsure (1)..(326): unsure at all n locations
  Clone ID: MRT4577_65528C.1
ccggncncaccgcgaccgggcggngagaggnagaacggccaccagacagcaaccgngaaggggnggcgncaaggcagcgcngaagcggcggcgacgncgaggcncgagcncccgngccgcgccccgagcnaaccnnagagaacanacccgaaagganacgnggagggggggagggggcggcngccacggagcgccccccgcggccggagngcngggnggagannncggagnccgncncacggcncngcagcnncgacgccgccggcagcggnagccgcagcancncgggaaaagccacncagganncnagaccnanacangacaaa

SEQ ID NO: 146941 - DNA, 576 bp, Zea mays
  unsure (1)..(576): unsure at all n locations
  Clone ID: MRT4577_65529C.1
tcgaggccggccgggtcccggagtggagtcgagagtggcaacattgagagcggttgggggcgttggccccagcttcatgaacagtacagccgccctgattgaagctagcttcgagctcgctgaacaagtgaagccatagcgggagcagctacaacgaagtgatcctccatgggcaacaccttcggattccgtggtggcctccgcgccgacgtcgccgacctgatgcaggttcggatccacgtcgttactgacaaaaaactgccagcaacatagaacaatgttctttctgtctttacccctcttgtgtccctacggtgtacgtgcttgttcatacgctgctttcngctcncttgccccccccccccccaagcgtcttccctctttttgctagggaacaaaacaataatgacatttaagttacagtagtgaattccatgtgtcttcccatggcaagagattcgtcttttttttccctgaaaagacaggagattgttcgatctttctcaacaataaactgatgagacgaggacgaggatcctgctggaccaatctgctgtttccagtctgagtgatcga

SEQ ID NO: 146942 - DNA, 332 bp, Zea mays
  Clone ID: MRT4577_6552C.1
ggggggagagccagagtcagaccaaacgatggctccatcctttatttttgacaccccacaagcccaaagcaaacagtaaaaaaaaggggacatccatgcatgccgcaaacgaaacaacccaacaggatcagcagttgcaggggctgcacttgcagctgtcaccgcaactgcagccgggggcggccttgccagaattgcccgccgccttaaactgggccgccttttttgttttaggggcaaccccgaggacaacagggggggggctggcctgagcgcccccgccgttttttttcttcaggtcagggtacattttgccgcaattgcagcttgat

SEQ ID NO: 146943 - DNA, 424 bp, Zea mays
  Clone ID: MRT4577_65530C.1
ccggccgggaatttcatagtaagccctcgaccatccctacaaattaccgctatgcttcctaacatcctactgatccttgtgctactctccgtagtactcccgcggatctctggactgcttcgatgagatacacatgctgcgcgatagtccacgtattccacgccgcggagcttcctgcaggacacccaggtcgcgcgcgaggcaaatcatctccggtcggcgacgctactggtcgtccccgacaaacttgccaagcctctggcgtcgatgcccgccgataaggtgcaggcggaggtggagaaccacgaccttctcagatacttcgaccccatcatgctggaggagatgaagacacgcaccgcccatcctccccacggatggtctccgtaaccgtacaagaaactcggtgtcctcaaattacacc

SEQ ID NO: 146944 - DNA, 409 bp, Zea mays
  unsure (1)..(409): unsure at all n locations
  Clone ID: MRT4577_65531C.1
acgcccgggccagctccgcagcaccggccgcctcagcttctgctgcttccccagcagcgcatcggggacagcccccagtcggcggcgattcgggcggtgacggtgagggcgtccgcggagacgatggcgacggagaagctgggtatcaaggtggagcgcaacccgccagagtcccgcctctccgagctcggcgtccgccagtggcccacgtaagcgagctacccgccctcctccctcctcccgggcgtctcggtctctgttctcgcccgcggtcctacgctgctacactgcgcccgtgccctgacggcgaatccgcgctggtgaatgaatggatgggtccgtccatcaggtggnggtgcgagaagagcaagttcccgtggacctactccgcaaggagacctgctacctg

SEQ ID NO: 146945 - DNA, 772 bp, Zea mays
  Clone ID: MRT4577_65532C.1
gactcctatagggcgattgggtacctcgaggccggccgggagttgctcaggggagatgacgagcccaatggtggccaccccggtccagctccgcagcaccggccgcctcagcttctgctccttccccagcagcgcatcggggacagcccccagtcggcggcgattcggggcggtgacggtgagggcgtccgcggagacgatggcgacggagaagctgggtatcaaggtggaacgcaacccgccagagtcccgcctctccgagctcggcgtccgccagtggcccacgtgggggtgcgagaagagcaagttcccgtggacctactccgccaaggagacctgctacctgctgcaggggaaggtgaaggtgtaccccgacggtcacggcgaggagttcgtggagatcgccgcgggggaccttgtcgtcttccccaagggcatgagctgcacctgggacgtcgccgaggccgtcgacaagcactacaacttcgagtagccgccgccgccgccatgtttggattgcttcctctagcttcctaccatgtgcttgtagacttgctgtgctcttatacacctatgctccattccagagttaaacagcgtaaaataaagctccggattagcggactacacaattcacaccaacgttctgtcaggcgtttttcctgttatgacaagtggaacttgtacatgttagtatgtgattcatgccctcaaggcctcaaactacctcgctgattcttggcgcaaaaaaaaaaaaaaaaaaggggcggcc

SEQ ID NO: 146946 - DNA, 299 bp, Zea mays
  Clone ID: MRT4577_65533C.1
cctggtcaaggcaaactaccgagtgttattgggccctatgctgtacgcgacggacaacgccaccttatcgcactatactcaagtgcctgtactgattggaacagggtgacgggcacgccccgcagacgtaaatggacgtgcgcaacatcatcagcccccccaaggctgtcttccgggagtcctccgcgacctcgccgaatcgctcctcgatgcccgtcatgcagcacgaggactgcgtacagggcatccactacgtgctgaaacatttcacggtgcccgttatgtgcgagcacatggtg

SEQ ID NO: 146947 - DNA, 801 bp, Zea mays
  Clone ID: MRT4577_65534C.1
gccggggaggtgctgctgcactcccacgcctctcccccaccaggccaccaccaagaagaaatctataagacgcggtccctctcaccaagtgcggagagttccaaggaaagaggccatggccaggaggtgctgcggtctgtcgacgcctgtaaacagctagctagaccgcgcgctatggccttgagagcggtcgtgtgtgcacagacgggcatgattttgtgaggggtgttataccagcgagcataataaagagggtcactgactggaaggagattaggagaaggactgcattgcagctctggtgaagtgcgagcaagatcttggagaggttgtggcatgtgggactgagggctgtaaacaaggcctccctccctggcagtgagaaatgttaaaggacggtagcaaggagaaatgttaaggcggagatgggtaagaagggaaattggttcactgcgctcaagaaggccttcacctcaagccccaaggagaagccaacaaatgtgcatcagctggtagcgcagtacccgtctactcacgcgcacggctgggagaagaagcgatggggaggcttcgggcggtcgcggccgcacgcggagccggcgtccccggcggcgggcgcgctgatcaacatcccgctgtaccgcgagccgagcagcatcgagaagatcctcggcgacgcggagatggaccagcagcgccagtactacgccgccaccagggcgcagtaccagatcacgcccgcgaggcccaccaccgccgtcgccggtagtgctgcttctgctgctgccgtgccgctgccgc

SEQ ID NO: 146948 - DNA, 492 bp, Zea mays
  unsure (1)..(492): unsure at all n locations
  Clone ID: MRT4577_65535C.1
gctagtagtacctggtactcgttcctcaacaatggagtagctagtatactggcacctccagtttacggtatttgacagtaaccccacacaaagtactgttcccaaaaggtgaggttactacntgctacagctaatgtactcctgtctcctcaaggcagctccatacagcaaaagcaggttagctgtctaggaatacatctccacgcagcaacttggatcagcgttcctttcgctgctgtggcagtgtttgccacacaaaagggccgtacctgtatatacacaaaacacattgtggtcgtatctgggaagaccaagttcggcctcagggagacgatccttcactgggaacgaccgtatgcgatcctcctgcggagccgctcctgtctgtgaacagactcccattggcgagctttcaagaaggcataatagcttaagctggttgcctgagggactaatggactctgaatgctgagctgcctgaggaaacttctt

SEQ ID NO: 146949 - DNA, 329 bp, Zea mays
  Clone ID: MRT4577_65536C.1
attgtttttcttttttttttttttttttatttttttttttttttttttcgctccccaatcccatacggcgtgatggtgggagaacatacacggtttacacatacattgttacatagcaatcgaaatttaagaacattttgtatttgacgaggggcctggctgctttctcagataaatatgcgggacacaacaacttactcagaacgtttactgtacacaaaccaacgctttattacttgttcacaaaaaataaccaggggcctggttggcgaggataaaacacaaacagggcgcgcgtgttttcgggagctcaaaacattttggatttg

SEQ ID NO: 146950 - DNA, 733 bp, Zea mays
  Clone ID: MRT4577_65537C.1
ggccaggaggtgctgcggtctgtcgacgcctgtaaacagctagctagaccgcgcgctatggccttgagagcggtcgtgtgtgcacagacgggcatgattttgtgaggggtgttataccagcgagcataataaagagggtcactgactggaaggagattaggagaaggactgcattgcagctctggtgaagtgcgagcaagatcttggagaggttgtggcatgtgggactgagggctgtaaacaaggtcattccaactttcttgaggaggtaaaacatctcaagtttaagtaaattttatataataaaatactgacgctttgtatatcaaataagtattgttacattatttattattatatttttatagtataactatttgatgtcataaatctatatagttatctctataatttttaactaaacgtaagatgcttgaacttttaaaaaaatggaatgatgaacgaatgatgcaaactttctcactcgtcccgttgttcatggaattacactacaggcctccctccctggcagtgagaaatgttaaaggacggtagcaaggagaaatgttaaggcggagatgggtaagaagggaaattggttcactgcgctcaagaaggccttcacctcaagccccaaggagaagccaacaaatgtgcatcagctggtagcgcagtacccgtctactcacgcgcacggctgggagaagaagcgatggggaggcttcgggcggtc

SEQ ID NO: 146951 - DNA, 291 bp, Zea mays
  Clone ID: MRT4577_65538C.1
cctaatgccagacatcatagctgcagagcctttgctcacagcactgtgctcaggggcttctccttgctagacaccaacctctgctgtctttttgtgctgaggaaattgtgtccttgtgcccatctctctgtctccactgctcatcccttgatagtcatgctctgagctcacatcacgattcacacacacttggtgcttcatgttgtatttggtttccaggctcctgcctccctacatctaacactgaggctgcctgtgaaagggtgtctctgtcattttaattcttggaat

SEQ ID NO: 146952 - DNA, 354 bp, Zea mays
  Clone ID: MRT4577_65539C.1
ctacagcgatgcgatacaaccaccactgaactcagcaccgataaagagcactccgactacctagaccaagagcaccgctcgatcgccaccgcgctcacttaattaagcaccgggagaggggcgacctaaccgacgaaaccgtacagggggcgggggtggagctagacagcgtaaacaacgagggtgggggcctcagtgctgaggagggcgacctcggtgaaggtgacggcagccttgatgacggtctccaggaagaacttgaacacgccccgggtttactttttaaaggaacaagataagcacttggcggggctccttcttaataaacccgggaatggccgtgtggggaacccc

SEQ ID NO: 146953 - DNA, 581 bp, Zea mays
  Clone ID: MRT4577_6553C.1
aaaaaaaaaaccctggacataactgcatcgttgctggggcccaacccacccggggaaataacataggggcaagccaactttcttattccttaggggacctttactttactggacgaccccaaattccggaaaaaagtaaagggggggcccattgggaaaaaaccctgcctttgccataccccagggttttcgggacgctgggaagttggccgcccacctccaccacttaaggcccataaaaatcggggcccggccagggggggccggggccaaaaacagttcgggttttgcccgcccccttttggaacggggggcccgggcgttcgtaaaagtcatcgcccccgaaactcgttgaaaaaagggggggggacccctttcgtttttttgccgaatgggagggctcgttgccccccccacctccgccgttgtttctccttgaattggggggttggcggagaaacccctcgagggttgaaagcaaggggcccccgaactttttgacctttgttttgccgaggccgttaatatccaaaagctttttttttgttctgggacctgggatactaatttccttaaacggg

SEQ ID NO: 146954 - DNA, 261 bp, Zea mays
  Clone ID: MRT4577_65540C.1
aaataactctatcttaccactactttcttttttttttttttactttttaattcattatatattattcatgggggccacttaaaaaggggtgttaactctccttttccaaacaaaaacccaataattaacttgcactctttgtgctaattagaagcttccgcccccatgggaattaccactatttttaactttattttattaattcccaagcagcaaacgcgccataccttaattaatttaatccctcaaattggacactac

SEQ ID NO: 146955 - DNA, 243 bp, Zea mays
  Clone ID: MRT4577_65541C.1
ggaaggaaaaatctgcaccccgtggccctttcgtgtaataataacttggatgcaaaccgccaaagaaagaaaaatggggacttgagcagaaatttcatgttcttttttcctggagcgagccttttccccccacgtggggcttaacaacgcttccgttgggtgagaccttttcttgcattttactacccattaaccggccgcggcagaaaagaagaggcttttatggagccccaccctgaaacc

SEQ ID NO: 146956 - DNA, 526 bp, Zea mays
  Clone ID: MRT4577_65542C.1
ggtgggtgtcggcgatattcgacagctgctgcgcgtggtggagcagcaggtgcgcgtagtgcgcgtccccggcgcggcggaaacacggcggacgcggcggccatggcggcggcggtctcggcggcgacctcggagcccgggtgctccgcgtccaccttgtacgcgcggcgcgacgtggtcatgtcctcgggccgctgccagcagtagtggtccgagtcgccgtccccgacctgcgcccacagctcggcgggcgccgtgtgcgccttcacgaagtagtcggtgccccacttgatggcctgcagcgcgtgcgccagctcccccgcgccggccacgccgccgccgtactccaggacgccccaggacagcagcgtgaccgtgaacgccatgggcaggccgaacttcacgtggtctccggcgtcgtagtacccgcccaccaggtccaccccttgctccagcccgtccgtcagcctccgatggccccgtcaccggacccgctggttgtacggcagccggcccgaccgctgcg

SEQ ID NO: 146957 - DNA, 311 bp, Zea mays
  Clone ID: MRT4577_65543C.1
accttgtacattagttcaaacacgccggccgcagtcccgttccggctgactgtgccaagaacatttctcttgtcgcacgggcacagtaagtcaacgctctacacgcctagacgccttgtgcggactgcatagttgcagcccatatggccagccgccggcctgaaagctgtcatcagatcagtaccatgtccctctatctgtccgagccagctggtgaggagggaagcaacaccgacggtaggatggaggtaggcgagtgcaatagcatcgactacggcgccttcagatactgtgacgcccgctactccttc

SEQ ID NO: 146958 - DNA, 183 bp, Zea mays
  Clone ID: MRT4577_65544C.1
acaagtttgtggccaatgaaccaaccactaagggtggcacctactatcctcttactgtacagaacgctctgcgagctcaggacatgcttcggagtgcaaactgccttggctatatctacgttgacagcggaggtgctaatactacccaggcggctgacgttttacctgaacgtgataattttg

SEQ ID NO: 146959 - DNA, 520 bp, Zea mays
  Clone ID: MRT4577_65545C.1
gaccacgcgtccgaggatcctcttggaggaggagattacagaggcatgcacacctttgtttttctccctcctctcgtcttcctcctaaactcgactcattcgctcgacaccgcatggcctaaccagttaaacccccttcctcctgcaccggtgaattgaacgaaccaaaccgtcctgactggtccagcgaggcgaacatggcagcctgccgcggcgccttactcgccgacgtcattgcgatcaacgtcgtgggttccgcttccgcggacaagtacaagccgacggagtccatactggtgaactgcgggtcggcaaaggagggcaaggacgtcgacgggaggaaatgggcggccgaccaagacaagagctggctcgtcgacgccgggaagtcatccatcatgggcgacgccgacgtccaggacccgtcgattgcgtcggccgtgccgtacatgacggcccgggtgttcaccaaggaggccatgtacaacttcttcgttggcgacgcggacaggcactgggt

SEQ ID NO: 146960 - DNA, 362 bp, Zea mays
  unsure (1)..(362): unsure at all n locations
  Clone ID: MRT4577_65546C.1
aacaagaaacaattttttttttggggggggggacgagtttaatacaaacccgaaacacgaaaaacacaaacagggcgggggggaaaattacttacaccgtacacgtaccaaaaggggggccaaggacaagggagctacaaaaacacagggagaaaaaaatttttttaccaccacaccacgcacgcacaaattactgggttacaaatcggcaagtcttttatttatctaccatctttaagtccctttgnttttgccttgatccgggggtcgaaacccatcgtcgtacgggttgcggttgagggganaagttgcacacacaccccccccccccccttttttggacgggcaaaaaataaccgggc

SEQ ID NO: 146961 - DNA, 185 bp, Zea mays
  Clone ID: MRT4577_65547C.1
ccgttcaacacagaatcctccaaccatgttcaaagccacccgcgccctgtccatgcagccaactcgcatgatggccatgcagccatcgcgaatgatggcaatgcagcccacgcggttgatggccatgcgccagagcccccagctcttcgtgaagggcagaccatggccctgcgcagccccgtccc

SEQ ID NO: 146962 - DNA, 525 bp, Zea mays
  Clone ID: MRT4577_65548C.1
cgttaaagtgtttttccattaccatttaaacctgatgggatttgggaaaaaccagactttttttttagaaactggacaattgttcttttagcacgtaaacaaggtttacgggccgcacccctgcccgagaaaatgctagaaaaaacgtgggcaaaacatttgccatgggggggaaggatatcacaagcccgggaaagaggctcaaaacccgcggggagaacctagggcgttttcggggacggtataagaatatcccgcctaaaccattgtttttcaatcaagctcctgaaaagttttcctgcccgaacccaggtgcttgatagtcacacatggcttggaaaggattcacccaaaccaacacaaggcgggttggctgggccctttgtggacaccctaaaaagggggtcataccgggattttacaagagaggggggccctttgaaccctttaacccccaaaaaaaagagaaataccgaggcgttgggttacccgggaaatcccgaacgggacctgggggggcaacaa

SEQ ID NO: 146963 - DNA, 501 bp, Zea mays
  Clone ID: MRT4577_65549C.1
tactccaccgaattcggctcgagcaccactctactgacgcccgacgactagtgtaacattttacttcagctcatgggtaaggagacagactcacattctcattgtggtcattggccatgtcgactctggcaagtcgaccaccactggccacctgatctacaagcttggaggtattgacaagcgagcgattgagcggttcgagaaagaggctgccgagatgaacaagcggtcattcaagtatgcgtgggtgcttgacaagctcaaggctgagcgtgagagcggtattacaattgatattgccctgtggaagttcgagaccaccaagcactactgcactgttattgatgccccgggacaccgagacttcttcaaaaatatgatgcactggcacttccccagctgggtgggctggtgttatgattgactcaaccactcgggggtttgagggtggtatctccaaggatggccagacccgtgagcatgctctcgttggttttacac

SEQ ID NO: 146964 - DNA, 238 bp, Zea mays
  Clone ID: MRT4577_6554C.1
attaacttaaattccgagaggttctttttttttttttaacacacatttccaactcaatttttcatacataaacatttattttacaaacaacctcaacatcaaaaacatcccaacctcacatttaaacaaactaaccacacactctgatgaacaatcacatataaacgctacaaaggcatgcccctcccaataactcccacccccgagaaaaacttaatcaactcatactgctccatcc

SEQ ID NO: 146965 - DNA, 756 bp, Zea mays
  unsure (1)..(756): unsure at all n locations
  Clone ID: MRT4577_65550C.1
ccggccgggactcgcagtcgcactagtgctaggcgcatccggcatccccatcccttgcctccgaatcggatcgccgcccccgctgccgctgccgctgccgccgagcggaagcagccatcaccccaaaccctagccagccatccaactatggagccgcccgccgccgccgccgccgactcctcgcccgatccgacgccgcaggaccagtttcctgccccgtccccttctccctccgcctccccggccaagcgctccgcctggaagcacccctcccccaacggccccgccgtcatggatgccaaccactggcccgcgctctccgacgccgccaagggcatcaagctcccagactcctcgtcttcctcgcctgcgcccgtcgccgccccatcggccgttgccaattcctccagttcgcaaaagcacggcgcccatcacgtccgccacaagtccgccaggcgtggcggcggcggggagcactctccacgagaccatcctgaccggaccacagccacgggttgggaccacgccggcggcggtggggggtaggggtgcccagaggaaccataataacggaggcgcaggagaggcaacgccgccgctgcctctgccggcggaccttctcccatgggtgccggtggcaacggnggaaggggaggcttttgtgccaggcgaaaaagggcctacgagccgcccttctatcgtggccctccaccaccagggggagggccactacatgcaaggggcccacaacacaac

SEQ ID NO: 146966 - DNA, 209 bp, Zea mays
  unsure (1)..(209): unsure at all n locations
  Clone ID: MRT4577_65551C.1
gtgcgttcgaggaagggagttaattggatgtacgagataaaggtttaggttaagtagatgttgatgcaagttggtgaaatagttgttaatgctatgatagtaggctagttgtataagagtactgaagtgatgtgagttgtgaacagaataatgggggcgtgnggaggttgnagntanaatgcaggaatttagtaaagagatgagaaagg

SEQ ID NO: 146967 - DNA, 395 bp, Zea mays
  unsure (1)..(395): unsure at all n locations
  Clone ID: MRT4577_65552C.1
ttcgaggcggncgacacacactnctagtagcgagagcaacggacgtaagaagtcntctnnttcnnttcgctctnntttnncgccttcgtttgctcctttcttctctctcttcttttcccctcttttttctgttgcttgtcctcntttccttcctccccctgctgctgtgtcttcgcctcctccttgggcgtcctcggttccttgttgccgcccgtctttgctgtgttgtgcccggtttccctgcgtcttgggtcgttgcttttgttgggcgccctctctgngctctcctggcggtgggtcccgccgttctccttctccctcgtctcgttctccgtgcctttttggctgcgctgtccgctgctgctctgtgnccgcgtgtgggtctgtttcgttct

SEQ ID NO: 146968 - DNA, 204 bp, Zea mays
  Clone ID: MRT4577_65553C.1
aatttcaaagaaggcatcaagcagaccggatttcatgatcatagattcatttccggtgcaatgatttgcaacgtaaaaataaaccaccgagagcttctgtacgacaacgcagacaatgaaataatgcacatagccaacatcaatagaaaaagacaaattaaagttaaaagaggacatgttgtctgtagccgcatcatacatcta

SEQ ID NO: 146969 - DNA, 298 bp, Zea mays
  unsure (1)..(298): unsure at all n locations
  Clone ID: MRT4577_65554C.1
ttacctatccatccaggtgtacacatccgggggttagccatacaacagaggactttccacccactattttctggcgctcactgattttgctgtcctgctctacaattaggccttctattacatgtgtcttcttttcttatacatttttcaccctacctacattaangttttcaggcttttttcccatttcatcttattccttacttgcttcttttgtttttatttttcctcttatctttttttttgattttattttagattttctttttattttttggtttttttttctttttttttt

SEQ ID NO: 146970 - DNA, 365 bp, Zea mays
  Clone ID: MRT4577_65555C.1
aattcggcacgagggtctcctacatcgatgttgcctcttccgcagcagttgtacaggcttctgtgccagtcgtgatcctactaatacccatgcctgccctcacctgattgatgtggcggacggacaagtccgtcgtgactctacagacgaggactgtcggcgccaatccgaagggggccaccggtagcgcctaacagccgtgttactttgacatgatcaaggatggtataatggaacgaaaggagaggaccgtgtgcgactcgctcgcgaccggcgtgtttgtctaggacaagcgcgccgcgtctgtgccgccaactacaataagatgctgtgcatccagctacgggggtgcataaccaaggaca

SEQ ID NO: 146971 - DNA, 480 bp, Zea mays
  Clone ID: MRT4577_65556C.1
aatactcgtgacagtgaaaatgactctcagcgaacttcaactttctcctgaattacacacagccgcactgatttgatcaacctgcaacctctgattgtatcactcagttgatcagctgaaattacaaaacacttacatgataggggggtggaatacaatgatacgtgcagtgttctcggcgtgcaaagttctcaaatgatttggtgatgcaaaccactgaacttgggaatgtgcaatctgaactgtttctccgcaaggaactcacggtgtttcacattcgaaaagggatgggccttacgacgccgagtgagccacaatggcgatcaatgactcatgtcatgtcctgaagattgttcatgactgtgcgaatgcaagccctactactaaacaagccttgacactcccactcttgatatactgcggaatcttatctgaactgccggcttatgcacgatgagtgggatcaagatgtttagcaag

SEQ ID NO: 146972 - DNA, 744 bp, Zea mays
  Clone ID: MRT4577_65557C.1
gtctttaggtgcaaaatttgggacttgtcaagaggtccagaaacttcgtctttacaaaaacaggttagtctaagatccattgtctgccagttaggtggtgtcttcactgaacctttggttattatggaataaaaaactgagatgtagaactagcaattattttagtctcctctttttgttggttttatcaaacttagctgtctacttgaacaaaactcatgccttaattttttttatattttgattttactagaatcaggtcgccttcttggaatttgattgcgttagattgtttgttatactaatttttttgaggcaatgtgtgctatactaatgtaatgggccttggtccatcccatgtatctctctccatatacaagtacctgccctaatcagggttaagggtttcactatcagactatcactatgtgcatgtcttagctttctaacctgaatacctgatgtcccatgtcaatttttgtgttaagatattatcaatttggcatccagagatgatcatattaggagtaatttgttgctagttctgttcattctgctgcatgcttgtttcttttgtagtgatgattcccttctgaagaataattgatgttatagctccctgcaattaacttctttcacttgtttgtaggcgtctagtgattcaaacctctcagtcaataggtgatgccccatatggggaccatttcactgtagaggcgagtaatccacaatgctgtctataat

SEQ ID NO: 146973 - DNA, 1186 bp, Zea mays
  Clone ID: MRT4577_65558C.1
cccagcgtccgcccttgcagtagtacgccatctgcgtgcggtcgtgtggaactgtagtgctggacatcctcgccttccagccttctcgaaaatcgaaaccctagaccgcgcgccccctcgccctccggccttccacgtccgatccgatccaaaatgcataagctaggcagaggaagccgggacaaggtgcaacagttcatggcaattaccggcgcaagtgagaaagctgcccttcaggctcttaaagctagtgattggcacttggaaggagcttttgatgttttctacagccagccacaaattgctgttgctaatactcgacatctggaagagctctacaacagatataaagaaccagatgctgatatgataatggtggaaggcatatcacagatctgcaatgatttacaggtggatcctcaggatattgttatgcttgtcatatcgtggcatatgaaagcttccactatgtgtgaattcactcgccaggagttcattggtggactgcagtcaataggagtggattcaatagagaagcttcaggcgaagttaccttcattgcgagctgagcttaaagatgatcagaagttccatgaaatatacaactttgcatttgcctgggcaagggagaagggccagaaatctctcgcattggagactgctattggcatgtggcagttgctatttgctgaaaggagctggcctctcattgactactggtgccaatttctacaggtaaggcataataaagcaatctccagggatacatgggcacagttattggagtttgttaagacaattgatcctcagctaaccaactatgacgaagaaggtgcttggccctacctaatcgatgaatttgtggactacttgaaagagaacggtcttgcctagcatagaaggtgtacggaattgggctgtaggggggagaatttgtcacccacaaggcccccatcattgtataacttaatggtcggatgcttgtattcattgcactaccaatagctaatgcggctcgtgcgtctggggatggagtttatcctctatatagacaaaacttgttgaatgatgtgggtgtaaaacgaaggctagaatggaagtcaagccctggttattgccattttgaattccccctcacgtgcctcgcctacgtcattgtgactttgcaaaaaaaaaataaaagggc

SEQ ID NO: 146974 - DNA, 709 bp, Zea mays
  Clone ID: MRT4577_65559C.1
gtctatccgtgacatgtgtcgcctccgcgtctcgctcctctacaaggcgtcggcgcccctccacctcacgccctccgaggcgaccacgctcggccgctccgtgctccgtctctccaacactgacttggaggtatgtgacacatccgacgagctactgcaccaggtggatgcctgattcgagggtaggccgcgcgttgcgtcgcggaggtcgccgagctggtgctgctgcaatagggcaacgcggaagcggctcctcgagggcgtggcgatgaaggtggcggagatggtcaaggaggtgaagaagtccaggaaggggaggagcaatatgggaggttgctaagaacaggagtctcggcaagtggcacgaggacgtaatgtagttgatgttggggcacacaaggatggaggagacactcatcttccttgacatacagagggcatctcttccagccgtttctgcaaagaggtcatcttgactgatcgcagcgatgaagttctggaagcaaggttcagttgtttaggaattcattcactgatacctcttattattcagttgaagcgccacatatattggtagataaatgctactgatacattcaagtaagtgatgaaccagtccattcatctgagctaataagtgcagtaatcagtacactgtagagagcataaacctacccaactattatggtagtggtgggctatattatat

SEQ ID NO: 146975 - DNA, 777 bp, Zea mays
  unsure (1)..(777): unsure at all n locations
  Clone ID: MRT4577_6555C.1
cattgggtacctcgnagccggccgggctcgtaacttttgtgccccagttcgtttatcctctcctctctctttctctgtcttgctgcggcgacacctccgcttccgccggccgagtccggagcggagccgaagcaacaaccgccggggaggcgagggattgattcggagatggcgtcaactagctctataggcgacgtgggagcctcaggtaaaaaaaatggaaagggagatgacaagttagttggtgcgctccttgtgggatttgcgcgtccaattccaccttgagtgcagggatcttcctctctgtaatttgtaacatgtatgtgtgtgctgggtatcgcagtcctgtacggctcctgataagattactgttcgttacttgctttcccttgtacagtggctgcattaggattagataatgcatatggtcaaaccttgccattagattgttaacagcgtacctacagtttgtcctgccatggatgtgaaagtactccttttcatgcttcaaaaaaaaaaaaaaaaagcggccgccgctccgggacaaagaggattgttgataggacaagtctgcagttttacctcttcagatacgatgactaatttatgcaaggcgcttaattaggatgagataacagcctgaaatgcataaacaggctcctgggtttgtgggatgcattgcaagatggttatgttggaacatgcagttcattttttgttttgtccctcgagaacatgtttgtaagggttctgaccttttagcacttagtcctgtta

SEQ ID NO: 146976 - DNA, 803 bp, Zea mays
  unsure (1)..(803): unsure at all n locations
  Clone ID: MRT4577_65560C.1
gaatcctcgccttccagccttctcgaaaatcgaaaccctagaccgcgcgccccctcgccctccggccttccacgtccgatccgatccaaaatgcataagctaggcagaggaagccgggacaaggtgcaacagttcatggcaattaccggcgcaagtgagaaagctgcccttcaggctcttaaagctagtgattggcacttggaaggagcttttgatgttttctacagccagccacaaattgctgttgctaatactcgacatctggaagagctctacaacagatataaagatgctgatatgataatggtggaaggcatatcgcagatctgcaatgatttacaggcccgcacattcatttattttggttggctatcttgtcttcatctatgtgtcctgatataagattctgatacgncaaatcatgtgtgtttccctttngtcaggtggatcctcaggatattgttatgcttgtcatatcgtggcatatgaaagcttccactatgtgtgaattcacttcgccaggagttcattgggtggactgncagtcaaataggagtggattcaatagagaagctttcaggcgaagttaccttcattgcgagctgagcttttaagatgatcacaagttccatgaaatatacaactttgcatttgcctggcncaaggggagaagggccagaaatctntcggcattgganactgctatggggnacatgtggcagttgctaatttgtttgaaaggagctggcctcttcattgactactggtgccatttttctacaggtaaggcataaataagcatc

SEQ ID NO: 146977 - DNA, 2621 bp, Zea mays
  Clone ID: MRT4577_65561C.1
atttttctggttttgatatggcacaatttctgtgggtttctcctttgattcataccactgtgtacttacgctgcgcgcgcgtgacttttaacggatgcgtgttcgttgtgcttgcagcataagctaggcagaggaagccgggacaaggtgcaacagttcatggcaattaccggcgcaagtgagaaagctgcccttcaggctcttaaagctagtgattggcacttggaaggagcttttgatgttttctacagccagccacaaattgctgttgctaatactcgacatctggaagagctctacaacagatataaaggtggaatattttactctctgttgcgccaatcatctttttatgccttgtctctgattttttttttccaattttacctgcgccatcatgttgtgtcttgattgctcagaaccagatgctgatatgataatggtggaaggcatatcacagatctgcaatgatttacaggtcattttttgggattttttttctttgaatgtatgttgttacactaaagtatcagcctgcagtcacttgtaatggataggtatatcaggcatcaggctcgaaatttgtgaactgtgattgtttcctttgttttgtgttttcttcatagtattcttcaatggaattcgtggaactattcaattttttcctatctacatttgctcttagtctgtgaagtgtagtaaattatagatttagaataccagcaacagacaacctgtctaccaccatggcgcgaaagggcctctagccgagttggttaggtgtgttctgagtagcacttcttagatcctgagtttgaatctaagtgggagcgaatttcagactaaggttaaaaaaggtcgctcgctggttcccctggttgtgtgcacacgagatgtatcgacctatgggggtggatcctcgtgtaggggctaggagggctcaaagtacgagtaaagatctggcgtatagggggtggatcctcttgttgcacgggggacttgcttttcgtgacctttcttagtcggggctccgattgagcttcttcttaatataaaaccttgggggcggtctttcccctaccggacgagtttttttgtctaccaccatggctttgggggttaagtatggctgtacttactatgtagactggcatgattgctaatgctagcgaaagggcctctagccgagttggttaggtggtttgagtagcactcctcaggtcctgggttcgacttcccgtgggagagaattttaggttgtggttaaaaaaatctcctcgtctgtctcacgccaaagcacagaaggcttagccccggtcgcggtcgttctcacatgggcttcgatgctgctgtgtatgggtagggcaggggttcgagggttttctcgacctgtgtgagaaggtcttattcttaatacaatactcgggggctgtcttaacccctgtaggtcaagttttttttaatgattgctaatgctaatttcagcatttattgcttcttattatttttggccccacaatagatactacagatgctgcatgaattttctttcccatgatcaggcccgcacatcatttattttggttggctatcttgtcttcatctatgtgtcctgatataagattctgatacgcaaatcatgtgtgtttccctttgtcaggtggatcctcaggatattgttatgcttgtcatatcgtggcatatgaaagcttccactatgtgtgaattcactcgccaggagttcattggtggactgcagtcaatagggtgagactgatctatgcgatttttataatcacttgtgctacaactcgagattctgaagtgtaaatagattgagtagtttgaaaagatccgactcattttcagagtggattcaatagagaagcttcaggcgaagttaccttcattgcgagctgagcttaaagatgatcgtaagttctcttttttcagttcgaactgctgctagcgtagcacacgtgtcatttgaatacaaatggttgcataagcagcttgttcagctaagggatgtaccagtaatggatggtttcatctgcctgtcacatacatgttcacttcatgcagagaagttccatgaaatatacaactttgcatttgcctgggcaagggagaagggccagaaatctctcgcattggagactgctattggcatgtggcagttgctatttgctgaaaggagctggcctctcattgactactggtgccaatttctacaggtaaggcataataaagcaatctccagggatacatgggcacagttattggagtttgttaagacaattgatcctcagctaaccaactatgacgaagaaggtgcttggccctacctaatcgatgaatttgtggactacttgaaagagaacggtcttgcctagcatagaaggtgtacggaattgggctgtaggggggagaatttgtcacccacaaggccaccatcattgtataacttaatggtcggatgcttgtattcattgcactaccaatagctaatgcggctcgtgcgtctggggatggagtttatcctctatatagacaaaacttgttgaatgatgtgggtgtaaaacgaaggctagaatggaagtcaagccctggttatcgcc

SEQ ID NO: 146978 - DNA, 183 bp, Zea mays
  Clone ID: MRT4577_65562C.1
cacacgcgtccgcccactcgacctttaatgtgacagtatcatcagataacgccagagcacagtgtctttttgaacgggcacgagcctgaaaacattaccaacgctattgtccctgagaaagatcttaccctcatcttatgcacaacagatcagcagctaaatgtaatcacacaggttcaataa

SEQ ID NO: 146979 - DNA, 709 bp, Zea mays
  Clone ID: MRT4577_65563C.1
caaaacccttggatcaaccccatttcaacttgactatgaaaacggagtgataaaagaatgtcaacaacagccttacagttacaagtggtggatttacagcaaatttcctatccagacatcaacttatcttccagtcttcctatgagataatatatctttgaagaccctcatttcaccatctgaatacgaaggttttctcccagtaaccaacttcattatctctttcccattcctatcctttgagatagccatgaggcctttcaacagttggttaatagtatcgacactcggaaaccaatttttctccatgctatccttgcacaacctgaatgccaaatcaaagtcccttctctcacagaggtaatggaccattgtctggtaaaccttactgtttggcttgcatcccctcccgtgcatcgcgccaaagaccgtcttggccatctcatgctcacccatcatgaagaaacccttgataattagattgtatgtgatctcatctggtttgatccccgccacatacattttccgtgccaactcatttgcctgccacccccttcccctgttaaccaggaactggatcctcacattgtaggtagcaagtgtcggcacacaacccctcagcctcatgagattccacaaaccatccccaacctcgcgtcggccacacttatacacaccacccatgagcgtcgtgtacgcggacgctggg

SEQ ID NO: 146980 - DNA, 283 bp, Zea mays
  Clone ID: MRT4577_65564C.1
ttattggtggagggaatcgttttttttagaaaaaaagcccccccggggggtccgggggggccaaaaatagaatgcgaacagcatcagcaatcctgaaaaaaaaatacaacagtgcagtcaggggggggtgtgcccacaagacaaaaaaggaaccgggcatttggcaggatttaattcaatattggccacgggcgggcgggagaacacaaacactcaccaggggggggggggagcccttttacaggccctgaaaaaaaagccaccccgggggggtaagaagggg

SEQ ID NO: 146981 - DNA, 870 bp, Zea mays
  unsure (1)..(870): unsure at all n locations
  Clone ID: MRT4577_65565C.1
cggccgctcgaggcggcgggcaggaaacctagcgccctttctccttcccctccatcccgacgagccgccacacccctccctccctcatcctctcctcacctgcagccgccggccttgtctctccactcgcctcctctcctctaccacgtcgtcatcgatccaccgtcggccttctcctctgcttacctcctcctgttctcttccatgtcgccgtcgatccagatcggccgtatcgtcatgggggagcagcgccggcagggtcttcgcggtgcggatggggggtaggatgtgacaacaaggggaaggaggaggccggtgaggaaggcaagcaatagcgggtggggctaaggggcagggtgaggcctcgcgcacctgctggcggccgacggattgacttcccgcgccaccacgtcgtcgcctcctctgcgccatgaggtgccacctctgcctccaccccccaccgggaaaggagctcgaggtgaacaggcagtgtgggaaggcgagaggaagcatgagctcatctctcctccaatggatgtctcgtgcatctggagtacaaggagaacaacacgtgcctgttggaggtggctcgagcgatgcaggccagtggcgaactagatctgacatagaagaccacattcctcagggatcccaaaatatattagacaatatggtagtccaatgctgttttgaagtatatattggcactatgctgaaaaaggacatgacaggaagtgaagacggccagtcatcgcgccatattcccgtgtgctccattcatattactatatgcttanaacgtcgtgctctccttatctaccatcatgtgggtttgctatcnaactctcgaaaaggcaaaacactttactc

SEQ ID NO: 146982 - DNA, 236 bp, Zea mays
  Clone ID: MRT4577_65566C.1
aggagaaatttctcccaaaagcgaaggacaacaggcctaatgcacatggatcttcacgggaaaccccgcaagaaagccaagcccggaacagcggttgcacaaggccctagtgcaaaagcctggggaacaaagcggggctcagaaaacggggagcacaggaacacaggtaaacctaagaggggagcccacaagcatgcgaaatactcagaaaaatacttaacgggaacgaacccaaa

SEQ ID NO: 146983 - DNA, 442 bp, Zea mays
  Clone ID: MRT4577_65567C.1
aacgctgctccaagcagcggcttcaccaccgaccggcagcaatggcgaggacgaccaacgggtgggcacgagggttgctggcgttcgcggcggtggcagtcgcggtgtcagcggggcggcggtacagttgggacgtggaggcggcggtcgcggtgttcaggcgcgggaggggcgcgctggggccctgggcggcacccgcttacgtcgcggcccacgcgctcacgctcgcgctatgcccaccctacgccatcttcttcgagggcgccgctgcgctcttcttcgggttcctccctggcgttgtttgcgtcttctgcgccaaaatccttggcgcgtcgctctccttctggatcggcagggcaattttcaaatattttacttcagcaatggaatggttacaaagaaataagtacttccatgttgtggttaaaggtgttgagaagga

SEQ ID NO: 146984 - DNA, 259 bp, Zea mays
  unsure (1)..(259): unsure at all n locations
  Clone ID: MRT4577_65568C.1
catgacgncgagggcgcgcgcgacgcaagcgcgagctccggatccagaaagagctttgaccttgaagaattacctcaacctggttgtggaacctttgtgttcgtgtttgccatctaaagacacaaggctcagatgtcgctataaagagaatcaacgctcgattctttgctgggaacgcgtctgagcaagatcggatcatgactgatttcaggaacgaggcacacaatcttgcgtgtctgcaccacccaaacgtagtagc

SEQ ID NO: 146985 - DNA, 660 bp, Zea mays
  unsure (1)..(660): unsure at all n locations
  Clone ID: MRT4577_65569C.1
ccgctcgagcgccggccggtatccaaaccctanccccatcccaacctcaccgcccccaccgacgccatgcagtccctggcgctccatcccccgctctccccgccgccgcccccacccccgcctccggccgccgcctcgccacgcgcgtccgcgccgccgccgtctccgacgagcccaagctcaataagtacagcgcgcgcatcacggagcccaagtcgcagggggcgtcgcaggccgtgctctacggagacggcctcaccgatgccgaccttcacaagccgcaggtcggggtctcctccgactggtacgaggggaacacctgcaacatgcacctgctccagatcgccgaggccgtgcgcgacggaatccgcgacgccggcatggtcgccttccgcttcaacaccgtcggggtcagagacgccatctgcatgggtaccaggggcatgagctactctctccagtcgcgcgacctcatcgccgacagcatagaaaccgacatgtgggcgtatcattaccacgccaatatctctgttcctgggggcgattggaacatgacaggtgcaataatggcaatgggacgggtacatcgaccacgtatccttgcttatggtggaagcattaaagctgatgactttgatgtcaattcatatgacatagcat

SEQ ID NO: 146986 - DNA, 1179 bp, Zea mays
  Clone ID: MRT4577_6556C.1
ctcgaggccggccggggctttctcgccgcctctgttccttcgctagtcgacaggccccgcttccgctctcctcttccaccggccaccgccgcgcgccgagaagatggggaagcggtggatcccgctggaggccaacccggacgtcatgaaccagttcatatggggtctgggagtctccgagagggctgtgcagttctgcgacgtctacggcctggacgacgagctgatcgccttggtgccccatcccgttctcgcagtcctcttcctctacccgttcacctccctggacgaggagaataaagaagaatcaagtgtttctgccaaatcgaccgcagggggcaaggatttgagcaagaaggtatactttacaaagcagactgttggtaatgcttgtggaacagttggtgttattcatgcaataggaaatgcaacatctcaaatcaagctagttgaggggtcctattttgagaagttctataagcaaacggctgatatggatccagctcagcgtgctgcctttctcgaggaagatgatgagatggaagatgcacattctgttgctgcatctgctggtgacactgatgctaatgttgatgttaatgaacattttgtatgtttctcctgtgttgatggtgaactttatgagcttgatggacgaaaatcacaacccacatcccatggcccttcatcacctgaaaccttgttgcaggatgctgcaaaagtcatcaaagctagaattgcagagaaccctaactcgatgaacttcaacgtcatggctctttcaaagaagtgaagtgtactgtgatggatggattttctttggcagaatacgggcctctttccctttcgcttccgctgagctgagctgcaccgagtggaaggtttgcattaggcaaacatagggaaaaaaaactttatatgacctgagatctttgtttgatgactcgatgtattctcgtgccttcatggagagagaaatgactgttcaggatttcaactttttggacgagtttcactttgctgtatctgaaccattctagcttcctcggcaggttgatttcataaagctagcatttctatgttttccctgcaaatgcatgtagttttctgtagaatgtaacctattaaacggaattggtgacacctggctaacgaatggaaacgttatttggggattgc

SEQ ID NO: 146987 - DNA, 1027 bp, Zea mays
  unsure (1)..(1027): unsure at all n locations
  Clone ID: MRT4577_65570C.1
aacgtacctgaatgaaaggggtggggcacatgaatgcatataaacgagaatattacaaactaaatagtgctacgcgatagcgaatttaacacctagcggtgaggcgttgtacaattgtgtacgcaaacactagttattaatatacgactgcgcgcaataattacgcttctcgaatctaacgcaaacattacgaacaacaaattatacacatgaaatacaattagcctaatcacaacttatcagttaattaattaaattctgaattaatcccttgctttataaattatactacatcattataagtgattaaaatattttatcatcacacatgcctgccaaaattctactcggtccactaattcagctaagtgaccagaatagcgaaataattcgccatagctgaatctggctcgataatcgcaagaactgcgaagtccacaagagtttcgtgactcacgcattttatcgagcacctgataagcatcgcactaacacattaatttatttaacgttcgaacttttctaaacaatttataagcttaccgtttcaacagctgacacgaatccgcgagatcggtagcgattttccgatccagacaatttatcgagcgcttggcaggtactatacgagcttcacgcacaccaccacatgacgaactctcaacaccgatcgaacttcatccgagtaactcggcgaaattaacttcaactcgcagccggtgtcgcgtgaaggcgaaacgggcccaagagccagggagcttcacgaccggtcgtagctagaacgaccaacaaggcgaagctcatcgacgaggtcgagaggatggcgagcgcgagcgcacatcgggacttgccaaaaacatgaagagctgcgcacatgacgcanagaanaatgaccgcaagtccacggtagcttcacgaactcggcgaggatgcataactcagcaacaggggctagactcggcgatagaaactcgacagtggagatctgagcgagcgcagcagggagcccggcatggcgagcagcaag

SEQ ID NO: 146988 - DNA, 217 bp, Zea mays
  unsure (1)..(217): unsure at all n locations
  Clone ID: MRT4577_65571C.1
cgcccaggtatnagtgaacttaaatatcgagctgctctactgcggaggcaaggaaagaaaacacgttttccctcttggccaagactgaagtgtacactgctgtctcgaccaccgcggtaggtgtggcgaattggatgaagcaattgtgggggggatcaatacgaaccctgatgtgctgggtaactaattaaaagcgtacggccagggtgctggaaaa

SEQ ID NO: 146989 - DNA, 350 bp, Zea mays
  Clone ID: MRT4577_65572C.1
aacagaattccaaccggaacggtgttttgaattaaagcaaattaactttggtactggtacattcgactcgaataggatccaaaaatacttacggtattatcactggcctcacaaagctgtcatataactatcgaaaaattaggcttgtgcattgtccatccaccaaaattgtcagtaccccatgggaaggacttgtcgaaaggtatccctagaattttgtagaaatgtaacaattgtcgtaaatcttggactgtcttgttaaattgcttattggctagaaagttctttattataattttctaatttacctgtttctatgtctattgtaattttgttttgtaatctttttt

SEQ ID NO: 146990 - DNA, 847 bp, Zea mays
  unsure (1)..(847): unsure at all n locations
  Clone ID: MRT4577_65573C.1
tcccccnnnctgcttttattcggcacgaggctgncatgatcaggcgagtggtggaaccgcaatgtantcgacgtcgagagcgacgccatcttggccgntcagcttcccgcccantccgactcgttcacagttaacggcaaaaccggcctgctgaaccagagctcccggctgcacgttcacggcggnggtttttcccancacgagggtgctcctccgggtcgtcaacgccggcctcaactcgggcgtcttcttcaacctggccggccacaacttcaccgtcntctccctggacccggnctacacctccaacctcaacacggacaccctcgtgctctcgccgggccagaccgtgtactctctcgttaccaccgtcctcattcccgggagctactacgtgnnnnntctnnntctctacnccttgancccggtnncnnnnnnnnnnnnnncncnnccnccnncnccnnnnnnccncnnnncncnnnccnnnnnccnncnncccccccnccccnccccccccnccccccncccncnncncccccccccccccccccccccccccccccccccccccccccnccccccccccccccccccccnccccccccccccccccccccncccccccccccccccccccccccccccccccnccccccccccncccnnnnccccnccccccccccccccccccccccccccccccccccncccncggcccnccccccccncccccccnccccccnncccnccccccccccccccccccccccccccnnnnncnncnnccccccccccccccccccccccctcccccccccccccnccnccccccccccccccggggggg

SEQ ID NO: 146991 - DNA, 233 bp, Zea mays
  Clone ID: MRT4577_65574C.1
cggcacgagctcgaatccaagatcagcttccgcctcgagacgcagaggtcccgcggcttcggcttcgcgagcttctcgatggaggaggctacgcggaacgacttcggcgagatgaatgccaaggagctccgcggacttaaccggaatgtcaaccgtggacagtgccttcgcagccgtcgacgacgaagacctggtcggcggcgcggtggtaggccaagctggcgccccggtca

SEQ ID NO: 146992 - DNA, 567 bp, Zea mays
  Clone ID: MRT4577_65575C.1
cttgttatctctagcacggccgcccttcattactgtttatttgttgaccaactgagcgtgagatgataatcataacatattagctcatgaaatagtatcagatacaaactaagggaccataacggacaggattacgatagaacaccgtgccacagagcataataaagggtagagttcacgatagtcactgatgtgaacgcatcaacaagaatacactgaggaactgcactcgacagcatatgacgcacacaagcctacttataatataacagggaaagacgagcttgcctacaagctcaccgaatcagacacgctttcagaacagatgccacacagagctcactgattatactcatagttacggtctcactgataaatctaggcccttacattctcacatgatttacctgaccggaatccttaaacgcctagctggggtaccataacctacgacttaattcataataatacctttgatactctagtgcctctatccgatccatcaaacctacctgtgcatacctgcactaatgtaactgctccatcatcatacataggcatgcctgc

SEQ ID NO: 146993 - DNA, 540 bp, Zea mays
  Clone ID: MRT4577_65576C.1
gagccggccggggtcttcgtccttcgcattccgttccgcgagaaacctgcgtccgcgttccccgtttctctctcctctggctccgagcctcggatgactctcgtggcgtggcccgcttggaggttggtcttctagaggagactttgcccctcgagagggaggaagtgaaggaaacttccagaagcctttcccgcagccgatgaaggaaaccagcagcagccatgtcggcggccccggcgctgaggacgtctgttcctcgtccgtgtccaacaattgtttcccacaagatgagggtacaagctcctgcgaaatggtcaatactgaatgctctgagacgtcctcagaggtgtcgggttctgaaagaacaagacctgaacatagcaaaaaagcatcttccgtacttgctaaaaatgattagtcgaatggctacattgaaagatgatggaactgtagttgtcgatatccctactactattgaagctgcatcacttgatcttcattcagaggattcgcagaatgtggcctttggtggcgaaccct

SEQ ID NO: 146994 - DNA, 376 bp, Zea mays
  Clone ID: MRT4577_65577C.1
cgtccgtattcctggtgcggccacgcgtccgcttgtcctctatggctatcagaggacaagttccatttgaatcaagagagtcaaataaggtggtgggcttggacatagtaagaggagcttgcttgcacatgccaaatgtcttcttaaacacccacttggtgttatatagagcaaattcaggttgaggatcaccaaatttctgtaagcggcacatgtaatggttttcgacgaaggcagctcttgatggcctggagcgggctcatctccggtcagcgagggtggtacactacgcttaggtttacgagcgtcctcaccatgttctggtcgaagcaaacaaagctgccactccacggtggtttcccagtcgggccccacc

SEQ ID NO: 146995 - DNA, 400 bp, Zea mays
  Clone ID: MRT4577_65578C.1
ggtagccgggggcaatcgtttgatgccccgacagaaaacaaggggggggtttccattacaagggggcaacggtcaatcaatggaacaaagtcaaaaggggtagcagtacgggttgggggtttgaggaatccactttaaaatacaacctaacacgcgacaacaaagcaacgacaggaaaaaaaaggggttaagggccccattattagggggggtccaccctggtggttccacatttttaatcacataaatcccaatttaataaaaccaaaaggacgttcctgcccctttctccccacaaggtgagccagcctttcaccgttcaaactttaaactttgggggtccccaacctttaaaaatactgggccttgggccctggttgccgtccgcagttatttccat

SEQ ID NO: 146996 - DNA, 242 bp, Zea mays
  Clone ID: MRT4577_65579C.1
aaacttttcgtcactaggagtagtatccttgaacaaaaagagacgccaccagagcattcgattcctggggcgacatttacgcctctattcggcatgagaatttggcctgatttctatttgccatgagggcataagctcggctaatccctccccaactaactctgatgcttcgagtgacccccaactaactgtggacaggacaggtgcgcgggtggtgatgagtgtcgcgagtgcgagaatac

SEQ ID NO: 146997 - DNA, 285 bp, Zea mays
  Clone ID: MRT4577_6557C.1
accgaggcagtttccagttaagaaaggaaccaaacttgggaatatggttgcgaatgaggtttgggggttgaaaataatgatgctcatgctccagatgtctatatatctatgtatctgatctcctactaatttgcagatggatataagactaagagtgaatattactaaaaatattgtaccatgggactcgcgctttgaacactctagcggatagatttgatagtgctactgatggcagctgtcgtatttgatattaagaaatcaaattaaacagttaggaatttc

SEQ ID NO: 146998 - DNA, 340 bp, Zea mays
  Clone ID: MRT4577_65580C.1
cccacgcgtccgaaaaaaaaaaaaaaaaaaaaaaaaaaaaaaaaaaaaaaaacaagcaactgtgaaaaaaataaaatgggtacaacctcaaaaaaaaaaaaattaaacttctttttacaacggcccccccttttaaatcttcctgccttacctaccctaatttccttccaaaacacttttcttttcgccaccctaatttaaattaattagccccggttttacccccttttcccttaaaaaaccttgccgtaccccaatttaatcgccttcaaaaacatccccttttctccaatttgcgtaatacctaaaagccccgccccattcccctttcccaacattt

SEQ ID NO: 146999 - DNA, 570 bp, Zea mays
  unsure (1)..(570): unsure at all n locations
  Clone ID: MRT4577_65581C.1
gcagngcaaaccccgggnttcgccggcgcggtagcgagggcgagngntggacgggaggatgttcggtctcgagacccccctgatggtggcgctgcagcaccttctggacgtgcccgacggcgacgccggcgcgggcggcgacaaggcgagtggtgccgcggcgggcggcgggcccacgcgcacctacgttcgtgacgcgcgcgccatggtggnntatttggncgtngttaaggtgttttngggcgcgtnngtgttngtggtggtntttgtggggttgggtttgggtgtttttttggtgtttgtggtggttgtgtgggtgttggtggtttttgttttgtggtgttgtgtggtgtgtgnggtttttttgttttttgttttggtgtttttgttgtgtttttttttttttgttgtttgngttttgttttttttttttttttttgtttttttttttttttttttttttttttttttttttgttttttttttttttgttgtgtgtttttttttttttttttttttttttttttttttgttttttgttttttttgtttttttttttttttttttttt

SEQ ID NO: 147000 - DNA, 1774 bp, Zea mays
  Clone ID: MRT4577_65582C.1
cattgggtacctcgaggccggccggaaaaatccgccgggcatcggccgcctcctaccccctctagtccaccctgtccccggacaggcagcgtcggagcgccggcgttgccaacgccaacgcggaggcgagacgatcgggaaggaggggagcagaggaaggatagtctggagcttcacctgtctgcttctgcggtctgcgggagcgatcacgtgacagttgcgacctccaactggagctggcttcgcatagacttctggaggaggcaacgggattgcgatttggaacatggggagttcgatcggctgcttgggaggcggctccaagtcgaggcaagatcagaattgtcaggtcgtcgcgggttcgtctcacagttcagtgcaggtcatgtcttatcaagagctggaaataatgtacaggtattctccctaaacgagttgaagactgccacacaaaactttcacatgttgaattgcattggccgtgggggtttcggagcagtgtataagggaaacctcaaagatggcactcaaattgcaattaaaaagcttgcagttgagtcaaaacaaagaattagtgaattcttgacagaaattaatgtcatatcaaatgttaggcacccaaaccttgtcaggctgattggttgctgcgctgaagggaaaaacagactattggtgtatgagtatgcggagaataatagtttggcgaatgctttgcttggaccaaagaataaatgtatcccattggactggcagaaaagagctgctatatgtattggaactgcttctggccttgcttttcttcatgagaaagcacaaccatgcattgtccaccgtgatatcaaggctagcaacattttacttgataagaaactgctgcccaaaattggagattctggattggccaagatttttcctgataccgttactcacattagcacgcgtgttgcaggaacaatgggttatttggcaccagagtatgcattgttgggacaattaaccaagaaagcagacatatatagttttggtgtgcttcttctcgaagtgataagtagtgaaaacagcagcaagccgacttgggggcctaatatgcatgttcttgtggaatggacatggaagctgcgggaagaaggaagactcttggaaattgttgatccagaactgaaaaagtacccagaggagcaaatgcttcgtttcatcaaggtggcactgctgtgcacacaagccacgtcccaacagaggccatccatgaagcaggttgtcaatatgctatctaacaaagcagaaattgacctgcaaaatgtagttgcaccaggtgtactgaaagaacctcggcagcgtactggcggctttgggagtttgacagcaggcacgacgtcgtcaaagccaaagcaccaaaggcaatccagctgaatcatacagtacaaagaccaacatgaacagctgtcaatttagcataaccgacgcatcaccaaggtgacgtgatagactgtcagcttgcaagcttgtttgacgtcttcactcttcaaaggtgtcacaaactctagtgatatggaaggcctgatccattttcatcctgttttagagttacatagtatgcgaaggccgctgtgaattgctgatgtacaggaattgtagctcatcttttttttttgttcttttgcaaaggaggaattgtagtttgatttgacgattgcttttacgttctggcggccacgttacaaaggacagttattttaggcttcaagttatctatatattagacacatttagtacc

SEQ ID NO: 147001 - DNA, 1862 bp, Zea mays
  Clone ID: MRT4577_65583C.1
ccacgaggaagactctgggaaattgtagatggactaccgaaaaaggacccagggtagctgcgtactgcgggccgctgccgatcgagtaaaaaaaaaacgccgggcatcggccgcctcctacccccaaccccctccaccctgtcctcggacaggcggcgtcggtgcgccggcggtgccagcgcggaggcggaacacccagacagcccggaccttcagctgtctgcttctgcgtctggcttgcgggagcgatcccgtcttctgtcgaccagtcgtggactcaaactagagctggcttcgccatagacttctggaggaggcaacgggattgggaattggaacatggggagttcggtcggctgcttgggaggcggctccaagtcgaggcaagatcagaatggtcaggtcgtcgcgggttcgtctccccgttcaggtcatgaattatcaagacctggaaataatgtacatgtattctccctaaacgagttgaagactgccacacgaaactttcacatgttgaattgcattggccgtggggggttcggagcagtgtataagggaaacctgaaaaatggcactccaattgcaattaaaaaacttgcagctgagtcaaaacaaggaattagtgaattcttgacagagattaatgtcatatcaaatgttaggcacccaaaccttatcaagctgattggttgctgtgttgaagggagtaacagactattggtgtacgaatatgcagagaataatagtttggcgaatgctttgcttggaccaaagaacaaatgtatcccattggactggcagaaaagagttgctatatgtattggaactgcttctggccttgcttttcttcatgaggaagcacaaccacggattgtccaccgtgatatcaaggctagcaacattttacttgataagaagctgctgccgaaaattggagattttggattggcgaaactctttcctgatactgtcactcacattagcacgcgtgttgcaggaacaatgggttatttggcaccagagtatgccttgttgggacaattgaccaagaaagcagacatatatagttttggggtgcttcttcttgaaatgataagtggtgaaagcagcagcaagtcgacttggggacctaatatgcatgttctcgtggaatggacatggaagctgcgggaagaaggaaggctcttggaaattgttgatccagaactggaaaagtacccagaggagcaaatgcttcgtttcattaaagtggcactgctgtgtacgcaagccacgtcccagcagaggccgtccatgaagcaggtcgttaatatgctatctaaccaaacagaaattgatctgcaaaatgtagctccaccaggtgtgctgaaagaacctcggcagcgtaccggtggctttgggggtttgatagcagacacgtcctcaagccaaagcactaaaggcaacccagctgaatcatacagcacacagaccaacatgaacagctctcagtttagcacaactgatgtatcaccacggtgacgttgtcgactattgtttgacgtcttcagaggtgtctcgcgcctcccacaaggtttattgtgctgagcccggacaaaatcgcttgatatggaaggcctgatccattttcatcctgttttagagctacgtaggatgcgaaggccgctgtgaattgctgatgtacaggaattgtagctcatctgtttttcttttctgcggaggatgatttgcagttaaatttgacattttttttatgttctccattaaagcctgttgtaggtatacattgcaagagtacaagacatgtattcgaaatttcaaaaattcatgaagactactgtagctttccttcccctagggcc

SEQ ID NO: 147002 - DNA, 200 bp, Zea mays
  Clone ID: MRT4577_65584C.1
tctgttggggttgtgttgtggatcctaacaatgtgctggtgggaactcagcatatgtgaatttttggcgtctccaactcatcatagatagttgtttttgccggtacatgagcgagctttacgtcagatttggtagtgcaaaaaaaggggctgctcgattctccgatcggcatgaccaacttacacggaattttgcagctg

SEQ ID NO: 147003 - DNA, 505 bp, Zea mays
  Clone ID: MRT4577_65585C.1
ccggccggcgctatcttcgatggcgcctttggcaagaacaccgccaatgatcaacaactgttcaatgatacgctttggaacatcaacaaagaactcgcatttgtgagctttgagttgcaagcattcatcaatcaatatgatggaatggtgtactacggagtggtaataatgttgctgacaaagaatcacagctcggaacaaagtattatgtgtcccagattgcattctacaagggactagtatgtgatagcttccttcgtatagtgacattatatatgctgtgttgacttctcatgtattgatgtaacaaattgttcctgtggtagttagaagcaattattcgggaagctggaaacgatgggagcataaccagtattgatgctctcaatgtccaacttgaaaaccaggtttgctgcacagtaattctgggaacaggatttgttggttttcctgtatttaccacacactgtcttatatcaacaaaaaaaaaaaaaaaaaagcggcc

SEQ ID NO: 147004 - DNA, 107 bp, Zea mays
  Clone ID: MRT4577_65586C.1
attcggctcgagcacgtccaccactcagaatttacttttctcccggtcactctatgcacttagatggggctggactcctggttccgatgacgctagaccactaggcg

SEQ ID NO: 147005 - DNA, 611 bp, Zea mays
  unsure (1)..(611): unsure at all n locations
  Clone ID: MRT4577_65587C.1
aagcagtggtaacaacgcagagtactttntttttttttttttttttttttttttttttttttttttttttgtttcttgatttttattttttttttgtttttggttgttgggggaacacaaaaattaaaaaaaattggggggggggaagggatttaaaaaccaaaacgcgacaaaaataaaaggggggggggggtactaaagaacagaaacccccaaaaagggaaaaaaagggggggggggctaaaaccgggctacaagagggggggcaaaaaggaaggaagccgggaacccgatgggccagggaaacaatagaaaaggcccccggaagggcctccggagggggggaaaaagcagccaacacccacccagggggaaaagggggggggggggttaggaccccccaaacacccaggggaaaagggggggagaaggggaaaaaagtctcctgaacccgggagaaaaggggtgaaaccggggagcacaaatagccgggcccaagagagaccgaccagatcccaggaaatggggggggccaggcgtttgacaccaagaaaattttggggagtgcggggggggcgcgctatgacccccccaaaaacaaaaaggggggg

SEQ ID NO: 147006 - DNA, 361 bp, Zea mays
  unsure (1)..(361): unsure at all n locations
  Clone ID: MRT4577_65588C.1
ggacaaaagggggaagagggnnatannaatggttggnaaagggnnaagagggggggggggggaaagggggttttttgnaaaaaaatgagngtggggaaaaaaanacccccctgggaaaacaactggccctcggccggcgccgaacagaagacccgccatgacacaaacacgagccggaatccggactcgactacagagcatacacttgggtactaaactactgtttcggtcgtgtctttgcctccggagaaggtgtgcctagcctttccggcggcgaataacgggcgggttcctttnnnccgggctgttcgaccgccggagctgcttntncagggacccgatgttggggttgccaatgaag

SEQ ID NO: 147007 - DNA, 336 bp, Zea mays
  Clone ID: MRT4577_65589C.1
agtgaccagaagcacgtgcactgattatattggattcattcgcaaatcgtagggcccaaacccactactggttgcactagcatacaatagcccgcttactgataccacaaccaccatacacggtgtatccacatatgcttcggcatgctgacagccaaaaacctttgtaatatatcacatacacaaacgctgctgaaactactactggaacaagcctcacaactgtttgccacgccacaacacatagttaggcaccagaacaaaaacctacttcgtgggatagatatgtcaactacagaaaaatgcgtcggaattggagtcacgtcatcatgtgca

SEQ ID NO: 147008 - DNA, 946 bp, Zea mays
  Clone ID: MRT4577_6558C.1
attgggtacctcgaggccggccgggtagccgcttctgttccttcgctagtcgacaggccccgcttccgctctcctcttccaccggccaccgccgcgcgccgagaagatggggaagcggtggatcccactggaggccaacccggacgtcatgaaccagttcatatggggtctgggagtctccgagagggctgtgcagttctgcgacgtctacggcctggacgacgagctgatcgccttggtgccccatcccgttctcgcagtcctcttcctctacccgttcacctccctggacgaggagaataaagaagaatcaagtgtttctgccaaatcgaccgcagggggcaaggatttgagcaagaaggtatactttacaaagcagactattggcaatgcttgtggaacaattggtgttattcatgcaataggaaatgcaacatctcaaatcaagctagttgagggttcctattttggaaagttctataagcaaacagctgatatggatccagtccagcgtgctgccttccttgaggaagatgatgagatggaggatgcacattctattgctgcatctgctggtgacactaatgtgaactttacgagcttgatggactaaaatcacaacccacaccccatggcccatcatcacctgaaaccttgttgcaggatgctgcagaagtcatcagagctagaattgcggagaaccctaactcgatgaacttcaatgtcatggccctttcaaagaagtgaagtatactgtgatgggtggatttcatttggcagaatacgggtcccttttcttttcagttctgctgagtactgcaccgagtggaaggtttgcacagggaaacaaagatagggaaaaatgttgactcgatgtattatcgtgccttcttgatggatagagaaatggtggttcatcaataaaaaaaaaaaaaaacccgcggcc

SEQ ID NO: 147009 - DNA, 657 bp, Zea mays
  Clone ID: MRT4577_65590C.1
gcgctgtcacctgccaccgccctcacctaccggctaccgctgccgccgtcgtcatctctatcgcccaacgccaccaggttacagacacggtaaccacggtgtacggcaacagagatccaaccagatctggataacaagactgcttgctgtctgctgggaagtggagcaagctcaagtttatatccgcctcgagggaaccggtgggagaaaagggagtggacagatctgactcagttcttgtctccgcttttctaacttctcacaggttggttgcaatggcccaaggaatgactaaaccaaaagcagaacaaacctgtgtgaatttctgtcgttgcaagaagaacaaacctgacatttttttatactagtgtcttagtcatcaatctaatgatattaattatatactgttgatattaataatttttttatatttggttaaagttaaaaatagttgactaattgaaaacgataacaacatttatcttgggacagaggtagtagaatgttagaggtttgattcaactgtcaactgctgtgtccctaaagcatgattaccctgttggaaatccatttggcgacggcgacggtatcagctcacagtatttgataaataagttcacagtatttggttcaactgttaacatttatcttgctgca

SEQ ID NO: 147010 - DNA, 729 bp, Zea mays
  Clone ID: MRT4577_65591C.1
gccggccgggtaccgaacccagtgcagataccgacgagcagtccagagcgaaggaatggactccatggccagcgacgacagcaaccaaggagcagcagccctacttcggcggcgtggagcgcacgccgtcggagctggagctagagggcgtggcgcccgtggtcaacctcaggcgctccgacttctcgtggaccgcgttcctgcccgacggcgccacccgcgaccacccggccgcgcacgtcaccgacgacaacgccgacctcgccgacgacttcccgcccgccatggtcattatcggcggcttcgacccgctcatggactggcagcgacgctacgccgacgtgctgcgccggaaggggaaggaggtgctggtggccgagtacccaggcatgttccacggcttctacggcttcccggagctccccgaggctaccaaggtgctgcaggatatgaaggccttcgtcgacagccacatacccacgcccaagctcgccgacgcgtgatgcacgaacaccatcccattccattctagtgtcatgagtcatgactgcttggttcatctatctgctgtcaaaatatatacttcctatatattaaagcagggcgcaaagcttccatctggtgcgcccacgtcatttgtgttttctcttccttcaacgtctttgattcaagcgtgtctccgtgggaagcttccggacgaagcaaaaaaaaaaaaaaaaaaggccccta

SEQ ID NO: 147011 - DNA, 4197 bp, Zea mays
  Clone ID: MRT4577_65592C.1
tttttctctttttttttttcccctccctcttgtttttttttttggctcgaaaaaacaacctaccaacgtaatcaaacgagcttgagtagcagcacaaacaggcggtgcagagagggaacaagtcaattcccgaaccaagacccttcttccctgatagcctgggatcagatggtcacaactggtttggttcgctcttgactcctcctctcgcaccttttctcttgctctcctaaacaatcaagtcctcagtctcttctaatacagagttacacggctctacgcccgaccattacgcgcgaactactaggtaaatctcccgtcttattattattacaaaaatcgaaataagcataccaatcgaagctaaccttcttcacagttctgacttctgagcaagggaacagaccgagagagagagagctaccagcagcaacacctgcatgaccaagctgccccggattgttttctgcgtgatagagaatcggccggcacaagtgagagcttgacaggaccctttcttttccagtagctgtagatgacaccgcactagcttcccaaaatgatcaaaatgcccccaccattctcttcgttcggtcaggggtatttttgtcattttaagaggcatatggcgggaaagagaagggggatttttgaactttccgtgtgttggtttcgggctcctgtcaaaccctctcttgcacctgcgatgtctgtcagcagaaacaaccggacctggaagtcaatttggcttttgttgtggtgtatggatctgctctcctctgctcccgctcttgctacttactactcggaggcagcagccgccggttcagcggccccgcccgccccagcgcccttgagcgcggctgtgatctggtggacggcgttgcagacgtggctgttgatcgcggtcacgctcgagaggttcagcttagccgagggcacagcgctagcgagcacctgcatgcccacggtgaggaggcagccgctggcgggctcgtcggcgttacctgctgggctgctttggccgtcgccggagcctgcggcgctggttgctgcagccgaagggttggcggccgggaagatggcgaagcccagcgggaggagagggatgtaggaagggtcctcgccgctcattgtcacttggatggcgtccacgtccacggtcgcaaacaccacgaggctcccgccgtcggggtgggtgctgctctcctgcagcatgagctccacgttctgggatgagttgcttgcagcattgattctaagaagagaaatgcaattctttgggtgtgatccatttgcaatatgtgccacttcgtgaagtgagcccccgcttgacataatctcaagctgacaacgctgttgttcatcggcaagaagctcgaagaccttctgatggttgaaaggaagccagcttgtagagacagcggttagaatgacaccgctgggctgccccggatccgtgttcttgcgagtagtgaccctgatcgtgtcctctgtagtttctgagagtgaagtccaagattggctcccagaagcactgatgttggcagagaaactagtgatcatccgctgtgacagcttcatcatatttgttctcgcctctggtgtgcggatcactcccaggtcggcgatgttgcgggcgagctcactggcaaggcgctcgcattggcgctggagcagggatacccagcgcgtggcgccgaaggcagagccgctggcgacgtagtccttgaacacctggtgcagtggcttctcctctccaacaatctccgtgtgctccacccacaccacgctagagtagccattgggcatgtcctggatgatgcaaccggaggggcgcctacagcaccttacaacagatggggtttgcagtgcctccagctggaacccctcggccgggaagtcgacgagggaccaggtcccctcgtcgccgttgtgcacgcagtacctgaagaacaccacctctcgcgcaggcaccaaaggagacgggaactgcaactccgcttgcatcaagaggagagatccactgcccatatgaccagatgcagatccatggtttatgacctgaatggttcttgccttggataggatcgaagggaacaactccatccacttgttagcgtccaggaaggcatccaccagcgtgatgctgttcatgataaccacggtgccgtcccttgatccctcggtcctggccgcggcgccgccaggggaggcactgctatcctgctggccgccgttgacaggccagctgaacatccgggcgtgctcgtcggctaccatgacctcggagctcgcgccacggcgccgcagccagagcgactcgcccgcgcggcacatcttggcgagggtcatggaaaatgctcggaggaggtcgagcaccagctgcctgtcctgctcctggacaggcgccatggcgcccatgaacgacggcgtggaggcgtggtgctcggcggttccggtgatctgctgcgacggcggcccgaggacggactggatgaggtcgccgcaacccatgactggggactggtcggtgaaatggcgagagtagacattcatgtcgaggtcgagcggcggcatgagcaccggcggcggtgccgataagcagaccagcgcggacgacgacatgctcggctgtcggccgccgccgtaccgggtcgcgatgcacgccaagcggtcgagctcgtccttgagcctagcgttctcgatgcggagctgctgctcctcgtacgacatctcgccgaggacggcggcgtggccgcagttggggcagactacgttgcggatggcggcctgcaggcggtagttatcgctcttgaggctctcgttctcggcgcggaggaggacgttgtcggcgcggtcctgctgcgccttcatctgggtgcgccggttctggaaccagaacttgacctggcggggtttgagccccagctcctggctcagcttcagccgctgcttgtcgtccgggtgcgggcactccttgaacagcgcttccatctgctggatctggtgtgccgtgtggcggtggtaccgtttcttcttgccgttggcggtggccagctgctgctgctgtccggcggcatccgccgtcgtctggagctcgaggccgctgtgctgcggcttctgctccggccggtcgtcgtccacgtcggcgaagctgagcaggccgtccaggtggccgctcccggagccgccgctgagctccatctccatctccagctgatccatgtcctcgtccttggccacctggactcgtgccgaattcggcacgagattaaacttgagtggcaatagcataaaggggaacattccaatctccctgggtaccatctctgtggtgcaagtactggatctgtcatacaatgagcttaatggatctattccagagagcctcggcgagctgacatcattacagatactgaacctgaatggcaatcgtctttctggtcgtgttccagccagtttgggaggaaggcctctgcacagagctagatttaacttcacggacaatgccggactatgtggaatacctgggttacgtgagtgtggccctcatctatccgtggctgcaaagatcggcatggctttcggcgtgcttttagctattctattcctagttgtattcgctgcgtgctggtggaagagacgccagaacattctccgtgctaaaagattagctgcagcaagggaagctccttatgcaaaatcaaggacccagttcacccgcgatgtgcaaatggccaagcatcaacggacacatgaaaatgctcggagcagcaacagtgaaggctcgccacatttgctttcctagctcggtgagaatactgcgacagtgacttggcttccatctattcttcagttcctcctttgtatgctcctctgcagtcttgaaagacgaagctgctgtacatactagctaggtcacgaatggtgtatatacttgtattttttttggtgatctagaactcagtccaggagagggatcagtctatcagatgagagaaattacccatttcatcctacttactgttctgattactgctgttgatttccccttcactgttcaagtatgcttattgtcagttttgtactctgtggtctgaagctctgcaaaactgccttttgccaggagctggagctccaggctgggctgtgctgtgctgagatatagagtgaattctgcaccttttcctaacc

SEQ ID NO: 147012 - DNA, 1389 bp, Zea mays
  Clone ID: MRT4577_65593C.1
cacgcgttctaaaactctctacctgctccgctgcccacacggcacacgagctgtcagctatatactctatcgcacggccgggaaacacccatcaaagataccgacgagcaggccagagcgaaggaatggactccatggccagcgacgacagcaaccaaggagcagcagccaagccgaagccgaagccaccaccgctaccgctgtccgtgcgcctccagctggccgggctgacagcggccatcgacgccgtggagcgccgcgacgggacggtgaaccgctgcctgtacggcgtgatcgaccggctcctgagcgcgcgcgccagcccgcgcccggacgcctccggggtgcgctcctacgacgtgaccatggacgcgtcccgcggcatctgggcgcgcgtcttcgcgccggccgcggcggaccgcccgctccccgtggtggtgtacttccacggcggcggcttcgcgctcttctccccggccatcgggcccttcaacggcgtgtgccgccgcctctgcgccgcgctcggcgccgtcgtggtgtccgtcaactaccgcctggccccggagcaccgctggcccgccgcctacgacgacggcgtcgacgcgctgcgcttcctcgacgcccgcggcggcgtcccgggcctggacgacggcgtgcccgtcgacctcggcacctgcttcctggccggggagagcgcgggcggaaacatcgtgcaccacgtcgccaaccgctgggcggcggcgtggcagccgtccgcgcgggccctccgcgtcgcgggcgtcttccccgtgcagccctacttcggcggcgtggagcgcacgccgtcggagctggagctagagggcgtggcgcccgtggtcaacctcaggcgctccgacttctcgtggaccgcgttcctgcccgacggcgccacccgcgaccacccggccgcgcacgtcaccgacgacaacgccgacctcgccgacgacttcccgcccgccatggtcattatcggcggcttcgacccgctcatggactggcagcgacgctacgccgacgtgctgcgccggaaggggaaggaggtgctggtggccgagtacccaggcatgttccacggcttctacggcttcccggagctccccgaggctaccaaggtgctgcaggatatgaaggccttcgtcgacagccacatacccacgcccaagctcgccgacgcgtgatgcacgaacaccatcccattccattctagtgtcatgagtcatgactgcttggttcatctatctgctgtcaaaatatatacttcctatatattaaagcagggcgcaaagcttccatctggtgcgcccacgtcatttgtgtttaaaaaaaaaaaaaaaaaacccccccccccgcgggggggggggggggccc

SEQ ID NO: 147013 - DNA, 268 bp, Zea mays
  Clone ID: MRT4577_65594C.1
ggacaatcgcgtccaaccgccgctgcacaagactaggaagaggttcccggtaccggggccgccgctatgtcgtcgatgatgaacgccctgtaaaactggctggtgaacccgcgccgcaacccgttcgggcgcctccacatgaccgccgcttcttggggcttaaggaattccggcttgaggtccaagaccctgtccaaccctattttgaaccggacattaaggaagcgcttgggaaggttgctatggaggtggtcgacgcccgcattca

SEQ ID NO: 147014 - DNA, 1221 bp, Zea mays
  Clone ID: MRT4577_65595C.1
ccctccctgctgacctccgagcggagcagagcaaggaaccggcaggaggaaaggaaaggtccatggcggggagatcgacgtacgacaaccccttcgaggagggcgccgccgcggccgaggtcaaccctttcgcggaccaagctaaacgaggaggaccgacggctcagtccagctattctggcggcgcgttctacacgacgtcgcaacgcccggctcctcctagcacgcgcctttcgccgcttgctcctgaacctgctggcttctacaatgacttcgctactccagtggatatccccatggacgacacaaacaacaaggacacgaagacaagggagaaggagcttctggccaaggaggccgagttgaacaggcgtgagaagctggcgttgtgttggaagagaaaaactggccaccgtttttccccgtcatccataacgatattggcaacgagatacctgtccatctgcaaagtacactgtatgtcgcattcgcgtcactcttagggttggtcctgtgcctgttttggaacataatctgcgttacggctgcctgggcaaaagggtcaggtcctaaaatatggtttctcgcaatcatatacttcattcttggatgccccggcgcctactacctttggtaccggccactataccgtgccatgaggaacgagagcgctcttaaatttggatggtttttcctattctacttggttcacatcgccttctgcgtgtacgcagctgtttctccttcgattctcttcgtggggaaatcgttgaccgggattttcccagcaatcagtttgataggcgacagcgtgattgtcgggatcttctacttcattggctttgcactgttctgcctagagtctttgctaagcatgtgggtcattcagcgtgtttacctctacttccgaggaagtgggaaggaagcggagatgaggcgggaagcagcacgcagtgctgcgagggcagcattttgacgaaccgtgtatatattatatagcacggcgtgcgttttgttcatagtttgaagtgtttgtagatcaacatacatatgtagagtagcgttggtgtactgtaaatcttcagaatttttcttaccagtattttgagccctaataaaataataaaattgtaatgatgatctcactcaagcttttaggaaaaaaatatatacttacattgtcaagggttgaaaaaaaaaaaaaaaaaaaaaaaaaaaaaa

SEQ ID NO: 147015 - DNA, 694 bp, Zea mays
  unsure (1)..(694): unsure at all n locations
  Clone ID: MRT4577_65596C.1
cggaagcccggggcgacccacgcgnccgcaggccacagcgcagcggtgtgtgtgggtgtgtgtctgcgccagagaccaaacaccaacctccccccaccctcgacccatccccacctcgccgccgccgccgccgccgcacggtctccttccccgagatttgaatgcgttaggaagtgcatggggagaaaggatgccagagttgcgtagtggagtccggcagtctcggttgagggcaaagaaggttgaggatcttgtggttcaagaccctactgacaacttggttgtggcggcacctacggtggcaggaagacgtggtagaggaaggggtgggaggggtggagggagaggagcaggacggggaaggggaggaagaggaagaggtgttccactgattaacttggatcctgaccagcctcttgaggttcttccaggagctggtgttggtgcccgcgctgcaggtggggcgcatcccattgaagacattgctaataaggtattgaagatggatggtgggagtgctgagaagattgctggcggtgaagatgaagggactacatctccagtcccagagaaggtatgctattactatgctccattgcttggccttgaacgtaaggtgggggaaaggtggttttgggcaagtttctgttggctggaacgttttctggttttacanagcgcactggacctgatg

SEQ ID NO: 147016 - DNA, 391 bp, Zea mays
  Clone ID: MRT4577_65597C.1
ggggaaaaaaaaatgggccggtggtttaaagcacccgcgaccggggggggccccctgttaacaggcggccctttttacatgtttgggtgggcccccattaaaaccggggggcatcctagccatattcccggttttttttttttttgggggaaaattctgaatttgacccggggttggaactatacatatatgcggggaaagggcccaaaaaccaacattaggttgaaaaaagggggggtttaaaataaaccaacaggtttcaaaaaacttccaaagggaagggggccgtggggggttgggggggaccccacaatatgggggggccaaaaccctccaattttctttggttgggggggttaaaaagaaccccttttcccctccgggggggggg

SEQ ID NO: 147017 - DNA, 746 bp, Zea mays
  Clone ID: MRT4577_65598C.1
ccggccggggcttcttccggttggtcctgccctccttgctgacctcggagcggagcggagcagagcaaggaaccggcaggagggaaggaaaggtccatggcggggagatcgacgtacgacaaccccttcgaggagggcgcagccgcggccgaggtcaaccctttcgcggaccaagctaaacgaggaggaccgacggctcagtccagctattctggcggcgcgttctacacgacgtcgcaacgtccggctcctcctagcacacgcctttcgccgcttgctcctgaacctgctggcttctacaatgacttcgctactccagtggatatccccatggacgacacaaacaacaaggacacgaagacaagggagaaggagcttctggccaaggaggccgagttgaacaggcgtgagaaggaaataaaaaggcgagaagacgccgcagcacgagctggcgttgtgttggaagagaaaaactggccaccgtttttccccatcatccataacgatattggcaacgagatacctgtccatctgcaaagtacactgtatgtcgcattcgcgtcactcttagggttggtcgtgtgcctgttttggaacataatctgcgttacggctgcctgggcaaaagggtcaggtcctaaaatatggtttctcgcaatcatatacttcattcttggatgccccggcgcctactacctttggtacgggccactataccgtgccatgaggaacgagagcgctcttaa

SEQ ID NO: 147018 - DNA, 108 bp, Zea mays
  Clone ID: MRT4577_65599C.1
cctacgctgtccgctcctcgtccttcggactcggcacagaatcttttgtctctacgggcgacggaaccgtgagaaagcgcagccatgagtgccccctctgaatggaga

SEQ ID NO: 147019 - DNA, 887 bp, Zea mays
  Clone ID: MRT4577_6559C.1
cacacttttctctctctgtatgttgtgtaattcaatgtgttttcatgaacacacatgtggaatggagtagtttgaatttaaattacatttgacttgcttgtaacatgatttcatgggtaccttatttgcagttgaggggtcctattttggaaagttctataagcaaacagctgatatggatccagtccagcgtgctgcctttcttgaggaagatgatgagatggaggatgcacattctattgctgcatctgctggtgacactaatattaatcttgatgttaatgtacactttgtatgtttctcctgtgttgacggtgaactttacgagcttgatggactaaaatcacaacccacaccccatggcccttcatcacctgaaaccttgttgcaggatgctgcagaagtcatcaaagctagaattgcggagaaccctaactcgatgaacttcaatgtcatggccctttcaaagaagtgaagtatactgtgatgggtggatttcatttggcagaatacgggtcccttttcttttcagttctgctgagtactgcaccgagtggaaggtttgcacagggaaacaaagatagggaaaaaatgttgactcgatgattctcgtgccttcttgatggatagagaaatggtggttcacgatttcacctttttcctgcgtacttaggctatttacaagggtagttttatgatggtttcatacacatttaatagtatgtcacatcaccatttgtttcatctttacatattttattgttttctattgactatttagttgcagtatttaattggtatgttagtttatgaaatagtgaagtgaaattttgtattgagaaacattgtttcattcttaattttatgacactctttgatgatatggc

SEQ ID NO: 147020 - DNA, 748 bp, Zea mays
  Clone ID: MRT4577_655C.1
cggtaaaaattagtaccctggtagttgttgaatactgagatttaaccatgtttaagttgaacgtatccaatgcaaacataaaatcttccactagcaaattaaacagataagatacaatacaaggcataagatgcaatgttattatcggtgattatttaaacattttgtaaaaacggaggacgtgacacagtaggatgcataatgttatctgatttgatgcagaataacattttatacattcgtagtccatatggaatatcatgcaaaatcagtgcacgtcaagaaaagttcattatttaaaattcttttcaaaatatagttcttacagctgaatggatgtagctatatgaagacatcactaaagaactataaggaacaaaaactgaataattttgcgttagcagagtatgaataaagctatagcactgttcagtattggattgttccatgaactagtgccgactaaatataaaaaaacaacctgcagggataagaccgcctccgcaatattatattaagaagaagacctcatgcaggtcgaaaaaaacccctctgaatccctgacacccatacacaatggcaccgtacgcggtacgccaggtgagaacgaatgcaacccgggccggggccagaccttattcacgtgctttggcataggacagatgaagggatttttttaaaaccccagcctaaaattttgctccacaaggagttgaactcagaactgaggagtgctactcaaacacct

SEQ ID NO: 147021 - DNA, 683 bp, Zea mays
  Clone ID: MRT4577_65600C.1
attgggaccctcgaggccggccgggactatctcttgggtgacacagcctcaaagcactccctacccccgcttccgaaccttctctaagctccccgccacctcctccactcgcaccgatggggaaagaaccaatgccagagctcctaactgctgccatcacgacaaattgaatatgccctggttcccatgcatgctaagcgtgatatgctatgtagcagaccagcctgctattctgcacatgcttgacattcctccagcagctgaagcccttaatgccgttaatatggagctggatgatgctgcgtttcctcttctgaaggtacttgttgctacaactgatgttatgaaagcctgcactggagccaatgtacccgtcatgcttggtgcattccccaggaaggagggaatggaaagcaaacatgccatgtctaaaaatgtttcaatctacaaatcccaaacatctgcccttgaagcccatgcatctcccaactgcaacgttctgatgattgccaacccagcaaacaccaatgctcttatcttgaaacaatttgctccatctattccacagaagaacatcacttagctgacccatctggaccacaacatggctcttgaacagatttctgagagacttaatgtccaaattagtactgtcaaaaatgatatcatctgcgataaccact

SEQ ID NO: 147022 - DNA, 381 bp, Zea mays
  unsure (1)..(381): unsure at all n locations
  Clone ID: MRT4577_65601C.1
gacgcgngggagcagggggggctttataaaggggaccccccgaggtcccccggcccaacgaaagacgagcagacaggccccgcctggaaagaagggactctgctatgggaaacaggaagctggcaaaatgacgtagacaaaccctgggcaacaacaagggcataagtcaggacaaatggaaaacagcacaaaggcaggacagggaggacagaggaagctactaaacacaatccgggccgggagaaaagaccagcagcccaacaaggatgacggcggagacaaaactgtatgcatgtgcaacgctctccctgaagaggaaaagaaggcgtggaaccagaaactcgagaggcaaaaggggcaagagatggtcgagcagaaaag

SEQ ID NO: 147023 - DNA, 197 bp, Zea mays
  unsure (1)..(197): unsure at all n locations
  Clone ID: MRT4577_65602C.1
gagctcacnatactgcggccgcccttccttttttttttggggggttttaataatttttttgggtctttcaaacccgtatgacaggaatgtttgggcgcaaaaattctgtttcccctacaaaaaacatctgaaaaacttagaacaaaaacagggcaagggttggccacccaccccaaacagggaactatattcccttc

SEQ ID NO: 147024 - DNA, 145 bp, Zea mays
  Clone ID: MRT4577_65603C.1
gcgcccacgcgtgcgcgcacacctacattgcttcatcttttgaagaataccgatctttacagggattttgttactcttccacggacaatcactaactacacaaccccttctacacctaccaagaacagcttgtgtacaagatcat

SEQ ID NO: 147025 - DNA, 627 bp, Zea mays
  Clone ID: MRT4577_65604C.1
ccgattctgagagcagcccatggcgcggggcgcccacgtcgtccgagcactctccctagccacctcgttttgtccgagccagcagctgcgccaggccggtgccgggagcctcgcggcggcggcggcggggccggctcatggtggtgcgggccggtgggccgcccagcaccaacgcgctcatcctcgccttcgtgcttccgctctccctcttcgtcggcacgctcgtcaccgccgcccgcgtcgccgacgacctcgacgaccgcttcctgagggagatggagataaaccgagcgatactggaagagaacgaggcgtccgacgaggacggtgccggtgaggaagacgacgatggggaggaggaagagggggtcgacctgccggtggtggtggaggaggagcccgccgttgtcggtccacgcaccaggaacaggccgagaagacgagtgttctcttctcaatagtgttggttctgatttacaggattatgtgcaccaaaggttcgtgacgacgtagtgttttgaattcttgtaaggctcctcttcaaagcccacgccgaagcacatctgagtacttcaaatttaatgtatatccatatgagcaatctaacgagttcaagaattttaattt

SEQ ID NO: 147026 - DNA, 777 bp, Zea mays
  Clone ID: MRT4577_65605C.1
gtcccacgcgtctaggcccgctgccgctgcccgctccggtctcgcgtctgggagcctccgattctgagagcagcccatggcgcggggcgcccacgtcgtccgagcactctcccagccacctcgttttgtccgagccagcagctgcgccaggccggtgccgggagcctcgcggcggcggcggcggggccggctcatggtggtgcgggccggtgggccgcccagcaccaacgcgctcatcctcgccttcgtgcttccgctctccctcttcgtcggcacgctcgtcaccgccgcccgcgtcgccgacgacctcgacgaccgcttcctgagggagatggagataaaccgagcgatactggaagagaacgaggcgtccgacgaggacggtgccggtgaggaagacgacgatggggaggaggaagagggggtcgacctgccggtggtggtggaggaggagcccgccgttgtcggtccacgcaccaggaacaggccgagaagacgagtgttctcttctcaatagtgttggttctgatttacaggtaattaatataaacaagggaatacgtcatcatctgtgtagccggcactcctgccacgtgcgatgcaattaatgcaggcggtatattttgctaggattatgtgcaccaaaggttcgtgacgacgtagtgttttgaattcttgtaaggctcctcttcaaagcccacgccgaagcacatctgagtacttcaaatttaatgtatatccatatgagcaatctaacgagttcaagaattttaattt

SEQ ID NO: 147027 - DNA, 523 bp, Zea mays
  Clone ID: MRT4577_65606C.1
gcgcgcattaacaaggctaggaagaagaacatagctggggggatcaaggatatgcatttgtactgtgctcacccaggcgtgcgcatcgtgtacgccggctactagacgctggacattcattttgacctgcacgccgagaaatactggatgctgaagcagacgccccggacgtgctgtggcacgccggacatgggcgagcacaacttcaacctgacgtccaagtgcggcaagcctgaggcgtacgcgagcccggaccccttcaaccactggagctgggacggcatccacctaacggaggcacgctacggccacatcgtcaggggctggatctacagtcccttcgacgacccgtccattcttgacaccaagcacctcggctaacgttgaccatccaccgtgttctgcaacgcctgtcccgaccgtacggacagaacagactacttctccgttatgggcgccgagtatgtgcgtccttataccgacccgcaaaattggattgttgacttgttgtaaagttgaaaga

SEQ ID NO: 147028 - DNA, 570 bp, Zea mays
  unsure (1)..(570): unsure at all n locations
  Clone ID: MRT4577_65607C.1
cccctcgctttcaaggatgcagnatcnntttgtgaagaacctctcaccggcagnactatcagccctcgnaggtggggagtcttctgacaccatttttctattgtcaagggctaagaatccaggaacagggggggggggtgcnnctcctgacnncagcagcgcnncttatcttcgnnccggcaaggcagcgttggagggacccggccgcannnacttgctgactacccaacatccagnaagggggggtcaacccatgtcatttggtggcnnngcgccttagggggaggggcatgcagnatnnctttgtcagagaaaccttgnnactggcaagnacgagatcagcccttgaggtnnnggagtctctcagnaccaccagttgagcaatgtgcagagggcttaagnaatccaggnacagaggnagggnnncatccctcctgnacnncagcagcggctttaatcttnncgccggcaaggcanngcttgagggaccgggaccgcacactttgnnctgactaccagacatcccaggaagggaggtcaaccccttccactttggttgcctgccgcctt

SEQ ID NO: 147029 - DNA, 406 bp, Zea mays
  Clone ID: MRT4577_65608C.1
tggtggttcgttggttgtgttgtgtgcgtgtgtttcagtgatgagctcctttgtttttctttctcgtggatctatcgatggatgaacatgaatgaatgaaccgaactgcacagctccggtgtgagctgatgcattcatgcatgcataaagaagcaaaaatgtacatatatgaataggaataatacgttaaacttattaagcctatcctgaaacccaaggataatgagatcggaattcctcagggaaatatccaactccacattttaaagaaatggggcggccccaaatgttcatatatgaatcccaggaattaatttccgaaccggtccctatagtgaaaccagttgaccttatatcgggagttcctagagtttgccgaactcggggcccatatagtcacccgggt

SEQ ID NO: 147030 - DNA, 621 bp, Zea mays
  Clone ID: MRT4577_65609C.1
gaccgacggggagggcagggcaatgctaaacaaacagcacctaagccctaccaagggcctcccagaggtgcaccagtggccctgcaccggccattttgcggtaagcctgtgggtatcatttgcacattttacgggaagcagaaaaaaaactaggggaatcttctgggccaaacgaaaaaaaatggaaaaacaagccgatgtgaaaccggagaataactggagaaaggtgttaaaaaattctggaaagaactttgtaacaaaaaggtagcaaggactttttgtgccctttcacatacatgggacccgcgtgacaaccttgttataatctcttgaaaagcggaagttctgattgacagacgtttggcactttaaaagttcttaaggaacatctggagctctttaggaccttgaatgcaatttggcctctgtccaacctacgagagttactgaccagttagtgatcccaccaggatcgaccctattgaaaaaggttggaaaaaaatgctcatcaaaagtacagtagcgtccctctggtggcttgcagtacagttggaacttattgtaaaaaaggtggacagccagattcaataaagcatgccttagtgttatattaaaccactg

SEQ ID NO: 147031 - DNA, 290 bp, Zea mays
  Clone ID: MRT4577_6560C.1
aaatatagggcggttaaaaaatttttggtaataaatgcagcgcgctgggttacaaatgcttctacaattgtaatttctggccttttttcggccaaaaaagagggcaaggggttcgcgccgtaattcccttgtgccagaagggaccccgggcgccaaagagagccctctttatgcatgatccgggagaaccggggggctcaggagaggcgaagaggggattggaattgggttgggtggaggggttggggcgcaggggtgggttattagctcactccgtaaattagagggag

SEQ ID NO: 147032 - DNA, 277 bp, Zea mays
  Clone ID: MRT4577_65610C.1
gacggcttccccaggagaacagcaagctagctgctatccaaacccgtgaacatggcgatggtggccaggccagtggcctccaggggcaagccctgcccaccacctcgcgcgctgacaccgccccaagccgacgacctcgactccgacaacttcacactttacaccaagacgcaagagcccatagctcaggactgacgatgctcatgctccccaccatgtccgatgacacctccgccaacccgctgctccccccgtcgctccacagcatgtcgtccac

SEQ ID NO: 147033 - DNA, 456 bp, Zea mays
  unsure (1)..(456): unsure at all n locations
  Clone ID: MRT4577_65611C.1
tgcttgtttatgtgcttgtcccctcctctgaaagcacaaaaggcgcccgctcccgaaagtcagaaaaggcagtccctcaccacggtatactagcttaaattacaacccagctacccccacatcatatgcgtaacgggcacgaacttaagccgcgagagtgcaagaggcgaatacagtaattagcacgaaatcatccaagccgacggaagagtagcctttccgtcacgatcgacaccccactgaaacgtacagtaaaagtcacgcgatcagaaaaaaatggaaatactccacagcccggaacggagatccaataccccgccggtcaggataccgggtcacactccgtcattcntctatccggtataaacaatcctacccgccctttagagatcgccaccaacgtcccgtaggaacatataccaccctccggcacttaccgaagcacataacatccaa

SEQ ID NO: 147034 - DNA, 236 bp, Zea mays
  Clone ID: MRT4577_65612C.1
cgtactgctaaatcagcggcggcatggacgacgactgaggcaaggtcaccctcccggcggtgcattacattggccgtgtcaatgccatcacgccgaagactaaactagtggatcagaccaagttgatacagtacagtcactatatatatcgggctgccctgccgactcttgatcccttccttctctggaccaaaagcatatttacttgagcgagacgagctccagctgaggaagtg

SEQ ID NO: 147035 - DNA, 922 bp, Zea mays
  Clone ID: MRT4577_65613C.1
cgctcgactaccaaaatcccaccgcccacctctgcaatggccgcctcccgccccccaccggccggggcggtgtcatcctccctccccccaccccaccccgctccgtcatcctccctcggtttccctcctatctgccctccgaatcccgctcgtgaaccctagacaccctccgtcgagatctccaaatcccactctcgaaccccgtgcccccgccctcgtccgccccacatcgtgcgatgcccccgccgcgagagctcccctagatggcatggagcgtgtcgcccacgcacttgccctgaccctgattgcacactaccgccgctggatgtccacgcgctggccctcttcatctcgctcgcggtggtcgtggtgcagacctcgctgatcatggtggagcggagggcgaagaagcggatggtgttcgtgatgaacaagctcatgtggctggtgtgcctcttcatctcggtggccttcatcgcgctgacctacgtggtggtggggcacgacgactggtggctggcctggtgcaccatgggcatcggcgccgcgatcatgctcaccaccctcggctccatgtgctactgcatcgtcgcgcacaggctggaggagaagaacaccaggaagatcaggagggcctccgcgagccagtcccgcggctcgtggtcccgatcggtcgactcggacgaggagatacttaacagcgagtacaagacgaagatgtacgcgctgtagcctgtaggatggatagcaagtgtaacatgacggattcttttgtacataccagtgctttgtttcgccagaggctgctccatggcattcggctcgggatgcagaggctgcggcaccacatcagtcttcaaccaaaggactgaaggcccttcctgtgaaaccaagttcaggtcacttgaccggtgtgcctgtt

SEQ ID NO: 147036 - DNA, 988 bp, Zea mays
  Clone ID: MRT4577_65614C.1
gataaacaagggcgcttccattgctaatgacatacatggatgttcacaaatcttggactgaatttactttagagctaagatgcaaatttattttcaggtatttacaatgttctaagttccttgtggacgacgaaactaggcactggtgggatatgatacgcgtgactacatacactagggccctgtttgggaacaaagtttttctgcagttttggaagaatacaaatactgcagtattctcaaatactgcagtattctcaaatactgcagtattatatacataatggtgtttggcaagctgggtaaaatctatgttttcaaaactgaagtattgcaaatactatagttgttttaaggcattctaaacttagctctggacctcagttttcaaaactgcggtattataaactaagaagggcatctattttttgagaccagagagggccaattttggcttgttatgtgaacaaagtgttgtgttttctgctcaaaaggtttgttttacctttgtaagttgtaagtttatattatacaaactgcagttacatataccttggctggtttcatgactgcttgatgagaagaaaaggcgcttgagctgatagagcgtgtattcattccctaagtattccaccccttggcaccaattgaagacaagatcgattcatgcatttcgtatgtttcagttgcatttaggttgtatgacttgagacaaactgggtttattgagcgtgaagaggttaagcaaatggtaattgctatattgatggaatttgatttaaaattatcagatgacttacgggcatacttcatagataagtcatttgaagatgcgaacgcggatatcgtgccataaataggaaaggagtagtggaaggaatttgcgttacgccaccctaacctatttaaacatatgtcactgaccctgacattacgtattaatgaagaactaatggaaacattgactgtggaagagagaataagcttg

SEQ ID NO: 147037 - DNA, 426 bp, Zea mays
  Clone ID: MRT4577_65615C.1
attaatggatttaactaataatatgattttggcacactaacttaaatcaaaaaaggagaggccggatgtcccaaacaaaaccaagaaagccaagggtttcaaagtaggactaagggagaaaggaaaaacgagggcaccgtagacaagaaaaaaaaaaaccctgggattttgcagggagcccttgaaaaggaaaaggaaaaaaacggacccagcaacgcaacaaaaacagaaaagcaatagaataggccaaggggcccgggggagaagacgaaaatagccgcaacaggggaaaagacaaaaactccttcacgacaaaaaacgggagggccggcagagcatacggaaaggtggggaaaaaaagaggaacaaaagagagctagacgcataaacacggacccaacaaccaagaaaataaaagacgcgggg

SEQ ID NO: 147038 - DNA, 398 bp, Zea mays
  Clone ID: MRT4577_65616C.1
ggaaaaaaatgtctctttttttacataacatgcatgctagggaccgggttttctggcggccactgacaaaatacagtatacggtatggtggttacagatgtctccactcaccagtgagatagacagaccactatagctacgtacagagggctggctgatcgatcgggtgagcagcactaccacgctgccgacaatttatcagctgccgttgatgaacgcggcgagcgtggccatgtgcatggcggccttgggcgaggcgaggttgttgaggaaatatcattggccctccccgggcgtaacgtacaggggcgcccgtccgcgccacccgttggcccggagcgcgttcacgtacgcgcgctggaacggtccgagccggtcctgcttcgacaccgttatta

SEQ ID NO: 147039 - DNA, 386 bp, Zea mays
  Clone ID: MRT4577_65617C.1
ataacacgataacttacattaagtattccctcaagtttgcaaatactaatgttttggaaacaacatcactataatatgccacataatcgtacaataacacgataacaatatatattctagatatgtgcccgtgcgttgcgatggaagtaaaagatttgtatgaaacattgatacttaatttagaattttagttacagacaaatgtgtcgacaaatgttcactaataagctaatcctttttagcgatatcgacaagtctttgttgtatgtttgtagggatggcatatcggcacgaattgtcctcataacttaaaagatcaatcacaaagtttcttccaaaagtctttgcatccccaacaaatttcaatcgtctgtcattcccccaca

SEQ ID NO: 147040 - DNA, 1490 bp, Zea mays
  unsure (1)..(1490): unsure at all n locations
  Clone ID: MRT4577_65618C.1
ggcccacnnnnnnnnnnnnnnnnnnnnnnnnnnnnnnnnnnnnnnnnnnnnnnnnnnnnnnnnnnngaagtcctgaactgtccagtcttgaactgtccagtctggaatctggatcgtggttacagcggggtattttacaccaacaccatgatcatctcttaccctcttcttcctcggccgtccggggggcctaagcgacttgggtggattgatgaccatctccggccattgttcatattggagcagcacatgtggttctgaagtgtccagtctggttgcagcggctgcaatggacgacgcgcttgactcgcccacggtcctccgctcttaccctcttcttcctcggccgtgcagcggtcctcagtgacttgggtggattgatgaccatctccgccttgacctcgccttgatctgccgtctcactccacagcgtcttgtccgggatcgggtgtatggtctgcgagtaggtcttgcggtacgtcgccacggtgaagcagctctcggcgtagcggtggacgttctgccggcaggagagcagcgccgccacgccatgcgcgcacggcacgccgtagagctgccagccggggcacaggcagcacctgttgcggatgtccacgatgttcgtcccctcgtgagccgagacgacctcgaactccgcctcgttggcccgggccacctgtacccgcgcgcgcgctcgatggcctcctgcacgcggcgctcggctgcaggcacgaggatcgtgctccactgcatgcttgcctcgcgtcgctcgttgaaccaggtcatcagctggcgccggatgcactccatcatctgaactataggaaggccagaggcatccagtatccaggaattcagcgactccgcgatgtttgctgttagatgaccgtaccttgtcccctcaaagtaagccgtggcccaaagacgtgaaggtaggtgccttatccaaacaacagcttctggtgaagcgtcctctatctctagcagcttagtttcaaactcaatcacagtcagcgcatgagcagcttcccagagaaggttggcaagcacaggattgttgaactcctttttgaaggcttcactaacatggcgcatgcagtacccgtggaatgcagttgggaagttgaattcaactccatcagtaatgcccttccgtctatcggacaagatggtcagccttggcatgttctctgtgttcttctccagcaactcatgcagctcagacaagaaccatacccagttctcgtcagtttcctcatcaaccacgccaaatgccagaggaaagagagcaccatccccatcaaaaccagtggcaagaaacaaggtgccaagatacttgtttttcagaagggtcctatcaagcccaataagtggacggcatgcattgacaaagccaaatattgatgcactgaatgatatgaagagtcgccgaaagcaattgtcatctgggtttccatacactcgcgctgccggcctcgaggtacccaatg

SEQ ID NO: 147041 - DNA, 517 bp, Zea mays
  Clone ID: MRT4577_65619C.1
ggccgccgcgtggggggggggggggtgttttttttttttttttttttggttttttttttttttttttttttttttttttttttttttttttttttttttttggcagcctctggaaccgaaaaaccctttattttacgggttaaaacatccccacatgtctgggggggggggcgggggtaacacccccccccgtcatcatcataataatggccactgcccccgccgggtgccggggggagacctcaacgggcgacccaaaaggggccctattcccccccccataattttttttttttttggggctttcacagccacgagccattattgatcacggccccccccccgggttggacagggaaacccggcactggatcaatgtcccccccacttttaaccccgggagaacggggaaacccaccaccccctcctcggggtcttccccggggcccccctcgttggggctttccatgtacacctcccaaaaagcgcccccccgtgcccacctggaaaatggacc

SEQ ID NO: 147042 - DNA, 379 bp, Zea mays
  Clone ID: MRT4577_6561C.1
atgttgggttatcttttttttttttttttttttcttcaccatgatcatccgtttctttttgattggtggcatatcgacgacgactgacttcttacctttacttggggttcaacaaaggggcgacaagcctggcgaaccaaaaacacaaagaaagggggtgatatggggggacgctaacttatggggcccccagcggacacaacaagcatcctaaagcacaaaaaggttgaacagctccccaaaacaaaaaaaaaggggttgcgggtgtcctcccacccgttctctgtggaacaatcccgcccgctctgaacttgcaggggacccggccttaaaagcacacagcccccactggacaaaagggaaaagagccgctgcggga

SEQ ID NO: 147043 - DNA, 363 bp, Zea mays
  Clone ID: MRT4577_65620C.1
atttccaatcgacccacgcatcactcaaaataacatccttccttccaaaaaaattttacaataaaaaactacaatacataaaacagctaaagttaaaattataacatcatcacggtactccaaatacaattatacaataaacccctactacacttgttcaattatacctcttctcatataccatacactcttaccctccaccattttctactccacaatcttaattaaactgctcaaatcattattactattcccaatcgataccaattcctacccattacataaatttccttttcccacattatattttttcaaaaatttctatctcttacattctttcttcttataaattcatctcacata

SEQ ID NO: 147044 - DNA, 769 bp, Zea mays
  Clone ID: MRT4577_65621C.1
ccattagtccattcccattcccatcccgaccccgtcttgccaccggctacacgctctcggagtctcggtcgctgcttgccaccgaccacaccctctctatcgacgccgcccaaatggaggccatccggaagcaggcctcaaagctccgggagcaggtagctcggcagcagcaggcggtgatgaagcagttcgggggcgggtacggcgcagacggcgtgttcgctgacgaggctgaggcgcaccagcactccaagctcgagaaactctacatctctacgcgcgcggccaagcacttccaaagggatatagttcggggcgtcgagggctacatagtcacggggtcgaagcaagtcgagatcggtggacagctgaaaccctgttgccatttcggtgaacacataaatttgaatttcgaaattgttaatgtaatgtgctttgtgttactagggaacaagttatgtgaggatgggaagaagtatggcactgagaacacttgtaccagtggtagcacactgtcgaaggcggcattaagttttgctaaggcacggtccatgatggaaaaggaaaggggtaacctgctgaaagcccttggcacacaggttgcagaaccactgagagctatggttatgggagctcctttggaggatgcccgccacctcgcccaaaggctattgaagtttcaaaacgccaaatgaaactaagagaagcatctggaaatagtgatatgatttcaaggctagaagcggctgagtcaaagctgcaggagttg

SEQ ID NO: 147045 - DNA, 1405 bp, Zea mays
  Clone ID: MRT4577_65622C.1
ccacgcgtccgctcatggggccccactccattagtccatttccattcccatcccgaccccgtcttgccaccggctacacgctctcggagtctcggacgccgcccaaatggaggccatccggaagcaggcctcaaagctccgggagcaggtagctcggcagcagcaggcggtgatgaagcagttcgggggcgggtacggcgcagacggcgtgttcgctgacgaggctgaggcgcaacagcactccaagctcgagaaactctacatctctacgcgcgcggccaagcacttccaaagggatatagttcggggcgtcgagggctacatagtcacggggtcgaagcaagtcgagatcgggaacaagttatgtgaggatgggaagaagtatggcactgagaacacttgtaccagtggtagcacactgtcgaaggcggcattaagttttgctaaggcacggtccatgatggaaaaggaaaggggtaacctgctgaaagcccttggcacacaggttgcagaaccactgagagctatggttatgggagctcctttggaggatgcccgccacctcgcccaaaggtacgacagaatgcgtcaagaagctgaagcgcaggctattgaagtttcaaaacgccaaatgaaactaagagaagcatctggaaatagtgatatgatttcaaggctagaagcggctgagtcaaagctgcaggagttgaaatcaaatatgggggttttgggcaaagaagctttggccgcaatgactgccgttgaaggccaacagcaaagactgacactgcagcgtcttattgcattggttgaatcagagagaaactaccaccaaaaggtcctacaaattcttgatcaacttgagagagagatggtatctgagcgccaaagaattgaaggggcacctcctccggtggttgagagttccatgcctccaccgcctgcatatgaagaagtcaatggtatattcatgaggaatacggtcgcagagttggtcgagaccgtggagtatttcctggctgaggcaatccaatcatatcgagcagagagcgacactgagctcaacctttcagctggtgactacatagtggtccgaaaggtgtcgaacaatggatgggccgaaggtgaatgcagggggagagctggctggttcccctacgactacatcgagaaacgagagcgtgtgcttgcaagtaaagtcgcgcaagttttctaaaacttttgctgagacatccatatattcccggggatgtgcaatgtgtattatgcttgatcgtcagaagagaagatctgtaattttgctggaagctgcctgttggatggcttgttcctgcctggccgtctgcattgttcaaattcatgtggcaggaactgaacattattaatgcttaatcttcattcttca

SEQ ID NO: 147046 - DNA, 1559 bp, Zea mays
  Clone ID: MRT4577_65623C.1
gccggagcgggagcctgaccctgacgccatctctccatccttctcctcctccctggttcagatctctcatcgtcccccgctgcattccatcccgaccccgtttgccactggtcacaccctctccatcgcttcctgccaccgaccacaccctctcgatcgccattcgccaccggccaaatggaggccatccggaagcaggcctcaaagttccgggagcaggtggctcggcagcagcaggcggtgatgaagcagttcgggggcgggtacggcgcagacggcgtgttcgcgaacgaggccgaggcgcaacagcactccaagctcgagaagctctacatctccacgcgcgccgccaagcacttccaaagggatatagttcggggcgtcgagggctacatcgtcacggggtcgaagcaagtcgaaatcggtggacagctgaactcccgtgtctcttttattgaacacatgaaatttgaattcggaattgttagtgtaatgtgctttgtgttgttcagggaacaagttatgtgaggatggcaagaagtacggcaccgagaacacttgtagcagtggaagcacactgtcgaaggcggcgttaagttttgctaaggcacgatccatgatggaaaaggaaaggggtaacctgctgaaagcccttggcacacaggttgcagaacctctgagggctatggttatgggagctcctttggaggatgctcgccaccttgctcaaaggtacgacagaatgcgtcaagaagctgaagcgcaggctattgaagtttcgaagcgccaaatgaaactaagagaggcgtctggaaatagtgatatggtttcaaggctagaagcagctgagtcaaagctgcaagagttgaaatcgaatatgggggtattgggcaaagaagctgttgcagcaatgactgccgttgaggcccaacagcaaagattgaccttgcagcgtcttattgcattggttgaatcagagagaaactaccaccaaaaggtcctacaaattcttgatcaacttgagagagagatggtatctgagcgccaaagaatcgaaggagcacctccggtggttgagagttccatgcctccaccgcctgcatatgaagaagtcaatggtatattcatgagaaatacagttgcagaattggtcgagactgtggagtatttcttggctgaggcaatccagtcataccaagccgaaagcgataccgagctcaacctttcaactggtgactacatagtggtccgaaaggtgtcgaacaatggatgggccgaaggtgaatgcagggggaaagctggttggttcccctacgactacatcgagaaacgggagcgtgtgcttgcaagtaaagtcgcccaagttttctaagtcttccgctgagccatgtagtatccccggggttgtacaatgtgtgttgtttatgcttgtcatcttcagagaatcagaggagatctgtaattttgctgaaagctgcctgttgggtggtttgtttctgcctggccgcctcaattgttcaaattcatgtggcaggaactgaatatattcattcttcagt

SEQ ID NO: 147047 - DNA, 1669 bp, Zea mays
  Clone ID: MRT4577_65625C.1
gggtacctcgagaccggccgggtcgccggagggcattactatttactgcatcagtaccacctccgtcaggagagccggcgccgtccgacttccggccatctcaggcacccgaactccgccccgatcccttgcttcaaaaagcaaaaaacaacaacaaaaaaaggactgaaagagaaagaacgccggagcgggagcctgaccctgacgccatctctccatccttctcctcctccctggttcagatctctcatcgtcccccgctgcattccatcccgaccccgtttgccactggtcacaccctctccatcgcttcctgccaccgaccacaccctctcgatcgccattcgccaccggccaaatggaggccatccggaagcaggcctcaaagttccgggagcaggtggctcggcagcagcaggcggtgatgaagcagttcgggggcgggtacggcgcagacggcgtgttcgcgaacgaggccgaggcgcaacagcactccaagctcgagaagctctacatctccacgcgcgccgccaagcacttccaaagggatatagttcggggcgtcgagggctacatcgtcacggggtcgaagcaagtcgaaatcgggaacaagttatgtgaggatggcaagaagtacggcaccgagaacacttgtagcagtggaagcacactgtcgaaggcggcgttaagttttgctaaggcacgatccatgatggaaaaggaaaggggtaacctgctgaaagcccttggcacacaggttgcagaacctctgagggctatggttatgggagctcctttggaggatgctcgccaccttgctcaaaggtacgacagaatgcgtcaagaagctgaagcgcaggctattgaagtttcgaagcgccaaatgaaactaagagaggcgtctggaaatagtgatatggtttcaggctagaagcagctgagtcaaagctgcaagagttgaaatcgaatatgggggtattgggcaaagaagctgttgcagcaatgactgccgttgaggcccaacagcaaagattgaccttgcagcgtcttattgcattggttgaatcagagagaaactaccaccaaaaggtcctacaaattcttgatcaacttgagagagagatggtatctgagcgccaaagaatcgaaggagcacctccggtggttgagagttccatgcctccaccgcctgcatatgaagaagtcaatggtatattcatgagaaatacagttgcagaattggtcgagactgtggagtatttcttggctgaggcaatccagtcataccaagccgaaagcgataccgagctcaacctttcaactggtgactacatagtggtccgaaaggtgtcgaacaatggatgggccgaaggtgaatgcagggggaaagctggttggttcccctacgactacatcgagaaacgggagcgtgtgcttgcaagtaaagtcgcccaagttttctaagtcttccgctgagccatgtagtatccccggggttgtacaatgtgtgttgtttatgcttgtcatcttcagagaatcagaggagatctgtaattttgctgaaagctgcctgttgggtggtttgtttctgcctggccgcctcaattgttcaaattcatgtggcaggaactgaatatattcattcttcagttatcctgtcaatatatat

SEQ ID NO: 147048 - DNA, 609 bp, Zea mays
  unsure (1)..(609): unsure at all n locations
  Clone ID: MRT4577_65626C.1
cccggggtgcagttatatacccagntatactttcagctggcttgtcaagcccagtggctaataataagtaagttttcgatcatttatttatcaaaggaatgcattcatgattaagcgaccggtatgtttctgtttctcacttcacttgttggctatagaattcttgcaccgagctgcagacctcacactggtaccatctgttgctatcggcagggatcttcaagctgctcgtgttacagcagccaataaaatacgcctttggaacaagggtgttgactcagaaagcttccatcctcgtttccgcaacatggaaatgcgttcaaggctaacgtacatgcatattcctcttcccttttgtgcagttttgtatttgtccgtttcaatgcccgggccgaactgtggtgctaatgttttcgttggagcaggaatggtgaaccagaaaagccacttgtattttatgttggacgcttaggagttgagaaaagcttggattttcttaagaggcgagcccttatatgtccctggtattttgattgctacggattgtggtatgtacaagcttgatgctggatcgtaggttcattactttgcagagtcatggaccgactt

SEQ ID NO: 147049 - DNA, 1790 bp, Zea mays
  Clone ID: MRT4577_65627C.1
cctcgaggggccggcccgggaaaaaaaaaaaaaaaaaaaaaaaaaaaaaaaaaaaaaaaaaaaaaaaaaaggcagcaaaaaaaaatattgaggccgaacgacaagagtgcattcccattcccatcccgaccccgtcttgccaccggctacacgctctcggagtctcggtcgctgcttgccaccgaccacaccctctctatcgacgccgcccaaatggaggccatccggaagcaggcctcaaagctccgggagcaggtagctcggcagcagcaggcggtgatgaagcagttcgggggcgggtacggcgcagacggcgtgttcgctgacgaggctgaggcgcaccagcactccaagctcgagaaactctacatctctacgcgcgcggccaagcacttccaaagggatatagttcggggcgtcgagggctacatagtcacggggtcgaagcaagtcgagatcgggaacaagttatgtgaggatgggaagaagtatggcactgagaacacttgtaccagtggtagcacactgtcgaaggcggcattaagttttgctaaggcacggtccatgatggaaaaggaaaggggtaacctgctgaaagcccttggcacacaggttgcagaaccactgagagctatggttatgggagctcctttggaggatgcccgccacctcgcccaaaggtacgacagaatgcgtcaagaatctgaagcgcaggctattgaagtttcaaaacgccaaatgaaactaagagaagcatctggaaatagtgatatgatttcaaggctagaagcggctgagtcaaagctgcaggagttgaaatcaaatatggggggtttgggcaaagaagctttgggccgcaatgactgccgttgaaggccaacagcaaagactgacactgcagcgtcttattgcattggttgaatcagagagaaactaccaccaaaaggtcctacaaattcttgatcaacttgagagagagatggtatctgagcgccaaagaattgaaggggcacctcctccggtggttgagagttccatgcctccaccgcctgcatatgaagaagtcaatggtatattcatgaggaatacggtcgcagagttggtcgagaccgtggagtatttcctggctgaggcaatccaatcatatcgagcagagagcgacactgagctcaacctttcagctggtgactacatagtggtccgaaaggtgtcgaacaatggatgggccgaaggtgaatgcagggggagagctggctggttcccctacgattacatcgagaaacgagagcgtgtgcttgcaagtaaagtcgcgcaagttttctaaaactaaaacttttgccgagacatccatatattcccggggatgtgcaatgtgtattatgcttgatcgtcagaagagaagatctgtaattttgctggaagctgcctgttggatggcttgttcctgcctggccgtctgcattgttcaaattcatgtggcaggaactgaacattattaatgcttaatcttcattcttcagttatcccgttaatatgtatccatactttttgtttgtttgtttgaagcatacaacaagacgagaaaaaaaacgcaaaatattctgtatcgacaacaagatttatttgccgagacatccatatattcccggcgatgcgcaatgtgtattatgctcgatcgccagaagcagaagatctcgcattttgctggaagctgactgctggatggcatgatcctgcccgcccggctggattgttcaaattcatgccacatgaactgaacattattaatg

SEQ ID NO: 147050 - DNA, 399 bp, Zea mays
  unsure (1)..(399): unsure at all n locations
  Clone ID: MRT4577_65628C.1
aaataggcaccaaatgtatatggtcggccgcggcaactactgcagcgtcttgttgcaactgctgttcttccgtctcaccggtcatctcttccagcgacttacctttggaatctggtagaaggaaggtaaacacaaggccgactaggttagaggcaaatagtgcccacagcgctcttggggcgacgtggtgttcttccatcgtgaacatgaagccaaacacgccgatgatagcgcctatcttcccaaatgcgccggctatgccatggcacgttgcgcgcatccgtgttgggaaaatctccgccggaactatgaaagtggtggtgttgggaccaaaattggtgaagaagttggtcaagccatacaagactgcgaaccctatcttgcgccgntttgttttct

SEQ ID NO: 147051 - DNA, 226 bp, Zea mays
  unsure (1)..(226): unsure at all n locations
  Clone ID: MRT4577_65629C.1
tagctgaattgctggatccacaaatggaattgncacacgcatgtacctgggggctgcaaatcctcaattcatgcagataactgaccagaactgacaagttattttactagtgatgtcaaaacgataaccaacataaggttttgagtccacaagtactgctttttaccgtacctttcactacacaaaagtgcagctttgtttacactatcgtgtttctgatcttctt

SEQ ID NO: 147052 - DNA, 310 bp, Zea mays
  unsure (1)..(310): unsure at all n locations
  Clone ID: MRT4577_6562C.1
cccaactaaaatccttaaaataaaactgtttgggccccaatatacccaaatttttgttccatccggaagtaatcgacccccaacacgggtgggaacacatccggttcaacttttcctacaaacaaaggctcccaggaagcaaaagtaaacgataaggaaaaaaacaagggctacatgctatggaaaccatcccaggggagcccactagcccactatgggggggctgttaactcttcgtaaccctttttttccttgggaagctggaatcatgcgcaaaatcctaaagaaagaaaaggcagcctnccgggga

SEQ ID NO: 147053 - DNA, 464 bp, Zea mays
  Clone ID: MRT4577_65630C.1
aattcggcacgaggctctctctcctacccttctgctttctcccgcgccccaaatccgagccccggagcctgatggcatggtgagcgacagcgaccatgaccatgacgagctccttcaaattgcgctgtatgagcatgcggcgcgggacctaaaccaccagagcccgaccgccgccaacattgccatgggacaaccttgagcggcaacccgtcgaaaaagaccgtgtcttttattgcttacccaggggcgcccgattgtagcacgcaattctatgcccggaggacacggatgacgattactcagatgctaagctgctgtctatctactctgacgaatacgattaccatcctgacagctcgtgacccgacaacgtcacagcatggtggtgtagtgacactctggagagcgaagggccgcggcacggaactacttaggactcacacgatgacgataccatgagctga

SEQ ID NO: 147054 - DNA, 672 bp, Zea mays
  Clone ID: MRT4577_65631C.1
ccggccgggccgggaaatctcaacgaacccgatcatcagacacagagacagcgcataccatcctcatgaacgccggcccgaaggatctgcaaccccgtggcgaagatcataatcgctgagtccatgcagtctcagtgacagattccaaccggactggtgatgcagcgccgcgcttctgcacacgagacgtgccagcatcggctccctcaaccacaccctccatgtgaccatagtacatgaccaacctgtgctacaacgacaatacacgcgaacacagtgactgcctcgctcctgatgggtccgactcctaaacccatctcttatgcgacaacgaagttactccggttgcttgaaggaactccgagaagacaccacgcttacctgcatgctgctgaactaagtacgacgactgtatcgcgggagccactgaccaagagaaggatgcatctcagtatcagtgggtggtcaataaagatgacatctctgctactaactaggctggccccatgaaccgtcgcagaatgtcaacgatgatgtatacacgtctgccgttgaccttgtctccggtgataactgcacgaacgactgccaagctcctcctgctaaaggcctctatgaccctccagctaccgctgatggtctcatgaccactggccatgccatcactgctac

SEQ ID NO: 147055 - DNA, 626 bp, Zea mays
  Clone ID: MRT4577_65632C.1
aacaaaagacgatttggcttttgaccctaaggttggggacaaaaaacaaacttacttgttgttccaacaaaattttcctttcaagcaaatagccgggcaggggaagttttattacagcttcccaacaaggaaaaacagagatcctaatcctaaccaaaaacaattttaataaaatatggggggggggcccaatcgttaaaaccaagcacattttaaatggggcccccctcgccccataaccccttaaaacaaaaaacaaaaccttcccggctgggggggggaacatgaaaaaacttcacaagaggttttttacatgaccagaaccctttttcgcagaaggaagcttcttgccctaaccggggggggccttttttgggggggggggggtttttttttttgaccccccttaatatttttggcctttggtttgggaggagggccaactgcctttgttttttgctccttgggaacgggttttttttgaccggaaaaggcgacggggatggttttttttgatcaacaggaaaagctgaaggcaagggcttttttttaagggttttccggccattgaaatgggggctaaaggaaagggacccttgcaccttgaaactgatgggtttgggggg

SEQ ID NO: 147056 - DNA, 271 bp, Zea mays
  Clone ID: MRT4577_65633C.1
gatccacctaaacgaacaacataaaccaccactcgcacatataccagattgcctcacacaccagcatcaacaagttcacatgctgctcgcgaaaacgtgagtatcgacagggagtttatgttcagacaactatcaacgagccatgccgtaaaccatacatcatctgcaccttcatcagcaccaactacatcttgattgtgaaggccgacatcttcatctcgatcgatctcatggccatgtgccacagcctggacggttccatgtgcagccc

SEQ ID NO: 147057 - DNA, 329 bp, Zea mays
  Clone ID: MRT4577_65634C.1
aaaacaggaggggcttttttgagccaatcggggcagggacataggcacacacactagcgcacagagatcaaagatgcatggtgtgtcacgatgccggccgatgacatgcaccaacacaagcccagcaaaaccgacaccaagcttgcctggcggagagccagagccagaccagacgatgggtccatcctttatttttgacacgccacaggcacaaagaacacagtgcggaaaaaaagtgacaggcatgcatgccgcaaacgaaacaacgctataggatcagcagttgcacgggctgcacttgcagctgacaccgaagctgcagccttggg

SEQ ID NO: 147058 - DNA, 443 bp, Zea mays
  Clone ID: MRT4577_65635C.1
tactgcactgctatcgaggcctcgttgcaacgtgactcactcaggcgtctcatcactggagctccccacgctgactgcgctgctcctacaacttgactcaaccacaggaggccctgggcaccatatctactatgatggacctacccgaggccgtgctcgccctggtcatacacttgcttgccaacggatgattgaccactaccgcaagatgggtgctgctacctccttgcctctgatgacctgctcaggatggatgatctgggaataggcgccctacctgacctaatcggtgaccgagcgctcaaggacaacataaacaccacggtggacgtgcttaccagagcccgtctcactgaggaacgcgatgacagcatgatacctctcccaatggcacttgtcaccgcgcatctgaccatcatgctgaatgccatgctcgaggcagt

SEQ ID NO: 147059 - DNA, 234 bp, Zea mays
  Clone ID: MRT4577_65636C.1
tcggtcacatagacgggaactacctttaatgaatactttcatggacacctcgcgcagtgggatggggtcatctttgggagacggggaggcccatatgacattatttatccccaatacaactcttaaaagatacacctacttcctgtaattaccagacctgcatactagaagatacattggatacaaaccaccttcctttgcctatcttacttacccgcgcctgactaccaaaat

SEQ ID NO: 147060 - DNA, 1000 bp, Zea mays
  unsure (1)..(1000): unsure at all n locations
  Clone ID: MRT4577_65637C.1
agagagagaggagcttcagcctcgaaagcaccccaaaactcgcagcaacgaattgggcatattcgccccacttgcacccccacttttggcactttcccttccggtcccctctcctcggcgcgatctaaatccggtccggcgatggacggcggggggcagccnccggacacggagatgacagacgccggcttgggcggcggggggcagccgccgccgcccgcagcagccggcgggcggggccgggatgatggagaacatccacgtcgacgctcagccacggtggccgcttcatccagtacaacatcttcggcaacgtgttcgaggtcacctccaagtacaagccccccatcctccccatcggcaagggcgcctacggcatcgtctggtccgcccgccctcccctcactccgattcgcatcgtttgttgtgcgactgactggccttctgatttgtgacctgcccagctcggcgctcaactccgagacggcagagcaggtggccatcaagaagatcgccaacgccttcgacaacaagatcgatgccaagcgcacgctccgcgagatcaagctgctccgccacatggaccacgagaatattgttgcaataagggatatcatacctcctgcgcagagggctgcattcaatgatgtgtatattgcatatgaattgatggatactgatctgcatcaaattattcgttcaaatcaagctttgtcagaggagcactgtcagtatccatcaattcatatgcaataagggatatcatacatcctgcgcagagggctgcattcaatgatgtgtatattgcatatgaattgatggatactgatctgcatcaaattattcgttcaaatcaagctttgtcagaggagcactgtcagtattttctttatcaaattcttcgtggcttgaagtatatacattcagcaaatgttcttcaccgtgacttgaagccttgcattcaaaagaagattgccggacgcgtgggcggacgcgtggg

SEQ ID NO: 147061 - DNA, 375 bp, Zea mays
  Clone ID: MRT4577_65638C.1
gcgatctagaactagttttgcgttagatggcatcatatggagttgggatgttgaacactattggctatgtatattcaaggcaagctgcaaaagaacttggaaagaaagtgatgtttttgggtgttccatttattgccgaatggtttaaggacaaagggcattttatcaaatcccaagtaacagctgccacaggtaacatagaactaatcattgtttatctgggagttctgtctgaaaatcttggaagcatgtaatgcagcttttggcatcatctatgttgatgtgcatcatctttcatgaaagttgttgtctcttatgtggcaagtgcaatagctcttatgcagttgcaagataacttgacgaagtatatgagtg

SEQ ID NO: 147062 - DNA, 1235 bp, Zea mays
  Clone ID: MRT4577_6563C.1
ccattcgttagccaggtgtcaccaattccgtttaataggttacattctacagaaaactacatgcatatgcaggggccgcggtttttttttttttttttcagaaatgctagctttatggaatcaacctgccgaggaagctagaatggttcagatacagcaaagtgaaactcttccaatgcaagtctccattcgactactaatacaccggaaaaagttgaaatcgtgaacagtcatttctctctccatgaaggcacgagaatacatcgagtcatcaaccaaacatctcaggtcatataaagttttttccccctatgtttgcccatgcaaaccttccactcggtgcagcccagcggaagcgaaaggaaaagaggcccgtattctgccaaagaaaatccatccatcacagtacacttcacttctttgaaagagccatgacgttgaagttcatcgagttagggttctctgcaattctagctttgatgacttttgcagcatcctgcaacaaggtttcaggtgatgaagggccatgggatgtgggttgtgattttcgtccatcaagctcataaagttcaccatcaacacaggagaaacatacaaaatgttcattaacatcaacattagcatcagtgtcaccagcagatgcagcaacagaatgtgcatcttccatctcatcatcttcctcgagaaaggcagcacgctgagctggatccatatcagccgtttgcttatagaacttctcaaaataggacccctcaactagcttgatttgagatgttgcatttcctattgcatgaataacaccaactgttccacaagcattaccaacagtctgcttcgtaaagtatactttcttgctcaattccttgcccgctgaggtcgatgtggcagcagaaacacttgattcttctttctcctcgtccagggaggtgagcgggtagaggaagaggacggcgagaacgggctggggcaccatagcgagcagctcatcgtcaaggccgtagacgtcgcagaactgcacatcctcctcgtggactcccagcccccatatgaactggttcaggacgtccgggttggcctccagcgggatccaccgcttccccatcttctcggtgcgcggcggtgggagaggagggcggaaaccgagcctgtcgagtgtcgactagcgcagggacaggcggcggggagtagggtaaaatgcgatcggggtggaaatggaaaaggcgccggacgcgggg

SEQ ID NO: 147063 - DNA, 647 bp, Zea mays
  unsure (1)..(647): unsure at all n locations
  Clone ID: MRT4577_65640C.1
ctcgaggccggccggggacacgtgggcacaggcacgggccccctccaaaaaaaaccccctccccagcttgtctgcccctctctccatttcgcggaggaagaaaaaggggaccaaaaaacggaaaaggggataggaggaacggatcagcggtggaagcttccagccctagcgcagcaatggcgggttggtgcgagcaggcggtggcgctgctacagcgccccgcggtggcggagatggccgtcgacgtgctgctctgcgcggtgccgatctgggccgccgtcatgatcggcctcgtcgtcggctggtcctggcgcccgcgctggacgggactgctcttcctcggcctccggagccgcctccgcatcctctgggtgccgccaggnctcggggcccggcggctctggntcgcctgcaccgcgctctccgcctgctccgtcgcgaccaagctcatctcctccgcattccgccgctgcagaggcaagcaccaggacagggcctcccccgacgatgatgccgctgcgaccagagacggcggatgtcgcgccgacggcagaacaaattttgagggtgagcatgatacagtcactgagaaggacctacaacttctcctgcaacttttagataataaggaatgcggggatacagct

SEQ ID NO: 147064 - DNA, 1887 bp, Zea mays
  Clone ID: MRT4577_65641C.1
ccggccgggaatgaccaaaattctcctcctcctgctgctcctcgcattgccgctgccggcagccctggcgctcaccgccgagggcctggcgctgctgacgttcaaggcggcggcgaccgacgacccgcactcggcgctctcgcggtggtccgagtccgaccaggacccgtgccggtggccgggtgtcatctgcgccaacgcctcgtcctcggcgccgtccgcggccccgcgcgtcgtcggcttggccgtggcgggcaagaacatctccgggtacatcccctcggagctggggtcgctgctcttcctccgccgcctcaacctccatggcaaccggctgtcgggcgtcatccccgccgcgctatccaacgcctcgtcgctccactctctctacctctacgggaaccgcctcacgggcggccttcccgtcgcgctctgcgacctcccacacctccagaacctggacgtctccgggaacgcgctctcgggcgagctgccgctggacctccgtggctgccgcagcctgcagcggctcgtgctggcccggaacgccttcacgggtgagctccccgcgggagtgtggcccgagatgcccaacctgcagcagctcgacctctcctccaacgccttcaacggctccataccgcccgacctcggcgagctccccaggctcgccggcacgcttaacctctcccacaaccacttctctggcgtcgtgccgcccgagctgggccgcctcgctgccaccgtgacgctcgacctccgcttcaacaacctctccggggccatcccacagacgggctccctcgccagccagggccccaccgcgttcctcaacaaccccggcctctgcggctacccgctccaggtcccctgccgcgccgtcccgccgcccacggagtcgccgacgccgccggccacgacgaccccgctgccctccaccgcgtcctccgaccgacaccagcccatcaggacgggcctgatcgcgctcatctccgtcgcggacgccgccggggtggccctggtcggcgtcatcctagtgtacatgtactggaaggtcaaggaccggaaggggcgccgcgacggcggcggcgacgacagcagcaagagcgggctctgccgctgcatgctgtggcggcacggtggcagtgacagctcggacgcgtcctcgggcgacggcgacggcgaaggcaagtacagcggcggcgagggggagcttgtggcgatggaccgcgggttccgcgtggagctggacgagctgttgcggtcctcggcctacgtgctgggcaagggaggcaaggggatcgtgtacaaggtggtggtggcgaacgggaccacgcccgtggccgtgcggcggctgggcggcggcggcggcggcgcggaccgctgcaaggagttcgcggcggaggcgcgcgccgtggggcgggtgcgccatcccaacgtggtgcgcctgcgcgcctactactggtccgccgacgagaagctcgtcgtcaccgacagcctcgaaaagatcggctaatgagtcacaaggtcatgctagcgtacacaacgccatgcatgctcatccaaggtcattgttatttttattaccttttccgtctcctccccgattttctctctcttgtaattcagtcttttttttaatttccttgctgtgctctcttgcaattggtcgtttgtaattgttggctattcttttgggtgcaattcatgttttccgtaattgatggctattacaaatggtacatagagaggtatgtaggagaaagggtatttccagcttaaattttcaggcctgttttagtacactggttttcaaaaccacaatttgtaatatcgcataactatagtatattttatattagctaaaaaaaaaaaaaaaaagcggcc

SEQ ID NO: 147065 - DNA, 2320 bp, Zea mays
  Clone ID: MRT4577_65642C.1
gcgccgcctcaacctccatggcaaccggctgtcgggcgtcatccccgccgcgctatccaacgcctcgtcgctccactctctctacctctacgggaaccgcctcacgggcggccttcccgtcgcgctctgcgacctcccacacctccagaacctggacgtctccgggaacgcgctctcgggcgagctgccgctggacctccgtggctgccgcagcctgcagcggctcgtgctggcccggaacgccttcacgggtgagctccccgcgggagtgtggcccgagatgcccaacctgcagcagctcgacctctcctccaacgccttcaacggctccataccgcccgacctcggcgagctccccaggctcgccggcacgcttaacctctcccacaaccacttctctggcgtcgtgccgcccgagctgggccgcctcgctgccaccgtgacgctcgacctccgcttcaacaacctctccggggccatcccacagacgggctccctcgccagccagggccccaccgcgttcctcaacaaccccggcctctgcggctacccgctccaggtcccctgccgcgccgtcccgccgcccacggagtcgccgacgccgccggccacgacgaccccgctgccctccaccgcgtcctccgaccaacaccagcccatcaggacgggcctgatcgcgctcatctccgtcgcggacgccgccggggtggccctggtcggcgtcatcctagtgtacatgtactggaaggtcaaggaccggaaggggcgccgcgacggcggcggcgacgacagcagcaagagcgggctctgccgctgcatgctgtggcagcacggtggcagtgacagctcggacgcgtcctcgggcgacggcgacggcgaaggcaagtacagcggcggcgagggggagcttgtggcgatggaccgcgggttccgcgtggagctggacgagctgttgcggtcctcggcctacgtgctgggcaagggaggcaaggggatcgtgtacaaggtggtggtggcgaacgggaccacgcccgtggccgtgcggcggctgggcggcggcggcggcggcggcgcggaccgctgcaaggagttcgcggcggaggcgcgcgccgtggggcgggtgcgccatcccaacgtggtgcgcctgcgcgcctactactggtccgccgacgagaagctcgtcgtcaccgacttcgttggcaacggcaacctcaccaccgcgctgcgcggacggcctggtcaaactgtcctgtcgtggtcagcacggctgaagatcgccaagggcgcggcgcgcgggctggcgtatctccacgagtccagcccgcggcggttcgtccacggcgaggtgaagccatcgaacatcctcctcgacgccgacttcaccgcacacgtcgccgacttcggccttgcccgcctgctggccgtggccggctgcgcccccgacgggccgccctccacgggtggtgccgggctcctcggcggcgccatcccgtacgtcaagccaccggcgacgggtacgggtccggaccgtttcggcgccggcggcgggtaccgcgcgccggaagcgcgtgcgcccggtgcaaagccgacgcagaagtgggacgtgttctcgttcggtgtggtgctgctggagttgctgacgggccgaggcccggccgccgaccacgcgtcgccgtcgacgtcggcgtcgttctcggcgcccgtgtccgggtcgacggcgacggaccggtccgggagcggggagcacgggggtggcgcggtgccggaggtggtgcggtgggttcgccgtggcttcgaggaggacgttcgccccctggcggagatggtggacccggcgctgctacgaggccccgcgctgcccaagaaggaggtggtggcggcgttccacgtcgcgctccagtgcacggagagcgacccggagctccggccacggatgaaggccgttgccgacagcctcgaaaagatcggctaatgagtcacaaggtcatgctagcgtacacaacgccatgcatgctcatccaaggtcattgttatttttattaccttttccgtctcctccccgattttctctctcttgtaattcagtcttttttttaatttccttgctgtgctctcttgcaattggtcgtttgtaattgttggctattcttttgggtgcaattcatgttttccgtaattgatggctattacaaatggtacatagagaggtatgtaggagaaagggtatttccagcttaaattttcaggcctgttttagtacactggttttcaaaaccacaatttgtaatatcgcataactatagtatattttatattagtt

SEQ ID NO: 147066 - DNA, 326 bp, Zea mays
  Clone ID: MRT4577_65643C.1
tgcaagtatagtctcgctctctgctaagcgaagcgaaggttcaagctagtctcggcggctctagtagacgatgggcaaggacgacgtgatcgagagcggcgctggcagcggcgagttcgctgccaaggactacacgggcccctcccccggcgccgctgatcgacgcggttgagctggggtcctggtcgctgtaccgcgccgtgatcgtcgagttcatggtcccgctgctgttcctgtacatcacggtggccacccgtgaccgggaaccagcaccatattgactccctcgacaaatgtctttttttttctgcacaaacccaccccca

SEQ ID NO: 147067 - DNA, 530 bp, Zea mays
  Clone ID: MRT4577_65644C.1
gggggggggcggggggcaaaaaaaaaccctggaaaccttttttttaaaaagtttaaaaaaggggggggggggcaaaaacatttaaaacttgtttgggaaaaccccaaaccgggttcatattgttttccccggaaaaatacgggggcaccaccgagagggacaatttggggtttcccttggccccccccctgggggggggatttttccggggccttggcttgggccccccacttggaccccaaaaagccccccccccactttttgcgggccctaaaaaaatttgggtaaaaaattgccttaaaagcccccaaaaatttggggaacacaaggttttccttgtttttgaaagggggaaaaaccaaaaagggtcctttttttttgggaaaaaaggacccaaggggggccttttttttaaaaaaggaggagggggcccccttttttccccaaggggggggggaccaccccccccggttaagggggcccccgtatgggggggagaccaaaaggtggaccctggtctgccaaaaggg

SEQ ID NO: 147068 - DNA, 462 bp, Zea mays
  Clone ID: MRT4577_65645C.1
cctaattaatgggggggggttaaatcccctttttcccccatttttcaaggggaggggggtaaaccccgttaaaacccattccccgaatttaaccccccaatttggttttaaccaggcccaaaaaactcggaaccctaattggcctttccggagcccgaaccgcccggaccaaagtttggccggccagggaccgaaccctcccgaccctaatttttttttttaaaaaaaagaaattcccccaaaaaaaaaaatttcactttaggggaaacttataagcgagtttggaatctttccaggggggggtgcccccacccccaattttaatcatttttcccgaaatttttttaacccccccatctttttatgggaacccaaattattccacattccccatcttttgaagggaaaaaaaacgtttccttctaaaggggggcagggactcaccttttttggttccctttt

SEQ ID NO: 147069 - DNA, 248 bp, Zea mays
  Clone ID: MRT4577_65646C.1
aacatatctccaatctcttccaatttaaacacgagagaaggccatgacgagaaccctcgggtcgatgctcatcatcggcggcgcagatgtcggcctgtgctccctccctccctctgcatcagcccgcgaggagccactacagccgtatatcgtcggcgggcggaaaccgatcaagaacgtcaacgaccctcatgtctaagagatcggccgctgggcagtctcggagtacattaagacggccaacgact

SEQ ID NO: 147070 - DNA, 1559 bp, Zea mays
  Clone ID: MRT4577_65647C.1
gccttcaattcatttgcgcgggtggttgagtgtttgtcatcgttccgatcgcaggcggccgcataacccttcttcctcctcgatcgatcggctctagctctcctgatcccatctcctcctcgaccacgaggaagccaaacccttctttgtctctagctagtgtgcctctgctgcacgtacacgcactctctctcggctagctagctgctgctctgcgttctttcaattcagctcagctcagctccttctatatattttggcttagcttcgtcctccggcccgaccggtcaatccatcgtcgagtccagcgcctgctcctgcctcctgcacgctgaacctgtagccgcagaatatgcctccagccgtcctccaagagccatgaataacaccagcaatagcaccaagaagcacagcctcctcgcgcccaaggccaccgtggacatgtctcgcctgcaccaggcctacgaccgcggctagctaataggccgggttgatagtcttttgatctgctgtggtcgttagcttgttgaacagaaaaacctactgggttgatagtgtttgccttgtgcagttgtgctagcttagcttgtttgcggctcagttactacgccgtttaattactgtcgtaagttcgttcgtaatcgtaacatcaatgaaggaaggaggcgagaagaagaacatcctgtccaagacgctgcagaggtgccggacctcgctggcccaacggaggaggccgccaccgccggcggcaccgaagagggcggcgtcgtcgccgtccctgggcgtgcccccgccgccgccggtgccagccgccggctacttcaccgttctggtgggcccggagaaggagcggttcggggtgcgcgcccgctgcgccaaccacccgctgttccgggcgctgctggacgcggccgaggccgagtacggcttcgccggctgcgacggcccgctcgagctgccctgcgccgtcgacgacttcatggaggtcatgtgggagatggagctgggcgaccccagcgcatcgcctggctgtggacgcttcgccgccggcagcactagaggctaccaccacgtgcaccagctggccggctaccacttggtggtgagcccgccggcgaggttcctcgtcgctggccgttaattcaacagagcacctgcttgcatgcattgctagctgcttggacgcccggccggcgacggtggtctaaaatggtctggtcgtatcgtcggttatggttgagcttgagcttgaacactcttttcttcctcttcttcttcggcgtcatcataagtagactagagatccgggcgcgcgcagaactttgttcaagtgcttgctgcttgctttactttgccgtctgttaacgtttgtttcactctctttgccttttcatcgcaagtgtactccatagatttgtttttgtgtctttgtaactctcatgttgtcttcaaatcgtttaattaacgatgtatgtatgcatgtatatacatcgtgtttactgtaacgagtgtaacacgttaaatacatataatagaagtggtgtatgtatgttctgtat

SEQ ID NO: 147071 - DNA, 132 bp, Zea mays
  Clone ID: MRT4577_65648C.1
acaaacaagggtgtggttctatgcagtaatataggttaccctatgccttaaacttgggcaccaaaacgcaatccaacctctgaatcggtaattaaagaaagaagttggcgccccccccaacctgacacttcc

SEQ ID NO: 147072 - DNA, 604 bp, Zea mays
  Clone ID: MRT4577_65649C.1
agatctaatttgtccccttcctttcattatttaacaaaatcatgttgtagggattttccctacagcctttccttaaaaaaactagggtagtatctggaagagatctctatctgaaaactaaccacacctgaacttgaacctattctatcttttttttcaacaaatggcaatgacatcctaacagcatgcacatacagataagtcggtgtaattagaaagtttagggctagtttggcaacaacatttttctaaggaatttttattttcccaaagaaaaatgaactaatttccttaataaaataattttttttagaaaaatagggatgccaaactagcccttacagaagaatgcttaggaaatacaatctatctttggatttggtccgtagcagggttactcgtagtcgacgaagctggtgtcttgccgttgggggtgccattggtcaccggagcaggtgttccccattttccttcggactccaatggctccagcactttaacgaacccatctgacagccccaccgcaaattggtttggctcgtgcggatgtgcggcgacaacaagagggggaacatatggattgctggttatcaccgattgcgca

SEQ ID NO: 147073 - DNA, 133 bp, Zea mays
  Clone ID: MRT4577_6564C.1
ctttttcctaccattctttcatcttatacacctgcatctggctgtggtgttgacaatagtggatcctatgaacttccaaatgattttttgtatgtaaacatcctgtgtcatctttcttgtgctgtccctgtaa

SEQ ID NO: 147074 - DNA, 634 bp, Zea mays
  Clone ID: MRT4577_65650C.1
ccggccgggaccattaaaccattcattactacaagatgacatgtgcatgcgatgtgatgaaacacttgttcctcctggccctcttctgcatcgaggatggtgagaatgaatgatcatagggcatcgatgctaaagcgtccgtccctggtggctccttcgacatcaccaagttgcgcgcctccggaaatgtgaagacagacagcacgaaggttgtgtaggaggcatgggcatcggcgtgcggaggaactgggaagcagacgatcctcatacccaagggcagacttccttgtcggacaactcgacttcacaggcccttgtaagggtgacgtgagcatccatgtggatggcaatctgctggcgaccacggagctaagacagtacgaggaccatggtaattggatcgagattctacgtgtggataatctggtcatcaccgataagggaaaacttgacgggaatggcccagacgtgtggagcaagaactcctgcaccaggaagtacgactgcaatatccttcccaactctctgctgatggacttcgcgaacaacgaagaggtgtccggagtcacgctgctcaactccaagttcttccacatgaacatgtaccgatgtgaggacatgctgatcaaggacg

SEQ ID NO: 147075 - DNA, 524 bp, Zea mays
  unsure (1)..(524): unsure at all n locations
  Clone ID: MRT4577_65651C.1
ccggacccctagggtacgccatcgcatgggatctgttgcctccgcggcagcgccaccttgtgctcactcagctgctaccccaggagggcgcgccgtcctatggccccgggctcgcaggtatcctcccgtagacgttagtgggagaggagaagaatgaggagaagggggactacctcaatctcctatgacccgtgccctttgaggagatccagtgcgaggctttaatgtctgtgaagcctgaactttttgcaggattgaggcttgactgcacaactgggtggaataactagttctctcttagccgtaacgatcatatgggcttctttgaagttccagcccacgggtctgacactattaaagtgccaactgctcattatgaatctggtgccaaccttcttagatccaaagntaatgctgattggaagggtgatgacagatggactgcttactgctcgcgtgagatgagatcagacagacacttggacagctgtgagcatgcgcacagcttacgcaagaggcacatt

SEQ ID NO: 147076 - DNA, 555 bp, Zea mays
  Clone ID: MRT4577_65652C.1
agaggctgcgctgctagtaacggctgctctaaatccgctcatcctgggggatatgggaggacaaaagcggggagcgaattagaagagctggacaaaatgtgggacgacgcgacgagcggccctggcccgcagacgggcctgtaaaatctccgaaagggcaccaccgcccgaccgctcgcaatcaattaagatagctgcactggcaggctgctagcaagaaggttggaacagacgacgtctatcccaacgacgccgaatgacgccgccgcctctcaactacttcgcgcgaggtacgaaacgtgcgaggcagagtatcccacccaaagtagcaagctgcccacatgggtgatgaccacgagcctcttggaccggccgaaggcgaacaccaccaccgtgtacgactggatgtacactaactacatgacgagcaccacacgtgtagatggggagatatgatactcgagcagggctggtgtcttgtgccacgtgatgcgtgctgatccatgcgggtatctaagaccaatgcatggtctatctatacttgatgatcactat

SEQ ID NO: 147077 - DNA, 366 bp, Zea mays
  Clone ID: MRT4577_65654C.1
atatctttatctttaatgaaaaaatatacagttgtttattacattttcatatcttttgtcagccttcttgctgataaactatactgttgcatactatatcccgaaaaggaaaaagcccttacccttctaaggcaggaccctaacttttgaacaattacgccctcgtctgatatgatggttcgagctcccacatatgatgtccaattacttctcagtatatatccgaaaatgaaggaaaagcaagcaaagtatctctatggccgccggcaaaaaacagtgagctgtactgtaagtgcttttgcttaaacgacaaccaacccgcagattggtcacctcttcctccagtccctgatgacatccacgctg

SEQ ID NO: 147078 - DNA, 3140 bp, Zea mays
  Clone ID: MRT4577_65655C.1
gattcggcccagatagcgaactggggcagggactggcggcccatcgtccgcgccgagcgatggcgtccccgctcctgtgcgtcctcctctacctactccgccaccttacggcctgccacgccgccagggacatcatcacgccggaccgcccgctggcgggcaacgagacgctggtctcgggcggcgagggcaacttcgcgctcggcttcttcaccccgccgggcgccaacagcacctacctcggcgtgtggtacaacaaggtctccctccgcaccgtggtgtgggtggccaaccgcgaggccccgatcgcgggcgccgtcggggacaaccccggcgccacgctctccgtctccgccggcggcacgctcgccattgccgcggggaacaggaccgtcgtgtggtccgtggagccggcgtccaggctggcgagcccggccgcccagatcctggacaacggcaacctggtgctcaaggatggcgccggcggcgtggcgggggaggagtcctactacccgatcgacacgctgcccccggagacctagctggggatcgagtacgtgaaaagtaaaaacaggaccctgacgtcgtggaaaagcccgtaggacccctcaccgggccccgtggacatggtgatggacaccagcggagatccgcaggtgttcatctgggactgcggcgagaaggtctggcggtccgggccctaggtctgcgtccatttcaccggcgtgccggacacggccacctactccggcatcaccttcagcttcgtaaacagcgcgcgggaggtgacatacagcttccaggtgcacaacgtgtccatcatctcgcacctgggcgtcgtgagcacggggaactacgggctgctgcagcgctcgacgtgggtggaggcggcgcgggcgtggaacctgtactggtacgcccccaaggaccagtgcgacgcggtgtcgccgtgcgggcccaacggcgtgtgcgacaccaacaacatgccggtctgctcctgcctccgcggcttcaccccgaggacccccgccgcgtgggcgctgcgggacggccgcgacgggtgcgtgcggtccacgccgctggactgccgcaacggcaccgacggcttcgtcacggtgcgccacgccaaggtgcccgacacggagcggagcgcggtggactggagcctgacgctggaccagtgccggcaggcgtgcctccgcaactgctcctgcaccgcgtacgccagcgccaacgtcagcggcggcgccggcggtgggctgccgcgccggcgccggcttcgggcttgcgtcatgtggaccacggggctcaccgacctgcgcgtgtaccccgacttcggccaggacctcttcgtccgcctcgccgccgtggatctcgatgtagaagctaaatcaagggaggcgcgcatcaaaatcgcagtcggcgccagcgtctcggcgctggcgcttcttctagcagtcgctggtctcctcatctggtcatggaggagaaggctaacaagaacagacggatcaagtaaatggagtagctcccgccccaccggccgccggtacgagggaagcagccacggtgacgacctggagctgccaatatttgatgtggggacgattgcagctgccacggatggttactcgatcgaaaacaagcttggcgagggtggatttggaccagtgtacaagggtaagctcgaggacggaatggaaatcgcagtgaagacactctcgaagacgtctgcacaagggcttgacgagttcaagaacgaggttttgctgatagccaagctccagcatcggaatcttgtccggcttctcggatgcagcattagcggacaggaaaggatgcttgtttacgagtacatggcaaacaagagcctggactatttcctgtttgagaaggacaacgttgtgctcgattggcaagtgcggtaccgtataatagaaggcattactcgaggtctactctacctccaccaggactcgagatacaggatcatccacagagatctgaaggcagctaatgtccttctggacaaggagatgacgcccaaaatctcagactttggcatggcgaggatatttggcaacgaagagacagaaatcaatacccgaaaagtggtcggcacatacggttatatgtctccggagtatgcaatggatgggatcttctctgtcaagtcggacgtattcagctatggagtattgctgctggaaatcgtcagcggtaggaggaacagaggagtgtattcctattcaaacaaccaaagccttctaggccatgcatggagcttgtggaacgaggagaagagcatagagctagcagacgaaagaatgaatgggtcgttcaactcggacgaagtgcacaagtgcatcagagttgggctcttgtgcgtgcaggagaacccagacgaccgtccgctgatgtctcaggtgcttctgatgctggctagtaccgatgccacctcactgccaactcctaagcagcctggcttcgccgctaggagagttctgatggaaacagacacgtcgtcaaccaagccagactgcagcatatttgacagtgcaacaattaccatgcttgaaggtcgatagtagtagttatgagttatgactgaaatgaaacttaaactgctagggaaatgtgtattgtagagtaaatttggcggcctcttcagtatcttgtgtgcttaagcagcagaaaattatatgaatattgaataatagcaggcagcagctggtagaaaaaaaaaaaaaaaaaaaaaaaaaaaaaaaaaaaaaatgcaggggggtaagagatttacaaattttgctaatgttacaaagcacttctgttatgatcggacgccactgcaggcggcggacaacaggagaggcggcggcgaccaacaataagtatgcagattagtctgataaggattagaagatttaggagataaggtttgttagaaagaaaagagaagatctcatacagattagttagatgatgtttaggagattaaagacataaagtttgttagagagaaaagagaggatcttagatttaatctctttagaaaaggactagaaggaagtataaatacttgtaaccccccctctatatgaattaagtagaaaattatttagcataaaaaaaaaaaaaaaaaa

SEQ ID NO: 147079 - DNA, 637 bp, Zea mays
  unsure (1)..(637): unsure at all n locations
  Clone ID: MRT4577_65656C.1
ctagctttgttcatcttgctctcccaagtcttccttctagtagctagctaggtcttcggtctcggacatgagcgggagcaactttggagacagcatggggtggagcagtagtgggagatcgtctggtccgagaaggggcaagagaggcggcggcggcggcggcggcacggacaagcccaagcaaccgcagcgagggctcggcgtggcgcagcttgagaagattaggttacagagcgaaatggcggagtatttccatcctctcggcggccaggcccccagcttgatccacagaacgggcagcctcagcttggaggatgcgcgggcgtcgacgtcctcgctgtcgtcgtcgccatcttcctccttccatgctgccgccgccatctcgtcggcgttcccaatccatccaaatttcgcgatgccatacggagagacagacgtacgatacagtgaattccaagctcatcccatcataagatcaccggtgagcagcagtgctgtctatggcaccccacattacgggcagcatcctaacatcacattgcctctctttgaatcgcaggtatcttnccggttgaagggacgacatcatgatcgaagtcagtcagcggactcaacaagcttgaactccgacgatcca

SEQ ID NO: 147080 - DNA, 207 bp, Zea mays
  Clone ID: MRT4577_65657C.1
gtcgcacacggacaccaaaaagccaaaaagggggggcttttgagaagaagcgcgtgtatacccaccgctacatatatgatcaccctgtgtacggaaagagacgtaagccctgtgccccaggcgaagtatacaccactaataataaggtaataaaaacacagacacggcaataagcgcctgctcaaacattcaggaaatgcatcaaaa

SEQ ID NO: 147081 - DNA, 536 bp, Zea mays
  Clone ID: MRT4577_65658C.1
aaatgcaagccacccatcattctttacaaacagtagcattgaccgaacacaaattgtgtgcgacatctcgctcaagattgtatggcctcagctacataaaacgggggctcgcatgttccacagcatctgtgagctgcgatagccacaaattcactcattgacctgaaaatgaatgcccagctgagagcctacatcttgctgcgatggagactaaacctttacgcacaaggaggagctttaccacctcatttcttacgacacctcgaacctctatttcctgttcatatcatgaatatttagtagaggaaggctgggttcatccaatccttgttagaaatctccaagaggggatcgacttgaacaactgtctgccatctcttagccgtaacatcatcaggtatgaccacattcttagaatggtctttcagaatcagctcactgttttcatttgatacactctgacgacaactcttcgatgaattggtgttgtgcaactgcatcaccggattagaaaacttcccgttctcggactgctc

SEQ ID NO: 147082 - DNA, 162 bp, Zea mays
  Clone ID: MRT4577_65659C.1
tgtaatcctaaatttctcatactgatatgtgcaacttctcagtaatagcatatagatctctaatctttcatgaccgaggagtcgcacatatcagtatgagacatttattatcgccggatacagcgtaaaaattctctcatactgatatgtgcaacttctcag

SEQ ID NO: 147083 - DNA, 465 bp, Zea mays
  unsure (1)..(465): unsure at all n locations
  Clone ID: MRT4577_6565C.1
gagatgacgaaaattaatctgctcttgataggattatgtncatacatggagatgaaaagctaatacgggttaagagaagcantagaattgaaaaactaaaacgggttagaggaagcaaagtaattaggcctgatagttttgttttaagcagaatcatntcatcataatgaaagaaagttgattagtccangataagagcaagtctgcaagtggaaggcggcggcccaccaaacaacataaatttctttctttttccttctgctngcgtctgctcgnggtgatcggcgagcgggattccttccccncgtgcnnggtagcggcggtctttgtgccgccgtcgccaagagccaagagctcngtggcgggtcaggatggaaagcgcatccncctgcgcccgctgcttggggcgggtgttcaccgggtggcggggatgggctgggggttntttgggcatgggggctggcc

SEQ ID NO: 147084 - DNA, 904 bp, Zea mays
  unsure (1)..(904): unsure at all n locations
  Clone ID: MRT4577_65660C.1
cattgggtacctcgaggccggccggggcagcctctgctcctactcattggggccctcgcgggcggccgggactgtctcccctgtcccctctcccgcgtgctcgtctaccttcggctcccccatgggatgagagcgccttcctcgccatggccgcctcccacctgccccccgcagccaccctcgtcaagaagtacccaactctcctccacccgttcggcgccaaaccacacgcccagaggctgatcttcaggtgccgcgcgaccagcagcgagggtgcggacgatggctgggcgtcctttgtggacgagctcaagaggtcgctgcaggtggacccgtccgacgcggtgattagcaacgccggcgcgggtctcacatcaaataacgacctcgtcaccgcgctgccactggaaccctccgctggtccggctgcgggagacgcgaccactgccgctgccggcgcggtgagcgagctcnctgggcgtggaacgcgtcaggcggcnggtggccaccccccgaccgccttcttgagctccctgctgcaccctggacgcgtccaacccggtgggcgagcgtggcgggcggcgcgctgtctcgcctggacgcgctcacgtcggggctgtcggacgcgcagcggtgggcgctgttcgggttcttggccgcgacgtggctgtacctgaccgcgcggcccggggtgcttagcggcgccgtggacatgtacgtgctggcgccgctgcagctggcgctggacagcgtgctgggccggcggagcctcaagatgagcgacttcgtcgtcggcgagcgcatcggggagggctccttcggggtggtgtatgccggcgccgtggtgcccaagaacggcgccgtcgtggaggagcggttcggcaatgccaagacgagccttcag

SEQ ID NO: 147085 - DNA, 2534 bp, Zea mays
  Clone ID: MRT4577_65661C.1
cttctggttcagacgttcagctacagctctatgcctctatggctctatctcatggcgacggcgacgtcgtcggcgccgctgctcccgaagcccgcactccgagctgcgtcctcttcttctctacacaccccaaatccaaggtccaagatacagcgagccaccccagaacagcaggaccaacatgtcgacaccaagtggaggaggcagccgagggccccgccccggcgcggcgagggagccaagagacgcctgcgcagcctcgtccagcgcggggaaatcgacgaagcgctcgtgctcttcgattccatggcctccggcggcggcaggaactgcccgcccgttgtcccctgcaacatcctcatcaagcggctgtgctcggacggccgcgtctccgacgcggggcgcgtgttcgcggcgcttggcccctccgccaccgtcgtcacctacaacaccatggtaaacgggtactgccgcgccggccggatcgaggacgcgcgccgcctcatcaacggcatgccgttcccgccggacacgttcacgttcaacccgctcatccgcgcgctctgcgtccgcgggcgcatccctgacgccctggcggtgttcgacgacatgctccaccggggatgctccccgagcgtcgtcacctacagcatcctcctggacgccacctgcaaggcgagcggctacaggcaggccatggcgctcctcgacgagatgcgcgccaagggctgcgagccggacattgtcacgtacaatgtcctcatcaatgccatgtgcaacgagggcgacgttgatgaagctctgaacatattgagcaacctgccgtctcatggatgcaaacctgacgctgtcacgtacacacctgtgttgaagagtctgtgtggctctgaacggtggaaggaggttgaggagctcttggctgagatgaccagcaacaattgtgcgccagatgaggtgacattcaacacaatagtcacttccctgtgccaacaaggcttagttgatcgtgcaattgaagtggttgatcatatgtcagagcacggatgcgtcgctgacatcgtcacatacagcagtattcttgatggtttgtgtgacgtagggcgcgttgacgacgcagttgagttgttaagcagactgaaatcctacgggtgcaaacccgatacgattgcctataccactgttctgaagggcctgtgcagcacagaacaatgggagcgtgccgaggagctcatggccgagatgctctgcagcgattgcccccctgacgaagtgacattcaacacagtagttgcttctctatgtcagaaagggttggtcgatcgtgcaatcagagtcgttgagcagatgtcagagaacggttgcagccctgacattgtcacatacaactgtatcatcgatggtctgtgcaacgaaagctgtattgacgatgccatggaattgttaagcgatctgcagtcctgtgggtgcaagcctgatatagttaccttcaacactttactgaagggcctgtgtggcgttgaccggtgggaggatgccgagcagctcatggccaatatgatgcgcagtaactgtccccctgacgaaatgacgttcaatacggtaatcacttctttgtgccagaaaggattacttacgcaggcaatggaaactctgaagataatggctgagaatggttgcgttccgaactcatctacctacaacatagtagtcgatgcacttctgaaggccggaaaggctcaggcagcccttgagctgctgagtggcatgacaaatggtactccagatctgattacttataatacagtaatttccaatcttaccaaggccgggaaaatggaggaagctcttgacttgttgcgtgtgatggtctctaatggcctttgcccggacacgaccacatacagatctttggcctatggtgtctgtagagaagatggaaccgacagggcggtcagaatgctccgcagggtgcaagatacgggcttgtcgcctgacactacattctacaatggtgttcttcttggtttctgtcgagatcggagaacggatcttgccatcgattgctttgctcatatggtctccagtggctgcatgcctgatgaatcaacctacgttatcctccttgaggctcttgcttatgggggtcttttggacgaggcaaaacgacttctagccagcctgtgttctcttggcgttttagataagaagttgatcgaggaagaaagccactactcgtagactgagcatgcatgttaacgtgttgtgattaagttgaatagcagtggcttcgcttactgtagtacaaagcgctgaaatggtcgctttggatcctttcaggtcatgagggattgtgcatacctttgtatagcttaggttcaaattttccatgcacgaagttgttatgcatctttcgctgttcacagtactaccattcagttctcgcttcgagcagatgttcgagtttcgtccagattcagtgctaatacttgctgtaatagtatgctaattgaacagtttcacacctttttcccctc

SEQ ID NO: 147086 - DNA, 796 bp, Zea mays
  unsure (1)..(796): unsure at all n locations
  Clone ID: MRT4577_65662C.1
cgtccttagtctgcttcagnagtccgctcaaggaaaatttgcaagtacatcaggtctaatttttttgatctgcagttgtacttataacttatatttggtgtaatcgcctcaagtaatgtttatagtactatatgcattctgttttttgaatggtttggtgcaagtatgactcgactactgcctaaaattagttttgccacacttttgtggaaagaaaaattgctagatagactcaggtgatctctagctaaaactctagtctatattaagtgctccatgatgctaaacaaattatatcgatgtgtttgtcttgtttaaacttgtcctattggcttcattgaggttgttttagggtttaggaaatgaatgcttgaatgtttagtccttacatctgcatgatcttatatcaagattatgtgtagaatgtttagtcctttactcctttctttggccattatatctttatgttgtgatgatgattttttctcatcttctccatgtataggactgatatatgtgttctctgtccactgatgcggctggagcgtcatgtcaacggctcaccctccccctaacaaattaaactagactgatgagtggagcttcatgttgggatgatccatgcaccttttaagttttggaacgtcgtactcaaatgtagcttgtgttagttgaacctatcgtactttcttttggaattaaattatatgatatttaaacatgtttgatgtttaatacttgtgttggatgctttatgcttcaaatatatatgcattatacaaaaaaaaaaaaaaaa

SEQ ID NO: 147087 - DNA, 521 bp, Zea mays
  Clone ID: MRT4577_65663C.1
ttgggtacctcgaggccggccgggatattgtgtagcaacctcagtccccgttggtcatggtcgagccacgtggtctccgatccagctcgccactgcaacgggtacggcgccgtggctgctgctgccctatgtcgagctccacctttgctgtggatgtgccggaaatgccacgtccgcagacattactgggcgccgtatccctccatgccacacgcatccagtccgagaagaggaccgcaatgtcttccactgcatgcgaaggtggaagtggacctctctggagtgggacgcctctgtcttcactttattgggtggctggcactgtgcaggagacgactatcccctcgacgctgtgggcatataatatatcgggaggaggcacttatgcttcaccgaggtactcacactacgacttcacgataagcatcttccgatgtcgacggctcgactacttggggaagcttgagctgcgcctacgcacaggatcttaaggtatcgtcctgactgctaccgcagaagct

SEQ ID NO: 147088 - DNA, 359 bp, Zea mays
  Clone ID: MRT4577_65664C.1
gggggccagccacccaataaaaaaatgaaatactcgtcccaaaacccatgggtggcaaatcaagccgggccggggaacaaagcttttgggggagcataccccatgctccccccgaaaggcctcctccctcccccataacttgggcgaatccaacaggcaaaccctaggccacccccggaatgaaaggaaacaagggcccaaatggggcagggcccaaaccaccctttcttgtttgggaggggccccctgtcctcgtattccgccccctaattaacaggggcaccccgggcccggtgggccccggaccccaaaacggtcatgttgctctcaaattcggggaaccccaatttatccatgcc

SEQ ID NO: 147089 - DNA, 381 bp, Zea mays
  Clone ID: MRT4577_65665C.1
ggactagcagctatgttgatgcgcgggggtacgggttatattgttgtggcacacatcatgcctttggctagctcttacgatggttataattaaaaacaccgacacaaaaaaaatcggatgcactgatggacaagctgccgacgcccggactggatttggaacaaagcacgcccgttcatgcatgggtgcttataggagctaaggcactaggacacatgctggcaaatactgctggtgtacggccggacgagacctgagcacgcttcgaagcatgcagcgcagtcatgattgatcgaggacgaagacctgctgctgtcaaggatgccgttgaccaccttcaatgctatcgacgctaatgaaaccatctttttgagccataat

SEQ ID NO: 147090 - DNA, 841 bp, Zea mays
  Clone ID: MRT4577_65666C.1
gttacaactttaagtaagtgtgattttgcataaaaaataataatttcaatacacatgcatcacaaattaatttgatttgtacagggaccactggatatgcttcctcatttatcctaaggttggaaaggtgctggtgctcgactccttgaactatgacccttcaacatatgaaaaattccttagtatcttagagcagtaagtcttttctttgcatgcatgcatacttatatcgttgagaaaattttgaaataacatggagattctacttgagatcacagagcatttaggttctataagattaaaggtggaaagtacaacaagaccaaaaaatgtgttccactagacatccatcatcactggccggtaagtatgtgaatttatgaatacatatcatacacaatgctgcaactaaataaccaatctctcctgttatgtatgtagtgccacaagcaaccacaaggatcggtcctatgtggattctatgcgtgcgagtttatgaaaatgaacggacgatacatcacaaaccctagcaaggtattattagtaatagtcatgtttgtatttgtaaattaacgatgcaaatgtgaatagatgatgtttataagcttcctttacatgactttcaaaaaggaaatccggagaacttgaccgaagctgcattatatggtataggttgaagacctatgtacattcatattaaaaagaggtcattccagctgaaggggaaatatcatgacgcttccaatacattagctatgccagagtttagaatttaacagaagttagtagactatcgcttaacgagatagttactagctagagcataggtgaaatcttatat

SEQ ID NO: 147091 - DNA, 362 bp, Zea mays
  Clone ID: MRT4577_65667C.1
ggaatatataaaatcattctagaatgtttactggggccatacataacataaactatgtttctagactcattcgagtcctaacagatacaatatagatcaatatagtactactatgtatgtgtatataacgtaaaatcttttttcattcaatatatttatttttagttttttctaggtcctatttatatttctagttttcctcagtctatttattttgttttgtttttttcttcatcttcgacaatgcactttcatttttaagggtccgccatggcatctccttcggttttgatttgggggggacttacctgaccttttacttacttacctagtaactaatattttacacgtaactgtatttt

SEQ ID NO: 147092 - DNA, 347 bp, Zea mays
  Clone ID: MRT4577_65668C.1
ccttccgttccctttcccgttcttccttctttttcttctgcttccgttccctccggtccaaaaccatctcacgtccagccggttctttttttttgcaccccctaggggctcccgacaaaaactatggtccccggacaaatacgacagatcctcatcgcgcgaaacgcacggcaccaacgtttactcgcgctgttcggacagcaccttgcccacggtgggcgggtcccgctgtcccagggccagcgccagcaccaatttcccagtggcctgtatgcacagagcccttccgggacagcaactgcgggtgccaacgtaccatgtgggtgcagaacccccctaacaccaac

SEQ ID NO: 147093 - DNA, 278 bp, Zea mays
  Clone ID: MRT4577_65669C.1
atcagttttaacttctaaaatctgttatttgcatatgatgtgttcataccaggatggaagcacaggtagctttgctaactcacatgcaattccgaggttcaaaacgtttaggaaaggacctcaaactcactggtcatcgaattcatggcaaggcgtacacaatcacagaaagagtaggtttgtctaaactgtaagaaagccaatggttgttttgcatttgatgctttgttgccttagagtattctttggtatagtacgtggtgcattcatgagtcatg

SEQ ID NO: 147094 - DNA, 304 bp, Zea mays
  Clone ID: MRT4577_65670C.1
gcactacgttatatcgtctagcaacgttcttgctgtagatgatggcatcaattgaactgatagctgctctgatgattctgttaatatactgtatcatgaactaactgatgctaacagttattatgccatgaatcactggtttgaaagagactccaacaggtaatcagatcgtaatgtcattaatcttgaccaaattatttacgacaatcatcctaaacttagaccctagactctctatccgcctgatgcataaccatgcttgatcatcagccttgaacggactactgagaagagccgaatggac

SEQ ID NO: 147095 - DNA, 440 bp, Zea mays
  Clone ID: MRT4577_65671C.1
gattgtgtaagtaggattgatatgtggaagatgtccttgcctaatacatttcaaatctaaaagtgtgccatacttggactccaaggcaacacaaatacacaatcgcgggctctaggcccatctgcctgtctaactgactgatacaaaatttgtataattacaagatcagtatttcagtagtagtttctgaagcgtacactgataagtagatattgagaatgataaatgagcgatcaagcagtggcaaaagatctccatttattgtccatgttcaatatttatggcagcactgtgccattcaggtttagtgggctggggaataatttatttagtgcctctgctctttatcaatgatagaccaatctgctggaacctttgcatagcgtggttgactggtttcctatactgtattcaattgcttgagctgcttcaaactgtag

SEQ ID NO: 147096 - DNA, 338 bp, Zea mays
  Clone ID: MRT4577_65672C.1
tttttaataataagtccggttttattatatatatagggtcgggtcatatcatcgtggaccaattaatatatggttacagcacatgcaatctgatcaaccaacatgcatttttacacacttacttactttatcacaaatactgaccccaaacatgcagagagagatttcaaactgaagaactctgtttttctctctttcacacacaccacacaatacctttgtattgcagtcagcttggcctctcttattattgttcaaccaccaccacaagttatatatataataatcatatccatggtcgccgatcgatgttatcatcaattgcatgttatctcact

SEQ ID NO: 147097 - DNA, 1396 bp, Zea mays
  unsure (1)..(1396): unsure at all n locations
  Clone ID: MRT4577_65673C.1
gcgaccaagtggaactgatggacaaaccaatacaggttcgggctcgggttgatgatggaggtatcatgtggagtgagaatatagttccaaactgtaactgggagtctggagaaaccatgttttattctgaattcaaggtgctgctacttaagggaattacttctgacattgagtgggctggtgacgaccacctcatttacattacaacggagagtatacttcggccaggccttcaagcttccgaaagcaagagatatttatttgttaaatctggaagcaaaaatacaaggtttatattctacctggacatattaaaacaaaacaaggaacttgctgttttgacaccttgtgtgtatggcgttgatacaacacctagtcattgtggaaatcatgtctttatgaagagacggagtgatgaattgtataattctgaattggttgcttgtccactggataatgttgctgagatcacttctcctgaccactgctctagccctgagttgcaggacctgttgcatacccgacaacagatgttacaacaggtacagatgcatttgcagagagctcaagttcggatgaaacgccaggctggcaaaggaaggatggaacggtccttcagtgtgggtgatcgagtgtatgtgaagctccagccatactgccagtcatcagcagccgagagagtgaaccacaaactggcgtttaaattctttggccccttaagcatggtcaggaaggttaacccggtagcgtatgaagtcgctttacctgaaggaagcaatgtgcaccctgtctttcacgtatctcaattgaagtcatttgttcctgcaaatgttatttccagctcggttttaccagctctgactccagactaccagatccctgaagaggttatggactcacgactgcaacgaagggcaggcaaggaggtacctcaactgctggtacgttggactagttggccgccatctctggccatctgggaagatgagcactggatcaaggagcaatttccaagggcgccagcttggggacaagctgtctctgaaggaggaggagatgtgaacgacgctggtattcaggatggcatgggtaaagctactcaagggggcgcgggagaatcaccagcaggaggcgagggcgacgctgttccagcagctcaggcgcggcctgcggaccacaaggcccaacaagaggaggtgcacaggccttgagtgggtgaattagacctatgactatgtatcgtggctccactatatatgggttgttcgtagacagggagagggtgtttttttggctgtaagaactcaggcggcggcggcgatccgaggtgatcgtcttccgaatcggaccgtactttccacaccaccataatcaagcgtgtgctccgtcttaanna

SEQ ID NO: 147098 - DNA, 3147 bp, Zea mays
  unsure (1)..(3147): unsure at all n locations
  Clone ID: MRT4577_65674C.1
cctgtacggctctgctgcctgagatattttccatcacgcatacatgcgctagcctctggccatggcgttcaagttctgctcggctcctccggccaggttcatctccctgctcccttgactcttccagacctccttcccctgatctttttcctgtaaatatccagccactagccgttcctatctccaaatttcaacctcatcatcttcaggctgccgcgctcacctccgtgagatattccagcgccgcccgtgcttggagaagaagatcctgccgcccgacccgcttttccttagatgtttgtcgccgccgtctctgttctttntatatgcgcggcagcggcccccaagctcaaaagagccggaagcgagaaaaaaatcaataagggaggcgatgctccggctggccggatccttccctcgtctgccccctcccgtgcgccctatctccccagcccccgccccgtcccagctctcactccgccgcgttctcctcctcctctcctccgccggcttcagccccacttcctgttacagcagcccttccttcgcagcgatggcggcggcggcgccgccggtggccaagaaggtcccgcggcagctcgttgagcacggcgacgtccgcgtcgacaactactactggctccgcgacgactctcgatccgacccggacgtcctcgcgcacctccgcgccgagaacgactacaccgccgccgtcatgtccgatgtcaagcaacttgaggatgaaatatatgctgaaatcagaggaagaataaaggaagatgatatagatgcgcctcttcgcaaagggcggtactactattatgaaaggacattgactggcaaggagtatgtgcaacactgtaggcgtcccgtatcgactgatgctcctattacagtccacgatgtgatgcccacaggacctgatgcccctgatgagcatattatcctggatgagaatgttaaggctgagggccacgactactacagcatcggagctttcaaggtcagtcccaacaacaagctagttgcttacgctgaagacactaaaggtgatgaaatctacacggtctatgtcattgacacggagagtggagaatatgttgggcaaccacttaaaggaattacttctgacattgagtgggctggtgacgaccacctcgtttacattacaatggatagtatacttcggccagataaagtatggctacataagttagggtctgaccaatcaagtgatgcttgtttgtatcatgagaaagatgatacattttctctaggccttcaaggttctgaaagcaagagatatttatttgttgaatctggaagcaaaaacacaagctttatattctacctggacatacccaaacagaacaaggaacttgctgttttgacacctcgtgtgtatggcattgatacaacagctagtcatcgtggaaatcatttctttattaagaggcgaagtgatgaattctacaattctgaattggttgcttgtccactggataatgtagctgagaccactatactgctaccacatagagaaagtgtgaaaatacaagacttccagctctttgacaaccatattgctgtatatgagcgtgagaatggccttcccaaagtgatcgtatatcggctacctgctattggagagtcaattggacaactccagggaggtcgagcgattgattttattgatccaacatatgctgtggaccctgaggagtctcagtttcattcatctgttctacgatttcattatagctcaatgcggactccaccctctgtttatgactatgatatggattcaggggtgtctgtgctgaagaagatccatactattttaggcggattcaatgcatcaaattatgtaacagaaagaaaatgggctgctgctgctgatggcactcaggtccccatgtccattctatacagaaatgatcttgtgaagcttgatggctcagaccctatgctactctatggctatggctcctatgagatatgcatagatccgagttttagagggtcacgattctctctggtagataggggctttatatatgtgatagctcatatccgcggtggtggtgaaatgggccggaagtggtacgaggatgggaaactgttgaagaagaaaaacactttcactgatttcattgattgtgctgagcacttgataaaaagcaagtactgctccaggggaaagctttgcattaatggcagaagcgcaggtggcttattgatgggtgctgtcctaaatatgaggcctgacttattcagggcagctgttgctggagtgccttttgttgatgttgtcacaactatgcttgatccaactatcccactgacaacagctgaatgggaggagtggggtgatccaagaaaagaagaattctattattacatgaaatcgtattctcctgttgacaatgtgatggcgcaagagtatcccaacattcttgtcactgcaggcttaaacgatccacgcgtgatgtactctgagcctgcgaaatacgtggcgaagctgagggagctgaagagagatgacaatcttgtgctgttcaagtgcgagctgggagctggacacttctccaaatcgggaaggttcgagaaattacaggaggatgcgtttacttatgcgttcatcctaaaggcgctgggcatgactcggaagctggcatcactgtgaattcgatgggtgtgaggcacctggactggatttgtatcatggcctgccctcttggttgggagatggatggattctgatggaatatgcatttagatttgaatagggacacagatgttatgcaaaagagattgtttgaaactttgaattctgatttgcatttggatatctgtcctagaataattgtgcttctattattcaatatttgcctcatttttaacctatggaccatctaaattttgcntattttctcttctttcaaagtactacaatcattacatgttggtactagtattattttacaggagcatgtatgtaattttataaaaaaaaaaaaaaaaaatctcctgaccactgctctagccctgagttgcaggacctgttgcatacccgacaacagatgttacaacaggtacagatgcatttgcagagagctcaagttcggatgaaacgccaggctggca

SEQ ID NO: 147099 - DNA, 415 bp, Zea mays
  Clone ID: MRT4577_65675C.1
ggaaaaacgggaaccccaaggggggaaaccaggacggggaaggggcgctttccaccccccaacttttgtttttgaaaaaaaaaaaaaaccttggaaaaagctttcccagatggtccctttcggaccccgggggccccccggaaaaaccggaccgggacccgggggggaaccaggtttccctaaagggaggggaaaaaaagctgggggaaaacaagggcaaaaccgttccccgggggaaaatggaatcccccaacaaatccacccaaaaaaagggccggaagcaaaaaagggaaaacccgggggccccaaggggggaaccaacccaaaaaaatgggggggggcccactgccccttttccaaggggaaaaccgggggggccagctgtaataaagaaacggccaacccccggggaaag

SEQ ID NO: 147100 - DNA, 504 bp, Zea mays
  unsure (1)..(504): unsure at all n locations
  Clone ID: MRT4577_65676C.1
ctcgagccggccgggccggngaatccccatctatgatttacttcatctctgtgcatagatagcgagagagagacagaggaagaagagagctaggaaatgagaggacaaacagcatctacttcagctaggcgacgaggcaaactggaaaagaagatatggggtcaaagaggagtcctaaggagctcacggatctgcataagcaacatcccacctcgtggagagcaggacctgattgatgaagacatgtaacactgtcaggcaacaataatgggaccatctgatagacgatattctggtggagtatttctacgtaccagctgattttcctgctgattatcgttgtaagacaacaaaggcggcattaacgtactaagagtgtttcatccaaagagtctacagcaactggagcatttgctctcaacatcttgaagagaacagtgaaggccggaactaatcaatcttcaagtggctgctgacgatgtgttccctgctgactgatgctaa

SEQ ID NO: 147101 - DNA, 485 bp, Zea mays
  Clone ID: MRT4577_65677C.1
gatgtattatgaagtactaatgctaataactagattgattgaaagcattcactgctatcaactttacagtgccatgggcaaactgtgctagatgaattaacagaaactaactgcttttatatgcacctgcagctattgctaccgagggccaccagagattggcctcatgaacctgccataagaactttctgcaaccaatgttaaccgagtggacggtccttttcatatttataaacaacctcctgttggattgatccaatacaataccgttgactgacgctccttcatcacccccggaccccatggtcgacccaattaattgcgtgaccgaggcctgtaagcattccagatttccttatacggagtggccttaaagcttgcctataatcattgtcatacatgctgcctgggtgaaactgctattcgatcacacttgccacaacatacaatcctgaaagcgttatatgtttagactgacgtgccta

SEQ ID NO: 147102 - DNA, 435 bp, Zea mays
  Clone ID: MRT4577_65678C.1
gaaagaatgaatcattgaatcatcaggttttggcccccccctcttggcccacatctagggggcccccaaaacgaaccaagggggaaggggatattttgcccccccatccctcgggggggggggggctgctttcccccttgaccctcattttttactggggggcccccaaatccccgccccttgtccttagggggacccaaatcaatgcataatcgggggggacatgacccccttttctgcccggcaatgtgaaccttggaaaggaaatgaaacattgaaaccctaacttttccctacctcagcccttttaaaaataatttaacttacccccaaaagttaatttttctatcccttggctagccaaaacaaaatatttcccaaaggaaataaaaaatagctttttttccttattggaaattcccgcattggggccgg

SEQ ID NO: 147103 - DNA, 376 bp, Zea mays
  Clone ID: MRT4577_65679C.1
attttaaaatttcaaattttaaattttccatacgacctcggatggtaaaaccacaaaatggaaagttttaggttttcaagagttatgaaactttgtagctaacaactttttcatttgaaatcatttgatcatgcaaaactatatttgaaattcaaaatttgagattttcaaacggcctcaaatgaaaaaacaaacaaaatgaaagttgtagatctcaaaaagtaatttaacattgtagttgacaacttttaaatttgaatcatcttatcatataaaaatacatttgaaattttcaaatctaaaatttaaatgttgtaagtgatctcggatgaaaaacaactattaaaattaaagttttaggtctcaaagagttatg

SEQ ID NO: 147104 - DNA, 108 bp, Zea mays
  Clone ID: MRT4577_6567C.1
tcggctcaacagaaatgaagggcgaggtcgacatgtagccgagcgcaagatgtgaggcttcgccgcgataccgcatatctcgcgccgctacttctcctttgcggagtc

SEQ ID NO: 147105 - DNA, 500 bp, Zea mays
  Clone ID: MRT4577_65680C.1
aattcggcacgaggctcacatctgaagggagccccttctaccgacgtgttcagcttgagggagagtgtgtactgacgtttccaccgtcataccatgctggttttaattggagcttgaattgtgcacaacctgctaatgtggcacccattgattgggtgccggtagaacaaaatgctgctgatctttatcgggaacaagctactataataactatgtcccatgataagctgatgattgaagctgtgagaaaaacacttatagctcatgggcacatgctatctctcaagaggaactcttctgctaacttgaagtggaaaagcatatgtggacctgatagcacaatatgcaagtcactgaaggctcgaatcgaaatggagatgggacaaagacaaaatatatcctgttcatgacagtctatgaatacggatagtgagtttgattctactgataagcaatgtgcaatgcgttactatgagctggatctgttaactgaaggctgt

SEQ ID NO: 147106 - DNA, 225 bp, Zea mays
  Clone ID: MRT4577_65681C.1
tttttgtgccccaaaaccaagtaagggaccgactccgcaaattcagaatcgatgacttcatgattcatagccttgcgacggctgaacatgagcatatacatgggctattcctttggatccccgggcaatttctttatcaacgaagaccagtacttgttgttgaatatgttccaacgtatttgacatgatcccgggaacgtacaaggtgaatctcatcgcttttta

SEQ ID NO: 147107 - DNA, 330 bp, Zea mays
  Clone ID: MRT4577_65682C.1
ggggccttggaatttaaaatttacatattttttgccaggggggaaaacccggggggggtccaaaagctttttacaggttcgggtttttaaaaaggtgggggggggaaaaccccccccttgggcgaaggaattggcccccctttttggggggggcccccaaattggggggacgggatccccttttcctgaccaaaccaattttaaaaacggggcaggggggggatgcccttttttcccggcccctaaggaagggatggcctccccaaaggttttaaaaggggaatttttaaacatttcccggggaaaaaagagacacccttggtttttttt

SEQ ID NO: 147108 - DNA, 2529 bp, Zea mays
  Clone ID: MRT4577_65683C.1
ccggccgggagtcgcgcccatctaactacgggtagactcggcaggacggcagcacaggtccacgcgggcgcggaggcaacgctatggtggctcgccgcttcgtggtccggcatggccccgcagccggaggatcagccgaggcggcggaggagcaacagcacgaggtggagtacgacacggagcacggcctcgacgtcctccgcctccagatcttttccctcaccgccgtcccgcccgacctccagaagatcgtggtggaggcggatgggtcggtggtggacgacggcaccgacctggaagccgtctctgagcgcctgcgcctccttgctatcggcgaggagggggaggacgacggggcagcggccagggcgcaggagaagtccgacgaggaattcgcacggatgcttcaggcggaagaagaggcacttctcctacaacagtacaatatacaaaatgatggtggagatgtgtttagacaaagagttgagccttacatgcaccaggttctgatgtatgaagattcagtgggacaagaggcagcacaaaagacagttccgatatgcgaactggaggagaaggcattagtttcactggccaaggaagggaatttcaatccttcgaaagatgaagagaagcatgcctttctgctgcaattgcttttttggtttaagcaatcattcagatgggttaatgcagcaccttgtgacagctgtggccgtgagacatccaatgttggaatgggcaccccacttacctcagaaatcaaatttggcgcttcacgtgttgagatgtataggtgtaaccattgttctagtatcacccgtttcccaaggtacaacgatcctcgtaagcttatacaaactaggagaggtcgctgtggagaatgggcgaattgcttcacattctattgtcgagcttttggatatgatgctcgtttgattctggatttcactgatcacgtgtggacagaatgtttttcaaacttgtatggaagatggatgcacctagatccatgcgaaggagtctatgataatcccttactgtacgagaaagggtggaacaagaagttaaattatgttattgcgatttctaaagatggagtacgggacgtaacaaaacgctacaccagaaagtggcatgaggttctctctaggcgaataattacctccgaagaaactgttgtgtctgttctatcatctataacagggaagtatcgcacaggtttgtcacctgatgctctatcagtcatagaaaaccgtgaaaaggaggagtctgaggaacttagaaaatctgcttatcttcaagttgaaacggctttatccttacctggaaggcttagtggttctgtggaatggaggaaagcaaggtcagagttgggccaagcagattcactaagttgctcatcctgccctattcggaagtgtgtggatggtcatgtttcaaatatatatgatgctctttctgcttttctttcacatttttttgacaaaaaaatccctaaagaaagaattattgaagcttttgaggcattgaagactttgatgctaactcttaaaagttccaactttaagagcagaagtgctacattagaccagaaagcacaccatctatttgaggagatatttccttccattgaaagattgttatctgctatttcactgaaagcagaattgggaactgctggataccaatctgtgaccgtgtctggaaatccagtacactcatccttagcgttaccagtagcactggatgcagttaatgagatattgagtaattataagaataatacctttttcacagaaggcaatcatttcccaagagggaacagagtatgctcaggttcagtccttgcaagcagggaacaacttccaataggaattgcaacagcagcttttgacggcattcactcctccaaatgggaagagcctgatggagccaaaggatgttggctgatttatacaatgcaagatggcaaaagttgcgagttggagtcatatgatttgatgtcagctaatgatgctccagagagggatccaatggactgggttcttgaagggagcgcagacggaggctccacctggaatatacttgatgctcggaattcagaaatgttcgagagccgtttcctgaggaaaacatttacagtggataagagatataaggcaaatgctttcaggtttaggtttctacgcgtaagagattcccattctaatccaaggtttcagataggatcaattgatctatatgggaaaaccatatgaactccccccggagctgtgtttcacttttcggctttctgaactgctcggtctcacgagcctgtgtagtatcataaattcataatattgtaatgcgagcatttactgtggacgcaacgctctcttcagtatgaatagatactgaataattaagagcatgatatatattgtttgcgcgcgcgattgagttctgaaatataagtgaagtccctcgacatgatcaaaaaaaaaaaaaaaaaaaccgaagagggaaaaagtttaaaaaagaata

SEQ ID NO: 147109 - DNA, 271 bp, Zea mays
  Clone ID: MRT4577_65684C.1
gcgagtcaaacgatcagatggctctgaatcccttcttactagatgatttttgcctggctggagtagttctgatccaagagcttgttgctttgatttttgcttgctcttagacttgtccacactgttaaattttgtgcccctcaaacaagcctgtgctcgctcactttcaactcagagcgattacgaccagtcggctactccaacttcaagaacggaagcctcggcctctcgggcgtgaaagctggattgtggttgtcccgtactattcact

SEQ ID NO: 147110 - DNA, 140 bp, Zea mays
  Clone ID: MRT4577_65685C.1
taactagaacatacatagtttttttcactagcaacatactatcaccaatgggagccaatattttagccctcctagccctcctagctcttttagcaagcgctgcttcctatacttttattatacaatgctaacaacaatac

SEQ ID NO: 147111 - DNA, 362 bp, Zea mays
  unsure (1)..(362): unsure at all n locations
  Clone ID: MRT4577_65686C.1
ttatcgggatcccagtccaaagttgattggtggatcaagtgaaggtggtgcatctgtattcaagctggagtacaatggccagcctgcttgtttagcacaatctccccaattgtacaagcagatgagcatctgtggtggctttggccgcgtgtttgaggttggtcccgtctttagagcagaaaagtcaaacactcacaggcatctgtgtgagtttatcgggttggatgctgagatggagnnatcaaggagcactactttgaggtttgtgatatcatagatggcttatttgttgcaatattcaaacacttgaatgaaaattgtcagaaggaacttgagacaataaataggcagtatccatttga

SEQ ID NO: 147112 - DNA, 545 bp, Zea mays
  Clone ID: MRT4577_65687C.1
ggcgatcacgcgtccgcccacgcgtccgcccacgcgtccgcccacgcgtccgagcacaggtccacgcgggcgcggaggcaacgctatggtggctcgccgcttcgtggtccggcatggccccgcagccggaggatcagccgaggcggcggaggagcaacagcacgaggtggagtacgacacggagcacggcctcgacgtcctccgcctccagatcttttccctcaccgccgtcccgcccgacctccagaagatcgtggtggaggcggatgggtcggtggtggacgacggcaccgacctggaagccgtctctgagcgcctgcgcctccttgctatcgggcgaggagggggaggacgacggggcagcggccagggcgcaggagaagtccgacgaggaattcgcacggatgcttcaggcggaagaagaggcactttctctacaacagtacaatatacaaaatgatggtggagatgtgtttagacaaaagttgagccttacatgcaccacgttctgatgtatgaagattcagtgggacaagaggcagcac

SEQ ID NO: 147113 - DNA, 297 bp, Zea mays
  Clone ID: MRT4577_65688C.1
gaccggaatctgccggctccgacccaggcgaccggtctgtcgcacacacacactttattctccggacgcgctcgttcgttcgcgaaggcgcgccgggctgacctcacatccgctcctccctacccgacaccgaccgacccctagtccgctcgcctccctccccgatccccaccgccatggccgccgccgccgccgccgcgtcctcctcttcctcctccgaggttccgatcgccgcccgcacctgcgtctccgtcggcgaggtggccgtgggcgcggtggctacaggcagcaggcgac

SEQ ID NO: 147114 - DNA, 2158 bp, Zea mays
  unsure (1)..(2158): unsure at all n locations
  Clone ID: MRT4577_65689C.1
caaactaggagaggtcgctgtggagaatgggcgaattgcttcacattctattgtcgagcttttggatatgatgctcgtttgattctggatttcactgatcacgtgtggacagaatgtttttcaaacttgtatggaagatggatgcacctagatccatgcgaaggagtctatgataatcccttactgtacgagaaagggtggaacaagaagttaaattatgttattgcgatttctaaagatggagtacgggacgtaacaaaacgctacaccagaaagtggcatgaggttctctctaggcgaataattacctccgaagaaactgttgtgtctgttctatcatctataacagggaagtatcgcacaggtttgtcacctgatgctctatcagtcatagaaaaccgtgaaaaggaggagtctgaggaacttagaaaatctgcttatcttcaagttgaaacggctttatccttacctggaaggcttagtggttctgtggaatggaggaaagcaaggtcagagttgggccaagcagattcactaagttgctcatcctgccctattcggaagtgtgtggatggtcatgtttcaaatatatatgatgctctttctgcttttctttcacatttttttgacaaaaaaatccctaaagaaagaattattgaagcttttgaggcattgaagactttgatgctaactcttaaaagttccaactttaagagcagaagtgctacattagaccagaaagcacaccatctatttgaggagatatttccttccattgaaagattgttatctgctatttcactgaaagcagaattgggaactgctggataccaatctgtgaccgtgtctggaaatccagtacactcatccttagcgttaccagtagcactggatgcagttaatgagatattgagtaattataagaataatacctttttcacagaaggcaatcatttcccaagagggaacagagtatgctcaggttcagtccttgcaagcagggaacaacttccaataggaattgtatgtgaatgcaattcttgcattttttagtatatattcatcgatgttttccatacattagtgtgtttgaaaatcatttcaggcaacagcagcttttgacggcattcactcctccaaatgggaagagcctgatggagccaaaggatgttggctgatttatacaatgcaagatggcaaaagttgcgagttggagtcatatgatttgatgtcagctaatgatgctccagagagggatccaatggactgggttcttgaagggagcgcagacggaggctccacctggaatatacttgatgctcggaattcagaaatgttcgagagccgtttcttgaggaaaacatttacagtggataagagatataaggcaaatgctttcaggtttaggtttctacgcgtaagagattctcattctaatccaaggtttcagataggatcaattgatctatatgggaaaaccatatgaactccccccggagctgtgtttcacttttcggctttctgaactgctcggtctcacgagcctgtgtagtatcataaattcataatattgtaatgcgagcatttactgtggacgcaacgctcttttctgtatgaatagatactgaataattttctttgtcctttctttcgtgcttattttggtcattggtttgctcttgttgacctgcaaatatcttgcttagctttgttggtctgagtgcagaaagccagattagctgttagacttgctaccttgagaacataccctcagggcttgtttggtaaaattgactagcaagggaattttagcaccttcaatccactctaatccccttgctcccaaatatgccctcatcggtaaaattttcgttcacttaaatagctagtctaccattttcgttactgtgaaccatatgactttctgactacatcgttaattagataagtattggcgaagcatatctgaatctgtaggtattagaaattacgggcaacgttgtaaattgaacttgctggtcaacgtagtcgcagctcacaagcattttttatgtcagggttcttgaagggagcgcagacggaggctccacctggaatatacttgatgctcggaattcaaaaatgttcganagccgtttcctgaggaaaactntacagt

SEQ ID NO: 147115 - DNA, 186 bp, Zea mays
  unsure (1)..(186): unsure at all n locations
  Clone ID: MRT4577_6568C.1
gatccacgctccctcgggcgctccttccgcgcccgcccacagatctcccatcgacgtcgatgctctgcgattaagcccagctaaactcgcgcggtttggntttgncacagcactgaagctcacaagacgctcgcttgcctcccaacccccccacccatattttctccccctctcccccctcccccc

SEQ ID NO: 147116 - DNA, 372 bp, Zea mays
  Clone ID: MRT4577_65690C.1
gctcatattagtgataatacagctaaagctttgcagtgtttgaaacaaaatcctaatttaaaggttgaaactgcattgcttcaagctacaatgtttgatgatagatcagacgatagtgatggggatattgattttcctccgtatgttcctggtaggaacctcattgctacaacaggtaaacctgaagacttggcaaaatctgatatgaaagattttgtccgtcaattatatgacgaaccaaagattttaggtcaagagttagcacctgatcaacatgacactgtgaattttacgttcgccatagataatactggcgttcgttataatgcatgtcctcctgaaggtgctcttgtattttatgctgacactcct

SEQ ID NO: 147117 - DNA, 838 bp, Zea mays
  unsure (1)..(838): unsure at all n locations
  Clone ID: MRT4577_65691C.1
cgcttacaattgagccagtcattactttactgaattcatctccaccagctgtgcaacaattggctgcggagctcctatctcatcttctcctggaagaacacctccagaaggatacagtagcagagcaatccatccctgccctcattcaaattctctcatcaggtttgccaaatttacagcagagagctataaaagctcttgctaatcttgcattagcttggccaaatacaattgcaaaggagggtggtgtgtttgagttgtccaaggtgctgctgcaatctgatcctcctttgcctcatgttgtatgggaatctgcagcagctgtcctgtctagcattttgcagtacagtaccgagtttttccttgaggttcctgttgcggtactagtgcagttgctcagatcagggactgaaagtaccgttgtgggtgcactgaatgccctgcttgtattggagagtgatgattcaacaagtgcagaagcaatggctgagagtggtgctgtagaagctcttctggatctcttgaggagtcatcagtgtgaggaagctgctgcaagactcattgaggcattgctgaacaacataagaataagggaggcgaaggctgctaaaaatgctattgcacctttatccatgtaccttctggatccacagacgcagtctcaacagggaagattgcttgctgctcttgctcttggagatcttttncaaaatgaaggtcttgctcgttctactgatgccgtcgcagcatgccgtgctctggtcaatcttcttgaangacagccaaccgaagagatgaagtggtagccatttgtgccttgcagaatctagtcatgtac

SEQ ID NO: 147118 - DNA, 160 bp, Zea mays
  Clone ID: MRT4577_65692C.1
gcgtagtacgcgtgtgctgtgactcatctcaccagcgctcgctcgtaccgtcgatcagcacatgtcgagagagacaggagccagagagacgtacctgaccactgtcgtgagagattgcttgtgtgtccatcttgcatctcatgcactcatcatgcactga

SEQ ID NO: 147119 - DNA, 544 bp, Zea mays
  Clone ID: MRT4577_65693C.1
cataaaaaaaaaaaaaaaaaaaacaaaaaagaaacaaagaaaaaaaaaaaaaaaaaaaaaaacaaaaaaaaaaaaaaaaaaaaaaaaacctaaaaaaaaacaaaaaaaaaaaaaagggggggccgtttaaaagaaccaaagttaactaccccggccatggaacggcttgcctttttaataggggcacctaaaatcaattccacggcccgccgttatacactttgcggacgggaaaacccttggggtaccccactttaaacgccttgaagaaaacccccttttggcctgtcgcgaaataactaaaaaggcccccccggaccccctttccaaaaaatgccccacccgaaaggccaaagggaaccccccttctacacggtcttaaaccgcgagggtgggggggttacacccaagcataccctataaattggcaaagccccaaacccccgctccttaaagtttcttccctcctttctaggccgcgtggcccggttttcccgataaagcttaaaaggggggccccccttaagggtcccaattaagggct

SEQ ID NO: 147120 - DNA, 565 bp, Zea mays
  unsure (1)..(565): unsure at all n locations
  Clone ID: MRT4577_65694C.1
cattgggtacctcgaggccggccgagngaattgcttctgctccctgagatagaaaaacagatggacagacacagagagagagagacatgtggagccgtcgctttgttatgatgaatcgaatcactaatatagatgttgaggatgatgaatgagtaaccatgtactccgaggtcaccttgtgccctggaaaaaaggatgaactccgattgttctacgatgcgacccacaacgccgaggcgagaagtgactgcccaggatcgtcggtgatattggctgtgaggaccactccgaggtgctccagcacatcgaccatgcctggacaatgaatcagttgatggtgcgcaccgatctcctctactgccgtggagaacccgcaacacagcatctacacgacgtccacgcactacatgcagaggggtgggatcgaggtgcggaagtcctctacgacccgtttgatcgataggaccttgacccttgggacctgcacgacccagaacagcttgtcgtacatgaagactccgcagctcatccttactgagtcacggatggactgtcccatgatctc

SEQ ID NO: 147121 - DNA, 1566 bp, Zea mays
  Clone ID: MRT4577_65695C.1
ccggccgggacgctgcctcattatctccttgaagctgccaatgtcgcttctctctccctcattctcgcagagccgcctctcccttcccatcgggcgcgtgcgtgcgtgctcctctggccgccaagcaccaagctcacaccagccactacctcaggccaccatgccgcttgccccagccccaatcttgcccaggtcattgtgtcgtcccctgctcggacctccaccaggtcgcgtcctcgctggtggccagtgccgctgcattgccctttccagcatcggccatggcacccacttccccaacacctagggccaagcctcgccaccgtgccttgtcttggagctccgaagaatgagcataggcttcccctgcaagccccaccgcgtcgccgctcctgccagccatgggcgtacgccccctcgagctcgtccggcgagtcatgccttgtccacgtcgagctcctcccctggaagctgtctctgagcccgaccgcaagctgtcatgtgtcctgctccatcttccagccgagtccctctctgctccagccatggtggccgtcagcttggagctctgtgatgactccatgccgcgcccctcttcaagctggcagctccacctcaaaattcgttgcgcgaccttgcctctccctcggctcgcatgcttgatctccctgctccttccgtcgtcgacgtcgccgaccttgggagtctagttcctcgacgcgctccacctattcgctgtttgccccacccagtggatagcggcgctcgccactccagacatagatatccatgcctcgtagttcgccctcaggtggcgtcgttgatctcgtctctgccatcgaattcgccttacatcttcgctcccattgtcgcagagaccccaccagctctgcacgccatccacgctttgtgttcgcatcggcatcccatgaatgtgtggtgaagacagttcgagcacaacccctgccaagtgttcgatggaaagtctgaaccaagattcatcgtcgatttgcgattatcaaattgttttggtcgtggtaagccgatgggttatgtaacaccccaggtgttaccatggccatggcacatctatgcactaatgactgtgatcatgtggaagaaacttgagcaggagaacataaaaccttgggaaccatgtattagccaagaatgttaatgaccaaaagcattacccaagcctttgtgcaattatcaccttgggcaagagaggattaaaccctagacccttcttaagctcttaactcccaaaacccaggtaaagggggaaggttaagcaaatgtgcaaatcatgagttaacctttagccaaagtttaagtatgtaacaccctgaatttgggggtataaaatttctttgttcatattcacaaattcaggtgttacttcccttttctcatccttccccaatcttctctctctcatttctataggagaaaagtggttatcttatttataattatagtctattagctcaaactccaagggagtatgaattgttgcatcatgttgaaccctagatttcacttttgtttggtgcataattctct

SEQ ID NO: 147122 - DNA, 707 bp, Zea mays
  Clone ID: MRT4577_65696C.1
ccggccgggatcccatcccactaattcatctatctagtatcttgaccgacaacttgaaatgactatgccgaaagaagcaccatagctataccgaagcattcaatttgtcgcctgttctaaatgtgtcggcaattataacccttgcgtgaaagatcggctggtacgagaatcgacagtgtcggaccacagtgaagccatcagacacgtataatagggacagctactatggcacaatcaccatcaactgttgcatgtccgagtaccaccgaggaaacaatccagagacaacaagaaacaaggcctcggcttcatttcaacaacttctaaatgatcttagaccgacacagtctttgcgcttcacatgtcacaccactcgggtgtcttcggtgtttgagaaacaacatcgtgatgctaacttgctagagataacgggcatgcatattcaacaagctaaagtgagaccttcaagtctggattatggtcttgcatgatatgatgcaagtgaagctcaagtcagccatcacgatgttcagatgatcggtgcttcaacaacccgcacctataatgacaggccacgacctggctatccaggtcacgccctgctatttgccagatctggggttctgcacccgatctcatgcattagaaagaggtcaggtgcagtgggaggatagatagatagagagatgagagagtacaaatgggtc

SEQ ID NO: 147123 - DNA, 463 bp, Zea mays
  Clone ID: MRT4577_65697C.1
aattcggcacgaggtggactgtgaacgattcagcagatcatatcttctgatgtgcacttggcaaatgctgggattacgatcgctgtgaaggcgccgacgagggaggctccttcacttttccctatgcgtgatgcaaaaccagagctctatatcacatgtgcattgattctccttccgtgccgggggggtaccctcatacgcacgaggggcttgttcgttttgttcgccctgtctgggctgaggatgctgaccagccgtttgacttggtagattcttacgtatgacttgctgattgtttccgtgtcacgaatatcgaacatatggcttcttctggcggtccggtgggcattgcgattgctgattgtggtatggtagctcaggcgtgaagggcgcatcttagaccgtgcatagcttactatgatgctttgtgaaccgaactgacagggctttgtgtctgcgcaca

SEQ ID NO: 147124 - DNA, 539 bp, Zea mays
  Clone ID: MRT4577_65698C.1
gccggccggttccggactcgacctgccttgctgtttcgtctgccgctcacctggcgtgcggccgctggacaacaggacaaccgccgacgccgaaaccctaggccctacgccagttttccaggccttcgacggttcttccctggccttcgtcgcgttcgccagagatgatgttgaagcttggtattatattgacatgacattgtctctgtcagttcaactaaagattcaaactgaacttaagatctgaagtgatctgttcacagtggtcactctaagctctgactcttttagatctatagcactgagccactgagctgtcatggacctgatttctacagttaccagttgtactagtgtaatagcttgtccagtcagtttcttctgaaacagcgctacattttggtgagggatgtggactgtaaaatggtatcatcattaagaatgctggttgcagtgggtgcttgtcatcagaccatgggcaactgctggactggtatcgtgttttggtagcacaaaaaaaaaaaaaaaaaaggccccta

SEQ ID NO: 147125 - DNA, 295 bp, Zea mays
  Clone ID: MRT4577_65699C.1
gggaaaactaagggaaaaatttttataccccccccggaaactaaaacattttattgtgttaaaatgttggatcggaaacaaacatttgaattcggtttattgactgccaatttacccccactgacttgagtcattgcataaaaccggacttgaggagctcaccaaaggcttcttcccaatggtagcggcacccaccccggggggggtttccaatttttaaacccccggttttggcttgtgggaaaccaccaacggggttttggccccccccttttcttcttgggcttttttcccc

SEQ ID NO: 147126 - DNA, 1547 bp, Zea mays
  Clone ID: MRT4577_6569C.1
ggtgggataacccaattcctcatattagtactaactaacaaactttgaggaatgatatggtgatggattaactcatttcattctacaaaccaaacaaaaatagtgatgagtgagaaaatgatggactaactcatttctcaaaccaaacgccccataagggctagtttgggaaccacaatttccaaaggaatttctattttcctaagtaaaattaattcattttcccatgagaaaatagaaatcctttgggaaattgaggtttccaaactagccctaagataacataactcaaacaaaacatcgtgtattgagatgctcatcgtccatgctggtcaagcccaagaccaagctcttactgaaatgcgttctgagatccaatggaataattacccatggttttggttactgaatccaactagatcctgaatggtatttcatggtactaatcacctgaaagaggactagtataccataaagatgactgagagaactgtccttagattacctgcattgctgtctttaccggtgtttagcatctgaccagagcatgagagcagataggagggatatcgtggctgtctcaacccgtagcctccttcaggcccaataatcagaagcccactttgttcaatgctggattctggcagaacactaaaaagaggaggcgcttccgctgatgctaagaaagcaagctttgactgtgatacaacaggtagaaggtgccttatctgaattggggatttcagcgacatttcatgtatcctctggcattgtttaactgcagccagcacaaggcgttgcaacctatccacccgattttccgctattgtgtgacatcgttctgtcaggagaggggtaacactagaagctccaagttcagtacatttctctataagccaatccgcacgtccgcctttcagtgtcccaaacgcagcaaagacatgccattggatgccttgaggagctatgatcctagcatcctctaataactcaacatctgagccacctttgtcaactttatgtatgaatccttcagctaaaccgcccgccccattgaatagttcaaccttgtcgttaacgccaaggcgcaaaacccgcgtcatgtgccagaactcgtctccttggatgcgaatcacctcacccttggacgaagggagagacggggcgtggaacctcggaaggccaccgcgggcgcggctcgccgcgccgccgtgcgcgcgcgcgggaggggccaggagcaggtgccgggtccgcagcggggctccgcgcagcagcggtgaggaggagaaggcggcggacgacagcatctctccgcgtctcctggcctattatcgcgcggcgacggccgtcggccgagcaggagcgccggcgaacctctcgagctcgtcccgcagcagagggtggaagcgtggagcggcggtggtctagtctaactggtctttctgaggatgtcggtcggagtagcagagagggagctttgcttttgggccgtacgtagcccgccggcccgtccagtccagttgctaagaagatggaagcaatttgcg

SEQ ID NO: 147127 - DNA, 641 bp, Zea mays
  unsure (1)..(641): unsure at all n locations
  Clone ID: MRT4577_656C.1
atcgcagagataggcgtcttcgtactcgcctacctccgcggctcaaacctttcccccttctcccaattccccgncgccgctccataccgtaacgcgacaccatgagggagtgnatttcgatccacataggacaggacggtatccaggtcggaaacgcgtgctgggagctgaactgccttgagcatggaattcaggttgaaggttagatgaccggtgacaagaccattggaggaggagatgatgatttaaaaaccttnttaagagagaatggcgctggaaaaaacagcccagagatgtaattgcagatataaaacccaatgacataatagaaggagaatgatagagactcaccaacatatatttactattttgacgaaataaaaaaaagcgccgcccgcacgccccccccaaccctccgccccccccacccccacaccccaccccccaccgcccccccccccccccccccccccccccccccaccccacccccacccccacccctacacgcccccaccacccccacccactcctccccccccccccccccccctacccccccccccacccctcccatctcccccccacctctccccccccccccaccccccctccccccaccccccccccagcccacccccc

SEQ ID NO: 147128 - DNA, 725 bp, Zea mays
  Clone ID: MRT4577_65700C.1
gccgtccgtcatacagctccagccccaccccagcttggagtgccgaacaaccaccccgccaagcgcaagccctgccgccgcctggaaggaggacaagccctgctgctgcctggaaggaggaggacaagccctgccgccgccacctccgcattgccagcccccgcccaccgcgcgcacccccgcaccgcaactcccgccgcgcccgccgctgaggcagcgcgccccccctccccaacagacgtgcacgccagcgctcctccgttccatcccactgaccagatccaccacagccccacacgtctagccatgccagcgccgccgcattcaaagctaccacagcgcgtgttgtgcagatctgggcaaccgcagctgggcgttcttcgtcaactgcgacttcctctaacttgcagacctggccaaccgcgtcgtcggcgctggtgctggcagcattgctcctggtatatcgcgttgtacctcctcgccgcggacctcacggggctcgacggcgggggcggggtcgtcttcgtcgtcgtgctcctggtgctcctcgcgtcccccgctgtcgtgctgggccggcgatcctggcgtggagattgtgggcggagacccgcaaggccgcgaacgccgaccttgaggaggcggattccttggtggccgcggccgtgccgctgcttctcgtggcggaggagagttgttccctcacctctgcatcggtgaagataatg

SEQ ID NO: 147129 - DNA, 516 bp, Zea mays
  Clone ID: MRT4577_65701C.1
atacacgagaagagagaaaagagagaggggggaaacaaacaaacaaaggggattgaattgggtttggattcataccacaacttgggtcccccggcggtttcctccttcctctcctctcggacaaaaccaaacgaacctcttccttcttcttcttcttcttccttcttcttcttcctccggcggatctcatcttcagatcacatccaagcagcgcaagcaggagacgagacgcgctccctcgctcgctccaccgtccacaaccaaaccaggcaaagggcagcgatggcgttcgacaaggtggaggagctgcggccgggcacctacggccacaacctccagctccgggtgctcagctccaagcccgtcgtcctccacaggccgcagggcggcagggctggcggcaacatgcgcatcgccgagtgcatcgttggcgacgacaccggcgtcgtcgtattcaccgcccgcaacgagcaagtggacatcatgaagcccggggcaatcgtggaggcgaggaag

SEQ ID NO: 147130 - DNA, 195 bp, Zea mays
  Clone ID: MRT4577_65702C.1
tggcttggaacctttgggctgatttatgtgcttgaaagctttaaaggttgttggtgtttcttagcttattacgggtgtgtagcttccttcgtctggtggtatcgctgctgttagggtttttgtgggtcctggtggctttcaccttcgtgtatgtttcccttaactcggttatcccgctgtttggttttggggggt

SEQ ID NO: 147131 - DNA, 606 bp, Zea mays
  Clone ID: MRT4577_65703C.1
ttttttttttttttttttttttttttttttttttttttttttttttttttttttttttttttttttttttttttttttttttttttttttttttttttttttttttttttttttttttttttttttttcccacccttaatttgaagggggggggaaagggggtaattaaaaaattttttgacaaaatttttttgtttggtattgggctttcattcaaggagctcccaaaataatttttggccccacccgacaaaattttaaggggcaaaaggggggaacctctaacccctttttttttttaattgggggttgatttttgaagcggtggataacaaaattttctttttttaaaacacttttttttttcttttgtctggggtttttttttttttttggggtctttcccctttatcttttgggaagtttttcaaaaatctttttggaaaaaaatctttttctttggggattttttactcccctttttcgtttaaggggcttgggggtccccccgggttttcccgtccgggtcttgtggggttttctttttattctttttgggggttttataaaggttgtgtctttatgggccttaaaatttttttgttt

SEQ ID NO: 147132 - DNA, 783 bp, Zea mays
  Clone ID: MRT4577_65704C.1
atgtccgtaaagataaataagccatctaaggtagaatataaaaatgtgcctaaaaaatatttgttgggcagacctctactcccttttaagaaactaaggaagctcctggctggtattaaaacgttgtatgaccagtacatgcaggcatcttcagttggcatcgataccatcagtgtacatgtaccagaaaaagcttttcaaggtttaagcaataaggcatttattgcattcgaggatatgtggttaatgatgaaccttcaaaagactcaacgtacaactcgcaacggtttttgcattgtaagtgtcactcatacttctagaacatgcaatgctaagaatccaagacaaggaagcatagtggcccagtacaactttaaggaccactggatatgctttcttatttatccgaaggttggaaaggtgctggtgctctactacttagattacgaccctttgacatatgaaaaattcctcaacatcttagagttggcttttagattttataagatgagaggtggaaagtacgacctattgaaacaacacatgtccctagacatccactataaatggccagaatttcaacaaggaaagccagagaacttgaccgaaggtgcatcgtatggcataattgaggacctatgcacattcataatgaaagaggccattcccattgaaggaaagtatcacgatgttactggtatattagtagactatctcttatggccagagtttagagaactcacagaaattagtagactatctcttagccatgttagttattag

SEQ ID NO: 147133 - DNA, 634 bp, Zea mays
  Clone ID: MRT4577_65705C.1
gtttctgctgcacggctcggtcctcgctccgaaccattcgctccgggcccgccgctcgcatacggcatacgtgtcccttatctgcctctcctcgccttcccgcagcgaggccgcctctactttcagaattacgactcccacctccccggagtgcgtgtttgcgtatcacggatcgaccgcctgtcctcattggggttccgctacgccgacccgagaacggagggcacacaccggctcaagacattccacaaaaaaaacttgcgacatgaggacgctgtattgactcagaattaaccaaaagcgccatcaccaccctaggatacagcaaactatgtatacatgcattgagtgctccactatgcgggtgtattatggcccgtgggccttgccaacggcattcttgaacactgtgataatgcctggctatgtccctccaccatatggggggcggccgaagactatggcgccggctgtcttgtggaaaatcttatggtgccatatagccgcatgctggagggttcctgacatagctcatgcccctattgcagaacccattgagtgaacagccagcgtaagctgtacaactcaaggataatactgtggactataacactataggatattgatggatctg

SEQ ID NO: 147134 - DNA, 757 bp, Zea mays
  unsure (1)..(757): unsure at all n locations
  Clone ID: MRT4577_65706C.1
gaccctccaggcctgccgggtgagagcctgggcctgccgctggtgccgcctttcctgcaggcgcaggcgcaggcgcgccacgggacggggagcttccggcgcggcgccaacttcgccgtcgggggcgccaccgccctcgacgccagcttcttccaccgctgggatccccccggcggcagcgtgttcccgctcaacgccagcctgggcgtgcagctgcagtggttccagtcgctcaagcgctcgctctgcgccacgcccaaaggctgccgcaggttgttgcgcagatcgctcttcttcgtgggcgcgttcggggccaacgactacctcctcgccatggccgcgacgagcctcgaacaagtcgggtcgctcgtgccagccgtcgtcaggaccatctccgcggccgtcgagaggctgatcgtggagcacggggcggcaaccgtggtggtccccggcgtgatcccggtggggtgcgcgccgccggtgctcgccacgttcgccgaccccgacccggcaggctacgacccacggacggggtgtctgagatcgatcaacgaggtggccacccgccacaacgcgctgctccaggacgccctgcgcgagctccgggccaggcacgccgccgccgncaccgtcgtctacgccgacttcttcggccccgtcatcgacatggtgacgtcgcctgccaagttcgggttccacgaagacgtgctgacgctttgctgcggaggacctgggcggttcaactacaacaggcacg

SEQ ID NO: 147135 - DNA, 1236 bp, Zea mays
  Clone ID: MRT4577_65707C.1
atgaggcggaagcagctcctgccgccgtggctgctggtcgtcctgttcttgtcgtggtcgtcggcggcgccagtgcccgcctcatccaccaccaccaccaccaccactctccccggtcaaatgcggcggcggcgctactacgactccatcttcagcctgggcgactcgtacgcggacaccggcaacggccccgtcgtgttcggctggcacgctctggccagccccgttatgcgcccgccctacggctccaccttcttcggccgccccaccggacgcaactgcgacggccgcctcgtcatcgacttcctcgctgagagcctgggcctgccgctggtcccgcctttcctgcaggcgcaggcgcgccacgggacggggagcttccggcgcggcgccaacttcgccgtcgggggcgccaccgccctcgacgccagcttcttccaccgctgggatccccccggcggcagcgtgttcccgctcaacgccagcctgggcgtgcagctgcagtggttccagtcgctcaagcgctcgctctgcgccacgcccaaaggcatgtgtgttgcattgcatgacccacgaggccacgaccacgacgacacagatgaacatgaactgacgcgctgcgacaggttgttgcgcagatcgctcttcttcgtgggcgcgttcggggccaacgactacctcctcgccatggccgcgacgagcctcgaacaagtcgggtcgctcgtgccagccgtcgtcaggaccatctccgcggccgtcgagaggctgatcgtggagcacggggcggcaaccgtggtggtccccggcgtgatcccggtggggtgcgcgccgccggtgctcgccacgttcgccgaccccgacccggcaggctacgacccgcggacggggtgtctgagatcgatcaacgaggtggccacccgccacaacgctctgctccaggacggcctgcgcgagctccgggccaggcacgccgccgccaccgtcgtctacgccgacttcttcggccccgtcatcgacatggtgacgtcgcctgccaagttcgggttcgacgaagacgtgctgacgctttgctgcggaggacctgggcggttcaactacaacaggcacgttttctgcggcgaccccggcgccagcgagtgcaaggacccgtcggctcgtttgttctgggacggcgtccacctgacggaggcagcctaccgatacgtcgccgccggctggctgagcgccataacgtag

SEQ ID NO: 147136 - DNA, 303 bp, Zea mays
  unsure (1)..(303): unsure at all n locations
  Clone ID: MRT4577_65708C.1
ttnatanttttcctatcaaaactttttctttttttgttttttaaaaattaaggggggttcaaaaaaaaacccagccggcaaccacccaacccatccaggtgcaggacaggggaattcacatttatacacggggcccaacaccgacgcagggaaatgaaacaggggccaaacgactcaccctaccactccattaaagggggggaccgggagaagctaaataaacccaacttggatgaaaaccaccagaacaagccgggcaggcccaccccctaacacaaaaagccaaggccggccctccaccgg

SEQ ID NO: 147137 - DNA, 332 bp, Zea mays
  Clone ID: MRT4577_65709C.1
tgacaaaagcctgcctgtcttacaactatacttggaaaattttgctaagccttacatagacctaagcccaccaccctagcccactccaatgatcatttagggtacaggtatataaacaaacaccaacaagtttattttttgggcacctaccgcctaggaccattaggagcctacttgcctgatgaatgattacacgagtatgagcttcgacacagacgactgccaggattaccagctgacggccaagaaaaaaacactaaaactcttttacagtggtaacacacccggtttaaacaccggcacactttacttttggccttgatcatgctttg

SEQ ID NO: 147138 - DNA, 432 bp, Zea mays
  Clone ID: MRT4577_6570C.1
atgcgatccaaatctcacggcccagattacaatgagccaacaccgaaacgatctgtggcccagatcatatggcgcgaagggacacgtcacaacttcatcttggccgttaaatccctatccgacgtccagcgcacaacccacccaaacccgaggacccgggcggtagcgccgcccattctaccggcggagacctcgccggtgaaggtcgatacggtgcccagttgggctgaagaaaaatataaaaatcagaatggtcgtgcattagggagttggccgagaggacttgagctaagaaaacaaatagatcttattctgacgccacataatggttatctgtgcaaaaatctggctatcccgctgaacctgctaatgggcgataaggcgtctttggattcatcagtttctgataatactgttcataatatcagctaa

SEQ ID NO: 147139 - DNA, 357 bp, Zea mays
  Clone ID: MRT4577_65710C.1
gggcattaaaaaggggcccgggttttggggggccccgcttaaaaaaatagggggtaaaccccccaccaacccggggggggggaggaaaaaaagttacaaaccaggggccaacccccagggggaaaggtcataaacgggaaaaaaattaaccccccctccaggggggaggggaactactaattttttagggccccaacccgggaaaaaaaaaaaaaccaaggggggggaaaaaaaggccccaaaaaaaaaaaatcccggcccccagcccacttgaagggggccctaagccccccagggggaggaaagcccacccccttgatgcctttaccgggccacaggaacttggtgggggccatt

SEQ ID NO: 147140 - DNA, 257 bp, Zea mays
  Clone ID: MRT4577_65711C.1
caaatactatggttcaggtttatatattacttaaacattctttttatcatttttttttaaccccccccacccaatacacataaaccgtcttttgcccctaaaaaaaacaaaccacttacacaaccccaatatttcccacacccccactattcaagggggactcacctcaaacatagaccattggctcacacattctaacaacaaagtatatttaaacccctaaaccatgctataataagcttacccccctacacaca

SEQ ID NO: 147141 - DNA, 647 bp, Zea mays
  Clone ID: MRT4577_65712C.1
tcctctctcggtcttcggctgacgctccgctccgattccgtgcgagctcgcgcgccagcatctgacacacgcgcccatgtatgtcgggcagggaaatgctcctctcgatcatcatcctcggcgaccacgcccatggcgagacctggctgatgaaccagtacggtaaggcatccgtgtccagatcatcctcaccacgccaccatagctgctgatttcatcgctaaggaggcccgaagcgacgaccgtctcctcacagtgcagatatgccatacaggaggacaggagcgcgccccaaatcttggccgtgatttctataagggagatgactgctgcgcccatgaatatgatgtcaacgtgtcccatgaaatatgaaaagctcaccaactgtcgtcgccgcattccaaagtcgaagcagcccatctgacccacagaaattcccattagaggcgcatgcatactgaatcgatgttgatggagataacagttcggacgtgtgtctgagaagaagtgtaagacgtggtgagcttcatagggaaacatcccctactttcatgactcggctagagaggtctcccatggaaagggtgcatatgactgaatagcgaggcatgctgtgaatcatgctccagaagaagatatgtatcttc

SEQ ID NO: 147142 - DNA, 152 bp, Zea mays
  Clone ID: MRT4577_65713C.1
ctggaagggccctgccaagaactgggagaacgtgctgctcagcctcggggtcgacgaccgctagccaagggtccgaagccatgagatcgcgcccgttgccaaagataaccgtgcccggccctgaaaaggtcggcctgcaaggcccctgatct

SEQ ID NO: 147143 - DNA, 118 bp, Zea mays
  Clone ID: MRT4577_65714C.1
ctaatctgaaatgaaacgtcatccacaaataggcggggtgcttatttaaggttgggtcatgtacctgtattctacaatccactattgtttccaaagacagcatttgatccttgttcaa

SEQ ID NO: 147144 - DNA, 288 bp, Zea mays
  Clone ID: MRT4577_65715C.1
aaaaaaaaacaacccaaaaattccctgatttttgacaaccggccccattccacaatttattattaaaacgggcaaattaggaagtggaaacttaacggggaaaacatttaaaaatcccttgtggggtgttgaattcaactcctatttgtttaaccaatgtttccaaaaatcacaaatcaacccttcctgggttccttgggaaggggataacaaatttgatgttctccattccgggtgcaaatagaataattctttcaaaacccaacccaaaaccactgtgttttacaa

SEQ ID NO: 147145 - DNA, 228 bp, Zea mays
  Clone ID: MRT4577_65716C.1
gtcacgtctcccacacctaactgtcccccgtttcacgaataccaaagcctacatggggacgcgaccgccactgcctcccactcctgctcctcgaggacgacgccctcgccgccgaccctgctagcgcggtgctgggcggcgggcgctgcccgctgctgggcgggtggaacccgatccctgacatgagcgactcggacatccaggagctaggcgggtgggcgctggggc

SEQ ID NO: 147146 - DNA, 300 bp, Zea mays
  Clone ID: MRT4577_65717C.1
acgatttaacctttttgttttgttgaagctcacactatgcaagaaagatgcgggcggggtaatataatgcaactgtacggtgaccgactaattatgactggtcaagtactcgtcatctagagccttcatctaaaatcttattgcacagctcataatgtgctccattgttggtgagatccctaccatgcgtgatccttttgtccatatgccatttataaacgatgattgttttagggatcccatatgaactgaacatcatccgactttagctgtcataagcacaagcatacactcaagacc

SEQ ID NO: 147147 - DNA, 1055 bp, Zea mays
  Clone ID: MRT4577_65718C.1
ctcgaggccggccggaaaacccagtaccccgcggccccgactctcgccatcggcgactcgccaccgttcatcccgcctcccgaattcgcagcttgtaaatggctaccgcctctctcttctccctcccatcgctccgtgtcctctcccgcacctctgcccatggcccccggttccagatcctcgccgctaggaagccagtggagtcctccaccgccaccagcggcagccgcagaggcggaagcaagggggctgggcttctgtcggtgttggaccgcgcgatggcggacgaggaggagtaccggcgcgcgcgcgcccaggtgcagcgcaagggcgtggaggtggaagggtacgccatcgaagggatctcggtgggcgggcacgagacctgcatcaccgtgccgtcgctgaacgtggcgttcgacatcggccgcgggccgcagttcgccgtcagccaggactatctctttatcacccacgcccacctcgaccacatcggtggtcttccaatgtacatagctacccgtggcctctacaacttgaagcctcctactgtgtttgtaccaccctgcatcagggatgatgtcgaggatctgcttcaagtccatcgtagaacgagtcaaattgagctaaaagttgaattagttgcactagatttgggagagacatatgaaatacgtaatgatcttgttgccaggccatttcaaacgtaccacactatacccagccagggttatgtcatctactctattcgaagaaagttgaaaaaacagtatgctcatttgaagggtagtcaaataatgaaactgaagcaatcaggaaccgagattacggataccatactgtacccagaagttgccttcacaggagatacaaagtctgattttattcttgacccaagaaatgcagatgccttgagagcaaaggttctcataactgaggcaacgttcctagatgaccatgttgatgttgagcatgctagggaacatggccacatgcatctttctgagataatggagcatttccagtggttcaggaacgaaacaatcgtactcact

SEQ ID NO: 147148 - DNA, 1088 bp, Zea mays
  Clone ID: MRT4577_65719C.1
gcacgaagcgaggagaaaggcgagctgctgctggtgtacgagtacatgcccaatggaagcctggacaaggccctctacggcgagccttgcacgttgtcgtggccgcagagatacacggtcgccgccggcatcgcgtcggtgctgtcgtacctccaccaggagtgcgagcagcgcgtcatccaccgggacatcaagaccagcaacatcctgctggacgtcaacctgagcccgcgcctgggcgacttcgggctggccaggctcatggaccacaacaagagccccgtgtccacgctcaccgcggggaccatgggctacctcgcgccggagtaccttcagtccggcaaggccaccgagcagaccgacgtgttcagctacggcgtggtgctcctcgaggtgtgctgcgggaggcggcccatcgacaaggacgagtgcggcaggggcggcgggggcaagaacgtgaacctggtggactgggtgtggcgcctccacggcgaggacaggctcatcgaggccgcggacgcacggctggccggcgagtttgacaaggccgaggtgctgctgctgctgctcgtggggctgagctgcgccaatcccaactgtgaggagcgtcccgcgatgcggcgggtggtgcagatcctcaaccgagaggcggagcctgtgcccgtgccgcccaagaaaccactgctggtgttcagctccagcgcgtccgcgaagctgcaggagatcgccttctcctgtggcgatgacgtccgaggcggctactccgttgccaagcctgcatcaccaaagtccgagggagccgacattgaacgctgacgcgaagcagtcgataccaattacactactacagatttgttggtgtgggaatatataggtgcttcagtctggaaagtgctgatgaatgcaaattccatgagtcatctacggtctagagaagctggcattgacgcttgatagcaagcgatcaatgcactgatagtgaattactacttgtgtgattcatatatgcattggccatgtgctcgtgaagggaatataggtaataatcccctctgttgtatgaatgttcaatactgaataatggagtc

SEQ ID NO: 147149 - DNA, 365 bp, Zea mays
  Clone ID: MRT4577_6571C.1
gttccaaaacagaaggacaatgcattagctggttttcttataaatatataagaggcccgcgagcacgcactgctcttataaagagacattcacagatggaatccacctacacacaaataaataagccaccccaaaccacacggaccaatcaccttcatctcttttctaacgacagtggcgcaattcaccgtggccagacatcccgccgccgctaggaggaggagactaagagcgcgccagagcgcgcggcggttgtcctaaccatgctccacaagttcgcgctcgcgttcaagaccaacaccatcgagttcttcgccgaggaggacaaagacgagtacgccgaccgaggagcgcgctgtccggtg

SEQ ID NO: 147150 - DNA, 306 bp, Zea mays
  Clone ID: MRT4577_65720C.1
aaaaaaaaaaataaaaaaaaaaaaaaaaaaaatttaaaattataaaaaaaaaaaataaaaaaaaggagaattgaaaaaacaaaaaaaaaaaaaattaaattaacatgatattatatttttttttaggaaatctgataattattttacatgatggtttttttatatgacctataacttttaaataaccttggttgatcctctttttttgcctgatagtgatttttctttttgacgtcgatgtgataaacatggggatttttgcaatttacattcttatgaagcttctatgctattttgaatatttta

SEQ ID NO: 147151 - DNA, 1483 bp, Zea mays
  Clone ID: MRT4577_65721C.1
aaaaaaacgttctcccgggccatcgtcagctgccggtttttccatacgcgcaagcgcaacacggcaacagtgccgaccgccgacgaccaaccaaaccatgcgaagaggaaagagccgtcgctttcgctacgctcggcagtggaggacacatcttcctcgccgcttctggctttgatccggtcgcatccaacgcacgacctgttgaaccagggcgcgccctcccagggttcctttcttctccgtctccgcgtaggcgtagcgaagaagctaacctagaatcaaagagatcgcacgcaagagggagcaccggagcagcgagccagcgacagcagcagagagatcgccggggccgctcgcctgtctggagagaggaaggaaacaagagatggacgagatcatgaacaaggtgggcgcttactggctggggcagagggccaacaaggagatctcctcggcaggcgacgacctcgatgtccgtgagacaaaaccatcccatcccggcctgctctttcagttcttgcacctcacgattcgttcggtttcttttcgttctagcatcgtccagctctcacacgcagcctatttgtccctgcgccctctgatgaatataccagctcaaagttagaacaggcatgggtggatcggtttgtgattttaatagttagagcagccatgaataaacaactccggtctctgtcatctgtttatcatggcaggtttaattaaagctgagatacttatgagagattttcagaggggaaaagagtcgtctcttctttgctgatcgcgccgctgatgtttcctaactctaactgcatgcagtcgctctcgaccagcgtcggggatggagcgaaatggctggtgaacaagctgaagggcaagatgcagaagccgctggcggacctgctcaaggagcacaacctccccgtgggcctgttcccgcgcgaggcgaccaactacgagttcgtgccagagacgcggcgcctgacggtgtacatcccgtccccctgcgaggtcggctaccgcgacggctccgagctgcggttcgacgccacggtgtcgggcacgctgggcgagggccgcctcacggaggtggaagggatcaagaccaaggtgctcgtctgggccagggtcaccgccgtcaaggccgacgccgccaaggtccacttcaccgccgggatcaagaggtcgcgcagccgggacgcctacgaggtcgtcaggggcggcatcaccgtcgacgagttctagcttagttttgctttcgcggctcacatggatggacgggcttcctcttgctcgctgcacgctgagatggacagattgttgctttcagttgcaggaataaattctacacccattagctatgtgggagatctgcgtgcactgtgcatcgtgtgttttgtgctttgttgtgagaatgtaacacctgaaggattcagaacgtgtgctcattgcttatgatatatgtctcgtgtcaggtttt

SEQ ID NO: 147152 - DNA, 334 bp, Zea mays
  Clone ID: MRT4577_65722C.1
ggagcagaaattgggtaacaaaccatcattttctatttttatacaaatcaaaaggccctttgctgtgactccaaccattacacaacatattattctaaacctaacatgaatatttaaggtaggcaacctatcacgccgacagttttagaaaaaaaagaaatattctttttacctccgtgtttaatcatattacaactctacattaaacttgcttaaacacatgcctgttttacacataactattaacccttttaaactattacccatactatccatttttattttccaccctccccactttttatattatttacaaaaaaagtggttattaaaa

SEQ ID NO: 147153 - DNA, 717 bp, Zea mays
  Clone ID: MRT4577_65723C.1
atgctgccagctcggatcagccgcggctccgagcggaactttatccccctcctccaagacaccaccacctcctcacgagcagtccgacgcggcaggagggcccagcgcggccgcctggcagaggcactgtggctgaagatgtatcaggtgtcggttccgctcgtcgaatattccaagaatttgctctattcgaaatactccgcaagaagaaaaatccaaggtatgtccctggactatgtctctcttgcacgctgcagctatgttttagtttggatcccatgtgttgcgatggtctttgcacgctgcatctctgtttcagtttggatcccatgtggtgcaggggcggagggcctaggggagcaagatgatgatgagttccaggatctgcatgaaagctacagaaaaggagctacaaaacagaatttgttatgttcaagttcaacttggttcatccttgtggctacctcacaacttgatgatgactacttaaatgttcataacatggacaccggggatcatgtggctgtcaaggtcctcgtcaaggcaaaggttcacaagaaaaaactagctggtcaggtgatgggaagtaaaacaaggatttacatggtgctggattttgtgatgggtggagagctccatgatatcattgtagggcttggagctgaagtttggatgccgaaggcaaagaggcagggactgtgcagaaataagaaataa

SEQ ID NO: 147154 - DNA, 665 bp, Zea mays
  Clone ID: MRT4577_65724C.1
cttctatccagctgggaagaaaagctttgagccagtaagtgattataactaaggtcccgtttgtttcgttagaattgaattccattttaataattataatttagataaaactaattaagtttatatatttatatatgtaatatatttgtatattatgttaaatcatatgagagagatagttatacactacattcatattataacgaagcaagtagaagagtatgttataagttgtacatcgaaaaaataatatgtaaatctatagaatcaatttccatctttcacccccatgaatttgagataggcttatatgataactttagaaagtggtggaatgtcatattctaaaaaaatagcttattccaatagtaagattccaattcctcaaaatgaaatgaaacaaacgggccctaaatgtttttacttgtggatgtgtggtgtctataaggcattaagatccaaagaggaggagctgaaatggccacgaaacacatatatagccagtaaaggagtttattaattgtcgagcttagctgataaaagccaatttgtggccaggtattagttgagcaggcaacctttgggaagggtgtctgctgattcaatgtgttgtggtttgtttttgcttatacctttttcagatcacttttgagggggagcggaca

SEQ ID NO: 147155 - DNA, 149 bp, Zea mays
  Clone ID: MRT4577_65725C.1
tttcgaagcatcgtgagcgcgcgcccaatgaatatcatcatcagacgtgaggtaggagagtgtgtaggtccgtttcacgcctaaataatctgcgggggattctgcatgtcgctggcctgcatgaacagcgtgatcgaaaagtgcatgtc

SEQ ID NO: 147156 - DNA, 212 bp, Zea mays
  Clone ID: MRT4577_65726C.1
gtactagggggctaccgttgcagaatgatgggcggcaggaagttataatggagtaaacattgcagatagaccagactgtatagaggtggcaagtaagccaacccctaacttgcgaaaagcgtaggtcaatcgcgaggggagacctgttacaggtgggttagcttggggtaagataaagggaaagcatgggaggttatacttagtgggacgag

SEQ ID NO: 147157 - DNA, 632 bp, Zea mays
  unsure (1)..(632): unsure at all n locations
  Clone ID: MRT4577_65727C.1
cgaagacgagtagcgnaggtgnaagcaaggggagctcggaggggaagaagaagagatcagagcagcaagggtcgtcggaagggaacaccaagaagtccaagagtgaggtctcctcgcccacgtcgtctctcaaggcatcatcgcaggtgcctaaagtgaagttaggagacaagatcactgcactgcaacagatcgtttcaccatttggaaagaccgatacggcatcagttctgtatgaggcgataaattacatcaagtggttgcacgaacaagttcagttgctgagtgatccatacatgaagactagtagcaaggactacaactacaacgcatggggaaggttagaagataaggagggcgccgagatggtggacctgcgaagtagaggcctgtgcttggtgcccgtctcatgcacgcctcaggcgtacagggacagcaacgacggcccagactactggacgcccccatataggagctgcttgtaccgatgatgaactgattcaattcctgctgccgtgcatgcgtacgtgtaatacgtagctgtttattccatccattggttatataccttactcagtggtaataaatttgtggtgaatatatatatattattgtttaaaaaaaaacaaacc

SEQ ID NO: 147158 - DNA, 226 bp, Zea mays
  Clone ID: MRT4577_65728C.1
cccacgcgtccgaaaaaaaaaaaaataaaataaaaaaaaaaaaaaaaaaaaaacaaaaaaaagaaaaaaaaaaccttaaaaaacataaacaaactcaacaccaaaaaaacaacaaaaaaaccacttaaccaacatactaaaacatcctcatgaagtacttcaccgacacctacgacctcttctgcatctccctcatgactaaactcctcagacgcatctactacac

SEQ ID NO: 147159 - DNA, 1317 bp, Zea mays
  unsure (1)..(1317): unsure at all n locations
  Clone ID: MRT4577_65729C.1
ctgagctccggctacggcggcggcgcgctcgcgcaccagcaccagcacgcggcggccggaggcgcgccggagcggctcacggcgaacctgtccgacctcgtgagcaactggtccatcgcgccgccgaacccgtgcctcggcgacgcgcaccaccaccaccgcaccggcgtcgtcgccgcggcatgcgataacgacaacgccaaggccggcatgttcctgggctccggcggcggcgtctgcaatcacgagataggcggacacggcgcgatgctggagggagcggcgacgggcggcggcggcggcggcggccaggagtttctccggcccgccgcaggcgcagggtacagctccatgctcgggctcagcaggaacaacaggacgatgtatatggaggcgccgtggggaagcaatgccgccggcgcgacgaggagcctgtcggacctgatatctttcggcggagctccgctgggaaaagcagaggaaccggcgccgcccacgtcaacgaaggcgctggcggagtacaagaagcaagggcacgacatcccttcgccggcgaagacgagtagcggaggtggaagcaaggggagctcggaggggaagaagaagagatcagagcagcaagggtcgtcggaagggaacaccaagaagtccaagaatgaggcgtcctcacccacgtcgtcatctctcaagggcatcgcagctgccaaaagtgaagttaggagacaagattactgcactgcaacagatcgtttcaccatttggaaagaccgataccgcgtcagttctgtatgaggcgataaattacatcaagtggttgcatgaacaagtgcagttgctgagtgatccatacatgaagacaagcagtagcaaggactacaacgcatggggagggttggactggaaggacaagtcggagacggagatggacctgcaaagtagaggcctgtgcttggtacccgtctcatgcacccctcaggtgtacagggataacaacggcccggattactggacgcccccgtatagaagctgcttataccgatgaactgatatatatatcctttaccctgctatatatttattcgattgattaccttaccggccaagtggcaataatttgtacgtacgtgctgaatatatacattgttgttgttaaagaagacaaaacatgatggttggcggtataagtttagagatcattttgtgtacgaccatgatttcattattttacattaaggcgtggtatgtatctggttattaattaccgccctcccctggctttgtttcttnttttcataaacaaaaaatgggggggagggg

SEQ ID NO: 147160 - DNA, 800 bp, Zea mays
  unsure (1)..(800): unsure at all n locations
  Clone ID: MRT4577_6572C.1
ccggccgggacctttaaacacagcgccctcgatatacttatccttgtttttttgcttctacacctgttatcctaggaattgacaaccgtccacatgaaggcgttcaagagtttcttgaacaaacgtcgccagagcttccagaaccgcaaatcgaaaccggcagaacaaccttccgcccctgccaaagccgacagtctcatcgagacgtcagcaccagcgccagcgccggcgtcccaggccaatggtgaccaacaacaagtgttagctgaagctgcccccggaacccttcagctcgcactccagaacaagtctagctccagcacagtatatgcatacatcactggcctcgccctcgagcggggaaacacgccgatttttatccagtcagacggccagactgtgtactatcccgtagggcccagtgagatcctgcaaccactccaggctgacgtcgccattccgctcggtaaccccgggaatactgttaatgtcagaataccaaagattgctggtggtcgcatctggttcagcatcggtgcgaagctcaccttccggctcaaccccggccctgctgtcgtcgagcccagcgtaaccaaccctagtgatccaaacttcaacatcgactggaccttctgcgaatttacctacaacgatgcacagctttttgctaacatcagttatgtcgactntgtcagcatcccagttgcgatgagccttaccaacacccaaggtcagacgcagagcgtaccaggcatggggccctgatggaccgaaagtgttgcaggacagactacgcgccc

SEQ ID NO: 147161 - DNA, 510 bp, Zea mays
  Clone ID: MRT4577_65730C.1
ccggccgggactccgagtccgagccgccggtacgccgccgggcgccggccccctcctcactcctcccgcttccctatgtagcctgcacaaacgcgacgcgacgcagagagctcgccagctcggccccctcctggtctcctcacagagtcgccagccttcgcgcagagcgcacaaacccaaggcggcgccgaccccctcctccctcttgtgaaagccccactgcgctgctctgctctctgcgcaaacccccactgcgctgctctccgcaagccgctagtgcaagccaccgcccgccagtgcccagtgaatttctatttgatgtgttgattttgctcacattgaatcagtctctatttgctgacagtgaatttcaatagcaacaaattgtgtggttgaacttgtgttgttgaacttgatctatttctttttatgctaatgctatttggtttgtgaactcaacttatgtaatatgtatgaacttattacaaaaaaaaaaaaaaaaaagcggcc

SEQ ID NO: 147162 - DNA, 1048 bp, Zea mays
  Clone ID: MRT4577_65731C.1
ccacgcgtccggtgttgtttggtgatggcaatcggtaattcccagttttgctgtgttgatattgaaggtgaacaccgtcagtgcatagctgctgctgattgggctgtgttgatattcagaggaaggtgaacatcatcggtgcatagctgctggttggggtttgagcattaccctcttcccattatgtgatcgaaaacatttgcccgtggccttgttctcgcgggtgcaataaggttgacaaactgtctgcaagtgaaaatggtaccaatgtgtgctgttttcttgtcacagggcatgggatttgttaactgttaactagaatgtatgagtgaagaaaggattcccacaggcaccagatgctttgatctgtctaccaatcgcaacaatttaaacactttggaccaaggtaataagtcaagtattgttacagaggcagcagaatatattgttggcatggatgtcggccttcacactcggcaatggggaaaacacaacagaacggtttctgatcttgtgttagggtacaatggtttggcgtgatgccatggagtgatccttggaggtgcctggtgtcctccctgccagtgcctgaagcaaaccatcctccatcagatttctctatcctcctttctttatacttacaatctctctgtttgaatgtgaaacatagtggtagagtagctaaactatttaggacctgagactgacgtgttcatgttgttagggagaagaaagatcccatggtccactgactcgggtgcatggggccttgaccaggatgcttaagctcgtcttggcattagttgagggtaacctcgtgtgttaacagaagacgaacaactttgttgaaggacttgagttcttttagcttgttgcttctattcttttgagtctgcttggttgtgctatggctgtgaaaaaagttgttgttggttgtgagctgtggaaaaagctgttgtaggttgtgagctgttaaaaagctaaacacagtttagtgaaaccactaatagtcgttaaaagttcttcgatataaaaaaaaaaaaaaaaa

SEQ ID NO: 147163 - DNA, 440 bp, Zea mays
  Clone ID: MRT4577_65732C.1
aaccgcgaattcggctcgagctctcctcttgccaatcgatcgcttgttcctttcttcccttccaagaagcgcagcgaagatggggattgtcacgcaagcctccaacgtcaccctccacctgctggccgacgtctgggcgccggcggccaagccgcggcacatgaactcgcaactcgcgctaccagcgccgtcctaccgcgggccggcccccttccgcgcgtccaccgaggaggcggtggaagcgcccaaggtgttcgaggccccacaactggaccccaacacgccgtacccgatcttctaacgcagcacgggctgctctgttcctcaaagcgcagatggaagacctctacgtaattacatggacgtccccaaagaacaagtcttcgagatgcccacccgacgcgccgccatcatgcgggagggccccaaccccttgaaac

SEQ ID NO: 147164 - DNA, 223 bp, Zea mays
  Clone ID: MRT4577_65733C.1
tgggtctgtcctaagtcatacacaacgatcacagtctccctagcaatctctagcagcagatcctcgttcgaagtctagcgctagccttcctactgtcccgatggcccgtacgaagcagacggtgtggaagcgtcttggtgctagtcatccttgctctcctccacacccgctgccgtgaataagtcctagagtcctccccctccatcatccctagtcttgctgt

SEQ ID NO: 147165 - DNA, 260 bp, Zea mays
  Clone ID: MRT4577_65734C.1
acagcaaccgcaaaaatttccgggacatcggcagactacgcaagggccaattacatcaaaaaacatgcataaaccactctctaacatagcacattggaatctggtccaaccaggaatgcgcctaccaaactgcttatgctcaccacaaacaaacttttgacctgggacacccccattaccccaaaatgtgctatgtccccactacagacaaagattacacattatagctaccaagtaaaaaacactcccatgcccaaggc

SEQ ID NO: 147166 - DNA, 238 bp, Zea mays
  Clone ID: MRT4577_65735C.1
cgcgtacgacatctaactgccctccgactgacgaatcccaaagccatcatggcgacgcaccgacactgcctaacaatcgtcctcttagtgggacggcgccctccccgacgtccctgctcgcgcggcgctcgacggcggccgcgacccgctgctgggctgatggaacccgacccctgacgtaggcgactcgcacatacaagagcttggcaggtggacacggtgacaagcacaacaccag

SEQ ID NO: 147167 - DNA, 160 bp, Zea mays
  Clone ID: MRT4577_65736C.1
gtttattgtagccgaaggcatacaaaatgaataaatgatgaggtgaggagaggatgtattttatatcatgaccttactttgaggctgaaaaagtcaagagaagactttaatgtggcaaaatccaagataacggtctgtgcgaaggtgtaaatactaatgc

SEQ ID NO: 147168 - DNA, 468 bp, Zea mays
  unsure (1)..(468): unsure at all n locations
  Clone ID: MRT4577_65737C.1
aaccccgggggccccctttaggagttccacgtgatcaccgatgctggcggcaaggccatggctttcagggttccccgcacgcgtcggtggggccgtgggtgctcgcgggagccggcgaggtgcctattggactcggcggaagtggagttcagctacgatatcgacactggcctcgtgtccgtcgacttgccggtgccggagcaggagctatacctttggacgctggagattatgatctaggtcgtgatgctgtgcgccgacgccaacgcttgccttcgcggctgagccattatgagtcggacgacattgtcatttgctatgtgcacgagagatagatgtattgtggtggtgttgtataattggcatggggagtgttttttttgttatgttcttatctgtatatcatacgtgctctgaatgttatataatacttgataataaaggatggtgctcctttaatacgaanaa

SEQ ID NO: 147169 - DNA, 308 bp, Zea mays
  unsure (1)..(308): unsure at all n locations
  Clone ID: MRT4577_65738C.1
gggtacccctcgggtccgcctgccgcaagcttacgcgccgcctacatcgacccctcctcgcgccgtaggccgcctgccacagacgcggggcagtcacgtcgtncggctcggagggatacggntcggcccgtcgggcttcncttcgcactcttctattggnctggagaggagcggagatccaccagcaattnggatctggtgctactttttcttggatatactnagnanncctcggagctggctaggnaatncagcttannaaagggtgatcgaacaggnntcatcnggnnntgagatggnngatgagg

SEQ ID NO: 147170 - DNA, 1798 bp, Zea mays
  Clone ID: MRT4577_65739C.1
ttgggtacctcgaggccggccgggaagtcagcggcaggaacagcccaccataaataaacgccgtactcgtcgtcgtacgtacgtacggacaccagctttaagctctgtctctgtgggccgcacgaggaaacgccgccgaaaaccactgggtgcccgctctcgctcggcacgtcctgcgcgcgcccacgcccacgcgactggtcacaagcgctagccagagttcttcacgcgcctcgcgcctgcctgcagccgcaggggaatcgatcgtggcaagggattgcagtcgcagctactggtagcagagcgatggcggccgcggcgagggtgtcggaggtgaaggccgagggcctcctgcggggcgcctgcacggcgctggccgcggcggccgcgctgctggtggggctcagcacgcagacggagacggtgctgctcgtcaggaagaaggccaccgtcaaggacgtccaggccctctgggtgctggccatggcggccgcggcagcggcgggctaccacctgctgcagctgctccagtgcctctaccccggccgcgtcgccagcgcgcgcccctgccgccggatcagcagggctctggcctggacatgcctcctgctcgacaaggcgtgcgcgtacacgacgttcgcgacgacggtggcggcggcgcaggcgtgcgtggtcgcgctggacggcgcgcacgcgctgcagtggaccaagctctgcaacatctacacgcgcttctgcgagcaggtcgccggcagcctcgtgctcgggatgctggccgccgtcggcaccgccgtcctctcggccgcctccgcgcgcaacgtcttccgccactactcgtcgttggagacctacgccgcgcactaggctcgcggcccaaggcgtcgtcagctgggccgggtgcgccactcctctaaaacactgggccgtaacgaatttcaggcccagatgaagggtgacctgggctattaaagctggagctagtagagttctactccagagtgtactcctgcctacagtcctactgctctctccctccctctcgaagaggtgtgtacttttatttttcttttgcttctgttgcatttgatacattagtgaagacatgagtatgtacgttcgtcagtgtattttcttagatctttcctgtagactacattgcagctaaggaataaaaaaaaaaccagcaattgctgcgcactaaaaaaaaaaaaaaaaaaaaaaaaaaaaaaaaaaaaaaccaacgccgggggcgccgttgaggagtgcgacgtgatcagcgatgctggcggcaaggccatggctctcagggttcgcgggtgcggtcggttcggcgcttactgctcgcgggagccggcgaggtgcctattggactcggcggaagtggagttcagctacgatatcgacactggcctcgtgtccgtcgacttgccggtgccggagcaggagctatacctttggacgctggagattatgatctaggtcgtgatgctgtgcgccgacgccaacgcttgccttcccggttgagcccttttgagtcgggcgccattgtcttttgttttgtgcccgaaaaataaatgtattgtggtggtgttgtataattggcatggggagggttttttttgttatgtttttatctgtaaatcaaacgtgctttgaatgttatataatacttgataataaaggatggggctcctttaataaaaaaaaaaaaaaaaaaaaaaaaaaaaaccaaaaaaaaaaaaaaaaaaaaaaaaaaaaaaaaaaaaaaaaaaaaactcgaggggggggcccgtgtacc

SEQ ID NO: 147171 - DNA, 438 bp, Zea mays
  Clone ID: MRT4577_6573C.1
aaaaaccaaattaattttttttaaaattaatttatttttggaaaaggaggggccaactaggggtttattgggttgggggtaaacccatgtccatgggagaaaatggggtgggttaaaacccaaaaaagggaaaaaaaaatttaaaccccgttaaacccatttcaacccaaaggggtggaaaaaaaccaaaaaatcgggttggaaaaaaaccaaaaaggcctaatttttttttgacaaaaaccctttttgcacaccccaagcccccaaaaagggggcctttgggggtgggttttttccaaaaacccccggaaactaaaaagggtttccaggcccaaggatcctcggtggaccgttgggttgaattttaaaaaacaaaaacggggccccggtttgtttggaaaaggtccattttttgggaaaaataaacccctttaaaaa

SEQ ID NO: 147172 - DNA, 452 bp, Zea mays
  Clone ID: MRT4577_65740C.1
gttcgttttgtacttaaaccatgtggatcgaggcgtattggggtgtattaacgtggattgtgactatttgtggatctattacgcctcaatccacatggatccctgggaaaaatgaacatcataatatttttcaatcatatccaattgacttggggcagaaataaccgaactagagtctacagtgaggtgagacctgttcgcctcttgagtgactgaaacaaataagagattgttagagctcggacaataccattgagtgtacaggtttgttcaggacccactggctataagctactctattcgttcacaaagactgtattgtagaggtacatgatagaatttattcttatatgctataaaagaaaatgtcttggctacgatgctggtcgattgcaaatgtatcttctctgatcgacttccatatcaaacgagacaaacccgagggggcgtcc

SEQ ID NO: 147173 - DNA, 122 bp, Zea mays
  unsure (1)..(122): unsure at all n locations
  Clone ID: MRT4577_65741C.1
cctcaganaatccccnagccanacanacagggtaggngtagngtgtaagagtagtntgnagangatgatnatagtangaggtttgtgtctnngcacaccnttgtctcccatggaagctgtta

SEQ ID NO: 147174 - DNA, 978 bp, Zea mays
  Clone ID: MRT4577_65742C.1
gaacacaccagttctctagagcagcaccgttcgtccattcgcccacgcacgccgcgtgatccgatcgcgcgcgtagggctccatcgatccgctaccgctacaatggcaatgtcgtacaccaccctccactacttcgccgtctcctgcgccctcctcgtggcatcggtgtcgtcgctgccgccgccggcggtgttccaagtcggcgacgagcgcgggtggacggtgccggcgaacggcaccgagacgtacaaccactgggccaagaggaaccggttccaggtcggcgacgtcctggacttcaagtacggcgccaacgactcggtgctgctggtggcgcacgacgactacaagcagtgcagcacggagacgccgctgggccggttcaccggcggcgacaccaagttcgcgctggaccgctacggccccgtctacttcgtcagcggcgtcgcaggccactgcgaggcgggacagcggatgatcgtgcgggtcatcaggcccggcgcctccgcaccgcgcggcgcccctgtggcggcgccggcgacgccgccaaccgcgagtggcagtggcagatcaggcgcgcccagcccggccacctcgccggccggctccggctccggttccagttccacttctccgagcccgagcccgagcccgagcccgctgccgcaggccagcggtgcgtctaggcgcgtgctcgtgtcgtccgttgcagttgggcttgtgctcttggttgcctgtgccatcaccctgtcgtccgtggtggcttgattaaacttagaagtctgttttctgcattcatgtacttagtgcgccgtcagtttaggaagtaatgttagcttgtcgagatctaggaggtatacgcgtgtcggttaggaatggttgggccactgggccgagtccgcatgctctttatgttaaagacttggtaatttcaaataaatggagttcttgccatgctctaaggctaattgggatttt

SEQ ID NO: 147175 - DNA, 252 bp, Zea mays
  Clone ID: MRT4577_65743C.1
ttcatcacctccgcgggagcacagagctagctgggcagtttgacagcagtcagcttgttcgccgcgcccgtccttcttgctcgcctacgttccgttccgatccgtcccgcccgccgacgccgccgcattcagggatggagatgaagaagatcgcctgcgccgtcctcgtcgccgcctcggcggccaccgaggcgctcgccgcggaggctcccgctaccggcccgaccagcaggtgctccaaggtcgcgccct

SEQ ID NO: 147176 - DNA, 205 bp, Zea mays
  Clone ID: MRT4577_65744C.1
cccgaatcagtgtgagggggtccattggggaatataaaaaaaacacaactctggacatcatctacaaggactgactgactgaccgaccgatcgaccactagctgtaagaggagagagtactacaaactttagacagacacacactacattcattaagttctaattaaaaagggataaacaaaactaccaccagctttaggccttc

SEQ ID NO: 147177 - DNA, 238 bp, Zea mays
  Clone ID: MRT4577_65745C.1
tggacgcgtgggcggacgcgtgggctctacaaacacgtgacacgtacacccaccctcgcccactgcgtaccggcaccggccagatggcctggtgccacatgcgtggccgccagcgggggtactctaccccgccgcagctggtagctcggttcccggggcattctcccgctggaggcttatgcgcgcctccgggggacgcctggttccgggagcgctggctagtccgctaagggaaacg

SEQ ID NO: 147178 - DNA, 203 bp, Zea mays
  Clone ID: MRT4577_65746C.1
tgacgagaagagattgtgtggagttaccacccttgatgtcgttagggctaaaactgactatgctgtgaaagcctatgttccaggtgctgggggtaacgtacctgatgtgggcggccatgcaggcattactattctgcgactatattctcaagccgcaccaaaagccaatcttgatgatgacgtcattaaggctcttacaaaga

SEQ ID NO: 147179 - DNA, 948 bp, Zea mays
  Clone ID: MRT4577_65747C.1
tacgacggccgcccgggcaggcacaagctttatttttttttttttttttttttacgcattattaacaatttattaagtttctttttattttttttttttttttaaaaaaagacccttggccctccaacacccaaaggccatatacaacacatacctgtggtgcatagagggacccaaaacatgacgccacaacagctacaacaacgggagctagcaaaccttgctgaaaactctaagcaacagcagtttctaccattcaaccaacctggatcatagaactctgcttcttattggcaacaacaacaactaccatacagtcagctacctgctgcccacccccagcaattacttccataaaaccaactagccacattgaactatactgcttataatacagcagcaacaactactaccattcaggcagctagctggtgtgagccctgctaccttcttgacacaaccacagttgttgccgttctaccagcacgctgcgcctaacgctggcaccctcttacaactgcaacaattgctgccattcaaccaacttgctttgacaaacccagcagcgttctaccaacaacccatcattggtggtgccctcttttagatttcttatgagttatagttcaataataaagttttttgtctgatgtttgtggcttcccagaaataagaaagtacatttctaaaaaaaaaaaaaaaaaaaaaaaaaaaaaaaaaaaaaaaaaaaaaaaaaaaaaaaaaaaaaaaaaaaaaaaaaataaaaaaaaaaaaaatggggggtcaatataaataattcaacttttgtttaccaagcataaacaaataaaaaccctttaatatattgggcggggcccttttaaatggcccacttttttaaacccgtgggattgagaaaacaactgttttttaaccggtcaatatttttttactaccggcgcccctttt

SEQ ID NO: 147180 - DNA, 247 bp, Zea mays
  Clone ID: MRT4577_65748C.1
atcccccgtgcacgcttgcgtaagcatgaatgctctatatcggtcggcctgcctatgcaactattctcctgcctactttcttagccataagcacacgggctaccctcaagactcccacctaccaggactgaccttgctggagggatacgtgccgtgcgcgacgatgccgaccaggtagcacactcatcaacagggctggtatctacacctgcgcggtggccttcgccggcggattcaccatcggact

SEQ ID NO: 147181 - DNA, 559 bp, Zea mays
  unsure (1)..(559): unsure at all n locations
  Clone ID: MRT4577_65749C.1
gccggccgggtcggggccgtcgtctcccaaaggggctctcaaagggccttgcgtctccagcgtcgacgtccacgacgccggggaccagcggccatgcgtcccttctcctgttgcgctctcgttcgtcttcacaatttgtgcagataaagtgtttcgagaagacaaattattattctttggggagagtgcataaatcttcgataagagaaggaatgcagtctatcagatgatgcaaagcagaaggaatcccttctcagagagtgaaatccgaaactggtgctttcaaatatttcaagatctgatttacatacattagcatggatatttccaatgcgaccttaatcctgatatgtggttttgcatttttttacaaacaatgttgcaatggttgatctatgattcctgtttgttgtgaaacaagtttctagccccaaccattttcacatgacattttagataagaaaatagttctccatgtagctcaatcttcatgtttaaaatatcatgtgtatttgactggagggacaanaaagaaaaaaaagaaaaaaaaaggccccta

SEQ ID NO: 147182 - DNA, 1211 bp, Zea mays
  Clone ID: MRT4577_6574C.1
cccccctgggtcgacccagcgtccgcgccaaccttcccctccgacccgcacctcgtggaccgcgccgcgcgcttatccacgttcgcgcccccgtccccgtccccatcctccacgtccccggccccgcccctccccgccgccgctaacgccggcaagcgcaaggccgacgagaagccggcgtacgtgcacgtgcgggccaggcggggccaggccacggacagccacagcctcgccgagcgggcgagacgcgagaagatcaatgcgaggatggagctgctcaaggagctggtccccggctgcagtaaggtatcaggaacagcattggtgctagatgagatcatcaatcatgttcagtctctccaaaggcaagttgagtgtggaaggatagcaggcttcaactgcaagaacggaatcgacttggagcaggtaacctggccagaaatgggtgttcatggagcaaggcagctgatgcaacttcaacagcagttctggcatggcgatttagcacatccacaccaagtggcttcacagtgggaaaagcgtggggatggccatcctcccgtgtttagcaactccagtccctctctcttcggctatgatctaacaagctctggtaaaccttgcacgcagtcctatatcaccttcctgaatgaatttagttgtttgtcgcttacttcacatatcacagcctggcttgccccacaacttttgtctcttagtttgtcccgccagtgctctcttgagaacaaagtgtactgataggtaaatttaaaaatttgctgtccaaaacctgaggtgaatattttctactatctaggggaagtttctgaagtatacaaagctatttatagtcatggccaaatcttgaatatgctagcatagtagcattgctgttatattggcccagatagcaaatagacacagaaacacaggtgaagcaaaagacatacagaagcatgtggcagtacagtgaccaagtgttttgcattagctaataaacgtgatagagagccagagatcccaactaggagtccctctgtttgcttatggaatttggaaacaacacagatatctaatttgagttgccgcgccctttttcagaggaaaacttctatttccactgcttcagaactatcagcattatccacttttcatactaacaaaaaccatgagcccaggacttcgctagaaagattagcagattagagtgt

SEQ ID NO: 147183 - DNA, 475 bp, Zea mays
  Clone ID: MRT4577_65750C.1
gggttccaaacttccaacaaatcccatcccataaaagggtccaatgggaagccccccccggttttccagcccttttttttttggtttgggggggcgatccaattggccagacctttggctgggaattagaccttttatgggtcattttactggggtacaaggggcaagggcccctttgcgacctaattcatactggcctacagctttattggttggccatttgagagggggcttttaaataaggggcccccccctgaacgaaagggggtcccctttgacacaaacaattctttttcccatttttgttccaaaaaaactggcaaaagggtctccttcttttccttggtgcccaaggaaaggccaccgggtttttttagtaataaaaagagcctttgccccagtccccatgagaatctggggcggggtcttttttgttccctttggaggcaggggggagattctggcacttttttgg

SEQ ID NO: 147184 - DNA, 834 bp, Zea mays
  unsure (1)..(834): unsure at all n locations
  Clone ID: MRT4577_65751C.1
attcgccttctccaagtcaacagagggatttacaagcttaattccttgcctgcccccaagaagccacttggtagcaggaggaagacagcagcaggaacaaatcttgcatgaatcgtctcatctccctagtccaacaggcgttcgtgcgaggcatctcatctcagctcacctcacctcgcctcgccttaaatccaatcccagcggcgagacggaagatttggaatgcggagggaggatttcaccacccacgcgcaggggaggaatcgtcaccggatctacgagtgagcggcacgcatgtacgtcgcgcgagtagaaggactcgatccaagaaaccctaactaacaaaagagagagggaccaaccggagagaaagctgccagcgtagtagaggtcgccgtcgcgaccaccgctcacccacacctcatcttcttggttgcgtgcgtcgacgtgagtttggagtcggagtcggagtcggaatttttctagaacgaatggggtatggttctgatccaggagctacacaaggtaaaaaatccaagtcctgggctagaaacccgaacaggtttaaacgaagagaaaaaaaatataacaatactggattgttttgggtttggattgtggactgaactaaatcccaatccaaaccaaaccaagcttggtttggtctaaacaaaccaggccttatgtgtgatgatagaaaagttgctgcctccagnacacaaactgtccctcttcctcgatctaaaaaatgtgtacagctcatctggttttttcatctgcgactgaattgtaacagctcaccttgtttttcattttgtgtgagacaaatcatct

SEQ ID NO: 147185 - DNA, 608 bp, Zea mays
  Clone ID: MRT4577_65752C.1
ccgggtatacaaatctcctgtcgtcgtcccaaaaggggctctcaaagggccttgcgtctccagcgttggcgtccgcgacgccggggaccagtggccatgagtcctctctcctgttgcgctctcgtccgtctccacaatttgtgcagtggatctagaaagaagcatttaacgaccggccgcaccagaccaaaccgtagcagaactcaactgaaggcaaccgcgggcccgcggccacaatgagtcagcaggaatgtagtctatcagatgatgaaaagcagaaggaatcccttctcagagagtgaaatccgaaactggtgctttcaaatatttcaagatctgatttacatgcattagcatggatatttccaatgcgaccttaatcctgatatgtggttttgcattttttttacaaacaatgttgcaatggttgatctatgattcctgtttgttgtgaaacaagtttctagccccaaccattttcacatgacattttagacaagaaaatagttctccatgtagctcaatcttcatgtttaaaatatcgtgtgtatttaactggagggactatcacttataagcccaagaatagctgccttgcaatttttcta

SEQ ID NO: 147186 - DNA, 1110 bp, Zea mays
  Clone ID: MRT4577_65753C.1
gccggccgggccgggatcccgtcgtcttccaaaggggctctcaaagggccttgcatctccagcgtcggcgtccacgacgccggggaccagcggccatgcgtcccctctcctgttgcgctctcgtccgtctccacaatttgtgcagaccaaagacaaagtaagagtgtgctgaaagaagaaattgacctacttaaggtggaaccaaacgaaagcgaagtggatctagaaagaagcatttaacgactggccgcaccagaccaaaccgtagcagaactcaactgaaggcaactgcgggcccgcggtcgcaatgagtcagcagataaagtgtttgagaagacaaaatattattctttggggggagtgcataaatcttcgataagcgaaggaatgcagtctatcagatgatgaaaagcagaaggaatcccttctcagagagtgaaatacaaaactggtgctttcaaatattttaagatctgatttacatgcattagcatggatatttccaatgcgaccttaatcctgatatgtggttttgcattttttttacaaacaatattgcaatggttgatctatgattcctgtttgttgtgaaacaagtttctagccccaaccattttcacatgacattttagataagaaaatagttctccatatagctcaatcttcatgtttaaaatatcatgtgtatttgactggagggactatcagttataagcccaagaattgcaaggcagctattctaatacaaaaaaaaaaaaaaaaaaaaaaaaaaaaaaaaaaaaaaaaaaaaaaaaaaaaaaaaaaaaaaaaaaaaaaaaaaaaaaaaaaaaaaaaaaaaaaaaaaaaaaaaaaaaaagaaaaaaaaaaaaaaaaaagggccccaagggccggggccccctaaaaaaaagggaaccccccgggggggggaaattcaatataaggtttttcaaacccgccacccccaggggggggccgggaccccatttcccccaaaagggggccgattaacggcgccccctgggccgggttttaaaaacggggggaggggaaaaccccgggggtaccccaattaaaccccttggaagaaatcccccttttcccaggtggggg

SEQ ID NO: 147187 - DNA, 238 bp, Zea mays
  Clone ID: MRT4577_65754C.1
gtgggatataataaatcaaggttctgacccaccccaaatacaaaaagcatcgataatcatttcaaaaattgcacattggcacacataacaatatgcattccactaagcataccaaaggagcacatattccggtcctgcaccatctgggcatgagtctgcagattcagaactgtgcacatatcaatataggcccctagtactaccagagaagccagcatttggatgctacgcctcaatg

SEQ ID NO: 147188 - DNA, 216 bp, Zea mays
  unsure (1)..(216): unsure at all n locations
  Clone ID: MRT4577_65755C.1
cacgccgtcctggnagtcctctanacanatcgcatagcctctgcagccgtcgccgcgccctgcctccaccgcagagtcgaagacacgcttcttcaggccagcaacaccgtccattaagttctggacgatctgcaacgtgagttgggggtcgtcctccacgaagacactgtccattaagatccggacgatctccaggatgtcgtcgctggctccctc

SEQ ID NO: 147189 - DNA, 1171 bp, Zea mays
  Clone ID: MRT4577_65756C.1
agttagtccgtgtgatgagatcatgtcctgctggcgccgacgccgtggtcgtcggcggcggatacataggaatggaatgcgcagccgctctggttgccaacaggatgaaagtcactgtcgtcttccccggaaaacacttgatggcaaatctgttcacaccgaagatcgctgagttttacgagaactactacgaatcgaaaggagtcacttttataaaaggaactgcggtttcatctctgcagatctcgtctgggaaggtgacggcagcaatcctgcgagacggcaggcgcctacctgcggacatggtcgtggtcggcatcggcgcgcgcgccaacacggagctcttcgaaggccagctggccatggagaagggcggcatcaaggttgacggacagatgcggacgagcgacgcatccgtgtacgccgtgggcgacgtggccgcgttccccgtcaagctgctgggcggcgaggtccgccggctggagcacgtggactgcgcgcgcatgaccgcgaggcacgccgtcgcgggggctctggagcccttgggcccgatcaccggggaaatcaactacgtgcccttcttctactccagggtcttcgcgctgtcctggaggttctacggcgacaacgccggggaggccgtgcactttggggacctggacttctccgcttcgccttctcctccgtccgcgcccaagttcggcgcgctctgggtccgcgcgggccgcgtcaccggcgcgttcctggaaggtgggagccctgaggagtacgaggcgctcgcgcgcgccgtgcggcgcaggacgaccgtcccggacgtggccgtgctcctcgcgcggtggggcctcgcgttcattgtccaggaccaggagggccggagcggagccacgcggtcgggtaggctttgtggcagcggcaacacgtccaactacgcatgggcatggcacgccacggtcggcgtggccgcggccgtgtccattgcggcgttcgcgtactggtatggatggaaggcgccgtacctggcgaaacgccacttctgaacaaaggcagcatgctgctctccgtctccgtcgaccaagaacacaacttgtcacacaacaactggacatcactcagcagagtaaatttactatctttgtatttggtaataaagtgaaaaaataaattaaaagat

SEQ ID NO: 147190 - DNA, 818 bp, Zea mays
  Clone ID: MRT4577_65757C.1
cttctcctcatctctacctgcttatgcattagagcccccggagttgccttcgattcgcagctaagtcctgctttctttctcccttcccgttcttacgtttcagtccctgtagcttcttttttccttagagtgtactccccgttccgttgcaaataagcccctgagctctgtcacattctagcctcgactccttggcctcgggaggagttcgtcgcagatccgatctagagagcctccccgcaccacccatgtttaccttccccttcctctgacggccgccgccccccgatgaagctgcgcgttcgctgccgctcccactccttctccgtcgccttcctctactggttctacgacttctcatgaactcctcgcccctcgagaccgccgcatatccatcctgcctctagttgatttgtagatctagctccgtttctccccctttcttgccttcttccttcccaccatcacagaaaagagaaattttttccggttcttggatcgagaacccgaccatgtcgtcgccatcgcgccggagctccagcccggagagcaacatcgacggcggcagcggcagcggctccgccggcgacgagcgcaagcgcaagaggatgctctccaacagggagtcggcgaggcggtcccgcgcgcgcaagcagcagcggatggaggagctcatcgccgaggccagccgcctccaggcggagaacgagcgcgtggaggcccagatcggcgcctacacgaccgagctgagcaaggtggacggcgagaacgccgtgctccgcgcgcgccacggcgagctcgccgggcggctgcaggcg

SEQ ID NO: 147191 - DNA, 408 bp, Zea mays
  Clone ID: MRT4577_65758C.1
cagacgcttaaccatcaacgtacgggctttttctggtaaaccactagcacaccggaaaaccgtcttgcgagactcaacctttgctctttttgctgggagaggccatattgattaaataagtgtgctttataggagtggagatgataggaggagggctaccgcatctagttgatggggctgcaaacaatactctattcggttggggcgcgcattaccggggtgatacactgaaaaaccgagtctacaggtgaacttgaacacgcatctagcgactaagctattagaaacatttactggactgcgaacacgccacttacatctgtgatggcaccatggtgtaaaacgagaacactgacggattcacgtatggtgtatagggtgttgaaaggagggggtgactaatcccta

SEQ ID NO: 147192 - DNA, 463 bp, Zea mays
  Clone ID: MRT4577_65759C.1
acggcgcgtctcgttcgaaaggagacgttgaaagggttctagtaggcctgactaggtcccaggaatcagggcttgccaagccaagaagctcgttgcttaggaaagcagcaaaggttgcatgatttctgggttctgtccaaattaggcctgaatcaaatgggcaatcatcacaatgtctagtctctcgtgtatattgctgttctttctttactttttaaaaaaaaaagaaaacacgcacacacaaataaatcagcaaacatgcacagttctcttcacaccatcagtagagcagtgcgagctcagtagctcgccttggaagacgttcgcgctggctttcctactctgaagaaagcagcggatcttgggctttctcaagccccggagatccagctcgccatcgggttccttcatcctactacaacaaacctgccacattgcataagcctccaattcgatacttact

SEQ ID NO: 147193 - DNA, 1037 bp, Zea mays
  Clone ID: MRT4577_6575C.1
aaaaaaaaaccactcatcaggcgagacgcgagaagatcaatgcgaggatggagctgctcaaggagctggtccccggctgcagtaaggtatcaggaacagcgttggtgctagatgagatcatcaatcatgttcagtctctccaaagtacttgtcaatgaggcttgcaactgtaaacccgaggggcgattttggtgggctagatagctttctgaccacggagataaatgtatcattagagtatcatggctggcccacatattactttcaagaacgtcttggaaaatgttcagatatgcacacttgctgaagtttaagcatttctgagtgtggaaggatagcaagcttcaactgcaagaacggaatcgacttggagcaggtaacctggccagaaatgggtgttcatggagcaaggcagctgatgcaactccaacagcagttctggcatggtgatttggcgcatccacaccaagtggtttcacagtgggaaaagcggggggatggccatcctcccgtcttcagcaactccagtccctctctcttcggctatgatctaacaagctctggagcccagcaaaacccggcgagcaagctaaagaccgagctttgatcgacaacggtaaatagcatgtcaggggagcaagatggacatatggggggagggggacacagaatttcagcaaattgatcaaggcacaaacgagctgcgaatgaatgatggctgtggatggttgatgtcaagcccagcgaaatcaacattttcagagaggggatgtacatatagcgatagagatactgttggtgttgagctgaagacggggatgcatatgatgggcgaggataccgcagtcgttggagagacaggcaagccctgttgctatcgttgcagagatggccaagcgataccctggtttcgttactgatgatgatgacattcttagtgtatttctgacgactataatggcagtcttaaggttatatgggcagcattttttacgaacgcaagacatttcaacaagcattggaaaatttggcaaccc

SEQ ID NO: 147194 - DNA, 398 bp, Zea mays
  Clone ID: MRT4577_65760C.1
cccacgcgtccgtgaacaatggcgtcagcagccaccttccttctgatcatcgctgcagccgcatggacatcgctaaccgacgccgctccctcaccgcctccattcgtcccaccgccgccgtgcgcaccgccgcaatcggcggtggcgtttctccgcgcgcgctgtgcaaccacgctgtacgccgtggcctgctacgagtccctcctcccgtacgcgtgcatattccagaccagccacgtcaagctcgcccgcgccgtcggcgacgtcaacgcggcctggctccgctcgatctccaagcgcgtcaaggagctcgtcgcccgcggcgctgctggtggtggcggcacggccggcggtgccaagtcggctgcgctccgcgactgtgccagcacggtctcgtc

SEQ ID NO: 147195 - DNA, 162 bp, Zea mays
  Clone ID: MRT4577_65761C.1
actatcaccccatatcgtcttgataatatcatacgcgaggacgcgtcacaccgtgtttgtcgacagtataagaccgccgtcgccgacgtccaatctaaggaggacgaggtggactcgcccaataaaggagcggctctgtctcagctcctgagactattgtta

SEQ ID NO: 147196 - DNA, 297 bp, Zea mays
  Clone ID: MRT4577_65762C.1
agaaatttgtttgtatttgttatttacattttatatttttgtacatattgttagggtcagccatttttaatgatctcggatgaccaaaccagccttcggagcgttctctgtcctacttctgactttacttgtggtgtgaccatgttcattataatctcaaaggagacaaaaaaccttgtaaaaaaagctaaaatgacaacagataaacaatcttattccgagcattccagtaacttttttgtgtatgtacttagctgtactataagtagttggtttgtatgagatggttacaaaggc

SEQ ID NO: 147197 - DNA, 557 bp, Zea mays
  unsure (1)..(557): unsure at all n locations
  Clone ID: MRT4577_65763C.1
cattgggtacctcgaggccggccgggatccagcccgaatatcggatccctgagaaatgctccgcacgatgaagctacgaatgcgatctatgcacgcgagaggcaggctgctccgtggtgcaagacccagcgggagaagcagacaatgggagcactctggatcgactctaaaccctcctccggcgaagtctctgcgtccaattctgtcaccgccgagagcgtacgcctctccctcaagcgtagtggaggaggtcgtctcgatcgactctgaccgttacacatcacgtcctgcggnctcgacgaacggtgagctcgtattcttcgaccctatcccccctcacggccctagacgacgtcgagtcagggcctggcacgccaccatatgccgagatctggcgttgtggcgtcgatcggctacgttggcgacctgaccaaaggtatcaaattgatctgccagtggagacatctcttcatcagcactggcgcgggatgagcatgaggaccctagctattgcgacgcttcccatactaggaattgcgaagagagatgaagatacg

SEQ ID NO: 147198 - DNA, 436 bp, Zea mays
  Clone ID: MRT4577_65764C.1
aaaccaaaagtttgatccccggggaaaacggggggactgaaacaaaaaattttaaccttttaaccccttttttggccacccccttttaaaaaccccgtataaaacaaaagggggccttggcccttgggaaaaaagcagagggggggggccgggtcaatccccgaaccccccccattggtccgggctaaaaacccgcccaagggggatccttatcacctaaaaaagggttttttcccgcacgagggttgtttttgactaaggctcgtaatcaccgacccccccccttggggggacccccgaaaggaaagcgtcacactggaggggtggtttgatttttttgggggggcaaaatatgggggggttaacgggctttactgactccacggggattttgggggccggttggttgttgacaaggatctggaaggggacgggg

SEQ ID NO: 147199 - DNA, 603 bp, Zea mays
  unsure (1)..(603): unsure at all n locations
  Clone ID: MRT4577_65765C.1
tcgcggagctgaggggcgaggccaacctttttttttttttttttttttttttttttttttttttttttttttttttttttttttttttttttttttttttttttttttttttttttaagcctgagggatatcccttaataagggacccccctggggggaagaagggggggggcaaaggtcaaccaaaccccggggggcccggaaaaagggcaaaaaggcaacccgcccctattaaaaaaaaaatgaacggggggggggaaaccagcggccccaaaaataccagccctctacccggaaaggggcccctcaccgggggcccttttgggggggaagaacccttccctttcgggcaggggccccttcaccacctgaagggggaggaacccacccaaccaagcccttaaaaaggggaagcccccgggggggaaaaacctgggccccggcacccccttgaagaaggggggccagggcgcgaaccaccccaccacaaagtggagggaacccaccggggcccccccaaaaaaatttttcccccccaaaggcccctccaagggtttgaaggactggtggggcccntgcaccccccttcgctgcccccccccc

SEQ ID NO: 147200 - DNA, 726 bp, Zea mays
  Clone ID: MRT4577_65766C.1
ttttttttttttttttaaataaccgctcttttttttcgcgactctattcatgacagtacatgacaactcggcgagtctatgcttattctaccttgactgttgcaccgacactttcaagagccttctttagtttttctatctcatctttcgtcccgttctctttgagttgtttgggtaagctttccacgaacttcttggcctcgaccaagttcatgttgggcatgatagttttgacctctttgatgaccttagctttttgcgtagcatcgatttgtgttagcgtgaggctgaagacggtcttttccttcggtttctcgggttctgcttttctatcatttgcggcagcaggtttgtcaccactggcttgagcggtgctagaagctgcctggacgggcatagctacttcggtgattttcagtctcgactttagggcatctaccagttctgcggcctccagcaagctcagctgactgatagtctgaactaactcctcgatttttggtgagaatttcacatctgttccagtcttgctggcagcgacaggtgcttgctgggggtttgccgagctaggaatgggagcttgggtggcgtaagaaaacgagccataaatcgatggcgattgggaacttcgggggagatgccgggagaggggctgggcaagaagaggtccgcggggccatcgcgatagtccgcaacataccgtcgttatccgagacatcgggtatg

SEQ ID NO: 147201 - DNA, 250 bp, Zea mays
  Clone ID: MRT4577_65767C.1
gatttaaatcggggtcggcggcttctgaaggatcggcaggctccttgccagggtcgccctccagaacgaggatgttcagctcgttcgtcgtcaactaccccttcatcaccacggactacatgacctacatgttcaagtacgacaccggccacggtctctggaagcacatcgacatcacactccaggactcccagaccctttttttttgtgacaagccggtcaccgtctttggcatcatgaaccctgagga

SEQ ID NO: 147202 - DNA, 752 bp, Zea mays
  Clone ID: MRT4577_65768C.1
gacacaggaagcatttgcctgcattttttccattgaagtgcaagcaaagtgaagaacacctttttttcaataattcaacaacaaaggccattggccagtccataaaacaaaaggctgttcaacagaacatattacaaacgacaccacactaaatagataagaagcacatgtcacgaaggacagccttatctcgtcgaagaagacaacggcggcgagggatgagatgaagagaggagcagcggaagccaacgaggcttggacctttggccatgcttgatggccatggaatttcgaggttgaggctgcttcgaattaggattaggacggatgcgtgcagtttggcaggagaagatgccgtgcacgactccgccccctgcgcggcaacatcgccgcaacaaaactggggtcttggacagatttgatcggcgaaagcagcttcggcgtcctaccagatttgggaatccacacagatccgccggagtgcatgggaaacgaaaagcgacgtcggccattccgttgcgcggcaggccaggcactcgtatcgacgacagtcgcgccggccgagtactccatgcgggcggcggatacgacggcggctaccgtcttggattgggacgtcgcagcgatgcaggcggcaggcccagcttgagtacgtagtgcctgttttcccaatcggctgaacgcgtgcagcggcggcggtcgtacgtaggaatccgtcactgatttggccaccaacaacacaccccggccgg

SEQ ID NO: 147203 - DNA, 512 bp, Zea mays
  Clone ID: MRT4577_65769C.1
cgcgagaggtgttcttgggtggatatagaactccacataaatcacaacgaacacaagctctggatctcaccgacaccgacgaagaaaagatcagtgtgcgtcgacaaacgaaggtgctatcgcacgccacagcaaggctaacatgaacgcccacatgagcaacggccagaaagcctgaaagttggtggtgatgaacttaactgccggctggcgcggttcatgccgggccatcggctcactgttcgtcgaacacgcctggaagttcactcaggtcgtgttactgaaggtggacgtggacgaagtgactgaagttaccgctgcctacgaggtcaaggcgatgccgaccttacacttcgtcaagaacggcaagactgtcgcgaccatcgtgggtgccaagacggacgagctcctggccctgatttacaagcatgcctcgcctgcacctgcgactgctgctgcctgaatgagagcagatcagtcgtcgccgagaatatgggccagtacatatggct

SEQ ID NO: 147204 - DNA, 580 bp, Zea mays
  Clone ID: MRT4577_6576C.1
aattcggcacgaggggagagcgaggtccttcttgccttctcgttcgtttgctctcctcgctgttcttgcggttacctcctccttttgctttcaatgctaccgcgttactgctggatctggcacacccaccgcgtccgccgcctcctcagctaatcttggtcccggcctccccaagattctcttgttctttcggaattgcgtcttcctttgctgcctctgcttcgcagcagcatccgcgtgcggcggcgtggaacaagtgctgtgcgtgccgatttgagcgagaagtttctcgtgcggtactcgaggtgagatttcacctcgtccacgttcttcctcaccgccaaagacccaagggggagaaggaagggaagaggcggaatttcgattggttggttgctgcgtgaatccgcgggattcaggctcgagtctcccttgaattgcggcgtgggccatggttctctcctccaattccaccaccaaggcagcagctcagctgtgaaagtgacagcccgcagtgtagtgctctctagcagcctgctgctggcctgggctccaaggcgtcctcaccttcgccttcccc

SEQ ID NO: 147205 - DNA, 451 bp, Zea mays
  Clone ID: MRT4577_65770C.1
cattggtacctcgagccggcgggaaaagagaccttacaatgcccattgctgtgtcccgtcagatgtgtaacggctgtcgtcagcacgcagcttcctccctcttcctctcttgtttacatgaaacacatgatacatactagatttacacagggcgcaccaacgaccgacaacaaacaaacgagacatagaagccgacctgaaaaaggcaatgtaattgtaccccaaagcttacgattttcaccgcgtcaccagagtggactacactccccctgcttctgtcgaacgcttcgtgtacgtcttctttccatgctgccactccctgcacttcggagacacggtgtaactcaaagttaagactatggcgtgcagctttgagcgcacccacggaatgtggtccgagctcgctccaacagccaacgtcgccgcgactgggtgggtgcaccgcgatgca

SEQ ID NO: 147206 - DNA, 281 bp, Zea mays
  unsure (1)..(281): unsure at all n locations
  Clone ID: MRT4577_65771C.1
ggggcttggactgaatcaagngcgggataaaattcaatttttaatataaggccttaccattgggggcacaccccaggttggggccccccccaaaaaaacctcccccatgaggcgctccttcgggccacggagggaatacaaacataccccccaaacttaaccaatctgcttattttttactcttcggttccacacccatcccatttgaatatacttgcccgccccctttttaaacccccaccaacaatccttttcaaatgcacctttccatggggggcccc

SEQ ID NO: 147207 - DNA, 336 bp, Zea mays
  Clone ID: MRT4577_65772C.1
caggcatgaagcacatgattgatgtgatctatcatcgtatacatactatgctatacatgccacacaggtctgaacgagcatatctaagctatatcctgatttttacctgattacgtgttgcaatgttacaacaacggcaagaggaaaagaaacacgacttgttaatctgcgctgatctgctgttactcaatctccaatgtatggacaccatgcagtgaccagattacatgtaggatcaaacctcccaactagcataggacataccacgaggctggatcacagaaaccatctatgtcaaaaattttctgcggccgggcactcaatagaagggatgaa

SEQ ID NO: 147208 - DNA, 549 bp, Zea mays
  Clone ID: MRT4577_65773C.1
cgcgaagctgactggacgccccttcagggtgttcagccttgacacggggcggctgaacccagagacataccaactcttcgacaaggtggagaagcactacggtatccacatcgagtacatgttccctgaggccagcgaggtgcaggaccttgtgaggagcaagggtctcttctctttctacgaggacggccaccaggagtgctgcagggtgaggaaggttcggccgttgaggagggccctcaagggcctcaaggcctggatcaccgggcagaggaaggaccagtcccctggcaccagggccagcatccccgttgttcaggttgatccgtcttttgaagggctggatggtggagccggtagcttgatcaagtggaaccctgtggctaatgtggatggcaaggatatctggaccttcctcaggaccatggatgtccctgtgaacaccctgcatgctcaaggctacgtctccattgggtgcgagccgtgcaccaggcccgtgttgccggggcagcacgagagggaagggaggtggtggtgggaggacgccac

SEQ ID NO: 147209 - DNA, 959 bp, Zea mays
  Clone ID: MRT4577_65774C.1
gccgggacctcccgcgcgacggggaaacggatgattgcttctagtcccaccgcgctgcaggtgctctccctctcgtcctccatggaatggatgattgcttctagtgctagtcaaaactagaggagcgcctcccaggatcctctcgcctgcgggcaccgagctgccgtctctgggacaagatgaagctggttttctggcatcggttttttctattcttcgtgttagtttcaacatcacagggtatgagttcagatggcctagctcttcttgctctgtccaaaaccctaatactgccaagtttcataagaaccaactggagtggttctgatgcaactccttgtacatggaacggtgttggctgcaatggaaggaacagagtgatttctctcgacctatcgtcatcagaggtttcaggttttataggacctgaaatagggcgtctgaaatacatgcaggttctcattttatctgctaacaacatatctggtttgatccctctagaattgggcaactgcagtatgcttgaacaattggatttgtcccaaaacttgctttctggcaacataccagcatcaatgggcagcctcaagaaattgtcatcactgtcgctctactacaattctttcaacggaacaataccagaggagttgttcaagaaccagtttctggagcaagtgtacctacatggcaatcagctcagtggttggatacccttctcggttggtgaaatgacaagccttaagtcattgtggttgcacgaaaatatgttgtctggagttttgcccagttcaattggcaactgcaccaagttggaggagctgtatctactccataatcaactgagtggcagtattccagagtccttgagtaagatcgaaggcctcaaggtttttgatgccactacaattagtttcacgggcgagatctctttcagttttgagaactgcaagctggaaata

SEQ ID NO: 147210 - DNA, 586 bp, Zea mays
  Clone ID: MRT4577_65775C.1
agtttatgatacaagtcgttgattatacattgagaccaatctcatccaataacttatggatacataaatcgccaaaccatttaacttctcttgaatcattgttgacatcaaatagttcctcaataattataatttcaaaaagcttctccctaccgatgcaaccgtcatggatataataaataatatttaataagtaattgagatattaggataacaatctaaataagacaagacagtggcacgacatctttgtatatttatatctaaggacaaatagacttcacggaaaaatggtaacggtcagacccaagaataagggaaattaagaggggaaaaaacgggaaaaaaaacaaaattatgcaccttttcactttggattggaaaacaacccaaaacaaactatggttttaaggaggaaaaatttaaataaggtccttgtaaattaatgtaattagggaaagaaggattagtggctagtgctagtggtggccaatttaattttggaccttggttggaagggaaaaaaaaaaaaaaaaaaaaggcggccttggacttcaacttttggttcctttaatgaagggtaaat

SEQ ID NO: 147211 - DNA, 329 bp, Zea mays
  Clone ID: MRT4577_65776C.1
gcatgaacgcctctgcccgtcccacgcaaacgtgcatgtttaccggcaatccggcgctggagcccaccagtgattcaatacgcaacaggtgttgctcatggctgaccctgtacagcatgactacgctcagatgtctggatcatggtcttcttgaggaccagcctatctgtgcaggagctcttgaccaaagatgaactgatcgccgacttgcttttggtggatgaacaactgaacggggctgccattctgacagcaaccaacgacacactggactgctcttggcataactgcataggatctagctgacacgaggcctaagctgggcactg

SEQ ID NO: 147212 - DNA, 371 bp, Zea mays
  Clone ID: MRT4577_65777C.1
accgcacacaacacaaactcaaccttgaccgtgacatacacgacgccatggctatctagcaggcccgtaagctaactcagcctggccggctaggcatgatgtattgtgcatccggtcgatttgtgccacatcaacattgagagctgaagatgactggatacacaaacgaaggggagcatcgtgctgatccagaccaaaacggtcgagccatgacagacagaccatacatggacacacgctgctactgataaaaccatgtagacggtgaagcagcagatgatgctaacatacttgttcaactacaggcaactagtgacgcacgacacaagtctacagatgaggtgtaccactaccggctactattagcggtc

SEQ ID NO: 147213 - DNA, 683 bp, Zea mays
  Clone ID: MRT4577_65778C.1
ctgcctgccctaccgaatctttcgacgtctcatcatacccaggaattgttcatctgttccaggacccctcggtttcaaccgaagcccactcaagccgaccacacaccgctgccgaatgtttccgtcacaagagatgctgaagtcctgaggctgtcatcagccacctccacaccggctgcgggaaccttcgctgctccctcggaggtcgctttccgattcctcctcgtgcatctattgggctcgctcggtgctgcttgcctgacgtgtgggtatgctgcttctttgacttggatgcccctccctcccgattaacatgccaagcatcaccctgctgtaccctctgtaagtaccttcatcaccctaataatataaggtaccagatttaccagcgcagaaatgaccgaccacgatccacggcatacatgagatgaaagtatcatgctgagacatgcgtgccgttggtggtgctagcagtacgcgaattgcgcgcggctgatgcagaacccgtccaaggtgtgacgacgagaacgagggtgacatactgcatcatacactcctacgtcaccctcctgaagatgatcgccgagtcgctcctccactgggtacccgtgtggtacccggccaaggtgctgttggcggcgtggctggcgctgccgcagctcaaggacgactccttcgtctac

SEQ ID NO: 147214 - DNA, 520 bp, Zea mays
  Clone ID: MRT4577_65779C.1
ccacgcgttcggacccacgctttcgtggagcaacagacgacgatttaattgataatgcaaaattaactggatatataaatgtgttagaactcttctagaggcggaaatttgaaccgtcgccatctgcaaactgaacaaagacatggacacaaacgttacgtggatcagtgccagggacattatttattgaataaaccgccactcatgaaagaacatagtccagggtgtgagcaggacccactactgacccccagcggatcacgcgatgcgcatactcgtaaagaaacaacttggcattctggacaacgtttaggacgttgataatgtttacaagcaagaactccacatacactaccacatcgcgcaggtcagcctcgtctactgcgtaggctcctgcatctgcttgatgagcttcacagaacactatggacgtcaacgaggaatgatgtatatccagaatcaattacgcaagctgcgtgatacgcagtaccgagatatggggttgatgcatactgtgcac

SEQ ID NO: 147215 - DNA, 463 bp, Zea mays
  Clone ID: MRT4577_6577C.1
ctccacgtcaccaccgtcgcctgtctccgtccactcgacactgagctaagcacgtcttgagcagcagtgcagcccagcccagcacacccgcacggtcaacagataactccgcgaacgcagctcccatgacaacgcacgacagcgacccgcagagtaacagctccatcgcgcaggtcgtgtcgtccctcagcagtctcgacatgaaccacacacacgacagtaccgagtccagcaagcgcgtaatgccagccatggccgcaactcacaaccacgtcggaatgaatgtcaacaggatacggcctacggaggacatcttcaacccgcacgacccacatattcgcgaggatatcatccggatgattatgcagtacctcagcgacgaaggctacaatgcttcccagatgacgattcaggacgaatccaacgtcaaatggcatgaccgggaggaaaacacgcatgagac

SEQ ID NO: 147216 - DNA, 259 bp, Zea mays
  Clone ID: MRT4577_65780C.1
gttggtcatagtattaacggccctcttgtgcctaagcctaacatccagactatcaacctgcgctaccacctcgccctagtcctcgctcctcctattcccaactacatcagttgtagttttaaccctcatggttgtcgtccattatgtaatggtatacctttagctaaccctcatcgcattagttaccgcaagcctaagtgctgcctcattatccattgaacttacgataaccagtagccgaaggccagtcacaggtgat

SEQ ID NO: 147217 - DNA, 1343 bp, Zea mays
  Clone ID: MRT4577_65781C.1
gagagttcgtgaatggtggcgacaaaagtgttgccaccctcggcggctcggctcttgtcggtaggtgtccctccctttactccctccgccctcccactcagtcccactgcccttctcctcggtccatcgcaagcttctgcggtcctgcctacggcggcatccacccttctgccgcatcgtctttctcaagacgctgccccaggtccatcgcgcctagggttcgccgagtccggcggcgctaagataatgagtgggcaccgaaacagtcatggaaagcgctactctgattatactgaaactggaggcggtaagagaagaaatcctggtgatgatacctatgcccctggtcctgatgacactgtgtatcgctacctctgtgcctctagaaaaattgggagtatcattggcaggggtggagaaattgcaaagcagttgaggactgagacccaagctaagatcaggattggtgagagtgtccctggatgtgaagagcgagttattaccatatttagctcaagtcgaaaaactaataccatcgatgatgctgaagataaggtttgccctgctcaggatgccctctttagagttcatgagaggcttgccactgatgagagttttggtaacgaagacagcgaagaaatttcacctcaagttactgttcgcctgcttgtgccatcagaccagattggatgcattcttggaaaaggtgggcacatcatccaaggaatccgcagtgagactggtgcgcaaatacgcgtgcttagtaaggatcatatccctgcatgtgccattagtggcgatgaacttctccagatatctggggacatggtagttgtcaaaaaggctctttgtcaagtgtcatctcgcctccataacaacccatccaagtcacagcatcttcttgcatccagcttgacccaaccgtatccaggggtacccactgtggttcctctgctgcacctgatcccaggcacctggaggatttctgcggcttacagcggatacagtgcccgctcctctagtagtgggttatctggtcatagttctcttcactatggaaagcatcatggttattaggatttagattgcttgataaagcagccaagacattgaagtttggagcctgcttattggagccccttcccaaaccagatggccaagagagcccaacctggaagcttaggaggactgtgtggatgccatagaccacctgatattcctcacactacattacttatgtcttcttctgggcctatgtttttagccctgccgcaaatgttctgaacctatgtatcgaaaggtcgcatttgagactgcaaaaaaaaaaaaaaaaaaaagcggcc

SEQ ID NO: 147218 - DNA, 2478 bp, Zea mays
  Clone ID: MRT4577_65782C.1
attgggacctcgaggcggccgggaacctcttcgtcgatcggtgtccctagcctccccctgcccggctgtcctcctcgatttcgcaagctcctggttacggcggcatctatcgttccgccgcaagggccgcatcgtctctctcgcgacgctgccccagaccgccgaggtcagtgcccctccgccggctcttcctgccacacgccccgtcgaatcccgcgacggcgggccttagttcggcgtctgcaccccgtagatccgggcggtagagcccttgtttcgtgccaatccgtcttcttggtggttcgatctcttcggtgggcgcgtagacgtgataatggctggccaccgaaacagtcatggaaagcgccagtctgattttactgaaaatggaggcagtaagagaagaaatcctggcgatgatacatatgcacctggtcctgatgacactgtgtatcgctacctctgtgcctctagaaaaattgggagtatcattggcaggggtggagaaattgcaaagcagttgaggactgagacccaagctaagatcaggattgggcgagagtgtcccctgggatgtgatgagcgagttgttaccatatttagcacaagcaggaaaactaataccatcgatggtgctgaagatgaggtttgccctgctcaggatgccctctttagagttcatgagaggcttgccagttatgagggtcttgggaacgaagacagcgaagaaatttcacctcaagttactgttcgcttgcttgtgccatcagaccagattggatgcattattggaaaaggtgggcagatcatccaaggaatccgcagtgagactggtgcacaaatacgtgtccttagtaatgatcatatccccgcatgtgccattagtggagacgaacttctccagatatctggggacacggtagttgtcagaaaggctcttcatcaagtgtcatctcgcctccataacaacccatccaagtcacagcatcttcttgcatccagcttgacccaaccttatccagggagcacccaccttggtggttcctctactgcacctgttgtagggatcactccagtaattcctccttatggtggctacaaaggtgatgtagcaggagattggccctctttataccaaccacgaagggatgagagctctgcaaaggagtttagcttgcgtttactttgtgctgctgcaaatgtggggggtgtaattgggaagggtggtggaattatcaaacagattaggcaggagtctggggctttaatcaaagtggctagctccaattcagaccctgatgatgactgcataattacagtttctgcgaaagagttctttgaagatcctgtatctccaacaattgatgctgcagttcgtttgcagcctagatgcagcgagaaaagtgatttagaatcagctgagcagtcatacacaacacgcttgctggtgtcaacatcacgtattgggtgcctaattggcaaaggtggttcaatcattactgagatacggagaacatccagagccaatatacgcattctttcaaaagaaaatgtcccaaaggtagcagcagaagatgaagagatggttcagataagtggaggccttgatgttgcaaggcatgctcttgtgcaaatagctacaaggctgaaagccaatttttttgaaagagagggctcgttatctgcatttccatctgtgatcccttaccatcctttgcctgctggtgtttcggtttcggatgaaccaaaatatctaagcagagacactaagcctgttggacattacctatattcaagtgcttttcgtacatcggatgacatgattccttctgacagctatgcaagttatggtggctcccaggcacctggaggaggatatgcggcttacagcggatacagtgcccgctcctctagtagtgggttatctggtcatagttctcttcactatggaaagcatcatggttattaggatttagattgcttgataaagcagctatctgatggacctgttattttcacctttgccacccctgctcccctcacgtactataaaaacagccaagacattgaagtttggagcctgcttattggagtcccttcccaaaccagatgaccaagagagcccaacctggaagctttgcttaagaggacccgtgtggatgccatagaccaccttatattcctcactacattactttgtcttcctgtgggcctatgtttttagccctgccgcaaatgttctgaacctatgtattgaaaggtcgcatttgagactgcatgtatttgcttgtttgaaacctgattcagtttagcgatcatagttctagacgcccgggcttccctatggaaagcgtcatggttattaggatttagattgcttgataaagcagccaagccattgaagtttggagcctgcttattggagccccttcccaaaccagatgaccaagagagcccaacctggaagctttgctgttt

SEQ ID NO: 147219 - DNA, 219 bp, Zea mays
  Clone ID: MRT4577_65783C.1
aaaaaaaaaacagggtttaaagacaaatgtcacaataacatcagagttctttttacattggggaagtttttcaaaataaaagattatttttaaacgaactttggttctttctttggcgccataaagtcaactgaaaaacgcccccttaatcaaatcaaactccttgttgggtggcttctcctgaaccaactgtttttttccttaaatgggggccgccaa

SEQ ID NO: 147220 - DNA, 1259 bp, Zea mays
  Clone ID: MRT4577_65784C.1
atggctgacaagccttcctccaccgtcgtcgtgggggatctggaggcccttgttgccgatggtttgctccgtcccctctccggcgggccgcaactggagtggatggtcccgagcgaggccgacctgactccgccgccggggtacgtggtcagctttatccccttccatgagcgggggtttggagtgccagcgagccgcttcatgcgggtgttcctgcactactacggggtggagctgcacaacttcaaccccaactccattgcgcaagcagccatcttcgcggctgtttgcgagggttttttggggattaaccctcactgggatctgtggacccatctcttctccgcggagctctttgcctcgacgacggaggtgaagaaggttcgtatggcggtgcgggccggtggctgcacccttcagctgaggccagggcgcatgcagcagtacatccctgccaccctcgtgtcttcgaacaaggggtggcagcgccagtggttttatcttcggaacgacgatgggaggctcctttcgttttctcaacgagtggcgggtagcgggtacggtagggaggctggatgccggtgccgttacctagcccgtgatgcgtcccgagcgtgggggttggggttttacaagccctccctgccaccggtcccggaggacgtggtgggccaagccacgtggagggtcgccgcggagacgaaaaaggagaagacggacatggaaaaggcccgggcccacgagcggatgcgggctcgggaagccttggagaggcgtcgtcggaggcaggagagggacggactcccaagggagccgtcaccggagacgcctgacgatgatgatgatgatgacgaggacgatgacatggcggcccgtcttggcttcagcccggatctgaggctgggccaggggtcgccgagccagcctccaagtgggctagcaccatcagtatctagggccgggacaccaaggtcccggtccgaggagcgaggacaggccgagggggtacttgacctcttggccgaggtagttcaggtgactccggggagtcaggccgatccgcctgtcccccaagagcaggcgcccgtgccggctacacaggaagttggtcctctggccgtcgtgacgacgcctgggcgggccgccccttcggtgcctcgggcgcccgaggtggaggcggcgccagagtcggcaacgcctgcaagggctgaggcccgaggggcctccccgcaggcacgattggccctggttcggagcgg

SEQ ID NO: 147221 - DNA, 1266 bp, Zea mays
  Clone ID: MRT4577_65785C.1
gccggggcttaccaccggcctcggcctcggcctcggtgccggcgccgatcgcccaggccgcgcaccccgcccgtcgtagtactgtcagtcatatcatagcaccccgctcagatttccacaacccaaatctacccacctcctcagacctcactccactcaccgttgccaaaagctcccacccacctctcatgggcagggttcatgtcacggcagccggccgcccgcccgcccgcgttcggcggcgcgcatgcagcatacaccgccccaggcccgatcgatggaggggaggggagcgcccgcgagaaccctaaaaagcctccgctcaacctctatgctggatgggatcagctggacggaggcctggagcgtccagcactccagcctgccacacgcctgggctggggcccacctccccgctataaagcggagccgccgggttaccgttgaagtctgaggagacctgatccacaagcaccgccgccgtgtgccagagatgagatgccatggaagagcaagaagacgcatggaattgtgacgccaaggagagcgaggcacaggagcacggtgacacggtcggccggcagatctgcagtggctgccgccgtctccgcacgatatctcgatcggatactgttgagatagctagccggccgccgttccattcatggtgcttgtactcgtccgatcgaattcctggccgcacacgccatttctttgacttttgtgctgccgctcgatcggtctaataaattaaggggctcgggcgatatgcattcctgaatttattttttttccttgcggaaattaagtttatatactcggcgtttgatgttcataaagacggcataatttcactgaatagtgtgaaacaaattatagttccggaggttttgttgaattattgggctttgcaggatttatattgttttatacttcgattacctgggacaatgtaagctttattttttttctgtctttattatatgggcaagtaaaaagtcaagtcggctgtaaataatagcattgaaggtttcaaggtacgcgcaagcatggtccctggtgaaagttgtaggttggttaagaaataaatattttctggtatatgtagccaaagtttgcgttgggggtttctaaatttgaattaacctacgaacttttcaccagcaggagtgttgattgttccacacaagtattctataaaaaagaaggccaagctagttgctgccagttcttttttactggacaaacgttgaactttcaactttt

SEQ ID NO: 147222 - DNA, 785 bp, Zea mays
  Clone ID: MRT4577_65786C.1
aaacaaatgaatataaacatacatagatattttggctgagctgctcaatgatgcctatcggactagtataaattccatcttccaattccagatgtgaatttttacacatacacatattttggctgagctgctggatgaaatccaacggaactctgaacatggaagactgaagaaaatgcagcacacaggttcgcgcgcctgtcgccgtctcttgaaatttcctgaggtgagcagtgagctggagaatcaccggcggccacgaactgcttgcatcgcgttgcgtcgttcagctcccggcccaggacacgaaggaagcaacgcgggggtctcgtcgtcggcgaccatgcttcctccttgggccgacgatgccagccatcggatcccggtcagtcaggacgtgaagagctggctgccgagcgtgacgatggcggtgccgccgtcgcccatgacggtggtcagggccatctccttctccaggatccggtccagctccgccgccaccagccgcatcctgggccgccgcctcgccgacgggctcaggcagctggacgccacctccatctgacaacacaacaggtccgaggtgaagctccctcccagcctcgggtcgaccagctcgttcgaggcgaaacgcgcctccatctgacaacacaacagggacaagctcgttgctggaccccggcggcatcagccccgcagcctccctgcctgtgaccagctcgagaaggaacaccccgaagctgtacacgtcgctgctctcagtctcagagagctgcgcctgcgcc

SEQ ID NO: 147223 - DNA, 307 bp, Zea mays
  Clone ID: MRT4577_65787C.1
ctcgcgggtcgacacaagcgtctaaagggagtcgtattaaagagcaagtgtgatcatccgttgatacatcttgctaagaaacctgcgtgcccttcgttcacgtcgcgataccgacgacgctctcttcggctccggcaaaccacatcatgtcgcgacggagatgaagaatgtcacctgcgccgtcttcagcagggccgcctacgccaccgtggtccacgccgccgatgctacggctcccaccactacgagcaccacctcggccgcattacaggccgtcggctctgtgcagggagatacagtgctctcc

SEQ ID NO: 147224 - DNA, 599 bp, Zea mays
  Clone ID: MRT4577_65788C.1
tcagtcaggacgtgaagagctggctgccgagcgtgacgatggcggtgccgccgtcgcccatgacggtggtcagggccatctccttctccaggatccggtccagctccgccgccaccagccgcatcctgggccgccgcctcgccgacgggctcaggcagctggacgccaggcccaccacctccgccataccctccgaggtgaagctccctcccagtctcgggtcgaccagctcgttcgaggcgaaacgcgcctccatccattgagcgagagagtccttgctggaccccggcggcatcagccccgcagcctccctgcctgtgaccagctcgagaaggaacaccccgaagctgtacacgtcgctgctctcagtctcagagagctgcgcctgcgccgatgaatgtacctccgggtcttggaagacaccgcgactcgccagagcggcgacggcgccaccatcaggccctcgcagcagcctgtggatcccggcgtcggacaccttggcgatgaagttctcgtcgaccagcacgttgctcgtcttgaactccctgtggatcagcggcggcgccaggctgtggaggtgactcagacctgcagttgcg

SEQ ID NO: 147225 - DNA, 329 bp, Zea mays
  Clone ID: MRT4577_65789C.1
aaaaaaaatcttctacccaaaggaggggaccacaaaccgagggccattttaaaagagttttgcgccatacacagattcaaggcgcaccggcgggaaatgtacactgagacctcccgaaaaggccaagggagccgggttaaaaccaaccgagaaccttcccaaactgggaaggtggacccaggaagcatagccccctggaaggaactggaccgaatccagttttacaccaaaacaccagagcaggaccctcgtttccctacatgaaaaacctcgccagctgtgtaagaggcctgcgcccgggcgagcaagggaccgaacccaaacccccc

SEQ ID NO: 147226 - DNA, 1816 bp, Zea mays
  Clone ID: MRT4577_6578C.1
caggctctccctaggtccctacctctccaatcttctccttccttgaccccagcggaggaggagccagggcgtgcgagtgcgaactgcgaacgcagcagcagggggttaggcgcgcacggcacaccagtgagtgccatcccctctcgcctcggcgccgtctccctataactaatggcgccactcccccctagcgccgcctccggtcccgtgtcctcctcccctcgttcccttgtcccggacgcctgcgccgagccgatgcgccgcgcctcgccgccgcaggagctccccgtcgccaggggcgagatccaggcggcgctggcccccgccaatgcctcctccgcgggcgcccacggaggcggaggctccttcacggcgctgctgggactccccacctcgcaggccatggagctgctcctcccccgcacgacgccccccgccctagccacagcgcccgcgccaaccttcccctccgacccgcacctcgtggaccgcgccgcgcgcttatccacgttcgcgcccccgtccccgtccccatcctccacgatgacggaccagcccctccccgccgccgctaacgccggcaagcgcaaggccgaccccgtcgaccgtgcccccaaggggaaggcggcgaagaaggggaagacggcggaggagaagctcgcgggcggcgacggcgacgacgagaagccggcgtacgtgcacgtgcgggccaggcggggccaggccacggacagccacagcctcgccgagcgggcgagacgcgagaagatcaatgcgaggatggagctgctcaaggagctggtccccggctgcagtaaggtatcaggaacagcattggtgctagatgagatcatcaatcatgttcagtctctccaaaggcaagttgagtacttgtcaatgaggctcgcagctgtaaacccaagggtcgattttggtgggctagacagctttctgaccacagagtgtggaaggatagcaggcttcaactgcaagaacggaatcgacttggagcaggtaacctggccagaaatgggtgttcatggagcaaggcagctgatgcaacttcaacagcagttctggcatggcgatttagcacatccacaccaagtggcttcacagtgggaaaagcgtggggatggccatcctcccgtgtttagcaactccagtccctctctcttcggctatgatctaacaagctctggagcccagcaaaccccggcgagcaagctaaagacggagctttgagcgacgatggatggtagatagcattgtcaggagagcaggctgaacatatgcggtgggggcgcagcagcgacatgatttcagcaagttgaccaggtcaggctacaaacgggctgggaatgttgatgtgaagcgcatggagaccaacattttcagagacagagaggatgtacatatagcgatagagaatactattggtgttgagctgaagacgggaataccatagttgtattgtagagatgggcacgccctgctgctatcgctgaagagatgggagggcgagcgatactccggtctagttgctggtattcttggtgtatttcttactataatggcccaatcttaaggttatatgagcagcaatttttatgaaccaaaacccaaaaaaaaccatcatgggtcatcatatacccttctcgaatgcatttcaacaaaacatgaatgtagcacagtataactacatgtaacacacgtgcttgttacaatcctactgttccaagccattctaggttttctttaaggcatacggattttgttacatatttatatatggcttttgttatgtactttcaga

SEQ ID NO: 147227 - DNA, 365 bp, Zea mays
  Clone ID: MRT4577_65790C.1
acgcgtccaaacagaatccacagtcatacgagcaatcgcacgcaagtgtcacgtcacatatcggtcgacatggatcacacgcagtctgccgtagcggtcgccgtgatggccccggtgctgctgctggaagcggtggtgatgacctctgatggcggcatcaactgcgtgcaggtgaactccgccatcaagcgctacgtcacctaggcgtacgtcatggggtccggaccctccgcgtcttgcagtacctgcgtcatgaacgtgatgatcgccggcaggatcgccgctgacaggtgcgctgcctgcatctgcctctcgaacgccgccatgggcgtcaacggtctcaaggcctgcaacacggccagcat

SEQ ID NO: 147228 - DNA, 286 bp, Zea mays
  Clone ID: MRT4577_65791C.1
gccggccagctgttatcgtaatcgatctggttgccactttgaccgtcctgactcggatctaacgaatctaaagtcgtacacgccagaactgcagaacatccacgtatatatagtcgactgtaaggctgtatccagcagctctcaggccttctttgaaataagcgaaaatttcctgtttcatgtgaaaataagctgattcctataaaatttctttatgatttctataaaattcctatgttacaaaggaggtcttatccaatctcctactggatctgctgtatagctt

SEQ ID NO: 147229 - DNA, 888 bp, Zea mays
  Clone ID: MRT4577_65792C.1
gccggccgggtcgcgaaagatatttttacatgtcgcccttcggcatcctcccaacactcaaggccacaaaccaaatgctgctaactactccagctagctagcaacaataatggcggcatgccgtccctccggcctcagcgtcttgtgcagcctctaccgtttctacatctgcatgctgtccatccatgtccctcgggctcactcgctgtccttcgacctcagcttctccaaaccccagagcccagacctcccccagaagataaacttcaacggcgacgcgtacctcactccagacacgctcgagctgacgcgaaaccagcgtgatcaaagcatcacgaacagcaccggccgggcgacgtacgcgcagccggtgccgctgtgggatggcgccacgggcgagacggccagcttcaccaccaccttctccttccggatcaggccggactcgagcacgtaccccggcgacgggatggcgttcttcctcggccactacgggtcagatatccctgtccacagcggcggcggcatgctcggcctcgtcccgacccacaccaacggcaccggaaacggcaccgtcgtcgccgtcgagttcgacaccttccagaacccgacgaacgacgacatcagcagcaaccacgtgggcatcgacgtcgactccctcaactccacggcgtccacggacaccacctcgccgaccaagaacctcacgtccggttacctgatggcggccaccgtaaggtacgagaacgtcactaggttgctcgccttggagctcaccgtcaacgacacgtcctactacgtcaacgcaactgtcgatctcaagggctacctaccggagcgtgtaggcgtcggcttctccgcggcgactggaaatggcggcgagcagca

SEQ ID NO: 147230 - DNA, 498 bp, Zea mays
  unsure (1)..(498): unsure at all n locations
  Clone ID: MRT4577_65793C.1
cggggggggggggttcaactgcggccagcctggccacgtggccagagactgctccagcggcggcggcggctacagcggtggcagcggcggtggtggtggcggatgatacaactgtttttttgccgtccacttttccagggactgcccatggggtgggggggggggcnnacgnaggctcggcggcnnccgttttgggggggggggaggatcctcccctggggagaggaaagaaacattgcccgcgactgtcccacgtcaggtgtttccgcgtccggccagtcagcctgatcggatcggatcggtccaccacctgctggtctgacggcgccgtccccttctagatctcccttgaaaaagctccccccctcgctgggtgtcggaactccttttttttggtggacgatccgggcactagtgtcctgtgcctcttttttcttctgcggttcgaggatcccggccctgcggccacaagagggacgccccgggngggacgaagaa

SEQ ID NO: 147231 - DNA, 256 bp, Zea mays
  Clone ID: MRT4577_65794C.1
cataaatattataaccactcagaattcatcatcatcacagttaatgataaaattccacagtgccagaactaaaagtcatccgggttcacgaacttggtgcatttccttccagacttttaaaaagaagatatttagggaatttttttttcaagatttttccccccagtccgcttacaaagtaatactatgttcgctgtaaaaaatttggaaataatggaaatgtataaagaaggaaataaaattctgctgtatctcc

SEQ ID NO: 147232 - DNA, 112 bp, Zea mays
  Clone ID: MRT4577_65795C.1
tctgttctagtctcttactatacagctactggggacccccttgaccctacagaggatgctctcttccagggctgtctcgtagaagacgtctgttaatcacatggccagggct

SEQ ID NO: 147233 - DNA, 615 bp, Zea mays
  Clone ID: MRT4577_65796C.1
gcatcacatgttgaattttaattcagcaattagtaagctgggagtgcaagaaataccgctaaaaggccaagcttttacttggtctaacatgcaataacatccattgttagaaaaattgattggtgctttatgtcctaagcttggtcaaccacctttccagggacatgtgccttcactcttgctcgggatatctcagatcatgtgtcttgaattgtgacagttaaaacaaatatcccaaggccccaatatgtttggtttgaaaactattggctgcatctaccagatttcaaaacagtttttcagaactcttggcaacaaccggtttatcaaccagaatctatggggttaaccaagacaaagatcgagtctttcctgcccctagtccagaaggtggagcgaaggttatcatcaacttctcatttcctgttgctggcaggaagattgcaaatgattaatgcggtattctcatcgctgcaaacctactatatgtgcactttgaagatccccatctcaatagtaaaacaaattaataagaatagaagacattgtttatgaagaggaacagacataaatgcaaaaaaacgctcaagcagcgtggaagctgcatgcaaaccc

SEQ ID NO: 147234 - DNA, 238 bp, Zea mays
  Clone ID: MRT4577_65797C.1
atatagttatgtcgtctcctatagagttataattagtatttatatgaaagtcaagatctatgtacctttctatatcactcaaactgattgcttgtgatatgctttctctggcttttatattatttcaacttcgaaggattaacagctgttaacacttaaaaagtactgccacatatgtagccttgaagtagttgatctaataaatgagagcagggagcagattcattgactctgaaat

SEQ ID NO: 147235 - DNA, 373 bp, Zea mays
  unsure (1)..(373): unsure at all n locations
  Clone ID: MRT4577_65798C.1
ggacgcgtgggcggacgcgtggggtcgcactagccaatcgtgcagcagctttgaatgctgccgtggtctctatcaaagaaaccatcaccgctgccatcataccgaatgcatggtctgcactgaatgttggtgcaccccattgtaaagggtatggaatgcttatcctaagagagtggaaagttacatgaaaaatgtaaaaacattgatgttaaaattagtcaatgatacatagggaagtctccaaaccattgtgatgaagatatgagattggcacggtctgtccgacagttgatctgggtgacaagtgctgtgtgcttgtatgcaccacttgctgtgaggatgtgggcatataaccatacangagtgatgcaca

SEQ ID NO: 147236 - DNA, 811 bp, Zea mays
  unsure (1)..(811): unsure at all n locations
  Clone ID: MRT4577_65799C.1
ggccggccgggccgggatctctctgtgcctgcgacgacgactaggtgggttaccgccgtcgcgccgccgccgccgccgccgtcatactacaggtgcgaggccttcatcggtatcttaacaggcgacgaacaccaaccagccccctccctgccctgcggaccctgccccagtctgcactctacgatggcggcgcctccggccacggctgccgcggcctcccggtgtctctctggtgccaagtcgtgccgggctgctgagcggagctccagctcgtttgccgtctcggcgccttctactggcctccggcaaagtaggagccgcgtcctcagcgtccgtgccaaggttgccactggcgtgcagagagccagcactgtggatgatggagcgaaaaggccgtggaagctcagtgatgctcgtcttgtcctggaagatggttcagtgtggagggccaagtcttttggcgcttcaggaacacaagtcggtgaagttgttttcaacacatcactgacaggctatcaggagattttgacagatccaagctatgctggtcaatttgtcctgatgaccaatccccatattggtaacactggcgttaatcctgacgatgaagaatcaaaccaatgttttcttggtggcctaatcataagaaatctaagcatatgtacttccaactggcgatgcaaagaaacacttgaagagtatctgactaagaggaacatcatgggaatatatgacgtggatacacgtgctataacacgaagatttagagaagacggcangtcttattgggtgtcttgagtactgatcagtc

SEQ ID NO: 147237 - DNA, 790 bp, Zea mays
  Clone ID: MRT4577_6579C.1
cctcgagtgagggagggccgggcgagaaaaaaaaaaaaaaaaggtcagagtcacatgcgccggatttcggggtgaggatcccaggaggtggaagacaggaaaaagagggggaaagaaacaagtgagtgacaggagagcgaggtccttcttgccttctcgttcgtttgctctcctcgctgttcttgcggttacttcctcattttgttttcaatgctaccgcgttactgctggatctggcacacccaccgcgtccgccgcctcctcagctaatcttggtccgcgcctccccaagattctcttgttcttttggaattgcgtcttcctttgctgcctctgcttcgcagcagcatccgcgtgcggcggcgtggaacaaggtgggatcttggctcagtttctagagtgttggaattctttctatccatcattgttttgtgttcaagagaggttatctttttctgcgaatgcagtgctgtgcgtgccgatttgagcgagaagtttctcgtgcggtactcgaggtgagatttcacctcgtccacgttcttcctcaccgccaaagacccaagggggagaaggaagggaagaggcggaatttccattggttggttgctgcgtgaatccgcgggattcaggctcgagtcttccttgaattgcggggtgggccatggttctctcctccaattccaccaccaaggcaacagctcagctttgaaagtgacaccccccagtgtagtgctctctagcagcctgctgctggcctgggcctccaatggcgtcctccccttcgccttcc

SEQ ID NO: 147238 - DNA, 591 bp, Zea mays
  Clone ID: MRT4577_657C.1
ggcaagcaaactcaatactgacttcgtttcatccgagtcttggaagaggtcgagctttctctgcacccaaggtcgcggatgtcttgcaactgcggatcaagtgcggccgcggctcaagctgcaagcgcggccagaagtcccctgacctggaggagacgcgcaccgccgcgcaggccaccgtcgtcctcgtcgtggcccccgcagaaaaggccgcgcccgagttcgtcgaggccgcggccgggtccggcgtggccgcccacggccgcagccgcggtggcaactgcaagtgcgacccctgcaactgctgatcacatcgatcgacgaccatggatatgattatcatctatctagcttgtgggtggtggttgaccaataataagcgaggccgagctggctgccatacataggtattgtgtgggtgtgtgtgacagagagagaaacagagttcttcagtttgctatctctctctgcatgttcggcgtcagcctttgtgctcatgtacggacgtgtgcctacctgcattgtgcgttgcaccgattgcatctgctgctcccatatatcaattggtccacgatgatatgaattgctact

SEQ ID NO: 147239 - DNA, 764 bp, Zea mays
  Clone ID: MRT4577_65800C.1
gcaaattgccctgcttcagaagtactcaatttgaagcctaatgtgtctttttagcaatgtcctggagatccagctgcagttccctatgctggaagacagtacaagcaatgcgtccgaaggttcctgttttcggcatctgtatgggccaccaattgattgggcaggcgcttggtgggaagacatttaaaatgaaatttggtcatcatggtgggaatcaccctgtctgtgatctccgtagtggacgtgtagacataagtgcacagaaccataactacgcagttgacccagaatcacttccagaaggagcagaagtaactcacgtcaatctcaacgacaatagttgtgctggccttcagtacgccaagatgaagcttgtgtctctccagtaccatcctgagtcttccccaggtccgcatgattccgacacagccttcggtgagtttatagagctcatgaagagcaacagattgtgaggaggggagtactggcaaaggtcaataattgtcttggtgctctctcgcagcaagctcaaaagaatttgtttcattttagtgtttttctttgggatgttcatgtacttgaattttgggtccagaggacatagcataagatgctctgcaactgtaccatgaattgaagtagtgaactggttgaatttcttgagaataacatgttatcaaattgcacggtacagtatactcagattatgctcgcgaatttctggccggcaaagaaaaaaaaaaaaaaaaaaggcccctagggcc

SEQ ID NO: 147240 - DNA, 834 bp, Zea mays
  Clone ID: MRT4577_65801C.1
tgcatattctggaggaagcacattttccacaccgagctaccaataaatgcaatacaggttgcaattcgcacccacgcgtccggccagcatgaaatacctacctacatgggctcgaatgaaaaacttgaccactcctagaatgtcaccgttcacatattgatttggattccattttggtgttacacagatccgaattgcaacctgtattgcatttattggtagctcggtgtggaaaatgtgcatattctggaggaagcaaaattatttcttgccaaattgagattcagtacaggtgcttattctgttctttgcagagagatgtatgaatgcaagatctgtacttccatggcaaatgaactgtgcaatatgagatggtacgagaatgttgcacatcatgaacgaaagtaaagagctttatatagcatacagctatgaggatttatgtttattggacattcgttgcttggtactgttataaaatttcgtgatgttgcgcaaataattacccttggtggttcaaatctgactacaatgtatgggtgtaccggattgtttggttgcagttacctgtaagagctcaggtctgataaaggctaaggcgacaaacagaagattatttttcctgataccacagttgacagttttgctattacctgttagatgttccaatatgtaaatcagtaaatagcacttgagcttacttcttgtttatcttatcctcagatttgtattccttctttcttactattacattcagtttatgcgtattgttaatgtatacattttagtttccggtcctggtttttgtcagtgacagctatttaggctactgag

SEQ ID NO: 147241 - DNA, 2173 bp, Zea mays
  Clone ID: MRT4577_65802C.1
ttgggtcgatcgaggccggcccgggagcgtttcaacagtaatctctctgtgcctgcgacgacgactaggtgggttaccgccgtcgcgccgccgccgccgccgccgtcatactacaggtgcgaggccttcatcggtatcttaacaggcgacgaacaccaaccaggtaacttcgtcggtatcttcacttcaccgacggcgacgagcatgaactcgaaccttttttttccccaaaaattgggggggggggtgccctgccccccggccgggctgcaccccagccctcacttaaaaactagtccccttgcgaaaaaattggtccgtccctgcctcagtctgcactctacgatggcggcgcctccggccacggctcccgcgaccgcccggtgtctgtccgtcgccaagtcgtgctgggctgccgagcggagctccagctcgtttgtcctctcggctcctgcgactggcctccggcaaagtgggagccgcgtcctcagcatccgtgccaaggttgccactggcctgcagagggcctgcattgcggatgatggagcggaaaggccgtggaagctcagtgatgctcgtcttgtcctggaagatggatcagtgtggacggccaagtcttttggtgcttcaggaacacaagttggtgaagttgttttcaacacatcactgacaggctatcaggagattttgaccgatccaagttatgctggtcagtttgtcctaatgaccaatcctcatattgggaacactggcgttaatcctgatgatgaagaatcaaaccaatgttttcttggtggcttaatcataagaaatctaagcatatgtacttccaactggcgatgcaaagaaacacttgagaagtatctgattaagaggaacatcatgggaatatatgatgtggatacacgtgctataacacgaagattaagagaagatggtagtcttattggtgtcttgagtactgatcagtctctgacagacaatgagttgttagaaatggcccaaaagtggaaaattgttggagttgatttgattagtggtgtcacatgtgatgctccatatgaatggtcggacaagactgattcagaatgggagtttaagagggatccgtcaagtgaaacttttcatgtggttgcctacgactttggtatcaagcataatattttgagacgattgacatcatatggatgcaaaataacagttgttccagcaaattggcctgcttcagaggtactcaatttgaagcctaatggtgttctttttagcaatggtcctggggatccagctgcagttccctatgctgtgaagacggtacaggaaataattgggaaggttcctgtttttggcatctgtatgggccaccaattgattgggcaggctcttggtgggaagacatttaaaatgaaatttggacatcatggcgggaatcaccctgtctgtgatctccgtagtggacgtgtagacataagtgcacagaaccataactacgcagttgacccagaatcactcccagaaggagcaaaagtaactcacgtcaatctcaacgataatagttgcgctggcctccagtactccaagatgaagcttatgtctctccagtaccatcccgagtcttcccctggtccgcatgactccgacacagccttcggcgagtttatagagctcatgaagagcaacagattgtaagaaaggggatcaggggagtacttgaaaaggtcaataattgtattggtgctccctcgcaccaacctcaaaagaatttgttgtatctgtagtgtttttcttttggttttgggacgttcatgtgcttgaatttttgggtccagaggacatagcataagatgctctgcgcattgtaccatgaaatggcctggttggatttcgtgaagataacatgtcatcaaactgtacggtacggtacactcactcggacagcgcctcgcgaatttcttaacggcaggtaaagtcgtcagtggatggccatgaaggccggtcagtggatgctttacttttgttgttccaggctaatcagatgtgcacgacgttgttgtcatctttattaaatgctttcatcatccaaaaaaaaaaaaaaaaaaaaaaacagctaatcagatgtgcacaacgttgttgccagctttttaaatgactgatggaaaatcaaaaaaaaaaaaaa

SEQ ID NO: 147242 - DNA, 415 bp, Zea mays
  Clone ID: MRT4577_65803C.1
gaggggggcaacaggggctttttgtccattggaaccaagggggggggaagggacacgtacccccccccacccgttaaaaaggcaccacctggaggcccctgccgggcgggggggcaaacgagggtggtgagtttgatcttaaaaaccaccacctagggatctaacccatgatctgggcaagggccccggggtttttgaaccccaacacaaagcccaccccgaggatggggcccacgggccccaaggccaacgggtgggggagggggaacccggggggggcacccctttgaaggccggagtcgcgcccctccaatttaaacccccccgtcgccttggggtttgccgacggggccagcccaaaccgccccggaaacaaaaaaaaggggggggtcgacaccaagaactgggggcgggc

SEQ ID NO: 147243 - DNA, 237 bp, Zea mays
  Clone ID: MRT4577_65804C.1
ctcacgcgatcagatacacgatttttcgtttaacgcaaccggtgtaacactatggctgcggactattagctgggagagggggatactgagtgttagcaaaaagtgtgtattgccttcaacgtatgttgacgcacttcatgctgaaaactaataacaaaataatgctagaaatacaaattaataaaataattcttttaaatactctacacactaccgtacgtatgcaattacttgcta

SEQ ID NO: 147244 - DNA, 331 bp, Zea mays
  Clone ID: MRT4577_65805C.1
ttttgttgtttgacaaaagagggactgcatttgcgatacatctgaagaaatcattgcgtatacaaagaatgtatcgtatgatgacagattaacactttgacatatactgttgctcaagaattaagaactaacgaatatggactaggtgtggagactattgacacatacattgaatacaataccagactattagggaactgacagtttataaacaaccatacggtcgtgccacccatgactctcgtgcacggcatgacatctgttgccgctgaacccacgtctacaggcttagactctcaagagtacggactcaccaatatacatataatca

SEQ ID NO: 147245 - DNA, 553 bp, Zea mays
  Clone ID: MRT4577_65806C.1
ccggccgggatcccacttcttgaactcttccatccaaataaacaatcactcaatcaatcactacatcactctcatccaaaatgtctgccatccccacctccacctcggtcatcgagtctgccgtcattgaggcctccttcagcgacgtctggcacctcatcaagctccaggacttctccaagttctactctgccctcgagtcctccgaatgggtcaagggctcttctcccgacaccgacatcgtcaagtggaccttcaaggacggcaccgtcctcgaggttaagcaggaggagcactccagcatcgaccactacatcacctacagcgtcatctcatcccagcccgccctgagctacacctccgtcgtcagcaccatccgcgcctaccccatcacctctggccagaacgagggtcagacctttgtcacctggagcggaaacttctccagcgacgccgacgctggtgttatcgctgacgccaagttcaagcgccgtgaggccctcgctgacctcgccaaggctgcttcaaaaaaaaaaaaaaaaaacccgcggcc

SEQ ID NO: 147246 - DNA, 987 bp, Zea mays
  Clone ID: MRT4577_65807C.1
catcgctgataagtttgctcctgatgcgctcagcacatttgttccagcatctgcaattcctgatggttggatggggctggatattggcccagattccattgctgcattcaacgcagccctggaaacaacccagactgtcatctggaacgggcccatgggtgtttttgaatatgacaagttcgctataggaactgaggctgtggcaaagaagttggcagaacttagccgcaagggtgtgacaactatcatcggaggtggagactctgtcgccgccgttgagaaggtcggagttgctgacgttatgagccacatttccaccggaggtggtgccagcttggaattgttggaaggaaaggagcttccaggagttactgcattggatgaagcagccactgtgactgtatgaagcaagttttcattttgtttcatcttcttttttggaagttaccgggggagggactcccacctgaataaggtgcgcaaggccaggattgttggctcaaccacagggagcgcacgccaccgcatcatcttcatgtaccattgtatacttgctacattcttgcttgctcctcctcagccgctcgaaatgtaggagatcaatgatttatagagctctggaaatcgtttgaacaagaagtaagcgacccaagtaatatgcttactgagtcatctttcctttgtgacgtaacaaattacataaaaacccttcgaaggtaacctagcctattcaaccattggtaactaggagttttatcctttgtgcaccaggaccagctttgccgagctaagtgtgaattttcttttctgttctttgtcaaagaagcaaactctagcgtcatgcctcgttagaatctagattttacgttatggagttctgctgctgaatctttttctgggccatgacattgtaaaattactgtttggtctctggcacaattttttttcgctttgaaaaaagtcgacgcggccgcgaattccagatct

SEQ ID NO: 147247 - DNA, 1690 bp, Zea mays
  Clone ID: MRT4577_65808C.1
cattgggtacctcgaggccggccgggccgggtatcccctcctcccccgctccttccacacaaacccgcaccaccggcccatgccccttcttcctctcctccccgtcatggcttccaccttctcccccacttccgccgcgagggccctcctcccgggctccacctcccgcccactcttcctcgccgcttcagcttcctcagggcgcattcaaccatccaggaagggactggacttccgccgcggccgattcaccgtctgcaatgtcgccgctcccaccgccgccgaacaggaggcgacggcgacggcgtcggccgcgaaggagacccagcgccccgtgtacccgttcgcggccatcgtggggcaggacgagatgaagctctgcctgctgctcaacgtcatcgaccccaagatcggcggcgtcatgatcatgggcgacaggggcacggggaagtccaccaccgtccgctccctcgtcgacctgctcccggacatccgcgtcgtcgtcggcgaccccttcaactccgacccggacgaccccgaggtcatgggccccgaggtccgccagcgggtcctgcagggggacaccggcctccccgtcaccaccgccaagatcaccatggtcgacctgcccctcggcgccaccgaggaccgcgtctgcggcaccattgacatcgagaaggcgctcaccgagggcgtcaaggcgttcgagcccggcctgctcgccaaggccaacaggggcatactgtacgtcgacgaggtcaacctgctggacgaccacctcgtcgacgtgctgctggattccgctgcgtcggggtggaacacggtggagagggagggtatctccatatcccaccctgctcgcttcatcctcatcggctctggtaacccggaggaaggggagctcaggccccagctgctggaccggttcgggatgcacgcgcaggttggtaccgtcagggacgccgagctcagggtgaagatcgtggaggagagggctcgtttcgacagggatccgaagacgttccgtgagtcgtatcatgacgagcaggagaagctccagcagcagatatcatctgcacggagtaaccttggcgctgtgcagattgaccatgacctccgtgtcaagatatccaaggtgtgctctgagttgaacgttgatggactcagaggtgacattgtgactaacagggctgccaaggcgctggctgcgttgaaaggaagggacagcgtcaccgtggaggacattgctactgtcattccaaactgcttgaggcatcggctccgcaaggatccgcttgaatccattgactcgggtttacttgtcattgagaagttttatgaagtctttagctagattgttcttgaggtaaatgttccttagtcacaatttttggcgggaaccctcttgttctgttactttcataatgttctgctgtttaataatatctggagcttgaattggtatcaaaaaaaaaaaaaaaaaaaaaaaaaaaaaaaaaaaatggcttgcgtcccggcagcgccgcaggggccgaacacgaagccggagagcgcgtggcggctgtgcacggtggccgaggtgcagcaggcaaagacgctcctcgccgtgacgcccatcttcgcgtgcaccatcgtcttcaacaccgtgctcgcgcagctgcagacgttctcggtgcagcagggcagcgcc

SEQ ID NO: 147248 - DNA, 194 bp, Zea mays
  unsure (1)..(194): unsure at all n locations
  Clone ID: MRT4577_65809C.1
natccacccactatacccgcccgcccggctagggttttgccaccatggccgccgccgcggccgccgcccggaggctcctctcccgccgcgcctcctcgaactcgctctccgcgttcctccgccgaggaactgccccggagtaattgatactgagcaaattcataataaaatgaccaattaggatatacttaagg

SEQ ID NO: 147249 - DNA, 936 bp, Zea mays
  unsure (1)..(936): unsure at all n locations
  Clone ID: MRT4577_6580C.1
aaaaaaaccactcatcaggcgagacgcgagaagatcaatgcgaggatggagctgctcaaggcgcggcccccccgccgcagtaaggtatcaggaacagcgttggtgctagatgagatcatcaatcatgttcagtctctccaaaggcaagttgagtacttgtcaatgaggcttgcaactgtaaacccgaggggcgattttggtgggctagatagctttctgaccacggagtgtggaaggatagcaagcttcaactgcaagaacggaatcgacttggagcaggtaacctggccagaaatgggtgttcatggagcaaggcagctgatgcaactccaacagcagttctggcatggtgatttggcgcatccacaccaagtggcttcacagtgggaaaagcggggggatggccatcctcccgtcttcagcaactccagtccctctctcttcggctatgatctaacaagctctggagcccagcaaaacccggcgagcaagctaaagaccgagctttgatcgacaacgggaaatagcatggcaggggagcaagatggacatatggggggagggggacacagaatttncagcaaattgatcaaggcacaaacgagctgcgaatgaatgatggctgtggatggttgatggcaagcccagcgaaatcaacattttcagagaggggatgtacatatagcgatagagatactgttggtgttgagctgaagacggggatgcatatgatgggcgaggataccgctgtcgttggagagacaggcaagccctgttgctatcgttgcagagatggccaagcgataccctggtttccggcccggtgatgatgacattcttagtgtatttctgacgactataatggcagtcttaaggttatatgggcagcattttttacgaacgcaagacatttcaacaagcattggaaaatttggc

SEQ ID NO: 147250 - DNA, 434 bp, Zea mays
  Clone ID: MRT4577_65810C.1
gaagttcggggtattgggacgctttaaggggatatcggtttgccacgggaaaaccacacaaacttaggggggaaaaaaaaaaccggaacaccgaggggggaaatactttttaaaagtggccgctaaagggacgaactgaagggggacatataaagctagggaccaaatttcgaggctttcacaaggggatttgtacccaaacaaccgcaagcgacttgtggtcaaagagctttttaattgccatatgattctccgggacaaggtcagggccaaagatttttcgggccgtgcgtggagggaacgaaaaacccccacatgggttgaaaggaaacaaacttcaatccctgctttgtttaccaagaactcacaattgccggtgatgaacaaggacccctaaaatggggggtggaaaaaagggaaaattcagccggggg

SEQ ID NO: 147251 - DNA, 375 bp, Zea mays
  Clone ID: MRT4577_65811C.1
agattgtatgcattcaactgatctaccaattgagaaaagtgctcgacatagtcagtaacagtggagtgttggcgaatgtgtaagagctgtctaagtaggtactcatattggtttttgccaaaacgctcactgattaaccccccaaattcagaccatgtgaggctgggtaatttgtgctctatagactggagccagcgcgcggctgagcctgaaaaatgcatagtggcgacttgggtccagactatggggtcaactccatacatggcaaaatatttttcacatctagattgccaaagtttgggaaattcgccatcaaatgcagggaaattgagctgtggaagtttgcctaaatgggctgtaaatagggtaccgtaa

SEQ ID NO: 147252 - DNA, 588 bp, Zea mays
  Clone ID: MRT4577_65812C.1
tttttccagttcagcatgcagcttcagccttgcctctttacactcgttgtgtcttcctcgcatatcaacttttaaaaaagacaaccccaagaaacaaccttcaagatgaagtactctttcgctattgctgccctcgccaccgccgtctcggctcagtctctcgccgacgtccccaagtgcgctattccttgccttgacgacgccatcaccagcaagaccgactgcaagaccactgatctcacctgtgtctgcaagagcttcgacgatgtccgaagcgccgctacctcttgtgtgatcaccaagtgtggttccgacgttgccatcaacgaggtcctgcctgctactgagaagctctgctctggcggctccggctccggttccgccgaggagtcctccaaggccgacaccaccaaggtcgaaacctgcaccaaggttgtcgtcaccaccagcgccgtcgggaccactgctgtcgagaccaccgccgtcgagaccacctctgtacctcccgtcgttgacagcaagaccaccgctgatccccccgtcggcgagactcccaccaccaactccgaggctgccggcggtgccacc

SEQ ID NO: 147253 - DNA, 336 bp, Zea mays
  Clone ID: MRT4577_65813C.1
ccgatttcttttctctaacaacttctgcactagcgggattccatgaaggttttggggagatcaaagaaacaaattcagcagtctcacttgccaaacaaacacatctaaagattccttgacacatttcacacatctggaaatgcttaataagcataaaggacctggatctcctgagtatccagtgcattgcatcgggtccagcatttctctcaccctgctcaccctccttagtgaacatagcgaaaagagcggcgtgatcggtgtctgtaacgtctgcagcggagcatcatcttctttacttctactcgtataacaagcataagattcaaacacttg

SEQ ID NO: 147254 - DNA, 513 bp, Zea mays
  unsure (1)..(513): unsure at all n locations
  Clone ID: MRT4577_65814C.1
tgtaacataggcctgacaagaaaaaaaaaacaagaggagaaataaggacggatgggtgcgtgcgtttgtgtagagcagagaaatgggcgcgggggaattttgctcgtcctctcctcttcttcggtagaggaggaaccgaggcagggagggtttatttcatctgtggattttttttttgtattattattagtaaattatagtagtaccactattatcacgacgatgatgggcgggatgagatgttctgtagcagcagggaagggggaggggggatgatgtgacaagttttccaaggattgttgcttcccttttgtttctcctctagtcctctgctctgcccaagggaataaaactcctcgcttgttcgaattcctaaaaaaaaaaaaaaaaaaaaaaaaaaaaaaaaaaaaaaaaaaaaaaaaaaaaaaaaaaaaaaaaaaaaaaaaaaaaaaaaaaaaaaaaaaaaaaaaaaaaaaaaaaagggggcggcccccttttttttntttttttttt

SEQ ID NO: 147255 - DNA, 251 bp, Zea mays
  Clone ID: MRT4577_65815C.1
ctcgcgagagtcgatcgtcaagatgtgaattgtgtacgaacgtgttgtgttgatatgtgatcagcatggatagtttgaacttgtgttcacagtcacagtgcaagctactgtgtggatgaatgagatatagctctgatgtcaggaatagagacgtctgcagatctaatagcattctgaggtacggcagagacacaagagaattacgcctcttatggttctgatcctgtactgactcgtgcatctaatcgcat

SEQ ID NO: 147256 - DNA, 530 bp, Zea mays
  Clone ID: MRT4577_65817C.1
cctaaaaaaaatttatctaggagataccagtgcttggtccagaatctgcccctgtgtctacgcacattggatgtattaatagctcgaacctcctccctgtaagaaggtcattggttggctcctttgaggaatctctcttatctggtcgctattcatgtgagaaaagacaatcagagtattgatggttttctggctattcttaatgtgactggcggtagtttttctcccccaactcagaagtttccgtttacagtgagcagcattgatgaagatagctccctgttgtactactcgtcgattgatcttgcggggaggttgcctacaaacaataccaaaggcccaaaacttaaaagaagcctcagtagcagtgattcacggtcaacaaatagccggttacgcattcccgtgaaaggccgcatacaactggtggttagtaacccagagaagacaccacttcacacctttttttgtacctatgatttgagtgacatgcctgctggaaccaaggttctgacattgggcatgagttg

SEQ ID NO: 147257 - DNA, 566 bp, Zea mays
  unsure (1)..(566): unsure at all n locations
  Clone ID: MRT4577_65818C.1
tccggttgggcttcctttccacatgtctgtnnattctgttccatattaccaagcacaatgnnttgaagatcatgtggatactcggtggagttcttatgaacccaggagaaacccctctttccctttaaagaaatttgaagtcnncttggttctcaaattttaaaaccaggccattanntggcaactnnntctgtgggttattttccatttcctcttctacttttcagaaagtnngtcacccaacncnncttcaggcnncttaaannaagttgtnncagtggagaaaaatgtcaagactttagagnnttagggttgggttaattctgaacctnntctcacacagnnttgcaagaactggaaccagcncgactttaccattnncactgctgcnnaagtgatttcttattctcaaagaagctaccgagcccgaaaatttnntgtgtctcaaagccaatacccttggtaatacttcgagccatttcagagatcataaaagctttgctttccttttttggcttccatttacccagtcgagtcaaaaatattcacttcccaaataaacgtgt

SEQ ID NO: 147258 - DNA, 522 bp, Zea mays
  Clone ID: MRT4577_65819C.1
ccggggccgtgccatctggtactttgtcaagagtaagctatagcgagttggcgcagtattaaacagcattgtgacattcttcccggttgttgcagatgtgtaccttgttctccctggtcacatgtttaaaaaaaaaaaaaaataaaaaaaaaaaaaaaaaaaaaaatataaaaaaaaaaaaaaaaaaaaaaaaaaaaaaaaaaaaaaaaaaaaaaaaaaaaaaaaaaaaaaaaaaaaaaaaaaaaaaaaaaaaaaaaaaaaatgggggggccgtttaaaaaatcccagttttacaacacctgtatcatgaaacatatgttttttttttggggcccctaaattaaatttccttgctccttactttaaaaactatgggacttgaaaaaaaccttgggactgccccaattaatttcctttgaggaaatcacccttttgacggccgtgcttaatattaaaaagcccgcaatttatgctttttaacaaaaatttcgccctcctgaatggctaaaggagccccccctt

SEQ ID NO: 147259 - DNA, 687 bp, Zea mays
  Clone ID: MRT4577_6581C.1
ttctccagatccaccgaatccgcgaggaatctatctgcagatgctgcctgaccctagctagctgagctacagtcaacaacatgtggcctgactgacatgacgaaggacataggagggattgctgcccgagtcgcgagagttctcgtgcaaggactacatggaccctccgccggcgcctctgatcgacgcggagcgagctcacccagtggtgactgacaccgggacggtcatcgtgcatagctcgtcctgcacgctgctcttactctacatcaccgtggccacccgagatcggtgacaagcaccacacggacctgctgcggcacgggacccaaagcgttttgcggcgcaccatctgatccttggctatagattgggccttccgcggcatgatcttcatcctcctatactgcaccgcgcggcatctcatgtgcagcacatgaacccggcgcgcgtagccttcacgacagctcctgcacaggaaagtgtccctcgaccacgcgctggtctacatcagcgcgcagtggctggacgacattctgggatgtgggacacgactagggcttcgatagtgcctactacatgtactacgacgggggcctgaaccaactcatcgacggctactacaaggggaccagactcgtcgtcgagatcatactgacgatgcatgctcgtctacaccgtattctc

SEQ ID NO: 147260 - DNA, 1444 bp, Zea mays
  Clone ID: MRT4577_65820C.1
ggtaccctgccggccgggccggggaggtttttgcccggtcgccgccgtcgctctgcccgcattcccttccacaacaccgagacgccaggatgacggcgcagactgcggaggagctcgccacccagatcgagcagcagaagctcgaggagcagaagaccgaggtgagatttcgcacacactcctcccgaacggtccgaatcagaaggggaatcgctgtcgcataggctatggatactgcagtccaaaatagatttgatgttttatttctagctgcagatccacgaacttgaagtagaatgatttcgtaggtgggtcttgctggaccatgcagaggaggttgtggtggaggatgaggaggacgacgacgatgaggacgatgaggatgatgatgaacttgacggacaagaaggggatgccagcggcaagtcaaagcaaagcaggagtgagaagaagagccgcaaagccatgctgaagcttggcatgaagcccatcactggtgtcagccgtgtcactgtgaagaaaagcaagaatatactgtttgtcatctcgaagccagatgtgttcaagagcccgaactcagacacatacgtcatattcggcgaggccaagatcgaggacctcagctcccagctgcagacccaggccgcagaacagttcaaggcccctgacttgagccagatcacgagtccagagacatctggcccgggccaggaagacaatgacgaggaggtcgacgaaactggtgttgaggccaaggacatcgagctggtgatgacccaggcatctgtttcgaggcccaaggctgtcagggccctcaaggcttctaatggggacattgtcactgccattatggatctgacaacttagaaccatttttttttctctctccctttggagtgccatgctatgcagcttgagtgttatctgtggaccatatggttagagatgttagcatgatggcttcttctgtcaaggtcattcaaacacggtttcatctttgctggcttgctatatggcaatagcttatagccgctgtgtttctgtggttctggtgtttcagtaatgtcattcaatggctctgcaaaaaaaaaaaaaaaaaaaaaaaaaaaaaaaaaaaaaaaaaaaaaaaaaaaaaaaaaaaaaaaaaaaaaaaaaaaaaaaaaaaaaaaaaaaaaaaaaaaaaaaaaaaaaaaagggggggccgttcttaaagaatcaaattttacttccccgtgcttgcaaagtaaaagtttttttatagggcccccaaaataaaattaacgggccggggtttaaaaacgtgggaacgggaaaaacctgggggtacccaaattaaatccctttgaaaaaaatccccttttcccaagttgggtaaaaaccaaaaaggccccaacaaatgccctttccaaaaatttgcccaccttaaatggaaaatggaaccccc

SEQ ID NO: 147261 - DNA, 1791 bp, Zea mays
  Clone ID: MRT4577_65821C.1
gactcctatagggccgctcctttcccttccccttccgctcctctagggtttttgccaagccgccgtcgccgtcgctctgccctcgtatcccctcccacgacaccgagacaccaagatgacggcgcagaccgcggaggagctcgccacccagatcgagcagcagaagctcgaggagcagaagaccgaggcagaggaagttgttgtggaggatgaggaggacgatgatgaggacgaagacgatgaggaaaggaagtggcaagacgaggcaaagcaggagggagaagaagagccgcaaggccgtgctgaagcttggcatgacgcccatccctggtgtcagccgggtcactgtgaagaaacgcccgggccggggcggtcccttccccttccgctcgagtctgctctagggtttttgccaagccgccgtcgccgtcgctctgccctcgtatcccctcccacgacaccgagacaccaagatgacggcgcagaccgcggaggagctcgccacccagatcgagcagcagaagctcgaggagcagaagaccgaggcagaggaagttgtggtggaggatgaggaggaggaagatgaggacgatgacgatgatgacaaggatgatgatgaactcgatggggatgccagtggcaagtcaaagcaaagcaggagtgagaagaagagccgcaaggccatgctgaagcttggcatgaagcccatcactggtgtcagccgcgtcactgtaaagaaaagcaagaatatactctttgtcatctccaaaccagatgtgttcaagagcccgaattccgacacgtatgtcatattcggcgaggctaagatcgaggacctcagctcccagctgcagacccaggcagcagagcagttcaaggctcctgacttgagccagatgatctcgaatccagagacgtctggcccgggacaggaggacaatgatgaggaggtcgacgaaactggtgttgaggccaaggacattgagctggtgatgacccaggcatctgtttcaaggcccaaggctgtcaaggccctcaaggcttctaatggggacattgtcactgccatcatggatctgacaacctagggtgatatttctgtccgtgccacttttgttttggagtgctattgcaacttgagtgttatatgtggacctatgcttcgatgatgttacatgattgcttcttgggtcaaggtcattcaaacaaggtttcatctttgctggcttgaaacctggcagtagtttatagcccagaatgtttgtctgtggttctggtgtttcagtaatgtcacagttatcaatggctcttaagtttctgcaatatcacatttttctttaccgataataaaaaaaaaaaaaagccgctaggccaaagggcacatatgtttaagagccagcactggcatcagcaaggttactgcggagcccagcaggaaatatgatcttgggccccacgtcgccgatccaggtcggaatcccaagctccgccgcctggggcagattcgccgaggccgaaagctcgaggatggcggctccccgctgcggacccacgcggctccaaaagatcaaggcgccagacctgtggcagatgatcccgaagcctgagacatcgggcctcggcccgcagctcaaccgaggagcgggtggaggatgccgagcctcctgtcgtggcccaggatgtccgagactggtgacgctcggcacctgccccgcaaaaaaaaaaaaaaaaaaaaaaaaaaaaaaaaaaaaaaaaaaaaaaaaaaaaaaaaaaaaaaaaccaaacccaccc

SEQ ID NO: 147262 - DNA, 648 bp, Zea mays
  Clone ID: MRT4577_65822C.1
atgctcccaacccacatatttctggatcaggaaagaactagcccttcatatgctcttagcgaatgtcaatcatccatccaactgcttaagcaacagggaactacatccataagaagaagaaaaaaaatctaactgatatatttaaggtattcttcctactgtaagaaacagtgcctctcatactatgccaagtccaaattatttcataaactgcctgttacaaccatcaaccagaggctgctgcctgctgcatactcagaatctgttcacttgcgataaagaatggcagtagcacggacagtccttaatatggtgactagaggcatgcgaccagacaaaagaaagtattcagctggcaagactggatgtttatcagttgcactgggtaggtagtattgtctgattgaaccgagaggtcctaggtagtattctctgattgaaccgagaggtcctggtcgaggaatgaagtcaatccactttacttgcacagttctgtcgggcagggggttatcgtccacagctgctaggtgcaagggaatgccaagagcttgtgatagagccttcatttctaaaaggtcggtatcagcttcaaagggacgcacagattttttgcagtgcaaaagtgcttttattttttcctttcccatt

SEQ ID NO: 147263 - DNA, 250 bp, Zea mays
  Clone ID: MRT4577_65823C.1
acattataactcgttttttggaacaaaactttttgcttttgattttaaaaggcaattcgggggatgggtacaactggcaattcacaccttgggggtgggggaacaaatacaactcaaatttcgccgttaaatgatcaaactagaatacttggcaggggttattctacaacaatattgttttttcaacgggggacacccccggtcagaaactactgggcaaggagtatgttgttgcaagaccaataaagcc

SEQ ID NO: 147264 - DNA, 3203 bp, Zea mays
  Clone ID: MRT4577_65824C.1
cattgggtacctcgaggccggccgggacgccaccccaatgtctgcggccgtggcattggcggtcatcttggccgtctacgtcgtcctcaggtatatatcctctccgagaggcaggtctaagcctctgaaccttccacctggcccgcgaggatggcgggtgatcggaagcctcggcgcactggcaggcgcgcttccgccgcaccgagcgctggccgcgctagcggcgcgccacggcccgctcatgcacctgcgcctcggctcctaccacgaggtcgcctcctacggctacctcggcatcgtgcacaccccgtacggcgcctactggcgcatggcgcgcaagctctgcgccaccgagctcttctccgcgcgccgcgtggactcgttcgagcgcgtccgcgcccaggagatgcgcgcgctcgcgcgcgccctgatcgagtgcgccagccgctcctccgcagcggcgggagccattgctcccacgcgagccttgcactgcaaaacacgggaggaaaagaaatccagaacctaccaaacaacaaagggggtagaggaaaggcaagaaaatgatgcggttatctactcccgctcgcacatgcttcccctccacgttgccgcctccgcaactaccgcctccgcaactaccgtctcggtcaccccacctcctcgcgtccgccctcgctccccgctcggcggcgtggcgccgcgggctccctccccctcctccgcccgtggtctccgccatgcgccggcgcggtcgccgcagggccgcgccccctccggccgctgccggcggcggcggcggcggggagctcgctgcctccgattcccaggagaagagagctggtacagacctcaagacactatctacaagattttggaaagtcgctgccccctactggtggtcagaggataaaactcaagcaaggctgaggcttgctgctgtgtttgctctcacattaggaaccacagggattagtgttggatttaacttcctcggccgtgacttctacaatgctcttgctgataaggatcaagagaagtttaccacacaactgctctactatctgggtgcctttgctggaggaattccgttctttgtcttgagagactatgcaagagaaactctttctttgagatggcgatcttggatgacaagttattatatgaagcgttactttaaaaacagaactttttacaagattcaatctcaatcaataattgacaatccagaccaaaggataaatgatgatctcagcgcattcactggaacggcacttgcattctcgctcacacttttcaatgctgctgtggacttggtatcattcagcaacatcctctatggaatctatccaccattgtttattgttcttgttgtgtactctctaggcggtactgctattagtgtcttccttggtaagaatttggtcaacttgaatttcatgcaagagaagaaagaagctgattttcgttacggacttgtccgtgttagagaaaatgcggaatcgattgctttttatggtggtgaggaaaatgagttacaacttttattggaggttcaggagtcggcttttgagaacctaagtgaattgctgatagcttctcggaatctggagtttttcaccaatggttatcgatatttgattcagattctgccagctgcagttgttgctccaatgtacttctcagggaaaattgagtttggagtaataaaccaatcggtgtctgctttcaatcatattcttagtgatttctctctcattgttttccaatttcagtcaattagtgcattctcagcagttatcgatcgtctaggtgagtttgatgatctattggatggaaacgagtcctctcaatcatctcaacgtgatagcattgatgggatcaacattgttttcaaaagcagtggtccttgtgttcctagttctaatggatcgctaacacagtctgatccatgcatggttctggaaattcgtaacttgacattgttaacaccaagaagtggaaatgttcttattactggcctcactatggaactaaaagacaaggaccacctactggtgatgggacctagtggaagtgggaagacgtcgctgttacgtgctttggccggcctctggactagtggaactggggagatcatataccacgtgagaggttctacgcagcttcaaaaaccaaatccaagttctgataaaccatccagcatgaatttaaagggcgaagaagaatcgttgcaaagttccaagcaaagaagagataatggcatattcttcgtcccacaaaggccgtatatggttctggggacacttcgtcaacagttgctctatcctacgtggactgaagaggttcaacactcaccagataatgatgataaaaactcagatcctcttccttttctgtccgaagtctccacatcagatctggtcggtgccaaatccgaggtgccctcgacagctgaactgatcgaagtccttgaggacgtcaagctgggttacatattgcctcgtttcaacggcttggactctacccatgactgggccagtgttctttcgctgggggagcagcagcgtctcgcgttcgcccggctattacttgctacacccactttggtcctgctggacgagtcgacaagcgcactcgatgaagcaaacgaggctcatctatacagtcagattgaagctgccggcattacctacgtaagcatcggccaccggaaaacacttcacaagttccacaacaaggcgctgtacatttccatgtctgattcgacggacaccaatccacgcaactgggagctaaagcccgcggacaagcttccagctgaggagccatcgcagttcccttcatgataatctcagcatttgtacccctggttgctgcttcctcatttttcgtccgttatttggcccccaatcagaagtatggctcaactgtaatgtaccgccatagtgctgcaagctgaagttggactgtttcaggatgatcgtcaaggttgctgccatgcatgctacgacgacccgggccgccggacatgatagctctcatgtgcactcagaccttagagaacagaacagtatagaatgtacataactcggatgcaagtacttatggtcttggtgttggtaatcgttgatctgtactacgctcttaatgctctgattcttttgttggatgatgaagtgctaggaatttcagttctgact

SEQ ID NO: 147265 - DNA, 637 bp, Zea mays
  unsure (1)..(637): unsure at all n locations
  Clone ID: MRT4577_65825C.1
acaccaatcaacatagcagagagcatacgtcgagcactgaagagctgagctagaagtaatangatatggtgacgatgtagctgcatactgtctggatctgcaggtcatgggagatccaccgatcggcatgcgaggccgctcagcgctcggagacggactcaaatggatccctcgccacgaccgctcatgtgaccatgttatctcacacactgtgcctcatctaccgcgagaatgtcaatacactccttgcttcactgctgtttgtttatgtcactgtagtgatcgcctctgctaagaaatatttaatcctgttggttgagttgaggccattccgcgaaggcacaactcttacatgtctgcgccagtcgcgacgaccactacgctgcctctcgtgagcttctgctacagcgatgcctgtatctaaggatccatggatgatttacgcatatgcgtattaattagccgggtcaggaaaccgtacataaggggctgcctgctcaatatcatcttgtggtgactgagtgacatctgaatatatcggtgcacgcgagggattccagagagcctactacgtgctatacgccgcaagctccaactatttcttccattactactgcaaaggtgcgggcttggccga

SEQ ID NO: 147266 - DNA, 413 bp, Zea mays
  Clone ID: MRT4577_65826C.1
cacccgcacgtaagctcggaattcggctcgagcgtgcccgcacgcagaatttttttgcctggcgcgaatcccctggctgcgaggcatgctgcggctcctgcggctgcaggccgtgccataactgctactgacacggctgctagtcatgccttgacatctgccaagaagctagggtttacgacctgatcgatcatgcgtaccgagttctcaagccggccagacagtacactgtcctactatctggcccacgcacgggactgtaccagggccaggatacccgagatctcctacgagggcatgcactgcacttgagcactgaaacccgctatctgggttaatcccgctggacgagattctgacaatggtttaagaagttggaacctgggcgctcactgcgccggacctggcgcctt

SEQ ID NO: 147267 - DNA, 630 bp, Zea mays
  Clone ID: MRT4577_65827C.1
taggggcctttttttttttttttttgggtaaagccaggtgcgtctcatatgtgcgccaaagaagaacaacacatataatgaccaagtgtatagagagaaatgtcacaaatattattacatagcggaagtatcttacaaaaataaatgataacaataaaacgaactaataattattctttggcaccatcaagctgactgggagacgccacctagataagctcgtactcctcgttgtagacctcctcctgggctacctgctcttcgccttcaatgatctcatgttcagcgttttccaactcctaggtatcgggctcctcggtcacttgctcgtagtgatcacgcagtgcctttccctgcccacgacgcaccccgtatttgcggccacgacgtcaaattggcggcgcccaggtcgcactccctcccagccaccaccatcaacatgatcctagagcttggatggattctcccgaccgcgcatagggcaccaattagtgcagtgcacgccggacgacagtggaggcttccggcggctccctgttctctctctcggtggtgaatatcccaatttggggtgctggtcggaggggttggaggcagcgccggccctggcgggggtcgagcagtgccccc

SEQ ID NO: 147268 - DNA, 543 bp, Zea mays
  Clone ID: MRT4577_65828C.1
gggtacctcgaggccggccgggttgttgtgcactctcttgggggtactgctattagtgtcttccttggtaagaatttggtcaacttgaatttcatgcaagagaagaaagaagctgattttcgttacggacttgtccgtgttagagaaaatgcggaatcgattgctttttatggtggtgaggaaaatgagttacaacttttattggatcggttcaggagggcttttgagaacctaagtgaattgctgatagcttctcggaatctggagtttttcaccaatggttatcgatatttaattcagattctgccagctgcagttgttgctccaatgtacttctccgggaaaattgagtttggagtaataaaccaatcggtgtctgctttcaatcatattcttagtgatttctctctcattgttttccaatttcagtcaattagtgcattctcagcagtcatcgatcgtctaggtgagtttgatgatctattggatggaaacgagtcctctcaatcatctcaacgtgatagcattgatgggatcaacatt

SEQ ID NO: 147269 - DNA, 715 bp, Zea mays
  unsure (1)..(715): unsure at all n locations
  Clone ID: MRT4577_65829C.1
tcccccagataatgatgataaaaactcaagcagatcttctttcttttctgtccgaagtctccacatcagatctagtcggtgccaaatcgagggtgccctcgacggctgaactgattgaagtccttgaggacgtccaagctgggttacatattgcctcgtttcaacggcttggactctacnccatgactgggccagtgttctttcgctgggggagcagcagcgtctcgcgttcgcccggctgttacttgctacacccacattggtcctgctggacgagtcgacaagcgcactcgatgaagcaaacgaggctcatctatacagtcagattgaagctgccggcattacctacgtaagcatcggacaccggaaaacacttcacaagttccacaacaaggcgctgtacatttccaagtctgattcgacggacaccaatccacgcaactgggagctaaagcccgcggacaagcttccagctgaggagccatcgccgttcccttcatgatgatctctcagcatttgtacccctggttgccgcttcctcatttttcgtccggtatttggcccctaatcagaagtatggctcagctgccaggtaccgccatagtgctgcaagctggacaggatagctctcatctttccatgtgcactcagaccttagagaacagtatagaatgtacataactcggatgcaagtacttatggtcttggtgttgct

SEQ ID NO: 147270 - DNA, 3935 bp, Zea mays
  Clone ID: MRT4577_65830C.1
tgggaccctcgaagccggccgggaaaattattttgtggcgttttccctttttcccccttttctcatgttgtaatatcctgctgtgattgaaatgaaatcaagctgtataaaaaaaaaaaaaaaaaaaaaaaaaaaaaaaaaaaaaaaaaaaaaaaaaaaaaaaaaaaaatttttctccagccgccgcgctcctgatccttatctctgcgcgcgctgcatcggcgcccgccgggaggcggatcccgcccgcctcgtccatgccgtgggtccgcaatctccgccgcttcgtcgacacgggcgccggcctcggatccgaggccctcatggaactggagactaaaaggatattgcttgagattttcaaggagcggcagcggaagagtgccgaggctggttccatcccaagtttttacaagaagaaacctgaagaaggatccattagctctagagttcaaaggttggccaagtacaggtttctaaagaaacaatcagagcttctgctgaatgctgatgatcttgatgccatgtgggtttgtctcagagaaaattgtgttattgatgatgctactggtgctgaaaagatgaattatgaagatttctgccatatcgccacagtctgcacggagcagattggtcagaaatgcaaacgatttttcagcccttcaaacttcatgaagtttgagaaggatgattctgggaggattgctatcctaccattttatctttatgtcatgcgaacagtttctcttactcaagcaagaattgatatgagtgagcttgatgaggattctgatggtttccttcagcctcatgaaatggaagcatatattagaggactcatccccaatttggcgcaattgcgcgatatgcccactgcatttgttcagatgtactgccgcatagctgcacgcaagttctttttcttctgtgatccacacagacgggggaaagcatgcataaagaaagtgttgctgagcaattgtcttcaggagctaatggaactacatcaggagagtgaggaagaggtaaccgataccgagcaggcagaaaactggttttccttaacttcagctcagcgcatatgtgacatgtttcttgcactagataaggatacgaacggtacactgagcaaacaagagctcaaggaatatgcagatggcacattgactgagattttcattgaaagagttttcgatgagcatgttcgccggagcaaagttggaggtggaaacagtcgtgagatggactttgaaagctttcttgattttgttttggctctagaaaacaaagatacccctgaaggcttgacatatttatttaggtgccttgatctcaatggaaggggtttccttacaactgcagatattcatactctatttagagacgtacaccagaaatggattgagggagggaactatgagctttgcatagaagacgtgagggatgaaatctgggacatggtgaaacccgcagatcctctcaggatctcgctatcagaccttctttcttgcaagcaaggtgggactgtcgccagcatgcttatagatgtgcgtggcttctgggcccacgacaacagggagaaccttctccaggaagaggaagagcaagtggaagaggcatgagttctccagctgccaagtaaccgtacctggtgcctcaaaattgcaacatcctcggaactgcctgtaccgcagtatcagtcattgtaacctagatagtgtattaaatctgtcaccaccagtttcctgaagctgaagcttgttcttaagtgtgccatagtggtcttcgaaacttgttgaggctagctagcgccgtttggccatattgacatctatccgtgagggcctgattcctcggcagcctgtatgtacatctagatttgcaccaagcgcgcaatcctcaatcctgactacggcatcacgcctgtaagcatatactccgtatgtaatacattgtgtttagttcgtaaaaaaaaaaaaaaaaaaaaaacactacactctacaagtccaagttcacgccaccaccaatgtctgcggccgtggcattggcggtcatcttggccgtctacgtcgtcctcaggtatatagcctctccgagaggcaggtctaagcctctgaaccttccacctggcccgcgaggatggccggtgatcggaagcctcggcgcactggcaggcgcgcttccgccgcaccgagcgctggccgcgctagcggcgcgccacggcccgctcatgcacctgcgcctcggctcctaccacgcggtggtggcctcgtcggcggacaccgcccggctcgtcctcaaggtccacgacctcgccttcgccgaccggccgcgcacggccgccggcgaggtcgcctcctacggctacctcggcatcgtgcacaccccgtacggcgcctactggcgcatggcgcgcaagctctgcgccaccgagctcttctccgcgcgccgcgtggactcgttcgagcgcgtccgcgcccaggagatgcgcgcgctcgcgcgcggcctgttcgagtgcgccggccgcggcgccgtcgcggtcagggagcacgtggcgggcgccacgctgcggaacatcctccgcatggcggtcggggagaagtggtcgggctgctacggtagccccgagggcgaggcgttccggcgcacgctggacgaggcgttcgcggtcaccggcgcggtcagcaacgtcggcgagtgggtcccgtggctgggctggctcgacctgcagggctgcgtccgccggatgaagcgcctccgcgcgcagtacgaccgcttcttcgagcagatcctcgacgaccacgaccacaagaagacgcggcgggagcgaggccgacccggcgccggcgactccgcggcggacgatgacctggtcgacgtgctgctgcggctggtcgaggaggacgaggacaggccggagacgacggaggccagcaggctcacgcgcgacggcgtgaaagcgttcgtccaggacatcgtcgccggcggcacggagagctcggcggtcacgatcgagtgggccatgtcggagctcctccgccggccggacgccttgcgggctgccaccgccgagctcgaccgcgtgattgggcacggccgctgggtcacagagcgcgacctcccggacctcccctacatcgacgccgtcgtgaaggagacgatgcggctgcacccggtcggcccgctcctcgtcccgcaccacgcccgcgagcacacggtggtggccggctacgacgtccccgccggtgcgcgcgtgctggtgaacgtgtgggccatcgctcgcgaccccgcgtcatggcctgacgcgcctgacgcgttccggccggagcggttcttgaacggcagctccggcgccagcgtcgacgtgcgcggcgcgcactttgagctgctgccgttcggggccgggcggcggatgtgccccgcgcacggcctcgcgatgaagctggtgaccgctggcgtggcgaacctggtgcacgggttcgcgtggcggctgccggacggtatggcgccggaggatgtgagcatggaggagctatttgggctttccacgcgccggaaggtcccgctcgtcgccgtcgcggagcccaggctgccggcgcacctctacactaatgtcacgccgccacagcaggtcgcgggctccacgattgcgaacttgtccaccaggccggagtacaagctcgtgttctgaatcattcaccgccactaaaaataaagcaggaaaaactacacttcctgcgtgctagacgtccgggcggaacacaacagtgcttgctcacgttcttctattggttgtactaaaaatatggactagcctgaactttctgaacctaattcacctgtctgcttggtttcaccatgttcaccaaacacaatcgatgcaacttatcaattgaaacaaaaaaaaaaaaagcggcaggtgcatttggttctct

SEQ ID NO: 147271 - DNA, 951 bp, Zea mays
  Clone ID: MRT4577_65831C.1
cccacgcgtccgcccacgcgtccgaccacgcgtccgcctcaactctcctttcctctcgtgggcgatcgactctctcctgcggcggcggcggcgatcaacgtcgacgactacggcccacgattctccttcgaagcgcgaatcatgatacattttgtgctccttatcagcaggcaggggaaggtgaggctgacgaaatggtacactccatacccacagaagcagagatccaagatcatcaaagagattagtacgctcgtcctgacaagaggccccaagctgtgcaattttgtcgactggcaaggttacagagttgtgtacaagaggtatgctagcctttacttctgcatgtgcattgaccccgctgacaatgaactggaaacccttcagatcatccatcactatgttgagatattggcccgctactttggcaatgtctgtgagcttgatctgatattcaattttcataaggcgtactttatattggacgaaattttgattgctggtgagcttcaagaatcaaacaagaaatcggtgctacgtctagtaactacacaggacgctttggtggaagccgcaaaggaggaggcaggctcgttgaggaacataattgcacaggctaccaagtagagcactcgtgtcttctacaatgattactcacacccccacggcatgatagtagcttaatcactaccttacggggcagcagcttttacccctgatttttcctcaatagtttatcccctcttccatctctgcattttgttcagaggtctgttctgttctgtcactctctctctctctatctctcttgttttcccactgtaccacctgtttcgagggaatgtgttgtttctgctcttttgcatgcacaacgttgtatacggaataaaataatgcaatgttttggttccaaaaaaaaaaaaaaaaaaaaaaagtcgacgcggccgcgaa

SEQ ID NO: 147272 - DNA, 991 bp, Zea mays
  unsure (1)..(991): unsure at all n locations
  Clone ID: MRT4577_65832C.1
ttttttttttttttttttaatatttattaactactttattaaaaagcatactagtttgtaagtaacatttttttgtgactaaatttaacgcaaggttaataaatagttacagataggtggaaaattgaacaataaacacgataacaaattaaagtaatttaattacatttaataacattgaaaacagctgaaaataagcgaatattgtcttgaaattaaaagtaatttaaacaaatttgtaattacaatttagaaaaagtctgttcaaacaaaacaaaaactaaattaattatttgtgattttcaaattaagtttaattgagttcataaatttataatcatagtttcaaatgtgaaaatgaaaaacaataaatagttaacttatcaaatcaaattgtaatcaattaatttatctaaactccaacaaatttgccgaactaaacactgatttcattattcgctggcttattttattgacttttcgttcgaaattgagatcgcaggctgttttacgcctgcgcggtaagaattcacttgcttcaatttgatgacatcgtcgttttcaagtggaaaaaagagcgaaccaaaagcgactagtaaagtttaatttttaaaataaggttttaaattaattaaattaaaattatttatttaattaagttctaaacatatacttaatagtttttgatcatttaattgtgtttgtttttgtgcttgtcaatttcaatttgttaactttggaatttcgaaattttcaaatcaacatctgtttgtttgtggttttttttttgtaaacaagacaaaacatcacgagatcagtaaaagtcacttgcctaagaatatttcacattggttgttttaagaaaagtcttatcataaataaacaatcaaatataatatttaaaacttaatgcttctattttattttcgtatcttaattatgtatcaaattaaaattaatttgtnctgacacccactgaaagtgcgccgga

SEQ ID NO: 147273 - DNA, 265 bp, Zea mays
  Clone ID: MRT4577_65833C.1
gacgaagagacacctttactaaggccagagatgtcctggtcaatgaccggccactgcctgccgccaaggtcccagccaaccaggaagaccattcaaggtaaccttaatcacagctcccaaggaaacgcttaatacacctacttctgacagctttactacctctgtgcgatgaaggcctcctttagtccatgctgacaatctaaattgaggagttgaacaagatgggcctacataggtctccgtgttccccaaacacattaggtat

SEQ ID NO: 147274 - DNA, 316 bp, Zea mays
  unsure (1)..(316): unsure at all n locations
  Clone ID: MRT4577_65834C.1
atctaaggttaattatgccaaggcaaaggtgggggcgaatccaaaacaaaaaagggggggggggggaacgggggggggacgaaaagaggggggggggggggggagggggggaggccgccacgggggggggccgggggggggggacggggagcggggggagcaccccggccaggggccggggatcgagctggcaagacctcgcccgagtccccggacgcatcnctgctccccacaggaggcgcactgtcggctggagagacactgaacgctcgtgagtcaccgaacgctctatccgactatggccaaaagccctcag

SEQ ID NO: 147275 - DNA, 305 bp, Zea mays
  Clone ID: MRT4577_65835C.1
acgtcgcacgcacgcgcactaggcattcggctcgagtgttgcaacagtaatgccaatgatgataccagtttctaacacgaaaataactttaaaagatgatagtccccggagtagtacagtatcccttgaaccagctcctgtaactgtacatattgatcatcttgtggtagagagaagtgacgatggctcttttcatatcagagattctcacatgcttaacactggaaatgatttgaaagaaaatgtcaaaagcgattcagtgctgctgaccagtggaaagtatgatctgaagaaacaacgcgtgt

SEQ ID NO: 147276 - DNA, 458 bp, Zea mays
  unsure (1)..(458): unsure at all n locations
  Clone ID: MRT4577_65836C.1
gggtgtggggttttttttatttttttttttgggggggttttatttttttttttttttttttttttttttttttttttttnttttgggcaaccacgaacccaaaacaggcatttgtagtctgggaccgggaacaaaacttaattccaaaagaggggggggggtgacaaacaaaattactaggaacaaaaaaaaattcggggggatgcccaaaaccagggggacataaatggcgaatccaggngcccttaaacctaaaagaagcccaatttgggggccccaacaagggcatcngaggcggggggcaatttcaaaaaagcccttttcttcccaacaggcccgaacaggggggggaccctctttgcttgaaaggcaaacaatttnttgacggcagcctnaaactttttcttggctggcctgggggcaacaataaaaaccacaggggggttaacttcaaactt

SEQ ID NO: 147277 - DNA, 238 bp, Zea mays
  Clone ID: MRT4577_65837C.1
agctgatacacacggcgaatatcagactctggacaagcgtccagttatccaaaaggccgtaaaattgctgaatgaagtacagactttagaactagatggacgaggcaagaacgaaattatattttgaacaacagggagtagcaggcttgatgctggtatgacagtatatggtaagaatagatatcctatatatcacccgggacttcagatctttctagtacagacattgctgtagtgg

SEQ ID NO: 147278 - DNA, 564 bp, Zea mays
  Clone ID: MRT4577_65838C.1
acaatcaacgtaaattccattatccccctttgcctcttcccttttccgagaacgccatgcaatgcaaaccgcatcaccggggatatacagggcctctaaaaccgccgcttcttccatttggcccgtgttttcatcttgtctcgctgctctatcacttcctccctccgtcttatgcttttgctatatcctgcccatctttcaaacggatcggccccccttttaaaacagagaggctgtatcttgatccccccttcaagcagcggagggggtcatcttacggagaagaggtctcttgggtccctctctttggattgcgttgccccatttgagtcattgcaaaaaacacaaataaaaaaaagcctactttcaacttttcatgctgtttactttgaaacagcagcgttgagaacctgtgtcctgaagaagccacccttagtcttctcaatgacctgctggtagacgttgttgggagggtggttcatgatcacggtgccgtcctggctgtcgatcttggcatccaatcgagtctcgcggatcaggttgacgatccacttctcgccatcg

SEQ ID NO: 147279 - DNA, 177 bp, Zea mays
  Clone ID: MRT4577_65839C.1
tttttttatacatactgatagagttggcggataccttatatgtgaaaccattttattcatattcacggtgtactgttcatttatttggctaaaagggaagggttttttctatacttacaaaggcctggtttaaaacaaatcaagtcaaaatgcccccaaacccataaagtttggatt

SEQ ID NO: 147280 - DNA, 921 bp, Zea mays
  Clone ID: MRT4577_6583C.1
gattgggtaccttgggaccggcgggtgccgaccccacccaaatttcttcctctcctccatttcctcccttcgccatcatcccctcggctccgctcttcttccctccccggctccccccgccgctgccccgcgcccgtggagttcttcgatcgagtcctcggagcctggagcacctcgtccaacaatccgggaccgcacgagaagagagagagggggtggtttgacacaagtcaggcacccgtcaagattcggctcgatctgctgcgggacatggagctggacagcatcgagtgcgtgtcctactccgacggcatggaggacgacgacgacacggccgccgtcacctcgtcccagctccctcgccccttcctcaaatcctcctctaccgccggtgctgccgccgccgccgccgcggccgtcaacgtggtcgtcgtctccgaccgcgccggtgccgccgggacggtagcgggagctgggccgctggtgatatctccggccacgggcgtgcatgagcttctcgagtgccccgtctgcaccaactccatgtacccgcccatccaccagtgccaaaatggtcatactctgtgttccacctgcaaaactcgggtgcacaaccgctgcccaacttgtcgacaggagctcggtgacatcaggtgtctggcattagaaaaagtggctgaatcacttgagctcccctgcagatactactctcttggatgtccagaagtcttcccatactacagcaaactaagccatgagtcacagtgtagttttaggccatacaactgtccttatgctggttctgaatgttcagttgttggggatattccttttcttgtggcacatctacgagatgatcataaagtggacatgcactctggatgcacatttaatcaccgctatgtcaagtccaacccaaga

SEQ ID NO: 147281 - DNA, 199 bp, Zea mays
  Clone ID: MRT4577_65840C.1
aagccatctcatcccctctcctcctcccgaccttccgccgcctcacccccacctcctccctccgcgccgccgccgccatgtcctcctcctcgtccgcggtcgtcgccccgatcgagtcactacgtgctcttcaaggaccgcccggaggcgtgagcctcgagtgcagaaaggttgatgtatgttatcttcagaatcaata

SEQ ID NO: 147282 - DNA, 155 bp, Zea mays
  Clone ID: MRT4577_65841C.1
tgcggctcttctatcgtttaggtagccggtttgctcgatgcggctcccgatcacaagctcctcaatccctagcgccgtcatggaccctagactccgagcgtcgagttcgagatgcgccggcgtctagagtgcgtcaagaccgctcgcactgagcg

SEQ ID NO: 147283 - DNA, 796 bp, Zea mays
  unsure (1)..(796): unsure at all n locations
  Clone ID: MRT4577_65842C.1
gaccccgttccaccctctccctcgcgtcgcctcgaaggaagcgcggctgatcccgctccaagcctccaaccctagcttccccgctccccaccttcctccgtccggggctcatggcggagatcgaggtggtatccgaaggcggcaggcgggacgaggacgaggagcggcggcggcagcagcagcaaggcgcgggggagccggaccccgtggtggacgtgtactctgcggcggcgtatggggacctggagcggctccgcggtttcgtggagcaggggggagccgccaccgcgctcagggagcccgacggcaacggctaccacgcgctccagtgggccgcgctcaacgactacccccacgtcgcgctctacatcgtcgagcacggtggcgacgttaatgcgacggaccacgcgcggcagacggcgctgcactgggcggccgtgcgtgggtccacttccgtggctgacgtgctgatggagcacggagcgagggtcgaggccgccgacgtcaatggcttccgggcagtccacgttgcatctcagtatggccaaacagcattcttgcatcacatcatctcaaagtacggtgcagattttgatgctttggacattgatgggaggagcgctttgcactgggctgcctacaaaggaaatgcagatacaatcagattactgctatttatggatgctaatcaagtaaggcaagacaaaaatggttgtacccctttacattgggctgccataagaggaaatttggaggtttgcacagttcttgtacatactggtactaangaagagct

SEQ ID NO: 147284 - DNA, 512 bp, Zea mays
  unsure (1)..(512): unsure at all n locations
  Clone ID: MRT4577_65843C.1
aacccctcaggcctggcagcgcctcgtccatcttcctctccgccttgccgggggctcagcctcgtctccgctccccgtcgctgcgtgggagctgcttgctcgcgacggcaaccggagttggcttgcgatggcgttgccgcccgtggaggcgcagcggcaggcgcgcccggatctcgcctcctggtatcgcttcctctcgccgaccctntatcatgcagaagaccatggctaccagcatcgccctcaagctcgaccaattcctcagctgaggccgcacagacggaacatatcttcagtcacaaattgcatcctgactttgaaccacatattgtcagcttgccntttgccggtacttccgccagtaccttgtaaggatgtgcattactcttaagggggatnanagctgcgtgataaaagagcacgattatgaccgatttctatgtgaaatgcaatttgagctattaatcttgagaaggaaccaaaagaggaaaaatccgtggaggacgggaaaa

SEQ ID NO: 147285 - DNA, 259 bp, Zea mays
  Clone ID: MRT4577_65844C.1
aagacaagagcaagaaagcaacactgcaacaagagacgcagaaagagagagagcgaagcttgagctgagctaggacgatggggttgctcatgctgcttcacgtcctgcttgtcgcggccgcggcgagagctccggcggcgcaggcgtggggcaaggagggccactacatgacctgcaagatcgccgatggtttcctgacgagcgaggcgttgacgggggtgaaggcgctcctgccgtcgtgggccaacggggagctcgc

SEQ ID NO: 147286 - DNA, 999 bp, Zea mays
  unsure (1)..(999): unsure at all n locations
  Clone ID: MRT4577_65845C.1
ggggctcatggcgctgcccgccggtaggcaccatccgaaagacgggccatggtcggtttccttcctcaccccagcggcggccatctatccgaaaataggccgcacctcgtccgctttgctccttgttcatccttcacctgctgatggcggcagcggcgcggccatccaacgccactcttctcgcgcgcctccgggacggcacggccaagttcgagctgctggatgactctgcgtttgcgcttgcgcacgcgcccccggcctggccccgacttcactgctttggcaggattgccccctcgttgaggggtgggtggtcggcagcgttgaacaaggtggagcattacggggttcagagggttaccggcgatggccggtgcatgtttcgagcgctggctaaaggaatggcaaaaaacaaggggattcctttggccccaagggaggaggtagaagatgcagatgatttacggatggcagtgaaagaaattatatgtgacagcgagactgggcggcaggagtacgaagaagcagttatagcaattactgtggagcaatcattgaaacgctactgccaaaggataaggaggcctgatttctggggtggagagtcagaattcctggttttgtctagactgtgtcggcagccaataattatttatattccagagcgtgagtaccatggtcggggtaatggtttcattcctatagctgaatatggtttggaattcaccaaaaatacaaagcagtggaagaaaaagacaccagtaagactattatacagtggaaggaaccattatgatttgcttgtgtgacatagttgcagagcaatgtatttttttagtgcccgtcgtcataccatggttgtattattttttgtttttatacctgtgcttgtgccccttttttgagccaccaatggaattgattcagttatccaaatatcagtttcgaaatatatattttctcgtttaaaaaaaaaaaaaaaannnnnnnnnaaaaaaa

SEQ ID NO: 147287 - DNA, 370 bp, Zea mays
  Clone ID: MRT4577_65846C.1
tcccggttcgaccaagccttccgttgcctgaaggtcctgttccccggttaagggattatttctgccggctcttagttcggggggattgacggttcggggggacttgacgcctgcgaatctgtcgagtcaaaagatgagaatttgaagcgtaatgtaacgctgtagaccaatgctggctctgaacatacatatgatcagagtgatgagggtgagctctgtgagcttcagactacggaatacagataattttggaccaagtgcttggagttcacttggattggattctgctgaattttctggtagggcggccgctatagatgtatcaaacttacatacccgtgcatgctactgcttacctgtctgatagtgt

SEQ ID NO: 147288 - DNA, 451 bp, Zea mays
  Clone ID: MRT4577_65847C.1
gaataccatgacaggtgctcttggttgcttcagttcggtctccagtgtccctattggaagcaccaacttgagttggagactcggatgctggtgcaggtgtggagggctcagtccgctccgagtctgggaattgatcacttgatacagtgacagaagcacctccagcaggagtttcagatttcacacctgttaagcgctgctgctcttcgatgatcctctggattgcagatatctgaagccctcaaactgcagatggaggtccaaaagcggttgcacgaacagttagaagtacaaaggcagctgcagttacgaattgaggctcagggaaagtacctccagaagatcatcgacgagcagcagcgtcttacaggggagaaatctgaaacatctgcggggggtgcctttggctctgactcacgtgatcatttcccagactcggagctggctgagc

SEQ ID NO: 147289 - DNA, 479 bp, Zea mays
  unsure (1)..(479): unsure at all n locations
  Clone ID: MRT4577_65848C.1
tggcttggaacctttgggctgatttatgtgcttgtggatttggtggtggtgtcggttgtggtgtgctatgagcctggtgagtatggtggtgcgaatgacgcttactgaggtgctggtgatgcctatggcgacggagttggatatgacgtggtggtcgcctgtgggtgagtcgggttttgattgtggtgatacgcatactcatagttggtatcctaatttgatggcgtcggtgtcggggtggtagacggtggtgtcggagggtatggaggtgggtcatcgtatggtgcttgggacgcttgttactctgcttgcgtcgacgtagtcggcgggtgttggtggttatgcggcggtgctgtggcgttcgcatggtgggatatatgtgtcgtcggtttggccttcgttgtgtgttcctggggcgtgtgttattcctgcggatgttgatgatgaggttgntgcgtgtgttgnggcggcttttggtg

SEQ ID NO: 147290 - DNA, 783 bp, Zea mays
  unsure (1)..(783): unsure at all n locations
  Clone ID: MRT4577_65849C.1
gggatcttctataccttcgcgctggctccctggactcccaaccccaccacggcatgccttgtcttcttcctccagacctgcctaccaccggccgtcgtgctccttccattgctgctgagcaaccggccgccgaaccaagcgaccatgccctccacacgacactcctcccctgcacctctccttcacgacttcttccagctcactgccgtcctgtagggaatgcccgagctcccctccattgtctctagctcgccatggtacagcgccactgtcagatccggtctccagctcgccaaggcgtttgccggacctcactgatgaagtctgtcgccatcctctggtccctgctcacccagcgctgctctctgtctctcccgttgccgagctccctcagctcgccccaactctcgtcgtggtctcgttcgtcgcgccccttgtgccggagctcgccggccgtgctcctctgtccaacaccggcatccttcatagctcggtcttgtgcagtgcgtcgacgtctcttgcagcctcgatatgtgttgttcgcctcactctgtcgtgtcttggccgtgctgtgcaccggcgttccctccgacagaccacatcgtcgtctaaccttgttcgcttcactgcagcaccatcgtcatctgcgagctccatcaccggccctccctagtattnttccacgacaccgagcctctctgacctcgctgctcgtcggtgcaatttctgtgtgtgggtgaagaaagtgaggctcgtgtgcatcgctcgtcaagtgttcggtcg

SEQ ID NO: 147291 - DNA, 632 bp, Zea mays
  Clone ID: MRT4577_6584C.1
ttttcattgttttgggcagtacttctgcttgcactttgaggcatttcagcttgggttggcaccagtatacatggctttcctacgatttatgggtgacgaaaatgattctaggaattacagctatagccttgaggttggtgcaaatggcaggaagatgatatgggagggaacgccccgcagcatccgggacagccaccggaaggttagggacagccatgacggcctaataattcagcgcaacatggctcttttcttctcaggtggagataggaaagagctgaagctgcgcgtcacaggccgtatctggaaggagcagcagaaccctgactcgggggcctgcattcccaatttgttcagctgagcgcagtaacaaggatgaatccaggtctgtgcttggtgttttgtccttgccaagctgccattgcagcctgccctaaattagttaggttgttggcaggataatgaaaatacagagttcctcctgtgggctggtgaatctcatgataagcaattttttctcgacgatacagatttgtgatgttatgtttgcctcggtgtattttgttgtctggaaataaactgttgcgcagtaactgcatttggttggcaaaaaaaaaaaaaaaaaagcggcc

SEQ ID NO: 147292 - DNA, 273 bp, Zea mays
  Clone ID: MRT4577_65850C.1
aagatccgcctgccgctgccactcatcacgttctcgcacgccggagccccttcttgtcactccgctgtatgcggagccgccgcttatacatgccagttgaagaacaagcaatctcaacccgattgagggagcatcctggagcacaaattgatgctcaacttctccgtacggagagagtggagatcgactctcccgcgtctcccatgtcctggaacaactgatagatcatccgccagtggtctctaacgcatacgagacactgtaacgttcctt

SEQ ID NO: 147293 - DNA, 371 bp, Zea mays
  Clone ID: MRT4577_65851C.1
acataaacacataacctcaagcacacagataggagatagttcaaacatataaaccacccacataacacactttaggttgcagtcatacaagttcataaaagaggggaatgatccagcaccaacaagggaaacaagaccaatctttattcgtgtagtagcgagatgtggggccgatggcagcaggtcaagaccatgctggatgcttagtcatcgtagttgtggcggcgatggtggtggtgcttctcgtaacgttccttcttctcatcatcagagtcatcgcgcttcgcgtaacggttcttcttctcatcatcagagtcgtcatcctgcttcttgcggccatagttcccctggccatacccaccaccatatga

SEQ ID NO: 147294 - DNA, 397 bp, Zea mays
  Clone ID: MRT4577_65852C.1
ccggaaaccccgggacgacccacgcgaccggtctgaacccgaagagcaaggagaggaacaggaggccgtttaaaaggaccagccggggcttcacccccgagaagagacagaggcggaccaaccgcgggacgaaacccaacaagaccaagaggggggaggagacccgggggaggcacaagacggacgagggggccgcggcgcaggacgacaagaacaagcggaggggaacccacgacgcgcaaaagggaacgaggccgcagaaggaacaccagcacacgccacagagcaagggcgaaaaggagggccgggggaaccaccaagacaccaccagggaaccggaggagaacaggaaggagaaggaaaaaggagaacacgagcggaagaagcaaccagccaa

SEQ ID NO: 147295 - DNA, 362 bp, Zea mays
  unsure (1)..(362): unsure at all n locations
  Clone ID: MRT4577_65853C.1
ctgtttttgcccccatcgcggcggcagcggcgggggctttcgaatctaagggggcgcccaaggctacggaggcggaggcggatacagcggtcggcgcgagggtggcggtggcggctacggctgcggtggcggcggctgctggagggactgatgtgtgggcccatcctggcttcggccgagttatcttatatatctatagtatcgtgttaccgacaccttctgtcaccgagttagtgtcccttctacacaaggattaggtgttggaaccctattgttcaatatggttgctccctctatgaaacgagactagagaacaatgagcaaggtttttgttcgcanaaaataccatcatgtaacaaaga

SEQ ID NO: 147296 - DNA, 291 bp, Zea mays
  Clone ID: MRT4577_65854C.1
caacaagaggaacgtccagttttttcccgtttttttttccacaaaaaatgcccccttaaccaaagtccttattacttaaaaaggaaaaccaaaattccaggcgggaaaggggaatctggggttgccataatgtttgcccttacaagaaaaatatctaaaatgtttgaagctagaatgctgatcctaaccctcgaaacatgggcagcttagggaaacataacttcaaagttgggctgcccccccgaaagaaaaaatcaaaacagttctggctctaagaactttttgctaaaa

SEQ ID NO: 147297 - DNA, 395 bp, Zea mays
  unsure (1)..(395): unsure at all n locations
  Clone ID: MRT4577_65855C.1
gattccgctctagcgaacgggacgacctttgtgcttggaagggtcatcctaaacatgagtccccagcggaacaactgcttcaagcgctttgttatcaacaacctgtacaggttcctgcagaagaacttcaggtccaacatttccagtctgaagatagctcctagcaaaaccttgcacgttggaatgcaatatgagatttgagtagaggagccttgcaagatatgatggacgtgagattctagaacatgcagacgtgggtagtttagaattagatgttttttgttttgtttttgaaactagcgatctgtttgtaattaggtcagcctcgccatacaaagctaccatggtcataactttggaactatntatttgagtgtggtctttgttgcacaatt

SEQ ID NO: 147298 - DNA, 358 bp, Zea mays
  Clone ID: MRT4577_65856C.1
aagctcggaattcggctcgaggggagtgaaagcaagaatcctagtttttgccagaacgccgagaccacagctcccgaggttaatggaccatggcgttgctctcccgcctacacttgttggcccagatcgcggcatgcatggctgaaatgacggcaagggcgtttttgaagcatcccaaggtgttaatctgttccatgttggccacccagaggaacaaaccgtgaaagggaggaaacaggctccggaagaacaatggttctggtttgaagacacccagcgaagcctctgacgggaccttcacagattcgaagtgtccatctgaccccgcactgagcctatgaagggtgccaatatggcc

SEQ ID NO: 147299 - DNA, 2788 bp, Zea mays
  Clone ID: MRT4577_65857C.1
agagcaagggaagagattctgaatttggaaaaaggagatactcaagcataaaggttttatctcattcaaatgaaagttcaaatggagcaagccctgagatatctccaagagattcaaatcccattatagatgaggaacagcaagttaaagagccatcaaaagatgacagcactaaagtatttctgaagctgaagttaaacagactcctgaatcatttgagcatccagcaccttctgagccacaactagagatagttgaggcgaacattaatgcacctaaggaagttattgaagttgaaaattcagaacctgaagatggttggcagcctgttcaaagacctaaatcagctgggggttcaggaaaacagatgaaacattatcgcccaaccaccagaaaggtgtatgaccctgatagtcatgatccaacatatacttcacaatacaaggcaaggaattcctattcaaataaccggtattatttcttaaggaagagaacagttgtacctacaacgtacacagatcctcaacagcatgtgaaagttcagacatttggtgccaggtttggtcgcaagatttacaaggctgtgacctatcgggttaagccagcgactgcaacaacagaggtgctagatacttttaagagtacagagcagatgagtggtaaagcagaatcacaggtagcaaactcacaagcacacaatcctacctcaacagatcacaaaggaagtgagtcacatggaactttagttgcaagtagtggaaatgctccatcatacaaagatgttgcactagcacggcctggaacaattgccaagactcaaatacagaaacctagagacgatgtaccacagaaccaaccatcacttggtcagattattgcacaagaaatgaaagattctttggttgattcactccaagtggaacagggacctgtctctgcaaataccaataattctaaagaagaaaccaatgtgctaggaaaactccagaaattagaagaaacaaaattctctcaaggggaactggagattgagaatctgtgcaaagacagggtacaagatttgccaataccaaaggctgaggaatctggaattggaagtgagcctgtaaatagtaaaaaagatgccaatgtgttaagtaacacaagtcaagaactatcaagtagtagcaatgatggtgcagccattgagttttcggagtcaactggatctgtaaaaactgaacagactgagaagtctgatacggatttttttgaagctctaccccgcagtatagaaaatatttcagtttcagcatctactacaaacacagggagtcttggaggtgatggaagtgagaagtccaagcctaacttagtgctaagtaatattgatttgagagagatgcctaataagaagctatctgcttctgcaccaccatttaatccatctccaccatctgtacttagcccactttctggcaatgttggtctcccgccaccaggtgccattccaggagtagcaccttggcctgtgaatgtatccctgcatcctgggcattcaactatggtgccaagtggtcctcctttgtgcacttcccctcatcatttataccctcctgctccccgatctcctaatctcatgcatcctgtgccatttatttatccaccatatagtcaaccacaggtggttccaaacaccacatttcccatgaacactaatatttttcggcctaaccattatggatggcaaccttatatgggcccagcgccatcagaatttgtgccaatgtcagcatggtcaagtagccatacaattgacttcattcccacaccacatgttgttgatcctatttctcaatctttagcagataagcatattcaatctgatgcagctgttgttagtataggcccttcactggacagtagcgctgtagtggccaaagaggagatggagactcctgcagtggcagtaagtggcaatttgataagcaacaaacatgatgatcaagataaacaattaaaggatgccactagaattgaactgagtcctgaaatgcaagaagacaacaagcatgatgaaggtagtttcaggatatatgtaaaggggaaaagccgtcggaaacaaactctgagaatcccaataagtttgcttaacaagacatatgggtcacgctcatttaagcttgtctataacaaagtagtcagagagaatgacatcttcaggccttcaagtgtgtcctttgctgaagttgtttcatctggcaactaggttatgcaaattctaaagcatctaattatgacattagtacccaaaagaaaattgtcatggatctccaattcaaatgtactgaaatgaagttattatttggaaggcagcattattctcataccatattccagatatgaaatcccaccactcgaaactattcaaaaaggataaatattttttcatttcaaatacggtaccgacaatcctgtgtagagtccagaaaagatgcaaggaattttgtgagatccagaactaataggagatggaagtattacgaataataatactagactgtctagacaggctgaattttcttcaattttgatagattaagagaaaggaatcctcttcaatttttggagctcacttttgggcttttgaagccgagcctttagattttgttcttttgttacgctgcggcacctaataaatgacttgccttctatgttttcgagaaacttacattattcttttttatataacaataatactgtctattcagtaaaaaaaaaaaaaaaaagcggcccgactagctcgtgc

SEQ ID NO: 147300 - DNA, 286 bp, Zea mays
  unsure (1)..(286): unsure at all n locations
  Clone ID: MRT4577_65858C.1
caaggtctttgaaaaagctcttgtgacccattccatgacttagttaatncnccttctcggcgaacactataaccggttactctgctactcgacaagcntaaatgtgatgtgacgcatgctataccaaacactgatgaatagctcntnaagattgtgcgaaagaattggaaaacatccctacanactgctgcaagaatcggataccatcgtattgacaaagcacttatcatagagattcatgaattgttcccatcaatgattggacgntgcataactgcactttaca

SEQ ID NO: 147301 - DNA, 2229 bp, Zea mays
  Clone ID: MRT4577_65859C.1
catcatgttttgttgggctggtattggagaattgccaacttccacatccaaaccatggccatgttatcttggccaatccttcgccaatcctattttacccaattagcagcatcgaggccggccgggtcggtcccatcgttcctctctctctgccccgcctacgcctcgccccagacgcatcaaaccgctctcctctccctccctgcccccctcgcaaccctgaagaagcccccacacgcaaggccgcaaacgcgccgcgcaccgcaaggtcccagggagcgacacgaggcggcctcattgcagcatggctgctatggccgccgccgccgccgccgccgctggcggcgtcgggctccacctcattggcgctgccacggccacgctcatcgtggcggtccttgttgcggccgtgctggggcgccgccgccgggcccgggcccgggcccaggcgcctccggtggaagggaaacccgcgccggaggcaggctgcgcggtcggtgacggcgcgggtcccgacgtcgggacggacgtcatcatcgtcggcgccggagtggctggatctgcgctggcgtacacgctcggaaaggatggccgccgggtgcatgtcatcgagagggatctgacagaacctgacagaattgtgggcgagctgttgcaacctggaggttacttgaaattaattgagttaggcctccaagattgtgtggaagaaattgatgcccaacgggtgcttggttacgcattattcaaagatggaagaaacacaaagcttgcttatcccttagagaagttccattctgatgttgctggtaggagctttcacaatgggaggtttatacagaggatgcgtcagaaagctgcgtctttgcccaatgttcaattagaacaaggaactgttacatcacttcttgaagaaaatggtactgttaaaggtgttcaatacaaaaccaagtcaggtgaagaactaaaagcttatgcgcccttgacgattgtatgtgatggctgcttttcaaatctacggcgtgccctttgctctccaaaagttgatgttccatcatgttttgttgggctggtattggagaattgccaacttccacatccaaaccatggccatgttatcttggccaatccttcgccaatactattttacccaattagcagcacagaggtgcgctgtttggttgatgtccctggtcagaaggtgccttccatagctagcggtgaaatggcaaattatctcaaaaccgtcgttgcaccccagattcctccagaaatctatgactctttcatagcggccattgataagggaagcataagaacaatgccaaacaggagcatgccagcggctccacttcctacccctggcgcacttctgatgggggatgccttcaatatgagacaccctttaactggtggaggaatgactgttgcattatccgacatcgttgtcctacgtaatcttctcaagcctctccgcaatctccacgacgcatcttccctgtgcaagtacctcgaatcgttctatacgctgcggaagccggttgcctccaccataaacacgttggccggtgctctgtacaaggtcttcagtgcctcgcctgatcaagctaggaatgagatgcgccaggcttgttttgattacttgagcctcggaggcgtcttctcgaacgggcctatcgctttactctctggtcttaaccctcggccactgagtttagttgcacacttctttgctgttgctatctacggtgtcggccgcttgatgctccctcttccttcacctaaacgaatgtggattggagctagactgatttctggtgcatgcggcatcatcctccctatcatcaaagctgaaggcgtgagacagatgttcttccctgctacagtacccgcatattaccgggccgcacctacgggagaaaaggcaaagcgagagaaccgattccgtgctgctggtccgaccatgatctcatggcaactgatgtttcacggatggcatttttcctgtgctagtggttgttaggtggtttgttgtgctgccgtcgatggaatgaggaacctgtatagtgtgctggtcctgggtactggtcaaagttgggaaatatgttgggtcctaccgtagccatgtcgattactgccaagctgtatatgattctgtcgaactagtgaaacctctccccatctttaacgcgtatcaatcttgtttgctccaaaaaaaaaaaaaaaaaa

SEQ ID NO: 147302 - DNA, 286 bp, Zea mays
  Clone ID: MRT4577_6585C.1
cttatcgcatatgcatgtcgtctaaaattaagccctgtttaatttgggcaacctttttcactagctagtaaattggttttttttttttcgtttagctccacgagcagcgtcgttattcacaaagctaaaactgttttgataaaattacgttgggatagctttttttattatcatgaatgactagagctgggacactgggagagagaaaaaatatccaagctggctttttcagctggatatgcaacgcacctagtatgagaacagaagaagctggtgagatttatct

SEQ ID NO: 147303 - DNA, 338 bp, Zea mays
  unsure (1)..(338): unsure at all n locations
  Clone ID: MRT4577_65860C.1
cggaataccaccctgggtcttagacattgctttatctactccgagcgcagaagacccgatcgacacctgagggtgttgctcgttgccctcgctctcctggctctcgctgcgagcgccaccttccacgcatacaagcggcggctttgcggctgccagccaccgccgccggttcattctaccgccgccggngcatctgccacctccggntcacctgccagctccggtgcatctcccaccgccggcccacctgcgcgncgccggncttcctgcccccgctgcgcgctcctcccggccctgtttagcgtggcccgcccgctccacactatcctggaccaccg

SEQ ID NO: 147304 - DNA, 188 bp, Zea mays
  Clone ID: MRT4577_65861C.1
tcgccgacgcgtgcgcggacgcgggggccaacgcgtccgtgagctagcacgcgtgcggccgaaggatcctctagaacctccatgacccagggtgcaagtgcaaaaatacaaaaagagggtctggtaaccgaaaacaagagcgtacgggaacctgtatgcctctgcagcgataccacctttgaggcccc

SEQ ID NO: 147305 - DNA, 2088 bp, Zea mays
  Clone ID: MRT4577_65862C.1
aaaaaaaaaaaaaaaaaaaaaaaaaaaaaaaaaaaaaaaaaaaagcatcaaaccgccctcctctgtccctccctctcccgtctgccccctcgcatccccaaattaagccccgcgcgcaaggcagcaaacgcgccgcgcaccggaaggccccggggagctgcacgaggtggccccattgcggcatggctgctacggccgccgccgctggcgtcgagttcccgctcattggcgttgccgtggccacgctcatcgtgacggtccttgtcgcggccgtgatgcgccgccgccgccgtccctggcaccaggcgcctctggtggaggggaaacccgcaccagaggcaggctgcgcggtcagcgatggcgggacggacgtcatcatcgtcggcgccggggtagctggatctgcgctggcatacacgctcggaaaggatggccgtcgggtgcatgtcatcgagagggatctgacagaacctgacagaattgtgggcgagctgttgcaacctgggggttacttgaaattaattgagctgggcctccaagattgtgtggaagaaattgatgcccaacgcgtgcttggttacgcattattcaaagatggaaggaacacaaagcttgcttatcccctggagaagttccattctgatgttgctggtaggagctttcacaatgggaggtttatacagaggatgcgtcaaaaagctgcgtctttgcccaatgtccaattagagcaaggaactgttacctcacttcttgaagaaaatggtactgttaaaggtgttcaatacaaaaccaagtcaggtgaagaactaaaggcttatgcgcccttgacgattgtatgtgatggctgcttttcgaatctacgacgcgccctttgctctccaaaggttgatgtcccatcatgttttgttgggctggtattggagaactgccaacttccacatccaaaccatggccatgttatcttggccaatccttctccaatcttattttacccaattagcagcacagaggtgcgctgtttggttgatgtccctggtcagaaggtgccttccatagctaccggtgaaatggcaaactatctcaaaactgttgttgcaccccagattcctccagaaatctatgactctttcatagcagccattgataagggaagcatacggacaatgccaaacaggagcatgccagcggctccacatccgacccctggtgcacttctgatgggggatgcgttcaatatgagacaccctttaactggtggaggaatgactgttgcattatctgacatcgttgtcctgcgtaatctgctcaagcctctccgcaatcttcatgacgcatcttccctgtgcaagtaccttgaatcgttctatacactgcggaagccggttgcttccacaataaacacattggccggtgctctgtacaaggtcttcagtgcctcgcctgatcaagctaggaatgagatgcgccaggcttgttttgattacttgagcctcggaggcgtcttctcgaacgggcctatcgctttactctctggccttaaccctcggccactgagtttagttgcgcacttctttgctgttgctatctacggtgtcggccgcttgatgctccctcttccttcacctaaacgaatgtggattggagctagactgatttctggtgcatgcggcatcatcctccctatcatcaaagctgaaggcgtgagacagatgttcttccctgctacagtacccgcatattaccgggccgcacctacgggagaaaaggcatgaacagagaaccgattccgtgctgctggtccgaccatgaatgatctcatggcaactgatgtttcacggatgacatttttcctttgctagtggttagttattggttattgttagctggctgcttgtgccgtcgatggaatgaggaacctgtatagtgtttgtcctgggtactggtaaagttggaaaatgtgttgggtttgttctctacgcgtgtcgattgctgccaagttgtgcacgtagccacgtatgattctgttgagctagtgaaacgtccccttcttccacgctgatcaaaaaaaaaaaaaaaaaaggggcggcc

SEQ ID NO: 147306 - DNA, 362 bp, Zea mays
  Clone ID: MRT4577_65863C.1
cccacgcgtacgaagcagacggcgcgcaagtcttcgtgcggcaaggcccctaggaagcaggtgtcgaccaagggggggcgcgtgtcggcccctgcgaccggcggtgtgaagaagccgcaccgcttccgtccgggcaccgcggcgctgcgcgagatccgcaagtaccagaagagcacggagctgctcatacagaagctgtccttccagctcctggtccgcgagatcgcgcaagacttcaagaccgacctgcgctttcagtccttcgccgtcacctctcttaaagaggcatccttgggtgccttcttgcccataagaatgacctccagcttttgtctacttattaccaagcccaaaaaaatcta

SEQ ID NO: 147307 - DNA, 192 bp, Zea mays
  Clone ID: MRT4577_65864C.1
gttaaacaagaatccacgttttattaaagccttaagcattcaacacaaggtttaaacattaaacatttttaaataccctataacttaaatacaaaagcaaggtggattaacttaacagccaaatgcagaggacaactttttcaaccggaattttatttggtcaccttgacacataggtttagggattaaaaa

SEQ ID NO: 147308 - DNA, 109 bp, Zea mays
  Clone ID: MRT4577_65865C.1
tgggtatacgagagccgacgatcgcctccacgtgccacgatgaagggaccctgacgcatagccgggttgtcccagacgtatgagcacgcgtctgtttctcttcctgcgt

SEQ ID NO: 147309 - DNA, 689 bp, Zea mays
  Clone ID: MRT4577_65866C.1
gtccctcctacagatctcacatgcgctccaccgagttacggagtcggcaatgctagtttcttcatcttcctctgctccaccgatcgcccatggtgttagcatggtaggaggtctagttctgtcccaggcgctgacgtacctaaactccacgccaagaaccgcctgaccggcgtcgtctccggatcaggagttggacaaaaggtctagggatcaggctcatccatgtggaacagagttggcaggatgcaactcgtttcggtctcggcgtctagcttggatcaaggcatgaaagtgcacgcgtggaagatcaagctgtgcctcgaccggtgtccgcgatatgtactgcctgctgctcgcggcgtgagctctctcatcctgttcgtgaggcatggagctcgcggtgttcatcttcaaattgctcgtcgagccgtagggcttctattactacaccctgatgcgcggccacatcagagtaggtgtgggagaccgtgatacgccgaccgcgctgctgctgtatgttgacgagctgcatgagggagtcagccctgacagctacacgttcccgttcgtgctctagcgtgagcgcaactgtcgtattgcgataatgaatgtggtgataggttcacttcgagaggactcaatcatacactgagctcttctgcgatcgattgactgggatatgacatttc

SEQ ID NO: 147310 - DNA, 1415 bp, Zea mays
  unsure (1)..(1415): unsure at all n locations
  Clone ID: MRT4577_65867C.1
cattgggtacctcgaggccggccggggtgcccgtgcgcaggtgcggcgggtcgcggcgccccagaaatagccagagcggccctattaacttgactccatcgactccgctgacccgtggagccggggccgtggcgagtggaagaagaaaagctgccccactttgcttcgcttctccgctccctgccttctttctttcttccgcgattgtgctgtgtccaactcaaacaacaacagcaacaacaaagaaacctccccttcatcgtatccaaactccaccaccaccatcatcgaatcgaaaccgccatgaccaccagcatcgagtacgactatctcttcaagctgctcctcatcggcgactcctccgtcggcaagtcctgcctcctcctccgtttcgccgacgattcgtacgttgacacctacatcagtaccatcggcgttgatttcaaaatccgcaccatcgacctcgatggaaagactgtcaagctacagatttgggacacagcaggccaggaaaggttcaggacaattacgagcagctactaccgaggagctcatggaatcattatcgtgtatgacgtgacagacatggagagcttcaataacatcaagcagtggctgagtgagattgataggtatgccagtgacaacgtatgcaagctcctagttgggaacaagtgtgatttggttgacagtaaggttgttgacactgaaaaggcaaaggattttgcagattcattaggaattccctttattgagacaagcgcaaaggaatccatcaacgtggaggaagctttcctgaccatgtcatcagaaatcaagaaaaggatggcaacccaaccaacggtggagaggagacccacagtccatgttcacatgaaaggacagccaatacagcagaagagcagctgctgctcatcatagtcagggctcatagggcacttaaatttggctagtggttagatggacgccgcaggatgttgttcacttaagattatattggaggcggcactggatagaatggaggatacctattactatggtctatatgcgtgtcatttcagcgttagatattcgtctttatacataatacttttagtataaaattcccagtctgtattattattgttcgtctgttacatttgcacctatttgcatgatttacggtgtgagttctgacttatacagatcagcattaattgccacaattgtataaactagcaaattgtttccgcgttagatattcgtctttatacataatccttttagtataaaattcccggtcggtattattattgttcgtcttaaaaatttggagctatttgcctgatttccggtgtgcgttctgccttgggggaaagcgcgggttttnaaaaaaaaaccnccnnnnnnnagggcggccgccgactaaatgaatc

SEQ ID NO: 147311 - DNA, 464 bp, Zea mays
  Clone ID: MRT4577_65868C.1
taccgggccccctgcgagtttttttttttttttttttttttttttttttttttttttttttttttttttttttttttttttttttttaattttttttttttttcctttttttttttgtgttttttcctttttttaaaaaaaacccccccctaaataaaacgggggataaaagaacaaggcaaccggtcccgaacaaacgaaagtttttttttttgcaaagggggcacaattaaaggaagggggaactgcctacatttcccaaggggggtctataaatacaatggggggaaccccaaatttgagtgttccaaggggggcaaaatggtaaaaaccccagggaagcaagaatgctaggggcctactttgacgggggccacttcaggtggggggggttggccatctcaagaaaaaaatcccttccccaaaaaagatcccatttgggggagaggggggggaaggcaccc

SEQ ID NO: 147312 - DNA, 254 bp, Zea mays
  Clone ID: MRT4577_65869C.1
ttgttttttttttttttttttgctttttttcttttttttttttttttttttgttgttttggtggtcgctctggtgttttggcggtgggtggcttcgtcctggtatagaaaccccgtttgggcaattagaaagaaaagggggttcatggaaaggagtgtgtcatgtgtagcccccgtttgaaaacgggggccggtttagagccctccgctgggggggctgcagaagggggtggagaaccactggggcgggaaagg

SEQ ID NO: 147313 - DNA, 557 bp, Zea mays
  Clone ID: MRT4577_6586C.1
tgggaccctcgaggccggccgggatgtcatcctccctggcaatcaaatctgtaccgtgtactctttctggaggataatcatggaagatgcacaacgttaagacgcatgtttatattgatctcatgcgtcctcaatctcgtgtaagaccaccaacgcaaaaagctgtatatctggtaacggagaaccataaccaacattgtattgatgcaaagacattccaaaggagatcgtgcgggtgcatactgaattactgatttagcaacagatggcattgtttgtgtccttgactatatgcctgataacgattaacagtttactgaccagagatcactgatctataggtagttttctttgtactgcattaaaagatttgtagcctcaaagctttagttgtatggtatcaaattgtcattgtgtgtcctcggttcgcctacatgttatcttagttcagattaaccaagaattaagatgcatatgtctgtaacttcagggtttctctttttgagccctactaggatctcatgcttaaccttttgccatatttatacatcctgagc

SEQ ID NO: 147314 - DNA, 647 bp, Zea mays
  Clone ID: MRT4577_65870C.1
ccggccgggtcgtcgaccgtcccgtcggtacaatgaccgataagaagaacgaggactacgtcgtccgtatgggcgacgataactacgacaagaatgagaagcctagcttccagcctcggtcaccgcctccaatggcgtacggctcaagtcaactccacagtctcgaacaactggaaaagaatccgccattgtctatcgcggcgtactgtctgtcctcgatcagtatgaccgttgtaaacaagtatgttgtttcaggcagtttctggaacctcaactttttctacttgactgttcaggctgttgtttgtattggcacaatcaccttgtgcaagcagctgggcatgatcaaggttctcgctcctttcgacgccgatcgagcaaggaaatggtttcctatttctcttctcctcgtcggcatgatttacaccagtaccaagtcgctccagttcctttcagtccccgtttatacgatcttcaagaacctgacaattattgtgatcgcgtatggcgaggtgctttggttcggtggtagcgttacccccctggccctgctttcgttcggtcttatggtcctgagctcaatcgtcgccgcttgggctgatattcagagtgccatcaacggcgattttggcactggcgactctgct

SEQ ID NO: 147315 - DNA, 435 bp, Zea mays
  Clone ID: MRT4577_65871C.1
gaacctttgggctgatttatgtgcttggggagtcatcagagaaggcctagaagattcatcattcggctagttctgccgataatgatcgatgcttagggggattcgcccgtcgttcctaagactcgaccacgtctctacggctcgcaccgccgcacggccggatttaataacacctccgtacttttgatcataggctcgactgttacgaaagtcctcgcctacccgagtctgggggagcttgtcagctccaccccctccgaccctctccggtccctcggaattacatgaactaacaagaaacgagtcgcgcctatcccttaaaaaaaaaaaaaaagaaaaaaagaaaaatacaataaatacaaaaaaaaaaaaaaagggtggttgtctcagaggacttaagtccatgcatgtgcgtacgtgatgctacagtctcct

SEQ ID NO: 147316 - DNA, 371 bp, Zea mays
  Clone ID: MRT4577_65872C.1
gtttgttttcgtgcttgtgtgctggtagaatgcaggtagtttgtttgcataaacccaaagctaggtcatgtcctcgtttagtgaaccataacccaaatcgtcatcaatcctccaaaaattcctccaagtctccaagcatggatgagttcgagtttctcgttactactccatgaccgcttagataagctttttattggatgtaaaatgaacgcagacttaaaataaggatctcgagtacatgttctcgttgtttaatatgtgactcttttgtagtcattttccctccaaaatcatgcctttggtcccttggttcaagttgatgtttctattccactcttgatcttttggggaccatctcgttattttatcaa

SEQ ID NO: 147317 - DNA, 1865 bp, Zea mays
  Clone ID: MRT4577_65873C.1
ccggccgggccagcaactgccccctcctggacgccgcgtcctcggggagcttgcgcgcggcctcggcgacggtctgctgctgctcctcgtcgccggccacgcgcttacccggcggcgccttggcggtgcggagctgcgtggcgacgttccacacgtgcatggcgtccaccccgcagcgcagcgcggtgacggcggcggagagccaggcgtcgacgaatatgcacatgaacggtccgctcaaggcacattgggtacctcgaggccggccggcaggaaattattcagaaagaaaacgaggaacacaggaagctcgtcttcctccctactagccgtccctgccgccttccccttcggaggtactactggattcaacaacaaccccctctctcgggtcccgggccgacgcgacgaaagacaaaggcagcggaggtggcgctgcagtccaccagttcttggcaacgtcgccaccgtcatcggccatggttcttggcaacgtcgccatcgtcgtcggctccggaattgtcggatcagtacttacaggcggtgagtttggccttcccgacttcagggatgcaatctctggtgctttcaagttcttgaccaagagtgcaaagccaggcaaggatgggccgtctaccagcagtccacatactgctgagttgttcagccaggtcaatcatctcagagaggagctgcaaatgttgtctaaatcaaatcatgtttccattgtcactgttgatggtagacctggccctggtgcatacggtataacagctgttgttattggaggagctattggctatttattcataagatggaaggggtggaaactttctgatatgatgtttgtgacgaagcgtgggttatcagatgcttgcaatgtagtggggaaacaagtggatcaggtttcagaaagtgttaatgttgcaaagaaacatcttgctggaaggattgatcgtgtagattgtagtttagatgaatgccaagaaattacagaagccacaaaggaagaggttacaatcatccatggagatctaagtgccttccagaaggaaatggaaacagttcatctcgtagttcgtagtctggagacaaagcttggacgcctagcttatactcaagatcggacaacacgaggaatatatgatttgtgtgaattcactaaaagattggatcagagcccgaaagctgatactcgtcaggttacatcatcaacttctcgtcctgctattgaatcctcagagagaattgttagggttggttctttacccctggctttggaaccggagtctcctagaattgaggcacctaaggttgtgcgctcatctacagtcatgtcagcatcgggtcttagtttgctagctggaactacaataccacctaaaagagatcaaccgggtgtgtacagcagagcaagttcaatgaaggaaggatcctctgagttgccgagtggcgtgcgaaactcagcagaaccaagccccaggagatctggtgcttcaaccctgtttggagggcttgggtttctaaggaactacaccagctgagatgtatgtgctcagataggtgtttttttttcccaaggagaccagcagtttgagctgtatatgtaggtagtaggtaatagggcagttgccaaaaggacggctcccttttcctattgggaattgcgaatttttgtaggaactaataccttgcagagcaatgcctcgatgccaagatacaaactttaaatttaatgttgggttagatgctggaagagaaacatcctattgtatattgcagtggaatgtactgctggaatacatgtttgggaaggagcaattacaactaagtttgtgcttttaaaaaaaaaaaaaaaaatataa

SEQ ID NO: 147318 - DNA, 1004 bp, Zea mays
  Clone ID: MRT4577_65874C.1
aggccggccggggcgcgagcctgaccagccacctagacctagctgaacccgaactggcgcacgaaccctagctactacctactagacgtccctgcccccttccccttcggagctgctggattcacccctcctctccctcgcgggtcccggcgcggacgcaaggcaaaggcaaaaggcggcagaggtggcgctgcagtccaccaattagcggctatggtgcttggcaagatcgccatcgtcatcggctccggagttatcggatcagtactcacaggtggtgagtctggccttcccgacttcaaggatgcaatctctggtgctttcaagttcttgaccaagagttcaaagcaaggcaaggatgggccgtcgaccagcaggccacatacttctgagttgttgacccaggtcaattatctcagagaggagctacaaatgttgtctaaatcaaatcatgttgctattgtcactgttgatggtagacctgggcctggtgcatatggtattacagctgttattattggagctattggctatttattcataagatggaaggggtggaaactttctgatatgatgtttgtgacgaagcgtggattatctgatgcttgcaatgttgtggggaaacaagtggatcaggtttcagaaagtgttaatgttgcaaggagacatcttgcaggaaggattgatcgtgtagattgtagtttagatgaatgtcatgaaattacagaagccacaagggaacaggtcacaatcatccatggagatctaagtgccttccagaaggaaatggaaacagttcatcttgtagttcgtagtctggaggcaaagcttggacgcctagcttatactcaagatcggacaacacgaggaatatatgatttgtgcgaattcactaaaagattggatcagagcccgaaagctgagactcatcaggttacatcatcaacttctcgccctgctattgatcctcagagagattgctagggctggttctttgccccagc

SEQ ID NO: 147319 - DNA, 1678 bp, Zea mays
  Clone ID: MRT4577_65875C.1
gggtggaagatccaaccctgagtggatccagagtttgcaggaatgcctgcaggctgcacctgccacaacaaatggtgcgtacatgctatccaagcaagcattatcaggcacgaggagagaactagtctcgagtttttttttttttttttttttagttgcaactgctccttgccaaacatgtattctactagtataatccagtgcaatatacaaccctcgaggcattgccctgcaaggtattaagttcctacaaaaattcgcaattcaattggaaaagggagccatccttttggcaactgccatgttttctactacctacatatgcagctcaagctgatggagtctgaataaaaattcacgtatctgagcacatacgtctcagctggtgtagctccttagaaaaccaagccctccaaaaagggttgaaccgccagatctcctggggcttggttctgctgagcttcggacaccactcggtaactcagaggatccttccttcattgaacttgctctgctgaaagcacccggctggtctcttttaggtggtgttgtagttccagctagcaaactaagtcccgatgctgacatgattgtagatgagcgcacaaccttaggcgcctctattctatgagactctggttccaaagctgggggcaaagaaccagccctagcaattctctctgaggattcaatagcagggcgaggagttgatgatgtaacctgatgagtctcagctttcgggctctgatccaatcttttagtgaattcacacaaatcatatattcctcgtgttgtccgatcttgagtataagctaggcgtccaagctttgtctccagactacgaactacgagatgaactgtttccatttccttctggaaggcacttagatctccatggatgattgtaacctcttcctttgtggcttctgtaatttcttggcattcatctaaactacaatctacacgatcaatccttccagcaagatgtttctttgcaacattaacactttctgaaacctgatccacttgtttccccactacattgccaagcatctgataacccacgcttcgtcacaaacatcatatcagaaagtttccaccccttccatcttatgaataaatagccaatagctcctccaataacaacagctgttataccgtatgcaccagggccaggtctaccatcaacagtgacaatggaaacatgatttgatttagacaacatttgcagctcctctctgagatgattgacctggctgaacaactcagcagtatgtggactgctggtagacggcccatccttgcctggctttgcactcttggtcaagaacttgaaagcaccagagattgcatccctgaagtcgggaaggccaaactcaccgcctgtaagtactgatccgacaattccggagccgatgacgatggcgacgttgccaagaaccatggccgatgacgatggcgacgttgccaagagcccaagaactggtggactgcagcgccacctccgctgcctttgtctttcgtcgcgtcggcccgggacccgcgagagggggagggttgtcaatccagcacctccggaggggaagggggcagggacgtctagtaggtagtagctagggttcgtgcgccagttcgggttcagctaggtggctggtcaggctcgcgccgactcgctaga

SEQ ID NO: 147320 - DNA, 793 bp, Zea mays
  Clone ID: MRT4577_65876C.1
cacccatccacccacgcgtccgcccacgcgtccgcccacgcgtccgtgatcgtcggcatagcggggggctgcggcgtcctgttcgttgcgctcgccggagcagccgcctacgctttcattcaaaggcggcgggcggagaaggcgaaggaggagcttggcggcccttttgcgtcgtgggctcggagcgaagagcgtggcggcgcgccgcggctgaaaggggcgaggtggttctcctacgaggagctgaagaggagcaccaacaacttcgccgaggcgaacgagctcggctacggagggtacggcaaggtttacaggggcatgctgccgacggggcagttcatcgccatcaagagggcgcagcaggggtccatgcagggcgggcacgagttcaagacggagatcgagctgctctcgcgcgtgcaccacaagaacctcgtcggcctcctcggcttctgcttcgagcagggggagcagatgctcgtctacgagttcatgtcaggcggcacgctgcgcgacagcctcgccggcaagagcgggctacatctcgactggaagaagcggctccgggtggcgcttggcgcggcgcgcgggctggcctacctccacgagctcgccgacccgccaatcatccaccgggacgtcaagtccagcaacatcctcatggacgagcacctcacggccaaggtcgccgacttcggcctctccaagctagtgtccgacagcgagaggggccacgtcagcacgcaagtgaaaagaaacactgggctatctggacccctgagtactacatgtc

SEQ ID NO: 147321 - DNA, 571 bp, Zea mays
  Clone ID: MRT4577_65877C.1
cagccagtaacacgtcacacacaagtacaggaaaacacggcacaccaagtggagcatccattttattactacttcctccaaactaaaagcacatccaaccagaaatatcctgggcctgtctggtccatcaacagtgcgggcccagaccggcctagtacagtacaggacaccacatgcatccgggccgttccactgaccaagcatgttgctgccataaaatcggcgcatgtgatcgcctctgagaaagctgcagtggtgccacgtttgtccggctaagagttaagatgcctttcgaatgtgaacccaataataatgcggtgcgggtgcggccgggaaatcacaggccgaaccgaactgctgaatgaaagagaccactcacgctgctgctgtgtcaggtcagcgacgagacttttgctccagctgccggggaccatccaaaaccagccattatagatcaaatcaagtagagtttaagtgctaggaaataattcaatgcatggtgtatctttggtaacgtgacatgacaacaatgcaatgcaacgcggcgggtttcaaaaaaaaaaaaacaaaa

SEQ ID NO: 147322 - DNA, 309 bp, Zea mays
  Clone ID: MRT4577_65878C.1
cttgctggcgaaggaacaaaacggaccatacgagattcgtcagtgaaagaagggacccaaactgacggacaaaacatatcatacaaatccacggggggatgatgaagttccaaatttaccaattccaatcactaaacccacagcagcggggaagtaaaagctgattccacgacttatctagcaaaacaccgaggcaagcctatccccaaaagagcatgagcggaggagtaaaccttatccttgcagagctacaccaaggtgctaaacaagatgacacgcaaagctcgcagaacctgagtagcagcacca

SEQ ID NO: 147323 - DNA, 292 bp, Zea mays
  Clone ID: MRT4577_65879C.1
tttatttttttttttttttttactctttttttttttttttttttttggtttttcaccaaaaaaacttttttattgaactatacctcataaacattctaaaagagggcccccccaaggatggggggctgttttaaccctgttgggtttgtaaaaccattggggtgaaatggcaaaaatgcctaaagatgtctagagggggccaacttaaagccccttgtacagttcaaacggaaacacctaggggctgttttaaaaaggcacgcagggctcccacaatttaccgtgcaaaatg

SEQ ID NO: 147324 - DNA, 268 bp, Zea mays
  Clone ID: MRT4577_6587C.1
ctcgagcgtgattccatagcttgatgatgatcggcagcaacgccagaaagcaggagaaagctcccggcggccggtccgggaagccgccgcactggaggcgccgggagcaggtggccacggcggtgtacgtggtccaccccacccagttccgcgccgtggtgcagcagctcacggggacaggggccgactccccgacgacgccgctgtccacacatgcgatgcttcagcgtgtcgcgggcggcggcgacaatggcgctgccgctggtac

SEQ ID NO: 147325 - DNA, 367 bp, Zea mays
  Clone ID: MRT4577_65880C.1
cacctctctttttctttccccccccccctctccccttgtccgggttaaatatttaattttttttaacccaacccaaaaattttacactttttttttttctcaaaaaaaaaaccatatttatcatccaaatacactttaaattttttaaacacaactatccaccgatcaccccaatccccccccaattaaaaaaaaaaacacaccaagggaaaatgaaaaaccaacttattcccaatataaaccaaaaacctctttcttaaaagcaaattctaacataaggtcattaacacctgtcaaactaacttcctacccttaactttaaacaggctttacttcattttacacccacataaatttttctatcttt

SEQ ID NO: 147326 - DNA, 368 bp, Zea mays
  Clone ID: MRT4577_65881C.1
gcgaaagggagagggaacaacatgaaaaagaaaaagagcaagtcagggacaaggacgaaatctgaaaaagatagggaccatgataaagataaggagaaagagagagaaaggcagcatgcagagcgtactgataaggttaaacacgaggatgattctcttgttggtgcaggacgatgggggatgaacactaaagaggacttggaggaggcctcaatctctttcatggtgtccttggctgtggtgcctggaaacattctgagaagggaagcatgttgtaagctgaatgcaccatgagcttgcacaggtgagggacctccagatcatgttgtttccaagaggtcatactatgatggaaaattaaaaaataa

SEQ ID NO: 147327 - DNA, 542 bp, Zea mays
  Clone ID: MRT4577_65882C.1
gtacctcgagccggcgggaaattcctgtactcgcacaccaggtgcagagtcttcccacatctcttctgcggcgaagaacccccagacgcgcaccagatctcttgttttactctgcagaggaggtctgtaggtgatccacttgagcctcctcaaaccgagagctactgtggctatgtgatcccacttgtagtcaggagttggtatgttgagggtaagcgtttcgcagactcgctgatgatcgactatcacaggcagcatggcgttgaaatcctaattgccaggatctccaacacctatgtgcccagcatgaacattgccgatgggagaggtgttaggaaatacatcgctcttgttttgttaggagaccccctcactgcccataagtggtgaactcggaataggagctgctgctatggagccgatacggttgatggtcttattaggctgctggacggcaacaatactggaccgattaacttagataaccaatgcgatttctccgtgctggaacttgctgggagagagaacgacctgattaaccc

SEQ ID NO: 147328 - DNA, 289 bp, Zea mays
  Clone ID: MRT4577_65883C.1
tgcggggatgaaggcagccgcggccgctctgtaggcgtttttcgcggagccgactgccgcgcgcgcgggggatggggaggcggttactaaggcaaatgctgtgatacgctcgccgatagtgaccgctgactcgctggacaactctcagctgcgcgctaagggcgacggcatgtcggacagcgcctcgatggtgctcaaggcgtggaaacacgcgagcgaagcgacggggcagtagaacatcgacatcccgtgaggcaactaccctgacgggtgcgctggacctggtggg

SEQ ID NO: 147329 - DNA, 359 bp, Zea mays
  Clone ID: MRT4577_65884C.1
atggggccgagcccaaaaaggctttttttttttgatactaaaaaaactgccaggtttacagttcttgtgcccgcgaagtttaaaccaacaaaaaaaacttcctttaccaaaaagactggcctttaatttgattagctggggggtttgcggggctattacagcacaattctggacatctgctttagggctggatcattgcccagtgtatccacaccaacaacgggccctggggggggtcatccgcgttgtaacccaaaagcacgtgcataacatgctgagcgctgtaagacacggtcacacccccaggctctgtcaaagctggtgtccaagattttgcattcctttaacacaaaccagag

SEQ ID NO: 147330 - DNA, 1375 bp, Zea mays
  Clone ID: MRT4577_65885C.1
ggcccgctcgagggccggccgggcccggggggcgtacgaagaaacagaaaaactcacacagaacaccacaccccccaccccggcgacacaccacccctcccgccccaaatctcagatcagagcgccgggagatctgccatttccgggtggagggatcgagccccgcgcttctcgattaaatcctgggctctgtatcttgtgtggatggcatttgtgcctcagagactgtagctcaccaagtgttgatttgaacctgtgaagatagagatgggttctccgagaaaatccgacaagaaggccgccttagactttgcagcatggggtttcaatatcacctcatccgttgggatcatcatggtcaacaaagccctaatggctacacatggattcagttttgccacaacattaactggccttcatttattgacaacgaccttgatgactattgtgtttcggtggttaggcctgagccagccctctcacttaccgctaccagatctgattaagttcgtaatcttttcaaatttgtcgatcgttggcatgaatgtgagcttgatgtggaattctgtggggttttatcagatagcaaagctgtgcatgatacccgcgtcatgtcttctggaagttgtctttgatcgtgtacattattcacgggacacaaagctgagcataatggttgtacttgtaggcgttgcagtttgcactgttactgatgtcagtgtgaatgcaaaaggcatgcttgcagctgttatagctgtctggagcacagctttccaacaatattatgttcattacctccagcgcaagtactctctgaactcattcaatctgctgggccacactgctccagcccaagctgggtcactcctgctagtgggaccatttgcagattacttgttgacaggcaaaagggtggatcacttcagtttctcatcacttgctctgtttttcctggcactctcatgctttgatatggtaggggttaatctgagccaaaccaggcggcaaagagcggcgcagcgtcctaccgctgaggtctgcaagtctcaagggaagttcggaagaaaagggcggtgccgagaaatagtcttgctctctctgattgccaacttgaacggggagttttccgttccaaggttgaatttctggtgaggtgacgtgaagtaccacatattgggaactcttgcctaatatttgacgcagagaacaaactcgttccatctagaaacccaggattgttatagttacaggtatactgtaaaggttcattttttttggcgctctgaatcaatttgcagtgaggggaaagacagacatggttgttacgagtcttcaagacagttttttatcgaatatataatgcagttgtttgagg

SEQ ID NO: 147331 - DNA, 507 bp, Zea mays
  Clone ID: MRT4577_65886C.1
gggcgccgacaccagcgggctgcactgcggctgcctcaagtactccgcgtaggggtacagccctactacaccgggtgagggcagacgatcgccatgttccagccggtccggcaacagtgctggcagcagcacatgaggatgatggacgtgcagtccgacttgcatgagctgcagatgatgatgcaatttgagcgtaccgttgccgtcaggaacagcctgtacgagccagctctgatgcagaagcagcatcagctgctggcagcccaggggctgaaccccatggcctggatgatggagcagaacatgccggacatgggaggactctgccaatgccagctgcccagctaccgagccaacccctgaggcgtgtacgctgccattccagcctactactgattcatgatatctggggaaatctcctctatacatgtcagtctatctatatatgtaataatgcagtaagacgacacacattgtcatgacgagggtgaccaattaattatgcat

SEQ ID NO: 147332 - DNA, 557 bp, Zea mays
  Clone ID: MRT4577_65887C.1
cctcgaggccggccggggcttttattgctcgcttttgcaccgggacgacgatgccgaccaacgctgcagctagcagcctcgtcgatggatcaacaagctttaatttgtgtgcaatgcacctacgtcgtacattaattgtgttcttctataaaactaacccatgcatcgatcatcagcaagcatcgtcatcagcaattcagcatagcgaaggtccgacgacacgacgacgacgatatagcaaatatcgatgacgacgacgacgtccgctcgactccggccgctcgccgtcggcgtcgctctctttgtcttcctaccgtggctgagctacgtgctcgaggctgccgaggagggccgggcggcggcgccgtggttctggccaccacagatcggcggcgacgacccctactactactgcctcagctggcgcctgatggtggaggcgggcaacgccaaggggtggcgcgcggtgccggcgcagtgcgtgggctacgtgcgcgtgtacatggcctggggccagaccacccgcgacgtgggcgccgtccgcggagctggcggcc

SEQ ID NO: 147333 - DNA, 273 bp, Zea mays
  Clone ID: MRT4577_65888C.1
aaaacaacaaggtgttcagaggcaaacttataatataaaagggaggcacagaacaacagttttggaatagaattattaatatacaaaaatagaccaaacatacttttgggaatacgctcataaacagaaatccatagcaaacaataagaaagaagcctacacttctacaattcgcagaaacagaagtctacacttataaattagtaaacacaggggaatgacaacatcgaaagcaccaggatgaaactacaggaatgatccaaaaaagtaggc

SEQ ID NO: 147334 - DNA, 456 bp, Zea mays
  Clone ID: MRT4577_65889C.1
acattagaatctggaaatgtaactgcttatttatgggtggccacatacatcatccaaaaaactttattattgaatgacaactaataagctgtctaaaagagggcaccgacaatgatgtgttgttaggtagaaggctgttgggtttgccaaatcaagttggacatagggcaacagctgttgcaattgtaaaagggctgcggcgttagccacaaactgctggtacaacggaagcaattgttgttgtgtcaagaatgaagcggggcttgttgtaactagctggccaaatggtatgagcatttgctgctggaaataatcagaggggaacagtgcggagaatctggttaaatggaagaaatagttgctgctgagagtaggcactatctagctggctgaatggtcagcgatgttgttgatgcaaataagcagcaaggctcagcgttgacagttggttgaata

SEQ ID NO: 147335 - DNA, 528 bp, Zea mays
  Clone ID: MRT4577_6588C.1
acctgcccaacaccagacaccatgcgtcagcatcactcgtgctatcataaatcacactcacttctctgcgtcatcgcactcttctactcattactccgactacccataccttcgagctgtcgaccatccatcgcgttacggatctgctccacatgttgcgctccctgcacttgttccgcgacaaggacgccaccacccgcactgatgctgctgttgctgtcaggatgatgacgacctatgcgatccccacaccactgtcccacgcactgatgcactaccgaccttcctccgtgcgactcgttgtgtcactgaacaccgccggaggtcgagtgtcgtagtgcactcaacccacctgtgcgtcggatcagtgtgacgctgtgacacatatgcagcctctattacgtgcacagcctctcactacccgctcatgatctccaaggaagagctgtcttctcgctgcagatagaccgtttgacccgaccattatcaccatgatgatgcacacgaccaagaacaccgtggatactg

SEQ ID NO: 147336 - DNA, 307 bp, Zea mays
  Clone ID: MRT4577_65890C.1
ttgtatttgttgcggatggtttaagagaagactgaaacataggagggaaggaacaaggagtaataagtgcgctaaggaactgtgaacggactatagaagataaaagagagtgcaagtagaacctaaagaaacagtgctacaatgggtgggcttcctttgtcctggtagaagcaaaacacgccgtagaggacgtaggtgattagcgcgagataaagaggctaactaggaagtgtccacggacctaaggagggccacgtgcaaggtagagggagaaagaaagtggaccagttcggagacgacaacgaca

SEQ ID NO: 147337 - DNA, 1257 bp, Zea mays
  unsure (1)..(1257): unsure at all n locations
  Clone ID: MRT4577_65891C.1
gaccctccgggccggccgggaaaagctactatgagtggatccttaataattcattttacttatcaagttaagtagttacctgcatctagatttctttatattctagatcaagcaattggcctatactagccatctttttatcatcccttcagttcacttgttgctacgtgtagggcagtgaccaagtcttcatgtccgagaagtaacaacgaaccaaatcgattaatacccagctagggatctccaaccacacgacatatgtagcactcacttcttacatatgtcaactcgtacccgggtttctcaagactagaatgggttcacgccaactgagagcacaaatactccacagttcagcctctttccatggagggtacacactaccctcgtcatccctccactcccatcgcgtggtggcctttctggtattggtcccaccgaggcaaagcttacccatgacgacgcatgtggccagttaaaaggtcgatcatcaagcctacatcnggctcggtccttaaacaactcagacagaaatagtacactgagactcctttctcgtgcaagtcacctacccgatctcgatttttactaatttcccaaaatttggtacctgtcagaggtacacttttttagatgttgaatccatctcggccatgatggattcaccatcacaagttttcttttataaaaattccctttcagtgtgaggcatcactggcttgtttttaaacaaaacatttttgttttctaaagcaaggctaagcatcaaaaatctttttcgtaaaagggtatcaaggaagggaaatcaattggcaaggaaggaaatgcaccaacggtttagcacacaactcctatcacctaatgcaacaaacaaggtgataaagattttaaaacacaaggaggtggcaactacaccgggacttgcctgaataacactaggttagtgttgttagacgacatccacttggcgattatcttttgttttgatacttgtgtcgtttatccatcttcagattagttcatcagcttcatcctgcggattaacccgcgcttggggtcgacttgggtcttcttccgcatcacgcgattaattaacgtacctgaatggaatgcattatgcacatgaatgcatatcgacaaaaatattacaaacctaaatagtgctacgcgatagcgaataaaacacctagcggcgaggggttgtaccgttttattcggaaacactagttatcagcatatggctaagcgcaataatta

SEQ ID NO: 147338 - DNA, 354 bp, Zea mays
  Clone ID: MRT4577_65892C.1
aaaaaaaaaaaaaaaaaaaaaaaaacaaaaaaaaacactaaaaaaaaaaaaaacaaccaacgggaaccaggaaaaaaaccctactaaaacagaccacaaaaaacaaaaaaaacaaataaaacaacaaaagggcccacccctatatggctcccaacctatcgaccacatccagactaggttaacgctgctacaacgcctacccataactcctgaaatgaccagactttatacactcgcgtccctgtaaaacccttgcagctacccatcatataggactggcggcactcccccttttgcccaccatgcccaattagcaatgggccctaaaacactccactgaccgaacttaagccc

SEQ ID NO: 147339 - DNA, 299 bp, Zea mays
  Clone ID: MRT4577_65894C.1
cccactcgtgcgccgacacgtgtgcggcgatatcacgtcgcggcaagggcatcagggggctgtgctaggtccgcgccaagcaccaccgactggtgctgcgcgacaacatgcagggcatcacgaatccggcgatccagatgctggccacgaagggcagcaataagcgcatctctggtctcatgtacgaggatacccgcagcgtgctcaatatcttacttgagaacgtcatgcgcgacgccatgacctacaccaagcacgcccagtcgtatgaccgtcaccgtcatggatgtcgactacgc

SEQ ID NO: 147340 - DNA, 326 bp, Zea mays
  unsure (1)..(326): unsure at all n locations
  Clone ID: MRT4577_65895C.1
ggtgnantgtcgtcgggttttccccnttttttttnggcncggttggtttttgtttttgttcttggttggcgtttttttgggttcggtcccccttcntgatttttgtttgtccatttgntgttgctgctgctggggggggccgcngggggcngcnttcctttttggcttctnnccagctcttgggttgtgcccccnttggtcggttgggcccgggggcaactgtttacacttgctggcgaggctggcaaaagtgtccgggtttttgggttgaggggggacttttggttgcctttccctaaggtgccgtcttgtgcaggttttccttt

SEQ ID NO: 147341 - DNA, 1469 bp, Zea mays
  Clone ID: MRT4577_65896C.1
cattgggtacctcgaggccggccggggaatatcatgtcggccggggccatctccaccgtacgtccactccatccgcacccagtctcggcgcctcaccccccaaaatcctctcgcggtcgcggatcgctcttccctccccctcttatccctttctcttctcccattccttccttccactcccccgcccagcgccaccatggcctcctccgtcgcggtgtccctccgcgccctcgctgccgccccgctccccaagtccagccccgccacttcctgccccttcttcgtgctccttgcgccggcgctgccccgacgcctgctccgcctccgctccgctcgccgcctgccgctcgccccgctcgccgcctccgactccgccttcgagtcctccgtcggagttaactacgcggagcccgacgactcggagaaggataaggaggtggagttgttcggatcgggtgacgacgagggggcgggtgagttggtggatgaccattccgtagaggtctcagccgctgtcgaggacgaggtggaggaggaggtcggggagtacgttgagccgcccgaggaggccaaggtctacgtcggaaacctgccctacgacgtcgacagcgagcgcctcgctcagctcttcgaccaggccggcgtcgtcgaggtcgcagaggtcatttacaacagagaaacagatcaaagtcgtgggtttgggtttgtcactatgagcactgttgaggaggctgagaaggctgtggagatgttccatcgctatgatgtcaatggaaggcttctgactgtaaataaagcagctcctagaggctctcgtgtggacagacctcccagacaatctgggccttctctcagaatttatgttggcaacctgccttggcaagtggatgattctagattggtggagttgttcagcgagcatggtaaagtagttgatgccagagttgtctatgaccgagaaactgggcgttcacggggatttggttttgttactatggcatcgcaggacgaattggatgatgctattgctgcccttgatggacagagtttggatggccgtgccttgcgggtgaatgttgcagaggagcggccacggcgaggtttctaatgaggttgtatcgggtggactgcacgcttgttccatgggttgggagcatcatagcatgttctgatactggtttagaccttccattctctttccttgtgttgctgagcttctatcatcgtgtcttattgtgaagagggaactcttcactaatgttttgttatgtacttgttgtgttcaaaagttcttgtactgtaggctactgttatgatgcgcctagctcaatttgtcgatgcaattcgaaattttgtctaaaaaaagttcatgcaaaaaaaaaaaaaaaaagcggccaaaaaaaaaagaaaaaaaaaaaaaaaaaaaaaaaaaaaaaaaaaaaagtaaaaaaaaaaaaaaaaaagcggcc

SEQ ID NO: 147342 - DNA, 339 bp, Zea mays
  Clone ID: MRT4577_65897C.1
gatgatccagcgatactgaatgattacaattaatataaacttggggcaactcacagagaaaataaaaacactgggcaaatccagcatgctgcctgagattgacaccagcaccacgattcttggctgtacaatcgtagttaatactagcagggcgtttactgttttttattcagaccgtcgtggaggactgtcgctctcatgggtgtggtctcaatgcactcaacgcatgggtaagcaagcgtgttgtcatcagctagttatggaagcaggacgttgatctcatactttgacaactcataaattggaaagcgttcacagactttgcattcactcacacac

SEQ ID NO: 147343 - DNA, 423 bp, Zea mays
  Clone ID: MRT4577_65898C.1
cccagaaacccaccccatttaagttcccaccggccgggaaatcccgggggggggggggggacccgggggggtattcgggcccaaccgggaacacccttaggcccgggaaaaaaattggccggggcaacggttttaggaaccttggccaagccaaaactattcaggttttcacaaaaactggggtaaaaatttaggcaaccgggaaaaatcccgggcgcgggggccaaaaaaccttgggaagaggacccccaaaaaccctattggggggggggggccccggaggaaccccaaggggaaaaggcccccgggggaaccaggtatttttccaaacccggcccccaggaataaactgggggcggaaccgggttccggggccaaaccttggggtccgggcaaccccgggggggggaatcccacgggggt

SEQ ID NO: 147344 - DNA, 383 bp, Zea mays
  Clone ID: MRT4577_65899C.1
aaaaaacaaacctcctaaacaaagacagaaccaaagacaaaggggggatttttaaaaaaagggccgccttaacccccaacaccaacaaacgccccggaacaaccccggcgacggccggcgccagaaaccgggcaaaacaacaaggcgcacccccccatggttccccctccggcggggaaaaaaaaaaaatggaaagacgccggaaccggaccgaacggcacggtacagcacaagaaacagctagccgggtctgaaccgagcaccccgaggccgcacccaaaggaaaaccccaccagaaccccagcccccccccaaggcccaaaccccgaaggaacaaaccaacggaggcccccggtcggacccaaagcagacccggcggacaa

SEQ ID NO: 147345 - DNA, 805 bp, Zea mays
  Clone ID: MRT4577_6589C.1
cttttgatggtatctgcagctggaacatgcctgggttgcctactacctcgcgtccgattcttagctaaggaacatcactggggaaaggacctgaacttagtgctggctttggcaggcattctgattttcggtggatcattttcactgggtatgggaggaataccctgggttataatgtcagagatctttcccataaacatgaaaggagcagcaggaagccttgtaacactcgtcagctggcttggctcgtggatagtctcgtacgccttcaacttcctcctggtgtggaactcctacggcacattcttcatctttgcaagcatctgtgggctcacagttgtgtttgtggagcagctagtgccagaaaccaaaggaagaaccctagaggagatccaagcctccatgaactcatccttggcgcccccctctgatatatgatttgcctgtctagtttacacaaccaaataactggatgtgatggcagcatgtaaatactattgcgctacagtggttattatttgtacgcatacaagtttgtatatctaggacggcttgaagatatgattctcgcaggaccatccagctttgtataatattgtccgtcataaaaatgatactattgcgtcggtattgggaacctcgtcatcaaatgagatttagggggtgtttggatacttctactaaattttagtcactgccacatcgaatatttggatgctagttagttttcatacactgaagaggtaactataaacagagcaaagtattacacaattttttgagtttaataaagcactctttatcg

SEQ ID NO: 147346 - DNA, 333 bp, Zea mays
  Clone ID: MRT4577_658C.1
ctgttatcatcagaaacctgatacagctttaccacatgccactatttccataccaggaccccagcagagggttgtccgacacacccaccatacccttatgtcattccgagcagaccatccaccggacttagccgcacattcaccgacaagtgactgaggaatatccatcctgagcctacgcccatatatctcaggggcctgggctaccgtcccgatcatggggtggacagttgccttgacgcctcattcaccatgcgctgatagcacgccacggccaccttgaccaacacccacgaggccacatggacaatcgcctgggtgacccatgatcac

SEQ ID NO: 147347 - DNA, 509 bp, Zea mays
  Clone ID: MRT4577_65900C.1
ggtaggacagactacaagtacagtcaataaggaatggaaatagtaaatgaggcatttatttttcctcccttctgcagcaggctcccttgcattggacattctccccgcaccgcggtccgcgggcgtcacccctcacccctgtcacgtctggacaagtgtcttgcactgggaggttttttttatcccacaatgccgggagcaggtacttcctcccgcctagcccgacggcgttgtagctcgcgccggtggccgggtctgtgagcagcttcccggggtagccggggtaggacccggtcccgaagatcccggcgcacaccgtggcagcctccagcccagcgccggcgtcgccctggtagtacccgtccccgtacgggttggtgaccgtgccggcgaggagggcggcgaggctgatgaccatgccgtcgacgccgacgtcgccgctgggcggcaccagcggcggggtccggggaccgtacgtctgcaggtggaacggccacgcccattggccg

SEQ ID NO: 147348 - DNA, 551 bp, Zea mays
  Clone ID: MRT4577_65901C.1
aaaaacactcaagggatctttgtttagaggatggagacctaaatctgaccgaccttcattggtggataaatatgcagaaaaagaggagaccttcacctaaaaaacaaagatatatgttgaaatggttctttttaaaagattgcaacgtgatccgggtgtcagagattcagaaggtcttggacatcgccgacgagcgtagcctcattgacaccatcttcttctgctacctcgggtgcaatgcaagctaaggtggtcgacaatggtgttcgcggcggcgaactcgcagcgcagccaggtgatgaagccatcgcgctcgtcgacgagccaggcgacgggctcggccaccacggtgccgggggccggcgaggcgatgaccgcggcggtggggtgttgtgagtacttcgccaaactctacttcatctttatgaaatacgtacctcatggtatggccgggaaacaatcaggtgcaggaacgtttgacttgcaaaaaaaatgtatatgtatgtgacatttcttcatatgtacatggattatatgttacaataaagtct

SEQ ID NO: 147349 - DNA, 1754 bp, Zea mays
  Clone ID: MRT4577_65902C.1
gaaggaatgcacaagtcaaaaaaaaaaaaaaaaaaaaaaaaaaaaaacgcgacctcctacccggcgtacctgcagtctctgggtacctcgagccgggcgctgcgccaaagtctgaaattaagctggacaccgctcccgcaccaaaccaaatcacctgttcccgcgacctcctccccggcgtacctccagtctccagagatccacacgaccacaccgacccaccaccatctgcatcggcaatggacgccgcgccacccaccataaccaagtccccgccgtccctggttccaccagcggggcccactcccggtggttccctcccgctctcctccatcgacaagaccgccgccgtccgtgtctccgtcgacttcatccaggtcttccccgcccctacgtcggggaaggaggactggagcccctcatctgcgatcgcggccatgcgcgagggctttgccagggcgctcgtgccgtactaccctatcgccggccgcatcgccgagcccgtgcctggtgagcctgagattgagtgcacgggggaaggggtgtggttcgtggaggctgaggcaagctgctccctcgaggaggcgcgtaacctcgagcgcccgctgtgcatcccgaaggaggagctgctcccgcgtccgccggccggtgtgcgcgtggaggacaccctgctgctcgcgcaggttacaaagttcacatgtggtgggttttctgtgggcatttgcttcagtcacttggtgttcgacgggcagggtgctgcgcaatttctgaaagcagttggtgagatggctaggggcctccctgagccatcgatcaagccaatctgggctcgtgatgccatccccaacccacctaagccacccctaggcccgccaccgtcattcaccgcattcaacttcgagaaatcagtcgtcgagatcgctctggacagcatcaagcgcgtgaaggatcaagttgcaagcgaaaccaaccagaagtgttccactttcgacgtggtcaccgccatgatcttcaaatgccgcgccttggcagtcgacttcgcgcctgacgctgaggttcgcctgggcttcgcagccagcactcgccacctgctgagcaatgtgctgccctccgtcgatggctactacgggaactgtgtgtacccaggtggtctcaccaagaccagccaggaggtgaaggaagcttcactggtggagatcgtgaccgcgatcagggaagccaaggaggctctgtcgtcgaggttcctcgactggttgagcggcggcgccaaggagaaccactacaacgtgtcgctggactacggcaccctcgtcgtgaccgactggagccatgtgggtttcaacgacgttgactacgggttcggtgagccaagctacgtgttcaccctgaacgacgacgtgaacatcgttccctccgttgtgtacctgaagcctcccaagccgaagcagggcatcaggctggtgctgcagtgcgtggaagggcggcactctgccgtgttcagcgaggagctgcagaagcacgcatagagcgagtgtattccatcccacagtggagattgttgtattttgttgtgtcgaattgctgcccccggaatttgcttgcaataagatagggttggcacgtgtttatactctgtactgttatctcagcacgttacattatacatgtattgagtgagtattgacagtggtgaaagaataatagtgttccatttgaaacaaaaaaaaaaaaaaaaaaaggcccaaagaaaaaaa

SEQ ID NO: 147350 - DNA, 493 bp, Zea mays
  Clone ID: MRT4577_65903C.1
attccatcctttttgtttgtaatttccggtgctcttcaactaaccggggagcgggggaaaatgaaccgccccccggaatcaggagcaggcgcgcagggtctttcccgggcgaaaaaagccccccttgggtgggatacacccgggggggaaaccaaccacaaggaactttgggaaaaacatggggaagagaccaccggcggctgcaacaaacgtgcgtggcggggcgaaaccaaacattttgtgcgggttgcgccggttgctgatggagcccaggaagtataggaaaaccgtggggcaggaaaaaaacaccccccccgggcagtccgcggggggtggggcgctggacaagcggtatgggcggcgagggccgctgggccacggggcggccctggaagaggaaaaaagcaggcccgcgacgacgaatagcctgacagcgacgacggggccctacttgagcttggagagcgagagcccccgaacagcgtccttgaag

SEQ ID NO: 147351 - DNA, 1661 bp, Zea mays
  Clone ID: MRT4577_65904C.1
tgggaccctcgaggccggccgggaaaaaatctaaatttgatagagcctgacctgaaaccgctgcactccgatctaatccaaacacaaagcggcaaagcccaactaccgaaagtcgccggttgttgtcagctaagcgaacgtctcgattcgtcaaagtctgaaattaagccggacgccgctcccgcaccaaacgaaactaattacctcttcccgcgacctcctcccccggcgtacctccggagatccaccccgacccaccaccgcgtgcctcggcaatggccgccgctccgaccaccgtaaccaagtccccgccgtccctggtcccgccggcggggcccacgccaggcggctccctcccgctctcctccatcgacaagactgccgccgtccgcgtctccgtcgacttcatccaggtcttccccgcccctacgtcggggaaggaggaccggagcccctcctccacgatcgcggctatgcgcgagggctttgccaaggcgctcgtgccgtactaccccgtcgccggccgcatcgccgagcccgttccgggggagcctgagattgagtgcacaggggaaggggtgtggttcgtggaggccgaggccagctgctccctcgaggaggcgcggaacctcgagcgcccgctgtgcatccccaaggaggagctgcttcctcgtccgccggccggggtgcgcgtggaggacaccctgctgctcgcgcaggttacaaagttcacatgtggtggatttgctgtgggcatttgcttcagtcacttggtgttcgatgggcagggtgctgcacaatttctgaaagcggtaggtgagatggctaggggcctccctgagccatcgatcaagccaatctgggctcgtgatgccatccccaacccacctaagccacccctaggtccgccaccgtcattcaccgcattcaactttgagaaatcagtcgttgagatctctctggacagcatcaagagtgtgaaggatcaggttgcgagtgaaaccaaccagaagtgttccactttcgacgtggtcacggccataatcttcaaatgccgcgccttggcagtcgacttcgcgcccgacgctgaggttcgcttgggcttcgcagccagcactcgccacctgctgggcaatgtgctgccctccgtcgaaggctactacgggaactgtgtgtacccaggtggtctcaccaagaccagccaggaggtgaaggaagcttcgcttgtggagattgtgaccacgatcagggaagccaaggaagctctgtcatcgaggttccttgactggttgagcggcggcgccaaggagaaccactacaacgtgtcgctagactatggcaccctcgtcgtgactgactggagccatgtgggcttcaacgaggtggactacgggttcggtgagccgagctacgtgttcaccctgaacgacgacgtgaacatcgtcccctccgttgtgtacctgaagccgcccaagccgaagcagggcatcaggctggtgctgcagtgcgtggaaggccatcactctgccgtgttcggcgaggagttgcagaagcatgcatagagtgagtgtattccacagtgggaatctgttgtattttgtttgttgtgtcaaattgctgctcccggaatttgcttgcaataaggcagattggtcgtgttt

SEQ ID NO: 147352 - DNA, 499 bp, Zea mays
  unsure (1)..(499): unsure at all n locations
  Clone ID: MRT4577_65905C.1
ggccgacgacgaggcgcagcggcagcggcaggtcgtcggcttcgacgaggacgaggagctctgggcgtcgctcggcgatatgctgtcggtgaacctggcctcgtaggccgatcgcctgctgcctgctggccagtcacccagtcactggccgagcagcgcgccaggggccatgggacgcggacgaacgcgacgtggcgttggtggccggtggggtccggtgcacgcgcgagcactcaggcaagcaggctccgctccatcggcgggggcgccggtgcgcggcgcagtgcggtgtggtgaagaggtctgcatggtcggcgtcgttgaccttccctcgtgtatgattgattgccttgtaaacttttagccagaaaaacatgatgaatcaacaaaaaagaagaagtttcaaannaaaaaaaaaaaaaaaaaaaaaaaaaaaaaaaaaaaaaaaaaaaaaaaaaaaaaaaaaaaaccccccgcgtccgccacacgcgtccgcgga

SEQ ID NO: 147353 - DNA, 296 bp, Zea mays
  Clone ID: MRT4577_65906C.1
ttttttttttttttttttgctatggggggactggggagcaggcccgatatcttattttattttagtattgtttatagatttcatatgataccttcttcctcggtggacgtccaactcagtgcctactactgcgagaccctgcaagagcaagcaagcatcacacactaaagtgactaaaccctaaacgcatcacatgtgatcgtggttggccgtgttccaggtttcttctacagcgacgcacggcaagcagcaatggctggcggacaaaaacctcgcgagaccctgtaagagcaagc

SEQ ID NO: 147354 - DNA, 499 bp, Zea mays
  Clone ID: MRT4577_65907C.1
gcgcgggccgcggagcgcaggacgatggccgtggcgccgtctcctggtagcatgtgctcgcgctccggctcgtgagcagtaaccccctttacagtatttaaggatcgctgaagctgcagaacggcatgaagagatgaaggaactgaatctgatcatggatcaatctacatgttcatgtcaagtggaggatgccaaaaatctggaactacaatgccctgtatccgaattctccaaaatagagaatgtatacattttcaatgataagatcctagccaaacatttctctttctctgtatagttcttgtcaaagtttgaagagtttggagttgaacctaccttgttgagtggaaggagattgtgttcagaaaactttagagatactttttagattgccgggatgtaaattgttgccagctggaaggccttgacttttaacagtctgaaacaattctgaaacagtaacatttaagcatggattacctcttgcatagtaatttcc

SEQ ID NO: 147355 - DNA, 348 bp, Zea mays
  Clone ID: MRT4577_65908C.1
gtgacattcaaatccccctatatatccaaaccatcacttttgcaaatcccacaaacagaagttaaaaggtccccacctatgcctgggtagcattttttatgttgcagcaaaaaaggatacattccccgcttgcaaggtcgatttacctttctatttcccagctcggcgacagcaaaaccagagatcactcccatgctttaagggcaccacccctcccaattgccttgataatagtcttcttactgttgcccccactgcactttttgggctcccccccgaattttgttgtccttctaatacccctcctgggcaatgtgagctttcttcctgcgcatttttttcttgatg

SEQ ID NO: 147356 - DNA, 870 bp, Zea mays
  unsure (1)..(870): unsure at all n locations
  Clone ID: MRT4577_65909C.1
gggtacgcccccgcctcccgggacgcccgcccgacctccaggatcctcgccgccgccgccgactgctgagagccatcggcgatcccatccacccgctgagagccatcggcgatcccatccacgcgtcgcgccgcatccgtgcccctccatcggagccccaccccaaaccacatgtttcgtcgctcaccttggcccctaaatccgagccaccactgcccgccgctcttcgccgtcctccagacgtccatgccgtcgccctctccccaacgttgtcgctctctccccaacgtcgtcgccccacctcgctggagatcctagccatggtccgtggaggacgtgcggcgcgacgaggaggtccgggagcaggccggtgttttcgtgcgcggggacaaggtgatggcggcgtggaggcggtgcagctcctgaagattataatctcgtcgaagccggtcacctcggtgtcggtgcggagccccgcggacggcgcagtagacgtgcgtgcagaacacggtgaagaagccatcaccgatgcgcgcctccctcatcgcgcctgcgcgttcccctccaccgcgcccctggcccagtgcgcgatccccgccactccatctcctacccgccgcgtgctccctgactctacccgacgtgcctttgtcaatctcgtctgctacgcctgtcgagcccgagatcatgcagatccaccattcccgcgcccttgatcgtatctgagtatcagttgcgctgactggtgtagctttcgttttttagactagatctggattgtaatgaacgtggctggcgatgacgtcactctgnatcgcgacgttgtctgtaatttaaatcggttttctatctgactcgaagggatgattt

SEQ ID NO: 147357 - DNA, 2932 bp, Zea mays
  Clone ID: MRT4577_6590C.1
gaggtccggaccgggaataccattcctcatcaaacaaatttggtgtatatgctaaaccaacccttagcagtccacaaccctagttctgcaaatccacctacaagacacgaataaggtatttcctttagcactttctacaatttatcaatacgaaattgacatacaaaatataatttagcatgcctgctccattttctttcttggtatctaaaatagaaattttatgaacaatttgacctttatgagttctactaaaacttgaaatttatataaactaattgtactccagttatctcgttgccgtcttttcgtaataggtttcttaaacgtatatgttcacctatttcaagagtaatttttttaccaaacatgtatacatacataggagtatatgtgaatagtgtggtatacaatacatcgacactcccactattttaattatggcccattaattcatgcatgcattcatttattcccttgctgcattttttctatatacttgccttcatctaattttgactgttcatttgatcaaacaacaatgtgtgttgaactaaaatagaggcattagtagaccaggatgaaaaaatagcgttaatacatgttaactaaaagtttaagactccatcctggtccgattctatagtggtacacttttttcttgactaattgcttcgtgctttcagtctttttagtttaaactttcagggatgtgtccactgagattgttgctgctcaagtccagcagactctgcgactattatagcttgccgatatccgaagggatcagaccggacaggtaattttgtgaattgtgatagatttagctcatagagactgctcagttttgtgaccgccatcaaaatcagacctgagatctggttgtgtgcgagattcagcacgttgagggacaccaggctgtcgagtttaggcggcattgttccaggtttactttgttcagttcaatttgtctagattttacatattcatgaatagccctttattattggtgcaactaatattcagtcgctaaaatatcaatggcctaccaaatttcgcaaaaaaggatgagcactacacgaaccattcctgtactttgtaagccttccctcctaaaagcttcagaatcttaacatgttacagttagttcttagaagattttatgtgcatcataattctaaaactttagccagtttacacctgttatttagtctactccttgaaaaaagtttttccctttgatctaaacatgaatgcttccttttactccaacatcacagcaaaaaaaaatcaaaagcattgcacttcttactactgatacccctatgtcactactaccatacaggttagtgcacgatccttacctttatgttctacatgtctttgggtttctctttttttcaagtgcgttctattattgtttatatgtccaccttcacactgattagctgttccttgttcctacacagttattatctgttatgtacatttttatacctttccaaattagcttattatctttaaaaaattgtattttcttggctactttacatttgaatgaccaatggcaacatcttcaaacaaacatagctaacttagaggaaagaaaacataatctttaaattgctcataagagagaatgtcatttttcagaaaaaaagaaaaacagtattgatgctttagaaaatcttaaactgatgcatgttaatattatcatatcaatgccaacaacatatgtttaagctggtttcatccttcctagcagctctacttgcttcatctcgctcttcactgctattttttaaattggaaggaaaataagagtacgatagaagaacttgaagcgcattcactggtctcttatttaaagtccataaagcaaagttccaaaaaaacaaaaagaaacattgagttgccttcacccggcttctcttgagaaaatacaaggtaaacatatttggcaattgtaatatatgttgttattttgctctttagttgcttcaaattgtttatgggtaccagtaggcaactcagaagagacaacaactgtactttctcaggcgttaagaaattctttagaaaggcatattattactacatatagagctaggagtagatcttcatccgaacccctccaacgacgactaggtcggcgttttctctccctgctgtttcaggtttgttacatttcaacctgtgggctttctttcagacaattgcatttcatctagcattcacatgggaagctctgaaatctgccagcttaaaaactagatgtaccaaacatgctatctgagcaccgcactgatacaacctttgatagtctgcgttttctctccctgctgtttcaggtttgttacatttcaacctgtggggtttctttcagacaattgcatttcatctagcattcacatgggaagctctcaaatctgccagcttaaaaactagatgtaccaaacatgctatctgagcaccgcactgatacaacctttgatcagtatttagtactacttgctcttccatattaatactactggtactactatttcattgcacgtttacatgacatggaacagagactgaatttagtcgagtgggttcacctgcagttccggtatgcaaactacacgaatgatgcctacaacaagagtgggaacgaatccttgtggctgcagctgataaaccagagagcatagacttaacctttgtgctcttctcgacaggcttctttgctgttagactttaaccaattcatctcatgtcccaagttcaattttatgtaatgaggattgcatggtattttttggcaatttatctttaatgaactataatgtatagctgaagttggttgcagtttgaaacaatgcgacatttaaaaacccatagaccagactcgcgcagggcgcgagcaattcactagtatcctttacac

SEQ ID NO: 147358 - DNA, 914 bp, Zea mays
  Clone ID: MRT4577_65910C.1
gggaccctcgacggcggccgggccaacctcccttggtttggctggcggctagcccctaaccaaaaaaaataaaataaaaccaactctcccattcggccatttgcccatttcccatctcgccttcgcttcccacgcccctccgtcccgcctcgccgcggcaaggcaccgccgccaaccgccctcgtccctcttcgactcgaccgcgtgagtgagacgaccgcgcgcgcccctcgcccgcccgccaggaggagatcgacccccgaacgcgtcatgaagtacgtgctggtgaccggcggcgtggtgagcgggctcgggaagggcgtgacggccagcagcgtcggggtcgtcctcaagtcctgcggcctccgcgtcacctccatcaagatcgatccatacctcaacatcgatgccggaaccatgtctccgctcgagcatggcgaagtgtttgttttggacgacggcggtgaggtggacttggaccttggaaactacgaacgatttctggacatcaagctgactcgtgacaacaacataaccacggggaagatctaccagtctgttattgacaaggaacgtagaggggattacctaggaaaaactgttcaggttgtgccgcacatcacagatgaaatacaagagtggattgaacgtgtggcaatgaatccagttgatggcacagaagagccagctgatgtttgtgtcatagaacttggtggcactataggggacattgaatcaatgcctttcattgaagcattaggtcaattttcataccgtgtagggcctggaaacttctgcttggtgcatgtcagtcttgtaccagttttaaatgtggttggtgagcagaaaacaaccccatagtgttcgcggacttggactgatcattgatattttgcatgaagcccacccaacat

SEQ ID NO: 147359 - DNA, 408 bp, Zea mays
  Clone ID: MRT4577_65911C.1
gccgaggcagggaggaagtcatactcaccggctagcacagtgagctagctcggaccagcgccaagccgcctagaaatcagcagtcgaccggggccgaagagctggtggatgctatgcgcgtggcctcctccgagctactaatgctatgcaggcatggccatgaacagaacgtccatggctatcgaggggcccatagagagcacgtcccttggcccggatcgataactaatatgtggacccacccatagctaggaggaatacgacgcgctcggactgaacatatgtaacctattgacgggatcttgcgtccctatgaaccatgcgatgagggtcactgtgaaccagtgcgctgtgcgtgctatcatcctaatactgccggatctctggtgtattaggtccactactaga

SEQ ID NO: 147360 - DNA, 652 bp, Zea mays
  unsure (1)..(652): unsure at all n locations
  Clone ID: MRT4577_65912C.1
gccggccgggctagcgcaaagcgcacttctccctgctcgctctattccccacgccagccctctccttcacgtcgccctccctccattcctcgtcctccatggtcgtcggccttccccgccatggtctctccctctcggcgctcttcttctgtgtgcctctgcagctcgccagcagccactcccagtccctctcctccctggcgctcgcccctgccccagcccaatgacgtcgtcgaccaccgttcccagcagctcgccatcacccacggctgcacctccaccttgtcaggctcacgcccaggtccagctagatatgcccctccccatctagctcgaccccgtcctactcagatgttgatcggatgatgaaggaaatgaaagccttaatgcgttgctcgctagctgctcgacgatttgcccaacaagaagttgaagcatcgttccaccccgacatctcgcctggaccctggcaacctgccctgggttggtctgggacactcctctggtgccgttacagtgtttttctgctatgacttggatcaatggtgttgatgatgtgagcccttaatcttgttgtcgctgctgccttgatctgngagntctgacacgncatcgtcctcgtcgtggtgagaccctgctgtttcctctatac

SEQ ID NO: 147361 - DNA, 392 bp, Zea mays
  Clone ID: MRT4577_65913C.1
aattcgaactctgtactatttgaagtaaggaatgtggttactagcctcctgggactagtaattgtatcacatttgagtcccaaaggatcgggacgcttcaactaccttacccgaaaggggcaagggcagtaggggagtaggcgtgtagggaggttctcgggttgattttgctgcgatggcggttagacgagggattcctgcattgctctacccagaaactgtagtgggttttcgaaagctagtggaactttgtaaaggcctcgtagtggatccctagccattcacctcggtagtgtctaagtgtaaaactggtatactagccgtgctcgcggtcatgagcagcttaggactctcgcatgattaaattatggaactaaattcaatttgtcacg

SEQ ID NO: 147362 - DNA, 226 bp, Zea mays
  Clone ID: MRT4577_65915C.1
cccacgcgtccgcccacgcgtccggaggcaagggacgtaagaagtgcattacctggggtggtcccttaatgaatccacgctcctagacgcgtacatcgccatgttcgtcactgagtttctccgacagcttggcatgctgagcagttcgctaaatgttcttcgtgctgagaatgtcagctatgatcggcctagattcagcggtactgcgctcttaatcgacagggaa

SEQ ID NO: 147363 - DNA, 279 bp, Zea mays
  Clone ID: MRT4577_65916C.1
gccaattcctaataaaaacaactttcatctatcgaagcagccaacgcaaccgggagcagtggctttctgaaacctatcgtgctcacccttccagaacatcatcttcagcccaagcccctcaaacctgcggccgctgtcagaggcttccatgatctggatcagcaaaacaacaactgcggcttatagactaccctaatgccactacactacccacggttcaaaaaagcggactaccaggccattccggagtgtcgcgtatactgactgctccttgagtac

SEQ ID NO: 147364 - DNA, 358 bp, Zea mays
  unsure (1)..(358): unsure at all n locations
  Clone ID: MRT4577_65917C.1
ttttctacccacttcttttctcgctgctcaagcacgcntcctgcgcggggtccatattattgcacgtgttggccaaaaangccnnttcagtgtacggtgcggacccggagccggagctgctgcggctcgcggtggcggcgtcgttcccgtctcttcttttcgagatctacccgttccacgccgaggccttggccgggctcatctcggcgtccgtgcgcgccgcgctcgaggcgccgctcaactactcgcggaaccacctatcgtacctgctcccgcgcttcgtgccgcgggcgatatacctcgactcctacttgctcgccgnctacgacgtgaggcggctttggtagactctcctccc

SEQ ID NO: 147365 - DNA, 342 bp, Zea mays
  Clone ID: MRT4577_65918C.1
ttcatcgcagaagtgtgactttccgcatgcgaattcgcactgagatatctcctgcttgccatctcagaggatgtatctgagagccgtcttacttcatatggcaagactaaggatgatcttatacttccacctgatgaaactctagtggaccacattactgacacgttccaaagcgctgcatgatcttgtggtgactgcccagtgtgcctagccccgacgaccctatctgcgcgttgaatgatgctcgtgcccaagtaactaccttgactatgaagacaacaacgctactgactttcaacttaaatcatgccatgtatgtatctctgtaccattgctatcgag

SEQ ID NO: 147366 - DNA, 680 bp, Zea mays
  Clone ID: MRT4577_65919C.1
atcctgactgtagtttttataagtgtgatagtcaagatactgaagattcaagctcattatcgtcatctttctcaaagttgaccatgtcatcatatgttgcttgcatgaacggtggtaacataaaaagtagcgagtcttatgatgatacagatgaaataccactatatgtaaccaataaggagtttgacaaggctaaaacaaaagttagaccgagtgcgatgcgcgaggttattcttgagcttccgaaggtacgttgggaagatgttggtggtcagtgcagtgtcaaggagcaactgattgaagctatccaattaccacaaaaatgcccagaagcatttgaacgtttagggatccgaccccctagaggattgctaatgataggaccgccaggttgcagcaagactttgatggctcgtgctgcagcttctgaagcaaaattgaatttcctggctgttaagggtcctgaacttttcagcaagtgggtcggtgactcagaaaaggcagtgagatcgctatttgcaaaggcgcgggctaatgcaccagcaatattattttttgatgaaatagatgggcttgcagtaactcgtgggcaagaaaatgatggcacgtctgttgctgatagggtcctcagtcagttgcttgtggaaatggatggtttggaccagagagttggtgttact

SEQ ID NO: 147367 - DNA, 222 bp, Zea mays
  Clone ID: MRT4577_6591C.1
agtcgtttacagacaaacaaatagaggaatttatttgatgcttctattcgattacaggatgatacacgctatgtgttgagtcatgaagaggtgtctaagcatgtagcttataggaggcctgatctaactaggtcatggattaaacacttatcacttgtgcaaggactggatcctcagaagagcgtcacaagtattcacactgaagatgagaactagcatcta

SEQ ID NO: 147368 - DNA, 232 bp, Zea mays
  Clone ID: MRT4577_65920C.1
aaaaaaaaaaaataattaaaaaaaaaattttttaaaaaaaaaaaaaaaaaaaaaaaaaaaggggcttattataaaacatctgaccctattaaatacaccaaaataacatcttatttcttttttatagtcccctctaattaactctctcttcatcaattttcaccaccttaacttttaaaacactttaattcccaaccttttactcttctaaaaccatattcctttcacccct

SEQ ID NO: 147369 - DNA, 492 bp, Zea mays
  Clone ID: MRT4577_65921C.1
cgttgctgtcggcttgttccgcgttctcaacctgttgttactccatctcctttaactttgtcagcagtcagcacccgctctcctttaactttgtcagcacccgctctcctttaactttgtcagcacccgctccttctacaggtgatgagggtgttggtattcactacaactattatggtaaagatggtcatgaagatgcttttttgctatagaaagaaggcgcataaggcttagactcgctgtacttcatagcctgctagtaatgccagtaatagagttttttaggggagttcctgttgtttcaatcactcaggagatgcttatgctccttggtcaccttgctgtgtcttcatcgccaggtgctgctaattatgggggtgtttgtttgggattataatctgcccagattatataatctagcttattttgatctataggttccgttactgtttttcagtcttctactgagggaccatcttcccgacagcaacg

SEQ ID NO: 147370 - DNA, 253 bp, Zea mays
  Clone ID: MRT4577_65922C.1
ttcgtgctttcctctaccggatctgcttgtgagcccggtgtcagtattactggggcggtgcgcgctctctctttcctcgccttcgccggcggcgacgagcttgagctcgagctggatgctggaatagaacacaaccgccgtgtgttcgaacccatgaacgtgcactactgaaagttgcgcagccattgatgctcagattgacacttgatgcagtgacggccgctcgccgagcaagaggttaaggcactgcgcg

SEQ ID NO: 147371 - DNA, 326 bp, Zea mays
  Clone ID: MRT4577_65923C.1
aaagaaaaggggccccaggccccctccttttttttttaaggggccaacttcccatccagaaaacaaggggggccccccccttgattggaaacaaaccacccccacaaaggttccttttaaaccgccccaccgaaaactataaacgggccataaaatttctacaggcgccccccggataaatgttggaacaagcccttcccagggggggaaaattttaactttggaggcaaagggcataaaccaccccccgccgcttaaaaaaagcaaccttttttttttcccccccgggggggaaaaaaaaagaaggaaggatttccctgggaaaa

SEQ ID NO: 147372 - DNA, 399 bp, Zea mays
  unsure (1)..(399): unsure at all n locations
  Clone ID: MRT4577_65924C.1
gggccgacccacgcgnacgaacgaaccccgccgagtacatacaaccacattttttttaacaaaaaggacagaacaaagggggggggttgaaactaacttttgaactatccccacggcactaacagacatttactctaacaactttaaactctccatatacatgaggataaagacggtagtagcatcactttcacttacactatcacaaaaacccttatcattcgcacccatgatttaatccgaaacttattgtgaaatgaagtttcgttcttatatagtccatcacactgatttattcaattcacgtcttacatttatcttccgttgcttgccaattaataatactccagatgtattcgttcattaaaaaaaaaaaaaaaaattgctgccgttttatat

SEQ ID NO: 147373 - DNA, 358 bp, Zea mays
  Clone ID: MRT4577_65925C.1
ctaccaccaccactatttgtttatctgatgaatgaacggtggcgatgatgacgatattgtttaaaaaaaaaaaaaaaaaaaaaaaaaaaaaaaaaaaaaaaaaaaaaaaaaaaaaaaaaaaaaaaaaaaaaaaaaaaaaaaaaaaaaaaaaaaaaaaaaaaaaaaaaaattattaacaataaaaaataaaaaaaaaaaaaaaaaacaaaaaaaaaaaaaaaacactctctcccggggcgcattaaaaaagggagaattggtgaaaacttaacaaaatgtgcgttacatttaaaaagccatataaagaccacaaatttccactaaaaaaaccttataaaaaacaaattaaacgggggtt

SEQ ID NO: 147374 - DNA, 215 bp, Zea mays
  Clone ID: MRT4577_65926C.1
ctcgagttctgtgcctgtgcctctgctccacctctcctgccccggcgccgctaagcgacggccaccactcagcactcactctgctcgctcgctctcttcgtacacgctcccgcttcgctcatggaattaaccgtggtgatgtagcggtctgacatgatgcacgtcatattcgagtcggacttgacgatcctggcggcgtcgtcgctgttcgttcg

SEQ ID NO: 147375 - DNA, 1365 bp, Zea mays
  unsure (1)..(1365): unsure at all n locations
  Clone ID: MRT4577_65927C.1
atcctgacaggagtaacagcatccatcgatccacagtccatgatggttaatgcatgggtctgctggagccgaggatgaacncagcactaacaactgacacagagcgaccttgcaatcaaaaacacagatgggcaacaacaaacgagacgaacgaagataaaccctctggactagggtaaacatcacggtagcgaacaggataacttggccgcgcgggccccaccgctcagttcctccagttcccgtcggagttgccgtagccgccgccacggttgccaccgccgtagccgccaccaccaccaccgtagccaccgccgccaccgtagccgccgccgccaccgccgtagccgccgccgccatcacggcgcccgccaccgccgtagccgccgcctccacggccaccaccgtagccgccgccgccgccagtccgcacgaagcgccccacaaaatgccgcggctgacgccggcgcacgccaccctcatcctggaccacgtcctgggcgatccctcgatccccaccgcagtcaccatcgcgttaatcgctgggatcccctctccctccgatccgaccccgcgcctccgccgcggggtccttctccgccgcctcgccaccgaccccgtatccgaatcctctctcgaaaccctccacctcctggcctcgctcccggcctgcgcctcccccatcgcagccgcccacatcgccgtcgcggcattcctcgcggcctccgcgcccgacttcgacgccgtcgccagggctctcttcgcgcgccccgacggccgcgcgcgccaagcggtccacggcggaagttcccccgcgctcgcatccgacgatgccatcgccacagtagaccagttcgaggctgccgtcgggatgtcctcctctcagaccatcctcagggtcctgtggggcaaccgggccgccgtggaggagcgggtccaggagctcctcgctgctgaatgggccgcgattggcccgtcgcggctcgaggcgttggctatgcggatcgtcggggatggggccgtcgatacatggggtgccgcagatgaggccatgcgtgccaatttgcgcatcttgggtgaggacccattttttgggtggattttgcagcagcgttgtgatcaagaaactagtgtgtagtgggacttttctgtatttttgtgatatagtaaaaatgagaaggaatttagaggtcatattttatcttggctctatgaagcaaccatgggttgaagctatcccaaacagaccttatattttgactgtactccatccttgctaattttgctgcttttagtttcttgtttatcatatatcaaactacatgatttcaatcttgtgaatacttttgatggcccccccgcaat

SEQ ID NO: 147376 - DNA, 585 bp, Zea mays
  Clone ID: MRT4577_65928C.1
cctcgaggccggccggggtgctttcttagaggtgtgttggcttctcctccccctccggttcgggttcgctttcgagaggctctccgcggctcggtttcgtgagggatggcatcgagatggcggcgacggatgttgagtaccgctgcttcgtcgctcggcctcgcctgggccacggacgaccactccctccacaacgccttcagtacctacggcgaggtcctcgaggccaagatgcatcctcgatcgggagacgcataggtcccgcggattcggcttcgtcaccttctccacgtgaggaggtagtatgcgcaacgccatcgagggcatgaacggcaaggagcatggacggccgcaacatcacctgtcaacgagggccagtcccgcgttggccgaggaggcgttgtcgcagcctacggtggtgatccggggaggcgtcgactacggcgtcgacgggcgccgtgatgtcggcgacgactacctcggtgacggcgtctacgatgacgccggctgctacagcgtcgcgggcgtcgactacgacggtgagaaccgcggcggaggcgtactcaactccgacggatactggag

SEQ ID NO: 147377 - DNA, 620 bp, Zea mays
  unsure (1)..(620): unsure at all n locations
  Clone ID: MRT4577_6592C.1
tttttttttttttttttttttttttttttttttttttttttttgctcatcctctccctctttattaattattaaacgggcttcctatataatccacagcttgaacttgatcctcagagcttggggaataaatttataattggctgggggggcggtttcctggctctaacaagaatcgttggtagcttacatcactttcattcgggggtcgcgtgggattttctgggaaggccgccgccctggggaattccagggggggtagccgctccgactatagcctggagagcttgagctgctgcttgggccaggggcgggggtcctcggggtccccctcgggccccaccgtctcgttcagagggtccttccacgcctcctcgttcagcgctgggttccccttcccatcgtaccgcccccgccccggccccnggtagtggtctgtgtggttgggggcttcnccccgccccccccccttcggacgcccctttgcctncagcttgccccacttcctccttccccccccctccctgctttgggtgtggtgccccccgggggccgggaatcccccccggtgccctggtgggattgtggggggcctcccccttcccagggtttgaagaatag

SEQ ID NO: 147378 - DNA, 392 bp, Zea mays
  unsure (1)..(392): unsure at all n locations
  Clone ID: MRT4577_65930C.1
aactgatggctcctcctacccctccggntctgtgttggggttcgagaggatctccggggttcgggttcgggggtgagcggatcgagatggcggcgtcggatggtgagaaccgctgcttcggtggcgggcctggctggggcaccggagaacaattccttcaaaaaggctttaagaactaacgggagggccctgagagcaagaacaacctcgatcgggagacgcaaaggtcccgcggcttcggcttcgtcaccttctccacggaggaggcgatgcggaacgccatcgagggcatgaacggcaaggagctggacggccgcaacatcaaccgcaacgaggcccagtcccgcggcggccgtggaggcggcggcggcgggaccggagtggccgtggag

SEQ ID NO: 147379 - DNA, 261 bp, Zea mays
  Clone ID: MRT4577_65931C.1
tcgaggccggccggggttgtagtcttgagactgtggcacatctgctatatatacgcattacgctcgctgatgcttcgcagctcccgcctaatgttaatcaaacgcttatctggcgtcgcgactggcagtctatggtgatgatcaccccaacatctactgtatgaagcttcgacctagctaacgatcactatctgaacaacaacaagcctctttaatctctcccagtaaccgccctgccctcgccctggatgagatagctga

SEQ ID NO: 147380 - DNA, 276 bp, Zea mays
  unsure (1)..(276): unsure at all n locations
  Clone ID: MRT4577_65933C.1
cggtacgcgtggggcttcggnaggaatgatcttgcgcgctgcgtcttactgcaccgccggcagtctccgggaggacacatcagacccagcgtgtgactattcgggcgtgttcttagtccagggaagctgtcgcctagactaggggccctggttctacattgatcatgcattgttctgtgtgccatactgtggagctggagtggtgaagggctttcagcagggactttacatgggcaacggtggtggcgccaatgaggcgcgtccttgctgcaccaa

SEQ ID NO: 147381 - DNA, 2063 bp, Zea mays
  Clone ID: MRT4577_65934C.1
cattgggtacctcgaggccggccggggcggccagcctaccactaccactctcgattaccagccctctcgccttctccgctcctccgtcgtcgccgaaccccatggccccaaaaccctaaactgagcccgccgctgcttctccagtccgcacgaagcgccccacaaaatgccgcggctgacgccggcgcacgccaccctcatcctggaccacgtcctgggcgatccctcgatccccaccgcagtcaccatcgcgttaatcgctgggatcccctctccctccgatccgaccccgcgcctccgccgcggggtccttctccgccgcctcgccaccgaccccgtatccgaatcctctctcgaaaccctccacctcctggcctcgctcccggcctgcgcctcccccatcgcagccgcccacatcgccgtcgcggcattcctcgcggcctccgcgcccgacttcgacgccgtcgccagggctctcttcgcgcgccccgacggccgcgcgcgccaagcggtccacggcggaagttcccccgcgctcgcatccgacgatgccatcgccacagtagaccagttcgaggctgccgtcgggatgtcctcctctcagaccatcctcagggtcctgtggggcaaccgggccgccgtggaggagcgggtccaggagctcctcgctgctgaatgggccgcgattggcccgtcgcggctcgaggcgttggctatgcggatcgtcggggatggggccgtcgagacatggggtgccgcagatgaggccatgcgtgccaatttgcgcatcttggctggggaagcaaaaacgcgcgagattctcgacaaacttgaaaaaactacctgcaacacaaatccaatttcaacaccagctgttgagaaggtgatggatgcgctcaaagcaagctgtgctgacctccacagcattgtggaggatccccttccagctgcaaaggcagttgcagatgagttattgactgcgaggatggaaaaattagttagcctgaatgcccaagaagtaggagggcagccaacaacttgtggcgttgcaggaccgagtattcataatgacaaagacaatggtccaggtataggcaaacctcacagccttatggagcggaacgcaacagcacgaacctctcagtgggaggagtcacttggtcttgatggttcggaaccaccctcaccaccgagaccacacttgcctagcccaaggagactaccaccttctcctttgtcaccgcctgggaacaaaaacaataatcggagaaaggcaaggaggtggagcttgttcgaagaagaaaccttaagaaagggtgttgaagagtatggtgttggcaattggagggatattctagataacaatgctgaggcttttaccggcaggacaccggtggacttgaaggacaagtggaggaacatgcttttccgttgatgtaacggggaaacatgtagctggacatgctttactagggtaaagtacctagcaattagcatgtagtcctcgtacatcacagcagactcttggtcaagcttttctggcagctgcagctacatgattttgtgtctcggtgtagtagcagccgcagcttttctggcagctgcagctacatgattgtctcggtgtagtagcagccgcagcccaaacggttggctttcctggcagctgcagctacagtattttgtgacggtatgcttaccgagtggctgattcgcgcactgacgtattatggactcgattttgtatttttattatgtacattgtcctgcatgcttgcattgtactttttttgggtggattttgcagcagcattgtgatcaagaaactagtgtgtagtgggccttttctgtatttttgttagatagtaaaatgagaaggaatttagaggtcgcattttatctcggctctatgaagcaaccatgggttgaaggtatcccaaacaaaccttatattttgactgcactccacccgagctaattacacggcatttagcttcttgtttatcatatatccaactacataatttcaatcctgtgaacccctttgatggcccccctgcgat

SEQ ID NO: 147382 - DNA, 409 bp, Zea mays
  Clone ID: MRT4577_65935C.1
tttagctcactagtagtagtccgcccctttttttattccttcattcctgtgtttgcattaccaagaagcaccatttttttccttaggatctaacttagaataaagcctgacgggggaaacagcacccatcgatccgcagtccatgctggtagatgcatgggtctgctggagcccaggatgaacacagcactaacaactgacacagagcgaccttcaatcaaaaacacagatgggcaacaacaaacacgagacgaacgaagataaactctttggactagggttaacaacacgggagcgaacaggataacttggccgcgcgggccccaccgttcagttcctccagtttccgttggagttgccgaaatcgccgtcactgtagcaaccgtcgtagacgtcgacacacaccacc

SEQ ID NO: 147383 - DNA, 412 bp, Zea mays
  unsure (1)..(412): unsure at all n locations
  Clone ID: MRT4577_65938C.1
ccctctcattaattttttcatccaaagacaatccaatngggttctttcaaaatatatatgggtatatgagtatttaaagctttggtgtggattgtaggaatagattaatcagaatagtattgatgttgtgaaataagaaaagcaagagtattgtttttgttgttgtagataaatccaaaaagtgaagattagaaaaatgtcacagaaatggcatatacttcaggtggctgctatgattgaaacttaaatcttactaagagtttgttgcaaggaataaatagattgattgagcagtagtctgatttatttaatccatcactagacccgatgaggtggtggtctaccatgttgttcctggagcaggttgttcgctggccgattttgactgattggatgtgacctacaagtggtg

SEQ ID NO: 147384 - DNA, 732 bp, Zea mays
  Clone ID: MRT4577_65939C.1
cattgggtacctcgaggccggccgggatagccgcattccttctttcattcgccgccgccgtctgctctctgctgccgtcgccatggggagaacgactgcgagatgctatcgccagatcaagaacaagccataccccaagtgcaggtactggcgcggcgtccctgaccccaacatcatgatctaccatgttggtatgcacacaaatggtgctgatgacctctccctactgtgtgcaccttgtctcttgacagatggagaatgtctccactgatgctcttgacgctgcccgtattcgcctgcaacaagtacatgaccaagtcttgatgaaaggatgtcttccaccttcggatccgatttcaccccttccatgtcctttgtatcaaccacatgatttcgcccgcctggggctgatagaatccagactgcaatgaggtgtgcctttgcacagcctcaggccacctgtgctgaggtgcacattggtcagtgcctcctttctgctcgatgcaaggacaacaatgctgcacatgccactgagattctgcgcctattcaaggtccaatttcctgatccccgaaagattattgacagcttaaagtgtttcttcaccaagttcagccgtgccgactacctgaagtacgagagagtgggtacaattgttcctgatggtgtcaacgcgaacctgctcggtaaccatggaatacttgataagcgtgctcctgggaaggctttcct

SEQ ID NO: 147385 - DNA, 534 bp, Zea mays
  Clone ID: MRT4577_6593C.1
ggtacccctcgagggctcggcccgggaaaaaaaaaaaaaaaaaaaaaaacgctgtgaggtgactcggtcgcatcttccccattctccatcgacccaccggcggcggcgcaagtgaagcgaagaggaaaggaagctacgagatgtcggcgaccactgcagcggtgcccttctggcgggcggcggggatgacctacatcggctactccaacatctgcgctgcgctggtccggaactgcctcaaggagcccttcaagtctgaggccgcgtcccgcgagaaggttcatttctccatttccaagtggacggatggcaagcaggagaagccaactgtccgcacagaatcggatgactaagggctggcgcgccatggcgacatagtccttcctacagatgatttgaagcgttgttgcaagtttctgagacttgttatttagttggcttgatttgtaatcaatgctgaagaataaatactttttgcgacaatggtctttttacaatgtcgtgttgtttcaaaaaaaaaaaaaaaaagcggcc

SEQ ID NO: 147386 - DNA, 498 bp, Zea mays
  Clone ID: MRT4577_65940C.1
atgtcggcacgaggccatactatactctcgcgcggcgagctcctcgagctcgctccccgttccaagatagaaaaatggccgcggcggaagcagcctcctccgcgccggcgcccgagcatctcctggaggtggaggacgacgaggtgctgatcgacttcaagcccaacgccaagtgccgcgccgacctccgcctccgctccctgcacccgtccctccccgtcgccttcaaggtgcagacctcctccccgctcaagttcctcgtcagcccgccgcgcggcgccgtgccgccgctctcctcggcgtccctgcgcgtcgtgctccgcccgcagccgcacgcgccgccgtccttcccgcgctcccgcgccgaccgcttcctcgtcctgtcctcgctctccgcggcgcgcctcgactccgtgggaagcagcaacgacggcggcggcgggggcggagtcagggccgtccgcctccgcgtgttcttcggcgggccgtaccttctcc

SEQ ID NO: 147387 - DNA, 355 bp, Zea mays
  Clone ID: MRT4577_65941C.1
accaggggcaaaacaggttccgggctcaaaaagaacaaaactagtttggtgttacaggcagcaggggggccatgcatgaatcatgaccgaggcaacgcttaaggttcctttacaacacgcatgcatttagctttccacaaaaaaaaactgggggggggggcagcaggtatgctgatgcaccaacgttttaggggaacttgaggctggggaacacgttgttgttgacggggtcggcgagggggtcaaacaggttttggaacgggccaaccccggggacaagcccctggatgaagtaaacgaggatggggagcatggggagcctgccgttcttgatctccttgagcttgagctcatt

SEQ ID NO: 147388 - DNA, 995 bp, Zea mays
  Clone ID: MRT4577_65942C.1
ctcgaggccggccgagagaactgagaagcggtccctctcccagaactgcagaagcagcgcggcgcggccgttaactcggctccctcaccttgctgccccctccgcaggcgcaggcgctcgcttccgaattggaggtgccatttgccaggggcgtactccattgattccggctgagttgtgcaaattgtgatagaactttcccgagattctagcccatacaatgcagggcatctctatatgtggttcagttgcctcaccccatggagcaaactgcagaagggcttgtgttgcaaggaacgatgtgaggctgccttgtgaagctaatgcagtaagccaggggttgcactctctgcattggtgtgcgcacaaaccgcaaatgaagaacaatggaagaagaatgaatgccgcagtgaaaactaatgctagatggttgtttggaggagatgggcgtagcaatgatgcaaggctggagcgcagtgagtctgctaatgaagatattttgatcttctacttccagatggatctacagacccggatacagtatgcattgaatatagaacagtttgatgtggcaaagcaattgagggaaaaactaaccgagattgaaacagaaattattaggcagcgtgaagctagaaggggttcaccaaagactgaagcccaagacaaagctctaaatcttatacgtgtgcgtgcagacttgcagaaagctattgacagtgaaaactatgctttggcagctggtctccgtgatgacattgccaaacttgaggttgagtctcttgcagtatctgctaaagctcttgcttatcaaaatgtgaaatatgcatttcgattagggcagaaagtacgtcacaatatacatggatatagaggcgtgatatgtggcatggacccggtgtgctgtgaatccaagtcatggatggagacagcaaacgtggataagctgtctaagggtccaaatcaacctttttatcaggtcctggttgatgtat

SEQ ID NO: 147389 - DNA, 767 bp, Zea mays
  unsure (1)..(767): unsure at all n locations
  Clone ID: MRT4577_65943C.1
ttgggtacctcgaggccggccgggaagctagtgtttgtttcatcttagcacagccagctgcccagctgctcagcttctcttccctcatagtcgaagacgtcgtagccatgtcatcccttctgaagctggtggtgtttcttggcctcacctttgcaacctcgttcgcaagaagtaacgatcccatgttcgcctacaacggtttctccaacaccaacctcgagctcgacggcacggcctccatcacggagaacggcctgctcgagctgaccaacggcaaggtcatgagcaaaggccacgctttcttcccggatccactgcgcttccgcagatcccccaacagcacggttcagtccttctccgcctcgttcgtgttcgggatcatctcggtgtacaacaaccttagcagccacgggctggccatgttcgtcgccccaggcaaggacttctccgccgcgacgccggtgggctacctgggcctcttcaacgcgcagaacgacggcaacggcaccaaccgcgtcttcgctctcgagctcgacacctaccagnaacagcgagttccaggacatcgacaacaaccatgtcggcatcaacgtcaacggcctccattccgtcgagtcccacgccgccggctttctaccgtgnatcgaaacggcacgtctgangtcgttcgaggacctgacgctctgcagccagaagcgatgcaagggtgtgggtggactacgacagcgagagcgcacggatcagctccaccgtagctcctctcaaca

SEQ ID NO: 147390 - DNA, 1821 bp, Zea mays
  Clone ID: MRT4577_65944C.1
ctcgaggccggccgggagcagatctcgcagaagcggtccctctccacagaactgcagaagcagcgcggcgcggccgttaactcggctccctcaccttgctgccccctccgcaggcgcaggcgctcgcttccgaattggaggtgccatttgccaggggcgtactccattgattccggctgagttgtgcaaattgtgatagaactttcccgagattcaagcccatacaatgcagggcatctctatatgcggttcagttgcctcaccccatggagcaaactgcagaagggcttgtgttgcaaggaacgatgtgaggctgccttgtgaagttaatgcagtaagccaggggttgcactctctgcattggtgtgcgcacaaaccgcaaatgaagaacaatggaagaagaatgaatgccgcagtgaaaactaatgctagatggttgtttggaggagatgggcgtagcaatgatgcaaggctggagcgcagtgagtctgctaatgaagatattttgatcttctacttccagatggatctacagacccggatacagtatgcattgaatatagaacagtttgatgtggcaaagcaattgagggaaaaactaaccgagattgaaacagaaattattaggcagcgtgaagctagaaggggttcaccaaagactgaagcccaagacaaagctctaaatcttatacgtgtgcgtgcagacttgcagaaagctattgacagtgaaaacgtgtgcgtgcagacttgcagaaagctattgacagtgaaaactatgctttggcagctggtctccgtgatgacattgccaaacttgaggttgagtctcttgcagtatctgctaaagctcttgcttatcaaaatgtgaaatatgcatttcgattagggctgaaagtacgtcacaatatacatggatatagaggcgtgatatgtggcatggacccggtgtgctgtgaatccaagtcatggatggagacagcaaacgtggataagctgtctatgttgatccagaactgctggttgcatatgtcgcagaagaaaatctttctgcagctgaagaatcagaaaagggaaggtttgatcacccctacattgagtttctcttttacggtgaggacacagctggggatttcattcctatcaagcagctccgtgagaagtatgaccagccacgctatgaagcttctggagatgaaagtgacaacgatggcaacacaaatagctgaagggcaagtgccttcgtgttgctagagttgttttggaaccattttgattcacctccaccaactcagatgtgaagtgctgaactatctggtacagcttcagacggcagatgtaagacaaggcaaccattggcgaactgggcatcctcagtaacctgcagttattctctgcatatgccgtccaaccttgcagatcgaaaattactcttttagagttttaccgtcaccaatcgattaagccatgcttgagagaagctacgtgtgccttgcttttacattataataccatcgataaatataaacgaaggaaagaaaggaagaaagaaagaaagaaaaaaatatatatccctatggatgttctgtgtatagttctctgagatctatctagttctgtactgtaccctctggtggacaattgtgcatatgtaacactggcaacttgtgtggagtctcgaataaattacgcgaagacttcacatgcagttgtttggactctgcattcatggaatcaatcatgtggaaataacattttttgttgactgctaaaaaaaaaaaaaaaaaaaaaaaaaaaaaaaactcgagaaggggcgccggtacc

SEQ ID NO: 147391 - DNA, 733 bp, Zea mays
  unsure (1)..(733): unsure at all n locations
  Clone ID: MRT4577_65945C.1
cgctcgaggccnggccggggccggggatcaacacaccaccaccaccagcagcacatcaatttagctagttccaggaacacgcgaggaaaccgcaggcatggccaacaaccgcatcttcgacgagtacaaccccgccgtcgaatggagccgctccgacgaggcggacgccgtccggatctcgctcccagggttcaagagggaggacatacgcgtgctggtggacagccacggccacctgcggacgcgcggcgagcggcacatcgccggcaacaggtggagccgcttccagacggacgtcgacctccccgccaactgcaacgccgacggcatccgcgccaagttcgagaacgacaggctcaccatcacgctccccaagagccgcggcctgctgatgaacgtggcgatcgccgtggtggtgctcctcggggtcaccgtccacttgtggcttagcctgaggaacgccactggaggcgcccgcgagcacggccacggcccacgggcagatgggggcccgtagaaatacgaccacgagctgtggacagggccggctgacctcaactgggggctgaccgcgtgagtacccaatacacgtaacccaggacactaaactggaaggggaaatgggaaataatccccgtacatccaattatacaaaagaggggccggtcccgaaaaaaaaaaaaaaaaaagctcccccggcccccgcccgctcccaaaatatgtggtccccccc

SEQ ID NO: 147392 - DNA, 189 bp, Zea mays
  Clone ID: MRT4577_65946C.1
ggttcctggagaaaaccaacctcttttggaccccaaaggccaagatggcttggcaccggcggtccagcctggggttgcggttaaacctgcagggccggcaaaaattcccctgccctgtaggaaacaagaaccgccggccaggcaacggtggtcctggcgttggccccgagaaaaaaggccggccccaat

SEQ ID NO: 147393 - DNA, 133 bp, Zea mays
  Clone ID: MRT4577_65947C.1
cctgaccaaacctgtgggggtcttcttggagtgcaactcctccccgatccccaaaatcgaacccaagtggaaaccctataactccggcctggcaataggtgggcgagccatacgccccaacgcctgtggtggg

SEQ ID NO: 147394 - DNA, 767 bp, Zea mays
  Clone ID: MRT4577_65948C.1
attccgaagaccaaacgacgctgcgctcccgttcccccgtcacaaacacacacactgcggagaggaccgcaacgcgagcccaccccaggccgaacgccgagagcgatccctcccgtccgtgttgccctttgcgctccgccttcctcctcttccaccccgtcacttccgtgccatccgcggctcgcctccccaccccccattcccgccgccccatgcctccggctcgaccgtagccgcccgacgacgaccgccatggccgccgattccggcagcggtgcccgccgttcccccccttaatccttgattgggatggccggcctggagatcgggccggcgtcgccgggctcggagggggcgccatcgccggcgtcgagcgtgggcgcctccgtggagcggcccgagcagtcgtcgccgcgggtgaccaagcgcccaggcctcgtcatgtccttctccgggaagcggctggaccagtcgccggccgggtcgccgtcgccgtcgccgtcgctgtcgcgcccggtgctggtcatgtcccactccagcaaccgcctcgaccagtcgcccgcgcgcccggtgctcgtcatgtcccgctccagcaaccggctggaccagtcctccccggcgtcgtcgccggcgccagtgaaggcgcccgtgctggtcatgtcaggctccagcaatcggcttgacagctcgcatccgtcgccgtcgccgacggcagcggccgccgctgcgcccttgctggtgctctccaactccggcaagcggatgga

SEQ ID NO: 147395 - DNA, 247 bp, Zea mays
  Clone ID: MRT4577_65949C.1
tcttgaccagcctgccccgatgcccaatgccgatgcggatgtagggccaaccgatgcagtcacgttgcacattgtgcctgataatgattgctttagggtgtcgtagatgacagagctcctatctcgtgctgtctccatgattaacatggagcgtttcgtatagtcatttgcgtcaagggtggtgatttgctctatgcgtgcaagtgaagctttcttaggttagtattggcgctgtttggactagtta

SEQ ID NO: 147396 - DNA, 363 bp, Zea mays
  Clone ID: MRT4577_6594C.1
gcatgcagcgacgtaactcggaatctggtcgaccttcggatctcgcattcagcgcacgcacggtgtgaaggaagggggacgcggaggaagatggggctcgcgttcgggaagctcttcagccggctcttcgccaagacagagatgcggatcctcatggtcggcctcgacggcggcggtacaaatcacaatctctaatagttaaagctcgggagatcgtcacaccatccacacatcggttcaatgttgaactgtgagtcaagacattagcttcatgtctggatgtcggggtcagacagatcgactcttggagcatactccagaaaccaggtctacttgtgtggcacatgactgacgtttgtaagc

SEQ ID NO: 147397 - DNA, 613 bp, Zea mays
  Clone ID: MRT4577_65950C.1
cgaggctcggccgggatcagagctccctatttccaagcgcgtcacctccgatcagagctccctatttccaagcgcttcacctccgatctctctctctccctccagtctccacgcaccgtcgctcgccgtgctcccgctcacccacgcagttctcggctccgtcctacgaacgaacccagccccagatttcttccagtcccaaacgactcgaccggatccatcctttcccgcgtttattcatttcaattcagattttggggggtggtgctttcttccttgtcctaatttggtcaaaatgggcagcaacaagaacggcgtttccggtgccgctaactcgaacgcggtcaacggcgcctcccctgcctgtgtgcccggcgtcgtgtgcttcctcgtcggctccgcgttcggcgccatggccgtgctccacgcatcctggctggcggaggtcggcggcgagtgggcctccgcggcgcggggggctgctcgacctgccggatcgatcggcgcccaccgcctgctcgtcacgatctcgcttctgttcctggccgccagcgtctggcgcctcgccaagcgctccgccgctgtggaggcgcgcgtcggcagcacggactcg

SEQ ID NO: 147398 - DNA, 1917 bp, Zea mays
  Clone ID: MRT4577_65951C.1
gtccatctcgtcaggggactgcaactcttttataggcgtctaccggcctacgcgccgggcacgcctctacagatccaggcgctcttctgctgcagcgccgcctctcgtcctcccggcgtcatcgtcgccgccctgatctccgcaggccggcgtgtggcggagatccatccgtgcttgaactgactccttccttagctacaagtacctattatcaaccatgtttggacgcatgccaaggaagagtagtaacaataccaagtattacgaggttcttggtgtgtctaagaccgcaagtcaggatgagcttaagaaagcatacagaaaagctgccataaaaaaccatcctgataagggtggagaccctgagaagtttaaagagctgtctcaagcttatgatgttcttagtgacccggagaagagggagatctatgaccagtatggagaagatgcccttaaggaaggaatgggaggaggcagcagcagtgatttccatagccctttcgacatttttgagcaactttttccgggttctagcacctttgggggtggtagctcaagaggacgcagacaaaagcgtggtgaagatgtggtgcatactatgaaggtttccttagacgatctgtacaatgggacaaccaagaaactatctttatcgcggagtgctttgtgctccaagtgcaaggggaaaggatccaagagtggggcatcaggaacatgccatggttgtcgtggtgctggaatgagaacaatcacaagacagataggccttggcatgatccaacagatgaacactgtttgccctgaatgcaaaggatcaggtgagatcataagtgacaaggacaaatgcccaagctgtaaaggaaacaaggtagtccaggagaagaaggtgttagaggttcatgtggagaaaggaatgcaacataaccaaaagattgtattccagggtcaagctgatgaagctcctgatacggttacaggagacattgtttttgtcttgcaacttaaagaccatccaaaatttaagaggatgtacgatgacttatatgttgagcacacaatctctctcaccgaagcattgtgtggcttccagtttgttcttactcatcttgatgggcgacagcttctgatcaaatctgaccccggggaggttattaaaccaggtcaacacaaggccattaacgatgaaggtatgcctcagcatggccgtcctttcatgaagggccgtctgtttgttgaattcaacgtggtgtttcccgagcctggtgcgctctcccctgcccagtgccgatcgttggagaagatccttccgccgaaaccagggagccaactgtcggacatggagctggaccagtgcgaggagaccacccttcacgatgtcaacattgaagaggagatgaggcgcaggcagcagcagaagaagcaggaagcctacgatgaagacgaggaggaggatgctcaaccaagggtgcaatgtgcccagcagtaaaatccgtgttcgttggaactgttctccaaaagtttcagcaggattttttatccatctgatcatctcgattctttttggcaaaaatataatcgttttataaactttaaactgttagttccatcctagtgtcagggaaaaaatgagagcccggaatggcatgttccttgtttgaactgcaatgcgtgattggtgttagttaagctctgctccatgttattttgttgtacccgtgaaaaaggtatcatgttcatggtgtgctactatttttgatgtgtaagaaacattgagcttgctggtagtgatgatttgtgatgcaccctggggtgctggctcaaaaaaaaaaaaaaaaaacccgcggccaaaaaaaaaaaaaaaaaaaaaaaaaaaaaaaaaaaaaaaaaaaaaaaaaaaaaaaaaaaaaaaaaaaaaaa

SEQ ID NO: 147399 - DNA, 179 bp, Zea mays
  Clone ID: MRT4577_65952C.1
gcccagcgcttctaaaccctagcgccgtcgcaatggccactgctacgagaaacatacatagtgcgtagtgagtacaatcatattggggtacaaaaaaaaactcggcatagatccatgtgatttaccggtgaagacacaatgacagcttgatcaccattctccatagaccgattatggat

SEQ ID NO: 147400 - DNA, 621 bp, Zea mays
  Clone ID: MRT4577_65953C.1
actccctcgtgcgacagatcctactccggcgatcctactccggcaagagaccgccgcccttgtggccagcgtctccatcatcggcgtccgcgttgtccagggctccgtcaagctcggcgtcgtctagggttccggcaagcccggcgtcgtctagggttccgccaagctcggcgtcatctacgtccttgtcaagctcggcatccacaaggtcaaaatgcatgtattgaaggaaaaacaatggatactgattgttgctaaattcagagccaaattgattgatattattaatccgtactacagtggtgatacatttctaccgacaattagttcactaatttacaacttcaaggctttgttcgctgccacatacggaaatactaattcttttaacataggaaattttgagtcaacatttgtaccagctcccaaggtcaatttcaggtatgactcagggattttccttcttcaatatttgagcaactacagaggtctcggaatggagggtttccctaatgcaagtaccaccacaattactccattgaaagcacttttttcccttctttgtgattcttcggtacataacagaaattaaattgcattttattttaaaattgaaggatg

SEQ ID NO: 147401 - DNA, 485 bp, Zea mays
  Clone ID: MRT4577_65954C.1
agacatacacatccacaaaaaaattatggagcaaacacgggacaaccctcggggttggttctactttggaaaggttatctaggccaaaaaaattcaccagctggttgggggcataaaaaaaaggaggggttaaagaaaccaggaagggtacatttccttacacaaaaaggggccccatcaggtgggattatttcggggggaagaaaaaggaaactaggacaggggcaaaaagggtgacacattatgcaaaagccggcaacaggtccctttaaggtgggtgggggatcctccgctccaactttgggctgaaaggcctgaaaagcccctggaaagggcaagccgcaaaatccccaagggcacaaaaaggatgcccttcgatttgcttcgggaccccaagaagcatggaaatttcctccaagttgggggaaccaaacttgggcctttccatgatcatccagagccagggggggcccctctggggaagg

SEQ ID NO: 147402 - DNA, 456 bp, Zea mays
  Clone ID: MRT4577_65955C.1
caaagaagaaaagggctccaaggccattacctgaatgttttagggagcaacatcccttcccgaaaaaaacgggagccccacaccctggtgaacaaacacccccaccacttcaggacccttaaaacccccccctccaacaaaaaagagcagcccataacattcctcgaggccacgcctttcttcctgaacgcaaaaagaccttctccagtagcgcaagggaaaatcaactggggggcggctccaccaactcccgccccctataaacggcctacactttgaaagccactctccggccccgaaaagaatgcacatccaaatggcaaggcaaaagccacacacctcggagtgctccctctaactgattgaccacccaacctgtgaccgccccacccatcacttgctgtggggctgtccctccacggtcaacttcacggagctcttcttggggccgaactt

SEQ ID NO: 147403 - DNA, 310 bp, Zea mays
  Clone ID: MRT4577_65956C.1
gctagtgcaaaacacactatcccgtccacccgcataccaaaaatgccaacctcacacggggggcaccaaactggggcggggggcgtaccctgaatcatccccacctgcttgcgacgggatgctccagggctacatctccattcaatgccacgcgccttgcatgcggcacgcgtccgccaaacagacacggcgcccacaatcacttccatgcacggcctcaacggcgacaccttgttcctgttgatgcatctactcttccgctttaacctgagcgcccccgccatcgcgcttactgcgctcacccaccacc

SEQ ID NO: 147404 - DNA, 295 bp, Zea mays
  Clone ID: MRT4577_65957C.1
agtgaacacattgggacgttgatcgattcgggactagcttcaacaaggggatcaagaagtcccatagtgctgcgaataagaatggtgcggaagcagaggcaaacagtactgctgtggctgatgatgatacggtaactgtgggacatgtgataagacttgttgacaatgacgatgcggagagtgaggaacctgtgaagagcactacagtggctgagcaggtggatgagtatgttgatattgtggatgaatgccaagcagccacataccaatccatggagatcgagaaggacgctga

SEQ ID NO: 147405 - DNA, 364 bp, Zea mays
  Clone ID: MRT4577_65958C.1
gcccgcaggaagaacaaaacaggcgccaccggaacagcgaccaccactccgcgggctacgccgccatcgggcacagggccgacaacaacccgaaggggccccacatccgagagccggccagaggctacaggaggggggacaacaccatgctggccacgcacggcggcatcgcgctccgccgcgaggccatgacgcggcccatcgccatccggaagcgcaggcgcaacgcccacaaggcgacgcggcggcaacggctggaagcagggagcgcagaagggaccaccacgcccggctggtgccgacggaggaacgcgagagagggacgcgacagcgaagggctcagggcggcggacagacctcagag

SEQ ID NO: 147406 - DNA, 257 bp, Zea mays
  Clone ID: MRT4577_65959C.1
ctgtaacagggggactaactttctttaaatttgagttttgctttttacattacaacagcactacaacagttgagttcctttggcagtagacgcctcctagctccgctacttccattgaacaaaacattggtacagatttggattttctttattacccaaaatgggattggttgtttgattgaaggtttaaaatgcgcagcaggtgaataaaaaatccatgattcacgaaaaccttcccccagaaatcaggttatatt

SEQ ID NO: 147407 - DNA, 250 bp, Zea mays
  Clone ID: MRT4577_6595C.1
catcatcctttcttctttggcaaagaaaaaactaaaccaacttgcggttttttgcctggcaacccagcccggaaagggggcccctttgtcaaagccctcacatgtgcaaacaaaaatagggcccccccaacgagggtcagctacaagggagggttcataaaaaaaaaccggtcgagtggaaagaattctacttgcggcagaaaataaccccccaaggggtccccccgccctatgggataaacaaaccgtg

SEQ ID NO: 147408 - DNA, 402 bp, Zea mays
  unsure (1)..(402): unsure at all n locations
  Clone ID: MRT4577_65960C.1
tttaattaagttaaaaatttttcaagttttttcatctagttgagtaggggtgctyytcctatttwtgaatattttatgyatwttyaggagctagtcagaagagakatatatacagacacacaggggcttcagatacatctcwtttccaccactatgtgtaaaaagattattatcgtaantaacaactyaaaaagtgtaaaaanttaaagaanatnctaatttgctgagstgcactgtacaatagaactaattaatatctygtatgatctayagaatagacatagcacatctgatggtatcatcntccctgcctctccaggctycatcctactaacagaattttaacaagccagttccttgttaaaaaaacacaataagaatttaatcttctcccttacttyc

SEQ ID NO: 147409 - DNA, 434 bp, Zea mays
  unsure (1)..(434): unsure at all n locations
  Clone ID: MRT4577_65961C.1
ttctacacggggggagaggccgaagaagaagcccttcttgaaacgcggtgcgccagaacggcgatggaagccaacgatcacttgggcaggaagaggaagagacactcgccagatctgcacacacacgaagggaatgtaatggagcgcatttgcggctgttttttggaccggggtgttgaacancaagagctggtgccactcttactatagtggacgacaggacccccagggggacaatgaaagctatgtatgatgcgcgtctgcgcacgagttctggaatgaccacaccccactcccaatacaatccctgccgggcggaagagatcaaattactcgatagataagcgacacacgttccttgaccaacccccgccccttctatggcctccaattcattatgcaatgcttttttcgggcccccgccaaaaaaataa

SEQ ID NO: 147410 - DNA, 323 bp, Zea mays
  Clone ID: MRT4577_65962C.1
cacgcgtcagcgaacgcgtgggagaccaataagcagcatagaaagtggaatacagtagcaacaatagagcaacaatggcggccaagatattttccatccttaagctccttgctctttctgcaggtgttgcttacgccactatttttccacaatactcaaagctccgagtgctgcccgtcgtcattcatacattccatcaatgagtgcttgattatgtgaacatgcagctctttatacctacaggttcgtgctcgcaatcgcaccaagcaggccagtttcagcagacccgttcttgtaaaatgccgccagccccatctttggtc

SEQ ID NO: 147411 - DNA, 455 bp, Zea mays
  Clone ID: MRT4577_65963C.1
atgcgagggccgccctttttttgggtcatgtgaagttgaaggaccgttccatctcgttgtccggttttttattgtacagtaatagctaatatgataatgataataattacatttctaaaaaaaaaaaaaaaaaaaaaaaaaaaaaaaaaaaaaaaaaaaaaaaaaaaaaaaaaaaaaaaaaaaaaaaaaaaaaaaaaaaaaaaaaaaaaaaaaaaaaaaaaaaagaaaaaaaaaaaaaaaaaaaaccaaaaaaaagcaaaccaacctgccggctcttaaacttggttctttccaaacacaaaaactcgagtcccctggcccgcttccccccaacgggaaaaacccgggaaacccccccgttttaaaaacccttaaaggaccagccccaatttcccccctttgccaaatttgacaaaactcccaaaaccccactccctaccccccattgccaaagt

SEQ ID NO: 147412 - DNA, 273 bp, Zea mays
  Clone ID: MRT4577_65964C.1
gggaccctcgaggccggccaggggatgcgatcataccagcactaaagcaccggatcccatcagaactccgaagttaagcgtgcttgggcgagagtagtactaggatgggtgacctcctgggaagtcctcgtgttgcattccctttccaaaccggcaaatcctcagatccgccccctcctccgcctccgcctccgcctcctgtaccctcacgccgtgcttccacagccctcccacctccgaatccagatccgccgccaccaactcctgcttctc

SEQ ID NO: 147413 - DNA, 1207 bp, Zea mays
  Clone ID: MRT4577_65965C.1
ggccgggatctgctacaggacggcacccacacacagtctcatgtctcaactatagtctccactcccccgcctccacgcctccggctccggccagccgcagtaattgcagcgcagcccaagccaccaccaccaggtaccaggcaccagccaaaggcgcggccttcgaccccgcgccggcgtcatggccgcggacgccaccgcttccccctccttctcctacctcccgccgccgctcccgacctcgcacctggacatccaggccgccgtcgccgaggccgccgagctgcgcgcgctccacgccgcgctcctccagggcggcggcgcctccaatgccgggacctacgccagcgctagccggagccccgccgtcatccgcctgccgccggcgctcccccggccggcccccctgcccacggccgccgaggactaccccgtgtttgccccgatgtatgatgaggagcccttgggcggaacgaactgcattcgtcaagataacaggagcctgtccgagaactggagcggcgtcggtttggaccatgatggcctagaggacgacgaggtggccttctcggatttcgacaaccacaacaccttctcttcgtcgaacagcgagctccatctctcttcgtcgaacgagcacctgcggaacagaagggcgtgcagaaaccatccgtccttccttcaacccaccgcccttgctgctgacggtttgatcaggtcaaccagcaggatgactgacttgactgaattcaaggtcgttacgacgtgcaatacctgcaagcctgcgacgatcaatcgtggggacgacgccaagtccttgaagaaccttgattgcaccgtgccgctgtcaaactaccaccccactgtcgccgcctttccccggacaaggcacaaaggaccacaacatatcctctcctggttgctaccaaagtcaaagaggaagccgaggccagatgtgtcgccgaccaccgtggaatgtgagaacatgtcgcagcttctcaaggactggggcgtgttctcgctggactccctgaagaaagaggttgtcgaggccaacgagcacagggacgccgccctgcaagaagtatcagggatgaaactatcactcggagaactgaccaccaagatagcgagcctgggagcgtactgttcggagctgaagaggctctaaagcagcgacagcgcgaagagatgcagctctcactcg

SEQ ID NO: 147414 - DNA, 486 bp, Zea mays
  Clone ID: MRT4577_65966C.1
tcgagccggccgggagtcgatcgcatacgcttggcccggctctattgagattgagggagagagagttgacctcaggaggggtgcgaaaagcacgatgtcaatgcttccccacgccccggcataagcccgagctgccggattcacaacgaagataacccaaaagtatccgaagaaaaataaccatttaattactgctatctcgaaaaatcaaaccaagaaaatttgtcaaaaggggtccacaaccattcgcaatttcaaagaaacctctggattctcgctgcattccaaaatgcccaacggcaaactgttggacgccgcccccagatggggccgcctgggggttctcctggagcagggcagaacattgtcacaggtgcctatgttcccaccgaggacacctcttacaccccagcagatgcaggagcagcagcttcagcatcagcaggctcagttgctaaacttcagtggccaaacggttgctacacc

SEQ ID NO: 147415 - DNA, 537 bp, Zea mays
  unsure (1)..(537): unsure at all n locations
  Clone ID: MRT4577_65967C.1
gtaaggaagggagttggcaatggcggatcagaaggtggctcagttggggcctggagctgcgtgctgcggctggaaccactgcggccggcgcctagccgccggcgccgtcgatgggtccgtttccgtctacgattctcagccgtctccctcctccaagtggcaggcccatgagcatgccatagtggctgtcgtctggcttcctccggactacggtgatgctatagcttgtgtctgtgctgacggtacactgtctttgtgggaggagattgctgaagatgatcaacttccaatctggagaaaatgtaaagtctttgagggtggcagttcccacatcctaattgtacagtttggtttgctgctgtcaagtctgaaaatggttattgcatactcagatggtcaagtgaaagtctatgaacttttggattcgttggaattggacaagtggcagcttcaggcagagctacagaatattatcgatcctgtttccagaattgngaagccagcatgcatttctgcatcaattgcatggagtccaag

SEQ ID NO: 147416 - DNA, 363 bp, Zea mays
  unsure (1)..(363): unsure at all n locations
  Clone ID: MRT4577_65968C.1
ctgggttgcagaactgtgccttggtaaacctgtctctattacagcatgttgccatacatctatttaagtgcataaggtctttgggctatcaagatccatcgaccttaaacaggaatgcttagcacgtttaccatacgtttaaaatccattctttatcaatcagtccttttatagctttctaagttcttattgatggctaatatacaagggttaatttttaatattttaattgatttctttaatcagtttctcgacttgtatttattaaatactcagactcagtattacctactcaatgccttttaaaagatagttataatggagaaaaatgcttaaananaaaatggttacttctgtatatta

SEQ ID NO: 147417 - DNA, 921 bp, Zea mays
  Clone ID: MRT4577_65969C.1
ttgggaccctcgaggccggccggggcagacttgctcgtaagacaagcaagcacacgcgtctcgtagtactgggggagaacgacgaagcaaacaccaccaagataatgacgtccaagggaacgaggccgtggagcaggctctccgaggccgagaccgccgtgaaccgcgccgtcgccgggagccgcgtggggagatacttcaagctggacgcgcgcaagagctccttcaccaaggagctccgcgccggcgccgccacgttcctcaccatggcctacatcatctccgtcaacgccgccgtcctgaccgactccggcgggccgtgcacggtgcgggactgcacccccgtgcccaccaactcgaccgtggcggccacgccgcctgggccggagtgcacggtcgccggggctaataacccggggtaccagcagtgcctggcgcgcaccaagagcgacctggtcgtggccacggccgtggccgccatggccggctccttcgccatgggcctcttcgccaacctcccgctcgcgctggcccccggcatgggcgccaacgcctacttcgcctacaacatggtcgggttccacgggtccggccccatcggctacagcacggcgctggccgtcgtgatgctggagggcctcgttttcttcgccctgtccgtcgtcggcctccggtccaggctggcgcggatgatcccgcggaacatccgcctcgcctcggcggtcggcatcggcctcttcctcgccttcacgggcctccaggcgcaccagggggtcgggctcgtcggcgccagcccgtccacgctggtcacgctcaccgcctgctccgacgtggacacggtcaccggcgcctgcctcggcggcaccatgcgcagcccgacgttctggctcggcgccgtcggcttcctcatcacggccacgt

SEQ ID NO: 147418 - DNA, 398 bp, Zea mays
  Clone ID: MRT4577_6596C.1
agccttccgtgtttactttacttccttggggttggctaaacctttggagtaagaagcacttgaaggttaaactcttccacattcggggattgttaggcctatttccagcggttaatattttgtcccaaattcaaagttcagtgattaaatgaatgcattttcctctcgttcttaaaaggttaataaaaattggaggggtggcccttttaaaggatccaagtttagatggccttgcatggaacgaattagttattttttgggataacttaagtagagtggcctggccgacgttttacaaggtaataattggaaaacctttggcgtaaccgaagtaaatcactttgcagaaaatccccttttggaaggttgggctaatacagaaaaggccggtgccatta

SEQ ID NO: 147419 - DNA, 292 bp, Zea mays
  Clone ID: MRT4577_65970C.1
ggggacccattgatttgtttattaaaacgggaccccaattttgggcctggcaacatttaacagcaaaacaaggccaaaataaccctactttaaaaacgttgcagttcacgacttttggtccaaatcgaaatccgtaaaaaagcactggtctattttgtccccatgaaaaaaaaaaaaacttcagattgatacccttgttttttgacggatgcttttacaggtttttttggcgcataataaaaaacttttggagggatcaaagacattccactttctttaaaaaacccctttc

SEQ ID NO: 147420 - DNA, 684 bp, Zea mays
  unsure (1)..(684): unsure at all n locations
  Clone ID: MRT4577_65971C.1
ttgggtccctcgaggccggccggngaactgcttataagcagcagctccggatcgcgttccccgggctcgtacgagtaggaccaccacacacgcgtccgaggtcgaagaacctcgacacatgtaccagtcgagaaggagtacggacgacgaagtcaacatccaagaagatacaatggcggcgacgtcgtccaaggcaacggggccatggagcaggctctcggaggccgaggccgccgtgaaccgtgccgtcgccgggagccacgtggggaggtacttcaagctggacgcgcgcaagagctccttcaccaaggagctccgcgccggcgccgccacgttcctcaccatggcctacatcatctccgtgaacgccgcaatcctgaccgactccggcggtccgtgcacggcgcgggactgcacccccgtggccaccgccaccaactcgacgaccgcggactgcgcagtcgtcggggctaaggctaacccggggtaccagcagtgcctggcgcgcaccaagagcgacctgatcgtggccacggccgtggccgcgatggccggctccttcgccatggggctcttcgccaacctcccgctggggctggcccccggcatgggtgcccacgcctactttgcgtacaacatgatcggcttccccggatccgggaccatcggctaccgcacggcgct

SEQ ID NO: 147421 - DNA, 462 bp, Zea mays
  Clone ID: MRT4577_65972C.1
cctattgaggggaactaaaaacccttggctgatgatgaatgaccaacttatgtcaaactactgttgaaattgtacagagagtgccaactgtaggagatgatcttataggcaccaacctcttcatggtctccaattccgtatatgagacgacctgacctgctctagtcttgtaggtgaaccaaatcggatctgtgaccgagagtgtcgaagctgataacatggacaaacgctccggatggtgagtgatggctggccataggtgagtctagacacatgacaccttcattgctgacctctcaggtggactgtctacggtacacatcacaatgggagctgcttgacgatctgagcgcatggccaaatacaacctgctgctcaggatctaggaagagctcggtgatgcctcggtctacgccggagcaaagttcaggtcaccagtgcagccctactaagataggaaga

SEQ ID NO: 147422 - DNA, 109 bp, Zea mays
  Clone ID: MRT4577_65973C.1
gatcttaaaggcactactatatgtttctgtaattgttaattttagtagggtatagtctcaccacattgttattctccatgttagattctatcgatcgatgctgatgtta

SEQ ID NO: 147423 - DNA, 449 bp, Zea mays
  unsure (1)..(449): unsure at all n locations
  Clone ID: MRT4577_65974C.1
ctcctcctcccccacaacccagagggagggggggaggcagaataaactccaccgcacccgcttcagtcgtaacccgaaaaatgtagcggccgccctcacgcacgaagggccacataagaattaccacttaccggcccacatacacgtatctgcaactacccctacntcaaattgggggggggggggaaaaaggccattacccacaacttgtaccaaccgccgcccccgtgtactctggaactgtacctagaatccctatccgcttaggttctaacaactaggctaatatgctgataatgacaacaagaatacttgtatcattgcgagctatgtcctcctggcgatccacaacaacaatgagcttgagaaaatgcaagaacgatcagactatcgctcatgccaagacctccccaatatcaaccctcatctactgcccaataagacgaccc

SEQ ID NO: 147424 - DNA, 368 bp, Zea mays
  unsure (1)..(368): unsure at all n locations
  Clone ID: MRT4577_65976C.1
aaaaaaaattcttttttttttaattattttttttgacccccaaaaaacccatttagagaagaaacaccttaacccctataaaaaaaggcccccccaaaaataggggccgtggaaaaaaacggtgggttaatccaaacaaggaggcttgaacgaaaaaaaaactaggcattataaaaaggagggccatttctcccaaacttgctaaaaaaaccccacccacatttttttggcataaaacccccgaaggatgtaaaacacccatgggaccaaaggccccactaaaccaccatttncaaagcccccctaatagctccacttaacaaattgcaatactgaaggccttggcaagtgtcagggagctcaacgaa

SEQ ID NO: 147425 - DNA, 284 bp, Zea mays
  Clone ID: MRT4577_65977C.1
aacaaggttaactcatccacaatagtattcatgtaagcaatcaaataacaactcttgtgaacgaggcttgacacatacggacaaacaaacacttatgctggatgtactcaatcaggttagttgtagcctggctgagctagatcaagctagacacgcctaggaagcaaaccaaacacgcctaacaatcaaaaaaaaaaggcgatgaatgacctgttacatattatctattgtagaacaatattttgacaccgaaattgtgctttaaaattatccttacaacaacc

SEQ ID NO: 147426 - DNA, 369 bp, Zea mays
  Clone ID: MRT4577_65978C.1
tttttttttttttttttttttgtttggtttttttttttttttttttttttttttttttttccccccggtatgctgaatgcttgaatttgaaaaaatcaataaatgggcccaaaaaaaaataaacaacaccctgttaaagtttccaaagagcccatccaaacaaaaaaacttggtccccatttaaaagcacccacagccaaatgctggcctaaaaaccaccactcttaattccttcctcgctattaatctactaacaagccagttttgttggaaaaaaaaatttttcctaatgctacaaccatgccctgaaaaaaaataaccttgctgggatcgatagcacctgtagcaaacaccgagtaattggggtac

SEQ ID NO: 147427 - DNA, 307 bp, Zea mays
  Clone ID: MRT4577_65979C.1
tcggccaagtgccacccccgccatggcaaggacatggcatgcttgcttatgtaccggggtgatgtggttcccaaggaccttaacccttctttggccacaatcaaaaccaaacccaccattcaattcggggactggtgcccgacttggttcaagtgcgggatcaactaccaggcttccaacgttgttcccggcggggaccttgccaaggtgcaacgttccctgttccttatcttcaacttcaccagtggtgtggagggttttttccgcattgaccacaagttcgacctcatgtaccccaagcgcgcct

SEQ ID NO: 147428 - DNA, 594 bp, Zea mays
  Clone ID: MRT4577_6597C.1
agcagtggtaacaacgcagagtactttttttttttttttttttttttttttttttctttttttttttttttttttttttttttttttttttttttttttttttttttttatcttttctagccaccatccattttgaaggggaatctacaacacaagggtgcaaaaatatgacattttttggttataggaccttaaatccttaaacaaaaaaaaaaaaacaagaaaaggcctttgtttcattaaaaggaattttttgacaggccatgttaataaccaaaactggatgggcctgtcatttttgacaaaacaaatccctttttaaaaaaacaagagttaatctacatagctgtccaaaaaaaaaaaaagactttgatacaccaggttcaaagtcggaaaaaatgtcattgtaaaaaaaaaaagggggtattgatcttcaggattgaaacaaaccccaatccagggcagggtgggaaaaaacttcataatccgggggaccatttacaaagcttttcactgggtggatcccttttaacaaaaatgggtggaagccatcgcttctaaagggaagcaacttataaaacactaacatcccaa

SEQ ID NO: 147429 - DNA, 389 bp, Zea mays
  Clone ID: MRT4577_65980C.1
gtccttagtccctcacacactcactatacactgctctgctgcagcaagaaggaagaagctagcgcctccctctcgttgtcagcaatggccaccaccgccgcgtccagcctcctcaagtcctccttcgcgggctcccggctcccttcggccacgcgcaccaccaccccgtcgtccgtggccggggccaccccgtgcgccggcggcggccccatccgcgcgtccatctgctactcccccaccccggcctacgacctgacgtgcttccggttcagccccatcaaggagtccatcgtgtaccgggagatgacccggcgctacatgacggacatgatcacccacgccgacaccgacgtggagatctgtggcgccgggtccgccgccctgtcctg

SEQ ID NO: 147430 - DNA, 349 bp, Zea mays
  unsure (1)..(349): unsure at all n locations
  Clone ID: MRT4577_65981C.1
gcaacanagaaagcacaagagngnaccaacaaaggcagccaaaanannnngccnccnnangcnccnnggncnnncngcaagagcagcnacggcgaccannnncccgcaaagcncgcaagcnccnanagcnncccnncnncccccgnaccncncaccagcgggggcggggggangngaaaacccaanncnncaacccnacagganccaacaggcaancgcagcnggcancnnaccnnnancacccnngnncccccaacaancancagcccnannacaacagnnaccnnnggngcannnannggcacaaaacaacagggcacaacaaccacaacaacnngngcnagcaaac

SEQ ID NO: 147431 - DNA, 459 bp, Zea mays
  Clone ID: MRT4577_65982C.1
ctgctctgctttagcaagatggaagaagctagcgcctccctctcgttgtcagcaatggccaccaccgccgcgtccagcctcctcaagtcctccttcgcgggctcccggctcccttcggccacgcgcaccaccaccccgtcgtccgtggccgtggccaccccgcgcgccggcggcggccccatccgcgcgtccatctcctcctcccccaccccgccctacgacctgacgtccttccggttcagccccatcaaggagttcatcgtgtcccgggagatgacccggcgctacatgacggacatgatcacccacgccgacaccgacgtggtgatcgtgggcgccgggtccgcgggcctgtcctgcgcgtacgaagctgtccaaggaccccaccgtgagcgtcgccatcgcggagcagtccgtgttccccggcggcggtgcgtggctgggcgggcagctgttctc

SEQ ID NO: 147432 - DNA, 350 bp, Zea mays
  Clone ID: MRT4577_65983C.1
ctgagtccctcacacactcactatacactgctctgctgcaacaagaaggaagaagctcgcgcctccgtagctatcgttgtcagcaatggccaccaccgctgcgtgcagcctcctcaagtgctccttcgagggctcccggctgccttcggccacgcgcaccaccaccccgtcgtccgtggtcgtggccacacctcgcgccggcggaggcccgatccgcgcgttcatctcctacccgaacccgccctacgacctgacgtgcttccggctcagccccatcaaggagtccatcgtgtcccgcgagatgacccggcgcttcatgacggacatgatcacccaaaccgacaccgacg

SEQ ID NO: 147433 - DNA, 135 bp, Zea mays
  Clone ID: MRT4577_65984C.1
gtagcgcataaggcacacacttgcagccatggcgaactccacgcccagcctggcggtgagcgacgagtgcaagagaaatgttccggatcttaatgcgcgggggagcttccggttcatcctgttcatgatcgacta

SEQ ID NO: 147434 - DNA, 341 bp, Zea mays
  Clone ID: MRT4577_65985C.1
tctgcttagtccctcacacactcactatacactggtgtgctgcagcaagaaggagagaagctagcgcctccctagctctcgttgtcagcaatggccaccaccgctgcgtccagcctcctcaagtcctccttcgcgggctcccggcttccttcgggcacgcgcaccaccaccccgtcgttcgtggccgtggccaccccgcgcgccggcggtggtcccatacgcgcgttcatcttcttccccaacccgccctacgacctgacgttctttcggttcagccccatcaaggagtccatcgtgtcccccgagatgacccggcgctacatgacggacatgatcaccca

SEQ ID NO: 147435 - DNA, 281 bp, Zea mays
  unsure (1)..(281): unsure at all n locations
  Clone ID: MRT4577_65986C.1
tcctcccctgnttaacattaacaaacactatctatataaatccaagacaccttacctagctgctgcccccaaccttaaataattttctcctcctctctaacaaacaactatctttgtcttcgcttcctcccttcctgaatttactaataatatataacatccatttactgctaacaaccatttctcaatgacatcttcattactcctccttcttctactgctacctctccttttgaccttttaaaatactcttattattgcttctcaactctttcatttca

SEQ ID NO: 147436 - DNA, 288 bp, Zea mays
  Clone ID: MRT4577_65987C.1
gttagttgggacacttaaattataagattggcaagcacggacgcccgtcaacccgtctggacactcttacaatgtaaaccgtcacccggggtttaagcgaaagcacacgttgattcactggtaggtacaggaatactgttctcgctatctcagggaggaggctgcagatgctaggagtcatgcctggtatgcacaaaatcatttattgaacatgtgctactaagtgccacatgtaactccaacttttttatacaaatgtaactgtgcatcatgactgtttttagttga

SEQ ID NO: 147437 - DNA, 433 bp, Zea mays
  Clone ID: MRT4577_65988C.1
tggctgcaatacctgagtcctcagtccctcacattctcactatacactgctctgctgcagcaagaaggaagaagctagcgcctccctagctctcgttgtcagcaatggccaccaccgctgcgtccagcctcctcaagtcctccttcgcgggctcccggctcccttcggccacgcgcaccaccaccccgtcgtccgtggccgtggccaccccccgcgccggcggtggccccatccgcgcgtccatctcctcccccaacccgccctacgacctgacgtccttccggttcagccccatcaaggagtccatcgcgccccgcgagatgacccggcgctacatgacggacatgatcacccacgccgacaccgacgtggtgattgtgggcgacggtaccgtcggtcctgccctgcgcgtaccagctgtccaaggacccca

SEQ ID NO: 147438 - DNA, 751 bp, Zea mays
  Clone ID: MRT4577_65989C.1
tcgccgatccccccgcactcactctgcgttgaatgcatccattcttccgtctccattgagatcatcgccactcccaggggcgggcagcaaggaagcaagccttgcttggtgcttggtgccattgtgcaccgcccgagcccccaaacaccgtgcactttttcatgcgtctgcccttgccattgccatcgccaagccccatgcgccgccgccacctccccctcccccttccccttcttccccttgtcttactccacctcctcttcgcggcgtcctctggctcgccttcgtcagaggtcgccttcttgacggcctggctcaacaccacggccgcgcgcccgccggactggtcgccggccgcattgtccccgtgcaactggtcgcgcgtctcctgcgccggcgggacaggcgagacgggcgccgtcacgtccgtgtccttccagtccgtgcacctcgcggtcccgctcccggcgggcctctgcgccgcgctgccggggctcgtgtcgtttgtcgtctcggatgccaacctcacaggcggcgtccccgatgacctgtggcggtgccgccgcctcaccgtgcttgatatcagccggcaccgcgctcaccggcttcctcccgtcttcgctcgggtacgccacggggctcgagaacttggcgctcaactccaaccagctttccgggcccctcccgcccgtgcttgcggcgcttgcgcccacgcttaggaacctgcttctcttcgtcacccgcctgtccg

SEQ ID NO: 147439 - DNA, 360 bp, Zea mays
  Clone ID: MRT4577_6598C.1
tttttggttttttttttttttttgtttttttttttcccttttttttttagtgtaatgatcttttatcgggccaagcggggcggggacactaaacccatcaacattcgggtggacggaacccaaaaatccctccaccgaagggcccaactggcctttctgggtccaccgctcgattgaccaccggaccgagggagtacccctggggactccgcctgcaggacacacgattataaagggccctgaaggggaacaaggggggaccccacatctctagagtggtaaaggggggaacaggttttgggggcccgagtttgggctcacaaacccggaatatttcttggtgccaagggcccaggggag

SEQ ID NO: 147440 - DNA, 287 bp, Zea mays
  Clone ID: MRT4577_65990C.1
aagtcttgttcggatctcactgacgccagccttgctgccataggccgtgggtgcgggaggcttgcgaagttcgccatccacggctgtgatctggtcacgccagctggggtcaggaggctagcaactgcgcttcggcccacaatcaaacaagtcagtatcttgcactgccggcgtctgcacacggcagcatgcctcactgctctaagtccgatccgtgatcgcgttgagagtcttgagatcagctgcgtctgggaggaagttgaacagcctgagagtgtggccaacgg

SEQ ID NO: 147441 - DNA, 200 bp, Zea mays
  Clone ID: MRT4577_65991C.1
attatcacccacgcgggccccgctatgaaggggggtaggacgaaatgggcaggctgactttgccccacacgcaatagcccaccaggacaggaagcccatacaacacctggacagaaggcatgcacagagacggcgacggagaactacacaggcgcggcgggggcgaaacagccaacgctgctgaaaggtgcgcacaagac

SEQ ID NO: 147442 - DNA, 509 bp, Zea mays
  Clone ID: MRT4577_65992C.1
acctcagccaaaaaagtaataatcagactactgtttgttcggcacaaggtgtctgaatccaatcttgatctacagcttcagatctcaaagaacctactgttcatatatttattattcccacactatagctccgtttggagctattgagaggtcctacgtccgcagactcaaaattgtatccgcctgacaaccaactcatcatcgaccaaaatacagtaaagatgaacttgcaccgccaaaaacggaaaaaaaaagtccctgctttgatgtgtatcatgggtgtgatgtcttagtaatccattccacccatgccaccacccattgctggagccggcgcctcttccttggggatctctacaattatggattccgtggtggtcatcagggacgacacgctagcagcatccaccaaagcagttctgatcacctttagcgggtcaatgataccagccttcaccatgtcaacgtattcacctttagcagcatcataacccaggtcagtattttct

SEQ ID NO: 147443 - DNA, 252 bp, Zea mays
  Clone ID: MRT4577_65993C.1
aatttccacccacacccacgcctgtttgaccatttttataatgccacacccaaccatgcaagctgatgagaaggcggggattgtcaaagcaacgacgaggggacactacaaaaaccagaatatcatccaaaactgcacaacttgagatgacaatataccaccttacaaaccccgaaaaagctcaaaagaatgatgttaacaacacttatgacgaaccaaaagctcatgcaaatgcaactgctatacacaaac

SEQ ID NO: 147444 - DNA, 154 bp, Zea mays
  unsure (1)..(154): unsure at all n locations
  Clone ID: MRT4577_65994C.1
cgcaannttnaccccctnatnagnttaatcagncgccttttcntcaatcgcccgcatncacttcgagacgtaanttctgggctgaatcntccnctncctcacgccantggcgcctcantattctttatntgcctcttncacacaacatacgncc

SEQ ID NO: 147445 - DNA, 310 bp, Zea mays
  Clone ID: MRT4577_65995C.1
ttgacggcgttgagccggcgaaccttttaccggtcccgcctcgcgaagaagagccgccgccgccgccgcttctccctgtaccgcctcaccctctccgccctccctaccagcagcacctcagcgtccgcgaggaccggacgcgggctgacggcgccgatgtagagcggcccgcggcccgcccacgccgcgaggatcgcgtcgtagtccagcttgagcagcagcgagcgcggcgacgcgcccgtgctcgcggcggacgagcacggcgacgcggtggtggttgccgtcgccggcggtggcgagggcccgccgg

SEQ ID NO: 147446 - DNA, 381 bp, Zea mays
  Clone ID: MRT4577_65996C.1
actcctatgggcgattgggttcctcgaggccggccggtaaaagcaaccgctttaagcttaactccacataacaagactttactgaatgcgttgatgtgtactcacccttgctttaaaaaccactcaaccccaggttgtccccattgtaatcagtgctcaggagaagatgaatgcaacatggaggactttcaggagcttcaggacttcgatgagttctagttgtgtttagtggaaaacctctagtaagttgcctataaaggccttatcattctacgtttcatatctgcactttgattatgttaatgactatgttaagttaatgactctgtggatgacatggacatcttgatgtaataaagtactatttccacttttatattg

SEQ ID NO: 147447 - DNA, 1692 bp, Zea mays
  Clone ID: MRT4577_65997C.1
ggggtgtagttgcccaatctgacaccttggtctgatcacaaccaaagtcctaggaacatgtaccaatgccagatggcaaagcaaaccatgggtttttgcggacaggccctaaaattccgtactgatgtaaaagcattccatctacagacccctcagacaccaattgttcggacaggtacatataccaaatattgtatggatgaatttccatctggaacgaatgctattgttgcagtgctatcatacacaggttatgacatggaggatgccatgattttgaacaaatcagctgttgagcgtggtatgttccgtggacatatttaccagactgaatgcattgacttatcaacaaaaagcagagataatgttccagaaacttttgcaaagagtatattaacaagggatacaagtaatgtgattgattcagatggccttcctcggcttggacaggctgtacatccaaacgagcaatactatagtgtccataatagccttacaaatgtgataaggcctgtcaaactaaaaggcacagagccagcatttattgactatgttgctgtcaacgggacaggttcaaaatgtggcctgcagaaggcgaacattcgtctgcgtcgtgtaagaaaccctataatcggtgacaagttcagcagtcgacatgggcagaagggtgtttgctctcagttgtggcctgacattgacatgccattctctgcaaatactggcatgagaccagatctgatcattaatcctcatgcatttccttcaagaatgacaatagcaatgcttttagagtctatggcagctaaggctggaagtctacatggaaagttcattgatgcaacaccttttgcaaactcactcaaaaaggacaaggactccgacaagcctaattcgattgtggacgaattgggtcccatgcttgcatcttatgggtttaattatcatggaaacgaggtcctttatagtggagtttttggcactgagatggactgtgagattttcatcggacctgtttattaccaacgtcttcgtcatatggtctcagacaaattccaggtccgcactaccggtcgtatagaccagataacaagacaacccataggaggaaggaagcatggtggagggatccgatttggtgagatggagcgtgatgccctcctcgcccatggttcgtcctacctcttgcatgacaggctccactcctgctcggattaccacatcgcagatgtgtgctccttctgtgggagcctgctgactgcgacaatgatcaaatccgatacccagaagaaagtcaagcacgagatgcttgggctccccactgtgagaccagcgaagaactttgcatgccaggcctgcaaaacaagcaaggggatggagaccgtggcaatgccgtatgtgttcaggtacctggctgctgagttggctgccatgaacataaagctggagctccggttgagcaacaaatcaggattgcctctcagctaagaatcataacaccagaattagcgcttgttcatcgcgggggctgcttcgcaggagaagcttaaatgtaaccattggtccggcgtgtagttgtttcatatgtcggtgtgatgtaccaatgtaacttgtaagaaaaacataaatgacaacacgagttattatagtttgaatggcggttctttttcatgtcaaaaaaaaaaaaaaaaaaaa

SEQ ID NO: 147448 - DNA, 117 bp, Zea mays
  Clone ID: MRT4577_65998C.1
ctcgcaaggtggcattagctactgatgtgtgtgaatatgttacgtctggggcagacagcgactaggataatcttgatattagatcaggacagctctctgtagtcggtaacagctgag

SEQ ID NO: 147449 - DNA, 157 bp, Zea mays
  Clone ID: MRT4577_65999C.1
caagaccatatccgacatcgagatgcgcctggctgcggctagagccgcccagcgggggggccaggccttttaaccggccaactcgacttcgaaggccaacaaggaacccggccgcgtaagaagttttttgtcattggccttttcaccacttttgctt

SEQ ID NO: 147450 - DNA, 175 bp, Zea mays
  Clone ID: MRT4577_6599C.1
ccggccgtgaagaaatacgtgacgcgtaagccagtgacgcacccagaccagatctccgcgacgacctgtaccagtacaccctggacacgggcgtgtacccgcgggagctgtacagcatgaacgagctgggccagatcaccgccacgcacacatgccccctgatgaccacctccga

SEQ ID NO: 147451 - DNA, 449 bp, Zea mays
  Clone ID: MRT4577_65C.1
tgcatgctcgcaggtcgactctataggatccccctgacacgtgtagatccgttgggactctattgagcggcacagcactcgtcatgggaggctagaaaacacatagattgcttgaaatgcttacagagcccgtataatgtgatctcaataggcggagaatacatagctctcagagggcagcctcgaaaatcactaaacgcgtacggggtagcgatacatgatatagccactgagcacagcgcatgatactgcggtgaagacactagaccacatggaatcagagcatacgcagagatagaactactgtcagcatcctagtataacatatctcgaatctgtggtgaatacactaattattccgcaagcccacctcgctgctgtaaagagaacgtgacctatattgtacttgtcttaatggtggagtctagagtactcatattttctttcac

SEQ ID NO: 147452 - DNA, 122 bp, Zea mays
  Clone ID: MRT4577_66000C.1
cgcctccaatacaagctgcatgttcacgaggtaccccctgacgtctccgcgcacagcgcgccatactttactcctctgaggatggtctcttcctgtataggcgcaccctcgaaggggatctt

SEQ ID NO: 147453 - DNA, 391 bp, Zea mays
  Clone ID: MRT4577_66001C.1
aaagaaaacgcagcctgcacataaatccattcttttagtcccggtgcgggtttcccagcaaaaaaaaaaaacggggcttagcggaaaaaaatagctcctagcccctgggggggccccaccgggaggggggcagcttttttccggggggtcacatcacggggggggagacccctttgggaaacgggaccacaaagggatgggggatttatgggactactccgggctgcgggggatcacctggccaaatttaataaaaggctcggggtcggaccccctcaacaagttgggccaggaaagggggctgccatcgcccccgccgccgcctctgaggccaacgttctcgttaacaaatttgggcgccgggggggactgtttttccacccctgggcct

SEQ ID NO: 147454 - DNA, 434 bp, Zea mays
  Clone ID: MRT4577_66002C.1
actgacaaaagggtaatggcataacttgatatgtcataacatgatcggtgcggtatgaaaaataacatgctacacgtaacttatcacccaaggcattttggttgtctacagacggaacgcacccacattgtgcttgagcgtgcgtggttccagatcataaacaccatgttcatacccatgtatttgctaattcaggcctcaatgaaatgttggagatctacactattggaccatgcccagaatgtttgagttctccaatgcaaccacaacacgtcctttgttttgcattagcttattcacatgaagtacacttgcatgttatccatgggcaaacgttatgtacacctttgaaccagtagggagactccgaacaagttacacgcgtatagctgaggccaataattgctgtcatacatgaaacaactacacttttg

SEQ ID NO: 147455 - DNA, 194 bp, Zea mays
  unsure (1)..(194): unsure at all n locations
  Clone ID: MRT4577_66003C.1
cccaatttttctcccacatcccaacaaaacacgtctcacaaaatatttcggcctgttcaancatccaaacacattccttccatccttttttcactacttattccctaccctacttgcctacctaacgattatcccatacccaatcccatccaactatcttcctactacttccaatcccatctctctatccctac

SEQ ID NO: 147456 - DNA, 421 bp, Zea mays
  Clone ID: MRT4577_66004C.1
gtgtttgtgcataacccacgctacagcttctggactcgatcttttacgcactgtgctcctgagatagagaagcttatccagtcggttgcaaggtcctatggagaggaaaggggcagacgatggaatgggtctagcggacggagcccactagggaaaaaatgcctagcatcgaatgaattccaaaaacatcagatgtagttttgctgatatggtatagttagagtaggtctgcgtggtttgctcggaatgaagatggacctgtgctatgctggaagtttagcccatctctatctctaacacaaaatctgcaggggaaaccactggcaactgatcaggcaacatagtccgttagtatgctaatcgttagtttccgcaagcttacaatatcaaccgctcgactgggtcattttgggtttatcat

SEQ ID NO: 147457 - DNA, 1116 bp, Zea mays
  Clone ID: MRT4577_66005C.1
ctcgaggccggccgggactgaacggtgacgccacactcacgaacggcgaaacccttccaggccaccacgcacaaccgctccaaccatggacgccggcgccgcgcgtccatcggcaccgtcgaccgccgcagtcgcgggggcctccgtcgcggacgagccccgggacgcgcgggtggtgcgggagctcctgcgctccatgggtctccgcgagggcgagtacgagccccgcgtcgtgcaccagttcctggacctggcctaccgatacgtcggagacgtgctcggggacgctcaggtctacgctgaccacgccgggaaggctcagatcgacgccgacgacgttcgcctcgccatccaggccaaggtcaatttctccttctcccagccgccgccgcgcgaggttctccttgagctggcccgtagccggaacagaatgccgctgcccaaatcaatcgctcctcctggctcgattcccctcccaccagagcaggacacactgttggcccagaactaccaactcctgcctccgttgaagccgccacctcaatatgaggaaacagaggatgagactggagaaccaaacccaagtaacccggcgaattctaatccatcctattcgcaggatcagagtaataaggagcagcaacagcagcacactccccagcatggtcagagggtttccttccaacttaatgctgtggcagctgcagctgcagctgcaaagcgtcctcggatgaccattgaccagctgaacatgggctaaccgttcgtcgtcgtcggttagactgtagtatctttttccgcaccctctagtctggtgaatcatgttttgaagagatagtgctgtagtggtatatgctcttactgactaccacccacatatttaaccacgagatgtgcagtccaacagcaccagcagcataagtttctgcctgcaagaacgttgctggagggaaggaaggaaagtgactgttctacagttctagtagtgtattttgtacttgcacactaaaagcttaatatctgctagtgtaattttatctgggtcttctacatgttcttgacaaaaatggcatcaccattcatcagtattgaaaaaaaaaaaaaaaaaaagcggcc

SEQ ID NO: 147458 - DNA, 763 bp, Zea mays
  unsure (1)..(763): unsure at all n locations
  Clone ID: MRT4577_66006C.1
gccggccgggtcgggagacctactctactgcctctcctcctccttagatcgtcacctccggccacggccgccctcaatctggccatccgctcaggtaaggtgagcatgacgaccgtcagtgtgctctactatgcgctcaagcgcatgtacatcgctgagaacatgggcaagacgaaggtcatgatcacgccgacatccaaggtacatcatccaacccctgacggtacatgcagccccttgtctacattgccaccagtacctagcatcatcgatgaccaccgatcgggcatagcattgtggtacaactccacggtaggctgaaaaaccgagaccttctcaaacctcgctttgatattggcgagacacacatcctgggatgtactgcaagggtgctcccgtccattcacctaggatacctccccctcacgacttcagcacgcatcatgcaccacgaggagggccgcctcaaaaatgttcgacgaaagggtctaggactcttctattgaacaacatgagatctttgttatgagcctgcctgcctgccttactctctcagactagagtacctgttatcttactttaatatggctctctcagactagagagtcttcttttacttcgatattggttactggattggactttcactttacaatcgctgactgcattgatcgaggncttcgccgagctcaaggcgaaggagctcgagaacggccgcctcgccatgttttccatgttcggcttcttcgtccaggncatcgtc

SEQ ID NO: 147459 - DNA, 679 bp, Zea mays
  Clone ID: MRT4577_66007C.1
aatccgccgcctcccccgtccgatgcggcctctctccgactccaccgtccgccgccgccgcctcgtccagcgctgacttcttccggtcgcagccgcctccctcccccgtccgtggctgagctccgacttcctccactgtcctgcggcccacgggtgaatcgaattcgggagaagactggcaaacatcagccggagcagcagcagcagcaggaagttgtgaaaacatagtggatttgaaccggaatcgtctcaaaaagaccaaatacgaggctggcacagctaatggcaacttcacgaggtcatccaccaaagcctggcaagagtgttggtcaggagtttgttgatcatcggctcctcagtcgaataggacattatcctgattcaaaagatttgccaagacagttggacatggtggcatacttcagcgacgagcctccttgtcagacaactcactgcactaatgtggcggttgagcagttcaacgcacaacagcagagtgatgataagaagataatgcgtgcagttggagttgacagcaacatgtttatcttggaccagaatgacccgttgagctattggcatgtgtactttaaagcttatgtagggagaaaccggtacaggtgttttgctgagttgagtggggaaaaaggacccgaattgctcagatattgcactgccg

SEQ ID NO: 147460 - DNA, 449 bp, Zea mays
  Clone ID: MRT4577_66008C.1
acacacgacgcctgctcccctccttcatctcctaataattctcctcaagtaaccttcttgaacactaaaccacacaaattggggcgctctatatactgtaccggtcgtttacaaacccgcaggccattgttttctcaccacttctataaactacacaaaccatgctgtactactgcatacaacaaaaccaaattccatctgctatatgacaattagagtgcaatcaaaatgtccgacattcctgacgaccataaccgaactaatcacatacccaacccttatcatattcttacatatcaccaacaaattatatatatcaacatatcttacattaacactacagatcaattatcctatatctttaccaaaccttatattaacaaactttatccaaactcaatcataaacatcacattcttgatatcagcaatttctatttctaaatttca

SEQ ID NO: 147461 - DNA, 704 bp, Zea mays
  Clone ID: MRT4577_66009C.1
cattgggtacctcgaggccggccgggagcaccagcgtcacccatcacgacacgtccccccacagccttcgagatgtcttcggaaaagagccaccgcctctacgtcaagggccgccacgttagctaccagcgtagcaagcgcaactcgaaccccaacatcagcctgctccagctcgagggcgtcgaaagcacaaaggacgcggagtggtacctcggaaagcgtgtcgcctatgtataccgcgtcggcagcagcaagtcgaaccccatccgcgtcatctggggcaagatccgccgaactcatggcaactctggtctcgttcgcgcttctttccagcacaaccttccaccaaagtccttcggtgccagtgtcagggttatgatgtaccccagctccatctaagggcgggcgattgaggaacattcgggaaggagttgaggcgattgggaacggcgcgcagccacatcaaaatctctttcagggcagcctctttagtttcatcacaatgcgataatggtagcatacacactcgtggtggaccggattgcagagacaaggactgctatcacggtagggctgatggataaagtgcggggtctgttcaggaacattctagatcaccagccggtagctgccttgcctagctttctataacatgaagccaacccacaaaaaaaaaaaagaaaaaaaaaaaaaaaaaagcggcc

SEQ ID NO: 147462 - DNA, 391 bp, Zea mays
  Clone ID: MRT4577_6600C.1
ccggggcttaggttgccgcatcgggcgtgtaggaggtcgccaaggcctggaaccggccgggctcgaccaagagctcagaattcgggataaccaaaaccatcccactggtgagtggctcgagcttgaagaacgagcactcacgtgtgtatatcgacaagaagacattctggatgagagctaaagcagagatcaagaagggggacatggaggataagaggactgatatcatggacgaatcgcaccttaccatagcttggatatctgcatagacattgaagctgatcagctggaacactctcgtcaggtcgtcactaacaactgaagtcgacatcctcaccgagaaaggcaagaatgtgttcagctgctgtatcatgactggtagtagaggcta

SEQ ID NO: 147463 - DNA, 938 bp, Zea mays
  Clone ID: MRT4577_66010C.1
ggccgggctttttcttggccgccaccccccttttccccacccttggccgcccctcccccttccccttgcagccaccctccactacttcctcctccctctagatctccccccacgcagcaaggatcgagaagaggaggagcaagatggattgaagaggaagagaggatcaaggagatgttctacccccatctcttgcagattttcttggggaaaccctaggtgcttgttgctcatcaaggggagtgggaagtagcagcacatacaccttcactctcataataacgctgcccagcgcagtcatgatttaattagaaacttcttcccaagggatgtttgcgtttaacgggttggtaacactggttgtatctgatttcataagctttccagtcttttcattgctgcattcatattatttgtgaaactccagttatgtttgttttactgtggctgtttctgtttacctgacaaaatgagtgggtctgttcactggtgggtttcatctagtaaatggccgaattggctcttccaactatggatacttttgtagagggataaaagttcttacttccagcagaatttcataatttttggttcagtagtttgggagatatcgaattttaaagttaaccatactgctgtctaaaacagattcagtcagttatcttgtcagatgttttagaacttgtagatggcagaatttaattatctattgaatactgaagttgtagagtattttgtgtagatactcctagagtatttgtttgatatcaccgctgttttaattttaaagatacaaaattaacaaacagcgttgctgctgtatggcatgtggttcagggtgggagtctttccactgggtcttggtttcaagtgtaggagtgttttgttgattgatggcaaatgtttgtgaaatatttgtactaagttttatgcccact

SEQ ID NO: 147464 - DNA, 1097 bp, Zea mays
  Clone ID: MRT4577_66011C.1
gagctttctcatctcctcagctcagcttgccgcattcggcttgttagccgagcccctccaactagcgtgctagacctttgacgctgtttccccatcgtccaagctccaccatgcccacacgtccgtcctgctcctccgtgcacacgcccatgcatcctaatctccctggaaacttcacacgtgtacggctccctgtggtgataatattcagggggggttggccagggtaccgttcccctgcgcgctcgccggacgccgccgcacatgctccctgctcggcctccccggcgtgctgctccctcgccttggtatccctgcgagctccttctccctcgcccggtttccagctcaggcctcgccggatgccaccgtcgcttttctgacctcgcctcgacactcaatcgctgcagcacgccatgccatgctgcactgtcatcgttcgctatcctcatcctcgccaattttcctcgttgtttctcggctacaaccgtgtcagctcctacgcgtcgtgcgcgttttgtgttcgggtcgagccccaggattttgaggaaaaggaagcttcagtacatcggccggtgaaaagaataaactggtggtagtcatggtccttgcaaaatccgagatcagcttagtcgcggtatgtgaattaaccacgtgatgcggagaacccgagccaagtcgaccccaagcgcagagaggatcaaggagatgttctttcccatctcctcttgaagatttcttggggaaaccctagcaggtggctacactccagatcatgtctagtacatttcttcttcttcgatgaaggtgcttgttgctcatcaaggggagtgggaagtagcagcacacccaccttcattctcataataatgctgcccagacgcaaccatgatttaattagaaacttcttgtcaaaggatgtttgtttttaactagtcgtgcgcactgattaattcagttcatgttgttatggttgtcttcccattgctagcagattattaatgtcttatatgttttcttatcatgatatctatttatactttgttgcttcccccatttatgcaatttgcaaaaaaaaaaaaaaaaaacccgcggcc

SEQ ID NO: 147465 - DNA, 417 bp, Zea mays
  Clone ID: MRT4577_66012C.1
aggcccggccgggctcccccttggctggacgccccctccccctatggcagccatcatccattgcttcctcccccaagatctccccctacgcagcaaggatcgagaaaaggaggggcacgttgaattgaagaggaagagaggatcaaggagatgttcttccccatctcttcttgaagatttcttggggaaaccctaggtgcttgttgctcatcaaggggagtgggaagtagcagcacatccaccttcactctcataataatgctgcccagacacagccatgatttaattagaaacttcttgtcaaaggatgtttgtatttaactagtcgtgcgcactgattaattcaaaaaaaaaaaaaaaaaaagaaacaaaaaaaaaaaaaaaaacaaaaaaaaaaagaatcacccgagactgaaa

SEQ ID NO: 147466 - DNA, 729 bp, Zea mays
  unsure (1)..(729): unsure at all n locations
  Clone ID: MRT4577_66013C.1
tcctccctcggcctacttgctggtggacctagaattaacgggagacgacacccgaggcgtccaggaactgccgagggaacttcatgactccaccagaattccttcttcctatttctctatttaagcaactagcagccaccaaagaacttgggttttgtttgatgtaagtttagcctttgctacttccttgtaaacgcgtgtgtcggctagaccacccgaatacttgaaacaggaccccatttatatcagatccgtgcgtgtttgcttgttatcttgttcttgcttgttctcgattgcttgcaggttcaaggctgttcttggcacggcaagagcagcaacaacaggagccggtgtaactatcgctaaggcgcagcacccttgtggttgttgtagtcggatagcacaacgtcgacctccccccaaatcgtagttatcaggagacggtgtacctgtcgctcaaggcgccacaccatcttggttgtggtagtcgggcagccaacgtcgttctccaacaagttttccacctccatcatctctcatcgaaagatcgggcacccttcttgatgaggacaacaaccccaacaccgccaaaacctttacctcgtgcggcatagccatccccaaatgctaagcaagcngctctgcgtcgtcgcttcgcttgctcttgctcttgtgtgtaacatatccagcttatgaataaattatgtgggatcagttaaattagtgggc

SEQ ID NO: 147467 - DNA, 524 bp, Zea mays
  unsure (1)..(524): unsure at all n locations
  Clone ID: MRT4577_66014C.1
cttttcccacccttggccgcccctcccccttccccttgcagccaccctccactacttcctcctccctctagatctccccccacgcagcaaggatcgagaagaggaggagcaagatggattgaagaggaagagaggatcaaggagatgttctacccccatctcttgcagattttcttggggaaaccctaggtggctacactccagatcatgcctagtacatttttcttcttcgatgaaggtgcttgttgctcatcaaggggagtgggaagtagcagcacatacaccttcactctcataataacgctgcccaggcgcagtcatgatttaattagaaacttcttgtcaaaggatgtttgtttttaactagtcgtgcgcactggttaattcagttcatgtcgttatggtcgtcttcccattgctagcagattattaatgtctattatgttttcttatcatgatatctatttacaaaaaaaaaaaaaaaaaagcggccccaacaanaaaagaaggaaaanaaaaaataa

SEQ ID NO: 147468 - DNA, 585 bp, Zea mays
  Clone ID: MRT4577_66015C.1
gaattctgtatctgtcccgttggctacttcgttccgctgtgaggctctgtgtgtgataagggaatgagatcgaatcttggcccatgcagcattttgtgtcctttttaaaaaaaaaaaaaaaaaaaaaaaaaaaaaaaaaaaacaaaaacaaaaaaaaaaaaaaaaaaaaaaaaaaaaaaaaaaaaaaaccctgttgcccaccggcaacccccaaggggagctcttccacacccggggggaaaatgggggcaaatcggaaggacgggccgccacggaatctgatgcacaagctgccccgccgcatgaagggaagttccaagcccaacaagggcctcaacctcatcggtccacctgggtctggaaaggaaactcagcctcctattatcaaggaggaaaattgcttgggccattaaaccaccggggaaatgctaagggctgctgggccgaccaaaaaacctctaggtatcaaagctaaaaaagctatgaaaaagggagagcttgtttcaaaagatttggttgggggcattattgatgaagctatgaaaaaaccctcatgccaaaaaggtttcattcttgagggctttc

SEQ ID NO: 147469 - DNA, 379 bp, Zea mays
  Clone ID: MRT4577_66016C.1
cagccacgtgggcggacacagtgcgcttcgctggcccaccaggcatgaacggcgcactccctgccgctcgggggcgaggtactagaaaccacaacatacccctacatgagtcctgagccggaatacaagccaaggctcggaccccacattcgcgcgacccccaattgtcagctggaggcaaaggcacgaatgtgtttacagcgccgccccagaagagcgaccacaccaagaacgacgagatcctcccggtggctaactaggcgccccacaagcatctcaagaagggctaccgcatgggtgctctcaagaatcatgggggcatgggcggtgtaccacagaagccaaaagagctcctacatgcctatgaagtgttgagcga

SEQ ID NO: 147470 - DNA, 499 bp, Zea mays
  Clone ID: MRT4577_66017C.1
gccgggccgggcttcacccccccctcttggccgcaccccctttttctcccccttggctggacgccccctccccctatggcagccatcctccattgcttcctcccccaagatctccccctacgcagcaaggatcgagaaaaggaggggcacgttgaattgaagaggaagagaggatcaaggagatgttcttccccatctcctcttgaagatttcttggggaaaccctaggtgcttgttgctcatcaaggggagtgggaagtagcagcacatccaccttcattctcataataatgctgcccagacgcagccatgatttaattagaaacttcttgtcaaaggatgtttgtttttaactagtcgtgcgcactgattaattcagttcatgttgttatggttgtcttcccattgctagcagattattaatgtcttatatgttttcttatcatgatatctatttatactttgttgcttccaaaaaaaaaaaaaaaaaaggccccta

SEQ ID NO: 147471 - DNA, 582 bp, Zea mays
  Clone ID: MRT4577_66018C.1
gccagtgggtgcccgttgctcgaggagtggaaccttgctgtttgccatggggtccatctacctggctggtctgcgatcgggctgtactgcagtaagctaagagtgctgcatgtgaaccgctgccggcacatctgcgaccagagcttgctggccctcggcaatggctgtccgcgccttgaagctgtgcatatcaatggctgtgccaaggtcaccaacaatggcctggccttgtttaccctttccaggccccacgtgaacctaagggtgtatgaagttatgtccattggcccttccattgagaatttgttccggttgcattgaggtgaaattgttagttaggttttcgaagtttgggattaaaagtataataccctgtccattacaggtgattggtttcttcagtcaattatgcacagtgtgtttgctctggtgcttactgtaagataacaatagcgaatatgttgttagttaagctgctgttttgtcaaggccatatttgtcaatccttcgttcccaaagttaggtagcattaatagagtttgacaaacattttatcagttgccaagaaatctttttgtgctt

SEQ ID NO: 147472 - DNA, 880 bp, Zea mays
  unsure (1)..(880): unsure at all n locations
  Clone ID: MRT4577_66019C.1
gtgtcgcgctcgaggccggccggccggcttcacccccctcttggccgccacccccttttctcccccttggctggacgccccctccccctatggcagccatcatccattgcttcctcccccaagatctccccctacgcagcaaggatcgagaaaaggaggggcacgttgaattgaagaggaagagaggatcaaggagatgttcttccccatctcttcttgaagatttcttggggaaaccctaggtggctacactccagatcatgtctagtacatttcttcttcttcgatgaaggtgcttgttgctcatcaaggggagtgggaagtagcagcacatccaccttcactctcataataatgctgcccagacacagccatgatttaattagaaacttcttgtcaaaggatgtttgtttttaactagtcgtgcgcactgattaattcagttcattgttgttatggttgtcttcccattgctagcagattattaatgtcttatatgttttcttatcatgatatctatttatactttgttgcttcccccgtttatgcaattttcaaaggagatgttatcgaaattttatatatgaatgttagatgtgtagtttagtagcatcctggggtgtttgtggatcccggggtgttacagtggaggttcgtcgaggtctgctgctcatagttcccatctctccactcaagatcgagcaaaagtggagcaactgcgtgaagaacttaatggagtatcgaccatcactcgtcgttgtaccctgatggtgatcagcgatagtgaccttccattttatgtgttgtgatacttgagactttttgtcttatgactatgnatggagatgtgtgtcaaaaaaaaaaaaaaagggccctaggc

SEQ ID NO: 147473 - DNA, 338 bp, Zea mays
  Clone ID: MRT4577_6601C.1
gggggcacaacataagggtttggacattttattaaaatgggggcgattaaaaagggtttacaggtggggataacgttgctacatccaaatagggggttgcttgccttggaagccaaaaatttttccttacaggagggatcccattggcgtttaaaaaatttttggtgcctttgatacataaacaggacaaatgggttactggcgggggttggggttttacaatttttggaatcacgattttcaccggtgcccaaagtttactttcttggggggtggactggggacacggtaaaaaccatggaattgcccccgcacttgttgggaacgttggaacccct

SEQ ID NO: 147474 - DNA, 1722 bp, Zea mays
  Clone ID: MRT4577_66020C.1
cctcgtgggtacctcgaggccgggcgggcttttcccccccctcttggccgcaccccctttttctcccccttggctggacgccccctccccctatggcagccatcctccattgcttcctcccccaagatctccccctacgcagcaaggatcgagaaaaggaggggcacgttgaattgaagaggaagagaggatcaaggagatgttcttccccatctcctcttgaagatttcttggggaaaccctaggtggctacactccagatcatgtctagtacatttcttcttcttcgatgaaggtgcttgttgctcatcaaggggagtgggaagtagcagcacatccaccttcattctcataataatgctgcccagacgcagccatgatttaattagaaacttcttgtcaaaggatgtttgtttttaactagtcgtgcgcactgattaattcagttcatgttgttatggttgtcttcccattgctagcagattattaatgtcttatatgttttcttatcatgatatctatttataaaaaaaaaaaaaaaaaagcaaaaaaaaaaaaaaaaaaaaaaaaaaaaaaaaaaaaagtagaaaaaaaatcaaaaaaaaaaaaaaaaaaaaaaatccaggaataaacgagacaaaatcatgactccaccggcccgagtgatttcgtaaccccaagctctaaattaaatggagcatatctttcaactcccaaggttgtttaaagcaaataagcacttccccgaaaggtctcttcgtctactttctagtggatcaagaatcaacgagagatcatacactaagcgtccagaaagtaccgagtgaactcctgctctacccaagtcaatttcgtaactgcagcatgcaccaaattaaatggagcataactttccactcccaaggttgtttagtgcaaataactactttttggaaagctctcttcgtctactttcaggtgcatcaagaatcaatgacagaaaccaaacgaggcgtccagaaactgccgagagagtttcgttctccattagaactcctttctattcctctatttaagcaactagcagccaccaaagaacttgggtttttgtttgatgtaagtttatcctttgctacttccttgtaaacgcgtgtgtcggctagaccacccggacacttgaaacagaaccccaactctatcagatccgtgagcgtctgctttttatcttgttcttgcttgttctcgattgcttgcaggttcaaggctgtgcttggcacggcaagagcagcaacaacaggagccggtgtaactatcgctaaggcgcagcacccttgtggttgttgtagtcggataacacaacgtcgacctccaccccaaatcgtagttatcaggagacggtgtacctgtcgctcaaggcgccacaccatcttggttgtggtagtcgggcagccaacgtcgttctccaacaagttttccacctccatcctctctcatcgaaagatcgggcacccttctacccgttgggttcatcaggtgatatggtttggttgcacttgagaaaggatcggtttcctactttgcgtcgttctaaattaatgcctcgtgctgctggtccttttaaggtgctaacaaagattaatgataatgcttatatccttgacctgcctgcggaatttggtgtttccactagttttaatgttgcagatttgaaaccattatatggccgagatgaggagttgtcgt

SEQ ID NO: 147475 - DNA, 104 bp, Zea mays
  Clone ID: MRT4577_66021C.1
gtttacaacgcaccatgtcataatttactttgttgagagcctcacacatttcaaatgtatttggaacctgacgctcctgccgacccgtgggatggacccgtggg

SEQ ID NO: 147476 - DNA, 814 bp, Zea mays
  unsure (1)..(814): unsure at all n locations
  Clone ID: MRT4577_66022C.1
aaaacccgtccgtccgtcaatcccttctccatggcggcgctctccgtgcctctccgcaccgcggcggccctgtcctcgtccggcgccggatcccgcgccgccgccgacccctccaaggtgtcatgcgtgaggagcaagggctcagctcattttggctgcagcttcccctccattgcggcttcctcttcatctgccaggaacattgagccacttagagctatagctacacaggcacccccggccgtcccacaatattcgagtggggagaagacgaaggttggcatcaatgggttcggtcggattgggagattggttctgagaattgcaaccagtagagatgatattgaagttgtggctgtcaatgatcctttcattgatgctaagtacatggcctatatgttcaagtatgactccactcatggcccctttaaaggatccattaatgtcgtggatgattcaaccctggagatcaatgggaagaaaatcacaataacaagcaaaagagatcccgcagagattccttggggtaactttggagctgactatgttgttgagtcttctggtgtttttacaaccatcgataaagcatcggtacacttgaagggtggtgctaagaaagtggtgatatctgctccatccgcagatgctcccatgtttgtggttggagtanatgagatgagctacgatcccaagatgaatgttgtttctaatgcaagttgtaccactaactgtcttgctcctcttgccaaggttgttcatgaagaatttggcattcttggaggtctaatgacaactgttcacgccacaacagcca

SEQ ID NO: 147477 - DNA, 287 bp, Zea mays
  Clone ID: MRT4577_66023C.1
acgcgtagctgacatttagacctactatttacatttcaagcacagcattgatccaaccgggacggccaaactaaacagcttccttatgctcctcgatctaaccgcaactgctactactcaaaccattagtccactatgttcacaaaattctatagattgaattcttcctccatacctgtaacaagacaactatcatatatgcgaaatcctgattgctcaaccctacaagatcctacattcaatcgaatcacgcatattaacattatcacccatgttcctccaacaac

SEQ ID NO: 147478 - DNA, 2290 bp, Zea mays
  Clone ID: MRT4577_66024C.1
acgcgagccacgaagccttgctagcccgcatacttacacgtcgcttgcttaatcaacagcaggagtaacagctagcgacgacgaccgtatatatggccgagaagaatgcagtcctcgcggtctctgccacccgccgcgccactataggcgagggcaagctgcttttccggatcgtgcaggtggggatgttggacgtggtgaccccgccggcccggccggggtgccagcttgagcattccactttgctagccagcatatacttacacgtagctagcttaataatcagcagctggtgcagcaagagtaacagctagcgacgacgaccatatggcggcgaagcagccagtcgtcgctgctgctgcctccggccaccccaagatgggggaggagaagctgatcatccggccggagaaggtgcggttcatagacgtgctgtcgatgctgctcctgaggcgccccatcaccagctacgcattcgtggaggccggcgaccggaccgccgccgacctgggcagcacgcccggcgactggctcgtcgcgctcacgcaggtcatccagaaggcgctcgccggcgcctactacccggctctcgtggtcggcgccgtcgtcgagttcctcctcaacttcgtcgcgctcaacaatggcatactcggcatctttctcaacctcttcagatgtaagctggtgatcccactgaaccgggaggcgcccaacttccggtccatgatcgggatgatcgacgggaggacggagctgaagccgctgccagccagcggcggcccagaggaccggcggctgcaggtggtgggcgtctccgccgccgccggatccggcggcgatgactactacttggacgtggagagcggcagcgcggcggtgccgctggtgcagcagcagtacgtgaacgggcggctcgtccgcctccgcaccttctccgtgttcgaggtgagcatgatggccgccaagatcgcctacgagaacgccgcctacatcgagaacgtcgtcaacaacgtctggaagttccacttcgtggggttctacaactgctggaacaagttcgtgggcgaccacacgacgcaggcgttcgtgttcaccgacaaggcagaggacgcgagcgtggtggtggtgtcgttccggggcacggagcccttcaacatgcgggactggtccacggacgtaaacctgtcgtggctgggcatgggcgagctgggccacgtccacgtcggcttcctcaaggcgctgggcctgcaggaggaggacggcaaggacgccacgcgggcgttccccaaggccgcccccaacgccgtcccgggcaagccgctggcctactacgcgctgcgcgaggaggtccagaagcagctgcagaagcacccgaacgccaacgtcgtggtcaccggccacagcctcggcgccgcgctggcgaccatcttcccggcgctgctggcgttccacggggagcggggcgtcctggaccgcctgctctccgtggtcacctacgggcagccgcgcgtgggcgacaaggtgttcgcgggctacgtgcgcgccaacgtgcccgtggagccgctccgggtggtgtaccgctacgacgtggtcccgcgcgtgcccttcgacgcgccgcccgtcgccgacttcgcgcacggcggcacctgcgtctacttcgacggctggtacaagggccgcgagatcgccaagggcggcgacgcgcccaacaagaactacttcgaccccaggtacctgctgtccatgtacggcaacgcgtggggggacctcttcaagggcgccttcctgtgggccaaggagggcaaggactaccgcgagggcgccgtctcgctgctctaccgcgccaccggcctgctcgtgcccggcatcgcgtcgcacagccccagggactacgtcaacgccgtccgcctcggcagcgtcgcctcggcgtagcttttggattgcatgttcgtttccatgcatgtgtatcattgcatgcaataattggatgaaataaacagcaataagcttcatcagtattattattgttgttgttgaatatatgcatcctctcctctctatatagaattatagatacatgaggcctggccggccgcgcacgttgctgaacagttgaagcgcttcccaaaaaaaaatgtatcaactgtgaagcatatatatccatgcatgcatgtgtgcccgaaatttttgtttttaggacatttgaacaaaaatttacaattaaaaccgaaaaaaaaaaaaaaaaaaaaaaaaaaaaaaaaaaaaaaaaaaaaaaaactcgaaagggggg

SEQ ID NO: 147479 - DNA, 264 bp, Zea mays
  Clone ID: MRT4577_66025C.1
aaaaaaaataaaaaaaaaaaaaaaaaaaaaaaaaaaaaaaaaaaacaaaaaaaaaataaaaaaaaaaaaaaaaaaaaaaaaaaaaataaaaaaaaagggggggcccccctaagggttcaacccttacttccgcgtgaatgcaacttcaaacctcttcaaagctgtccccaaatttcacttcatgggccttcgttttacaccttcctgactggaaaaacccggcgcttacccagcttagtccccttccagcaaacccccctttcg

SEQ ID NO: 147480 - DNA, 233 bp, Zea mays
  Clone ID: MRT4577_66026C.1
tgcagtacggtccggattcccgggtgcataacgattattggtggccaggtcgaaaaggagaggagaggcgctgcggcggcaagtgtgggtgcggctgcctgtgcaaatgcggcaaccgctggggagggggcatcaagatgtaccctgacatggctgcgcagatgaccaccaccacccagtctcttatgatgggtgctcacaccatccaaggcgcacgccgagggcgggttcga

SEQ ID NO: 147481 - DNA, 761 bp, Zea mays
  unsure (1)..(761): unsure at all n locations
  Clone ID: MRT4577_66027C.1
gggatgtttttattctgtgtgcattattgatctagagttcaataaacgaatttaatctttcagaaatcgccactctgatagtctgattgctatatgcatgcatcggactagtaaatatatgaatatatgattttaacttaaccatttgttagtgaatctgttttccagcatcaatcgagaatcagattgttaagtggttcaggagagcatcaagtacaattgtggaaaatatctccattgatgctatgacacatcttgatgaatttgaagtgagtttgtgtatgattggttagtggttatacttttttgttacttatcctattttaaatgcttgtgacagtgcaatctatatgccttggttattgaccttggcagacccaaattacatttcaaagttcatgatgccatcaaatgctgaatgttttaccattttatgtcacggtggtacctgattccagaagcaagattctgctggaaaagtaccagttttggttgtctaattgctgttcttttattctttaggtggattctgagtacattccggacctttcagcaaattctcctttgtgtgtgtctggaaaataccgaggaaaattcccagacacagtgaaagctaaaggttacttagttgacatgaaggaagtcctgattgaactgaaggtccaacaactaaaggaagtaactcttgacaaagtattggtgacacaacatattgatcttatgacagcanaggcatggctttctgcggccaaacaactgga

SEQ ID NO: 147482 - DNA, 155 bp, Zea mays
  Clone ID: MRT4577_66028C.1
ggctttcttatagtaacaggagggactctgaaacgggagctatgacagaagaggacgtgcagcctatgctagcgagagcatggagagatccaacgcaccgggtgatgatgataggatcgtagccttgtacgcaaggtgggactcagggatataca

SEQ ID NO: 147483 - DNA, 407 bp, Zea mays
  Clone ID: MRT4577_66029C.1
tgttctacccactcgttcgattttccgctccacaccttttctttgccgtttttttaaaaacagtacagccgcactaatcacacttttaccaaactctcctttctccatcccctcaattactcaacctaacacacaccaacaacatcatcccttttctttttcttctcttccattaataacttctccctcaaccccaacattaatcacactatcttaacccccatttatcctttcactactccatctatatcaacatctaattttaaattcaaaatctttataactactaaaacaactagtacattaactaaacctactttatcaacccatttaacttacaatcatcaatacattcttcctcctttccaattttctaatttcttacattctctatttctaataatata

SEQ ID NO: 147484 - DNA, 574 bp, Zea mays
  Clone ID: MRT4577_6602C.1
gctgccgctgcttgcgcctctctcgcccgcatcgccgcagggttcgcaaagatggcagtgccactgctgacgcagaagatcgtgaagaagcgggtcaagcagttcaagaggccacacctcgaccgctacaagtgcctcaagccaagctggcgtaggcccaagggtatcgactcccgcgtcaggcggaagttcaagggatgcaccttgatgccgaacattggatacggctctgacaagaagacgaggcactaccttcccaacaagttcaagaagtttgtcgttcacaacgtctctgagctggagctgctgttgatgcacaacaggacatactgtgccgagattgcccacaacgtgtccacctggaagcgcaaggagatcgtcgaacgtgctgcacaactggacatcgtggtcaccaacaagcttgccaggctccgcagccaggaggacgagtgaaatggccaatatttttctctaccattttttatgcttatgttagacttttccaacggacataattctgttataagcggaagaatgatggtgagggccatctagtttttgactggacatcatg

SEQ ID NO: 147485 - DNA, 576 bp, Zea mays
  Clone ID: MRT4577_66030C.1
acataatatttttaaatcaatcacatagataggcactttgaatagagagtttacatcaaggttaaacgaaagagtttagaatacatcagaagaataaaataatatacttgttgaagcaattaagttcttacatcaagatcacgtagtggccaggtacaaaaatacataagcatctctataactaattcataatttataggacttgaatggctaataagtgcacatttgtgtctagtctacatacagaaaaggaacaccagcccaccattgtgctcatcaataattcccgagtgacacataggttagccaaaggagtggttaagtctaaacactaaggatgacatttggattatgtagtttcacttgacaactttagagtgtgctatacttgatgggttttctagtcgatagtattagagctatgctacaagcctacaaatgaactcaagctttctcattcttaattaacaacaatacaacttacttggtggctcgaggaatctacttggttgtactcgggcatgtcatatgcgggcttagacttactcaattttcaattgtatacattggagttct

SEQ ID NO: 147486 - DNA, 765 bp, Zea mays
  unsure (1)..(765): unsure at all n locations
  Clone ID: MRT4577_66031C.1
cgctccttctccccngcccgattgctagctattcaaccagatcgctagtcaaatccatctagctatgtgcctgggtgcttgccagtaatccagatcgccgaatccatgcagctgtgtgcctgggtgcttgctagcttatacatgcccgtgtgcttggttagccgccgccgctttctttttcttgccctagccgccgctggcccgctgctatggcctcccctggcttctccatctacggttcctgcaccatgcccgtcatgctcatgcagcacatacagccgggtgcgtcaacccctcacgtatatatgcaggtgagcgtgtttgctcccttcgccgacctgcagcagtcgggcgcgtccactcgcttcgaccccatgcagccggacgcctccgctcccttcggccagatgcagccggacgcctctgcggctctgctcgccatgccgatggccggcggacatactccgcccgccccggtttagccctacggcggcttcgcctcgctgccggtctcactatcatgggacactacttccttagctgccctgcgctcggctccatccccgctggcgcttggtacctgcggcgtttggtacatggactcgggcgccaccgcccacatgacatctcatcccagtactctaacctcctccacttcggttcatactcctacttgcatcaccgttggcaacggttcctctttactatcacacatgttggttatgcttcgtttcctttcacatctacacctatcactatgcctga

SEQ ID NO: 147487 - DNA, 841 bp, Zea mays
  Clone ID: MRT4577_66032C.1
ggccggccgggccagccgctcccttcctccagctccctctaccggtcgccaggaccatagctcggtctccactacaagcaatgaacgtccttgccctctccctcccctgtttccatggccgcgcacaaagctcctctgctggcgcgcccaagctccatctcacagcgcgccctctccgtggaagcttgcatcacgccccctctgctcgcctctggctcggatggcgcccccaggtcccaggttgctcggtatcaagcctccctacgcacagcttctcctgtccagcctcttcccaagccaccatctctagccgtcctgtggagcgccaactgcgtctcttcccacgtctaagctccagatctcatccatgacttcctccctggttcgctggtctgcgcgtccctgcttgccatggctgccggtcagcccttgcgacgctccagctcggattcagctcagctcgcccaagtcactcatggccgcgcacggtgttcttgtcgacgttgtgctcgtcgggattagcctatgcgcgtccctgctcccttgcgcgcgcacgctcctgctgagctcggccgtgtccatttcgccgcgctcggtctctagctccctgtgcgtgccgttgcaagctcgtcagccaccgttgtcttgtcacagaacccccaacgccgtcatccatggtcgcgacctcgccaaatgcgttcgtcgcttgacctagtgtcgtttggctcgtcgaccttgtccgctgccacgtgcacttgttcctaaacgcatcacgcagtagttggatctcgcgcgcgtggttttgaagctctgcgcgttcgttgtgccgcgtcatgtgccg

SEQ ID NO: 147488 - DNA, 401 bp, Zea mays
  Clone ID: MRT4577_66033C.1
atcagtgccgccgcacgagctggcgtggcgcagccgcgcggcgtcgctgtccgtgcacgagggggtcgggcggacgctcaaggggcgcgacctcagccgggtaagggacgccgtctggaagaggaccggcttcgaggactgagccgatgctgatcccccgccgcgcaggccgccggtatgtgtaggttagaatatgagcagcgctgctgattgcttatctcttgagttccttttctctctctctctctttttaaaaaaaagtcgggccagggtagtagtaagctctttttttttgtttcgttcatgttgatgtgagccaacagtgcgggggtgtgacggtgtgtcattcatatggtgtgacgattttccggacaccttaagaaaaaagacgaattttgtac

SEQ ID NO: 147489 - DNA, 641 bp, Zea mays
  Clone ID: MRT4577_66034C.1
ttttttttttttttattttttttttttttttttttttttttttttttttttttttttttttttttttttttttttggaagggaaaaatccttttcttttgggggggggcggaaaataccgggattttaaaaaattttaatgatccaaatgggaccaaccttgttacctagaaaagatcggcctttggctcagggaaccaaagggcccataaaaaaccacggccccacccaaaaaaccctgttaagtttttccaagtggggaacccacaacctgttgttactgaaaaaaaagcattttgcccttttgcttttgatggggccccccggttatttgggggccgccagctccagggggggcgaaacaacattcgggggggttttcatccgggccgttctagtcccattttgcttcctgctccaaggggccaaattcaaaacttgtttccttggacataataagggaccgagaggcgaggacaatccaaccaaacgggtcaaatgcaaccccccgcgggagttattaacctggttccccgggtttgcaggggcccttattgacgggcaaccaaagcctttttttgaccgggggccacgggaatggcaacaacggggagggccccgcccccccccagggggccaatg

SEQ ID NO: 147490 - DNA, 875 bp, Zea mays
  Clone ID: MRT4577_66035C.1
agctcggaattcggctcgagctgaatctagctacgtaccatctctttcgaatcgcgatcaagtttatttggtgcggggtcggaacaggaagatgggtaaaacatgggcgctcatcacccacctccacgctctcgcagggccgagtctcactctgatataccctctgtacgcgtcgatctgcgcgatggagagcgcgaccagggtggacgacgagcagtggctggcctactggataatctactccttcatcaccctcttcgaaatggcggccgagcatgtcctctactggataccgctgcggtacgaggcgaagctgctgctggcggcgtggctggtcctgccgcacttcaggggcgcgtccttcatctacgacaggttcgtcagggagcagctgaggaagaacggggtgaggctgcacggtcaccaccacggccacgccgccgaccacgtgccgcacgtcttccaggctgagcatcgtcatggcgtgcacagctgagagccccgagaatcgtggttcttccgagaagaaattaaagctgaactgcgccaacgcggttcgttgtctgccgtcacctgaactgcgcaggaccgccgcgcgatccgtttctcggtcgtaagctacttgtgttgcactcacctgtaacagcatctcgacagagcacttgacttggacatcgtcactccactaggctcgtcctgctaattcacatggacctgattcttcagctggagaagttcctttgtaacgaataaatttcgacagagacgcatgattgcgtaactgtgtattgcttattgctgaaacattccgaatattggattgcttgtgcactgacaggtgacaggctcgtatggtaaaaaaaaaaaaaaaaaaa

SEQ ID NO: 147491 - DNA, 268 bp, Zea mays
  Clone ID: MRT4577_66036C.1
cttatctttttcttcttactttatacctatctttcattgctcgacagaaaacgggcaacggacttcctttatttccctacaccaaatataaaaaatgaaccaggggagtaatcacacaggcatcggtggggatgcaaaaaacaaagggcctctcggaagaacgaggttgagcaacagccgactccaaaagggctaacccgtgcaaaacactgcaatggaagggccccaaataaacacgggccaaacaacaaaggccgtaaaaaggggg

SEQ ID NO: 147492 - DNA, 235 bp, Zea mays
  Clone ID: MRT4577_66037C.1
tctgtgatccactccaaatcaccctacactcccgggggcttttttataaatcctgggggctttcataaccaatattggcatccttctcttcctactcctccctctgccaacttccatccccttttccattcatataccctgcccctaccccgggctacactgcttgaactgctctaacgcctgccttaccaccaacatcggcacctactggcttaacccctacgccaactacctc

SEQ ID NO: 147493 - DNA, 628 bp, Zea mays
  Clone ID: MRT4577_66038C.1
agcagtggtaacaacgcagagtaacgcgggaggcacaaagccacgaggggaaaacaaatttagggcttgcaaaaaaaacctcaagcatgtccgagagtttcgaaaactcgctcccaaccttgttttttaaacggaataaaaaaatatatactgtgacactgactactcactatctcagctctcgatctttttatacttgcaacaaaaatatacgacagtctagatatggatgaacgttgaaagaataagagtgagaacatagatagaataaagggtgagacacaatttctaattcaaatataccagagaaaaaagtataagaatgattagtgtgatttaaaaataccttattttttaatacagaattgacttctatattttagaaaagatgttttataacttaacaaatatgctccaaatttatttagccgcttaaaactttgttaatttaccgattagtttttttaaaactactattaaagatgctttaggctaggtttgcccaagctaatctgtaccggtcttggactttttatcctgctccaatttataaatatagcaaaaaaaaaaaaaaaaaaaaaaaaaaaagtactctgcgttgttaccactgcttaagggcgaaaaccag

SEQ ID NO: 147494 - DNA, 518 bp, Zea mays
  Clone ID: MRT4577_66039C.1
gcttggaacctttgggctgatttatgtgcttgcttatgtgcttgaaaagccacgggtcctagccctatcgcgtaccggacacgcaatccctcggcgggatcacccccctcggagtccgcgaataagcccggggccggagtagctcacgtaggccccggcggggctctttcgtcgatagtatctcccgttcataaccctacagccgaaataaaaggatgcctgtccgaggaaaccgagacgcttccgagtagcgtcattttcggtaagtaagagcagaatactctaaccgcacggataaatcgaataatcgatgggaggaacccaacaagagtagagggggttcaactttacgaactcctagtagtagtagcccgccgtaaataatactaatcttcacagacaacgagtataactaaacctagtcccctcccggcagtacgagaactgccgcataacaccaaaaagggcgaagaaaacgttttcccaaaacccgcccccccgcatactcgacgcacaca

SEQ ID NO: 147495 - DNA, 263 bp, Zea mays
  Clone ID: MRT4577_6603C.1
tcgcccaccagtttcctgattactgtttccttcttctgaatctgaagatagatccgtcttcatcttgccttcgattgcacggtttcggggggaacaggcgacggtgatccgggagtatggccgaggcagcgaacgggaaggaggacgccaagaggacaggactggaacagccggttttaaccgcatcttaggccaacatcttgggatccttccatcagcgctcaaacccaagcaaaaaaaaagaacttttaattgttcaagag

SEQ ID NO: 147496 - DNA, 421 bp, Zea mays
  Clone ID: MRT4577_66040C.1
aaaaccttcttaccagacctaaaaatttcccccgaattagggcaaccaaattacccccacccgggggaaagaaccatttccaacccaacttacgggggtaacacctttacggggattaccaccttggccttggaaattttaatcaattatttttgggaggcccttaaacttttgtccattccaaatttttttaatttccccgggaaagaaccccatccaaggggaaaacctagtccttattccccaaagccccccaacctccatttccaaaatgggggtttcttgattctaacccccaaaacttgaaattaacctacttaacaactttttaacaaagtattgtggggaaaaataaccttacctttttgttaatggatgggttccccccttttaaataataatggtcctaattttcctgttc

SEQ ID NO: 147497 - DNA, 368 bp, Zea mays
  unsure (1)..(368): unsure at all n locations
  Clone ID: MRT4577_66041C.1
caggtctactccgactctctatccttcctccatcggggcggggaaacgcgcaggagtctggaacanatccattctctgcttccttggggaaaaaaaaacttcaataacagctgccgtcgggtcttctccaatgctgatttaacgctgtacccacctgctctatttgagctatatttcctgtacaaagcttagttcagatccattcacttcactcatgggctcattctgctccatcagaaacccaaaacacgcatcaggaacaggacgcccttgggaattcatctcttcgagccggtccgccgcattggcagccccatctacttcagatcatgccatgctcttgtgctagtgctcacgatgctattcta

SEQ ID NO: 147498 - DNA, 785 bp, Zea mays
  unsure (1)..(785): unsure at all n locations
  Clone ID: MRT4577_66042C.1
gggtacctcgaggccggccgggcttttattttccttctccaccgcggccccggaaaatttcccccttccccgtagcgaaaccctagccgccgcgccaaaaccaaatcccgccacgcccgaaaatttccggtggtttccttgccgcgaatcgatcgattccgagcgattcggttgattggatcgatttcgggtgcttcgcgattgattaggccggcaaagccgccaatccttgtgatctctcgaaggggtagagcgcggtcgaccgtcggtcatgtcgaggtgcttcccctacccgccgcctgtgtacttgggaaacccagtggccgtggccgaggcggagtcgaccgctaaggtttgttgaaccttcggatttacacacgcacaccggatcgtttgttcttcctggttgttgctgctaggatctgtgggttgtgcgtgtgtgatttgggtatcgcacgtgctgggaaagctaacctgcttgttcggttctaccccaatccatatggattgtggaggttttaatctctattaagtcaaaatctctcacaatccgtatcaatcccctccaatccatatggattgaaaataaccgaacaagccctgagtcggagcccggagtcagagggaagtgtctgaattctgtgtagcttagctactcgatctcattcagatcgnattaaaatttttaagtggatggncgctagtcgagatttattgagtccgattttcgaatattcgtcctgtggagcttagctacacgatgacattcagatcgatttaaaatt

SEQ ID NO: 147499 - DNA, 513 bp, Zea mays
  Clone ID: MRT4577_66043C.1
cctcgaggccggccgggtgcgcactgctctctgcctcatgcccgccccagcctcccaccctctcactaccaggcagtccctcccagcggctcgccagacacctgctcctccagacctctctccatccctctccggctctccgcctctccccctcgagaggaggtgaggagaggagaagcaacagaggggggcgcggagaccgaccgaccgaccgacgtgtactgagccctggcgctggtggagagtgcttctcgctcctggaggatccatacacggagcggtgctagataagggagaggcgccggggtcggtgtccggtgcgatgagtaagagcatcagggcaccgacggattcggagatctcgccggagaatatgaacagatctgcatctctgtatcaagatcttctggatctcacagtcgctattgagatacaatgggccactgaatccagcatttactgcaaagacatgccgacgaatgtgtatcggcctcacagcgtaacaataactga

SEQ ID NO: 147500 - DNA, 486 bp, Zea mays
  unsure (1)..(486): unsure at all n locations
  Clone ID: MRT4577_66044C.1
cgccgcaggaccggccggatcccgggcgacccacgccccgccagagaaccccacccagaccacacannggcagcacggccagaangcgccaaggagccgaagcaaggaacaccaccaggagaggcgacacggtggcggcccgaggagaacccgcaggggttggggaaccgacgggggaggccgcccgacgagctgcncccgaaagaccccaccanaaaaaagcaccgcacaccaccgcagagacccccacaagcccacgcacagggaggncagagccggagaaagcgagcaaaggcacagcaaggacaacggcgccagcgagcaaaaaagcagagaaaacggaggcgccagcacanccngcgggaacccgacacgcgccaacagcggangngccgggagggagggcgacaccgaagcggcaacgaggcacgcagccggangcgagccaggcagaacaccaagggcgnacaacccacacacgagaca

SEQ ID NO: 147501 - DNA, 204 bp, Zea mays
  Clone ID: MRT4577_66045C.1
acggccgggatcttgccatgaacgcttgcgtgcacatgattatgagccaatcagaaaggtacaagacctaaatgagcacgcccaaaaccagcctctctttcaagtgatggagcttcatgctgcttctacttattatcatcgtccatcgctggcagagttggttacgttgctagggaactccatatataatagaagaactatgat

SEQ ID NO: 147502 - DNA, 422 bp, Zea mays
  Clone ID: MRT4577_66046C.1
ttttattttttttttttttttttgtttttttttgggggttttttccgcggttttttccccaaagggggttttttttttttggggaacgggaggcccccgtgaaaaaaaaacggggtaaagggggggtttaccaagaactttttcggggttacaacccgctgggttaaaaattttacggtggaaataaaggggggaaatattggggccttttttttcaaaaaaggggtgggccaaaaactgccaaagggggcccaggtaaaaattttctcccaaaaaaaaaatcccttttttgggggttcggggccaaggaaagttttgtttaaaaccggcggacaggggtggggccaagccaattgggccccgggggttaaaagccccctttgggggtctttagcaacttttatgggggccccccagggggg

SEQ ID NO: 147503 - DNA, 193 bp, Zea mays
  Clone ID: MRT4577_66047C.1
ctacactacaccacaccacacactcattaccgctatcacacacaccctataccagcgagttatttccatcgtagaccgagactcaacaagctataagctatgccaacacaggaataatagatggcggcgtccaccgagacgaccgtctgtgacctgaagactaccactatcatataggctgctgctgctgcca

SEQ ID NO: 147504 - DNA, 338 bp, Zea mays
  Clone ID: MRT4577_66048C.1
ctcggtcggattccggagccaggcgtccgcggacgcgtccagaccatacacggctttgttttcaaggactacccggagccccataggaggttttctatacacgtggggcgagcgtgaactggaacttcgctctaaacgacccaggcttatctcgccttgccttcatctacataggcgcacaaaagaacgtcctaccttcaatcgactggcctgccatctaccgcatggaccctgataaaacccttcagttcctcacgttaatcatgctggacttcattactctttctgacgacgccttactatacaacagcccgccctgctatgccatttacaacagt

SEQ ID NO: 147505 - DNA, 370 bp, Zea mays
  Clone ID: MRT4577_66049C.1
tcgagcggccgcccgggcaggtagctttttttttttttttttttttttttttttttttctttttttttttttttatttaaatccataaatttattatgaccatgctttttttattggtcagaccacacacggccaagagagtcagtaaaaccaaaacatacctaggacccggccaaacttagggggaaaaccaaaaaaaaaaagggggggcctataacggcattaaaccccgcccggcaccacccaaagggggaaatccaacacaccggggggcaatactaagggacccacactcgcacccaagactaggggaaaaaagcggtaaagagctaaagccctggggggacaaaaggagtcgcagctaaacaaa

SEQ ID NO: 147506 - DNA, 843 bp, Zea mays
  Clone ID: MRT4577_6604C.1
tctctgccgggcccaaggcccgagcccccaaccctagggttctcacggcgccataagagcctctcctctctccccggccgccgcccgccgcccgctgccgctgcttgcgcctctctcgcccgcatcgccgcagggttcgcaaagatggcagtgccgctgctgacgcagaagatcgtgaagaagcgggtcaagcagttcaagaggccacacctcgaccgctacaagtgcctcaagccaagctggcgtaggcccaagggtatcgactcccgtgtcaggcggaagttcaagggatgcaccttgatgcccaacattggatacggctctgacaagaagacgaggcactaccttcccaacaagttcaagaagtttgtcgttcacaacgtctctgagctggagctgctgttgatgcacaacaggacatactgtgccgagattgcccacaacgtgtccacccggaagcgcaaggagatcgtcgaacgtgctgcgcaactggacatcgtggtcaccaacaagcttgccaggcttcgcagccaggaggacgagtgaaatggccattatttccggttgtgatccgctggtgtgcaagatgttgctgagatccgagattcattctctgccatttttttatgcttatgttagacttttccaatggacaaaattctgttataagcggaagagtgatggcgaggaccatctagtttttgaccggacatcatgaagtatatgcagccttgtgcatgtaatggatctgtggctccgaagctacatgcatttttctgaggcgcaaatgttggcctgttcaaatgtagcctaatttattagttttcactaaaaaaaaaaaaa

SEQ ID NO: 147507 - DNA, 139 bp, Zea mays
  unsure (1)..(139): unsure at all n locations
  Clone ID: MRT4577_66052C.1
agctcccgaacgcgcccctagcgttttttttttctttttccttttttataatgcgagaaagccattattcgcttgttttattcctaatcatgcggcgcntgcggcggcttgccgccttctttgttgggtcctcggccgc

SEQ ID NO: 147508 - DNA, 523 bp, Zea mays
  Clone ID: MRT4577_66053C.1
agggggaaaaaccccccttttttttttttgaaaaaatttcaaggaaaaccttaccgggggagaaagggccggggcccgccagggcccaacctttccgaacccaaaaaaccaaccagcggggggccaaaagattattttaaaaggcccccgggctggcggggtttaaagacccccatttttaaaagccaaccccgccccccccaaagggagcgccccggggtgaatttttggggccaatttttttaaaaaaaaaagcccactttggcccaggggggccacggtttattccccggggattttccctttggggaccccggacttgaaacccaaggggggggccccccgggaaaaccccctggaaaactgggggaccctttttcccccggggggcaaaaaaaccccccggggggaaaaaaaaggaacccggaaaggcccccggggggccaaaaagcccccccgaaaaaacgggggcgggggcccaaaaacctctaaatcggagagaaaccccccccggggggcgggg

SEQ ID NO: 147509 - DNA, 703 bp, Zea mays
  unsure (1)..(703): unsure at all n locations
  Clone ID: MRT4577_66054C.1
ggtacacctcgggtctggccgggtttgttcagtgtgagcagtagctgcttgtttatgttctagatttgagtaggatcggataggattaacgattaggtggatgcgagctgatttgtggaattcgtcgaactatgtctccggtgccttcatgtaatccctttttgaacttcctaatagtaactgcagtaagattttttttccctgatcagatttgcagtcagtagtttccattgtcgcccctggtgtagccattatatatctgctttgatggattgcacatttttttgaactgaatttctactggaactctgtccttcagaaattgtcactgtcaccttggttagtaatttcacactgcagtattcgaaaatataccttacctgatcattgaaaatataccttagctgatatgccatattgaactgtgttttttcttcaatcgttagactccttgctgacagatgtcgctcttcctggatgcctgcagacgcaaagcggttgattgngtaggaggttctcggacccttccgttcagagtgatatgaagctatggccattcaaggtcgtggcgggccctggcgacaagccgatgatcgtggttagctacaagggtgaggataagcagttctctgccgaggagatctcctctatggtgctgaccaagatgaaggagatcgctgaggcctacctcggctccaccatc

SEQ ID NO: 147510 - DNA, 336 bp, Zea mays
  Clone ID: MRT4577_66055C.1
ggtaatatggcttggtttggatgcactcagtatccaccttttggaggggattaggatgtaacttagtttaatttcccctccaatccacgccaacatgggtggtttgaggtagataccagtgcatccaaacaagacctatactggtggctataataaagaaaattatgagatgaagcgcacctccatctttctaattgatgctatagtggatctctggccaataacgtccgcaatcgattactctgtcagcacttgatggttctttgatgggcattgtgaatactggttggacacattcatgattgccctcggaacaaatgtactcatctactgggt

SEQ ID NO: 147511 - DNA, 453 bp, Zea mays
  Clone ID: MRT4577_66056C.1
atgttctatctgtagcatgaggcgattttttcactcaggctggctgatcagccaggatttgagcttctgaccattacacgtgtgatcttgtactacatcacattaccaaccgcaccgtgggactggatggacaacttagctgatttggaggcgactgcggcggtggaggcagcaacaacgggggtcttaaaaaggaagagggacacgccctccatcgaaatggacatgaacgtgcctttactgttgactgaaaaactatcacgagctggcccctatcatgcaatgccacccaacgcagaaccgctggtctaactacagtggtcgatttgaacggacgggagacagggcccatgcgtacgtctacgcggggttacacaagagaattcccagaccgttgtctgcaagcgtgccaggcttccctatactgagacacattagagctgtgtgtactga

SEQ ID NO: 147512 - DNA, 652 bp, Zea mays
  unsure (1)..(652): unsure at all n locations
  Clone ID: MRT4577_66057C.1
ggcgattgggaccctcgaggccggccgggaggacatacgtatcgcgctcggtctttcgttcccggtagaacactacaaacaacttcacatattccatttttctcacaactcattcaaaatggccagcggagatgccaccctctttgaggagtcctttaccgtaatggagtacgatcagtccaagtatgaccgtgtcgcacgcattcattgcacatcggccgactcgcagaccatcatgtcactcgatatcaacatcgaactattcccttgtgtccgtggtgactctctgcacgtcgttttgacaacaacgctggctctggatggaagcaaggaggaggagaagggctggcgggacgttggtaagggcggtgatgcgccagccacgattgccgacctctacgactatgtgtgccatggcaaaatctacaagttcgaagagacattcgatggaaacaccatcaatgcttacngtctctttcggtggtctcctcatgtcgctccagggccctgtcaagaagttgactccgctccgcgtcgataacgtctaccttcttgtcaagaaataatccgaagcgcaaatgatacatttatctagactatagctcttcaaaaaaaaaaaaaaagcaaaaaaaaaaaaaaaaaacccgcggcc

SEQ ID NO: 147513 - DNA, 341 bp, Zea mays
  Clone ID: MRT4577_66058C.1
actgatgccataatgtacacgacagacacacatcatgaataggaccgagcgcatcttgggatcaacgggcccctctactccatctggaccaccccttgaggaccttacggaatgcctccacaggctgtatactatcccactataggtgggttcttgaaaaaaaaccaccgtgcggaagtcatatatggatgtgacctgccccatatgattttgggaaagaccaagccagccaaatcattattagggtgccgcatgctacgcgatctatgtcggctagaacaggcggaccctgctgctgtgaatgtctgcctcgcaccagtttgacagcactatgaacggac

SEQ ID NO: 147514 - DNA, 225 bp, Zea mays
  Clone ID: MRT4577_66059C.1
tcgggagagtgctcctactcctatgaagaggggctacaaactggctaagcttggatgctgggaggaggaagccgatgccatggaggagaaggccggagggcttgatgagtaagacgggcttccggggtcgattcgcttcttggtgccaaagaaaagactaacctagccgccgccgtcgctcgtctgcctgagaggcgccacgcaccgaggatttgggcgagttct

SEQ ID NO: 147515 - DNA, 526 bp, Zea mays
  unsure (1)..(526): unsure at all n locations
  Clone ID: MRT4577_6605C.1
ggcggccgaggaccagcacnacanncgcacggccgggacaccgcangggngggangncacgcncaacccgnnccagcncgngaagggngncancnngcncgccgncaccgcgccgacggggaccgggnggnncgcccngaagccaccccngcaggacaaggagaggaaagngcccacggnggngancccncngcaggcngcagcnaacancgcngcngccggggncggcgagacgggnncccncccgcagggacgggggacacggaaccagancncccagnnngnngangnncgccgcggcngcgcngcgcnccccccagnggngnggncgangcgcgcccngcgggagncacccaagacagacggcaaggcagccagaacccnngccaagcncangcncnnccgccagnncnacgnngccgnnangggacaccccnacnncaccaggancannggggangcccncaagacaannaccaaccacaagcaccagagggccagcgccgcagcggaggagggggccacc

SEQ ID NO: 147516 - DNA, 411 bp, Zea mays
  Clone ID: MRT4577_66060C.1
gttaaaaggtgatatttgtgaagaatccctcatggatactaaaactgctaatggttcttgggattgtagtgaactaaataatgattcctgtgggaaaacttcagccctttgcatgaaattgaatcggcctgcacttaatgttacacaagccacatctgtacctgaccgattatcttcgtctttggagaaagccagtgaaaatgtggccgcaagtggtgtcaaagagacaaaaacatttggctcagctgtttgtgatgttgacagaagtgcagaaccaattgaccgttcaaacaacaatgtgacgagcaacacaatgcgacatagtgagactattgtagtggattcagtgaacaatgtgggggatacagcaagcaactcttcactggctactaaatcatccagtatacaatc

SEQ ID NO: 147517 - DNA, 293 bp, Zea mays
  Clone ID: MRT4577_66061C.1
ctgccacgtccaagcaaaccgggaaaggagaggatcccggagccgcgtgatggccagaggcctggtcgcccctcactgggtggccgtgggactgctgtcctggcatagcttggggcttctggtggctggactcgggggtcatgacgacctgcacgacgactgcaagaggacttccatggccacagccacaggcactcacatgaagatttccaccatggccacagccatgcccatggccatggccacactcacgagagcatctggcatggacatacccacgatcacgaccatgg

SEQ ID NO: 147518 - DNA, 403 bp, Zea mays
  Clone ID: MRT4577_66062C.1
tttggctctattttcggtataaagttatttagattgagtgactacagggtacaattcgtggtttacttcgcctacataaacttgcaagtttcatttgcttttcttatggcaacattcttttcaaattgcagaactgctagtgtgactggatatctcttcacaattggttctgcctattcaggagaatatttattcaggcctatttttgaagatatgtccctctcaagaagctggagtacactcatggagttgttcccaccattttgtttgtaccgcataatctatgagttctctccacctccatcacctttgtatcgtacaaacttttctggagtacactgggaagacttaagtgatcacaagaatggaatgttagacattctcattataaaggcagtcgagt

SEQ ID NO: 147519 - DNA, 599 bp, Zea mays
  Clone ID: MRT4577_66063C.1
gaagtcaattgcagccagccgtgaagagagtgatgtctttgttacgaataataatgggaacatggccaaagttttagctggacggaggcgatacatgggccacaagagaactattcgcccaaatgcaaagaaactcaatgtactatttcaaacacggaatcaattgagctgggataccttttcacggaaggtacagagagttcagaggggtcttatgggggagccggacgatatcagaccaaaacaggatgacttccatgaatttccatcatcttgcatctgctcaagaaaacctgggaacatatcggccacaacatgaaaaccaaccggacagggcaaatgcagcgaggatgctgctagttgggcacttactttgacagtagggaaacatatgcttacgttgaaagaaacacggtagaattaacagggcaaggagggatgcatagtgcatatatgtcatggctcggtaagatgccacgtcaaggagagttgccaactggtgatgtcatgcctgtaaattattgttcgtacatgattaattctttaaacatgttgtccgctcgctgttcctcaaaaacggccgaaaaagaggatccaag

SEQ ID NO: 147520 - DNA, 407 bp, Zea mays
  Clone ID: MRT4577_66064C.1
acgaaaacgatccgaaaaaaccggtagtcagaacgggacggtacaggatgggatttttcggtaccgttttcatccctagctcgagccaaggagtccggcggaaggccgccggtgtgcgaaacagcgtcagcgtcgagaggagaaaaagtcaccgcgagtccaggatccatgctgaggcacttggtccggacgggccagctcgccgacgcgaggagcctattcgacgcgatgccgcgccgcgacgaggtcgcctacgcgactcttctctcgggctatgccgcggcagctgacttcccgggcgctatggcgctcttctcccgcttccgcgcctcctcctcccagccacacgacgccgcggatccgttcatcctcagccccgtcctcaaggcgtgcgcttccgctgccgc

SEQ ID NO: 147521 - DNA, 222 bp, Zea mays
  Clone ID: MRT4577_66065C.1
tcgacgtcaccaacttcgtgcccggcaagtgtaggggtcggaggggccaccgcggggcgtcaggggtctccgatgtcgatatctatgtgttcggatgcacgttagcgcgcactggttccagattgaaccatgatgtaaattacttaccgttccagggttcaatcggcaaggaataattgttgtgttcacttgtctctggcttttcaacattttgtaatatta

SEQ ID NO: 147522 - DNA, 657 bp, Zea mays
  Clone ID: MRT4577_66066C.1
gccgcgtcgacttgtttcttacctaaatttattagtttcctctttatttgtaactgttctatacttaggcgggtggaatttctctattcgcctatatatccttttttggatttttccaaatgaataaaataattggcaattttggaaatggtaataggtatctttattacattaactaaagcttatttatttctcttcatttctatcacaataagatggactttacccaggatgagaatggatcagttattaaatcttggatggaaatttcttttacctatttctctgggcaatctcttattaacaacttctttccaactagtttcactataaataagaatacaataacagtaagaatattttcaacacaaaagttctctcaaacaagagaaagaaacatacctttttcatatatagatttagaatatgttccctatgctaactgggttcattagttatggtcaacaaacaatacgcgccgcaagatacattggtcaaagtttcataattaccttatcccacacaaatcgtttacctataacgattcactacccttatgaaaaatcaattacatcggagcgtttccgggggcgaatacactttgaatttgataaatgcattgcttgtgaagtatgtgttcgcgtatgcccgatagat

SEQ ID NO: 147523 - DNA, 413 bp, Zea mays
  Clone ID: MRT4577_66067C.1
attggaaaaaaactttgggccctcgtcttattcaaaatatttatttaaaagatgtaaaattttaagccaagtacaagctaccttacgtgataaaacatttcacaaaaaatggtaattcatttttttttttaacaagaccggggatcaaagtttttttaaaagttaactgggccctatatttatgggtgggggggggatatatgcatttcgtttgctttcgttggccgagcgccgatgccacccacaaaatgtcagaagagccccgagtttgatgggttcgtcgttcacgtgtggggggtgtctgatgtctccgccaggtgccggggcactaagactatttctagcagaccgtataaaaatcgggcaaaatactattttgtgttgtagatcacaccggttgtataatattggct

SEQ ID NO: 147524 - DNA, 199 bp, Zea mays
  unsure (1)..(199): unsure at all n locations
  Clone ID: MRT4577_66068C.1
tagataaaaatattctaccccccccccggcggcacacaagtcgtcatctcagatttttaacaccnccatcaactcccacacccagctataacagaccatctggacaaaacacatagcataacctcaacgtacacacatattcatgctaatacaaaaataagccaacaccatatctaaaatccacaactacttctactaa

SEQ ID NO: 147525 - DNA, 205 bp, Zea mays
  unsure (1)..(205): unsure at all n locations
  Clone ID: MRT4577_66069C.1
tgtcttccacgcgngggccacctcggaccaggggcttttttcgaactttttcagtttaaaggccttccagctgtatatacggccgaacgtatcgacgcgagtggtgtacccgtagcggctctgcatgggggtcacctccatctccgtgatgtttctctgcagggcaagcctgacgggcggctccttctttctaagcaacatcgtg

SEQ ID NO: 147526 - DNA, 328 bp, Zea mays
  Clone ID: MRT4577_6606C.1
atcccctacgagatctgccccctcgccctcgccctggtccaatccccatcttcttgggggccgatccagcctgcttcaattccccggcgatggtcctgtgcaaattcccaaaggggacgaggggttactggttcggacattaagtgcccctctggggggtggggctattctttccggaacattaactttttgtggtgaaaaactattcttaatgggttggtaaattttagtattactggccacaacactggtcgtcttgccattcttgtcttgaaagggggacttaagaaaccacaccaatgggttgctttgatgttggacacaccaa

SEQ ID NO: 147527 - DNA, 337 bp, Zea mays
  Clone ID: MRT4577_66071C.1
tcgctcgccgctccgcgatccgcgagcagtgcaccgcgaacccaagatgcgccgacatccgatccatgacacaggggaatggatcggcggacgccaccgatcgcgtggtccagcacggcctcctcgtgctcctccaactccaccccgtccgcccgcgcgtctgcctccacctccatgggcatgggcgatttgctgtgcaggtctgaaccctgacggtctcaactccttcttgtccggtcggctgtgtctccctcccaactcccgcagccgaagcgcgtagccccgccgccgaagcgcgcactccacgatctcgaagcctgcctcggcgctgctcccc

SEQ ID NO: 147528 - DNA, 662 bp, Zea mays
  unsure (1)..(662): unsure at all n locations
  Clone ID: MRT4577_66072C.1
actatgatgaacctttgcttttgtttacatctcaccggagatgggggtcacgctctccatgctggtcaggaggctattccaccagaaggaggatgagcgattctacatagatcgcgtctcagatgcaccgtggctacagaccactatcctctacaaagtcacgttcgcagatatcatgaccgccatccccaccattgcatttaacgcttaaactggcgcagtatcgaaaacattgactatcactagcttgatgatcgtctcgaggtcacagacaagatccgaaccctgtggagggcactcacttccagaacacccaaagtcctcctttttggtgtagacagcaacgacacgacagcgtgttgttgtcgccaaacatgatctccatcgtatggtgaatgatgacgaactccgtgatgctcgagccttttggagtttgcaaacgagcaatatctgtctaatgacatgaacgctgactgtgaatcaccgataagcttggactgcactccctgcaccattgacactgcgacatcctgagcacatgtgctacctctggtgagggctatgatgagaagcatgactggctatcgaacacatcgctatgaccgctcggagcatctaggcaaggattcaatcagagnaagcgaactgcctctaccattaca

SEQ ID NO: 147529 - DNA, 1173 bp, Zea mays
  Clone ID: MRT4577_66073C.1
atggaggacttgagcaacatgaccctgaccattgtgattgggaaaaatgtggcttttgagatgtcgcaaaaaatgtgtcggggagtggagccaacttcctcaagaccatatgcttttacatgtgatgaaaggaagggcaaaaagaaggctcccactccaagttcctcaagtgaagaggaggaggaagaagaaagtgatgatgatgaagataatcaaccatgcacatcatcctccgaggacgtaaaaacaatccgacacgtcggaaaggtaatgaggatgatccgcaagattaatctaatgggtgtgcccctgcaggtcgaagatcttctctttaacattgataggaaaaagcaaaggaagagaggatgcttcgcatgtggggagaaggcccacttcagggacaactgtccaaatatggccaaacccaaaaaggagaggagcaaaggcaagacgctaacaagtgttagaacttgggatgattcttcaagtgaagatgaacctccaagtacacgcagccaccggtcctcatcacgctcatcacggtcatcacacaaatgccttatggcaagaggtaacaaaagcattccatcctcgagtgatgaaagtagtagtgatgatgaaggtgagggaaagccctctgtagatgagcttgcggaagccgtagaatttttccaggatgtctgcaccaagcaaaaagctcaacttaaaactttgaaaaataagttgattagctcccaaaatgattataaagaagtggctcgccttggcaaggctttgtatgacaagaaaggcaaagccaaacaaatccgacctccacaggataacaccactgcgggagtgaacaagcctatggagggagaaactgtgatttgtaggctatgccacaaggaaggccataagtctttccaatgcaaggcgatgaccggggataaacaaaggcaaaagctcaagcaaaagccatcaagcaaaatctccaacacctacatcaaaaaggtggacaaaaagactgctacaccatatttgatcaagaagaaaaaggatggaaaggtgatagcaagcaaggccaacaagcaagccaacaaaggaaagggggccaaacgtatctgggtgccaaaggaaataatttcaaccatgaaaagcaccaagaaggtttggatcccgaaagggaagtga

SEQ ID NO: 147530 - DNA, 286 bp, Zea mays
  unsure (1)..(286): unsure at all n locations
  Clone ID: MRT4577_66074C.1
gcggattcgttagcttaaggaggcgctggagcangnccggcgggcgttttttaaactgggcgaggcctacaccaatctcggcgtntctctatcggaggagaccacagcagctcccccggcgggcgaggaccgcgaggctgatctcgatgccaatggacatggcgcggagacatattatggcgcgagtgactccgattacgagacggcccataaccgtgctcttcatcaacctacggtagcatcactggagttactaacaacgctcaatggcgaacactaggcagga

SEQ ID NO: 147531 - DNA, 1647 bp, Zea mays
  Clone ID: MRT4577_66075C.1
atggatacccataggccaccacacttcgacggcactaacttcccatattatagtgctagaatggcttgttacctagaggccattgatctaggtgtttggagagtcactcgtgacgggatgaaacccctcaagaatcccgagaaacccaccacgagtgaggaaaaagaaattcatttaaatgctagagccaaaaattgcttgtatgagtctcttagcatggatatttttaaccaagtatttaccttgaaaactgctaatgagatttggctaaaattgcatgagctccatgacggcacatccaatgtccgtgagcaaaaacattgcctagtcttaaatgagtataattcttttgctatgaaagacgatgagcttgttagatacatgtattctcgtttgaatctaataatcaatgagctcaactctattggcattaataagctaggcgatgcggacattgtgaggaagattatctccttgctaccacaacaaagatatgggagcatcatcaccatccttcacaacatggaggacttgagcaacatgaccccgaccattgtcgaggatcttctctttaacattgacaggaaaaagcaaaggaagagaggatgcttcgcatgtggggagaagggccacttcagggacaactgtccaaatatggtgaaacccaaaaaggagaggagcaaaggcaaggcgctaacaagtgttagaacttggaatgattcttcaagtgaagatgaacctccaaggacgcgcagccaccgatcctcatcacgctcatcacggtcatcacacaaatgccttatggcaagaggtaacaaaagcattccatcatctagtgatgaaagtagtagtgatgatgaaggtgagggaaagccctctgtagatgagcttgcggaagccgtagaatttttccaggatgtttgcactaagcaaaaagctcaacttaaaactttgaaaaataagttggttagctctcaaaatgattacaaaggtttgcttgaaaaatttgaaacttttgcaaacttaaatagtgagctatcaactaaaattgagctattagaatgtagtgctccatccactgctaccgatgatagccttattaaaaagaatgaaaaattgaaagctaagttagctagctcccaagaagctattgaaaatttgctagagaaaatggaaattcttagcattcacaataatgagctaactactaagctagaaaacattggtagcaccccagcagcatctttagttgaaatacctgaaataattaagaaagatgcttctacttcctgctttgatttaattgatgattctaacccctgcaaccaagtcgttgttgagaatattgttgtagagacatgttcggatgaggttgcaaaggaaaatgaacaattaaagcaagaagtggctcgccttggcaaggctttgtatgacaagaaaggcaaagccaaacaaatccgacctccacaggataacaccattgcgggagtgaacaagcctgtagagggagaaactgtgatttgtaggctatgcaacatggaaggccacaagtctttccaatgcaaggcgatgaccggggataaacaaaggcaaaagctcaagcaaaagccatcaagcaaaatctccacacctacatcaaaaaggtga

SEQ ID NO: 147532 - DNA, 1941 bp, Zea mays
  Clone ID: MRT4577_66076C.1
atggatacccataggccaccacacttcgacgccactaacttcccatattatagtgctagaatggcttgttacctagaggccgttgatctaggtgtttggagagtcactcgtgacgggatgaaacccctcaataatcgcgagaaacccaccacgagtgaggaaaaagaaattcatttaaatgctagagccaaaaattgcttgtatgaatatcttagcatggatattttcaatcaagtatttaccttgaaaactgctaatgagatttggctaaaattgcatgagctccataacggcacttccaatgtccgtgagcaaaaacattgcctagtcttaaatgagtataattcttttgccatgaaagatgatgagcttgttagagacatgtattctcgtttgaatctaattatcaatgagctcaattctattggcattaataagctaggtgatgcggacattgtgaggaagattatctccctgctacctcaacaaagatatgggagcatcatcaccatccttcacaacatggaggacttgagcaacatgaccccgaccattgtgattgggaaaatcgcggcctttgaaatgtcgcgtaaaatgagtcgtggagaggagccaacttcctcaagaccatatgcttttgcatgtgatgaaagaaagggcaaaaagaaggctcccactccaagttcctcaagtgaagaagaggaagaagaagaaagtgatgatgacgaagataatcaaccatgcacatcatcctccgaggacgaagaaacagtcgaggatcttctctttaacattgacaggaaaaagcaaaggaagagaggatgcttcgcatgtggggagaagggccacttcagggacaactgtccaaatatggccaaacccaaaaaggagaggagcaaaggcaaggcgctaacaagtgttagaacttgggatgattcttcaagtgaagatgaacctccaaggacgcacagccaccagtcctcgtcacgatcatcacggtcatcacacaaatgccttatggcaagaggtaacaaaagcattccatcctctagtgatgaaagtagtagtgatgatgaaggtgagggaaagccctctctagatgagcttgcggaagccgtagaatttttccaggatgtttgcactaagcaaaaagctcaacttaaaactttgaaaaataagttggttagctctcaaaatgattacaaaggtttgctagaaaaatttgaaacttttgcaaacttaaataatgagctatcaactaaaattgagctattagaatctagtgctccatccactgctaccgatgatggccttattaaaaagaatgaaaaacttaaggctaagttagctagctcccaagaagctattgaaaatttgctagagaaaatggaaattcttagcatacacaacaatgagctaactactaagctagaaaacattggtagcaccccagcagcatctttagttgaaatacctgaaataattaagaaagatgcttctacttcctgctttgatttaattgatgattctaacccctgcaaccaagtcgttgttgagaatattgttgtagagacatgttcggatgaggttgcaaaggaaaatgaacaattaaagcaagaagtggctcgccttggcaaggctttgctatgccacatggaaggccacaagtctttccaatgcaaggcgatgaccggggataaacaaaggcaaaagctcaagcaaaagccatcaagcaaaatctccaacacctacatcaaaaaggtgaacaaaaaggatgctacaccatatttgatcaaaaagaaaaagaatggaaaggtgatagcaatcaaggccaacaagcaaaccaacaaaggaaaaggggccaaacgcatctgggtgccaaaggagataatctcaaccatgaaaagcaccaagaaggtttggatcccgaaagggaagtga

SEQ ID NO: 147533 - DNA, 1620 bp, Zea mays
  Clone ID: MRT4577_66077C.1
atggatacccataggccaccacacttcgacaacactaacttcccatattatagtgctagaatgtcttgttacctagagaatgttgatctaggtgtttggagagtcactcgtggtgggatgaaaccacccataaatcccgagaaacccaccacgatttttacattaaaaactgctaatgagatttgcctaaaattgcatgagcttcatgacggcacatccaatgtccgtgagcaaaaacattgcctagtcttaaatgagtataattcttttgctatgaaggataatgagtttgttagagatatgtattctcgtctgaatctaatcatcaatgagctcaattctattggcattaataagctagaaagaaaaggcaaaaagaaggctcccactccaagttcctcaaatgatgaagaggagaaagaagaaagtgatgatgatgaagataatcaaccatcaatgtcatatcatcctccaaggatgaagaaacaatcccatgcgtcgaaaaggtcaaggatcttctctttaacattgacaggaaaaaggaaagaaggagaggatgcttcgcatgcgaggagaagggccacttctgggacagctgtcaaaatatggccgaacccacaaaagggaggagcaacggcaaggtgcttacaagtgtcaaaacttgggatgactcttcaagcgaagatgaacctccaaggatgcacagccaccgatcctcatcacgttcatcacgatcatcacgcaagtgccttatggcaagaggatgtttgcactaaacaaaaggctcaacttaaaaatttgaaaaataagttgattagctctcaaaatgattataaaggtttgatagaaaaaattgaaatatttgcaaatttgaactgtgagctatcaactaaaaggaatgaaaaacttaaggctaagttagctagctcccaagaagccattgaaaatttgctagggaaaatggaaattcttagcatacacaatgatgagctaactaataagctagaaaacattggtagcatcccagaagtatattttgttgaaatacctgaaattatcaagaaagatgcttctacttcttactttgatttaattgataattctaacccctgcaatcaagttcttgttaagaatgttgttatagaaacatgttcggatgagattgcaatggagaatgagcaattaaagcaagaggtggcttgccttggcaaggctctgtatgacaagaaaggcaaagccaaacaaatccaaccttctcagaataacaccactgcaagagtgaacaagcctgtggagggaaaaaccacgatttgtaggatatgccacaaggaaggccacaagtcttaccaatgcaaggcgaagaccagggataagcaaaagctcaagcaaaagctcaagcaaaagccaacaagcaaaatcttcaacacctacatcaacaaggtggataaaaaggctgctacaccatatttaatcaaaaataaaaagaatggaaaggtgatagcaatcaagtccaacaagcaagccaacaaagggaaagggaccaaacacatttgggtgtcgaaggaaattatttcaaccatgaaaagcaccaagaaagtttggatcacaagagggaagtga

SEQ ID NO: 147534 - DNA, 105 bp, Zea mays
  Clone ID: MRT4577_66078C.1
ctaggtccatccatcaagtggtcatctccattcacacaaacaggataggtcaatataacataaaactggtaatggcaaggtcttcattaggaaacacaacatcaa

SEQ ID NO: 147535 - DNA, 293 bp, Zea mays
  Clone ID: MRT4577_66079C.1
agataataatgactatggtggatccttctttcctttgcattctagcattagtcgggctccggacgcgtcccagtgctaagctttagactcgcggtatagtggtatgataatccttccggtcacaacatgaacttacatttgactttgcatggtctttaatgcgtatctttgaccactaattacttctataatatattcataaaatgcttcaaatataagatattttgcatgtgctttgaacacaaatcgacacatataactgaataattatgataggaaactatggaagcact

SEQ ID NO: 147536 - DNA, 858 bp, Zea mays
  Clone ID: MRT4577_6607C.1
cattgggtacctcgaggccggccgggccccaaggtccgagcccccaaccctagggttctcacggcgccataagagcctcccctctctccccggccgccgcccgccgcccgctgcccgctgccgctgcttgcgcctctctcgcccgcatcgccgcagggttcgcaaagatggcagtgccgctgctgacgcagaagatcgtgaagaagcgggtcaagcagttcaagaggccacacctcgaccgctacaagtgcctcaagccaagctggcgtaggcccaagggtatcgactcccgcgttaggcggaagttcaagggatgcaccttgatgcccaacattggatacggctctgacaagaagacgaggcactaccttcccaacaagttcaagaagtttgtcgttcacaacgtctctgagctggagctgctgttgatgcacaacaggacatactgtgccgagattgcccacaacgtgtccacccggaagcgcaaggagatcgtcgaacgtgctgcgcaactggacatcgtggtcaccaacaagcttgccaggctccgcagccaggaggacgagtgaaatggccattatttccggttgtgatccgctggggtgcaagatgttgctgagatcggagataacttctgtaccatttttttatgcttatgttagacttttccaacggacaaaattctgttataagcggaagagtgatggcgaggaccatcttagtttttgaccggacatcatgaagtatatgcagccttgtgcatgtaatgggatctggatgggtaatgaatctgtggctccgaagctacatgcatttttctgaggcgcaaaaaaaaaaaaaaaaaaggcccctagggcc

SEQ ID NO: 147537 - DNA, 2109 bp, Zea mays
  Clone ID: MRT4577_66080C.1
atggatacccataggccaccacacttcgacggcactaacttcccatattatagtgctagaatggcttgctacctagaggccgttgatctaggtgtttggagagtcactcgtgacgggatgaaacccctcaagaatcccgagaaacccaccacgagtgaggaaaaagaaatccatttaaatgctagagccaaaaattgcttgtttgaatctcttagcatggatattttcaatcaagtatttactctgaaaactgctaatgagatttggctaaaattgcatgagctccatgacggcacatccaatgtccgtgagcaaaaacattgcctagtcttaaatgagtataattcttttgctatgaaagatgatgagcttgttagagacatgtattctcgtttgaatcaaataatcaatgagctcaactctattggcattaataagctaggtgatgcggacattgtgaggaagattatctccctgctaccacaacaaaaatatgggagcatcatcaccatccttcacaacatggaggacttgagcaacatgaccccgaccattgtgattgggaaaatcgcggcctttgagatgtcgcgaaaaatgagtcggggagaggagccaacttcctcaaagccatatgcttttgcatgtgatgaaaggaagggcaaaaagaaggctcccactccaagttcctcaagcaaagaagaggaagaagaagaagaaagtgatgatgatgaagataatcaaccatgcacatcatcctccgaggacgaagaaacaatccgacgcgtcggaaaggtaatgaggatgatccgcaagattaatctaatgggtgtgcctctgcaggtcgaggatcttctctttaacattgacaggaaaaagcaaaggaagagaggatgcttcgcatgtggggagaagggccacttcagggacaactgtccaaatatggccaaacccaaaaaggagaggagcaaaggcaaggcgctcacaagtgttagaacttgggatgactcttcaagtgaagatgaatctccaaggacgcgcagccaccggtcctcgtcacgatcatcacggacatcacacaaatgccttatggcaagaggtaacaaaagcattccatcctctagtgatgaaagtagtagtgatgatgaaggtgagggaaaggcctctctagatgagcttgcagaagccgtagaatttttccaggatgtttgcactaagcaaaaagctcaacttaaaaatttgaaaaataagttggttagctctcaaaatgattacaaaggtttgctagaaaaatttgaaacttttgcaaacttaaatagtgagctatcaactaaaattgagctgttagaatctagtgctccatccactgctaccgatgatagccttattaaaaagaatgaaaaacttaaggctaagttagctagctcccaagaagctattgaaaatttgctagagaaaatggaaattcttagcatacacaataatgagctaactactaagctagaaagcattggtagcaccccagcagcatctttagttgaaatatctgaaataattaagaaagatgcttctacttcctgctttgatttaattgatgattctaacacctgcaaccaagtcgctgttgagaatattgttatagagacatgtacggatgaggttgcaaaggaaaatgaacaattaaagcaagaagtggctcgccttggcaaggctttgtatgacaagaaaggcaaagccaaacaaatccaacctccacaggataacaccactgcgggagtgaacaagcctatggagggagaaactgtgatttgtaggatatgccacaaggaaggccacaagtctttccaatgcaaggcgatgaccggggataaacaaaggcaaaagctcaagcaaaagccatcaagcaaaatctccagcacctacatcaaaaaggtgaacaaaaaggacgctacaccatatttgatcaagaagaaaaagaatggaaaggtgatagcaatcaaggccaacaagcaagccaacaaaggaaagggggccaaacgcatctgggtgccaaaagagataatttcaaccatgaaaagcaccaagaaggtttggatcccgaaagggaagtga

SEQ ID NO: 147538 - DNA, 693 bp, Zea mays
  Clone ID: MRT4577_66081C.1
atggatacccataggtcagcacacttcgtcggcacttacttcccatattatagtgctagaatggcttgttacctagaggccgttgatctaggtgtttggatagtcactcgtgatgggatgaaaccacccaaaaatctcgagaaacccaccacgacttttacattgaaaactgctaatgagatttggctaaaattgcatgagctccatgacggcacatccaatgtccgtgagcaaaaacattgcctagtcttacatgagtataattcttttgctatgaaagataatgagcttgttagagatatgtattcttgtttgaatataatcataaatgagctcaattctattgacattaatcagctaggtgatgcggacattgtgaggaagattctctccctgctaccacaacaaagatatgggagcatcatcaccattcttcacaacatggaggacttgagtacaatgaccccgaccatcgtaattgggaaaatcgcagcctttgagatgtcgcaaaaaatgtgtcggggagaggagccaacttcctcaaggccatatgcttttgcatgtgatgaaaggaagggtaaaaagaaggctcccactccaagttcctcaagtgaagaagaggaagaagaaagtgatgaaggagaagataatcaaccatcaacatcatcctccaaggacgaagaaacaatctga

SEQ ID NO: 147539 - DNA, 713 bp, Zea mays
  Clone ID: MRT4577_66082C.1
ctcgaggccggccgggccccacgtcaacactcaccaccgggcgctagctcactaccaacctcagcacatcgaggagaagaggagtgaacatgcgattcgtcggctggccaccgcgggctagctacattcctcgggcacccgcactggtcggacccaggcgaccgcactaacggttcgcatgcgtggacactggttcgtcgcatcgcgcggcgcgaaagtccatggctgccgtcccgaagaaggtggagaagacgtcgatctcctctgaccggccgctgtggttccccggcgtcgtggcgcccgactacctcgacggctcgatggttgtggactaccgcatcgagccgttcaggatcgcgaagcccgtgcagtacctgaaggtcgaactggactcgctggaccagaacctggccaagaacgatggcgagagagatcatcggcacccggctcgagtcctccgacgtcaagtccaccccgctccagccctacagcgaggagttcctcctccagcgggtccgcgagtgcgagttcatccacggccgatagtccatgatcggcaccctcggcgccctcaccgtcgagtggatcaccggagtcacctggtaggatgctggcaacgcggatctgtggaatgcgtcctcctacctgtgacaaacggtgccgatcagcatatcgacgctcatctggatcgaagtgattgcgatcggctacat

SEQ ID NO: 147540 - DNA, 336 bp, Zea mays
  Clone ID: MRT4577_66083C.1
atgtgtcggggagaggagccaacttcctcaagtccatatgcttttgcatgtgatgaaaggaagggtaaaaagaaggctcccactctaagttcctcaagtgaagaagaggaagaagaagaaagtgatgatggtgaagatgatcaaccatcaacatcatcctctgaggacgaagaaacaatccaacgcgtcggaaaggtagaggatcttctctttaacattgacaggaaaaagcaaagaaagagaggatgcttcgcatacagcgagaagggccacttcatggacaactgtccaactatggccgaacccaaaaaagagaggagcaaaggcaaggcgtaa

SEQ ID NO: 147541 - DNA, 1025 bp, Zea mays
  Clone ID: MRT4577_66084C.1
caggccgactctagatgttcggagatcactcatgacgggatgaaaccacctaaaactcccgagatgtctcactacgagtgaagaaaaaagaaatgcatttgaatgttagagccgaaaattgcttgtatggatctcttaacatgaaagtttttaatcaagtttttactttaaaaactgctaatgagatttggcttaaattacatgagctccatgacgacacatccaatgtccatgagcaaaaacattgcctagctttaaatgattataattcttttgccatgaaagagaatgagcttgttagagacctgtactctcgtttgaatctaaccatcaatgagtttaattctattggaattaataagctaggtgatgcggacattgtgaggaagattatctccctgctaccacaacaaagatatgggagcatcatcaccatccttcacaacatggaggacttgagcaacatgaccccgaccattgtgattgggaaaatcgcggcctttgagatgtcgcgaaaaatgagtcggggagaggagccaacttcctcaaggccatatgcttttgcatgtgatgaaaggaagggcaaaaagaaggctcccactccaagttcctcaagtgaagaagaggaagaagaagaaagtgatgatgatgaagataatcaaccatgcacatcatcctccgaggacgaagaaacaatccgacgcgtcagaaaggtcaaggatcttctctttaacattgacaggaaaaagcaaagaaagagaggatgctttgcatgtggggagaagggccacttcagggatagctgtccaactatggccgaacccaaaaaggagaggagcaaaggcaaggcgctaacaagtgttagaacttgggatgactcttcaagtgaagacgaacctccaagaacgcgcagccaccggtcctcatcacgctcatcacacaaatgccttatggcaagaggtaacacaaacactccatcctctagtgatgaaagtagtagtgatgatgaaggtgagggaaagtga

SEQ ID NO: 147542 - DNA, 1950 bp, Zea mays
  Clone ID: MRT4577_66085C.1
atggatacccataagccaccacactttgacggcactaacttcccatattatagtgctagaatggcttgttacctagaggccgttgatctaggtgtttggagagtcactcgtgacgggatgaaacccctcaagaatcccgagaaacccaccacgagtgaggaaaatgaaattcatttaaatgctagagccaaaaattgcttgtatgaaccttttagcatggatatttttaatcaattatttaccttgaaaactgctaatgagatttggctaaaattgcatgagctccatgacggcacatccaatgtccgtgagcaaaaacattgcgtagtcttaaatgagtataattcttttgctatgaaagatgatgagcttgttagagacatgtattctcgtttgaatctaattatcaatgagcttaactctattggcattaataagctaggtgacgcgggcattgtgaggaagattatctccttgttaccacaacaaagatatgggagcatcatcaccatccttcacaacatggaggatttgagcaacatgaccccgaccattgtgattgggaaaatcgcggcctttgagatgtcgcgaaaaatgagtcggggagaggagccaacttcctcaaggccatatgcttttgcatgtgatgaaaggaagggcaaaaagacggctcccactccaagttcctcaagtgaagaagaggaagaagaagaaagtgatgatgatgaagataatcaaccatgcacatcatcctccaaggacgaagaatcaatccgacacgtcggaaaggtagaagatcttctctttaacattgacaggaaaaagcaaagaaagagaggatgcttcgcatgtggggagaagggctacttcagggacagctgtccaactatggccgaacccaaaaaggagaggagcaaaggcaaggcgctaacaagtgttagaacttgggatgactcttcaagtgaagacgaacctccaaggacacgcagccaccggtcctcatcacgctcgtcacacaaatgcctcatggcaagaggtaacacaagcattccatcctctagtgatgaaagtagtagtgatgatgaaggtgagggaaagccatctctagatgagcttgcagaagtcgtagaatttttccaggatgtttgcactaagcaaaaagctcaacttaaaactttgaaaaataagttggttagctctcaaaatgattacaaaggtttgctagaaaaatttgaaacttttgcaaacttaaatagtgagctatcaactaaaattgagctattagaatctagtgctccatccactgctaccgatgaaagccttattaaaaagaatgaaaaacttaaggctaagttagctagctcccaagaagttgttgaaaatttgctagagaaaatggaaattcttagcatacacaataatgagctaactactaagctagaaaacattggtagcaccccagcagcatctttagttgaaatacctgaaattagtaagaaagatgcttctacttcctgctttgatttacttgatgattctaacacctgcaaccaagtctttgttgagaatattgttgtagaaacatgttcggatgaggttgcaaaggaaaatgaacaattaaagcaagaagtggctcgccttggcaaggctttgctatgccacaaggaaggccacaagtctttccaatgcaaggcgatgaccggggataaacaaaggcaaaagctcaagcaaaagccatcaagcaaaatctccaacacctacatcaaaaaggtgaacaaaaaggatgctacaccatacttgatcaagaagaaaaagaatggaaaggtgatagcaatcaaggccaacaaggaagccaacaaaggaaaaggggccaaacgcatctgggtgccaaaggaaataatttcaaccatgaaaagcaccaagaaggtctggatcccgaaagggaagtga

SEQ ID NO: 147543 - DNA, 634 bp, Zea mays
  Clone ID: MRT4577_66086C.1
gggttgccgccgcgtgctggtgacgggcacggggcctctggggtgcgcgccggcgatccttgcgcagcgcagccgcaacggcgagtgcgcggcggagctgatgcgcgcggcggcgctcttcaacccgcagctggcgcgcgtcctggaccagctcaacgcgcgctttggcgccggcaccttcatcgcggccaacgcgttccgcgtccacttcgacttcgtcagcgatccggccgccttcggcttcgccacggccaaggacgcgtgctgcggacagggcccccacaacggcctgggcctctgcaccccgctctccaacctgtgcgccgaccgcagcaagtacgtcttctgggacgcctaccaccccacggagcgcgccaaccgggtcatcgtcagccagttcatgtcaggctcgctcgactacgtcagccccatgaacctcagcaccgtcttgcaaatggacgccgcatttcaccagatcgagtactgactcatcgtcccgagagagtagagacccaaccaacaagcctgctgtcgtctacctcgtttcgttttatatctctgtgactgccgtgcgtgtgtctgtgtacgatcacataaacaacatcaacatgtatttatatttatagtgagtttg

SEQ ID NO: 147544 - DNA, 233 bp, Zea mays
  Clone ID: MRT4577_66087C.1
ctcacgcgtacggccacgcatccgcccacgcgtccgtccacgcatgcgcccacgcgtacgtgcacgcatgctgcgcgtgcaatgagtccaaggcgttcgccttttgcaagaacaactcgatcaagaagcttaccgcttccatgaagaactactcgcccgacagcacccgtacgctcgccatcaacgccaccatcgagaagaccaagcaccggttctagaactacggcaagttc

SEQ ID NO: 147545 - DNA, 257 bp, Zea mays
  Clone ID: MRT4577_66088C.1
tttgtttttttttttttacgattcgggccacatgaaaccaaattatgggagaccgaatgtgcaccgactgatacagacagtgtggaatgacagaaaggtctattgacaatgtccgatggagacctaactatgaccaactcgcaagcgagtacgagtcaactggtcaatcaaaaaagcggttctgccacgagaaggcgggatcctttccaactcgacgtgccatgagacacacactgccgagctgttgaatgcactgg

SEQ ID NO: 147546 - DNA, 163 bp, Zea mays
  Clone ID: MRT4577_66089C.1
agggtggatatgctacctagaggaggaacaggtgccgcaagtccgcaaagcgccatgcatgcatgctttgctcggcgcactgttcttagcgctcgacatgagtactatcactacctcaaattggataaagcatatgactttagaatattgtttatgtctttga

SEQ ID NO: 147547 - DNA, 144 bp, Zea mays
  Clone ID: MRT4577_6608C.1
ggaagagctgagccggaccaagtctcctcgtctgtcgtctccacctcgtcgctcacctctgatcccaagcgacccaagctagggttccaccccagccctgaggtcgcccctatccaatccgatggagggcggcgactcgtccgg

SEQ ID NO: 147548 - DNA, 559 bp, Zea mays
  unsure (1)..(559): unsure at all n locations
  Clone ID: MRT4577_66090C.1
atctcataaagattgctttaacttgcccacacatatatacaagggggcgaaccgaagaacacgttccacttgctaccggcacaggggacatgtaccgcataaaccaacgcagcaggatgaccgagagcccttacctcaattcacccttaaacgggaccacgcatgcgctctataaggttcgcgtagggacatcccaacactatctacgagggtaacatttctgcacaacgattctgtctggcgaagggaatgatgatcacagaccgggacactagatcatcgcccagcgtcttgtaaatacacatgtggtacacgctgatgcatgctcccgctgccgagcacactgctgcgtgcgcagcaataacgttattgctggacgaggaagagccagcacctggagcactaccgtagcctgcaccagcgcctgcgccgtagccaccaccggcaccaccaccagctcctccgccgtagccgcctccggcgccacctcctgcacctncaccgtatccaccaccagctcctccaccatagccgcctcctgcaccgggacctccgccat

SEQ ID NO: 147549 - DNA, 979 bp, Zea mays
  Clone ID: MRT4577_66091C.1
ttgggaccctcgaggccggccgggacaaaccccctcccttcttctcttcttggtccccgcgcgcgcacttgcatcattgcatgcagcacacctgaacaacttgcctgttgtactgtaccacgagcagccacatgatgacgctcctcaagacgtacaaccacaacgacaagcagcaccagttctcgcttcccaagaggaacttcgtcacctacgccgtctacgcgctcatcgccgtcgcgctcctctacctgttcgtcgacccggcagctccgcctgctgcgggttcgggtgcgactgcggcatcatctacgaccaccaccaagccatcatcatcactacctccttctccttattacgaagcatcatcgccgatcatcagcacttcatcagcagccgcaccgctgtgcgactactccgacggcgagtgggtgccggacgcccggccgccgctctacgacggcacgacctgcggcgccatcaaggacgacgggcggagctgcacggcgaacgggcgcgcggacacgggctacgtgcactggcggtggcagccgcgggcgtgcgacctcccggacttctctgcggacgccttcctgcgctggctccgcaaccgccacgtggccttcgtcggcgactcgctggcgcgcaaccaggcggagtcgctcgtgtgcctgctctcgtcgcggtccccgtccccgccggacctcgcgcaccgcagcgccgacggcaggttcaggcgctgggtgttccgcgacgacagcgccggcaacgccaccgtctccgtcttctggtcgccgttcctgcttagaggcgtcgagaagtccgagcgcgacggcgtgcgctacaaccaggtcttcctggacgcgttcgacgagcgctggatgtcggagctccacggcatcgacgtcgccgtgctgtccgcgggacactggttccggatccccagcgtgtaccaccggggcggcagggtcgtcggatgcca

SEQ ID NO: 147550 - DNA, 822 bp, Zea mays
  Clone ID: MRT4577_66092C.1
ggcccgggccaaaccaaactaccaacaaattaaaccccctccctcccctcccttcttctatccttggtctggtctggtccccgcgcgcgcacttgcatgcagcagcacacctgaacaacttgcctgttgagcagcggcagccacatgatgactctcctcaagacgtaccaccaccacaacgacaagcagcgccagttctcgcttcccaagtggaacttcgtcacctacgccgtcaacgcgctcatcgccgtcgcgctcctctacctgttcgtcgacccggcagctccgcctgctgcgggttcgggtgcgactgcggcatcatctacgaccaccagcacttcatcagcagccgcaccgccgtgcgactactccgacggcgagtgggtgccggacgcccggccgccgctctacgacggcacgacctgcagcgccatcaaggacgacgggcggagctgcacggcgaacgggcgcgcggacacgggctacgtgcactggcggtggcagccgcgggcgtgcgacctcccggacttctccgcggacgccttcctgcgctggctccgcaaccgccacgtggccttcgtcggcgactcgctggcgcgcaaccaggcggagtcgctcgtgtgcctgctctcgtcgcggtccccgtccccgccggacctcgcgcaccgcagcgccgacggcaggttcaggcgctgggtgttccgcgacgacagcgccggcaacgccaccgtctccgtcttctggtcgccgttcctgcttagaggcgtcgagaaagtcgagcgcgacggcgggcgctacaccaggtcttcctggacgcgttcg

SEQ ID NO: 147551 - DNA, 286 bp, Zea mays
  Clone ID: MRT4577_66093C.1
ccgtgctccgcaaccgctgagtgagtagaagagatggccggcaaaggcgatggccggctatcggcatcgatttcggcacgacgtactcttgcgtcggggtgttgcagcacgaccgcgtcgagatcattgcccaacgacaggggaaccgcaccacgccctcgtaacgtcgctttcacggctccgagcggctcatcggagatgcggccaagaaccaggtcgccaatgaacccatcaacacggtctttgatgcaagcgtctcatcggcaggaagttcagtgatgcgtct

SEQ ID NO: 147552 - DNA, 744 bp, Zea mays
  Clone ID: MRT4577_66094C.1
gaagaatttgacgatgcagggcacagcatgagtgccaaggatctaatgcaggactacttcattggggaggtggacttggacccaactcctgacattcctgagatggaggttttcaggaaggagcaggacacgggatttgccagcaagcttaaggacaacgtggtgcagtactgggcaatcccagcagctgtaattgggatatcagctgttgttgctatattgtatgcgcgaaggaagtgaaagttaatgtgccatgcttgggcagatgatccttttaggctttgttcgtctcaatccccatgggtttgataaaaacgaacagggcattagaaggatcggtaacaacgcagagtacgcgggtatgtactcctgtcccaaattacactatgatgttcgattcttagacacacttaggcaaacatttgcctgattaatgacactattttatcgatatgacaatcaattgatggatttatactcttggaaccaactgtcatgcttgctggcttgaatatgttccatgcagcctatgatgcttttgaatgtcatggattgccattcaatcttttacctttaaaaaaaaaaaaaaaaaaaaaaaaaaaaaaaaaaaaaaaaaaaaaaaaataaaaaaaaaaaaaaaaaaaaaaaaaaaaaagtactctgcgttgttaccactgtttaagggaaaaatcccgagtttttcccaccttgtgccccccccgcccccctctctttcggcccccc

SEQ ID NO: 147553 - DNA, 835 bp, Zea mays
  Clone ID: MRT4577_66095C.1
gccggccgggctgcgagctcccaacctttgttttgctacccccatttcttctttaatttgagcttgctagatagatctcggtgacgtccgtccgcgggagacggtggcatcagtaaagacttagacgatgagggctctgcagaccagctgatgatgccgtcgtccgacggcggggagggtgtcgccgatgtgccccgcgggcccgacggccggagctcaccaagcaatagcagcacggtggagctggatggggacggcggtggcgccaggaaggccggtgcctcgccgtcgtcgtcggtgcggccctacgtccggtccaagaacccccgcctccggtggacgccggagctccacctctgcttcctccgcgctgtcgacaggctcggcggccaagaccgtgcaactccaaagctcgttcttcagttgatgaacgttaaagggcttagcataggccatgtcaagagccatctccaaatgtataggagcaagaagatcgacggctcgggccaggtgataggtggtggtgggtcatggagaggtcgtcttcatcgtcagttgcaggacggggggcaagcggcgtacagcctcggccatctctccttgcatcacggcgccggccagacgactgctgctagcagtgccatattgtcagcaaggtctggcgcatggccccattggaacagtttccacgatgatccatcgtattcgatgcttcttcacggcggtcaccatcatcttcttggatcaaaccctactgctactactactactcatcaacaacagctgaagctgcagcagctgctgcatcccctgacaactgtgctgcgctcccgct

SEQ ID NO: 147554 - DNA, 345 bp, Zea mays
  Clone ID: MRT4577_66096C.1
cacacgcgtcgttgcgaagggagctgggaagcgagctgccacgccgcctggcgcggccggtctgacccaatggctcagccaatggcaccgcgaactgcctaacgaacgtcctaacgtgcgtcgagcagagccgccagctgatacctcggatgctgacttagatgctgacagacatgatccgacacacagtagcttacacccactgtctttgcaactaagtgcgatgaccaactctatgactaaacgggtgatttaacactaggtcgaattactatcggaatgactatatcagtacggtcatactaacctgtatcacgacctgcttaacgcaggtcacgatccata

SEQ ID NO: 147555 - DNA, 437 bp, Zea mays
  unsure (1)..(437): unsure at all n locations
  Clone ID: MRT4577_66097C.1
cgctccggacagtgaataaccgggtcgacgagctgttttgncggcggccgccctccttttttttttttttttttttagaaaaaaagcgacagccccaactcgcattaacaagtacattacatacaccattgctcctgtgctttccaaagtttttcacggaaaacatacaccctcccaagatccattaccgctctcggacacctagcagttagacaactttattactccagcagagcgtaccaaaccccctggatattgaaattcttgggcgccttggccccaatgtctttgtctgacggttgcacccttttaaaaaacttctaagacattgccggtctcacggtggctcttggtgacgctcaacgcgatgttgtcgggggaggaggccgcaatacttgatgttccccttttggagggtttaatcggcacctttgccc

SEQ ID NO: 147556 - DNA, 170 bp, Zea mays
  unsure (1)..(170): unsure at all n locations
  Clone ID: MRT4577_66098C.1
ggggggggcgcttgttgcgggcnntgcgggcngcctggggcgcctcactggagactttctccttgtcccggagacgggtgcacacagtaggggaactcatcggcgcccttcctcttcatgccgacgtcgtagatcctgatcttggtgtcagggacggggggtgggggcct

SEQ ID NO: 147557 - DNA, 437 bp, Zea mays
  Clone ID: MRT4577_66099C.1
gggggccgccaccccgctaccccctgcttatatttacatacttttttcaataacaaggattcatgttcggaatgacttacaggaaaaaacaccagagggtgggaagcaatagcaaacaaaaacccgttacttcaatggaaacgggggttttacttggccaattattaacccccccaattttaaggcccacaaatacggggttttaaacagctaatccttaatgaaaaaagaagctttatccgggcccccgggacatgagggctttcagggcctggaacaggcccttaccaaaccttaggggggagcttaccagaagccgggggcatccatttcccagagttggacacgcttttgccgacctttcaccctggaacggctttaatgatccccgcctcctcccaaaaaaccttcttccactctttgacaaaactttcatc

SEQ ID NO: 147558 - DNA, 1994 bp, Zea mays
  unsure (1)..(1994): unsure at all n locations
  Clone ID: MRT4577_6609C.1
gctttctcggncgcgtggggtcaaggtttatactacctgtatctggaggcagtttcagtgagaaagttgaagtcccatgctgtttctgacaaanaaattcaagctagtggaatttgtcattctcagtcttctactgtaaatgatgattttgctgtcaaatataaagaaaaatatggcaccgatgtttttcgcagaatacttcaatccttttgtccctctatctatgggcatgaggttgtaaaagctggtatcacacttgctctttttggcggtgtgcagaagaactcaatggatcaaaacatggtccctgttcgaggagatattcatgttattgtagttggtgatccagggctaggcaaaagccaactcctccaagctgcagcagctgtttccccacgaggaatatatgtatgtgggaatacgacaacaaaggctggcctaactgttgctgtggttaaagattctatgacaaatgattatgcatttgaggctggtgccatggtccttgctgatcgtggaatatgctgtattgatgagtttgataaaatgtttacagagcatcaggctttacttgaagccatggagcagcaatgtgtttctattgcaaaggctggtcttgtagcaagtttgtcagctcgaacttcagtgttggcagctgcaaatcctattggtggccattatgaccgagcaaaaacagtgaacgagaatctaaaaatgagtgctgccctcctttctcgatttgacttggtgtttattctacttgacaagccagatgagtcactagataaaagagtgtcagaccatataatagctctccataccaatgatgttgataatttcagacccaacaagaggaccagaacagggtcacattttgatggtgatccggggcttggagttggtggaaattcagtagcttcaaggctgaggctacacccagagaaagacaaggacttcactccattatctgggcaacttcttcgcaaatatatatcttattcaagagaacatgtcttccccagaatgtcaaaggcagcagctgcaattttgaaagaattttatttgaagctgagaaaccgcagtgcttctgctgatggtacacccatcacagccaggcagttagaaagcctagtcagattagccgaagctcgtgctcgcgtggatctaagagatgaagtgactgaagaagatgctcaggatgttgtcgatatcatgaaagaatctctgtatgacaaatatgttgatgaacatggttttgttgattttactcggagcggtggaatgagccaaccgaagcaggcaaagaagtttctgaatgcattaaacaaggaatctgagttgcagcaaaaggactgcttctcgagaactgaactttacaccatagctgataagatcagcttgcaagttccagacttggacactcttgtagaaaagatgaacattgccggttaccttattcaaaaaagatcagggatgtatcagctggtgactgcgccatattaacaatgcagccaacgaggtcaagatggagagttttcttgaatgaaactagaatttgcacctgctttgtctgtactagtgcctgctctagatctccagacactctggaaggccttaatccatttcaacataattgacatgtacctttcagctcatttccccccgtcccgtgagagatgtatggtttggaagctatgcgtatcgtcatggctgcgcacatacgtgctgcagtgtacaggcgactgaagtgcacgcgtcgcaggatgagcactaactttggtagcttggtgtatgccatggttgcgatatgatatattattgtgaaacaggaacctctagcggttattagtttatagatattcaagtttgccaatgaaacatccagaatagcatatgatgcattttacaccccttacacccgatcactcggaaaacatctagcacgctgtaaattactccctcagcaatagtaattattgctgttactgcgctgc

SEQ ID NO: 147559 - DNA, 391 bp, Zea mays
  unsure (1)..(391): unsure at all n locations
  Clone ID: MRT4577_660C.1
ttcgttcttttttttnttttgttgcaatgttttttttttattcatggaaatggtagcatatatatggtatcatcagcgccataaaaccaacagaagcagcaaaaggacatgacatcatcgtcttcaatggacaccaaaccatgtctgcatcatcagttaacttaacacctctctctctctctctccctctaaagatagatataggtagataaagactaataggaactcaaaacagctagtagctctgttacctgaccccaaccgccaaaatctcatctcaatccgatgccaccatttctcttttctccagggaacaaatctttcaatggatttatctcatgtttttttcctataagggatgtacatgtaacgaaaaactacaaccccccag

SEQ ID NO: 147560 - DNA, 1610 bp, Zea mays
  Clone ID: MRT4577_66100C.1
agcgtaaacatggcaggatacaatttattattcaccttgattaactgggatgcaataaatcgttgtcaggtgaacatgtacaggctacaacatgcagggcgtcaggttaatggacatgataaataaaccgtcgccgcaagggttcagttctgtattccttttgcaatgctgctgggactcagccacagcccggctgaacaaacacagcagcgcttcgggcgcaaaaagagatcggtgcactgcaatttgtgggcggagtagaggtggtggctgatgttcgctggcaggtaattctgcaggagctcgaggatggaggtgaaatcgccggccaagaggcgcttccggacaaggaacagcatattctgagcaaggtatcctggaggctatcacgatcacttaatactgtgtcccaaaatgtgaatggtatctgcgaagttgaattcctccgtcagcggtaacggtatccatttctgtagttatttccaaatgttgttggagacctccatcatgctttgctacaagctgtgataacttggctagtcagctagtgtagctcgaactccaacagcactgttgtctagtttctggcagaagttgtctctaaacccactaaccagctcgacgaaacaaaacaatgaacccgcttccgcaaatttcaacaaggattccaggcagcattatgcaacaaaagatagtaatgaccaaactgaacaggaaagcttcggctatcagcagtactatatgtagggcactaagaacttggtaaaaacaatctcttactccatacagcatttttatcatccggatcactccgaaatacaaagagcggtgccagaatttcattcatccttgtacatatcctattccagcattcagcttggcaaagattaacagtgcatttttcaaagattcctgattggactttgcaaaagacgagtcgctacagaagaaatgcatgtcagggtgggcgcgctttacatcgcggtcaatctgctccataatctccgagtactcaaaaaactgattccaagcactggtcttcccaaggcttaaagggtgctcctctcgggttactctgacctgtgcaggaacccattgtgaacatgttctgcatttacgttgtagtggggccttctgtttgcactttagcaaattcaggattcggggtctctatttttgggagaggatctatctagtcaggcattggtggccataaactagataccatatgtgcaacaaaaactttgaaagcagcgtactgtcctctcttctttgccagctcctctgctcccacaggccacagcgcgcggtcattgggcagatagcccagtagcagcttccacacggtcgcctggacgcccgccgcgtctggactccctgagccgccagcatcctcagttcatcgagacctatatcaccttcttggacaacgccgcaaagaggcgggactgccgagagatctcgaattccggcgtaggcgccggcggagatcgcggcgagctcgccatggatttgggtgggcgtcaagaatggtgcacccgtgacccgtcccgtccgtgaggcttcggaaacgtgccggttggcctggccccgatagcaatgcaccgtcc

SEQ ID NO: 147561 - DNA, 578 bp, Zea mays
  unsure (1)..(578): unsure at all n locations
  Clone ID: MRT4577_66101C.1
atccctgtagtgatacttangcagtagtaaaagaaaccgtacagtgcagaagaatggcagcagcaaaccaacaatggtgagatctacactgtgttgtgtgattgccgccaactgttctgttctgttctgttgtatgtgtcccaggtgtagcgtaaacatggcaggatacaatttattattcaccttgattaactgggatgcaataaatcgttgtcaggtgaacatgtacaggctacaacatgcagggcgtcaggttaatggtcatgataaataaaccgtcgccgcaagggttcagttctgtattccttttgcaatgctgctgggactcagccacacccggctgaacaaacacagcagcgcttcgggcgcaaaagagatcggtgcactgcaatttgttggcggagtagaggttatggctgatgttcgttggcaggtaattctgagcaaggtatcctggaggctatcacgatcacttaatactgtgtcccaaaatgtgaatggtatctgcgaagttgaattcctgggtcagcggtaacggtatccatctgaacgcatagaactggggattaacttctgta

SEQ ID NO: 147562 - DNA, 494 bp, Zea mays
  unsure (1)..(494): unsure at all n locations
  Clone ID: MRT4577_66102C.1
caaattcaaagcaacaaaaagggcaaagcaaacactgccacccacggccaccggagggaagaggagacccaaccccccaaaaggaggaaaaaagagagaaaaagagaacgacggcgggacccagccagtaaaaaaaaaaccgaccggaccggcccgcgggggggcgaaaaccagcaaaccggccgcccccgcggggggaacccagcgaggccccaaccgggcccaaagcaggggcaaacacgggccccgggggaaactgcgagccaaggacaaccccccacaacacaccagccgaaagcaaaaagaaacaaaccgggggagcccagggggggcacaaaaggaaacaaactggcatgaagtgaggggcccccactcaggggggaaaacacaggaaaccgggggggcaaagaaaaaaaaaaaacccgncaaaaagcggggagaaggacggggggctctgggggcccctccccactgaagggagggcccggccggga

SEQ ID NO: 147563 - DNA, 704 bp, Zea mays
  Clone ID: MRT4577_66103C.1
agcgtaaacatggcaggatacaatttattattcaccttgattaactgggatgcaataaatcgttgtcaggtgaacatgtacaggctacaacatgcagggcgtcaggttaatggacatgataaataaaccgtcgccgcaagggttcagttctgtattcgttttgcaatgctgctgggactcagccacagcccggctgaacaaacacagcagcgcttcgggcgcaaaaagagatcggtgcactgcaatttgtgggcggagtagaggtggtggctgatgttcgttggcgggtaattctgcaggagcttgaggctggaggtgaaatcgccggccaagaggcgcttccggacaaggaacagcatattctgagcaaggtatcctggaggctatcacgatcacttaatactgtgtcccaaaatgtgaatggtatctgcgaagttgaattcctgggtcagcggtaacggtatccatctgaacgcatagaactggggattaacttctgtagttatttccaaatgttgttggagacctccatcatgctttgctacaagctgtgataacttggctagtcagctagtgtagctcgaactccaacagcactgttgtctagtttctggcagaagttgtctctaaacccactaaccagctcgacgaaacaaaacaatgaacccgcttccgcaaatttcaacaaggattccaggcagctt

SEQ ID NO: 147564 - DNA, 111 bp, Zea mays
  Clone ID: MRT4577_66104C.1
agcccctcggctatagctttgaccgcgccgtgtacttttcccaccagggcgaggatgacaaaaaggagaggtttaaagggcaagcgtcgggaccccaatcaaatgtaacaa

SEQ ID NO: 147565 - DNA, 302 bp, Zea mays
  Clone ID: MRT4577_66105C.1
catgggatcatgttcctcatcttcctgtagctggtactttcgccatggcctgcactcggcgggccgcagccatgctgagcccgggcccggtctcccagcaccgccctgggcgctgcgcagatctaggggagcctgacaggacgttgacatcgtggaataggagcactatcccaccatgaggttgggaagttagggtggaagattgccagcagccatggcctcccatgagggtgtccctttcaagtttgagaacgcactgggggactgcagatggtgttgacagcagctgaggctacattccc

SEQ ID NO: 147566 - DNA, 244 bp, Zea mays
  Clone ID: MRT4577_66106C.1
ggatcctctatagcggccgccctccactctttctggccccgcttcgtgttctcgggcggctgcggggtgccacggtgggctggactaggcacccatcataagactgccgacggaggatgcttgcagatcacggcgcacatctgtccgcttgcatactcccagcttgtgcgggtggacgccaatcaaagtcctgccccgctgcggccacgcataccacgaggagagcgttgacataacgctaccc

SEQ ID NO: 147567 - DNA, 434 bp, Zea mays
  Clone ID: MRT4577_66107C.1
ggacaaaaacttcttgtgtgtttgcttcatgtcatttgttgcttactattatgttttgtttacctagaagggttctgctagaatgtggatgaagaggcacgacctaccaatgttctcttggttggttttctaggttcttatggagtcattgatgatgaggcacttaagcatgtcatgccagtattcggtgtcgttacgaagataaaagtttttgcaaacaaggcaatatgcttgtgttaagttcgcaaatgttacaaaaaacttgtaatgctaagatgaatctagatggtcatcttttcaagggttgtagcattcagattcttttctcaaacagtgggcttgctccaaacaaattggataacctagcatcggttgctgaatttactagatcagaaatgtattccagtgatggctgtgacaaccatggtattggg

SEQ ID NO: 147568 - DNA, 723 bp, Zea mays
  unsure (1)..(723): unsure at all n locations
  Clone ID: MRT4577_66108C.1
aattcggcacgagggcttcttccaatcattggattgctggaaacctataggtcgcaataccatgcatatccacgacgttctgattgtcggcgctggcccagctggtctagcagctgcagcacgtctccgcgaacatacaccatccgcgacctttaccgatgatgaacatcagagataccattggataaagaagcacggtcgaaagatgaacatcaagaactatcggaagaacaaggactcgttgccaacgccgccttcaacaccatcgaattctgactgtggatgcgagcatcaggaatcgtcagaagaagcaatagacatgctagttctcgatgctgatggagcagactggatgtccaagtggaagcgactctttaaaacattccacatcgactaccttcgcagcccaatgttcttccacgtcgatcccgctgaccgagacgggctgctcgcatacacatacgaacaagaaagggacaaggacatcatggctctccncaatattgcgggcaaagaagtcagcaagcataagaaaaagaagaagcttaagcaaggaaggtttcttggtgggacaccagatgtggacagaaggatcgaaaagactactttacgccaaagacggatttgttccatgcacactgcancgaaggtggtgcgggcggtatcgccttggcagcgatatgatccgtcaaggaagcgtgacggatattcaatacggagaga

SEQ ID NO: 147569 - DNA, 852 bp, Zea mays
  Clone ID: MRT4577_66109C.1
aaggcgacaccgggagctcaggcggcgggaaaatcctcgaagcaacccaccctgtcgtccgcgtcctccacgccctcgtcggctcgtcctcgccgtcctcctccacaccgcgcgcgcggcggtgttgacccacccacccgttcctcccccaccccatcagcgctggaggcggcggtgcgtaagtcccccggacccttcggcggcggcggcggcgcgcggttatgccgagaggctcccaggtttcatcaccgtgctctgctggagttatagcattttcagcaaggatatggagtacaccccctgcacagcaagttcctctgtatcccacatctcgctgctcgaggaagttcttggctggaggttttgtctttacggagacttcctggtcatctcttttgtcaactgcacttgaggatcaacccacgcttagtgactgccttgcctggtcccatgctgtcagacattagagttgcccagtgattacactattacagtgcagctgtagcacatttatttgagcatggtggatctgtttctctggcaacattccagtaatctttgtcttggtgctaatcagccagcagaagttaccatcaagacatctttggacacttggatctaacgcttagagctttgccttcgcatataggctctaggtttgggttttcgttttctgctagctttcttctactctaccactgtaagttttcagtctgatcggtccaaagtttggtgtgtattggttacgctgtccttcaccagccttcactttgcatggcgtgaccttagagaagacgtgttcaagattttgttgtcgcaaaagcatgggatagcatacatagctttgagaga

SEQ ID NO: 147570 - DNA, 297 bp, Zea mays
  Clone ID: MRT4577_6610C.1
caagctctcacacaactacccgcggggcttccttgctgacaagggcagcgactgttacaatgcttaaccgccacaacagatccgcttcgcctttgtgggtcgcgaatttggcgggctgcttgatagacattcgcctatcttgccagatacgctcataatcgtcatggaacctatagtcactgtaacgtagtattgaaacgaaaggattttagctctaagaccagaccatccaggacagtgttaatacttatacgatgttcgtacgaactacatgaaatacatagcacattacttgag

SEQ ID NO: 147571 - DNA, 676 bp, Zea mays
  unsure (1)..(676): unsure at all n locations
  Clone ID: MRT4577_66110C.1
ctattttttgaaggatctaagcaatctcatgcacctgctgttgctcgcaaggttcttctatccataacgaattggcacccacacaattacttggatgatgtacttcatccatcacaagtacaagatcaaaggctcgaacgtttaggtctgtaaccacaaaactgaatacttaatgtcttgcagtgttcacttttattatatattgtgatgggtgtttctgaggtagacacaattgtctatattgtttctttgttaggattaaccgcaaaaaacacacctgcatgaactgctatttgttgtacatgttaatagatggtaggatactaggatcaatatgcaacccatcaatcaaccagacaaccatggagtaaaacatggatgacttttcctcttttttatctgcctggaatggctacacgcttctaatacgttacgcttctagtaagttgtcttccacagatgaacctgtttcaccacctacacaatcagtactgactgcagtggaacctggtgctcttgaccatttttatcaacaatcaaagagaaaaaaaagtcccaatctatgcagagcccagagctgattgtcgaggagtttattgagctctgtctgcatcttaacctttagaatcagtttggtatgagtatgatggtttcttatttttactntattcacagg

SEQ ID NO: 147572 - DNA, 497 bp, Zea mays
  Clone ID: MRT4577_66111C.1
attcaggcccatgcttggggactactaccagttgcgacgccgtactccgtgttgccaagggatctggcgcaaggtcaggcagtgcatgtacgtctagccctaggtcatcaagtgtcgtgttctgtgccaacacgagcattggccgcctccgctaggacactaagagtagtacctagaagggagcaggcacatcaagagaaagatgtacgctaatctcgcttatctatctaactgtagccgtctgcttttacgacgagcaagacagacatttactgacagatactaaagattactgaagcgccattggtagacgtggcatgaaatacaagtgttcaatgtctactgctcatggcgtactatgttgtgactactaatgattcggtgatgccagatctgccgcgtctaccaatggtgcggtcattattcgagaccatgaatgtatcgcaaagtgatcgctcttggcatgagcttctggttggaactcggagacctgtctt

SEQ ID NO: 147573 - DNA, 326 bp, Zea mays
  Clone ID: MRT4577_66112C.1
ggcttggacctttgggctgattagtgcttggccagatagctcgaggcataagtaaagagcatagtgaatataccacgactgtggtcggcagttgcgtctaatgcgctactacattcggaaaggactcggtcaccatcctcgacgaggttccgagtccgaacgagtccgtaaagcgtgtcgtaacttcaggcattatcacacacagtcgacgaactggtcctcactcggtatccggacggtcgtcgaaacatacctgtcgcacttaagagactcattcgcaagaggtcgcgacgacaatacgagagtcaactgtcgtagtaactccg

SEQ ID NO: 147574 - DNA, 276 bp, Zea mays
  Clone ID: MRT4577_66113C.1
aagcgggggagatcactgttaatgtttttcacattaagttacaaatacaaatcacccaaagagagagagagagagagagagagagaccttcgctagattttcgcttatttgggggggggggtaaaacccttttgttgttttgtaaaagagggcgcattgacggggaaaggaaaccaggaaatagttttaaccggtcatacaagcatttggctgcagcacacaagaagggaccataaacaccccaaggtttctttcttttaatattggttttttggt

SEQ ID NO: 147575 - DNA, 637 bp, Zea mays
  Clone ID: MRT4577_66114C.1
cattgggaccctcgaggccggccgggaaatcttcctgtcctgtccagcaaagggagacctgcacaagggaggactggaggagaggaggaggacctacccaacccggcctgcagctctctcgtctcttcctcctcctcgaagctccgatccgatcccccaatgtctgacagcagtcccgctcccggcgcctactactccggccctcccgccgcgccgccgcccgagtctaagcccgttgatggcggccaggtcaacgccgatgttcctggctactactcctcctccgtccctgctgcgaaatctggcgccggcggccagcagggcagctccgctgctcccaaggaatcgggcttcttcgccagctgttgtgggtgcttctctggcggcgaaaccgcgagatagatagattcagtgttggaccgagaaccatggatggatggatggaacatgcatgcccagtgattgtttgcgccgatgaaagttcaatttgtccggatttattttctctgaaatagtatatgtttttttttctccatcggtgagccggtgatcttgtcaatttgtacaataatcattatatgcaaccaactgtgctttaatttgctctgatatcaaaaaaaaaaaaaaaaaagcggcc

SEQ ID NO: 147576 - DNA, 488 bp, Zea mays
  Clone ID: MRT4577_66115C.1
aattcggcacgaggatgagacctagctgtgctgctccagaagcaccacgaccgctgcagaccgcgaatacgcgacgccccgctgctgtgttctcgtagcactagtttgccagtactcacgatcctatggtcagtcagcgagaaccatgcgcactgcagaagactgaaatgaacagccaggggcagcgcacatgtctgctctggcgagtccgaacagcacgtggccacctgcttgtataggcagaggtagcattaacaaacatgtgagactgaagcaggctgctgatgcattgccctcatcaggatcgagcgctccattcaaggatgcctggtcagcttgacaagcacgcgaccgacatagatagaggctccactaggatagtgcatacggaggacaactacaccacgagctactactgatcgtggatcgacgcacaagtgcacctacactagtgcccatgatgactactgtcacttcctaagctgaat

SEQ ID NO: 147577 - DNA, 614 bp, Zea mays
  Clone ID: MRT4577_66116C.1
tcgatcctgtcctgtccagcaagggagacctggactggaggaggaggacctacctacccggcctccagctctctcgtctcttcctcctcctcctcgaagctccgatccgatcccccaatgtctgacagcagtccagctcccggcgcctactactccggccctcccgccgcgccgccgcccgagtctaagcccgttgacggcggccaggtcaacgccgatgttcctgaagcaggctactactcctccgcccctgctgcgaaatctggcgccggcggccagcagggcagctccgctgctcccaaggaatcgggcttcttcgccagctgttgtgggtgcttctctggcggcgaaaccgcgagatagatagattcagtgttggaccgagaaccatggatggatggatggaacatgcatgcccagtgattgtttgcgccgatgaaagttcaatttgtccggatttattttctctgaaatagtatatgttttttttctccatcggtgagccggtgatcttgtcaatttgtacaataatcattatatgcaacagtgctttaatttgctctgatatcaaaatcaaagagtctctcatataaagaagaaaaaaaacattacgt

SEQ ID NO: 147578 - DNA, 599 bp, Zea mays
  Clone ID: MRT4577_66117C.1
gagatcgatcctgtcctgtccagcaagggagacctggactggaggaggaggacctacccaacccggcctgcagctctctcgtctcttcctccttcctcctcgaagctccgatccgatccgatcccccaatgtctgacagcagtcccgctcccggcgcctactactccggccctcccgccgcgccgccgcccgagtctaagcccgttgacggcggccaggtcaacgccgatgttcctggctactactcctccgcccctgctgcgaaatctggcgccggcggccagcagggcagctccgctgctcccaaggaatcgggcttcttcgccagctgttgtgggtgcttctctggcggcgaaaccgcgagatagatagattcagtgttggaccgagaaccatggatggatggatggaacatgcatgcccagtgattgtttgcgccgatgaaagttcaatttgtccggatttattttctctgaaatagtatatgtttttttttctccatcggtgagccggtgatcttgtcaatttgtacaataatcattatatgcaacagtgctttaatttgctctgatatcaaaaaaaaaaaaaaaaaagcggcc

SEQ ID NO: 147579 - DNA, 738 bp, Zea mays
  unsure (1)..(738): unsure at all n locations
  Clone ID: MRT4577_66118C.1
gattgatcctgtcctgtccagcaagggagacctggactggaggaggaggacctacctacccggcctccagctctctcgtctcttcctcctcctcctcgaagctccgatccgatcccccaatgtctgacagcagtccagctcccggcgcctactactccggccctcccgccgcgccgccgcccgagtctaagcccgttgacggcggccaggtcaacgccgatgttcctggtgcgcgcactacctacagatctgatccaaagagtctcttcaattctcctaacaatccctcctccgatcacgttcctcgtctactgtaattgtaacgaccttggcttgtttggcaagaagcaggctactactcctccgcccctgctgcgaaatctggcgccggcggccagggcagctccgctgctcctaaggaatcgggcttcttcgccacctggtgagcattcggagcccaaacaatcgatcaaataaatcaaattaaatctagtcgctgttgcctgcttttgatttcacttgattccttctctggtggtacgtgatggctctccgtttcttgtatgcatgcatgtatgtatgtatcatcacagttgtgggtgcttctctggcggcgaaaccgcgagatagatagattcagtgttggaccgagaaccatggnatggatggatggaacatgcatgcccagtgattgtttgcgccgatgaaagttcattttgtccggattattttctctga

SEQ ID NO: 147580 - DNA, 570 bp, Zea mays
  unsure (1)..(570): unsure at all n locations
  Clone ID: MRT4577_66119C.1
tcttattgtcttagcaactcttaacttatattgacatcttctctcttgnttttggcatatttggttatattatatgatttttggcttatttggttatattgtgcanacttctttgagttgtctttagctgacctgtgtggatgcttgatgcagaattgttgagtgcggtgcggctagcctactaagcatgttctttatttgattttgtatacactatgaagtgaaacgaaaaataagcataatatggagagtctaggtctttcacttggttttataatgttgatggtacagataagctcctgggaacatctgggcatattgttttcacattttattccatgaactgaaatacaagcctttcaanatccattaggcagacacttgacattaattgcttaatagggtactagcatatgaagagttcagataggcaatggacatatttatcacgttgttgtaaatgcgtcaaatgattatgacatccagcccacgttttccattggatagtaacagtgcctggcatttggtgaggattcatttgtccttgctcattggatacatctttggctc

SEQ ID NO: 147581 - DNA, 283 bp, Zea mays
  Clone ID: MRT4577_6611C.1
attgaaccactagcaccttatatgcacaatcgggcccaccaaggcgcgcgaaaattgtttctcttcttagcgcccgaggaccctgcgcgcgaggttaccgcgggaacattttcccggcaagcgcacgagcgcctatatatccccctttttccccggagctctcaaaaaaaggggtttttgtgtgtaaacccaacccttgatccctactacagcggacacgaagtcacaacaagcatcttacttttattatcactgttgtttctacaacaatcatgactattac

SEQ ID NO: 147582 - DNA, 233 bp, Zea mays
  Clone ID: MRT4577_66120C.1
tagtttacccacgcgtcgcgtcaaaacgaaacgaagcatccacgtttgtcgctcacacgctggcaataggccgccagcccatctcccagcaccggcgccggcgtccgctaagcggcgccggtccacagacaaattggacttccagccgggtcatggcccggcttttttttcggatggggttgctcggcaaaccgggctcccggtggggccgcgatcccctgtgacggctgggc

SEQ ID NO: 147583 - DNA, 681 bp, Zea mays
  Clone ID: MRT4577_66121C.1
ttgggaccctcgaggccggccgggaaccctgcctgcagctctctcgtctcttcctcctcctcgaagctccgatccgatcccccaatgtctgacagcagtcccgctcccggcgcctactactccggccctcccgccgcgccgccgcccgagtctaagcccgttgatggcggccaggtcaacgccgatgttcctggtgcgcgcactacctacagatctgatccaagagcctcttcaattctcctgacaatccctccgatcacgttcctcgtctactgtaattgtaacgaccttggcttgtttggcaagagcaggctactactcctcctccgtccctgctgcgaaatctggcgccggcggccagcagggcagctccgctgctcccaaggaatcgggcttcttcgccagctgttgtgggtgcttctctggcggcgaaaccgcgagatagatagattcagtgttggaccgagaaccatggatggatggatggaacatgcatgcccagtgattgtttgcgccgatgaaagttcaatttgtccggatttattttctctgaaatagtatatgtttttttttctccatcggtgagccggtgatcttgtcaatttgtacaataatcattatatgcaaccaactgtgctttaatttgctctgatatcgaaaaaaaaaaaaaaaaaagcggcc

SEQ ID NO: 147584 - DNA, 868 bp, Zea mays
  Clone ID: MRT4577_66122C.1
cgatccgatcccccaatgtctgacagcagtccagctcccggtacgcgctctcctcacccatcgtactcctatatgcaaactgtcaaattaagcaagcacacaggagatgccgtatatcgtttacctcgcatgctaattcgctggcccgttctcttcgtgctggtgctgctgcaggcgcctactactccggccctcccgccgcgccgccgcccgagtctaagcccgttgacgactgccaggtcaacgccgatgttcctggtgcgcgcactacactacactacagatccgatccaagcgtttcttctcctaacttcgtttctaattctccctccaaccacggttgcgcggatgtgtctaacgaccttgttggcttgtttggcaagagcaggctactactcctcctcggtccctgctgcgaaatctggcgccggcggccagggcagctccgctgctcctaaggaatcgggcttcttcgccagctggtgagcatccggagcccaaacaatcgatcaaataaactaaattaaatctagtcgctgttgcctgcttttgatttcacttgattccttctctggtggtgatggcgatccgtttcttgtatgcatgtatgtatgtatcatcacagttgtgggtgcttctctggcggcgaaaccgcgagatagatagattcagtgttggaccgagaaccatggatggatggaacatgcatgcccagtgattgtttgcgccgatgaaagttcaatttgtccggatttattttctctgaaatagtatatgttttttttctccatcggtgagccggtgatcttgtcaatttgttcaataatcattatatgcaaccaactgtaaattaacctgctctgatatc

SEQ ID NO: 147585 - DNA, 715 bp, Zea mays
  unsure (1)..(715): unsure at all n locations
  Clone ID: MRT4577_66123C.1
atcgatcctgtcctgtccagcaagggagacctggactggaggaggaggacctacctacccggcctccagctctctcgtctcttcctcctcctcctcgaagctccgatccgatcccccaatgtctgacagcagtccagctcccggcgcctactactccggccctcccgccgcgccgccgcccgagtctaagcccgttgacggcggccaggtcaacgccgatgttcctggtgcgcgcactacctacagatctgatccaaagagtctcttcaattctcctaacaatccctcctccgatcacgttcctcgtctactgtaattgtaacgaccttggcttgtttggcaagaagcaggctactactcctccgcccctgctgcgaaatctggcgccggcggccagggcagctccgctgctcctaaggaatcgggcttcttcgccacctgttgtgggtgcttctctggcggcgaaaccgcgagatagatagattcagtgttggaccgagaaccatggatggatggatggaacatgcatgcccagtgattgtttgcgccgatgaaagttcaatttgtccggatttattttctctgaaatagtatatgttttttttctccatcggtgagccggtgatcttgtcaatttgtacaataatcattatatgcaacagtgctttaatttgctctgatatcanaaaaaaaaaaaaaaaaggcccctagggcc

SEQ ID NO: 147586 - DNA, 698 bp, Zea mays
  Clone ID: MRT4577_66124C.1
gctgagctccccatctatcctgtcctgtccagcaagggagacctggactggaggaggaggacctacctacccggcctccagctctctcgtctcttcctcctcctcctcgaagctccgatccgatcccccaatgtctgacagcagtccagctcccggcgcctactactccggccctcccgccgcgccgccgcccgagtctaagcccgttgacggcggccaggtcaacgccgatgttcctggctactactcctccgtccctgctgcgaaatctggcgccggcggccagggcagctccgctgctcctaaggaatcgggcttcttcgccacctggtgagcattcggagcccaaacaatcgatcaaataaatcaaattaaatctagtcgctgttgcctgctttttgatttcacttgattccttctctggtggtacgtgatggctctccgtttcttgtatgcatgcatgtatgtatgtatcatcacagttgtgggtgcttctctggcggcgaaaccgcgagatagatagattcagtgttggaccgagaaccatggatggatggatggaacatgcatgcccagtgattgtttgcgccggtgaaagttcaatttgtccggatttattttctctgaaatagtatatgtttttttttctccatcggtgagccggtgatcttgtcaatttgtacaataatcattatatg

SEQ ID NO: 147587 - DNA, 1083 bp, Zea mays
  Clone ID: MRT4577_66125C.1
ggccgcttttttttttttttttttctaatgttttttttcttctttatatgagagactctttgatttcgatatcagagcaaattaaagcactgttgcatataatgattattgtacaaattgacaagatcaccggctcaccgatggagaaaaaaaaaacatatactatttcagagaaaataaatccggacaaattgaactttcatcggcgcaaacaatcactgggcatgcatgttccatccatccatccatggttctcggtccaacactgaatctatctatctcgcggtttcgccgccagagaagcacccacaacaggtggcgaagaagcccgattccttaggagcagcggagctgccctggccgccggcgccagatttcgcagcagggacggaggaggagtagtagctcttggatcagatctgtaggtagtgcgcgcaccaggaacatcggcgttgacctggccgccgtcaacgggcttagactcgggcggcggcgcggcgggagggccggagtagtaggcgccgggagctggactgctgtcagacattgggggatcggatcggagcttcgaggaggaggaggaagagacgagagagctggaggccgggtaggtaggtcctcccgccgcgccgccgcccgagtctaagcccgttgacggcggccaggtcaacgccgatgttcctggctactactcctccgtccctgctgcgaaatctggcgccggcggccagcagggcagctccgctgctcccaaggaatcgggcttcttcgccagctgttgtgggtgcttctctggcggcgaaaccgcgagatagatagattcagtgttggaccgagaaccatggatggatggatggaacatgcatgcccagtgattgtttgcgccgatgaaagttcaatttgtccggatttattttctctgaaatagtatatgtttttttttctccatcggtgagccggtgatcttgtcaatttgtacaataatcattatatgcaaccaactgtgctttaatttgctctgatatcaaaatcaaagagtctctcatatagagtttaccttatgatgaatggaagaagaagaag

SEQ ID NO: 147588 - DNA, 318 bp, Zea mays
  Clone ID: MRT4577_66126C.1
tctttttcacctagagaaaacagccttgttctagggctgcttgacatacacggggacgtgaacgcgagctaactacaatggaggcggcaccctacctgttacacaattttgcacgccatccccgactccaaaatgaagctgggcgccgactttgagcgctgtgccctggccgagttcaaccgcgacccctacgagctcaactgaacctacgatcttagctttacagctccatctggacagcgcctcgactttcttgaggcgtaataccgatggggcaccccaactcacggcgagcccttctactaccttccgctatgg

SEQ ID NO: 147589 - DNA, 711 bp, Zea mays
  Clone ID: MRT4577_66127C.1
ccctcgagtccggccgggaaacaataccgctagtgctcgcaccagtcagtctgacgcgcgccggcggcggagcagaggggtggggtgtgggctggcctgggctgcgtcgcggacagctgatctgcgcccgctccccttgaaaggaaggtctcattcacatctacactctacatctacaacaacaagaactgcgactacgtcaacgtgaacgtgaaccggccacgaggacaatccgatgacgtacataccactaccacacccggacgcgtctgggactggaacaagacgcaacctcgccatcgagataaacataaacaagcaatggaatgttatcatgataacgaagcgtgtccatgtgcagcatgagcatgcgcccccgtgcccataaacagaacacctgcggatggggaaggatgacaatgatcaaggtggatgcaaatgcaacaggagcgagggcatgatcatcaagacgaagacgcatgcgccgaagcccaagtctgtgtttgtggggactgcgactaccatcgagactgccattcccatcgatgacgatgaggataattgatggcaaggactaagactaggttgtggcttggtacctgtaccagatctacatctagtgtactgcgagcgcgtacaattcacactgacactgagcatgaacctgaacctgatgtgcgtgttgaagatgtaactcgttccgtcatgaac

SEQ ID NO: 147590 - DNA, 724 bp, Zea mays
  Clone ID: MRT4577_66128C.1
ttttttttttttttttttaacaggtaccacaactttattataaaattaatgtgactggaacgatacaaaatggatttttaacgtgaaatatatcgaataaataacaatctcgtggattagacgatgtggtgcatttctattggctcaagatttgccacacaaaaggttataaagaacataatcgcagaagatcccaagggtgggatctcgtgtggccactaccttctcctatctctccctatcgcatgatctggcagttgcacgaaagaaaaaaaaatccaggagcaggggaacggccatcgttggcctccaggggttggggcacgccaccggtgagccgcggtcggccgtggcggggctacaggctgggctcgccatggctgtttgccgtgcccgcgcctaagccgccgttcagcggctccaggcccgtgagccggtactcgcgctagccggtgcagtgcggcagcacctgagccacgccgaccgcagggccacgcccacggccgggctagaggcacccgcacgctggcagggttgccgcgaccgcgcgcacgctggccgcgcctggccacgagcaagggcccgcagtacctacggggaagaaggctggggaagacagagaaggggtttctcacctgcgttgagagagctccggcgacggcgcattgcatgggtggaagggcgccaggtgtgagggagatggatggctgctacgttctgggaa

SEQ ID NO: 147591 - DNA, 1277 bp, Zea mays
  Clone ID: MRT4577_66129C.1
atggatcctcgagaaacaatgggacgctgcatggattctagtaaagggttgggttttactgaggttgcaaaagcccgtgcgagtacaaacaaagttgtttgttgccatttctcattggatgggaaacttcttgccaccggagggcatgataaaaaggtcgttttatggtttacagatgtgctaaaacgtaaatccgcattagaagagcactcttccctaattacagatgttcgatttagccctggcatgacccgccttgccacatcttcctttgacaaaaccgtgcgggtttgggacgctgacaatccagattattcgctccgcacttttacaggtcattcagcatctgtcatgtcacttgattttcatccgaacaaagaagacatcgtttgttcgtgtgatagtgatggtgaagtgcggtgttggagcataaataatggtagttgtgtgacctgcgttagggttttcaatggaggagctactcggttaagatttcaacctcgccagggtaaatatctggcagctgcctcagaaaagggaatatccatactggatgcggagacattacaagtttgtagaactcctttgcagggccacgtacagattattcagtcagtatgttgggatgccgcgggcaactatctggcgtctgtcagtgaagattctgtcagggtgtggtcatttacctcagggaactacatcgaatgcatacatgagctgatctgcagcgggaacaagttccattcgtgtgtttttcacccaaattacccgaatttgcttataatcggttgttatgagtccctagagctttgggacattagggagaagaacacggtgacaatcagcaacgctcatgacggcatggttgctgccctagccgcgtcaagtgcatcggggctggttgcatcagtgagtcatgatcagctcgttaagctctggaggtgacactgaagacagcaacgcttgtctgtgtgtcattctcatttccagtgtcgtggcaaaagcgaaagggcagctgatctgatctcctagattgatttgcgactgtggcatgcgcaaactattcaaatagttgtcagtaatgtgcttcccttatttctttgtttgtttatccatgccgggtgatactttgttacaattcatctatttagagaactgctattataatttgacccccccttagccttgtttggtactcttgtccttccatccaattttgaattgataggttttaattaatttaattaaccatcccccaaaaaaaaaaaaaaaaaaaa

SEQ ID NO: 147592 - DNA, 341 bp, Zea mays
  Clone ID: MRT4577_6612C.1
tttccatcccttacaatatcgcccgcgggctgtaatatattcaccttcaagggatcgagcactcagacgtcaaaccctataacatcttatatgatggagaattctgctctaaagatgtcaattttggaatggctcgagaagaaacatactgacacttgataggggatgaaccacgttcatattagatggatggcaccatatatgtacaagcacaatccctatttccgtaaagatgatatgaatatctatggtcttatcttgagggaaatattcatcccttcacttcccttataaaaatattacttccattcatgcacctttttcctttgtttataaaaacc

SEQ ID NO: 147593 - DNA, 298 bp, Zea mays
  Clone ID: MRT4577_66130C.1
aaacccaaaatggaccattttattaccaaacaccctaaaggggggcaacggttgatttttattgatcccagggcctacttttcccggtttaacccgggattataggacatgactggattttggcacttccgagggggggtgtatttatcgccccccgacactattgtatttgcagttccttcggttggtaacatttttagccgagacatttgacattttgacttgaacaatttggttatttaccacttcgggactcccacgccgggccgggcggatcgcattgagtttgagtggagta

SEQ ID NO: 147594 - DNA, 226 bp, Zea mays
  Clone ID: MRT4577_66131C.1
gttctgcccactcacctaacagaaccaaaaactttaagctctaataaagcttgggctacctacccattttctaggggaatgccaaacatataatacgattttatggggtctgactgtttcaagacctaaaaaactaaaactttgaactgtagcaaaaaagggaagtctgtcctcaatgcctaaactgccatgtcctgggggaccttttcggatttttgcgctcagt

SEQ ID NO: 147595 - DNA, 670 bp, Zea mays
  Clone ID: MRT4577_66132C.1
ccctcctcgagtttttttttttttttttttttttttttttttttcccaaacagaaaaacccgttaccggaaacatccaccaactaaagctagaggcgtgtcataacctacctaccagtaccagttcaacacaaaacgtaacacggtcacaatttcattaatattacatcgacctggacgtccgcataatgatggaggacttgcttcgggggggcttggttctcataatttattgcggttttctcgcagcttaatcaccctgtctcatgcgctgctaaggttctacgaattgccagcctaattagttctatttccagctctaaatacccattatcaggggggcagctcactgacgcttcagtcaagcttcgccacctttgaaatgtatgctctgccaaagggtacagcgcaataagatgcagcagtgattccgagcccggcaagaaaaataagccaatcgtaagctggatcttgcacggggtaaaccctgaggccaatagtgttccaaaagctttcagtccacacgggatctgcagcacccattggatctgacgagttcgctggaaaaacgggccatgcattgtcctcaaacttcacccgagttgaataagcaggaccataccgtggttgtagatacaacacatttacctccaccctccacctttgcccct

SEQ ID NO: 147596 - DNA, 727 bp, Zea mays
  Clone ID: MRT4577_66133C.1
aaaggattcatcaagtaaatgtgatcgatcgattaacatctcatgcagctccccaaagtcatccttcccttcaggcagcatcatgaagactaaactccttcttgcctcaaagcagagaagattcttatgcttcacgagccaatgtagacgctcatttctcttggaacaacggacaagagcattgagtggtgctttgtgtgccagcaacacaagctgtaggttgtgccccacatcctcataaatcgctgcgatgaaatcaagttcagtcaacatgaccaggatgtgtgatcgagcagcccatatggtttgactttccatgaccccgatactctctgatgacaatggcaggtccatctccaatgtcttcaagcactcatccaaccttttcaacatgtacatcgacatgatgtgaaacctccatatccatgtgtcaccatgctgagactccctgctgtaaaaaatactgggtatcggcccctcatcagaaatccaacggcgtgcctgctggcacatcactttgagaaagtttgagaactcatctagatcactaggcgatataatcattggcattgatgcaagcccatcaaggaccatatccactgtttcacgggcaaatggcaggacttgctcgatcaacctggttggtgagttcatagaagggggtagcttggggcgagtggataaagctgaggcaagtgtacgacgacatgatctatacagtaattca

SEQ ID NO: 147597 - DNA, 2169 bp, Zea mays
  unsure (1)..(2169): unsure at all n locations
  Clone ID: MRT4577_66134C.1
ttttttttttttttttcggtcttggtaacggatcaactagaatagcccaccatccgttcactggtaatcggagtgtcagcactcagcacaatgcagctacatgcacatgttattacactactgccaccggctggactacacagcgtcacactcacacctcttcagaaaacaaaaggaacctgctttctatcaattccttctgcattaggttaaatagaagtctcggaacactaaacccaggatacatacaaaagaagaaagaaagcctattacctcaagccctaggaacagattcaatgaggcagcagggtgtcgctagcctaccgtatgtacagaatataccggttcagaatccatgacagcagcaactaccatgtaccgaagctgcagctcacatgctcttctgtgatcttctgcagctggttttccatcattttcaaggatgtgtaaggagggaggcagagccggtagaagcaggtctgcgatgatgggagccggtcgggcgaatctgatgtcttgtaaataaaaagtttggagctcagtccacaaaacccgtctgatggtaaatacttcaccgaagtccagaagaagaggagctgcctctgtctctcgattgacatgcgctccacagccttccagaacagggtaatctggcgatccttttctttgtagccattatattgagtatgtgatttccaatcttgcagatttattgcattgctgctcccccctaacagtcgatcaaagtcttctagatctaaacactcgaaaaactcttcccggcgcttgggattaactagtatatcagcaaatccatccgtgaaatgggttagctgagatgaaatagagtccacaaagatattcttaataagaagatcaatgtaatgctctctgttccaaatattcacactgatatcctgtcctcctggacaaagatcaataatcttttcagtacctaattcatgagctcctcgggaaaatgttaggtatagattatcaatttcagcagcatccatctctagaatttttttacagcttgcatatttgacaggatctgcaacagaaatatcttctaacgtaatacttctcccagcaagatgcaagaacagagtacggtctatcacaactccaacttgtactttatgcatcaaggctaatccaattatccgccccgcaaaagtgaagtacttcaggtgcagtggatccacagcagatgtttcgttcaagtagaaccttcgtttatcctccggacagggtgagaagagaacttgcttcgaactgaaaagagcttggcacactaaacaaaaccattcccttagaacgccaggacctgtagcttcctcattcttaaactccataaacagcccaccacgaagttcagtttgtttcgcctgtgcgatgtaattaaaggattcatcaagtaaatgtgatcgatcaattaacatctcatgcagctccccaaagtcatccttcccttcagggagcatcatgaagactaaattccttcttgcttcaaagcaaaggagattcttatgcttcacgagccaatgtagacgctcatttctcttggaacaacggacaagagcattgagtggcgccctgtgtgccagcaacacaagctgtaggttgtgccccacatcctcataaatcgctgagatgaaatcgagttcagtcaacatgaccaggatgtgtgatcgagcagcccatgtggtttgactttccatgaccccgacactctttgatgataatgacaggtccatctccaatgtcttcaagcactcatccaaccttttcagcatgtccatcgacatgttgtgaaacctccatatccatgtgtcgccatgctcagactccctgctgtacagattactgggcatcggcccctcaccggaaatccaatggcgtgcctgctggcacatcactttgaggaaatttgagaactcatcaagatcactaggcgatataatcattggcattgatgcaagtccatcaaggaccacatccactgtttcacgggcgaatggcaggacttgctcgatcaatctggttggtgagttcatagaagggggcagcctggggcgagttgataaaactgaggcaagagtncgncggcatgatctagatagaggtacgggacgcgtgggcaaaaacaagaaatccggaccgggt

SEQ ID NO: 147598 - DNA, 412 bp, Zea mays
  Clone ID: MRT4577_66135C.1
cccaacaataacaagaagacatgaatagatactatcaaggcagtcacatggaaaatacaaatgtttataaaacaggtagctgatacccacagggcacgtacttacactacatacaacatagaaaacaggaccacaaacagtaggtgccaatacgcatgtacaaccgggaagggcgcgctacatggaactttgcttgacaaaacaccggtcgcgagcattcattggtgccttgccaaagtgaaaatccctatccctagacccggacgccttccttgtgtggggcggatcactcagtcagactttggtgtggaaacacaagtaagaacataacctttctcctgctccccttcttcaaggagagacccctccgagtgggcaatcgagccagagttcattatggcggtccaggtgg

SEQ ID NO: 147599 - DNA, 845 bp, Zea mays
  Clone ID: MRT4577_66136C.1
cccctagccccggtggcgggcgcgacccggcggccgtgctggtagccccagcgcgggggcgccggcgtgtgcggcgcgaataccgggcgggcatgcgacatagccatggtcaacaactgcttctgctgtcgctgtgacacgcaagaaggcaagtgccacgaccgcccatccgcagtaatgccttgatccgccgatggtgccgcgcggcggtaggcaccgctacttcttgccgcatgaactgatggatcatgccacctccgctggtcggatattaccggggtcatgcactgcacaagacaacgatgcaacaaatcctatgtcgcttgtcatcatggttgcacttccctaatccggtttgatcccgacggaggtttgcacactagaagcgtcctttttctcgattttgatgagaaacatgttggcaggaaaaaaacatcggcccttgccttgtttgtgcatgccatcgatatccatgcatgcatatgagagagacttgcaaaatggacgatcttacaggagaccgaagatggagcccttgatgatgccgttgacgcttgagatggtggcgactcaacattcttgcactcgccagttcttgcgtccggacggcagtaccggggatacactcctatttctactctcaatggagcatctacttctctctgttttttttttttttgcgagcaaaagtgctgataacgtgttgtaactcagtggtaaacaagtgaacagagggatagagaaatgacagcccatcttctttattgcagaggggaaaaaaaaaaaaaaaaaaaaaaaaaaaaaaaaaaaaaaaaaagtaaaaaaaaaaaaaaaaaaggccccta

SEQ ID NO: 147600 - DNA, 391 bp, Zea mays
  Clone ID: MRT4577_66137C.1
tcttttttttcgcatcgtctaccatatcaggagggagatcgttacgctcaagctgttcaagcacccgaatgccgcgcggttgcacgaggctgttgccaggaaaacgatgatctacatggtgctggactttgtgaacggtgatgagctgttcgacaagatcgatatgaaggggaaactgaccaaacacgagggcggggggctgtttcagcatctaagctacggaggcagctattgccatgacagaggcgtgtaccaccgagacctcaggccagacaatgttcatgttgatcggaagggcaccatcgagatttctgacttcagcctcagtgctataccttaacatctacggagtgacgggcttgtgcacacaacatgtggtaggcgcaaatac

SEQ ID NO: 147601 - DNA, 301 bp, Zea mays
  Clone ID: MRT4577_66138C.1
gtgcttgactcaaccggtttgtctgacgctagcggtacatacacgacgcacaaaccgactacgaccctacctgatgcacttctacccgggcattagctggagctggaaggcggaagcgttcccgttggattacttcttgggctggaaagagtgaaagacccggatgcactaaatcctgtcttggaacagttacagacctgtaattgatcccatactttctgacgggccctaagttggaacctgcccaggcggatgggtcagctctcagctgactggtgatccggcaccgcatcgtcagact

SEQ ID NO: 147602 - DNA, 201 bp, Zea mays
  Clone ID: MRT4577_66139C.1
ccggccaacctcagggaaaggttcaggccaaccaatccggtcgcagaagaaaaattggtaaaaggtggtaacataagtttaaaccccccaaaaataaccaaccaacggttggatggaacaacccaaaagcaataacccaaggtaaccaaacgttacaattccaaaaaccacccaattcaactggccttaacccaaaatcct

SEQ ID NO: 147603 - DNA, 295 bp, Zea mays
  unsure (1)..(295): unsure at all n locations
  Clone ID: MRT4577_6613C.1
atagtgagtcgtattagnangagaactcgccgctcagctcggggaccaacgacgccgcctacatgcagctcaggaacatcgacacgtacatcatctacgcaacgacctgcgatgacgggaaagtcaagcccagaggatccaactgcatggacttggctgatccttgcgctcaatactacgtcgacgcttagctgaaccagccaaacgtgatgaagaccatccgtgccaacacaaggctcacgtacagatgggccagatgcaggggcacgttctagaagctgctcaagttcggtga

SEQ ID NO: 147604 - DNA, 551 bp, Zea mays
  Clone ID: MRT4577_66140C.1
atctatcgatccgcgctgacccctgtcgttgggtgttccactttgcttcctccactagctagctaagctccatctgcatccatctatccatcctcccatggcgtccgtgaagctcgccgccgtaccggccggagcccgagccctgcaagacgcaggccatgtacttcaagaactgcctcctcctcgtgagcgagtgcgagaagtgctgcacgggcgtggtggccgaccccgcgtgctactgcgaggtggagcgggaggcgttgatcgactgcgcgcccggccaccactgcagccgcgccgacaagaagatcaagatcgccgagatgaacctctcctgcatgaagaacctaaagtgcaagcatgcgtgatggccggtacggtaccttagctgcagcttcctactacaagtatatctcgtctctcgtttgtgtgtccatctccgagtgttgatgtggactttgtggtctggctttgttcccactatgatgatggttgtgttgtgtcgtacgtccctatgtaaactttggtattaacaacatggtgcttgatcc

SEQ ID NO: 147605 - DNA, 799 bp, Zea mays
  Clone ID: MRT4577_66141C.1
gccggcctgggtcggggcaacccaccaaggaaattcacaaagcgatactagtccctaccaaagcatagttcctgaaacactcttgcaatcctactagcgtcgacaatgtcgctcgtgaggcgcagcaacgtgttcgaccccttctcgatggacctctgggaccccttcgacaccatgttccgctccatcgtcccgtcggcggtctccaccaactccgggaccgccacctttgccagcgcccgcatcgactggaaggagacgcccgaggcgcacgtgttcaaggccgacctccccggcgtcaagaaggaggaggtcaaggtcgaggtcgaggacggcaacgtgctggtcatcagcggccagcgcagcagggagaaggaggacaaggacgacaagtggcaccgcgtcgagcgcagcagcggccagttcgtcaggcgcttccgcctgccggagaacgccaagatggatcaggtcaaggctggcctcgagaacggcgtgctcacggtcaccgtgcctaaggcggaagagaagaagcctgaggtgacggctatggctattgagatctctggttgagcatccaatccaatatggacgtggaaggaaggtgtacaccgtgtactgctgctggtccgtggctgtcgctgtcttgtgtgatgtttcatgtgtcttctacgatatataacgtacttccgtttgtttcgtttcgtatgtacaatcttccgggtatcgttcatgtatccctttgaataataacaaataaaatcgggttttcacggcaaaaaaaaaaaaaaaaaggccccta

SEQ ID NO: 147606 - DNA, 737 bp, Zea mays
  Clone ID: MRT4577_66142C.1
ggtaccctccgagggtctggcgcgggcaccaaggaaattcacaaagcgatactagtccctaccaaagcatacttcctgaaacactcttgcaatccactgagttctgtttgttgagacgcatagagctagcgtcgacaatgtcgctcgtgaggcgcagcaacgtgttcgaccccttctcgatgaacctctgggacccattcgacaccatgttccgctccatcgtcccgtcggcggcctccaccgactccgagaccgccgccttcgccagcgcccgcatcgactggaaggagacgcccgaggcgcacgtgttcaaggccgacctccccggcgtcaagaaggaggaggtcaaggtcgaggtcgaggacggcaacgtgctggtcatcagcggccagcgcagcaaggagaaggaggacaaggatgataagtggcaccgcgtcgagcgcagcagtggccagttcgtcaggcgcttccgcctgccggagaacgccaaggtggatcaggtgaaggctggccttgagaatggcgtgctcacgatcaccgtgcccaaggcggaggagaagaagcctgaggtgaaggctattgagatatctggttgagcatccaatccaatatggacgtggaaggaaggtgtactgctgctggtccgtggctgtcgctgtcttgtgtgatgtttcctgtgtcttctacgatatataacgtacttccgtttgtttcgtttcgtatgtacaatcttctgg

SEQ ID NO: 147607 - DNA, 195 bp, Zea mays
  Clone ID: MRT4577_66143C.1
gcttatgaacagagcactttcgattgcatgattattgattatgttctagcacaaaggcacaggtaccacaattacattaaggaatgacaacgaataagggggggttgcaacatccgatcagatccctccatgcagggatggggggccttaagaggcaggacacacggaggggggaggaacaggcctacgaggacg

SEQ ID NO: 147608 - DNA, 198 bp, Zea mays
  Clone ID: MRT4577_66144C.1
cgcgcctactaaactagaattatctctagtcttacaatataaactttaaagttcaaaattggaaatactaaactttaccttaaaatattatatcataattaatcaaaaaaccattattcacacttcttcattcaaaattttttaacaaattaatttttataataccatacttttacaaatttcttcaaataccacttt

SEQ ID NO: 147609 - DNA, 765 bp, Zea mays
  Clone ID: MRT4577_66145C.1
ccggccgggaccaaggaaattcacaaagagatactagtccctaccaaagcatacttcctgaaacactcttgcaatccactgagtcctgtttgttgagacttgagacgcatagagctagcgtcgacaatgtcgctcgtgaggcgcagcaacgtgttcgaccccttctcgatggacctctgggaccccttcgacaccatgttccgctccatcgtcccgtcggcggcctccaccaactccgagaccgccgtcttcgccagcgcccgcatcgactggaaggagacgcccgaggcgcacgtgttcaaggccgacctccccagcgtcaagaaggaggaggtcaaggtcgaggtcgaggacggcaacgtgctggtcatcagcggccagcgcagcagggagaaggaggacaaggacgacaagtggcaccgcgtcgagcgcagcagcggccagttcgtcaggcgcttccgcctgccagagaacgccaaggtggatcaggtcaaggctggcctcgagaacggcgtgctcacggtcaccgtgcccaaggcggaggagaagaagcctgaggtgaaggctattgagatatctggttgagcatccaatccaatatggacgtggaaggaaggtgtactgctgctggtccgtggctgtcgctgtcttgtgtgatgtttcctgtgtcttctacgatatataacgtacttccgtttgtttcgtttcgtatgtacaatcttccgggtatttgaataataacaaataaaatcgggttttcacggt

SEQ ID NO: 147610 - DNA, 756 bp, Zea mays
  Clone ID: MRT4577_66147C.1
caccgggaaaacccgattttatttgttattattcaaagggatacatgaacgatacccggaagattgtacatacgaaacgaaacaaacggaagtacgttatactgtatatcgtagaagacacaggaaacatcacacaagacagcgacagccacggaccagcagcagtacaccttccttccacgtccatattggattggatgctcaaccagagatctcaatagccttcacctcacgcttcatctcttccgccttaggcacggtgaccgtgagcacgccgttctcgaggccagccttgacctgatccaccttggcgttctctggcaggcggaagcgcctgacgaactggccactgctgcgctcgacgcggtgccacttgtcgtccttgtcctccttctctctgctgcgctggccgctgatgaccagcacgttgccgtcctcgacctcaaccttgacctcctccttcttgacgccggggaggtcggccttgaacacgtgcgcctcgggcgtctccttccagtcgatgcgggcgctggcgaaggcggcggtctcggagtcggtggagaccgccgacgggacgatagagcggaacatggtgtcgaaggggtcccagaggtccatcgagaaggggtcgaacacgttgctgcgcctcacgagcgacattgtcgacgctagctctatgcgtctcaacaaacaggactcagtggattgcaagagtgcttcaggaagtatgctttggtagggactagtatcacttta

SEQ ID NO: 147611 - DNA, 372 bp, Zea mays
  Clone ID: MRT4577_66148C.1
ctagaatcccaccatttacgaacgctatcctgctacttcgtctgctaccattaccactcgacttatcttatcggctaccggtccgagctcattgcataatcacgctaaccaaaagccagcgggctattccggaaccgagacacctcgaggaccacaatacgatttcttcaacctctccattgcttcctagctattaagcgcgaggtcattcatcagcgcagggtattttcgtcgaatctacaacataaaaaagcagcaaaaatgcgtaccaccgcagtcctgaggaatgccgctcgcactcctttgatcaagtttctcggaaagcgcacgacgccagcttccgttgaccacactcctcatgctcaccctgct

SEQ ID NO: 147612 - DNA, 515 bp, Zea mays
  Clone ID: MRT4577_6614C.1
aaacaagtacatggtagagctgttaagacagggcacacctctgaaactgaagttgccaatgctttgatttcactatatggaaagtgtggcagtattgaagatgccaagatgatcttttctgaaatgtcactgaggaatgaggtttcatggaatactatcataacaagttgttcacagcatggacgtggactagaagctttggatttatttgatcagatgaagcaagaaggtctgaaaccaaatgatgtcaccttcataggtgttttagctgcttgcagtcatgtgggtttggttgaggaagtccttagttacttcaaatccatgtctaatgtgtatggacttaatccaatacctgaccattatgcctgtgttgtggatattcttggacgagcaggccaacttgaccgtgcaaggagatttgttgatgaaatgcctatcactgctaatgcaatgatttggcgaacacttctcagtgcgtgtaaagtacacaagaacatcgaaattggggagcttgc

SEQ ID NO: 147613 - DNA, 917 bp, Zea mays
  Clone ID: MRT4577_66151C.1
cattgggtacctcgaggccggccggatcatatctccatccgcggttccgcccagctgctccacatctcaattctcaccacacacacgcacacacactataaaaaaaaccaaggaaattcacaaagcgatactagctagtccctaccaaagcatacttcctgaaacactcttgcaatccactgagttctgtttgttgagacgcatagagctagagtcgacaatgtcgctcgtgaggcgcagcaacgtgttcgaccccttctcgatggacctctgggaccccttcgacaccatgttccgctccatcgtcccgtcggcgacctccaccaactccgagactgccgccttcgccagcgcccgcatcgactggaaggagacgcccgaggcgcacgtgttcaaggccgacctccccggcgtcaagaaggaagaggtcaaggtcgaggtcgaggacggcaacatgctggtcatcagcggccagcgcagcagggagaaggaggacaaggacgacaagtggcaccgcgtcgagcgcagcagcggccagttcgtcaggcgcttccgcctgccggagaacaccaaggtggatcaggtcaaggctggcctcgagaacggcgtgctcacggtcaccgtgcccaaggcggaggagaagaagcctgaggtgaaggctattgagatctctggttgagcatccaatccaatatggacgattggacgtggaaggtttcctgtgtcttctacgatataataattggtcgctgtcctgtgtggatgtttcctgtgtcttctacgatatattaatgtacttctgtctgtttcgtttcgtatgtacaatcttccgggtatcgttcatgtatccctttgaataataacaaataaaatcgggtttgtcacggtaggaaaaaaaaaaaaaaaaaaggccccta

SEQ ID NO: 147614 - DNA, 1003 bp, Zea mays
  Clone ID: MRT4577_66152C.1
aactacgtctcgcaagccatcttggctagcactctctccttccccaccgcgccgccgagctccgcctccggccgacgcaagcagcccacctcggacgaattcttcttcccctactactcgtatctaccgggatggcgtcgggtggagatctcccatccgggttcgctgatgagagcaaaagtacaaaaacagaaggatcatccaacgaatgtcaaggggtccctccagctgccgctgcaggcttgtcgggtcctttcgatttttcttctatgcaaagtttgctcaatgatccatctataaaggagatggcggaccagattgcaagggaccctgcattcaatcagatggctgagcagctacagaaaggtgctcagactgcaggagaacagggcatgcctccattggatcctcatcaatacatggaaacaatgcaaaaggtcatggaaaaccctcagtttatgacaatggcagagcgcctcgggactgctcttatgcaggatcctactatgtccagtatgctggaaaatttgactagtccaacacataaggaggagcttgaagagcgcatgtctcggattaaggaagatccagccttgaagccaattcttgatgagttagagaatgggggtcctgctgcaatgataaagtactggaatgaccctgaaactcttcaaaagattggtgaggcaatgggagctagcttcccatttggtgcaggttcttctgctgaaccttctggtactgaagaaactgaggaagaaggtggggatgatgatgaatccatcgttcatcacactgccagtgttggtgatgaagagggtctcaagaaagcactagatggtggagccgacaaggatgaagaagactctgagggaagaacaaaccttttcattctgattgtgataaaaaaaaaaaaaaaaaaaaaaaaaaaaaaaaaaaaaaaaaaaaaaaaaaaaaaaaaaaaaaaaaaaaaaaaaaaaaaaaaaaaaaaaaaaagggggcg

SEQ ID NO: 147615 - DNA, 307 bp, Zea mays
  Clone ID: MRT4577_66153C.1
ggcggccgccctttttttttttttttcgaaagcgcaggagaactgcgcgatattatattaaagaagaaggacaattacagaagaaaacaaaagaggcgcctatggcggccagtaacaggcatacagaaacccatccatgtctaaagaggaacctaacacaaataaccacaatgctagctaactagcagggatgcctggaatgggggcggtgagcaaagacagcttttttgcaccagccatctcccataggtgaacctccaactcaactcttcctcgagccgaatttccgacgcatgcgtgcatgtgc

SEQ ID NO: 147616 - DNA, 116 bp, Zea mays
  Clone ID: MRT4577_66154C.1
gaaccggaaacgtaatcgtgaaagtgtgcgcctgttcgcccgctgatatagacaaaagactgtcgcgtaccttgttacacgcgttatcatatagtctggacctctcgacaagacaa

SEQ ID NO: 147617 - DNA, 1648 bp, Zea mays
  Clone ID: MRT4577_66155C.1
gggttcgaggccggccggggatatgcgcctcggcccgttgctccgttctgagttgcccccgatccggcccacctacatctcccagctcacctcccgagtcccgacgaccgcttcgtgccttcgtttcgtccgtcccctagtccctacgaccctactccctaccgcacgccaccgcccaccagcgccgccgaggggcaaggccgaaccctcctccgttcgccgaggcggagcacgcccttccaggccagcttccaccggagcaagagctaagtcgcctcgaattcttcccagctagtagcgtgtgccgtaccccgtcgctcaaccgggatggcgtcgagtggggatccgcccggatctgctgatgagaagaaaactccaatatccgaagggtcttccgacgaacgtcaagggcttcctccagcaggcttttcaaatccttttgattttggttctatgcaaagtttgctcaatgatccatctattaaggagatggcagatcaaattgcaagggatcctgcattcaaccggatggctgagcagctacagaaaagtgctcaaagcacaggagaacagggcacacctccattaaatcctcaacaatacatggaaacaatgcaaaaggtcatggaaaacccccagtttatgaccatggcagagcgtctggggaatgctcttatgcaggatcctgctatgtccagtatgctggaaacctttagtagtccatcacataaggagcagctggaagagcgtatgtctcgcattaaggaagatccagctatgaagtcaattcttgatgagttagagaatgggggcccttctgcaatgatgaagtactggaacgaccctgatactcttcaaaagattggtgaggcaatgggagctagcttcccatttggtgcaggttcttctgctgaaccttctggtactgaagaaactgaggaagaaggtggggatgatgatgaatccatcgttcatcacactgccagtgttggtgatgaagagggtctcaagaaagcactagatggtggagccgacaaggatgaagaagactctgagggaagaagggccttacattttgcatgtgggtacggtgagttgaagtgtgcccagatccttcttgaagctggtgctgcagtggacgctcttgacaagaacaagaacaccccgttgcattacgctgctggctacggccgcaaggagtgtgtggatcttcttttgaagcacggtgctgctgtaactctccaaaacctggacgggaagacacctatcgatgtcgccaagctgaataaccaggacgaggttctgaagttgctcgagaaggacgccttcctttgaataccatgcctttcgtatacacttggactcttggtgtcatgtttttttttcataccggttgtttttgtctggatagccacatgtcatggtccttaaatctgttatgcctaaatgctattagcatgtgggtgttcgaactggcctgtaatggtctaccgttcgtgacttgtgttttcccactccatttctgatacttaagcacatatgaaaaagttgtttccggatcaaattcaatggtggtgtatcatggttatcaaaaaaaaaaaaaaaacagccaaaaaaaaaaaaaaaaaaaaaactcgagacctcgtgc

SEQ ID NO: 147618 - DNA, 382 bp, Zea mays
  Clone ID: MRT4577_66156C.1
gggcaacgagtcgtcgaggacgtggtcggcgaggccgaaccgccgaagcgtgaggaccacctgagcttgccaacgagggtagtgggaggacgctaggtccaacacaacaggcacgagagaccgaatgttgtgaaccccgacgacctgagcgtggagcgcgacgatggtgtcggcgttgagcccagaggtgtggagagtcccgatagcgaccgggggagcttctttggtgatgggcggtcaaagtggcgcccatggcacattcttgctccaaggcaagagacgcagcgcgttcgcgctcctgggaggcagcaacagccacctgaatggtggcgacggtcgcgacaagcgcagaggatgcgggtggagccgtcaaggacgcgac

SEQ ID NO: 147619 - DNA, 633 bp, Zea mays
  Clone ID: MRT4577_66157C.1
ccggccgggccttcctcctccccgtcgatggtgttgtcttctctctcaccctaggacaagggagacactatcgcttctctgccaacgatgtcgagtgctcccccacacgtacggagttgttccaaagactcctgtacttcccctgcaagcctcggcggtgaccatcatcgatctatggacctcggtgagtggaggtcacggatctactccaccggtgtcgacgaggtttgtttccccgtcctggagaagcgacgacgcaatagatcttcgtgcactgcagagtcgtctcccccaagccgcaaaggaatcactccactccatcctcgttctttgaatcgatctgattgaagaggactatagtctatagatcatatgctcatttcaacatcaagggcaatttgattcaattaagtctaggatgatgattttcagtacctaggatgaagtttcagagctgccacctaatttcagagctgcaagatttctacagaattggaagactatgctaccaaaaaagctttcctaatttacctaagatgaagttcagtattgtttaggacgagtcatatgtttatgtctttgtgtctccaaaaatatttgtacacgtatcaagtggtgattattttaagttac

SEQ ID NO: 147620 - DNA, 577 bp, Zea mays
  unsure (1)..(577): unsure at all n locations
  Clone ID: MRT4577_66158C.1
cacgcacgcaacagctgaactgagttgcactacttgttgtgccaactacacacgagagctagacaccctcgcgacgatagaatggagaccatgaaggcaacaagaacgctggtgcagcccgtctactccacccctcacccgctcgccggtgagaaggtccccctgaccgtcttcgaccgcgccgccttcgacatcttcgtgcccaccgtgctcgcctaccccacgccggcaccgtccaacgaggcgctcaaagatggactccgcagggccgtggctctgtaccctcacctcgcgggccgactcgccgtcgacgaccggggccgccggttccttcacgtaaacgacgagggcgtgcttgtggtcgaagcagcaatctcggctgacctgtccggcgtgctcgccggcggtatgaccgacgcaaacgtcgtcgtcgacgagctgtacccgagtctcccagaggaccaacgttggcgcggcactcctgcagatcaagctcaaccgctgcaggtgcggaggccttcgtcgtncgcatcatctgccaccaacacgtcgccgacggccactccatgagcgcctt

SEQ ID NO: 147621 - DNA, 838 bp, Zea mays
  Clone ID: MRT4577_66159C.1
cattgggtacctcgaggccggccggaaaaaaaaaaaaaatatacccggttcttgagtatgggaacaatacgctccccgctcgcccaaaaacacgacacctaggccccccacgtcgccggctcccggcgatggcgccgctgcccttcctgctgggtttcctcctcggcgccctggcgctggcggctgtcgaggcggcggcgatccttctgctgctccgccgcctccgccgcagtcaggctgcggcgggggacgcgctaccagccgccgacgagctgcccggggaacgccccttcccctacgagaagcagggttttctgtggatactggagccagaaaaaatgccaaaactcagtaatgaccgcttatcggctggaggtcctagagagacaaaagacaagaagaatattgtggaagtttttcctgcaaagaagatggctaaaatcaagggaaactctctttgtttgtctggtcctgatggctcccaagcaaccattgagcttttgaactgcacggtacttgcagtttctgcatcaagtatgccctcgcgtaaatgggccaagaggttcccagtaaaattagaaagcaaggacaatgagatttataatggaagcaaggtgtgctatctttatacagacacttcctgggagaaggaatcatggtgtaaagcactccgtattgcagctactgctgacaaggaaaaattaaattggcatgccaagctgagcgaaaaattcctcaattacatatcatcattaaattctgaatacccatgttttctaaagcctgacatactctctggtgaggatcatgaggctatggacaagacatcaaagactga

SEQ ID NO: 147622 - DNA, 151 bp, Zea mays
  Clone ID: MRT4577_6615C.1
ggcccggaggccagcaaggtgaggaggttcatcgagcggacattacggcgagaaggttgctgcagctcacggcgatcctgggcatgtgcatgctcattggagacggcatcctcacgccggccatctcaatcctgtcagctgttgatggact

SEQ ID NO: 147623 - DNA, 317 bp, Zea mays
  Clone ID: MRT4577_66160C.1
aatactctatagtgagtcgtactattcagccgccagtccgccggcgcaactccagccgccgcgtgcccctcctctccccacccgatgctggccctcgcgcgcgccgcgtcgctgctccgccgcgcctcggggtccgcgcctagtactgcgtctctgtacgatccgccgcggtacgtatgcccttgcctcgtggagaatctgccaagtttctttgtcaatgggtaatcgacacttttggctcgaccatttgacgtgttgtttccatcagtactcccttctagcaggactgtgtggacaccatatcgggagcctgggca

SEQ ID NO: 147624 - DNA, 648 bp, Zea mays
  Clone ID: MRT4577_66161C.1
aggatctcgatacctagtccgctgctcgattctcagccgtcgcctatcccttcccgtgctccgcaaccgctgagtgagaagaatagatggccgacaagggcgatggcccggctatcggaatcgatctcggaacgacgtactcttgcgtcggagtgcggcagcacgaccgcgtcgagatcattgccaacgaccagggtaaccgcaccacgccctcgtacgtcatcttcgccgactccgagcgcctcatctgagatgcgggcaataaccaggtcggcatgaaccccatcaacaccgtctttgatgctagcgtctcatcggcaggagggtcagcgatgagtctgtccagagagatatcaagctgtgtcccttcaaggtcatttctgggcctggagagaagccaatgattgttgtccagcacaagggtgaggagaagcatgttgcagctgaagagatctcctctatggttcttatcaagatgcgaggagattgctgaagcttaccttgtgagcacgatcaaaaatgctgcggtcacagtccctgcctacttcaatgactcacagaggcaggtcacaaaggatgctgctacgattgctgaacttaatgagctgcgtatcatcgacgtagccaacagctgcagctatcgcctat

SEQ ID NO: 147625 - DNA, 129 bp, Zea mays
  Clone ID: MRT4577_66162C.1
ggccccatacctgaggagctgcggaacctcactcaccgcgttaaggtgtatgtgctgcctgcctaaaagctcgtctctaaggcctgcgctctttttttcaaattatgtactatagtcccttcgccaact

SEQ ID NO: 147626 - DNA, 491 bp, Zea mays
  Clone ID: MRT4577_66163C.1
gggggctgctccattctcagttgccgccaatcccttcacgtgctccgcaaccgctgagtgagaagaagagatggccggcaagggcgatggcccggctatcggcatcgatctcggcacgacgtactcttgcgtcggcgtgtggcagcacgaccgcgtcgagatcattgccaacgaccagggcaaccgcaccacgccctcgtacgtcgccttcaccgactccgagcgcctcatcggagacgcggccaagaaccaggtcgccatgaaccccatcaacaccgtctttgatgccaagcgtctcatcgacaggaggctcagtgattttttttgtccagaccccacatcaagttgtggcccttcaaggtcatttctgcccccggtgagaacccaatgattgctgtccaccacaagggcgaggagaagcagttagcagctgaagagacctcctctatggcacttatcaagatgcgcgagattgctgaaccttaccttgg

SEQ ID NO: 147627 - DNA, 530 bp, Zea mays
  unsure (1)..(530): unsure at all n locations
  Clone ID: MRT4577_66164C.1
gggtacctcgaggcggccgggaaaaaactctcgaaaccctagtcccctgctccattctcagccgccgccaatcccttcccgtgctccgcaaccgctgagtgagaagaagagatggccggcaagggcgatggcccggctatcggcatcgatctcggcacgacgtactcttgcgtcggcgtgtggcagcacgaccgcgtcgagatcattgccaacgaccagggtaaccgcaccacgccctcgtacgtcgccttcaccgactccgagcgcctcatcggagatgcggccaagaaccaggtcgccatgaaccccatcaacaccgtctttgatgccaagcgtctcatcggnaggaggttctttgatgcttctgcccagagcgatatcaagctgtggcccttccaggtcaattctgggcctggcgagaagccaatgattgttgtccagccacagggtcgaggagaagcaggttgcagctgaacagatctcctctatggtatcttatccacatgcctgagatcgctgaagcttaccct

SEQ ID NO: 147628 - DNA, 649 bp, Zea mays
  Clone ID: MRT4577_66165C.1
gccggccgggtttggctctctaaaccctactcccctgctccattctcagccgccgccaatcccttcacgtgctccgcaaccgctgagtgataagaatagatggccggcaagggcgatggcccggatatcggtatcgatctcggcacgacgtactcttgcgtcggcgtgtggcagcactaccgcgtcgagatcattgccagcgaccagtgtaaccgcaccacgccctcgtacgtctccttcaccgactcctgagcgcctcatcggagatgcggacaagtaccagtgtcgccatgaaccccatcaacaccgcctttgatgccaagcgtctcatcgacaggaggatcagaggtgcgtctgtccagagtgatatccagctgtcggccttcaatgatatttctgggcctggcgataagccaatgattgttgtccagcactagggtgaagagaagcagtttgcagctgaagagatctcctctatggatcttatcaagatgcgtgagattgctgaagcttaccttggtagcacgatcaataatgctgtggtcacagtccctgcctacttcaatgactcacagaggcaggccacaaaggatgctggaggtgattgctgggcttaatgtgctgcgtatcatcaacgagtcaacagctg

SEQ ID NO: 147629 - DNA, 109 bp, Zea mays
  Clone ID: MRT4577_66166C.1
acactcgccctgtatcggcccattaaacaccgctattgtgttggttactcgcaaagtgaccgtttcactttccatatccctaacacccggtccttttacttttttccct

SEQ ID NO: 147630 - DNA, 506 bp, Zea mays
  Clone ID: MRT4577_66167C.1
ggccgggcatctctaaacctagggccctgctacattctcagccgacgccaagccctgacgtgctccgcaaccgctgagtgagaagaagagatggccggcaagggcgatggcccggctatcggcatcgatctcggcacgacgtactcttgcgtaggcgtgtggcagcacgaccgcgtcgagatcattgccaacgaccagggtaaccgcaccacgccctgggacgtgggcttcaccgactccgagcgcctcatcggagatgcggccaagaaccaggtcgccatgaaccccatcaacaccgtctttgatgccaagcgtcttatcggcaggaggttcagcgatgcatctgtccagagtgatatcaagttgtggccctgcaaggacattgctgggcctggtgagaagccaatgattgttgcccagcacaagggtgaagagaagcagtttgcagctgaagagatctgctctatggctcttatcaagatgcgagagaatgctgaagcttacct

SEQ ID NO: 147631 - DNA, 580 bp, Zea mays
  Clone ID: MRT4577_66169C.1
ctctcgaaaccctagtcccctgctccattctcagccgccgccaatcccttcccgtgctccgcaaccgctgagtgagaagaagagatggccggcaagggcgatggcccggctatcggcatcgatctcggcacgacgtactcttgcgtcggcgtgtggcagcacgaccgcgtcgagatcattgccaacgaccagggtaaccgcaccacgccctcgtacgtcgccttcaccgactccgagcgcctcatcggagatgcggccaagaaccaggtcgccatgaaccccatcaacaccgtctttgatgccaagcgtctcatcggcaggaggttcagtgatgcgtctgtccagagtgatatcaagttgtggcccttcaaggtcatttctgggcctggcgagaagccactgattgctgcccagcaccagggcgaggacaaccaccttgcagctgaacagatctcctctatgctccttatcacgccgcgcgccaccgctgaagcctacctctggagcacgatcaagaatgctgtggtcacagtccctgcctacttcaatgactcacagaggcagggcacaaaggatgctg

SEQ ID NO: 147632 - DNA, 281 bp, Zea mays
  unsure (1)..(281): unsure at all n locations
  Clone ID: MRT4577_6616C.1
tttgcagttgaagctctgtgatttcgctgtgggcacattctgttttttgtcttatggtgtggcagaatcatgtactgtttcgaattctgagaataagcgcactctcccagcatggatgttgaaagcaacctcaggtaatcaagcggcaaagaccgcagatcagaataagcaggcactggaatctgctgacattggggctcttgatcagagcaagctcatcaaaaggaacaacagacggccgctanaaaacttggattcagtagctactggtgaactgggag

SEQ ID NO: 147633 - DNA, 319 bp, Zea mays
  Clone ID: MRT4577_66170C.1
aaaacggatatgtgtaaattctttaacttaaaattcaaaacaatatttcaatatctttaacttaaggcattaaacccttacttaactgcacacgaaaaaaaaacttcccatttggacctactgtaaccagcctctgtaccaaccataaggctgtaggtgctatagtggtcaaccagacttgagatggaggcacctggccttgactgaagcttaatagctgacgaacgaggctgttattttctaacattgacctattcatactatcaatgggctcctgggacccttgtgctttagcccacaaggggtggacttcttcccc

SEQ ID NO: 147634 - DNA, 178 bp, Zea mays
  Clone ID: MRT4577_66171C.1
ccatgattgtctccatgtatctgtactgctccctacaataagtccacttctgcctctgccgcgactgctgccacatgggaactgtgaagaggcaccctggcaagcagcagtgattgggggaggggacaggatctaaccatgtcacttgggccagaatggacctgccctttctgctcca

SEQ ID NO: 147635 - DNA, 586 bp, Zea mays
  Clone ID: MRT4577_66172C.1
ctcgaaaccctagtcccctgctccattactagtacgccgacaatcccttcacgtgctcgcgaaccgctgagtgagaagagagatggccggaagggcgatggcccggctatcggcatcgatctcggcacgacgtactcttgcgtcggcgtgtggcaacacgaccgcgttgagatcattgccaacgaccagggttaccgcaccacgccctcgtacgggggcttcaccgactccgagcgcctcatcggagatgcggccaagaaccaggtcgccatgaaccccatcaacaccgtgtttgatgccaagcgtctcatcggcaggaggctcattgatgcgtctgtgcagagggatatcaagttgtggcccttcaaggtcatttctgggcctggtgagaagccaatgattgttgtccagcacaagggtgaggagaagcagtttgcagctgaagagatctcctctatggttcttatcaagatgcgtgagattgctgaagcttaccttggtagcacgatcaagaatgctgggggcacagtccctgcctacttgaatgactcacagaggcaggtcacaaaggatgcctggggggatt

SEQ ID NO: 147636 - DNA, 222 bp, Zea mays
  Clone ID: MRT4577_66173C.1
acgcttgagtacggccattacattcacgctcttatccttcccctatggttaagtactcacaggagccggtctaccctaccaaaggggccaacgccattggaagggacctgagggtccactttaagaacacaagggagacagcttttgcgcttcgcaagctgcctttgaccaaagctaagcgataccttgaagatgttatttctcacaagcaagcaattccct

SEQ ID NO: 147637 - DNA, 583 bp, Zea mays
  Clone ID: MRT4577_66174C.1
tgtgcggtcgctcgaggccggccgggttccctctcgaaaccctagtcccctgctcttttctcagccgccgccaatcccttcccgtgctccgcaactgctgagtgagaagaagagatggccggcaaaggcgatggcccggctatcggcatcgatctcggcacgacgtactcttgcgtcggcgtgtggcagcacgaccgctgtcgagatcattgccaacgaccagggtaaccgcaccacgccctcgtacgtcgccttcaccgactccgagcgcctcatcggagatgcggccaagaaccaggtcgccatgaaccccatcaacaccgtctttgatgccaagcgtctcatcggcacgagggtcagtgatgcgtctgtccagagagatatcaagttgtgggccttcaaggtcatttctgggcctggtgagaagtccatgattgttgtccagcacaaaggtgaggagaagacagttgcagctggagagatctcctctatgggtcttatccagatgcccgagattgctgaagctttccctggtagcacgatcaagaatggttgggtcacagagcctggcctcttcaatgac

SEQ ID NO: 147638 - DNA, 799 bp, Zea mays
  unsure (1)..(799): unsure at all n locations
  Clone ID: MRT4577_66175C.1
ctctcgaaaccctaatcccctggtcctttctcagncgncgncaatcccttcccgtgctccgcaaccgctgagtgagaagaagagatggncggnaagggcgatggnccggntatcggnatcgatctcggnacgacgtactcttgcgtcggngtgtggnagcacgaccgcgtcgagatcattgccaacgaccagggtaaccgcaccacgccctcgtacgtcgccttcaccgactccgagcgcctcatcggagatgcggccaagaaccaggtcgccatggaccccatcaacaccgtctttgatgccaagcgtctcatcggtaggaggttcattgatgtgtctgtccagagtgatatcaagttgtggnccttcaagggcatttctgggcctggtgagaagccaatgattgttgtccagcacaagggtgaggaaaagcagtttgcagctgaacagatctcctctatggttcttatcaagatgcgtgagattgctgaagcttaccttggaagcacgatcaacaatgctgtggtcccactcccctgcctacttcaaatgactcacagaggcaggccacaaaggatgctggggagattgcctggccttaaagtgctgcgtatcctcaaccgagtccacagctgcaattatcgcctatgtccttgacaagaaggctaccaatgtccgcgaataaaaatgtccccctctttgatcttggaagttgcaacctttgttgctccctcctccccattgagaaagaatcctttgaggataaggncanagctggagaccccccctcttcggggtg

SEQ ID NO: 147639 - DNA, 185 bp, Zea mays
  Clone ID: MRT4577_66176C.1
attctgagcatccacaaacttatcttctgttgcttccgagcaccgacttagcagctttgtcttccaagataacaggacctccttgcgtcccttgtcctatttgcgagcgcaataattgcgtcgcattagttcacaaagtttacatgcttctagcgcctttttactacagctctctcgaccagtta

SEQ ID NO: 147640 - DNA, 323 bp, Zea mays
  Clone ID: MRT4577_66177C.1
atcataatccaagggggtggattatataatctgggcgaaataagctggactgtttgtttgcctcttaagattatttaatccagattatataatctagggggtaaacaaacaggcccttaacacaaatgacccacctagacctcgactgatgaaccaccgtcatgatgggtcaaagcatttccggcccaaatactaattcaatgaaactacatacgcatcggcaatgggccatataagcccttgaacaaaagctagggccctgcatttcacccgcttctgtacatacatgcggcgcggggccaaaaatcacgggggcacaaaca

SEQ ID NO: 147641 - DNA, 277 bp, Zea mays
  unsure (1)..(277): unsure at all n locations
  Clone ID: MRT4577_66178C.1
accacgcgtccgcccacgcgtccggcctagcggaaggtcggcggcggcccgcctcgctgatcgcgatggagcggcggagcagcagcggcgcggggagctgcctggggctgctggcggtccccttggtgtcaacgagcgtcatcctcgtctcctaccgcctcaacggccgcctgnaggcggacctcagggtcataatacccggcaaaggcaacggacccccggacaagggccggcgccgcacaaggaagaccagaaaggtgcccttcccggccaactt

SEQ ID NO: 147642 - DNA, 2725 bp, Zea mays
  Clone ID: MRT4577_66179C.1
tgatgatgtaaaaggagaagggttataccttttaaatcagctgacctgtcatctgacctgtaatgctgcaaatgatgctatgggtgataagatcgatgagcagtgtcctgtgatggaaggaaatttgtccgacaccaataaatttgttgattcaaatcctgttgtttcggaaaaggccatggagccaaatgagtgttacatcacaatggccatctctaggcatccatttctgagacgttggatattatcaaggtacaagaaattatgtgattcctgtaaacctgccgtggtttctgaggtgtcatcttgtttgaaagttttgggctctttgtcagaaccttccgatgataaaagtcacacgggcaatgagtcatcagtgctggagaaacttgataacaatgtcagagaaaatatgcgaccagatgaactaatttcttcatctgagcagggagcacttgcaaaaactgagagtgtcgataattatggaaataagttttcacagaataagaatgtggacatggttcgttctgataatcagaaatctgatgagctcacggacgcaaaattggatgacttcaaaggaggaactgttgtctctgatgcacagcatcaaggttcaagatctgatttgcttatgccaaaatctgtgtatgattctgctggaggatctacatcacttacttctccaggacaacattttggaagggcaaagcatttattttctgaaccatttgatatttatggcacttatgttgcgagggatgtgatttcagtttcaaaggaactttgggttggttcactgggaaatagagcaactgaggcactagtcagatctaagtttgaggagtttggcccattagtaaattttttgttctatccatccagaaaattttctttagttgagtatagaaacatattacatgctgtgcatgcatgtggatatatgcagggttcatctatttggggcggttttcttcaagtaaagtatttagacaggcttataggtagtaagggagttattcgtggtatagctattggtgaaagccgtcatgtttatgttgctaaagtcaagaataaaaaagacaaagatgaggtctttgatgatttaaagatggcagggctgaagtggccatctgggattactgatattcctggagaaaatgctttgcttcttgaattcgagacggcagttgatgcagctactgcaaaattctatattaggcaccaagctcgtccaaatgtttgttccagggatatgaatctacctggtcatcaacttttggtgcaaaatatagaccactcagtccctgacatcgacttaatcaacgccttctctcaattcggtgaggtcatcaggtggcaaatcaatagggctgatagtaactgctttatagtttatagatcacaagatgctgctgcccgtgcgaaatcacacttgcatggagcgcggtttgggttgaagtcaattaccacgcgtccgaggacatacagtgcaggatctgttcatgataaaacagtgtcacctgttgctccgttgttaggccagagtgttcctgacaacagcgtgcgccatgagatcaggaatccaatagtcccaggatatcatgcaggatatgcagcaccaggggatcgacctatttatggtccgccacctccaaatacaagcagagctccacaaggaaattttccttgccctcctgtttccacacaccatagttctgtgatgccaccgccacctattcaaacctcttttgttcgtcctatgtatcctggtccagggagtccctgggagaacactactccaaatccaccgcccttcagccacgtttctcctcgcatgatgcctggaagtaacttccgtgttaatccagcttctcttccttttgtaccctcttgtgttacccctgtttcacagcttcctggaggatcagcacagcattctgagaaaatgccaccatcactacctctgccaactgtagctcccccaccatttacacctctagatatgccaccaacacaccctccgccactacctatttcccagccaccttcagtgccgccacccccaaattctcctcctccgcaaccttttgctgattcgtctgactcacaaaagccaagttctcatcctcaatggcagggtcctcttttaaaaagtggcttgcattactgcagaatctatgcaagcagaatagagttggatgcctgcagatatgaaaatactgtttctgaaccggcagaatggccttcagcgctagatgtgacaaagcgcacagctttccagcatgtgaagacaactttcaacaatacaccgcctaataagagagaggtctgccggctcgtgccttgttcaaatggtgatcagagagggttccgggatttcataagctatctggtacagaaagaatgcgctggcgtgattaggattcctgctgtgaaggcgatgtggacgagaatactgttcatccttcctcccacatctgatgcatgtggcatggtaggaatcccccctcttccagctgacaccatgattgttgtaactttgcccaaggaaacaacagtcgaagcatcataacaattttgtgtgctacatgtatgtatgttagctttgtcggtgtaagctttttgtggagctttgtgctccatagcagtcatgtaaaaactgtgcataattgttggctactatgcggtgttagcattattatacagtaggtcagctcagttc

SEQ ID NO: 147643 - DNA, 288 bp, Zea mays
  Clone ID: MRT4577_6617C.1
aagggaaagtgctgtaggtttttatttttcagtcaaaatcgcacactttttttgcctttccatacaatacagggggagataccggatacctcggggaacataaagaacctacccaaaaaaaaaaaaaaacccaacccccccctgttggctggtcaaagctccacctttttgggctggagaagaccatacccggggccgccgccaaaacttttttttgcgttcccggcaccctttcccctgggaatcccaacaacccgcgggcccttgaactggttgggggccaacttt

SEQ ID NO: 147644 - DNA, 138 bp, Zea mays
  Clone ID: MRT4577_66180C.1
ccctccttttacacctgcgcacaagcgcatacctttggggcttttttaaatcataaggctcttacacaccccacaaatcacctccctttaaacatatacttctcttaatttcacaattctctcgttcacttcctacac

SEQ ID NO: 147645 - DNA, 625 bp, Zea mays
  unsure (1)..(625): unsure at all n locations
  Clone ID: MRT4577_66181C.1
agccatgcaggttgagtggaatgaagatgaagtattcaatttcttggttaactactnacgggaagatgcttgtatcatcctacagggagacctccatgcagtcttttcaagtaggctcaatttctgacgattcttccgcatccagtgccgcaacagtacctattggagctgccctgggtatcgcccttgctagctgtacatttggggcgctagcatgcttctggaggacccaacagaagaacagaaagtactaccatttacgttttttaaagaaaatttgactaaacattttaggcaaagaaagaactggaactgaatatcttgcaccacttgcaaaccctaaactgcatgtctgcatcagaaggagcctccgtgagtgtaaattttctggaccggttgtcttggcgatgggcccaaaagagtcgaaaacagatgaaaaacatacagagtagatttagtagtgccgagtcacgtggtagtgttgcgcgacggcgcgaactttgttgcaacaggtaatacagattgaacgtgtaaactctgtccttaacatgtttctcggatacctttacctggttatcgatgtaatattatcaatttaatgagtgaaaacgctgtgccttacttt

SEQ ID NO: 147646 - DNA, 2298 bp, Zea mays
  Clone ID: MRT4577_66182C.1
ggaccctcgaggccggccgggaaaaacccagcctgctaatcgccccactaggaggagtaggaggactctccgaggtccgagcggggtaggcaggtgtccgaaacggatcaccaaaccccgccggcgcagccgagagatccgacgtcgccgcgatccatggccgcctcgacggcggcggcgcggcgtctcctcctcgccctcgccgtcctcgccgcctgcctcggctcggcgccgcacggggccgtcgcgctccgctcgctcggcgtcgggggcgccaaggcggccgacggggacgcggccgtggacctcgacgcgtccaacttcaccgccttcctccagacttcgccggagtcgttcgcggtcgtcgagttcttcgcccactggtgtcctgcctgcagaaactacaagcctcactatgagagggttgcaaaacttttcaatggcccagatgctgcacatccagggactgttgtgatggcacgagttgattgtgcatcaaaggtgaacgtggatctttgcaacaaattctctgttgaccattatccttacctggtgtggggtccgccaacaaaattcaatttggttcagtggaaaccaaagcaagagaatagtgaattggaactaattgatgatggaagaacagcagatcggttactgaaatggataaataagaagatgggaagctcattcaatttagacgacaaaaagtatgagaatgaaagtatgcacccaaaaaatacttcagatcctgaacagattgttcgagcaatttatgacgttgaggaagctacatctcatgcattgcagataattttggagcacaagatgatcaaaccagacactcgtgactcgcttattagctttttacaaattttggtggctcatcatccatcaaagaggtgtcgaagaggatctgctgagctacttattgactttgatgatcactggcatacaaacctctcattaagtttggaagacagtactacactgttgaaaggtgcaggagagaaagtatgtggaaatggagtgccacgtggatactggattttctgccgaggaagtaaaaaggaaacaagaggatttagctgtggcctatgggttttgctgcattcactaactgtccgaatcggagatggagagagccaaacaacatttacatcaatttgtgatttcatccacaatttcttcatatgtgaggaatgccgcacacacttctatgaaatgtgttcaagttaccgttcacctgtagtgtatcagtccccttcaaatctgcccgtgaccttgccctctggctatggaccgcgcataacaaagttaacgagaggttgatgaaagaagaaaaggagttagacaatgctgatccttcatttcctaagatcatctggcctccaaagcaactctgtccattgtgctaccgttcttctagtaggacggctgatggagccatgcaggttgagtggaatgaagatgaagtattcaatttcttggttaactactacgggaagatgcttgtatcatcctacagggagacctccatgcagtcctttcaagtaggctcaatttctgacgattcttccgcatccagtgccgcaacagtacctattggagctgccctgggtatcgcccttgctagctgtacatttggggcgctagcatgcttctggaggacccaacagaagaacagaaagtactaccatttacgttctttaaagaaaatttgactaaacattttaggttcgtaggattccattactaatccgagccttgtagattcatatcatagagaagtgattagggtctttttgtctcctttgttcatttcacaggcaaagaaagaactggaactgaatatcttgcaccacttgcaaaccctaaactgcatgtctgcatcagaaggagcctccgtgagtgtaaattttctggaccggttatcttgacgatgggcccaaaagagtcgaaaacagatgaaaaacatacagagtagatttagtagtgccgagtcacgtggtagtgttgcgcgacggcgcgaactttgttgcaacaggtaatacagattgaacgtgtaaactctgtccttaacatgtttctcggatacctttacctggttatcgatgtaatattatcaatttaatgagtgaaaacgctgtgccttgctttatgctgtaatacagattgaacgtgtaaactctgtccttaacatgtttctcggatacctttacctggttatcgatgtaatattatcaatttaatgagtgaaaacgctgtgccttactttgtgggaaaaaaaaaaaatgttaa

SEQ ID NO: 147647 - DNA, 384 bp, Zea mays
  Clone ID: MRT4577_66183C.1
gcgaaaaaaaatccaatcaaatttttggttttttttaggaaacccccctgtgggttgggggcccctttttcggggtccttttattttgaatttaaaaaatggccccccccaccatgggttggttccttcccaaaaaaggtttttttaaaaaaaactggttttttgggaaaaatttttttttttttaagaagggggcaaccaaggggtttcccccttcccaggggttaaagaacttgtggcccttttggagggcccccacaaaatttcaacaaattatttggtttaaaggaaacccttttttaaagaaagcaaaagggtttcccaccatttgtttaatcaaaggtggtccaatttttgtgaaaaatttttgttgcaagttttaag

SEQ ID NO: 147648 - DNA, 119 bp, Zea mays
  Clone ID: MRT4577_66184C.1
acgaggagttgtccttttcgcgagcccaccccaagccgaacggcgagagcgatctggtccgggcaaaataacctttacactcagccttactacaattccactccgacaattccgtgcca

SEQ ID NO: 147649 - DNA, 371 bp, Zea mays
  Clone ID: MRT4577_66185C.1
gtggtctttctttgatggttgatttgaatattcgggttgggtagtacttatcaagggctcaggggccataagtcggatggacgttgagctgcgattggccgagtgaactcaaatcgtggattggtggtgcataccaaggtgcccttatatcaaaggtagattatttcccctcgggacttacctaatttgagcgtgcgcattggcagagtcacacaagtagaataactttgacctatcatgatgagaacgacataaattgtctgataaattatgattatccaacaactcttgactattatattacacagtataggtcgaactggtcgtccaggagctagccgaactcgagtcactttttcacacacgcaaat

SEQ ID NO: 147650 - DNA, 359 bp, Zea mays
  Clone ID: MRT4577_66186C.1
cgacgccacgcgtaacgctccaacccgtctacattcaacgccacgctgtccgctgcgatcaacataacattcattcggaccaccggagatctatgtaactaacttatatctgcctcttctattacttgcaattccattgcttacaaccacgatcatagcgtcagacactcgaacatctactatgcttatcatgccttgcacgttcatcccttctacattgaatgaaggatcaccaacctgacttctggatccgtatgaactacaagatccaatagagtggtaccacctactgttatcaaccttgtttgtacagtcactaggcctatgacaaatgcactctccttagctgacaatgatat

SEQ ID NO: 147651 - DNA, 217 bp, Zea mays
  Clone ID: MRT4577_66187C.1
acacatcacatgcagctcgagatttatttatagagaaagattccgttttttaagcacgatcaccacaaccagtcggctccccctacctcccaccccaaccacacattcaacatcttctgccacaccaaccaaaactactgcctgaccactcttaacaacaccaccatactctcccccatcaaccccaaatactaccaccaacactaatacaaataca

SEQ ID NO: 147652 - DNA, 654 bp, Zea mays
  unsure (1)..(654): unsure at all n locations
  Clone ID: MRT4577_66188C.1
cattgggtacctcgaggccggccggngaaaaaaataaaaaaaaacttactttttctcacccacgacgtcgacgatgtcgcgacctgcccgtcctcgtccgaggcggctcgtctcaaatccatgctccagcgtagtctcggatccagacgcacccggtgacaatctcgggctacgcccgcacgcgctgcgccacggtcgaggcagtggtcggcctggatgtcgcgcgtgccacaactgtgtaggacctggggcgcggcgctgtcgccgctaacggccggctccggcgcctcgacggcttcgcgaaagcaaagcgtgtacactactagcttggtcctcccatcaaccatgttaattcccaggtgcctcttgggaggtggggttgggagcttcttatggtttgcattggatggatgaagcaacaccaataactcatcttccctgttggtggcggcatgtattctgctactttaaaccatgtcacattgatgcatccctaccacccattcttatctgtcataaatagaaattctcctccatacatattaaatttgtagtctagatttttactctgtagacgactcttaaccttatgtggactattaattatgttggcgcgatggcgattgtttaataacccgtattggtgtgcatgag

SEQ ID NO: 147653 - DNA, 1873 bp, Zea mays
  Clone ID: MRT4577_66189C.1
ccggccgggacagcaagtagtgtcgaacgagagccacatcccgctctccacccgggcgcgcgtgtcctccgtttcgccatgtccaactccaagcagcacgacgccgccgacgacggcggcatcccagcccccgaggcgccggcaaagcgcccaccgcttaacaagtacgccctcgcctgcgccgtcctcgcttccatgaactccatcctccttggctacggtacgcgcacgcatgatgcatacaattccatgcacccgttggccgttgccatatgcagcacgcgtacgtgcgcctcatgctatctgtatgcagatgtgtcggtgatgagcggagcgcagctattcatgaagcaggacctcaagatcacggacacgcagatcgagatcctcgccggcatcatcaatatctactcgctcgtcggctcgctcgcggcgggccggacgtccgactggctcggccggcggtacaccatggtgctcgcggcggccatcttcttcgcgggcgcgctcatcatgggcctcgccccgagctacacgatcctcatgcttggccgcttcgtggcgggcgtcggcgtcggatacgcgctcatgatcgcacccgtgtacacggccgaggtctcgcccacgtcggcgcgcggcctgctcacgtccttcccggaggtgttcatcaacacgggggtgctcctcgggtatgtctccaactacgccttccacggcctccccgtgcacctcagctggcgcgtcatgttcctcgtcggcgccgtcccgcctatcttcctcgcactgggggtcctcgccatgccggagtcgccgcggtggctcgtcatgcaggggcgcatcggcgacgcgcgccgcgtgctggccaagacctccaactcccccgccgaggccgaggagcggctcgccgacatcaagaatgccatcggcatcccagacggcgtcggcgacaacgacgacgacgtggtggtggtcgcccgcaggaacaagggcagccatggcgaaggggtgtggagggacctcctcatccgcccgacgccgcccgtccgccgcatactcatcgcctgcctcggcctccagttcttccagcaggcctccggcatcgactccgtggtgctgtacagcccgcgggtgttcgagaaggctgggcttaggtcgaacaacaactctttgggcgccaccatggcggtgggcgcgaccaagacgctgttcatcctggtggccacgttcttcctcgaccgcgtcgggcggagaccgctgctgctcacaagcgcgggcgggatggtggtgtcgctggtgacgctggcctcggcgttgcgcgccatcgaccggctcccagagggacaggcgacgtcgctggcgggcgtgagcatcgcggcggttctcacgttcgtggcgtccttctccatcggcatgggcccgatcgcgtgggtgtacagctcggagatattcccactgcggctccgcgcgcagggctgcgcactcggcacggcgatgaaccgggtcatgagcggcaccatcaccatgtccttcatctcgctctacaaggccatcaccttcgccgggagcttctacttgtatgcaggcattgctgctgccgggtggctgttcatgttcttcttcctgccggagacgaggggcagcaacctagaggacaccgagaagctcttcggcggtggcgaccacgacgaggacaaggaagatggacacgatgcgcagaagtccactgagttgagtagtagccaacagtgacctgatctgtatctgatagtatgtacgctagtaaaaaacacagactgtttttttttacttagattactgcacctttaaagcacgagtttctttgtgtgttaaaaaaaaaaaaaaaaaagcggcc

SEQ ID NO: 147654 - DNA, 290 bp, Zea mays
  unsure (1)..(290): unsure at all n locations
  Clone ID: MRT4577_6618C.1
gtctgnatgggcgagctcccaggtcgacgtggcggggatggctgcgacggccggctgcggcggtggtggaggggctaaagcggcagtgaccgagcagatagcacaagcagtgcggtccacctccaacctactacagctgatggagcacacctcccccgttcaggttcatttggcaaaactaccgaagaacctgctggaaaaagcatcctttgcaaagaacacagagcgtgtgctgcaccagctacctcatgtaatataatgcttggatgcttttatcgacaggagttttg

SEQ ID NO: 147655 - DNA, 1758 bp, Zea mays
  Clone ID: MRT4577_66190C.1
cccacgcgtccgcttgctgcatgcgaaggagctctctagaaggctgaaggaagaaggagcaagttcgccatcattgggatcctcgacctccggccgcttccccgctgccgtgcccgccctgccctccaccttctcccggcgcaataaacaagtcgaggcgaggcgaggcggcagcggcggcggcggcattgccgagatttccgtgattcttgcgcttgttagttgtgctgtgtatagttgggccggccgggggtggttccgtacagttccttctctgttggagtagtcggcggcgatgggtatcctcgcgctcatcaccggcaaggcgggcgccagcgggttcgggtcggcgtccacggcggagcatgtcaccgacggcgccgacgccagccgcctcaccgtcgctatcacaggaggagctagtggcattggtctggagacatcaagagtcttcgccctgagaggagcccatgtggtcatcgctgctagaaacacagaggctgcatcagaagcaagaaagaccatcatggagaagaacccaacggcacgtattgatgttctgaagctagacctcagctccctcaagtctgtcagggcttttgtggaccagttcaactcgatgaaactccctctaaacatcctgataaataatgcaggcgtcatgttctgcccttttcaactgtctaaaaacggggtcgagatgcagttcgcgacaaatcatctcggacactttctgcttaccaatctcctccttgataccatgaaggccactgccaagtctacgggcattgagggccgcattgtgaacttgtcatcagtcgcccaccaccatacgtatccgaagggaattgacttcgataacctcaacgatgagaaaatatacaacgacaaaatggcttatggacagtctaagctggcgaacttgctgcatgcgaaggagctctctagaaggctgaaggaagaaggagcaaacatcacagttaacagtgtccatcctggattgatcatgaccaatttgatgaggcactcctttgttctcatgaaggtgcttcaggttgccacttacatactgtggaagaatgtaccccagggagctgcgactacttgctacgtaggactgagccctcaactcaagggagtgacaggaaagtactttgctgactgcaacgtggagaagacgagcaaactggcgaggagcgaggagttggcgaagcagctctgggacttcagcgaggagctgatcaagtctgcgaagtgagagccgaaagagctggatcagagaaaatgttgtggtcctgcttggcatctagtggtacaagtgatgactgattagtatatagcacggaggaggaacctgggcgatggctggacctcatggtgttcaggaataaaatctgcttgctttcgtacattaattagtccggtgtggcaaacatcaatttgtagtgctgtcaatatctgttcaatatacgtgcagctcagttctgacttgaaaaatgcagagtcgtgtttgcctgaaacatgtcgtttttcacaaccagtgtttgattctttttcgttatttggttcagcatccgaattgtgagtacagctcttcttgttacattgtgggcatctctactattttgcaacaaaaaaaaaaaaaaaaaactttatatataagaaggcatttggtcatatttgagcaacctcagtcgtagaatgataaatgattttcatcagcgaaaagtcgatcaatatattttgaccattaatttt

SEQ ID NO: 147656 - DNA, 1664 bp, Zea mays
  unsure (1)..(1664): unsure at all n locations
  Clone ID: MRT4577_66191C.1
gcccgctgccgtgcccgccctgccgcgcaataaacaagtcgagtcgagtgcggcggcggcggcggcattgccgagatttccgtgattctatcgcttgttggttgtgctgtgtatagtatatactacgagtctacgacctggttgtctcaactcatcctttcgtttctcttattggctgctgcgcttgggagttcgcttcagttgggccggccgggggtggttccgtacttccgttcagttccttctctgttggagtagtcggcggcgatgggtatcctcgcgctcatcaccggcaaggcgggcgccagcgggttcgggtcggcgtccacggcggagcatgtcaccgacggcgccgacgccagccgcctcaccgtcgctatcacaggaggagctagtggcattggtctggagacatcaagagtcttcgccctgagaggagcccatgtggtcatcgctgctagaaacacagaggctgcatcagaagcaagaaagaccatcatggagaagaacccaacggcacgtattgatgttctgaagctagacctcagctccctcaagtctgtcagggcttttgtggaccagttcaactcgatgaaactccctctaaacatcctgataaataatgcaggcgtcatgttctgcccttttcaactgtctaaaaacggggtcgagatgcagttcgcgacaaatcatctcggacactttctgcttaccaatctcctccttgataccatgaaggccactgccaagtctacgggcattgagggccgcagtgaacttgtcatcagtcgcccaccaccatacgtatccgaagggaattgacttcgataacctcacctgtcgctatcacaggaggagctagtggcattggtctggagacatcaagagtcttcgccctgagaggagcccatgtggtcatcgctgctagaaacacagaggctgcatcagaagcgtgaaagaccatcatggagaagaacccaacggcacgtattgatgttctgaagctagacgtcaggtccctcaagtctgtctaggcttgtgtggacccgctcaactcgatgaaactccctctaaacatcctgataaataatgcaggcgtcatggtctgcccttttctactgtctncgatgagaaaatatncancgacaaaatggcttatggacagtctaagctggcgaacttgctgcatgcgaaggagctctctagaaggctgaaggaagaaggagcaaacatcacagttaacagtgtccatcctggattgatcatgaccaatttgatgaggcactcctttgttctcatgaaggtgcttcaggttgccacttacatactgtggaagaatgtaccccagggagctgcaactacttgctacgtaggactgagccctcaactcaagggagtgacaggaaagtactttgctgactgcaacgtggaggagacgagcaaactggcgaggagcgaggagttggcgaagcagctctgggccttcagcgaggagctgatcaagtctgcgaaatgagagccgaaaatgttgtggtcctgcttggcatctagtggtacaagtgatgactgattagtatatagcacggaggaacctgggcgatggctggacctcatggtgttcaggaataaaatctgcttgctttcgcaaaaaaaaaaaaaaaaaa

SEQ ID NO: 147657 - DNA, 477 bp, Zea mays
  Clone ID: MRT4577_66192C.1
cattaaaaccaaaaccttattatgaccatgcatatgtgatggggcataccacacataaaaatgggggtggggtgacggggttatgacatatatccaaagagagaagaggggaggaggagattgcccaaataccaggaaccacaaataggggggaaggggagcggggaccccacaggggttggggcggaacctgggcagggggaactgggaaaggccacccagggccgggggggtcagcgccatcatcaaggacatggggttgagaccctgggctgccagcagctgctggggttggtgcataaaagctggctcgtacaggctgctgctggcggaaggggaaccctaaaactgaataatcatttaaaattgttgcccgacggactgaacatccatcatccaaatttgctgatgggagcactggtgccggagcggctggaacatggggctcggctgcccacacccggcacaggagggggc

SEQ ID NO: 147658 - DNA, 1964 bp, Zea mays
  Clone ID: MRT4577_66193C.1
ggcaagtaacaaaagataccatgctagattgattaatgataattattggagcaagaaaaaagatacttatctactaaggtgaacataaaaacatttttcttccatgtcatctatatttaggtgaaaatacaagtcaattaaccatgcttagtagaacctatcagcaagcagccgcgcagagattatgattatccataatctattgaggtcaatgatgctggatccttccagttagatagctatcatcttcagtctttttcatctcactatagtattttgagggtccagttgctcgcttaactcaattccaaggtgtcaaaaatctattattttccaaattttactgaaacttgtaattttttgcatatgccaggaggagctagtggcattggtctggagacatcaagagtcttccgctgagaggagcccatgtggtcatcgctgctagaaacacagaagctgcatcagaagcaagaaagaccatcatggagaagaacccaacggcacgtattgatgttctgaagctagacctcagctccctcaagtctgtcagggcttttgtggaccagttcaactcgatcaaactccctctgaacatcctgatgtaaccctattcacctcttgttcatgcttgttttttattttcatatatatgaaagtttcctttgatttcgttgaatctatctccagcatatacgtattattacttttagcgcttgttttttttcattcatatatatgaaagtttcctttgcttgttttttctttcatatatatgaaagtttccgcctattttagcgctttcctctttgcactggatcaaggcttgagggaatccttttctgttccacagaaataatgcaggcgtcatgttttgcccttttcagctgtctaaagacggggtcgagatgcagtttgcgacaaatcatctaggtattctctcactgacagcatgacttgcttgaaattgtttttttatcaggacactttctgcttaccaatctcctccttgataccatgaaggccactgccaagtctacgggtattgagggccgcattgtgaatttgtcatcagtcgcccaccaccatacgtatccgaagggaattgacttcgataacctcaatgatgagaaaatgtatgtgcgtttatggttctgctttgtaggaattgtctgttgattgaactgcaagtaatgatcttttattaacttgcagatacaacgacaaaatggcttatggacagtctaagctggcgaacttgctgcatgcgaaggagctctctagaaggctgaaggaagaaggagcaaacatcacagttaacagtgtccatcctggattgatcatgaccaatttgatgaggcactcctttgttctcatgaaggtgcttcaggttgccacttacatactgtggaagaatgtaccccagggagctgcaactacttgctacgtaggactgagccctcaactcaagggagtgacaggaaagtactttgctgactgcaacgtggagaagacgagcaaactggcgaggagcgaggagttggcgaagcagctctgggacttcagcgaggagctgatcaagtctgcgaaatgagagccgaaaatgttgtggtcctgcttggcatctagtggtacaagtgatgactgattagtatatagcacggaggaacctgggcgatggctggacctcatggtgttcaggaataaaatctgcttgctttcgtacattaattagtccggtgtggcaaacatcaatttgtagtgctgtcaatatctgttaatatacgtgcagctcagttctgacttgaaaaatgcagagtcgtgtttgcctgaaacatgtcgtttcaaccagtgtttgattttttttcgttatttggttcagcatccgaattgtgagtactgctcttgttgttacattgtgagcatctctactatcttgccactgaaactacaagccaagatcc

SEQ ID NO: 147659 - DNA, 392 bp, Zea mays
  unsure (1)..(392): unsure at all n locations
  Clone ID: MRT4577_66194C.1
gggaaggtgccggtaaagttcatccgaagcgcagatgaccattctgacgacaggtatgacccgggcgcgctgccgaggatcagcaacgagctgaggagctactgcttgggtgtcacacctgcactaagcaataatgtggttggcagagggtagcacagtttatgatgggatctgctacatgaacttcagcttcatatggatgagggggcaccaggacgatcttgtggcatctgcgagtactgtgtgatggagaggggcatgacatttgccctgtaccttgtgaagagctcangacagatggatactcctactggtgaggactactttgacctactcccctgtgtagtactcagacatactacagcgcccacgacacttgggagtggatgata

SEQ ID NO: 147660 - DNA, 302 bp, Zea mays
  Clone ID: MRT4577_66195C.1
ggaagctaaagggggtttccgaaccacttgtttagggcccttcaaaaacataataggggcgggtcaccattagacggccccaaaaaaggaactttagccttgaaaaaaaattcttagccaaaccaaaaaggggaattctccacaaaggtaaggggggtttccttagggggggatttggggcccaaaatcacaaaggggccccgggggaaaaaaccccttggttttcaattggaaaagcaaggggtaactcttttatgggcccctcgggaacttgggccaccaaaccaaccctaaatgtttgg

SEQ ID NO: 147661 - DNA, 259 bp, Zea mays
  Clone ID: MRT4577_66196C.1
gaagaaggtctggaacggaggagattccccttattcagtcgggatacacaaaatatacttagagacaagtaacatcttaacgttttgaggaccttcggcagaggaaggcccccaacaataggtatcttgcaatttagacaaaccatgcaactcaaatgtactccataaggggaagtggtgcaagccaattgactttgttgctttggttttattctttcattacggttcttttttataactcgtgaccgtccagttggaa

SEQ ID NO: 147662 - DNA, 189 bp, Zea mays
  Clone ID: MRT4577_66197C.1
ctaatatacaagataatggtaaattagcctgagttcgtgatctgctttagttcagtttaccattagcttgtatattatgagcctcagtttgtatcacttagggcctgttcgtttctgctggaacagaccaggattaattccaaatctctaaaacttatagtaattattgaaagaatccgagtcatattt

SEQ ID NO: 147663 - DNA, 800 bp, Zea mays
  unsure (1)..(800): unsure at all n locations
  Clone ID: MRT4577_66198C.1
ccggccgggactttctctatccatcactactcatcactcacccatctttaccacatctacttccactaccgcaaccatggttcaacaaatccccaaggccaaccacatcctcgacctcctcagcctcaagggcaaggtcgtcgtcgtcaccggcgcttccggcccccgaggcatgggtatcgaggccgcccgcggtgccgctgagatgggcgccgacgtcgccatcacctacgcttcccgcaaggagggcgccgacaagaacgtcgaggagctcgtcaaggagtacggcgtcaaggccaaggcttacaagctcaacgctgccgactacaacgatgttgagcgatttgttggcgaggttgtcaaggactttggcaagattgacggatttgtcgccaacgccggtgctactgccaacgctggtgtcattgacggctccgctgccgactgggaccacgttatccagatcgacctcaacggcaccgcctactgcgccaagaccgtcggcgctctcttccgcaagcaaggccacggctccttcgttattacctcctccatgtccggccacatcgccaactaccctcaagagcagacctcttacaacgtcgccaaggcgggctgcatccacatggcacgctctctcgccaacgagtggcgcgactttgcccgcgtcaactccatctctcccggctacatcgacacccggcctgtctgactttatcgacgccgagacccagnagctgtggaggagcatgatccccatgggncgaaacggagatgccaaggagctcaaggctgcttat

SEQ ID NO: 147664 - DNA, 234 bp, Zea mays
  Clone ID: MRT4577_66199C.1
ggtatgaaaaaaggtgacccccaccttgggggctaccaaggaaacatgtttttgggctggccctgagcaacctggggggttattacaccaacagggacatttacagggggtaaggagctgagttgtggatcatcccattttacaagggcaagagggattttccactgtccgacggaaggcccaattcttatgggtaatgggactatggaacatgagggaccagaatcaacaccc

SEQ ID NO: 147665 - DNA, 1306 bp, Zea mays
  Clone ID: MRT4577_6619C.1
ttgggtacctcgaggccggccgggattcccctatccccacgccacagcctcccttccctccccgtctcctccaaattcaatcgtctccaagcgccaatccgccccatctccaaatcccaggcaggcaggcagccaaccagccatggagtgcgagccggaggagctgcaccaccgcccgctcttcgcgcgcatcgcggccgcgtgggcgctgcccctgtccgcgctcttcctcctgcacgtcgccatctcgcacgcgctcttcacccacatcgactccgacgacacggccctggacgcatcctccccgggcaccgacacgcagcgccgcctgctgtcccgcctcgcctccgactggctcgccctgctcctcttcaagtccgcctacctcctcgcgctcctcctgctctcgctcctctccgtcgccgcctccgtgttctccgtcgcctccgtctactccgccaagcgcgacgcgctcaccttcccgcgcgtgctctccgtcgtgccccgcgtctggcggaggctcgccgccacgttcctcgccgccttcgcgctcctcttcgcctaccacgccgtcgccgtgctcgtcttcgtcggcctcctcgtcgccgcggacaacggctccggcctcgcgggcctgctcgccttcctcgtcgccgtcgcctacctgctcggcctcgtctacctcggcgtcgtctggcacctcgccagcgtcgtctccgtgctcgaggaccacaagggcttcgccgccatgcgcaagagcaaggacctcatcagggggaagctcgtcaccgcgggggccatattcttcacgctcaacgtcgtcttcgccgccgtcgagctcggcttccgcgcctgggtcgtcaggggatccggcgccgcgtcgtccaggctcttgctcggcctcatcatgctcgccgcgctctgctgcgtcgtcatgctcgcgctcgtcacgcagaccgtcgtctacctcgtgtgcaagagctaccaccacgagagcctcgacaaggccaacatctccgaccacctcgaggtctacctcggcgactacgtcccgctaaaggcgtccgacgtgcagatggagcagttccagccaggtaatctgtaattgtgtacgtacagcaggcagcaggtgatgaacatacttgcgttaagtaggaagaattgggaatttttgtcttgggtgtacaagaataatggggatctgtacttcccttagtttcttcctcaaggacatggttccttcccttgtttacatgatatataaacaggagatgaatggaattgggcatgccgaatttacaaactt

SEQ ID NO: 147666 - DNA, 420 bp, Zea mays
  Clone ID: MRT4577_661C.1
ataggatcaaatcatatcatcggggaccaattaatatatggttacagcagatgcaatcggatcaaccaacatgcatgtagacacacgtacatgagcacaaagactgacgccaagcatgcagagagagatagcaaactgaagaactctgtttctctctgtttttaacacacacacacaccacacaatacctatgtatggcagccagctcggcctcgcttattattgttcaaccaccaccacaagctagatagataataatcatatccatgggccgcgatcgatgtgaacacaaattgttggaggggtcgtacttgcagcctctaccgaagccggaggggtgggcggtctcgacggactccgccgaggccttgacaaactcgggcgcggccttcttctccgggggcacgccgaggacgacgg

SEQ ID NO: 147667 - DNA, 515 bp, Zea mays
  Clone ID: MRT4577_66200C.1
caaggccggcaaaacttatagcagggcaaaaacatgcttttatgggacactaattcaggccggaaaaacttatagcagggcaaaaacatgcttggggggtggggggaaccaaaataaaaaaaaactttcccaaccccttatttaacccctacaaatttaagggggcccttttttgaaaaccccaccccggggaggttccgatgttgggggggggccccattagtttggggcttcactatagcattaggggagacccaccctaaggaatattggcaaaactattaaagggtggttagggtacccctaaaaaacaaatttaaaaggttctaccacagtgggtgtggttttcgcaaaactccggattaaaagaaatggggaccaccctttctcctgcttgaagggaggcatgatcggggcaaccaaaatgccaacccaagggtccggcccgccaggcaggccccaaggctggcagccctgtccataaacagccaccgcgtcttttttgccgacccaaa

SEQ ID NO: 147668 - DNA, 420 bp, Zea mays
  Clone ID: MRT4577_66201C.1
cctcttgctcagccgaagaacctttctctagctccttccactcatcctgctcatttgcgaactaaactacatcttccttctcttctttatcttggacctgtgaactttttactgatttttcaaagatcttgggatgtgaaggcttattctgtgcacggattgacatctgcctttgtaccggcatacggtgtgacatctccagaatccacctgctttgccgcaccagcataaccaccaccagcttcctcagtgatctgaacctctgccatattgacatcagggccggaccgcccctaataaccattggccaaccctttggcctgttctcaagcttccttagtagctacaggttccttgttctcgataaccccttccttggggacccccttactatccggagcaccatcgtccacagcccac

SEQ ID NO: 147669 - DNA, 359 bp, Zea mays
  unsure (1)..(359): unsure at all n locations
  Clone ID: MRT4577_66202C.1
ctagtaatttntagagtcaacttcgtgctgataggttctaacctctataatctagacgatttctatgtataacctgtctaggcactttctgagtagatcaaagctcacagtttgtctactggtagggtagaggagggagagggagtgtaggttttatacattcgagtccgagatggacagcggggtagcaatgggatcaggaagtggagcgcctacatcttggcttgtttctccttgcgtattagggcattggggcggagttttggtggtcggcgacataggaacgttagtctctatgagcgccatagctagggtaggatgatttctgtcactaggggctagagagagtctgagtctcg

SEQ ID NO: 147670 - DNA, 1358 bp, Zea mays
  Clone ID: MRT4577_66203C.1
ccggccgggaatgcgcctcgccgcgccgcgccgcaccgccctccccccacgtccggcattgcgtctcagcgatgtggccgccttcctcctcctcctcctcttcgtcgtctccagccgcggttccggagcccggcggccggatgtccgcgctcacgatgcgcgcggtggcgcggatgtcgagggcgcggtggttcgtcttcctgcgccgggtgtaccagtaccagaacggcccgaggtctgacctgggctccaacccgttcaactcgcccggctggctcgcgctcgagctcggcgtgatcgtcgcgcaggtggtcctgaccaccgccgtcgtcgcaacatccgccgcggagcgacccgcgtggccgctccggctgtgggtcgcggcctacaacgtcggcaacgtgctcagcctacccctcctatactggcggcaccgccattcctcctcctcctcctccgccggcggcggccggggcgacctcgagatgcacggcgccaatgacgctccggggaacaggtcgtatctgatgaacaaggcgcgggcgttcctggagctcttcttcgcgatgtggttcgtgatgggcaacgtgtgggtgttcgacgcgcggctggggtcgttccagcgcgcgccgaggctgtacgcgctctgcgtcagcctgctggcatggaacgccgtcgtctactcgctcccgttcctcctcttcctcctgctctgctgcttcgtgcccgcggtcggctacgcgctcggctacaacatgaacacggcctccgtcggccgcggcgcctccgacgagcagctcgccgcgctgccgcggtggcgcttcaaggagcccgacgtggcaagggaccgggagcgcgatgaccaggagtgctgcatctgccttgcgcagtacggggagaaggaggaggttcggcagctgccgtgcacgcacgtgttccacctcaagtgcgtggacaggtggctcaggatcatctcctcttgccctctctgcaagcaagagctcaagtgactgatgcctactccgctcctacagagagatgtgggtgtattctccctcccttactctgactgcgcctgccgatcagccacacctactacatatataccacgacgaccgccggacgatgcgtgcgtcgcacctctcgcgaggatctctcggcgggcccgtgctgacctctagtagacgctgacaaatgatgtgcagcaggcggcaggtgaattcggtaccttttttttttgtctagactagatcaaatgggaaatgtgtaaacaaaaaggtctcttttttttatgtatgtaacaatgtgatgtgcgcccttgcttcattcaagactgaatgcatacttttctttgtgcc

SEQ ID NO: 147671 - DNA, 155 bp, Zea mays
  Clone ID: MRT4577_66204C.1
ggctggcggccgacggtccgggagctccgggcggcatggggagcgacgagatgctacggcgtagctcgtggcgctgtcggctccgtggcgctcacggggctggccacgcgtcgatgcgcacgcggcggtcacgtacggcttcggctgatagcatg

SEQ ID NO: 147672 - DNA, 313 bp, Zea mays
  Clone ID: MRT4577_66205C.1
aaaaaacaaaccccctcgaggggggaagactgaaacattttttttatgtcaacacatgatcagtttttttggttcggagtctcaaaaacaagggttctggtgtgacaaaacttttgggctataaacaattaggcgctttattacccccccactcaaatttggttacaattttacactgaaaccggaacttgaaatgcgacaaacaaaatcagtcacaaaaatgttttcaggccctttttactggacaagggtttttggatttattctggaccggcggattttaaaatttttgcgatttggaaaaagggaaaaa

SEQ ID NO: 147673 - DNA, 1292 bp, Zea mays
  Clone ID: MRT4577_66206C.1
gcacgaggatagatgccgttgatcctgcattgagaagggcaggacgttttgactcagaggtagaggttgccgttcctacagttgaagaaaggctgctgattcttaagctttataccaaaaacctacatctggatgaaaaagtcgatcttcagactgttgctgcgttctgcaatggctatgttggagctgatttagaagcattgtgtcgagaagctgccaagcttgcatatcatagaatgttaaacttatgtgagggtgacaaagtacttaaactacttatggaagactgggaatgtgctagatctatggtgggaccaagcataacaagaggggtaaccaaagaaatttcaattgtttcgtgggatgatataggaggcttgaaagatctaaagaaagagcttcagaaagttgttgaatggcccatcaagcatgctgctgcattttctagacttggaatatcaccagtccggggggtgctgttgcatggcccaccagggtgctccaagactactcttgccaaggctgcagcgcatgctgcccaagcttctttcttttctttgagtggtgcagatttatattccaagtatgttggagaaggggaagctctgttgcgtagaacatttcagaaagctcgtcttgcttctcccagcattatattttttgatgaggctgatgccattgcccccaagagaactggccctggtgggaattctagtggcaatgccacagtcggagaaagacttttgtcgactttattgaccgaaatggatggtttagaactggctacgggaattatcgtattgggtgctacgaatcgcccaaatgcaattgatgctgctcttttgcgtccagggcgtttcgataaggtgctgtatgtcccgccaccagatgtggaagggcgacacgagatactacgcatccatacacggaaaatgaagttgggagaggatgtagatctttggaaggttgcagagtgtaccgagctattcaccggtgctgatcttgaaggcctttgcagggaagctggaatggcagcattgagggaagatatctcagcaatttgatacatgacgctcacttccaagccgcacgaagttcattaagcccctctcttacaaaagcagtagttgatgagtactcaaaggtagatataaatgatccatcgagtaggaaacattgatatgttccttttctatttctttgttgcacactaggcgcaatacacatttgcaaccttgccaccaagacacacagatggagatagagagatctttttaaggatattccttttt

SEQ ID NO: 147674 - DNA, 2005 bp, Zea mays
  Clone ID: MRT4577_66207C.1
attcggctcgtccagaaagagcttcagaaagttgttgaatggcccatcaagcatgctgctgcattttctagacttggaataccaccagtccggggggtgctgttgcatggcccaccagggtgctccaagactactcttgccaaggctgcagcgcatgctgcccaagcttctttcttttctttgaggttcatcaggaaacaacattttattttacgaaaataacagttcactttccgttgtgtgaagaacatagaacttttagcccacagtatttaaaacagattaacataatttacttatttctgccagttgagttaatatcctgtacccagaagtcagcgaatgcttgaaaataatcaactaaaacatgttcagataaagatactctcatcaacactcactagcttttcacataaattcttataacagtggtgcagatttatattccaagtatgttggagaaggggaagctctgttgcgtagaacatttcagaaagctcgtcttgcttctcccagcattatattttttgatgaggctgatgccattgcccccaagaggtatgcactgatatgtgatgcataatataataaaaatgattctgatataactgtcatagctagcaagaatgggtaggtattgcttatcccttttactgtttaaaatggaaaaatgtacttgttacacataatggaaagactgttgtgcaatcaaactttccatacaatcgttgtgcaatcaaactatcaaaagttataaaaattctcaaatcttttatagatatacttcattactgactctactgatatatcaaaattcaaattttaattcttcctatgttaagagatattaaaaagaggaattttatccaataagaatacttaaaaatgatgatttttctttttatatctattaacatagaatgaattagagcttgaaatttcatatattggtagagtaaataatatagggaaattataatttcatgattgatttacgtggtttttggtagtttgataccaagggaaggatgcctctacaacaaaatttcactagataatgtaaacgcaaaagcagttttcaaagaacttgctaacaaggacaactgggatgttctttttatggcactttaatgagatcatatagaattccgtttttggcctctaggcaccattatctttagcttcagagtaccatatgcgtataaaactaaaaatagtttatgttggcacctgtgtatgctcttgcagaactggccctgaagagaattgtagtggcaatgccacagtcggagaatgacttttgtcgactttattgaccgaaatggatggtttagaactggctatggtgggaattctagtggcaatgccacagtcggagaaagacttttgtcgactttattgaccgaaatggatggtttagaactggctacgggaattatcgtattgggtgctacgaatcgcccaaatgcaattgatgctgctcttttgcgtccagggcgtttcgataaggtgctgcatgtcccgccaccagatgtggtagggagacacgagatactacgcatctcccattgatctgcaggtgctgtatgtcccgccaccagatgtggaagggcgacacgagatactacgcatccatacacggaaaatgaagttgggagaggatgtagatctttggaaggttgcagagtgtaccgagctattcaccggtgctgatcttgaaggcctttgcagggaagctggaatggcagcattgagggaagatatctcagcaagtttgatacatgacgctcacttccaagccgcacgaagttcattaagcccctctcttacaaaagcagtagttgatgagtactcaaaggtagatataaatgatccatcgagtaggaaacattgatatgttctttttctatttctttgttgcacactaggcgcaatacacatttgcaaccttgccaccaagacacacagatggagatagagagatctttttaagaatattcttttt

SEQ ID NO: 147675 - DNA, 246 bp, Zea mays
  Clone ID: MRT4577_66208C.1
gctccaggtcgcctcctacccacaggttcatctggtggcggtgcccgaacacgtacgccggcaggggcaccacgtccgggttcccgaacgccaggcaccacacgccgcctgctccccggcgctctccggggaccttgcacagcagcctgtcccccgccaccgacatctgcacgccattgcacagcagggtcacgggcgggagcctagccgacggcggcaggcgccccttgtgcacgcagaagcaag

SEQ ID NO: 147676 - DNA, 839 bp, Zea mays
  Clone ID: MRT4577_66209C.1
ctcgaagccggccgggaacagtctcaactgaactgtacttccacgcaccccccatcttcatctccccaccaagctcccgcagcccgcacactacccctccgcaaacatgtcctggcaagcatacgtcgaccagaggtaaccagctccctgtagcttgcattgcgcagtgcatctctaatcgcgtctcgcagcctcatcggcactggcaacattgacgacgccgtcatctgcgatgccaccggccagaccatctgggcctcgtcccccaacttcaagctcccccccgccgagatggccgccatcgccgcctcgttcaccgacaagagcgagaccaaggccgtgatcgccaacggcatcaagatcaagggcgagaagtacatgaccattgaggcgtcggatgactcggtcaaggcaaagaaggtgcgctccccgcccgtccgcagcgtatgacgcatctgtctgtttgccgcagctgacccgtgcaaccacagggcaaggaaggcatcgtcgcattcaagacagcccaggcgctcctgatcgcacaccacaacgccgaggtgcagacgaccaacgccttcaacagcgtcgccgagctgggcgagtacctcaagaaggccggctactagagcgcagccgcctcgcttccttcagagccttgttcatactttagggatatttgcatacagcctggcagacggacgagaaaagctcagcgcgccgtggtagctgcttgttggggacgcatagagagggggccgagccccgggcggatggaaggcacgttggtgggggtcgggacgcacctacgaagcaacaatggagatatatcactacacact

SEQ ID NO: 147677 - DNA, 677 bp, Zea mays
  Clone ID: MRT4577_6620C.1
tccgtgctcgaggaccacagggcttcgccgccatgcgcaagagcaaggacctcatcagggggaagctcgtcaccgcgggtgctatcttcttcacgctcaacgtcgtcttcgccgccgtcgagctcggcttccgcgcctgggtcgtcaggggatccggcgccgcgtcgtcaaggctcttgctcggcctcatcatgctcgccgcgctctgctgcgtcgtcatgctcgcgctcgtcacgcagaccgtcgtctacctcgtgtgcaagagctaccaccacgagagcctcgacaaggccaacatctccgaccacctcgaggtctacctcggcgactacgtcccgctaaaggcgtccgacgtgcagatggagcagttccaggtctgactgtgaatcccatagcttctttgtgtcttttatcactgctcgccaatccatcctctgatgccggaattctcctgttaccaccggcagccaggtaatctgtaattgtgtacgtacagcaggcagcaggtgatgaacatacttgcgttaagtaggaagaattgggaatttttgtcttgggtgtacaagaataatggggatctgtacttcccttagtttcttcctcaaggacatggttccttcccttgtttacatgatatataaacaggagatgaatggaattgggcatgccgaatttac

SEQ ID NO: 147678 - DNA, 607 bp, Zea mays
  Clone ID: MRT4577_66210C.1
agtctcttactgtagtgtagccccgcatctagctgaagcgcgcgactgcctcgcttctcttgagcacgagcctctgttcctgctcgcctgagatgcacctcgctgacctgaatcgactctgcccaaatcacgtcctgatctccgttctaatctcgttagggtcgcacgcgtagatgctttgtcattcctgctcctgctgccgaaaagctccatgtacatatcccctccgacaagttgccctgcagccccaactgccttgcagcgatatctctcccacgacacgcaccccggaaacagcacagcattgcttgtactctgatatccaagctctacgcgcaccgtgacctcaattacgcttcgtcggtgaataactcgcaaatgctttccccagaaccacccaaaatattctctccatacaccatatgcatcttactgtgcgtgcgtgatcagaaaatcgcccaaaccatgcgattactaagctagctaaatgtgatttacccactgctacacacgagaaactactcaaaatccttgacaagttccctgataacgcggatcactgagaaagtgacattgatgaacacactagaagctgagaacctctatc

SEQ ID NO: 147679 - DNA, 216 bp, Zea mays
  Clone ID: MRT4577_66211C.1
ccctcaccttgcctggcacctacggctttttctgctagcctcaccaaggagcaagaattgtcggctagaggacagtcaactaaagctagctatccattccatgcatcttcatctgtatgtactccgcccgtctattgatgatgcattcatctctacttgctttccttacatgtactacatttaatgcaacaaattaagttacttatcttatagaaa

SEQ ID NO: 147680 - DNA, 399 bp, Zea mays
  unsure (1)..(399): unsure at all n locations
  Clone ID: MRT4577_66212C.1
tcgtaccgcatccaaccgtcaagggggggtctatcctcccatcgtctttcgcccaagtccgttgcccgtgagcctctgccgcgggatgggcagaggccgtgccgcgcttcgccggatggaaagaatgctcgtcattcggcgccatcccgagcctgctctgaagtgtgagctatttggagggccgatatgccacaaagtagaatcaaatttgatcatnnttaggctctnnntcggtgatangnntctagacccaaacatgnntattgagaaatgcccagctgtaaatgcccgtttgcatttaatcagtgtccaattctcacaaattactgcgttcnnctcctaattacatattgtctcntgtcagtggtattaaccttggtgacttaccannnattatgc

SEQ ID NO: 147681 - DNA, 2955 bp, Zea mays
  Clone ID: MRT4577_66213C.1
atggacaatcttcagcagcctcttcagcccgggacggtgctccgctttgggagtctcgagttcatgtcccccgacggcagctacgacatgatactcctccccccgcagcacgacggcaacgacggtcgtcggctcgcccgacggaggcgaacccgacgacgacatctccccggggtggaagaggaacacccgggtttgccccgccaccctcctcgccggaggagggggagacggagcaaccatggccaggcaagaggcagcacctcgtcggctgtcagaccagagcgagtcgacggcgccggcacccctgtgggggacatgtcaggtgttatcctcgcacctgggacaacgataggtgtcgcttcccagcaacgtgccaaccccaggcggactgatgacgctagcacccttgcgagggacttgtcgggcattagtctcgcacctaagatagcgacacgttccatctccgatgcaacttcaccaccatccaccaacaaggaggtaccatcagttttccatcatgttccctttagattcagcttcgatccgccaagggaccccacttcggcaagcgctttcgcaagggcataccctgaccttccggggtaccatatgtggtcaacttgggacctactgactgtcgcctctacctctggacccgtgggttccaaggaagaggacgaccccaacttcagttgggatttctccgaacttcgtgatcccagtgccatgcgagacttcgtgtccgcatgtgaccactgcctctctggctattctgacgatggccacagccttgacgacgagggttacgacccaactcgcgagtgcttccacatcgatcaggaggatcacgacgaagacaaccacctcggcatgccaagaaacaacgacgcccctacaactgcgtcttgcgttgagatcccgcgggagctagctgaggcccgggcccctgtggggggtcagagcacctccgacaaaacctcgagcaagagtgggcaggtcgagcacccgccggagaagcgcgtcgtcgagcccgggacgtccagcgccgtattattgacaacgccaggggtagggctgcccccgactttcaacggggccaaccagaacctagctacaacggtgatattactccgaacaatgccggagccatccaccaccgaggggcgacgtatccaggacgaactcaaggacctcctggaaaatgccgcagtccaacaagccgagagctctgcctcccgaaggcgggggtgcccctcggagcatcacgccttgtcctcccgacacatacgggaagcctcggtccataccgagcacacaggagacaggacccctgtagccctggaccgcctcggcacgagcaacatcgccgcgatcgtcgagcccgcctcgaggaaagggtgcgccgaggctaccaccccagacgtggaggacgctacgacattgggagggacggacgacgacaacctcatcatccgcaacctccccctcttcctctccgacgctgcccgagcctggctggagcatctgcctcctgctcagatcttcgactgggacgacctagtcaaggccttcgctggaaatttccaaggtacgtacgtgcgccctggaaacccgtgggatctccgaagctgccaccagcagccaggggaatccctgcgagagtacattcgacgattttcaaagcagtgcaccgagttgcctaacatcaccgactcggacgtcatcgaagcattcctcgccggcaccacttgccgggacctggtaagcaaactgggacgcaagactcccaccaaggcaagcgaattgatggatatagccaccaatttcacctctggtcaggaggcggtcgaagccatcttccggaaagacaagcagcctccgggaaggcagaaggaagacatccccgaggcgtccgtccagcgtggcacgaagaagaagactaagaagaaagcgcaagcaaaatgcaacatcgttgacacagatctcgtcgttgttgccgagcgcaggaatcctcggagaccccccggaggggccaacgtgttcgacaagatgctcaaggagtcgtgcccctatcacaggggtcccgtcaagcacacccttgaagagtgcgacatgctccggcgttacttcaataaggctgggccctcggcggaagatggcaaggaccaaggcaacaacaacaaggagggtgacaaggaagaagagttcctggaggtccacaactgcttcatgatctacggtgggctctccaaggtcctcatggacagaggcagcagcctcaacatcatctacaccaagaccctagggctcttgggggtcgatcggtccacgattcgtgccggtgcagcaccttttcacgggattgtccccggcaagcgtgtcctgccccttgggcaacttgatttgcccgtctgctttggaactccctccaacttccgaaaggaaaccctcactttcgaggtagtcgggtttcgaggaacctatcacgcggtgttgggaagaccgtgctacaccaagttcatggccgtccccaactacatgtacctcaaactcaagatggcaggccccaagggaaccatcaccgtcggatccacataccaccacgcttacgagtgcgacgtggaatgcgtggagtacgccgaagccatcaccgagtccgaggccctcatcgccgacctggattgcctctccaagaggcgcccgacccgaagcggcatgccggcaacttcgagccagccgaggcagttaagtctgtctctctcgaccttagcaacgacgccgacaagaaagtcaagatcggctccgagctcaaccccaaataggaagcagtgctcgtcgactttctccgcacaaacgccgagatttttgcgtggagtccctcggacatgccaggcataccgagggatgtcgccaagcactcactggacatctgagccggtgcccgacccgtga

SEQ ID NO: 147682 - DNA, 138 bp, Zea mays
  Clone ID: MRT4577_66214C.1
cctccctagccaccagatatatccagagtgatagtggaagttatcaatacattaagttatataacagcaaaccagtgcaggcgctccaaaatgagactagagcttaaaaaagaaagtgccgtacgggactagaaagct

SEQ ID NO: 147683 - DNA, 781 bp, Zea mays
  Clone ID: MRT4577_66215C.1
gggtgaagaagcagccttgtatgtaggagcaactcgccctctcctcatgttcaaagacacttatcgtagcagttatcacattataattgtgtgtgagtatggcactgaatacaacaatatcaccgcatcatatgcatatgagatgaaagtgatagagtgatagtaccatccagttgcttgacccacacattagagaaacttaactcaaagttcaactaacaatatatctgtaaaacttagcaattaatctatcatatgcctttactgatataagaggagtgtcaaagttgcatattcctatggtgaatgcactagggagagtgaagatacccctgtattgtatggactctactcatacccccatccttggaaaagggggactaaaaagaagttctagaagtatcagcctactacaaatgcttatagaaacaagttactgaaagagaatgcatcatgcttcctttcaaatgttctagaagtgacatgccctaaaggtgaacgtcctaattaagagcacctagaggagggtgaataggtgatcctgcaaaattagctctaaacaacacaaacttggttcataaaatgtgttagtgagaaccaaaaccaagttaggattagaagagaggagaaaaagaactcttcacttgattgctcctctaagatgagtattgaacttagtagcaatattacaagtgaatatgagaacttacctttcttgcattttggtcccacatttgtagcaaaatcctatcattctttcaataaatacataggaagcatc

SEQ ID NO: 147684 - DNA, 442 bp, Zea mays
  Clone ID: MRT4577_66216C.1
acagccttcctcttcccctctcttctcccctcctctcacccgagcacgccaacgcacactcaagtctccaatggccaacgagcacttcttccccggcgagtacctttcctccggtctggccgcgccgttccttggcgcatcttacgtgcagccgccccgttcagggttcgaagccgccgcggctatggccttcgggctgccgtgggtggaccagcatcttccagtagactcctcagccaccacggcacactttgactccgcgctcagttctctggtctcgtctcctgccagcgccaccgccggcggaggcttaggcttcgcgcacggcggcgaggatgacgtcgccatcggcgacctgatcggccggctcggcagcatctgcgacggcgccagcgccaacaactcctgctacagcacgcctatcagctcccctccacgcggg

SEQ ID NO: 147685 - DNA, 366 bp, Zea mays
  unsure (1)..(366): unsure at all n locations
  Clone ID: MRT4577_66217C.1
tatgtcgccggtcctatggcccgaacgaagcaaacacctggaagcgcaccgacggagcgtgacccccgaaagtcagcttcctctaaggctgaacgcaagcggggccccaccaccggcggtgtgaagaagccagaccgtttgcaccccgataccgcgcggcttcacgagattctctcgtaccaaaagagcactgagctggtcatccgacagctacaataacatggtctctttcgagagatcgcgcaagactaccagactgatctgacgttgcaggactccgccgcagctgtgtctgaagaggccnagcgaagaagacctggagaagctcttccaggacaccaacctttgtgtcatgcactccaagcg

SEQ ID NO: 147686 - DNA, 874 bp, Zea mays
  unsure (1)..(874): unsure at all n locations
  Clone ID: MRT4577_66218C.1
cattgggaccctcgaggccggccgggaggcatttcgacggcggttaaaccctagcgagaaagctcggggtgaggcggcggatgccgctgtaggtcctcgagggccggctccgccgcccgcgcaaggcgctcatcgacctcgtcacgcttctcgtataaataaacagcaaccccctctcaatccaaatccaccaagcccactcctctgctgccgcattccaacccattcccatcgtcttcaatgaccaacccagcgccaccagcagcgccatcagcaggagagagatcgccggagccatgacaaggggcggcagaggcgacatgaagtccttctaccgtcagcagaagacgcacgccgccgctgctgccgccgccactaccaagcccactggtggcgtctccaagaaggcggcggcgcaccaccacaagaaggccgcgctcgccaccaacgtccacccagccccagatcacggagcagcgagagagggcgggccgcgagttcgacatggacacgcgctacgggccatgcctcgacgtcacccgcgcccagcggtggcgccgcgccgacgaacagccctgcctccgggagggtcgcgtctaggctactggcgggatggacattccttccccgcgtttcgccgacatgctccatcagtgttcagtactagctctgtgttggagatgcggtgtcgcatccatccgttctgctcccgtctaccgcatttcgtggtagcagtggcacccgtagtagtaccatctgtgcctgtcacaagaaggagaaaccgagtaacatatttgtcctgatcaccgtaaaaaaataggtttngtcctgatccaactccctcctcatccngttctcaaaatctttactatgc

SEQ ID NO: 147687 - DNA, 546 bp, Zea mays
  Clone ID: MRT4577_66219C.1
gatccatggtaagccttttttgagagccgaggcattccttgttttgattaatcagataacggaaatacaacaactgattcagctgattcacttgatgttaggctttatacgagaggatgagtgaccagacatgattctcaaggacttctagaaataagaaaagtagctcagcatctttgagccaaatcagaaacttacacttgcaaatcttctacaatcttaggcacgcatagtaaagatttttgagaaacggatggaggaggagttggatcaggacaaacctatttttttacggtgatcaggacaaatatgttactcggtttctccttcttgtgacaggcacagatggtactactacgggtgccactgctaccacgaaatgcggtagacgggagcagaacggatggatgcgacaccgcatctccaacacagagctagtactgaacactgatggagcatgtcggcgaaacgcggggaaggaatgtccatcccgccagtagcctagacgcgaccctcccagaggcagggctgttcgtcggcgcggcg

SEQ ID NO: 147688 - DNA, 467 bp, Zea mays
  unsure (1)..(467): unsure at all n locations
  Clone ID: MRT4577_6621C.1
gtaccctncgcggnccggccgagacgccccgtctccaatcccaggcaggcaggcagccaaccagccatggagtgcgagccggaggagctgcagttcctgggcgtcgtcggcatctaccgctgttcctcctgcacgtcgccatctcgcacgcgctcttcacccacatcgactccgacgacacggccctggacgcatcctccccgggcaccgacacgcagcgccgcctgctgtcccgcctcgcctccgactggctcgccctgctcctcttcaagtccgcctacctcctcgcgctcctcctgctctcgctcctctccgtcgccgcctccgtgttctccgtcgcctccgtctactccgccaagcgcgacgcgctcaccttcccgcgcgtgctctccgtcgtgccccgcgtctggcggaggctcgccgccacgttcctcgccgncttcgcgctcctcttcgnctaccacgcc

SEQ ID NO: 147689 - DNA, 3053 bp, Zea mays
  Clone ID: MRT4577_66220C.1
ccgccacgtcgcgggtgggtttccaacagcgtcggatcgttgttctcccgtccttccgccctatcgcccatgccgatactttctaccagcatatatggaatccctccgctggtgtcttgctttttccctcggtctggtggcaggagttcctttctcctccttggctccattgtcgtccgttccttttcttcgtaccccgatttctcttgctttgtttccttgtcgcctgtgcaccggatccatgtgtgttggctcatcatttgtattgttcttgtccgtccaactgattagagtttctggcttggtagaagatcaccccgaccttgcttatcgcctcgtgttttccttattttttgatattgagttctctgcaatttgggattgctttgcctgtaaggcgagaccacgagaagataggggcgggctatggaggacgaccagttcgcgacaacgctgatgggctcgcgattttggccgatgtggaggaaggaggccatgttggcgctggactctaggttcacaagcatgatgacggaccaaagaagcccgagaactccatgctatctcaaccaagaagacttggtggaggaaggaaagaaggaagagcattgggacctcgagccggccggacagcggaatgaagcagtcgtccgcgtcgaatgcccccatcgaccttcgcccccggcccctcctccccacccaggcaggcaggcagcttccgcctttagggcaaccctagccaaatccccaatcccactcggccaccactattccttgtgcgactcccgccgcaccctcgctagccacctcctctccgtcgtcgcagcaccgcagctaggccgtggtcgcatcgttacatcctcccaaccgaggcaccacagctactcctcctcttccccccactgttgccataaggaggcgccagaggaggcatgcactgcggcgaggcatggagacggcggttaaaccctagcgagaaagctcggggtgaggcagcggatgctgctgtaggtcctcgagggccggctccgccgcccgcgcaaggcgctcatcgacctcgtcacgcttctcgtataaataaacagcaaccccctctcaatccaaatccaccaagcccactcctctgctgccgcattccaacccattcccatcgtcttcaacaaccaacccagcgccaccagcagcgccatcagcaggagagagatcgccggagccatgacaaggggcggcggaggcgacatgaagtccttctaccgtcagcagaagacgcacgccgccgctgctgccgccgccactaccaagcccactggtggcgtctccaagaaggcggcggcgcaccaccacaagaaggccgcgctcgccaccaacgtccacccagccccagatcacggcgctggcagccgccggaggcggaggcggagcagcgagagagggcgggccgcgagttcgacatggacacgcgctacgggccatgcctcgacgtcacccgcgcccagcggtggcgccgggccgacgaccatccctaccgtggaattagtcgcgtctggactgtgcgctaaaagatacatacgataactggaatgcctcaaaacttcctgaatatttttaaattttttatgccataataaatacttatagctagctgaacattattttatttcctctcaactcagcaactcaatattaggctgtgggccaattaaattgttgattatgagcttcttttttgcctgttttgttttagggctgtgattccattgcaatgacatctgtaactgataagaaagctaagatggagagttaaatatcttctgcgccctttgtggagggtggcattcaggaggcatgtggtgatgcatgcaacatttgccttgaggttttctgtgagagtgacccttctacagtttggtgtatgcttctcagtgacaaagtaccttttaaaatgcaagacaatggtatatgcattgacttattatgtatagtgagtcatattttgataggtttttggtacagacttatttagttaaaaacctatagtgacaactatttgatctagagtttaatgtacaagattggaagtgtctagggtggcattcaggaggcatgtggtgatgcatgcaacatttgccttgaggttttctgtgagagtgacccttctgcagtgagtagccattttgttagttgagctattttatatataaatgttatttctgtaaccaattacttggagttcggagtgtttttcttatgcaggtttggtgtatccttctcagtgacaaagtaccttttaaaatgcactgccctgtacactctgacatgcaagacaatggtatatggattggcttatttatgtatagtgagtcatattttgataggtttttggtacagacttatttagttaaaaacttatagtgacatctgtttgattttttacaatatgtacaagattggaagatcctctttatttttttgttcttctttatgatttgattgtcacaacatcaactttaaattagtgtcatatgttacctgcattctttttgcaccagctatagcacggttacactccgatcctctcgaaatttgccatctgaaggttggtttaaaaagccctgcctctgggagggtcgcgtaggctactggcgggatggacattccttccccgcgtttcgccgacatgctccatcagtgttcagtactagctctgtgttggagatgcggtgtcgcatccatccgtgcttcgaccgcatttcgtggtagcagtggcacccgtagtagtaccatctgtgcctgtcacaagaaggagaaaccgagtaacatatttgtcctgatcaccgtaaaaaaataggtttgacctgatccaactcctactccatccgtttttcaaaaattttttactatgcgtgcctaagattgtaaaagatttgcaagtgtaggcttctgatttggctcaaagatgctgagctacttttcttatttttagaagtgcttgagaatcatgtgtggtcactgatgctctcgcatgaagcctaacatgaagggaatcagctgaa

SEQ ID NO: 147690 - DNA, 434 bp, Zea mays
  Clone ID: MRT4577_66221C.1
catacccaaacacaagcaagtgtcggcaacaagctaaacacaagctcagctagctcctctctctagtctctctactatcttggcaacaagcagcaatggcagcagcaaccaccaccaagaacgtcctgctgctcctcctcctagcactcctccctctcgccacactctcctcccgcaccggcccgtcatcggcgcacaaaagccacggccacagccacaggtcatcgccgtcggccaagcacccaccgccgtctccttctcctccgtcctcaccaccttctgctccctcgcctgctccggcggcgaccgccgcgctagtgcgcgcgacctgcaactccacggcgtactacgacctgtgcgtgtccgcgctgggcgccgacccgtccagcgcgacggccgacgtgcggggcctgtcggccatcgcggtctcggtc

SEQ ID NO: 147691 - DNA, 1016 bp, Zea mays
  Clone ID: MRT4577_66222C.1
acaatacataggcaatccatctcctcccacatgtacagctcgctttccgatctagcaatgtcaacgggagcaacggagatgatcgtagccaccgccgatgccgccagcagcaccaggtgcatgtcgtcgacggcgagagcagaggacgtgatcgtgtccaccgccgtggccaccgcggccggcaccaagtgccacatgttcaagatcgacggctacaagcggatcaaggccatgtacggcaagggcaggagcatcgactcctgcaggttcgaggtggctggccgcgcatggaagatcctcttcttccccaacggcgactgccgggacaccgcgggccacgtctccctcttcctcaagctggacgacgacgacaccgtcggcggcggccccgacgacaacgacgacggcaaggtcgtggtggtcgagctcaggttctcgctgctgtgccgccccggctgggcgccggacgaccggccccagagctggacccgcacggccaccttcaccaacaagggcaacaagaccatgggctacagccagttcatgaagcgctcggagctggagatgccgaggttcctcggggacgactgcctcgccatccgctgtgacatgtccgtcctcgacgaccccgtcgacgtcaaggaggagcccgcgcagccgctcgacctgcagcggcttggggtgcctctcgactgcaaggtcgtcgacgacggcgcgtgcatcaataccgaacccctcgttcccgttcccctcagctacttcaagttcacggaggcgctcgtcaagctgttcgtcggctgtttcgacgtctgaccgaatggatcctcgccggctgggttttattgttgcgttatatagtttcgacaaccatcatttcgagtatttcaagataaaagtacactgtcatcgttcccccaagttttgtttagatcgatcagggtgctagtttatttaatttatgtgtaaatcatcagaatttccacattattagtgaataaactgaatctagttttttc

SEQ ID NO: 147692 - DNA, 1404 bp, Zea mays
  Clone ID: MRT4577_66223C.1
atatccaccaagcccactcctctgctgccgcattccaagtttccaacccattcccatcctcttcaacggtcaacccagcgccaccagcagcgccatcagcaggagagagatcgccggagccatgacgaggggcggcggaggcgacatgaagtccttcttccgtcagcagaagacgcacgccgccgccgccactaccaagcccactggcggcgtctccaagaaggcggcggcgcatcaccacaagaaggccgcactcgccaccaacatccacccggccccaggtaccgatcccggtccgaatcccccgatcgctgttcgcttccgcggcagtaccggcggatcgaccgattgattcgatttcgattcgtctctcgtcaccgcagatcacggcgccggcagccgccagcagggggaagcggaggcggagcagcgggagagggcgggccgcgagttcgacatggacacgcgctacgggccatgcctcggcgtcacccgcccccagcggtggcgccgcgccgccgcgctcggcctcgcaccgccgccggcgctcctcgccctctgcgccgacgaacagccctgcctctgggagggccgcgtctaggctactggcggcgcggggtgcacattccccgcgtttcgccgacatgctccatcagtgttcagtactagctctgtgttggagatgcggtgtcgcgtccatccgttctgctcccgtctaccgcatctcgtggtagcagtggcaccagtagtagtaccatctgtgcctgtcacaagaaggagaaaccgagtaacatatttgtcctgatcaccgtaaaaaaataggcatgttctgcacaaaaacgctaatgaagacgtaccaatgggatcttggttcatcggattgtacgtcgatgatcgccgtctttgctgcagcaagccaccggattgcgaatggaaagacgcaggcaggaacatgtgtgttgcatccttccactggagttgcagtggcatctgcaaatctgctgattggatcagtaaagtccatcaacgttgcgcgagagtgagaatgcacttttgggctgtgattccattgcaatggcatctgtaactgataagaaagctaagatggagagtttaatatcttctgcggcctttgtggagggtggcattcaggaggcatgtggtgatgcatgcaacatttgccttgaggttttctgtgagagtgacccttctgcagtttggtgtatccttctcagtgacaaagtaccttttaaaatgcactgccatttacactctgacatgcaagacaatggtatatggattggcttatttatgtatagtgagtcatattttgataggtttttggtacaaacttatttagttaaaaacttatagtgacatctgtttgattttttacattatgta

SEQ ID NO: 147693 - DNA, 542 bp, Zea mays
  Clone ID: MRT4577_66224C.1
cccacgtcggctgacaaacgggtgaggaacacagaggctatgcagccaccgcagccggagccggagcccgccgccaaccggcgggcaccctccacgtgctcccccgcacagaggcggagcggtggcattgggtgcatggccggcctcctccgcctcatctcgccgtaccaccggagccaccaccggaagcgcctcaccgccaagaacgcgccagcagcgcgggcctcccaagcaccgccacccccgccgtcctcgtcgtcgcccagaaagaaggcggcggcccagcagccttcagcttcgcccgcggcttctccgacgaagccgacggtgcagcagctgatgacgaccgccggccatcatcgcccgcctcatgggcctggaggagtccgcgccgtcctcgcccgccgcgacgctgctgcggccagtcgtcccgagtcgtccgcctccgccgccgccggcggcggcgccggagacagccgcggagaaacggaggaagctgctgggcgcgctggaaaagtgcgacgaggacctcaagacgcttc

SEQ ID NO: 147694 - DNA, 296 bp, Zea mays
  Clone ID: MRT4577_66225C.1
gccaatcaaacaggaacagagctgggaaacaggacccaaatgacgtgctcccgctgtggatgctcatacacacaacaagaaggtgagttgtgaaacaagaggaaaacattgacgggctctaaaaaagcgaggatgggttcatatgacagttctgtggacagacaccgttctttggcggagtgtttgcaaactactgatcaatgcatgggccgtttttgtctgacctaaggggtgattttagaaaaaaggattcataggagacggcaatgagagccctctcataggtggtgggacaa

SEQ ID NO: 147695 - DNA, 393 bp, Zea mays
  Clone ID: MRT4577_66226C.1
ggtgttgttttttttttttttgaatacgtttttttttgaattgggttgatccattttagcatttcatgtaatggccaagtcctgcattactatttgaccgtacaggaaaaggaatttttccgtcgtttgtgacagcaccagggcatgattgtttgttgttggtaagagcgggccggctcagggttgttctctctcgtggaacggtgagcaggctcacctgaatgaaaaaagaagagtgttcccaccaacaggtcaactagagcctgtttctaactgcctcgcgcaggcctcccatggcactcgccttctcccggagcgtgactttccgcgtgttgcggttttatttttttgggcggtttttgtcccctccctccctttctccttggcggtgcg

SEQ ID NO: 147696 - DNA, 349 bp, Zea mays
  Clone ID: MRT4577_66227C.1
cggcatatctgctcgcatttccttgcaaccgattgccttcagccgtcccaacccacgaccgatggcgctctacgacgataagaagcccgcggcgcataatccggcagattatgaccccgcggcggtgaacacgaccgccgggaacaagcccaaggcggacaagcggatccccggtgtcaagtccgccggcaaggaccgcggcgatggcaatcgtggcgagacgaagtgctagaagatcgtggagacgtgcaagatctacatcttcaaggtgctgaagcaggtgcagccggacatcggcatctcctccaaggacatgtccatcatggactccttcatcaacgacatcttc

SEQ ID NO: 147697 - DNA, 1823 bp, Zea mays
  Clone ID: MRT4577_66228C.1
tccacgcttccgcttgccaatcttttcaactgattattatataaaataaacattaatttttttccccggccggggtgtgcttcagatccgctgcctgcctgtccttctcctctcctttcctctccccgcgcccaacagcctcacatgtatctcggcccggcgaaaagttgagaacgacagacagttcctgaccacagggcgcgatggacgtcccggccgtggcggaccctggaacggagcgaggcgaaggcgcgctgatccagtgcccgtactgcgactcggaggcgatgcacaagctggcgcagatcctcctcccgggcctcgccgccgtctgcgtggacggcaccacgggggacccgttccgcagcccttccgcggtggccgtggacctccgcaaggagatggtggactacatcacgcagcggagcgacagcttcatcgcggacgcgctgatcgagtcggaggcgaaccaggacgcgcccggggccgaggtgcccgacgaccccttcgagaccgtgtccgtcttcatggacgacttcgccagcaccaagcgcaacatcatcggccacgtctccggctggctgctcaccgacagccgcgacgacaagatcgacgacttcgtgcaggagatggaggccaccaagttctggccgctggagcgccgggaggccgtcgccgagctcctgctcaagaacgtcgacctcaagaccaggttccactgccccgagaagtacgagaacgaggagcgcctcgaggaccacaaggcgcagtgcagcttccgccccgtcgcctgcgccaacgacggctgccgcgccaaggtctccgtccgctgcgtcaaggaccacgacgccgcctgcgtgtacaagctgctccagtgcgagcagggctgcgacaagcgcctgctcaggcgcgacatggaccgccactgcgtcaccgtctgccccatgaggcccatgaagtgccccttcggctgcgattcctccttccctgaccgtgacctcgagaggcactgcgccgagttccttcagccgcatctgctcatggtccttaaggccatccataagaaaggccggtcggaacaagacctcaaggaccttgctcaaaagctggaaaagtttgatggagatggtaaactggctaaggctctggacgcaagacctcttactaatgttgtcaaggacctcgaagccaagatgaaaggtggacagtcaagttaaaagggctgggtctttcatacagacagacttcacaggatggataatggcattgtttggttcaagatatggtcccacgcgcagcatacatacagagaagaatatgagttttgttttattcttatctcctttacgattttttttaattttttgcttcatttttctccctgtcacaatcaaaccaattatcagtcagtatgcatagtcgtccgctattgctctgtatcttcagcttttgtatgaggatattatatcatttgttttggtataaaaatcaaggaacaggccatgtttccagcaggcttgttctgtaccaaactgatcacttgttaattatgatgaatgaggcatgctgatattcacattgaacagcagctaggttaatgtgttgtctgtgccagtcgagctacttgggttgggtgtacctcacgattttgttttgggtagaaagacagatgatcagtatccaacacatatcatcataccagtggcctaattgttgaattcattaggccctcgctgctaggtagggataatgcaggagccttaggagttgattggttgtgggatgaattttgaacccttaatatttgcagaactctaccactc

SEQ ID NO: 147698 - DNA, 440 bp, Zea mays
  Clone ID: MRT4577_66229C.1
tggcttggaacctttgggctgatttatgtgcttgtttatgtgcttgtttatgtgcttgtttatgtgcttgtttatgtgcttgtggatgtgcgggacttaagagagaacgttgtagtatactctaatagctgttgtatgtgttgcttttgttgactctgtgtaatagttgttgtatacgttattttgtttctgtatttatggtacttgtgtttagacgccgtgggtggtgttgcttttgttgactttgtgtaatagttgttgtatacgttagttctggttctgtgtttatgatacttgtgtttggtcgccgtggttggtgttgcttctgttgattttctagacacaaagctatctcgccgcctcctaagatcatttgaagtgacctacctcttggcctagtatcgcctcctaagatcaatcgaagtgacctaccgacgacg

SEQ ID NO: 147699 - DNA, 771 bp, Zea mays
  Clone ID: MRT4577_6622C.1
accttcagctctagtagcagatacagggagctaagctagcagcaatggcgacaaaggatgttgcttccatgtttgccgttgctctcttcattggagcgttcgctgctgttcctacgagtgtgcaatccatcggcgtgtgctacggcgtgatcggcaacaacctcccctcccggagcgacgtggtgcagctctacaggtccaagggcatcaacggcatgcgcatctacttcgccgacgggcaggccctctccgcgctccgcaactccggcatcggcctcatcctcgacatcggtaacgaccagctctccaacattgccgccagcacctccaacgcggcgtcctgggtccagaacaacgtgcgcccctactacccggccgtgaacatcaagtacatcgccgccggcaacgaggtgcagggcggcaccacgcagagcatcgtcccggccatgcggaacctcaacgcggccctctccgccgcgggcctcggcgccatcaaggtgtccacctcgatccggttcgacgcggtggccaactcgttcccgccctccgccggcgtgttcgcgcagtcgtacatgacggacgtggcccggctcctggcgagcaccggcgcgccgctgctggccaacgtgtacccctacttcgcgtaccgcgacaacccgcgggacatcagcctgaactccgcgacgttccagccgggcaccagcgtgcgtgaccagaacaacgggctgacctacacgagcctgttcgacgcgatggtggacgccgtgtacg

SEQ ID NO: 147700 - DNA, 817 bp, Zea mays
  Clone ID: MRT4577_66230C.1
ctcacgactcctcttcccacacagttattgagttcgtctgcggtaaggcatcccatgttcctccgccgccgtctcctctccaccgctaccgccgcggccgccgcccgcggcccgccgccgattcgcgtgtccctaacggagtccgcgggccgcggcgtcttcgctacccgcccagtatcttctggcgagctcctccactcagcgcagcccctcgtctcccacccctcccactctctgctccacgaggtttgctacaattgcctcagaaggaagcccggggaagggcgcgcttcaagcgggggtgactacttctgcagcgatgcttgcaggggccacgccaagatccgaattctcacattgtttggctgcaaaacacggacgcgaaattgaaggctctccgcgacattgaagaaggtgaggagctgtgcatctgctacatcgatgctagcatggatgccgacgctagacagaagattcttgctgatggatttggcttcaagtcccgttgccttcggtgcttgtctggagactagaaaccatgtctactttcttcctgagcatgagtttgtcttcgattgtagcggattgaagcggttggtgctgaataccatcagaatcttaagttgcaatcttctgtacactagttacagccacgccaattgagttgtggttaagcattactttgccttttgcacttccctaccacgacatgctagaaatgttgtggtgtaaatgttgtagccgtttttgtttagcttcttggtcagtccttagtgtcagaaataaaatttcgataatactcggatcatttgaatac

SEQ ID NO: 147701 - DNA, 449 bp, Zea mays
  Clone ID: MRT4577_66231C.1
gacgtgataataagggggaacaagctgtgctcttgttattttctttaaaaaaaaaaaaaaaaaaaaaaacctacctggccgggccggtccgaagggcggagattacatcaaactgactggccgttactaactagatccatactaggtagcggggggggtgggatcatggatatagatagtttgctgtcgtgaaaagatatttgttcacaatcacacacacaatacaagcgagcacgcataaagaaaaaagactgggggggctaccgagtgagcgaactaacataaattgagtggggttcactgacctgctttctattcaggaaacaaatctggccagcctgcttaatgaatgaatcaaccaacggggagagaggggttgcgtattgagtgggtgttcttttgcttggtcactgactgactgggttcggtcggtcggctggtgggagcgg

SEQ ID NO: 147702 - DNA, 2315 bp, Zea mays
  Clone ID: MRT4577_66232C.1
taagctaggctgctatgcccagccggccgggctatgcgacagtcacacagcttgtctccttcctcctctccaccccggccccttgatctcatctcttccatcctagcttgctcgccgctgccagtctctcctccacctgcaactcccatgtctcagtcttctcctctcttctccgtcgcccgagcgcacgccggagcaggagggcgagccgtggcagccgctctcctgctccgtcgtcgccccattgcacagctgccgcacagcatccatggcctacggtgtctctctccagccagagcgacaccttccaagacgctcctcagcctcccccgcgccacgctgtcctccttcgccgaccccgacggcgacggcggctccagcgcgaaagccagcgacggcggcgccaaggccggcgccggcggggaggagcaggtcggggaatgcgagatgtcggagatggccagggcgttccacatctcgccacgggtggcgacgtccatctccgtgacgatcgcgttcgccgccctcaccgtgccgctggcgatgcgctcgctggtctgccacgggaccttcaggatgaacgcgctggcgtacttcacgctcctgtcggggttctacatggcgtggaacatcggggcgaacgatgtcgcgaacgccatggggacgtcggttgggtccggagctctgacgctccggcaggcggtgctgaccgccgcggtgctcgagttctccggcgcattcctcatggggacccatgtcaccagcaccatgcagaagggaatcctggttgcgtctgcgttccaagggaaggactctctgctcttcgctggactcatatcctcccttgctgctgccggtacatggctgcaggttgcttcgtcatatggctggcctgtctcaactacacattgtatcgttggggccatggttggtttcgggctggtgtatggaggggtggatgcagttttctggagttctttggctagagtatcttcatcctgggtcatctctcctttgatgggtgcagctgtctcttttcttgtttacaagtgcatacgcaggtttgtatacagcgcaccaaatccaggccaggctgcagctgctgctgcaccaatcgcagtcttcaccggtgtcactgcaatctcgtttgctgcttttcctctcagcaaggtgttctccattgccatcctgcaagcagtgtccagtggggcaataggagccatcattgtctcccgagtgatccaaaagcagctaggtgacttgctgtcttcagaagcagagaagatcgcgtctgctgagaagtcaagtgcccagcaggctggatttctctcggacattgctggccctacgggagctcagctgcagatcgtgtacggtgtgtttggttacatgcaggtcttatcggcatgcttcatgtcatttgctcacggagggaacgacgtctccaatgccatagggcccctggctgcagctttgtccatccttcaaggtgtggcaagcagcgctgagatagtcatacccactgaagttcttgcttggggtggttttgggattgttgcagggctcacaatgtggggatacagggtgatagcaacaattggcaagaagatcacagaactaacacctaccaggggctttgccgcagagtttgcagcagcttcagtagtcttgttcgcatcaaagctcgggttgcctatatctgccacgcatacacttgttggtgcggtgatgggtgtcgggtttgcaagagggctcaatagagtcagggcagagacagttcgcgaaattgtggcgtcctggttggtcacaattccagttggtgctgtcctatctatcttctacacattgatcttaaccaaaattctggcgtacttcatgtgagtggattgtaaaataaaagggctgcttttaagtggtacagcccattgtcacttcataaattttgatcagtggaaaaaggattttcttttgcaaaagtaaagagatggactgattccacaagttccaccagaaatttacaagaatttccaagaccaaataaccattttcttggaaactgagcaaattagaagtgtttcccagcaaataatcatggtacaggctcctgaattattatttttttcaactttttatactaccttgtatgtctatcacaaggtcgaatactgtaacttctcgtagagctgttatacatatagatgtaatgtaatggttggtcaaatttattcttgtaaattgtaatgatatcgcatgactttgttcattgccaatcatcctagaataagagctcattcctctgcaggaaattatatgac

SEQ ID NO: 147703 - DNA, 1379 bp, Zea mays
  Clone ID: MRT4577_66233C.1
tccgtattccttttttttccgccctttttttttttttttttttttttggagtataatatatgtaatgctaccccaactacagctacaaggtttccggtattcaaatgatccgagtattatcgaaattttatttctgacactaaggactgaacaagaagctaaacaaaaacggctacaacatttacaccacaacatttctagcatgtcgtggtagggaagtgcaaaaggcaaagtaatgcttaaccacaactcaattggcgtggctgtaactagtgtacagaagattgcaacttaagattctgatggtactcagcaccaaccgcttcaatccgctacaatcgaagacaaactcatgctcaggaagaaagtagacatggtttctagtctccagacaagcaccgaaggcaacggcacttgaagccaaatccatcagcaagaatcttctgtctagcgtcggcatccatgctagcatcgatgtagcagatgcacagctcctcgccttcttcaatgtcgcggagagccttcaatttcgcgtccgcgttttgcagccaaacaatgtgagcattcggatcgcagtcatggttgtagaaagatgggagcatataaaccgcattgccaactgatgaatcacatgatacagaggctgccgctgaggataagagatcctcatatgaacttgcaaccaattcaatacgaaaagcatttatgcgtattcttgccaatacattgatgtaccaatctatggtcaaaaaggttgtgatttcttcctgaaatccagcttttctaaaagtggattccaacaactcaaattcctctttcatctcaatcagcgtcccctggtgcaacagagctggctgaagtatgttaaggcaatctgcattagcagctcctgatataaccatgcaagcaaggcgcttggccatgtatgggtacttcagatcacgtgaactgcagtggtaatcgaataaagaccaatctacattcttgtcaatgtcatggaaccccttggcgtggtccctgcaagcatcgctgcagaagtagtcacccccgcttgaagcgcgcccttccccgggcttccttctgaggcaattgtagcaaacctcgtggagcagagagtgggaggggtgggagacgaggggctgcgctgagtggaggagctcgccagaagatactgggcgggtagcgaagacgccgcggcccgcggactccgttagggacacgcggatcggcggtgggccgcgggcggcggtcgcagcggcagcggtggagaggagacggcggcggaggaacatgggatgccttaccgcagacgaactcaatgactgtgtgggaagaggagtggcgatttacaaccccccggccggcctcgagggtcccaa

SEQ ID NO: 147704 - DNA, 848 bp, Zea mays
  unsure (1)..(848): unsure at all n locations
  Clone ID: MRT4577_66234C.1
cactcctaagggcgattgggttcctcgaggccggccgggagccgtcggacgccgctagctcctgcgttgggcatccgggcatctgcctcaatgctgtcgttcgaccctcgccccaccttcgtgctcgtccctggagttcacccaggctgcgcctcctctcgccggagctcaccggatgccgctccctggacgggctcccctgcagccacatcgtccgcaccccctcctgctcactggcgctggtgacctcgccgtgccaaagcgtcgagctcctcccgtccgtggcggttgccagttgtcgaccctgcttggactccacctcgccaagctgcatgggacgcgctccctatcccagcgctgcccccttcccctgctcggtttcaacaccggcgcccatccccagcgctcacctctgctcctgccatggtcgtccatggtgtgtcaacacccaagattgtgcatccctccttgttcggcctcggtaaaactctagacgctcggacttcaccttggcactcctctctgtttcctctatgccgcttgtcgtcggctagattcacccggtcatagcgccctgtgacatctagcaagccgtgcgtcgtcgatcgtcgtcctcctccgggctgcgcgctttgccttgactgctcgttgttgatcctgtttaggccccaacatcggcaccacacatccctttttttggtgttcgttgccatcgactcagcacagtctgtcgagcttggcgtcctcgacctcaagccttgccaagtcgtgagaggggagaaatcctgaatgtttgngagaaagtgaaggataggcgtgcacgcctgccaggtgttcggtgttatgca

SEQ ID NO: 147705 - DNA, 176 bp, Zea mays
  unsure (1)..(176): unsure at all n locations
  Clone ID: MRT4577_66235C.1
tnggaccaaaacgggtgttttatttctaggttgttcgacagaacaaccctactacatacgcaaatacaaaaagggccctatttgctaaaaccacaaaaaactggccagttcaaaaggaaggaccccacaaacaacccacaagggaggcctcaaataaagaaacggtacaaccagga

SEQ ID NO: 147706 - DNA, 297 bp, Zea mays
  Clone ID: MRT4577_66236C.1
catactcgtacgttaaggtgtcatcagatttctgagttatgtccagagtcctatgagacggtttatgagaagatacatgcgagagagttcgaattaagcaatttgcacgcaaagtgactggctactgactacgctgaactcacaatcctgcgacagaggttcaatttcaaggctaccaccaatgtctagctattataacgaaccaagcactgtcaatgttgaatcctgaaagatccccacaaccagagctaaatcaccaattcttgatctgtcttaagacaagtccatatcatagac

SEQ ID NO: 147707 - DNA, 433 bp, Zea mays
  Clone ID: MRT4577_66237C.1
cccacgcgtccggagaaggtactagatcgtggtgaaaaaatcgaacttcttgtggataaaacggaggatctccgagcacaggcacaagatttcaggcaacagggaacgaagatacgaagaaagatgtggtgggagaatatgaagatgaagctcatcgttttcggcatcgtggttgcactgatcctcctcattgtcttgacagtttgcaaggacttcgattgctgataagatgcaggaacatgaaaggaaagaacatgagaaaaaatgtagggggagtgtagtgccatgacaccgcgggaccaaaatccatcatttgtgtgatgttgttggcattggccacaatgttcttagctacgcctagaacgatgggctcaaattaagttataacagggctctctaatattttaaataattgtaatagtagcaaatatcg

SEQ ID NO: 147708 - DNA, 537 bp, Zea mays
  Clone ID: MRT4577_66238C.1
cctgggaatacgttttgcacactttaaaaaaaaccaaacttcctggccatgtaaatatacaataccctgaaaagatggaatttatttcctaaaaaacattccttccaaatacagaaaatgcttctgtttaaaaatgacgggtcccaaaaacattagcagcctttttttttttcctccaccaactcgatgcaggggtatagccccagttgaacaaaatttaacatgcccactttttgttttgaaatctaataagcatccttttaattttccaactgaatttgctccgcgatgggtcttaagggggtcagccactccgagggcaccttgggcaatgtttttttccaaaacaattttgcaaatctttgcccttttgaatctattatcaaaataaattttaccaggtttaaagctgatattacctgttcactgggatcaggaaggcagggaggaccaccttttggaggcctaaaaatcagctcaactaactcaagggcatgaaatgcccagggcggaaacccattacctcaaaatccttcg

SEQ ID NO: 147709 - DNA, 362 bp, Zea mays
  Clone ID: MRT4577_66239C.1
aacatatctaggggtgggcattccatttattaggttaattcggtttataaaaaaacggtttctccgccggtaggggaaagaccccccccgatattatattaagaagaagctcaatcggaaccccgaccgagaaaggtcacgaaagctggccagaaccgaaatatatgttgaaaaagcagaaaccggaccatactaactgaattatttcggttcggttatttctattttcggttttaaaccaaaattttagaaacgtcacaaaaacatgtgtggttggctcttgactgtatgagctaccgagctgggcgcctggctgtctccttgcatatgctggccacgtgtaatcgtggatgttggctact

SEQ ID NO: 147710 - DNA, 315 bp, Zea mays
  Clone ID: MRT4577_6623C.1
tttctttcctttttttaaaattttttaacaaacaacgcaactatggggaatttgaacaactacgcttcacacaaacacactttcactacaaactcccacatcctcttgtgacaaaataaattctcacttgactatacctaccccccaatatattcccagaacatcaaaattccacataccgtctaaaaatatttaacctttacaccactcgctcatttatacctaaaatacatatcttaaaaatccacatttatttcccctctaccctcccatacactcatacctcttttccccatcaaactcactttatctcct

SEQ ID NO: 147711 - DNA, 1049 bp, Zea mays
  Clone ID: MRT4577_66240C.1
agctgaaataattcgtgactacaagactggagatagtttatgctatgcttttattgaattcgatacaaaggaggcttgtgagcgtgcatatttcaagatggacaattgtctgattgacgatagaaggatccatgttgattttagtcagagtgtttcgaagctgtggggtcaattcagacaaagcaaaagaaatgcaaagaaagatgggtgttttaagtgtggcgcccctgatcacctagccagagactgcgatcaagacggtgagcagaaaaacaaaggcccaagttatgttctaaaagatgaaaatacacaacgtggtggaaatcaccgtagaagctatgatctagtatttgacgaagacgaagctgattgttctgaagagagagatcatgaaaatggccacagaagaaagaatcgaagaatagatgatcgaaaatcagagctaccacctcgtggtggtcgtgatagaaatagccatgagagaacacacagtgatgagaaaggaagcaagcatgggaaagatgataggaaccgaggggatcggaaacatgatgactaccacagttacagtagatccggtgacagaagctctggtagaaacgatgatcgtgattatagcaagcgccacgacagaagcagaagtggggaggaagagaagggctacagacgaagggataagtctgatggtgagcggcaccatagagacgatggctacgatcgccgcaggagagatgaagacagccacaggaaaaggagcccagatagtaaacatagaagagaagacggagggcaccatgtgagaaaccagcagtctgatgataggtcctacaaggagagaaggcacagagatggtagataagaaagtttctgcacgactcggttttcttgcctgctttccactgatgtctctataagctggtattcttagctcaacttttttttttttgtaagtcaatgtaactgcctggaatatgttgaattgttgtagtgtccagatctgaatctttttttgtgtgtttacagtttttgctggataatttattgcaatc

SEQ ID NO: 147712 - DNA, 264 bp, Zea mays
  Clone ID: MRT4577_66241C.1
cacagaccctggtgcagtgctcatcacttatagccgttgccgcaaccgcttgctagcgctgggctctgtaatcctatcttccgggaaacgtcgactcgacatagcctcccagacggagacgatcgccttgccaccagagaccaaccaactgctatgattcatcatcaagaccttatactccaacaccgagatctgcctaagtgagcccactagcaactccaggactgccttgcattcgatcacgaccgcgagtatgacgagcac

SEQ ID NO: 147713 - DNA, 558 bp, Zea mays
  Clone ID: MRT4577_66242C.1
cacagaaaacctattctggacccacgcttcctttgcccccaagctaacggatgaagccatgctgatttgcatgttttattttctccgtacatgactaactttatcatcagttatgttaaatagacacaagaaggacggactacagttttgttaaatttgtaactcgtctatgttgagttcttggtggcacattcgccatgacaggaatgcttgaccggtggatgggttaacagcttatcaagacagtcaccaactcaaagaccagaagtgtactgcggtaattgcacaagtcacgatggatggaaaaccgttggtagagtggtaccgtggctaatgaagccatgttgatttttgcctgttttattttcttcgtacatggttaacttgtaatacgtcgttgtttttttttcatcaactatgttagattaatacagtccacggactacatggttaactatgttggtagtggaactgaaatgccaagccgatcttgatcaatcctatagtcccgtcgtgccaaaacccacgcgtccgcggacgcgtgggcggacgcgtggg

SEQ ID NO: 147714 - DNA, 771 bp, Zea mays
  Clone ID: MRT4577_66243C.1
tgtcaaagaaaatattgccaacaaatcagtattcggctcgtggtgtcacggagtattttcttcccattcgcccaactgagagggcctggccagcggtgtacttcctgtatgatctctcaccaattacagtcaccatcaaagaggaaagaaggaacttccttcattttataactcgtctttgtgcagttcttggtggcacatttgccatgacaggaatgcttgaccgatggatgtaccggcttgtcgagtcagtcaccaactcgaagaccagaagtgtactgcggtaactgcacaattcatgataggcggaaaacagctggacgactttcgtcgcatgtgacatgtgttgcgagctgcattcgctcctgtcctcaggtagatgcatgccctgcgatgcttcaaggctgtccgggggagtagcagtatttgaggaaaggtcgatgaaatgaagtagtagcgaggaaagatgtcatgcttcaactgccaaggatcagaagagttcgtgagtcgttactgttgtgaagcacgtcgctgttgtagtgctgtatgatttatttctccgtcacgagtcatgattaacacaaacgaggtacagagactttttttaattcctctgaacattgatcattgtgatatagagcttctccatatatatagagagctattatatatatagtgctgtcaaggacgaacatttgtataaacgggactgggattagaatccctcatttcctctttttttattataaaaaatagagtttgtattttttt

SEQ ID NO: 147715 - DNA, 1311 bp, Zea mays
  Clone ID: MRT4577_66244C.1
ccacgcgtccgaatatgttgtgttagcatgtgctgtactgctgttattggttaccctgtcgactcaggcttcaacccagtgcctacctccatagaagctggaagccctagctgcttccttttgcaaaagagaaaaaactggcacctttttggtaatctataactgtcagagaagtgcatgtcctcagtggtgattatcatggggaaacctgtattaacagtgactaaatcactaaattgatggaccaaagatgtttcagttggaataactctatgatggttggacatgaacagaccatgatcatgaccatcacgatgaacaaaagaagcatgaacaaaccttcaacgaagaagcagaaaaaatgatcaagagtgtgaaacaagcactcggaaatggtgaaggctgccgggtctatgggatgttggatgtgcagagggtggctggtaacttccatatctcagtgcatggtttgaacatttttgttgctgaaaagatttttgaagggtcaaaccatgtgaacgtcagtcatgttatccacgagctgtcatttggcccaaagtatccaggaattcataacccactggatgaaacttcaaggatacttcatgacacaagtggaaccttcaaatactatatcaaggttgttccgactgagtacaaatatctgtcaaagaaaatattgccaacaaatcagtattctgtcacggagtattttcttcccattcgcccaactgagagggcctggccaggtaggtacccccctcccttccttttcaagcatgctcccttccttttcaagcatgctatcttcatttattctaaaagctgaagtgtttttttttcatgtagcggtgtacttcctgtatgatctctcaccaattacagtcaccatcaaagaggaaagaaggaacttccttcattttataactcgtctttgtgcagttcttggtggcacatttgccatgacaggaatgcttgaccgatggatgtaccggcttgtcgagtcagtcaccaactcgaagaccagaagtgtactgcggtaactgcacaattcatgataggcggaaaacagctggtaccgtggctaatgaagccaatagacggacctttgcccccaagctaacggatgaagccatgctgatttgcatgttttattttctccgtacatgactaactttatcatcagttatgttaaattgacacaaagtccacggactacagttttgtaaaacttgatgaggaatatgtatgcaaagaaagcgtgggtccagaatagttttctgtgcatacatattcctcatcaagttttac

SEQ ID NO: 147716 - DNA, 1864 bp, Zea mays
  Clone ID: MRT4577_66245C.1
agagggggcgactgccctttcctcttatttccattaccccgagcgtacattctctcctctctctcttggcggcgactcggcgaccggcgctgctgccccacgtttggtgcccaggtcttcgtgggccccttagccggcgacgagcatcaccagctgaaagatggcgaggataccgtctctgaagagcctcaatgcgtttccacatgcggaggaacacttgttgaagaagacttactctggtgctgttgtgacaattcttgggctacttataatgattacactgtttgtacatgagctgcagttttatctcaccacatacacagtgcatcagatgtctgtagatctaaaacgaggagagactctgccaattcatgtcaacatgtcatttccttctttgccatgtgaagtattgagtgtggatgcaattgacatgtctgggaaacatgaagttgatttgcatacaaatatttggaagcttcgcttggacaagcatggccatatcatcggtacagagtacttgtctgacctagttgaaaaggagcatggggcacatcatgatcatgaccatgaacaggagcatcatgatgaacaaaagaagcatgaacaaaccttcaacgaagaagcacagaaaatgatcaagagtgtcaaacaagcactgggaaatggtgaagggtgtcgagtctatgggacgttggatgtgcagagggtggctggtaacttccatatctcagtgcatggtttgaacatctttgttgctgaaaagatttttgaagggtcaagccatgtaaacgtcagtcatgttatccacgagctctcatttggcccaaagtatccaggaattgacaacccactggatgatacttcaaggatacttcatgacacaagtggaaccttcaaatactatatcaaggttgttccgactgagtacaaatatctgtcaaagaaaatattgccaacaaatcagtattctgtcacggagtattttcttcccattcgcccaactgagagggcctggccagcggtgtacttcctgtatgatctctcaccaattacagtcaccatcaaagaggaaagaaggaacttccttcattttataactcgcctttgtgcagttcttggtggcacatttgccatgacaggaatgcttgaccgatggatgtaccggcttgtcgagtcagtcaccaactcgaagaccagaagtgtactgcggtaactgcacaattcatgataggcggaaaacagctggtaccgtggctaagagcatctctaagagactttttatttttggctctctatttaactctctatttattttttcataaagattacattatatatatagcatctcactccaacagactatctatctagttttgctagtcaggtggctagtcaaatttggctagtgagagagctgatttggagagtcagatagcttagcgagttagataactagtctgttggaaagttattttattgttgagtagctaaaatttggcttgacgagtcatttaactagtctcttggaggtgctctaatgaagccaatagacggacctttgcccccaagctaacggatgaagccatgctgatttgcatgttttattttctccgtacatgactaactttatcatcagttatgttaaattgacacaaagtccacggactacagttttgtaaaacttgatgaggaatatgtatgcaaagaaagcgtgggtccagaatagttttctgtgaaaaatcaatacaaatgtagcttcagtgtgctctgtaatagcaacctgatgctttatttataggacgactttcgtcgcaaaaaaaaaaaaaaaaaaaaaaaaaaagtactctgcgttgttaccactgct

SEQ ID NO: 147717 - DNA, 549 bp, Zea mays
  unsure (1)..(549): unsure at all n locations
  Clone ID: MRT4577_66246C.1
gcncccgctcgctcggccctggccatttatgcgtggacacacgttcttctcagcaataaacaacgccagcggggccgatcgttgctcgttccgcatcccgatccgcggctcctcatcaagagtcgtcgtcgtcactccggctcctcgcggccggttctttgcttgcctccaagaaaccgtcggcttggcttctcattcccgtcccaaatccgtcctgttaataggcccagctcagcttcttgcattagcttcttctcggggcggactctagttctagtgtgttgatttggattggagttttggggcaggtgctgcaagcaatggcggaggtgcggagccgggtgcgggggttcctgcggaaccggtggctggtgttcgtggcggcgatgtggatgcagtcggtcgccggggtggggtacctgttcggcagcctgtcgccggcgatcaagtcctcgcttggctacaaccagcgccaggtggtcagcctcggcgtcgccaaggatctgggagacagcgacggcttcttcgccggcaagctctgcgccgtgc

SEQ ID NO: 147718 - DNA, 477 bp, Zea mays
  unsure (1)..(477): unsure at all n locations
  Clone ID: MRT4577_66247C.1
gactctagnnagcgagtagttacctcccttcgctaatcgtcacncnncaaaatttcggtcgaccgcggatgnannttctctttgannatcgttgcttcagaacccttgacgttcggagcgtagtcacgtgtgtcgcttttcttccttttccataacccatgatcnnatcttgtcgcctcnnccccttgnnnatcacgccgcgctnncttaaaatgatcgaacccctcgttcatnnncatcttgacgtgtggcgggatcgcacccannttgttgagcgaacgaagcgttngnnatcttgctcncttttagttaccttgtcgggtcgcaccaatcgccananntcgccgttggtacgnnntattgcgactcgnnttggaatgnntcttcttcaatctaccatnncatcaaagatcaacccaacttgcntttctcttggtngacgccccattanngtctcaaatcaaatacctaatgtca

SEQ ID NO: 147719 - DNA, 348 bp, Zea mays
  unsure (1)..(348): unsure at all n locations
  Clone ID: MRT4577_66248C.1
tcgtctcgtcggacgccccgtggggtnnctcatgtctctgcttcgtcgtctctnnngtggagctacctannggtgacncggtgcgcggactcgttccnttnacgccactgtggccgtcganntccagccctcnnngtcggcttttctnnntcgcaccntncgtcactncgtgcgggtcangnncacctcaccaggggttcatttaaatgggnncagagaccggggtgttctaaccccnnctcttnntggaaggggtatgnnaagcatgggtgaaggggcagagaacgnnngagtcattcttcnnaccaagccnnncttccttggggatgtcttgcaagcccaaatctt

SEQ ID NO: 147720 - DNA, 229 bp, Zea mays
  Clone ID: MRT4577_66249C.1
cgatcgcccgcacctgtgccatgtcttctttttgacaaactgtcaacactccagggagggtttcaagtttttcgtgtaggcctaatagtatacaacgtctccaaagctcacgacccagcaatcacagaagccagagcacgagccctgaatgtaaccctattaaaagtctgagctgaaccacaatacgaggtggccgtcctacaagaaacgtgaacgttactcccagaac

SEQ ID NO: 147721 - DNA, 226 bp, Zea mays
  Clone ID: MRT4577_6624C.1
cctgaattgaacgtggtagtgtttatgatgattagatgtctaggctttctatgtttgcgtgaatcgtttctgctggattgtccattgtcatcaccaccttatgttcaatactttaaatcttgcgcaggtgatcgtcggtgctgtcggtggtggtgcaatgatggtgagcggaggtggcggcggcggtgctgctgcatctggtggtgctgctgccgaggctcccaag

SEQ ID NO: 147722 - DNA, 264 bp, Zea mays
  Clone ID: MRT4577_66250C.1
ctcttccctttccaatctggatgctaaaaggggagggcgtcatgtgctttgggagacatgaacgagactaacggaacacaaaaccctatggtccatactgcgaccaacgacccagactgaaaaaggggtatcatacgaccacgagacactgtgcttgcagtagcatactatgcaaaggtgtcgtgctctattacattaacaagagctgtagcaaggtagacgctctaaacatggatgggccaattatccttgagatcgactact

SEQ ID NO: 147723 - DNA, 167 bp, Zea mays
  Clone ID: MRT4577_66251C.1
ggtcttttcatcttgtgtagtttttacagtgtgaataaaacattggctcaggatgctaatgtgaaggtcagcaattatctaaagcaggtgagctctgttgaacaaatgtgtattttcagtgagtctgagtcgggtgtgtgtgggtgttttgtttcttggcttggggt

SEQ ID NO: 147724 - DNA, 304 bp, Zea mays
  Clone ID: MRT4577_66252C.1
ggcggccgggcggagattttcccaacgcccgagtgcgcggtgcaggctgtctcggtgctgatcacagacatgcatctacgagaatagtggctccctaccactgcgacttgagcgacaaggggttcgactcgatgtgcgaaccctgatgtcgcgacgagtttctccactgcgagatcgtggtacattcagtttacaaacgtggcaagggtacgaccgcggagctcgaatgacccacatgcaaatccacagagcgggaggccccgggtagcagggcggagaacatggaccgatcgctgtccgatgc

SEQ ID NO: 147725 - DNA, 277 bp, Zea mays
  Clone ID: MRT4577_66253C.1
ggttcagctcgcctttcttggccagaggcgccggttggactcacgggcggggcatgatggtggtgggtacgggcacctcgctggcgctctcctccctcctgtccctgctgctctttgctgggatgcagatgtacagccgtcagctggcctccaccgagtggctcaccatccagggcggcctgcttggttcgggtctcttcgtgttctcgctcactgccttcaataatctggagaatcttgtctttggcaaaggattccaagcaaagatcttccctga

SEQ ID NO: 147726 - DNA, 567 bp, Zea mays
  Clone ID: MRT4577_66254C.1
cctaccaaggggttttcaaaaaatttcctttttgaatggttttaaaattttcgaaatttggaaaaccccggctacctaaagaaccaacccccaacaaaaaggcaaaaggggggaaaaccttaaaaaaaagggcggccccccccggcccggagcaacaaccccaaaaaaagggccccgaacccggggaaaaacattagggggggggggaaaatgggcgaccactgggggagcatctcccattcgggggcgggctgggggcccccccaaaataaaccccccaaaaccattttaggggccgctcggacccagggccttaagcccgcaaaaccctgggggggcccaaaaaaaaaccccttaaaaccccaggaaaaccccggggggtggggttaaaattttccccccaccgatgggggggggctgtgtttggaccccggccccccccaaatcaggggattaacccccccaggacccctggggccgaaatccgggaccccgggggaccccctggggcaaagccggccccccccccggggggcccccccccttggggcccctaaggggggggta

SEQ ID NO: 147727 - DNA, 296 bp, Zea mays
  Clone ID: MRT4577_66255C.1
attcggctcgagcaacaacggcagccactttgttgcgcatccatatgctgctggggctctgtgcatgtgctgctaccgaaaccatgtacccgcagtgctggcatgctgctatagctaccctgatgccgacggacctatcaccaggggtgcctacgcaccgagaagacccaacccttcaaccctacatggcccaacccgctatctgagctgggatctctacacaatgtacacatagctgctccaacatgcatcagtcctaatacaaccgttaccttaggtgcatttactgggacaaa

SEQ ID NO: 147728 - DNA, 319 bp, Zea mays
  Clone ID: MRT4577_66256C.1
caaacgcgatcgatgcatgaaattccattctccgatctcggatgcgacgacaccacacgctgcgatggtggcgcgctcgaggcgacgtcattcgtctcggcagacatggcatgatagccacgagaggggtggcagcttgatgacaagcagtctgacaagaaaatgtaaggcatattaactggagacttctttacgtttatatgatgatgaatgagaaaggatggacagcatgggactgcacgagaaccatcagacaggcatctatgcctattgattaatgaagcgatgagatatttaccaaaaagctataatttcctta

SEQ ID NO: 147729 - DNA, 241 bp, Zea mays
  Clone ID: MRT4577_66257C.1
aggaacgcggcccaagctttttttttttctttgttctgttttttttatgccctagagattattcctttccactctcataggtagatacaggtcatagcgcacactgccacccaagggtgacgggtgacactccgtggcacatcgacgcttaacgcagggaacaacatatagatggataggaataaactctattgcattaataacaacagaaccataggacgaagaaactctaaggtcgaat

SEQ ID NO: 147730 - DNA, 569 bp, Zea mays
  Clone ID: MRT4577_66258C.1
ccggccggatgacttcgcaagcgcctcccagagatagcttatgagcccttctgagaatatcaattgccaccattgtcgcaatcatggtcgtagctaggtgccgtgggcatcacgctgtgcgctcacatatttgacgcaacatatgaggattgagcctaatgatgcatggcctgcctgttcgagtgagcgacgtagctcaccttaattgccgtgtacggatggtccgattactgctacgaaagctgggccagcgcaatgaaatactcgcttctgctcaacgatgtgttagagggcgtgcggatcttcggagcatattctgcgtttctcgcctgctgtatcgctgctttactgcctacagcatttgtcactggagttcgatatactccactgctccaatacggatatccatataattacatcgattatgccttctcgaatatgtgagccgcagcccagcatattgctttttattctactaatgtcccactactagctgttttccatgggctacgcctctcagacctacattcagaaatcaatcctccagttgtaggtcgcgaaatccgaca

SEQ ID NO: 147731 - DNA, 189 bp, Zea mays
  unsure (1)..(189): unsure at all n locations
  Clone ID: MRT4577_66259C.1
aaagaggatggtcgggaaaaggtattgttacatttattttcttactagatataggttgtcatcacgtcaaaggtggtcgtaaccatcctcttaaatcagggttagtattattataacgtctgcatagatgtaatccggatcgagagggggggtttgggttnttttgcgaggacgacgatccgctcgctg

SEQ ID NO: 147732 - DNA, 325 bp, Zea mays
  Clone ID: MRT4577_6625C.1
aaaaaaaaaaaaaaacataaaaaaataaaattaaaaaaaaaaaaaaaaaaaaaaaaaaaatggtaacatgaaaaaaaaaaaaaaaaaaaaaaataaaaaaaataaaaacataaataaaaaaaaaaaaaaaggggatgccgttttaaaggttccaagttaacattcatgtacttgcaacataatactttttaaataagcacactaaaattcaattaattgaccattttttaaaaaaaagtgaattgtaaaaaccctttatttcccaattttaacaccttataacaaaatacccattttccaagatggcataaaaccaaaaaggccc

SEQ ID NO: 147733 - DNA, 572 bp, Zea mays
  Clone ID: MRT4577_66260C.1
ttgggtacctcgaggccggccgggctatcgcactcacggctctttcctattctcgacgacggcgctgctgcaagcgccagctcgatcgacatgcgaatagtacactctatcgccgacatggagcgtatgtacagtcgtggctaagggtatctcgtcgacgatgctgccgtacacattaggacgcctacctacctagactgaagaccgccatcctccgactgtgcaagacatgatcacaaaggcagcgaataaggaacacatgccgacgcagatcggcttcctgctccgagaccagcacgactatcccccttgtcaatagtgacaccggcactaaaatcctccgcatcctctacgtcatgggctggcacccaatatcccgaaagacctgtacttcctcatcaagaaggcgctggcgataacgaagcaccttgagagagacatgaaggacaaatactctaaatctcaccgctcattcttgtcgacagcaggatccaccgccttgtccgctactacaagcgcacaaaaatacttccacccacgtgcaagaactagtcaaccactgctagaactct

SEQ ID NO: 147734 - DNA, 260 bp, Zea mays
  Clone ID: MRT4577_66261C.1
gactccacgcgacgggctccaagccactatggaacgaaatttaaccgaacaagcccacaagtgggaggggatcatacagagtgggccatagcaactctatctgggcgccacccgatgagccactgcgtcgcgacgcagataccgaaagcacctgctgaacgagaccatgcatgcggaaagtaagcccaaaggtgcacgagtatagctctgctgaaaaaatacatagatgcaaggactcccaacctgtgaaaccattcaag

SEQ ID NO: 147735 - DNA, 303 bp, Zea mays
  Clone ID: MRT4577_66262C.1
ggaaaaaggaccccccacaaaaaaaagggggggaaaagggaaaatgcaagggacaacagtttaaaggggtttcaaaccaaaccaaaccgggtttcaaggccccaccccaaaaaaaaggggggacaccggggccttgccagggaaaattctttacggggggcccccaaattttacgggcgaaaggtataaaacgggtacaaggggtgaacccaaaaaaccagggtccaaaaaacattgcatagggggattcgacaggagcaaacacttgtttttttgttttaggcacaaaaaagccggctttac

SEQ ID NO: 147736 - DNA, 686 bp, Zea mays
  unsure (1)..(686): unsure at all n locations
  Clone ID: MRT4577_66263C.1
agcgtatccatgtcaagctagtggtctccgtttgctgtcaactggtaacattcatctgcggttgactcttgaggatcctacagcgagaattcatgcgtacgtccataagaattatctggtccaattcttcggtggttttctgacagaagaagcgataacaaagaagatgaacaagctacttggtatcccagaaccagaggacagcgaggaaggtgcccccttgactaggaatccaccttggatatggtgctgcttgacatcattctatatggacaaaaacaatccctgggacagcagaaagtaccgaatctttgctacagagatgagggattgaggagggatgctgctcgaatatgcaggaacggccttgcaaatgaaccgaactgattctatgtagtatttctgtgtgctctcgttggcattttgcttggaggggcatcttgctgggatgcagcgagacatgctttagttgtagcctgcgtactgtcagtattattccctagatgcaatgttgttgcagtgctgctgctgaccttctgctccatccagaacactggtagcagtctgtatgcgcgcccacgctacagaactctagattatcttgtgaaatgttagtgcacacagcacacatcaccaacttttggcttggaacgtggcaagaaccccttttcttgttcggcgacana

SEQ ID NO: 147737 - DNA, 2103 bp, Zea mays
  Clone ID: MRT4577_66264C.1
ttgggaccctcgaggccggccgggaaaccgtgccgcagtgtcccaagtcccaacaagcgtcaagtcgcgtggattcgccactggcgggtattgattaccttgccgccccttgaccaaaccaaataacacaagtccccattgcttgcaccctacagctcctcacacccaaggtatggaggaggcaccaacgagggagccgaagaggctgcgccaggacgccgcggttacttccgccgcggcggcggctgaggagcctcagtacgtgtacctgcctatcgccgacgccatgaaggttcccggcgtccgggtttgcctcttcgccgttgtctccgagatcggcatcaccgaccgcagccgtggcacggatttcactcttaggttgaggattgtggatcaatcatgcatggatggaatctctgtaacagtttttgctgacaaaactactctattgccttgtgtcaagtcaagtggagatgtgatcagtctccataacgtcatgataacgatgcatggggagttctttgtttcatttaacaaagaagtttcttcatttgcgctatttgaaagcaaagtagctgagtgcagcccatatcagacttctgtgaaatatcatggcagcaaaaatgacaaagaacttttaacccagatgagaacgtggcttgcatataatcctctaggtctgaaagattttgaattgcagttaagaagtttaaaatctgattctacttttgatctagtatgcaaggttgttcatgtccatgaagataacgacaaattgatattttatgtttgggatggaactgatacccctgctgttgagtttcaggcaactttggatccaaaggcagttgaatcaccccctctatttgaagggccacctctacccagggaggttttgtgcacaatgccaattatcggaactgttttgaggattttttcagatatgcctatcaaggaagtatcccacatgcaaaatagggtttattgggccagattctgtaacattacttgcaaggaagagtttggcatttggaaaggcattttgctggcctctagtaaagttcggcttttatctcatgaagatggtagtgttgttgatcgtcgaaagatgtttgccagtcgtaaggtcaaccaagttctctgccagccgatggcaagctttccctctaatgttactgttctatcagatgtagaatatgaggaagaatggcactcaacgttaatgcagtctttaactcataaagaggtgacacacaaactcaaaaccttggcccgtgttgtgggagcgtatccatgtcaagctagtggtctccgtttgctgtcaactggtaacattcatctgcggttgactcttgaggatcctacagcgagaattcatgcgtacgtccataagaattatctggtccaattcttcggtggttttctgacagaagaagcgataacaaagaagatgaacaagctacttggtatcccagaaccagaggacagcgaggaaggtgcccccttgactaggaatccaccttggatatggtgctgcttgacatcattctatatggaccaaaatcaatccctgggccagcagaaagtaccgcatctttgcaacatactatagggattgaggagggatgctgctcaaatatgcaggaacggccttgcaaatgaaccgaactgattctatgtagtatttccgtgaactctcgttggcattttgcttaatggggcaaactgagtgtttgtagtatttctgtgtgctctcgttggcattttgcttggaggggcatcttgctgggatgcagcgagacacgctttagttgtagcctgcgtactgtcagtattattccctagatgcaatgttgttgcagtgctgctgctgaccttctgctccatccagaacactggtagcagtctgtatgcgcgcccacgctacagaactctagattatcttgtgaaatgttagtgcacacagcaccaacttttggcttggaagttggaacgtggcaagaaaaaccccttttcttgttcggcgccttgcagttctctcggtttccacgaaatgggtatatgttccttgtgaaaaaaaaaaaaaaaaaaaaacaaagtagt

SEQ ID NO: 147738 - DNA, 327 bp, Zea mays
  Clone ID: MRT4577_66265C.1
ctgggcggtggcgctgccgtgccgtcgcgtcctgatccccgctcccgcgttcatcggccgatgcttctgcgcaatgacgagatccactcgacaggttagcctccagctccagaatcatgtgcaggatcctcgcgaagaaccccgtgtatgctttctcccccgggcttgtacaccactctcacatcttacagcggcacctctctattatagtgaccgcctgacaccctatatgatgaaggctacttccatgcaataatgaccttcccccacaactatcccaacagtcaaccatcatccagatttacttgtgacatgcggcgtctaaat

SEQ ID NO: 147739 - DNA, 1951 bp, Zea mays
  Clone ID: MRT4577_66266C.1
ccggccgggaacaaaccaaacgcgcactacggtgctcaccgctgatcatggactcgccaccgctccaacccacggtgttctccctgatacttgctctcatcctagtgctatacttggcgctccggcgccgcggcggcggcaagaaccggagctacccgccggtggctggcaccgtgctgcaccagctgttcaacttcggccgcctgatggagtaccaaaccgcgctctcccgcaggtaccgtaccttccgcatgcttaccccgacctgcagctacatctacaccgtggagcccgcgaacgtggagtacatcctcaaggccaacttcggcaactacggcaaggggagcacgctgcacgagctgagggaggacctcctcggcgacggcatcttcaacgtggacggcgccaagtggcggcaccagcggaaggtcgccagccacgagttctccacgcgggtgctgcgcgactacagcaccggcgtgttccgcgacacggcggcggagctcgcgggcatcgtggctgccgccgccgccgccgcgggggagaagctggacatgcaggagctgctgatgcggtcgacgctggactccatcttcaaggtcgggttcggggtcaacctgggcgtgctgtccggctccagcgaggaaggcgccgcgttcgccaaggcgttcgacgacgccagcgagcaggtgctgcaccgcttcttggacccgttctggaaggccaagaggttcctgaacttctcgtcggaggcggccatgaagcgctcgctccgcaccatcaacggcttcgtctacgccgtcgtcgacaggaagatcgagcagatggaaagagaccaacaggaatttgtgagcccagaagatattacctctccgtagtccgtacatgatgggtgcagtgcagacgggacgacgggatcacgagaggagattacagttctgacacggtgacatttccctgacacgccaagaaagaggacatcctgtcgaggttcctggtggagcgggagagcgatcccggctgctccgacaacaagtacctgcgggacatcattctcaacttcgtgatcgccggccgcgacacgaccgcggggaccctgtcgtggttcctctacgtgctctgcaggaaccaacacgtccaggacaggatcgcgcaggaggtgcgtgccgccgcctcgggcgacggcggcctcggcgttccagagctcgtcgcgtgcttgaccgaggacgccatcagcaagatgcggtacctgcacgcggtgctgacggagaccctccggctgtacccggctgtgcccatcgacgtgaagtgctgcttttcggacgacacgttgccggacggctacgctgtcaagaaaggggacatggtgaactaccagccgtaccaaatgggcaggatgcggttcctgtggggcgcggacgccgaggagttcaggccggagaggtggctggacgacgccggcgtcttcgtccccgagagccccttcaagttcacggctttccaggcgggccctcgcgtctgcttgggaaaggaattcgcgtacaggcagatgaagatcttcgcggctgtgcttctctacctgttcaggtttgagatgtgggatgccaacgctaccgtgggttaccgggccatgctcaccctcaaaatcgatcgcccgctgtatcttcgtacgtcgctccggcgatgaggtgaggcgggcggcatgcctcaatgtcaaacggtcagacacgtctgtaagtgtaggaaaacaacatctccaaacatcagcatagtcttcgggccacgattgggcttcttagaaattggtatgatgatttttaccaaacacccccacatatggaagtgactattttctcccaatccaatcctcacatgggattgtctctttatttctatttaaaattctattcaggactcacggtcaataaagcccctctccaccattacctcg

SEQ ID NO: 147740 - DNA, 395 bp, Zea mays
  unsure (1)..(395): unsure at all n locations
  Clone ID: MRT4577_66267C.1
ctcgnaaaaaaaaaaaaaaaaaaaaaaaaaaaaaaaaaaaaaaaaaaaaaaaaaaaaaaaaaaaaaaaaaaaaaaaaaaaaaacaaaaaataaaaaaaaaaaaaaaaacaaaggggggggcccttttttaaggggtccaatttttcataccccgtgggtccgaagttttaaaactcttttttaatggggaacacaaattgcattacccgtggcccgattcttttaaaacgcacatgacctggtaaaacccctggtggttcaccaaattaaaaggcccttgcaagaaaatcccccttttaccactggtgggatttttaaaggaaaaggcccaaccccgatttgcctttgccaaaattattccccaaccctgtatgggtgaatatggacacccccct

SEQ ID NO: 147741 - DNA, 2451 bp, Zea mays
  Clone ID: MRT4577_66268C.1
cctcgaggccggccgggagtctgcactgcactcaaccaccacccgcgctccccaccccacctcccctcccccccccctacagattttcactttccaattcctatttatctcttcttttgttctttaatttggttcgtacgtacaagacttctcggatcactcgtcttctttgattgcatcatcgagacctgcattttcccttccaaattcgtcactcactctggttggccgccttctgtcttctgatccaatccggttgaaatcctccgtctccttccagcaagatctggcacataaggagaatcggcaagaaccattctgcaaatgaggccggatacgcggcttgaatcggcggtgttccagctcaccccgacccgcaccaggtgtgatttagttgtggtggcgaatggacggaaggagaagatagcctctggtctgctgaacccattcgtcgcccatctcaaggttgcacaagaacaaattgccaagggaggctattctatcacacttgagcctgacccagagattgatgcaccctggtttaccaggggcacgttggataggtttgttcgatttgtcagtacaccagaggtcctggagcgggtcacaaccatagagtctgagatattgcagatcgaggatggcattgccgtccagggcagcgacagtcttgggttgagatctgtggaatactataatgggaaattggtggactgtatggaaggtgaaatgctgacgcattgggacctcgagccggccgggataaagctgaccttcagaaggcaaagaaagagcaggaagaggaacagatcaaacggctagaaaggcttaagctagagaggcaaaagaggattgctgcaagaagcagcacttccaatgcaccaacaccacagcagcccagagtaaagccttctcccaaggtttcccccagcacctacaagagctcaaagctcagcgataccgaacttgcatcctcttcacctctcagaaaatttcctatcaaaactaccccagggactgatcctgaaaaaacagcaaaatcaagcaaactaaatgataatactaatgcagttagtaagccaaccttgacagacatgaaggagagaagtgggaggaccgaatcatccaacgagagattgagaaaacttgctgaacctaaaaccaacagttcgactggccatactttgaattccaagtcagcaagcgtggaccgcccgcggagaaaaagcatgccacaagatagccagacaaagaaaatttcagctataatgcagcttgaccagagtaaatcagcaacactaccagaactgaaggtcaaatactcgcaagctcctgctgttgtgaaaaatgcagtagctagtagagagagaaaagaggtttcagctggagctaaatctcttcgtacaacagaaactgctagtgtaaaggaaaccaacggtaacatctcaaggatgaacagcagcgacgataatgtggtggttgagaagaccgttgtgatgctcgaagatgaggcggtcattctacattctggaagaaatgcagcaaaggaaacttgtagtgatgacaggacagagaagcccagcccagaatcggagtacatagctatcagggctccgctgtctccagttattcttccggaggctgagagatctgatgacctggggagctcatatgaggtggtgactgagtgtctaaaggatgaacctgaggagccaaccttgggcgccgtggagaaaccttaccaggccccctttgctagggtgacatcgctggagaatgcatcagacaacagtccattacctgaatcacttgcgcatgcaaatagcattaaggctcgagtgcctgagcctgtgtacacagtttcagttgagggccatgtggtaagtgaaaagcctcgaagcaaagagccaaaaggcttgaggaaacttttgaaatttggcaggaaaagccatgctgagggcgcaatggattcatcagttgacgaagcctcagcaggagatggttcgatgctgaagaatctcatttctcaagatgactctggtgcgtcttcttcaaaagcttctcggtccttctccctactgtcaccgttccgcagcaagcacaaggtgattgttctgtgagcacaaggtaatcaatttgggaggagaggaatataatggcgcagcacagtacatacttttggtttttcccttctagtatatatttacacacacgtatacataaatacatacatactatatgatggacttgtcattagacagcctatgtgaaggctgtgtgtggcgatggatggttgtttgcccttgtggttttgtaccctaactatttgtgttgatatatatggtgatactttttgttccagatttactattcaaatgtttgcactccgccggcttttgtaccctaactatttgtgttgatatatatggtgatactttttgttaccaaaaa

SEQ ID NO: 147742 - DNA, 310 bp, Zea mays
  unsure (1)..(310): unsure at all n locations
  Clone ID: MRT4577_66269C.1
atnnntttttgtttttttttttttttttttttttttataaaataaaacatgggctttatttggaccaactcacacccagnacttacattgtgttgggtgggggctctcgttctgcagctggtgcacttatagttattcttgcccgttttacaggtacaaacacataaatcttgtcatacaccttggcgaggagcccaagataagccactcttcatgtgtttatgaacaacaaagcacaaaaaacctttcacagcccttccacaagccccaatacaagaatgaaataaaatggtgccggctcgaacttttg

SEQ ID NO: 147743 - DNA, 139 bp, Zea mays
  unsure (1)..(139): unsure at all n locations
  Clone ID: MRT4577_6626C.1
gcaatggcattcctaatgcttaccgaacganaaattctaggntatanacaactacncnaaggcncnaacgttgtaggcccctacgggctactaacaacccttacgctgacgccatnaaantcttcaccaaagancccct

SEQ ID NO: 147744 - DNA, 1247 bp, Zea mays
  Clone ID: MRT4577_66270C.1
gccaaggaggctattctatcacacttgagcctgacccagagattgatgcaccctggtttaccaggggcacgttggataggtttgttcgatttgtcagtacaccagaggtcctggagcgggtcacaaccatagagtctgagatattgcagattgaggatggcattgccgtccagggcagcgacagtcttgggttgagatctgtagtaaggcaagttacaatcctgatgcagatagggcacttgttccatacaaggctggtacacaaccaattccaccattgcagaatcatgatgctacacaggaggagaattcaaaggatcaattgctcagagtgctagagactcgcaaaacagtcttacgtaaagaacaagctatggcctttgcacgtgctgtagcagcaggatttgacatcgacaacttggtgtatctgatcacttttgcagagtgttttggtgcttctcgcttgatgtggtgactgagtgtctaaaggatgaacctgaggagccaaccttgggcgccgtggagaaaccttaccaggccccctttgctagggtgacatcgctggagaatgcatcagacaacagtccattacctgaatcacttgcgcatgcaaatagcattaaggctcgagtgcctgagcctgtgtacacagtttcagttgagggccatgtggtaagtgaaaagcctcgaagcaaagagccaaaaggcttgaggaaacttttgaaatttggcaggaaaagccatgctgagggcgcaatggattcatcagttgacgaagcctcagcaggagatggttcgatgctgaagaatctcatttctcaagatgactctggtgcgtcttcttcaaaaggttgtgtgcacaacttgtctcttgaatcgatttctaacaaccatgacctagtggtggtggtggaatgttcactatgcttgtttactgtttcatcagcttctcggtccttctccctactgtcaccgttccgcagcaagcacaaggtgattgttctgtgagcacaaggtaatcaatttgggaggagaggaatataatggcgcagcacagtacatacttttggtttttcccttctagtatatatttacacacacgtatacataaatacatacatactatatgatggacttgtcattagacagcctatgtgaaggctgtgtgtggcgatggatggttgtttgcccttgtggttttgtaccctaactatttgtgttgatatatatggtgaactttttgttcc

SEQ ID NO: 147745 - DNA, 384 bp, Zea mays
  Clone ID: MRT4577_66271C.1
gtaacacattcatggattcgtgtaccaatatttttatttttgcgtaagatggcaagaactttgctgttctagggcattgttgatctttaggtagggtaaggtaagacacaccggtaccgacggagtatacctttcagactgcaacaaccatccttgtctgacataaaagtcactacgctattacagtattgtggaaaaagcctgacgagcacaccaaaaaatgcggtactgaactaccgagcataaatacaggcagtggagctatgactcctaataatgcatgggtagatgacgcgcaccatacattcacacggaaatgaatacttccttgacgaagaggtcgaagatgatgacgacgattcctcgaccgacgctatgggtgct

SEQ ID NO: 147746 - DNA, 591 bp, Zea mays
  Clone ID: MRT4577_66272C.1
actccatagggcgattgggttcctcgaggccggccctccgtgctaccgcacagccgtggtgtggccgttcatctcggaggccacccgactcactatggtcacatccacgggtgcagctgagatccacgggttgtagcttccgtattcgatggccccggcttcggtgcccgtgacgctcccaggccgattcgacgaggttcgtgggttatacgcgcctcgcacatgcatgcgctgaatttctcgctttcccaaccctatcgtttttcgtttttttgggtgtgtatggttttcccaggtgcggtcaagatccaaatccaatgttcgttgtttgcatgagtaaggcatataggggcactgaatcgaactgtcaagatgcagtctcgtcttttttttctaatgtggataatctgatattgtggcaatatatataatattttccagaaaaaaaaaaaaaaaaagcggcctcgtggagttaagatgttcttcgagttttacaggctgttgatgttttttaccagcggtgtgtgtttcttttgctctgaatcttcgtgttgcaggttgaagtcaataaaaaaaaaaaaaaaagcggcc

SEQ ID NO: 147747 - DNA, 481 bp, Zea mays
  Clone ID: MRT4577_66273C.1
gtaaggcaaatacaacacatgtatttaataataatatcattaatagtaagatacactgactccccatcaacattggatgcgtaagcgaactataaccccacaacagaacactgaaacaggatagcaagcaaccagacacactatgccagtgctgcatagaacgaacagaaaaacgatctagcataatgtcaataccagaatggccaagggaaacatcaggaggaagagactaacgcctcctgggaagggctgatgactccattcgggcgggccaccctgctccaaaaccagcaccaagcagttaataccctccgggacgtgtagcacattaaaccaaccatgtacaggtaaggggcctacgaaaacacaaatgatgaatatacacaacatagacatgacattggtggggttaaggctaagattgagctggataaatgcatattatgtctaaaaggtcaagcatgcagacctcgatacacca

SEQ ID NO: 147748 - DNA, 308 bp, Zea mays
  Clone ID: MRT4577_66274C.1
ctcatagtggcgcaacctgttgagatggtgcggtcgagcctgcccctgccatccactgtcgcttcctctgtgccctgtgatttcatgggacttggtgggcctcccgttgacccgatgtagctgctataaagtgaagtgtccctcaggcagggagagggctcacagagtctcctctgtacgtggccatggccagacaccccagtcccttcaccaccacctgctccccacgccaccaccactggggtggctgtttgtaaaaagtaaagttcttagagggtcataggtctggacactccatccttgccaaa

SEQ ID NO: 147749 - DNA, 802 bp, Zea mays
  Clone ID: MRT4577_66275C.1
cccacgcgtccgatcgatgaactgccaataaatcccacccccatcttatggaggacgttgctttctgcttgtggaggccatggagatgtcgaacttggcaagcgtgtctttgagaggattcttgagctggacgattctcatggtggtgattatgtaatattctcgaatttgtgtgcaaacactggatactgggaagagatgaatagggtaaggaaactgatgagcgacaaaggtgtggtaaaggtgcctggctgcagctcaatcgagatagataacacggttcatgagttcttcgcaggagatggaaggcaccccaaatcacaagaagcacggaaaatggttgatgaagtgatcgatcaactaaagcttgttggttatatccctgatacctcacatgtgtttcatgtcgaaatgggtgaggaggagaaggcggtaagcctaaaataccatagtgagaagctggcaattgcttttgggcttctaaatactgctccaggggctacactgcgtgttgtcaagaatctccgcgtatgcccagattgccactcgatggcaaagtttgtctcaatggtcttcaataggcgaattatactcagagatctcaatcgcttccatcactttgaaggagggatctgctcttgtggtgactattggtaaatttgtaggaacaaaattcttgcacctcgatatcttgtattgcaatgccttccactcaggttgtggtgaatctgtatatccatggaaaacctactgacgactgatgattctttctatgaatattattggcactgaatgataaatt

SEQ ID NO: 147750 - DNA, 853 bp, Zea mays
  unsure (1)..(853): unsure at all n locations
  Clone ID: MRT4577_66276C.1
ccggccgggccttctctaatttgtgaatgatagtatctttgcttgtgtgtgcaggttgcaagctggggtgcttatcttatgaataggaacatcatcaccatgtcttttgcgccaagggattcacatgaggcacaggtacagtttgcattagagcggggggtaccagccatgattggagtgatggggactgagagaatcccatatccggctagagcatttgacatggcacactgctcgagatgtttgatcccatggaataagcttgatggtgtctatctaattgaagtagacagggttcttaggcctgggggctactggatcctctctgggcctccaatccattggaagagacactaccagggctgggagaggacagaaggagacctgaagcaagagcaagatgagattgaggacttggcgaaacggctctgctggaagaaggtcgtagagaaaggtgatcttgctatatggcagaaatctatcaaccacgtagaatgtgttgacagtaggaaggtttatgatgctccgcagatttgtaagagcaatgatgtggattctgcttggtacaagaaaatggacacttgcatatctcctctcccagatgtgaagagtgaagatgaagttgctggcggagtccttgagacatggcccaaaagagcatttgctgtccccccaagagtatcccgcggntcagttccaggcctcacccctgagaagtccaagaggataacaaggtgtggtcagagagagtggatcactacnagaaattgattcccacactgggcaaaagacgatacaggaatgtgatggacatgaatgcngggggataggtggctttgcagctgcattgatg

SEQ ID NO: 147751 - DNA, 317 bp, Zea mays
  Clone ID: MRT4577_66277C.1
gcataacaggttgggttacccaaaaagatcaatcctaggtcgttgttaccggccgaagggctggccaatcctgaattctggcccacgcaactctttaggttcctttacaacacgcatggatttaggtttccacagcaaacaaccaggggcgggggcagcaggtatccttatgccccaacgttttaggggaacccggggctggggagcaccttttttttgacggggactgcgaggtggtagaacctggtttggaaccggccaacgcccgggaccagcccccgtttgaaacaacccacaatgggtagcattgcgagcct

SEQ ID NO: 147752 - DNA, 1615 bp, Zea mays
  unsure (1)..(1615): unsure at all n locations
  Clone ID: MRT4577_66278C.1
caagactgcagcctgattcgacgattccagaagtgcataacatgcacatatttttgcccaaaaaaaaacaaacacatatatacaaggaaaacgaagaaaaaaattgaacgggcgcatttgaatttaacggctaaacactctgcacagcagctaccacttcctttcagatgccagcactagtcgtcgtgtcacttgtatacatctctgacggaccacaacctgagtctgcaagtgcacaggtaccccgaattcccagccatcagacactagagtatcgatcgagaacacaacaggagcacataaaaacaggacaacaaaacaatcctactgccaagagaatggcagtgcctgtgatggatcctcaaacatagcatcaggaacaaaccacatggtggccagcactggccgcgaatgcagcagtggccacagctgccgttgcagcctgcgacacggcagcggcagtggtcgaagaggcagtaacctggggttggccaacggcggggacgccagcagttgaggggcgacgcagcgacgatgacagaagagagagagcacactcggggcccagtgtgccggagagagcgttgtcgcgtgtgctgcttccagtgtggctgctgctgccttcagcgtgatggccagggcgggctgcatggaggtggtggagcacactgctaccgccaccctgtccctgtgggtgagggaactcgtctggtggtgttcttgagaacgatatggagaagggctgctgacggcccaccaagtgcacggcgtccgaattctggccaactgttggaattgtttgtgggtagaactcaaactgattcacttggnggtatggaaagaaaccccctagatttgtcagatcatgctgtggctttcttcgacgcctattatggccatccagacgcttccggcaacttcttttttcctcgtcaaactcggacagcatgtgaaaccggctgcattgctggcagaagcgccgctcctgtccgccgacgaccaccaccggcgccttggagtgtgcctcacagaccttatgaagccggtggtactcgcggcaccggctgagatcagagcggcagccgtcgacggagcacgcctccgcgccggcacctcccacggccgcgcgggacctcctcccggctcccggcgccgccccagtcggccgcgagctctgggcaagacccgcggcgaaatcctggagccgcacctcggcgtcggcggcggaggaggacgggcctgcgaaggacagcatggtcggaccggggtccgtcgccgccgcgccccacgacggagacccggacgccgctgcccagtccatgccgccgccggcgaagaaggaaagaaacgcctccgcctgctcccaaacaagaaaccttcaagacggcgaggacaagttcaggaaaaaattcctctgcaagaaacaaacaaatagccaagagaggagcatccacgcaagaaggcccgcaggatgtgcaataaagctaccgcaagagaagatatacgtatggcgcgaagcagaaggtggctattcaagtgcaagcaaaacagaaggggatgaggcagactgcaggcaggcaggcaggaggagctcggtacatacaatcggagaaag

SEQ ID NO: 147753 - DNA, 829 bp, Zea mays
  Clone ID: MRT4577_66279C.1
cggccgctcaggcggcgggcgggtttcgaacgactcctggcgaacagctcatgctccacgctgatcccactcactcgaccgagccaacccaaacctccaagatttaacgccgccgtcttcaaaagccacccacagggatccctcccattgtctctcttctcctcgatcgatccgaagatggcttctgctgcccgcgtgctgacgccaatggcgctgctgctctcgctcgcgctccagctcgcggcggccgcggtgtcgccccccggtcccagacccaccttcccgggcgacgcggccgcactggcgtcgctgaaagccgccgtggacgccgccaccgtcccgtcctactcctgcctcgcctcgtgggacttctcccgcgacccctgcgccgccttcccctgcggcgtccactgcaacacgccccccaactcgtcccaccagcgcgtcgccggcgtctccctcgaccccgcggggtactccggcacgctcccggcgcccgtcttcgcctcgctccctttcctccagaccctctccctccgtggcaaccgcttccacggctcgctgccagcgggggtggcgctgcctccgagcctccgcgtcctcgtcctctccggcaacgacttctccggcgagataccgacgtccctcttcaccccggcctcgtcgctcgacgagctcgacctctcccgcaacgcgttcaccggagcgataccgcctcagatcgcgtccttgggctccctgacgcgaatggagctgcagcacaaccgcctcagcgggagcctgccgtcgatgggcaagatgcgctcgctcgtccacctcgacgtcagcg

SEQ ID NO: 147754 - DNA, 524 bp, Zea mays
  Clone ID: MRT4577_6627C.1
ccgggccgggtaccacacctatgatatctcacaggcttcatacaacacagcaagccaggcacatcatcttcaacctcaacggcaggcctaccaagagaccatcctgccttgctgtcgtctcttgcactatgtgcgagcgccgcaactgcgatcattcattgacaacgccaactcgtttctagggcgacaagtccacagattcctacccccaactactcaaatgtactggctacacgaggccgtgccagcctgtatgctacggcacgcagcagcgactggccaacaaccacatcccctattgcagcagccacaactagcgaaggtatatctacaaagcatcgccatcacaaccgctacagcagcagcatgcttctaccaatactgcaccacctagccgtgaaccacgctgcctactactagcaacagcagttgcttgcattaaacccactagctgtggcgaaccttgctgcttactatgcccgcacaacagctgctaccattcatgccactggtcaggagccctg

SEQ ID NO: 147755 - DNA, 756 bp, Zea mays
  Clone ID: MRT4577_66280C.1
ctggccgggttcgaagatggcagatgaacttctgtggcgtatccagaggctcttttttctaaatggtgatcaagatctttcttcatttctattagtggaatttggtatagtgaagtttccagactatgtttgcagcatctcccatcgcatttttcaagaaagaaatgatctacttgagtacgaagacgctattcgagttgctcaggtgatggatgaatcccttgataataataaaatggacttggtgacaagatgcatcgatttatctgagaatcgattatgcattatgccaaaacgagaaaacacaattacacctgaacgtctccgatcattcttttctcgcttttcagcgtcctgggtctattcgaaaatactcacattaggtgtctctgtttatgaaagagaccgcaggtatgaagatgcagtcaggattctaaagacactacttagcacagttgcttgtgatagacggcgaggatattgggcattgaggctatccattgatttggagcatatgggtcgtccaaatgagagcctatccacagctgaaggaggggcaactgatccatgggtccgtgctggttcaaagttcgctctgcaaaggagagttctgcgtttaagcaaacctccacgacgctggaaagttcccagttacgctgattatgttaagagaaatataagagaggtaagcattgaaggaaggccattgaattgcgagacaggagcaaagaatgtattttacggttacgatgggga

SEQ ID NO: 147756 - DNA, 214 bp, Zea mays
  Clone ID: MRT4577_66281C.1
cctttgattttttttgtgtgtgaataaaataaggtttgggggagtgcgccttggatgtggtgagctgcggggtcctatcaacgacgcaaatgctcattaggcaggcttgtctgtcagcgtttaaatatttcacagcggccgagggatccatgctcactgtggaaaagaaggacctgggttcgggtgctcatctaggacaacatccgcacggcaa

SEQ ID NO: 147757 - DNA, 350 bp, Zea mays
  unsure (1)..(350): unsure at all n locations
  Clone ID: MRT4577_66282C.1
cccccccncgcagagcaagaaccccgccacgaaccgccgacacgcgagcgcgggggagcgcacgaggagaccccgaggcccggcaacgggggacggccaagacaaggccggccccagcacgcgcagccgcgcgggcaagcgggggcagacagagcacacgcccacacgccgccgaaaccgggcagaccaccccaggcaccagggggggcagcggnacacggagccccaccgagaagaagccgcccgccagaaggggggaggaaacaaacgagcaaaacacccaggcgcgagcaccaaaaacgggaggcacccacagaggcggggcgccagacacacgcgccacgaggaaa

SEQ ID NO: 147758 - DNA, 615 bp, Zea mays
  Clone ID: MRT4577_66283C.1
ccggccgggtctctcctctctctcacccgaatagaacgccgtcgtgcgcctcctccgccaccgtgccgccgcccgcgaccgccgctgcccgccccgcacgcgccgtcgatcgttccccgcgccgtccgccgccctacccgcacgtcgccgaccgtccccatgccatccgtccccgtgctgctcgcccgccggcctgcccgccactccgccgtcgtcgtcgagccgccgcatcgagagaagaggaacataatgtctatgctgctaccatgcgatacaatgtcgatgaggaacctcctgtcagtgatctcaacattttctaatggagaggcacaagcactagtaagggcacgttctaccaccttagcatggatgaaagaatgtccgcattgctatacatgtactgtaatatggaagagatggatccatatttcattaagttcgacgaggaaaattggacttattcccataagcctacaagcaaacaactagatacgatgcgatgacatgggaggcaaggaagacctaattttgttgactggtttcgcgagcattgcacaaagactcctaacatacacgaggacttgagacacaaaaaaaaaaaaaaaaaaagcggcc

SEQ ID NO: 147759 - DNA, 2073 bp, Zea mays
  Clone ID: MRT4577_66284C.1
atggatcctaagggaaaggggatggtggtcaacgacaaagagaaggactccatcttcaacgagccaagagatgacaagcccactgactcaggctcgagtcacaagaagaaggacaggaagaagaagaggcgcatcaagaagatcatctactacgacagtgatgcctcctcttcttcaccaagagatgacgacgacgacaacgactcgtcgccgaaaaagaaaatggttaatcaaaattattcttttgattactcttgcattccctacaactcaaatgctcatttgctttctattcctcttggaaaacccccacactttgatggagaggattactcattttggagccataaaatgcgtagtcatctgttttctctccatcctagtatctgggaaattgtggaaaatgggatgcattttgatagtacagataatcttatattcattaatgaacaaattcataagaatgcccaagctactactgtcttgttagcttcgctttgcaggaacgaatacaataaagtaagtggcttggacaacaccaagcaaatctgggacaccctcaagatctcacatgagggaaatgatgctacaatgatcaccaaaatggaactggtggaaggcgagctctggagatttgccatgatcaggggagaagagccaacacaaacctacaacaggctcaagaccctggtcaacaagattagaagctatggaagcacaagatggacagaccgcgacgtcgtccgactcatgctcaggtcctttacagttattgacccccatcttgtgaatcttatccatgaaaaccccaggtacacaaagatgacgcctgaggagatactcagaaaatttgtaagcgggcgcatgatggttaaggaggcaaggtatgtagatgacgccttaaacggcccactgcccgtctacgagccacaacccattgcgctcaaggcaacaagcagcaaggaggcgctaccaagcaaggtagcacaattggaggctgccgggctcaacgagaatgaaatggcgcttatcatcaagcgcttcaagaccgcacttaaaggacgcaaggagtaccccaacaagaacaaaacaaggggaaagcgctcctgcttcaaatgcggtaagactggtcactttattgcaaattgtcccgataatgagagtgaccagggacaagaaaagagcgggaaggagaaaaagaagaactataggaaggctaagggcgaggcgcacttgggaaaggaatgggacttggactgctcctcttccgactccgacgacgaaggactcacttcctcggccttcaacaagtcttctctcttccccaacgaacgccatacatgtcttatggccaaggaaaagaaggtacatgttcgagatacccctaagtacactacttctagcgatgatgattcttccgatgatgacgtagattactctagtttatttaaaggtttagatagagctaaagtagagaaaattaatgaattaattgatgctctaaatgaaaaagatagattgctagaaaggcaagaagatattttatatgaggaacatgacaaatttgttagtgtgcaaaaatcccttgccttagaaactaagagaaatgaaatgttatcttctgaattgtctatttgccatgaatcggtctctagtttaaatagtttaaatgatgaactaaatgctaggctagaggaagtcaacaaaactagttcatgtgtagagcatgttgtgatttgtaatagatgtaaaaattttgatgttgatgcttgtgatgaacaccttgcttctattactaaattaaataatgaggtggcaagtctgaatgctcaacttaagacttgcaaggttgattacgacaaactaaaatttgctagggatgcctacactgttggtagacacccttcaattaaggatggacttggttttcgaaaggaaaccaagaacttaacaagccaaaggactcctgttctcaacaaggagaaagggaaggcccctatggcaagtagtcctcaaaggaaccatgcttttattatgataggaaaattgctagtcgttctcattacaataaga

SEQ ID NO: 147760 - DNA, 298 bp, Zea mays
  Clone ID: MRT4577_66285C.1
aaaaaccagttgttgataactaattgcagacaagtcattggaaaacacaaaaaaagccaaagccttaaccggaatcaaaaaaagggctaaaggggcagggccccaaaaacttgcacagaaaaaatccttatctccggggccccaaaaacccctaacaggggcccgaaatacctctcacaagaaaagggggggcccgcaaccccaaaaagggggcccgcccttcctgggaggccccccgaccgggccgtacacaaggggggccctgacctgggggttgccccaactgaaggggggcccc

SEQ ID NO: 147761 - DNA, 1161 bp, Zea mays
  Clone ID: MRT4577_66286C.1
cccacgcgtccggttcaggagagccttattcatgcaatggagactggtaggtacaaggacttgcatgggggacgagtgactgatcttaatgactcgattgtggtgttgtctacaagaatgatccaaggatgccaggatgcttctcttggggtggaagagggcaatgctttttcagaagaaaaggctgtggcagctcgtgggcatcaactgaagatcatagttgagccgggcacaaccaacatcggtggaggcaacgttgtagtttcgtcaaggcattccttgggaagcagtgaagcctcaagtaagcggaagctccacatctctgatgggcaagaaaagacagaagaatcggcaagcacttcaaagcgactgcatagaacatcaagcatcccattcgacttgaacctcccaggcgacgatgaggaagcccatgatgatggtgatgatgacaagagcagtggcagccacgaaaactatctagagggatctgtcggaaacctcttgcgttgggtggatggttcaatcaatttcaagccatttgactttggcaagctttgtgaggacatcctgcaggagttcagcaatactaccagcaaaattctgggcaccagggggtgcaggctggagatcgacgctggggctatggagcaggtagtggcagcggcatgggcatccgattcgcatgagaatgagaagaggcctgtgcggacgtgggtggagcaggtgtttggcaggagccttgagcaggtcaagatgaggtgtgagaatctgagcagctgtaccctgagactggtttcctgtgaggtgaaagaagatggttttggagctttgcttccctcgagaataattctggattggtgatggtgatatgtgtcgtttgcattattgctgctagctatctagctgtaagtattggttagttagctgacaccacccaccgtactgtagcatatataggttcatatcattatttggtggcttcaaaataatgtaattaagctggagtatgtacgtacggtagtctagcaattaaactactcgttcaagtccatgacctggggatggatggctgtatttattgttgctcctgcgtgtatatatatatttgtaagaccgacgtgatggccttttcatgtggaattccatatactgatgtccttt

SEQ ID NO: 147762 - DNA, 262 bp, Zea mays
  Clone ID: MRT4577_66287C.1
gccgccaccaccaccatcagcccaccaggccaacaccatcagctactgctgcgcgcctgctcttcgcctcgcctccctccagtctccaggaatccatctcccccattgctcccgtgcagcagccacctgcactgtgctgcctccttcgttcgtctcccggcctccagtgtcctcggttcccgcgatcctccgtatgctgatacctcatttgcgtatctgaagcgagggctatgaagttaaggacaaaacgtccagaatggaa

SEQ ID NO: 147763 - DNA, 351 bp, Zea mays
  Clone ID: MRT4577_66288C.1
aaccttctgctacccaccaatataaacagataggcccacccagcacggcccaagaccacggggaataagggcaacgccgacgggccatatgaagagggcatcagcccatgaggacccccgcgttcctgaacttgaacctgacggccaaaaacaggaagaagaggaagttgatggggctgagcacgcacatgacccagaaaaacctcccgagggggaaggggtccaggctggcaccctgcaaccacggccgggggtcgccgcgccctgccgcgctgttgacaatggacaccagcaccgagctgagggaatatcccagcgccagcgacgcccacgacagggacgtcgccaggg

SEQ ID NO: 147764 - DNA, 2075 bp, Zea mays
  Clone ID: MRT4577_66289C.1
gggtacctcgaggccggccggggcgggctgtggcctagccacagccacgtcagcaatgtcgaaaccaaccccactccacgtctcccccaggattgaagggaggaatcaaagccgccgggagctcggcgtcaccgccgcgagctcgacacctcgacacctcgtgccgccgcagcgcttgctttcgtcccccttacgccactcccacttggccacttcagccaccatctccctgaagctagtggctaacctcctcaccgccatgggcacccctctcctcatcccccttctcgtcaccctccagctgttcactacctcctcccccgcggtcgcgtcgtcacacatctccgccatcatctcgcagtcgggcctcgacttcgccaaggacctgctcgtatcccatgccgttgcgaccctcacgcccatgaacgtgccggacatcgagaggaccatgagcatacccctcgtgggcaccgtccgcatggccgcatccgggattgtgctccacggcctcgccgtcaccaactccaccgtcgctgtgggggacgcgggtgttgtcgtggccgcctcgttggccagcgcgaacctcaccatggagtggaactactcgtatgacgcctggattgtgaccatatccgacagcgggaatgcttcggtccaggttgaaggaatggaggttggtgtttccatggtcatgaagaatcagaatggatctatcaagctgtctgttacagaatgtagctgttatatggaggacttggacataacactaaatgggggagcatcttggttctatcaagtgtttatagatggtttcagtaatcatatcatatcatcggtggaaaatgcaattaagaacaaagtaatggaaggtgcactgaagcttgattctttcctgggaaacctcccaaagaaaattgatcttgatagtgttgctgcaatgaatgtgactgttgttaatgatccaatattcaagagctcctctgttgagtttgatatagatggcttgtttattccatctgatgaaactgctccgagagacatgcgtcttggagatacccaatttgcattacctcttgggagctcctcaaaaatgctttggatttcattggatgaagatgtcttcaactccgtttcagctctctacttcaaggctggtttgctgcaacggatggtggacaagattcctgatcagttttttctgaacactgctagctggagatttttggttcctcgattgtatcgagagtttcctgacgataatatgctactgaatatctctgcagtttcgcctccctctgtgagaattaatgtgggtagaattgatgccacagttgacttagatataacggttaatgttttggattttggtgagatagttccagttgcatgcttatcagtgtcggttgatgtttatggagctgcagcagtatcagagaataatcttgttgggagagtggaattggactatttctcatttaccttaaagtggagcaaagttggcaaactccacaccattctagtgcagactgtgctgaggattttgctgaaaaaattgtttgtaccatatgtgaactcgtatctcaagcatggcttccggttgcccatcatcaagggtttctccgtcacagatgcatatatcctcacttcttactcaagaatgattgttagctgcgatgttgccttcattgagccagaggttctgtctcctgtccaagagtccaacaccaacgaagatttgtcatatgaggttctgtctcctgtccaagagtccaagaccaacgaagagttgaccaacgaagatttgtcatttgaggttctgtccagtttactgcttggatctgccaaaacatcgcaaccaacagcgtaaaattcatgtaaatagtaaagctattcatcagtttattgctttgtaaaatgtgtaaataactgtgtattgtgtgtgtagttttttttaaaaaagtttaccatgtccctacatgagagcacctttctttttctttttcttcagcctcacgatcagacttcttattttgcttcgcttctctatgaatataagattggcagaattcctaccc

SEQ ID NO: 147765 - DNA, 399 bp, Zea mays
  unsure (1)..(399): unsure at all n locations
  Clone ID: MRT4577_6628C.1
gccccaggttttataaaaagcgccgtgcccccgagtcagaatcagaggancccctgtttttttagggggggggggcgcgagcacgccactctccctactccctccctctctctctatctccctctctctagcaccccatagcagcagcaacccgccctccaatgtgcagcgtcgccaccagagcacctcccaagcctcctctctcacgggggggttttttttttttgtttttaaacccctcctctacggcggggggggggggctacccaagaaagaatcatccgagccacgtcagcggaggcgtaacaacaacggtgcacggccggaggaccgacctgaacgatgatcggactctaacaagcggatgccccgcccgagcaaaggaccctccccgcaaca

SEQ ID NO: 147766 - DNA, 474 bp, Zea mays
  Clone ID: MRT4577_66290C.1
ggcctcgcccacctcgccgcgctccacgccgcgctcgccgagctcctcgtcctccctgagccccgcgccgcgctcgctaccgccggcgccaccgccttctcggaccgcctcctggacggcctcctggcgctggccgacgcgcacggcgcgttccgggagacgctggtcgacctcaggcgccacgccgccgaggcccaggccgcgctgcgccgccgcgacgcggcgcgcctcgcgtcggccgtccgcgcgccgcgccgcgccgagaaggggcctcgcccgcctcgcgtcctccgcgcgcgcagccgccgctgccagctgcaggctgccactgccagcggccaccgccgccgaggtcgaggtgtccgggctgctcgccgaggccctgggcgccgcggcgtccgcgtccgcggccgtgttctccgcccttgaggccgagtcgttcgccggcaccgacgtcgccgtcgcgtctgccgt

SEQ ID NO: 147767 - DNA, 641 bp, Zea mays
  Clone ID: MRT4577_66291C.1
gtatctgtcaatcccctcatgctcctgagaccggccctccccgtcgccgtcagttccactctcccactcatctcccatctcgccgccgtccgccgtcggtgctcaatcgccgccacgggcatggccggagtctccgccgcctctcctgccgcagcacagatcggcagcttcctctccaagaagccctacgcgccgccgtcctgggcctcgcacctcgccctcgccccatcccacactttctcccttggccacttcccgaccccgattcacaaatggaatctgccaaatctgccggagggcactgaagtatggatcaagcgggacgatctatcgggtatgcagctgagcggggacaaggtccggaagctcgagtttctgttgtccgatgccgtcgcgcagggtgcggactgcgttatcactgtcggtggtatccagagcaaccactgccgtgcgacggcggtggctgccaagtatctcaatcttgactgttatttgatactgcgtacttccaagcttcttgtggatcaggaccctgggtttggttggcaatctccttgttgagagactcttgggagcgcacattgatctcgtctcaaaagaagagtatgggaaaattggcagtgtggctttagcggacttgc

SEQ ID NO: 147768 - DNA, 277 bp, Zea mays
  Clone ID: MRT4577_66292C.1
cgtgggtcgacccgggcaggccggccgggtgcctgcggcgtgccagccttcgcgactgcgcgcgccctagccgtccagggcgagagcacgtctgcctcccggcggctccttctacgctggcccccaccccgcatacgggccaacgcgcccagtacaccgtaagaggggagggggtggccgccgaacgggctgttcctctgccccaggtcgcgcctgcaggggacgaagaaagcgcaacggtctaccgactgccacgcgagcccccagccggcgggac

SEQ ID NO: 147769 - DNA, 560 bp, Zea mays
  unsure (1)..(560): unsure at all n locations
  Clone ID: MRT4577_66293C.1
ccgggnncgacccgagcgactttttttctcgggcctcgcccacctcggcgcgctccacgccgcgctcgccgagctcctcgtcctcccggagccccgcgccgcgctagccaccaacggcgccaccgccttctcggaccgcctcctggacggcctcctggcgctggccgacgcgcacggcgcgttccgggagacgctcggggggcggaggcgccacgttgtcgaggcccaggccgcgctccgccgccgcgacgcaacgcgcctcgcgtcggccgtccgcgcgccgcgccgcgccgagaagggcctcgcccgcctcgcgtcctccgcgcgcgcagcagccgccgccagctgcaggctgccgctgccagcggccaccgccgccgaggtcgaggtgtccggggtgctcgccgaggccctgggcgccgcggcgtccgcgtccgcagccgtgttctccgccctcgaggccgtctcgtccgccgccaccgccgccgccgccgcgtctgccggctcctccaagaaaccggcggcgacggcgacgctcatgtcctttgtcaccaggagcg

SEQ ID NO: 147770 - DNA, 401 bp, Zea mays
  Clone ID: MRT4577_66294C.1
gatgccatcggggtgttccgcgaaatggtgtggagcggggagcggccgaatgagttcgggttctcgtgcgtggtgaacgcgtgcacgggatcgagggatttggaggctgggaggcaggtgcacggtgcagtggtgaggacgggatatgaaaaggatgtgttcacagcaaatgcgctggtcgacatgtactcaaagctgggagacattgaaatggcagcagcggttttcgagaagatgcctgcggcggacgtcgtctcatggaatgctttcatttctggctgtgtaacccatgggcatgatcaccgtgcactggagctgctactacagatgaagtcttcaggactggtgcccaatgtgttcaccttatctagtgttctgaaagcttgagcttgtgcttgtgc

SEQ ID NO: 147771 - DNA, 290 bp, Zea mays
  Clone ID: MRT4577_66295C.1
atgtaaaaagagaagacatttttttctcacaaatttcggggaaacaatgaagaaaagaaactcctaaactatagtgatctattaggacagctcacaaacgtttgtgtcaccagaaaaagaaagaaagaaagaaagaaagaaagaaaaaggtctcaggctcaaagcttgcgcgcgagctggatgagcaagttggctttcctctgcgccctgctggtgccgttcttggcgaacctggagaggtcctcggggagtccgaacctgagcccgtgcaccagcagcggcctgttgtt

SEQ ID NO: 147772 - DNA, 284 bp, Zea mays
  unsure (1)..(284): unsure at all n locations
  Clone ID: MRT4577_66296C.1
cccagaggtcggtttttggttgcatttagatccctcgacatatatttgatgattatgttcatcgaatttcgttgtttacgtgtgttcatgcanaatcaataggcaatttcgtgtagactatgaagttggtaaatgaggtaacttctgctgtatttcactatgtctttttatacgtcctggacgatttgccacgctgtttgcatatgtagagatggagtactggangtcactggagggaccattgtatctgctcgagaggtcttcgctttgtctccggcacccaa

SEQ ID NO: 147773 - DNA, 272 bp, Zea mays
  Clone ID: MRT4577_66297C.1
cgtccgggcggtgcaagaggctacttttgacagggtggccaagatatttgacatgggggacgtaaagatccaaatgcatattgcactggctgtgccagaggagaggccacaagcccatgctgtagctagcgctagaggatggacggaggaactgccagctcgtgctgctgatgcgatgccgagatagcctggaggccgcccacgaagaagatataaaggtcagaggaaaccgccctggacggtcgcattgatgctgataaccatagaaggta

SEQ ID NO: 147774 - DNA, 300 bp, Zea mays
  Clone ID: MRT4577_66298C.1
ccgacccacgacccacgcccacgcccacgcaaacgcacactcagcgtccccttaaaacgatcaccacccacaacacgggcaggacacaatacccggggcgacgcccacacgaccaacaaaccggcacacacaccgcagatccaaacacataccctaccacacagacaaaaccgcgggatagaagatgacccccgccgggcacaaccacaaccccccaacaagacacaccgcgggaccacagcagcaacgtgctacaacaacaacaccaacaaccgcgctgaacggcaacaacacaaagac

SEQ ID NO: 147775 - DNA, 264 bp, Zea mays
  Clone ID: MRT4577_66299C.1
ggggggggaaaaccctctaaaatttttccaggcttacccttaaacaggaatgggtccccaaaattggggggaaaggcgggcccatgtttttagcctaacaggggggccctaaactattaaaccctatcggccaacgggcaacttttaatgggaaaccccagcaaaggggaccagatccaacccggggtttctaaaccggcccgggtcccaaggcaaggggaacctccagggatctttacccgggggggccccttggcttttttg

SEQ ID NO: 147776 - DNA, 117 bp, Zea mays
  Clone ID: MRT4577_6629C.1
tgatcctgttttaaggaatgttgctcacctcgcaagttggcaggttataagccggttgaagtatcaggttatgtggttgaggatgatgacttatttgcggtccagaacaaatcttat

SEQ ID NO: 147777 - DNA, 762 bp, Zea mays
  Clone ID: MRT4577_662C.1
gcgttcgcttgtttcactgattcttgaagagatcgagcttcttttgcaccacaaggtcgaggatgtcttgcaactgcggatcaagctgcggctgcggctcaagctgcaagtgcgggtaatatatacataataatatataagtgcaccgtgcatgattaatttctccagccttcttcttgtcttgtctagttaatttcccttcttctttatttatttttttccattgcaaaacaaacaaacaaacaagaacaaagttaatttggatcgagtagttcaatccatttgcgcgctgtcctttttcagcaagaagtaccctgacctggaggagacgagcaccgccgcgcaggccaccgtcgtcctcggcgtggccccggagaagcaggccgcgcccgagttcgtcgaggccgcggcggagtccggcgaggccgcccacggctgcagctgcggtagcggctgcaagtgcgacccctgcaactgctgatcacatcgatcgacgaccatggatatgattattatctatctagcttgtggtggtggttgaacaattataataagcgaggccgagctggctgccatacataggtattgtgtggtgtgtgtgtgagagagagaaacagagttcttcagtttgctctctctctctctgcatgcttggcgtcagtctttgtgctcatgtacgtgtgtctggttgatccgattgcgtctgctgtaaccatatattaattggtccacgatgatatgatttgatactatatatatact

SEQ ID NO: 147778 - DNA, 251 bp, Zea mays
  unsure (1)..(251): unsure at all n locations
  Clone ID: MRT4577_66300C.1
aaagaaaccagacactnttctattttttctttatgacactgtacactataccagtcggttattaaaaatattagcccacctataatacttttactcaaaaagctatcactaaacttaataaatattataccattttctattagaatttcctatccaatattccaaaattccctattaatgataaaaatcactaaatctttaataaagtattttctattaatcaacatctacattatatcactagctatcac

SEQ ID NO: 147779 - DNA, 720 bp, Zea mays
  unsure (1)..(720): unsure at all n locations
  Clone ID: MRT4577_66301C.1
atgcgcttccagccttatttttacatggtatacagagcctactacttccacacatctagatcatgtcatcttcctcctctcctcacgccatggccatgccctcgcttgcctccctcggccacaccatcacggagaagcttacccgtgacaacttcctgatatggaaggttcaagtccttccgcacgtcagggccgcggcgatgacaggctaccttgatggcacgaacaaggagcctgctgctgtcatcgtcaccgagaaggaggccaacggcaagaaggagatcgtcgagacgcccaatccggagcatgcgatctgggtcacccaagatcaacaggtgctcacgtttctgcttgcgtccatgtctcgtgaagttttgatgcaggtgtccaatcacaccacggccgcgggtgtctggcaggctctggtcgagagtttctccgcgcagtccagagcacgtcagatccaactccgtttggcgatcggcaacgctcgcaagggcgatctctccgcttctgcttacttcacgaagatgaagggacttgcagacgagcttgctgctgcaggaaagcccctcgaggaggatgatatcgtctcgcacatcctcgagggtcttatgcatgagcccgactacanacggttcgttacctccatctccacgcgtgctgccaccgatcggncgatcggtctcaatgaacttttctcgctgctgctctctgctg

SEQ ID NO: 147780 - DNA, 448 bp, Zea mays
  Clone ID: MRT4577_66302C.1
ttttttttttttttttggctcgaatgtcacatctttactatataacaggagttctatacaaaataaataaataattacattataaggagacaacggtccagcaacccacagttgactgggagacgacgacctagatctctcacgaacacatcgcagcatcctccatgcgcctcatcctgtggtacctgttcttgaccaaaatttaggcagcaccggacgccgaccgcggatgtgagcggcttcacgacgaagcgcgatcttcgacgaagaattgcccacgccacaccgccttccacgcccaatcgccggtagggaatggatgcacggttgcccccacaaacgtccctggcgctaacttggtctccgcaggcggattcgccgagatgcacatgcggcggcggcgaaccaagacggcgcccgcaacccgcactctctctccccgagtata

SEQ ID NO: 147781 - DNA, 789 bp, Zea mays
  Clone ID: MRT4577_66303C.1
gctcctctatcatagggatatatggatataagacgtgatttccatatggccgaaggggaaggagaatggagctactccaagaattgtaggcgccagcaagtagctgtccgcgagaccaggccaatggtcgagactgccgtcaagcaggtgtacgcagctctcttccccagaaccatggtcgtcgccgacctcggatgctctgcagggccgaacacgctgctcttcatctctagcgtcctgagcagcatcgctgctgcggctgctgctgaacggtgcaagcaggttgtgaaagggtcctcctcctcctccctactatgtcatggggctaccggagtcctattacaacaggctgtttcctcgtcagactgtgcatctgttccactcctcctactgcctccactggcgctcccaggaacctgagggactagaggcgtggagaaagccttgcctgaacgaggacaacatctacatcgcaaggagtaggaccacgacaccttctgtggcgaaactgttccaggagcagttccagaaggacttctccctcttcctcaagctgcgccacgaagagctcgtgcatggagggcgaatggtgcttgtatttctcggcaggaagaacgaggacgcgtacagtggcgacctcaaccagctcttcgcactggtcgcaacagcgttgcagtctcttgttttgaaagttagttatattagttgcatatatatgtatgtaaatttttcttgtaatttttttgcttaattgttttcactaattaatctgtggaggaaattaaaagc

SEQ ID NO: 147782 - DNA, 1492 bp, Zea mays
  Clone ID: MRT4577_66304C.1
ttttttttttttttttttaatccatgtataataattgtataccagtatacgtatactgcagtacacatactatgcatgccaactggttttagtacgaccgtaccgtataatgcatgcacacatatactcaattgtacgtgtcccatgaaatacacatgatatatcacatatgagtatattagctacaccgtacgaaatacaatacacatacgtatatgtatatcgatacatctatatcactctttcttcaagcacatggcgaaggtagtgaacttggtcttctccttctcgaggtgctcagcgacaaggcgcctgaactcggcaaaccatgcatcaattatggcttctccaaaatggcggacaattaaagacttcagcacggatctgatgtacttggcgacattcatgctgctgcgagcgctgtcctcgacgacgtcgtcaccctccgagtcgtcgagagggtcccagttcatctcgaactgcttgatcagatccatgctgaacagaccgctctgcgtgaccagatcctccacttctcccaccgacggcccgtagatcggtaggttgaaagactctagcttttccttctccacaaggcccttcaaaacaagagactgcaacgctgttgcgaccagtgcgaagagctggttgaggtcgccactgtacgcgtcctcgttcttcctgccgagaaatacaagcaccattcgccctccatgcacgagctcttcgtggcgcagcttgaggaagagggagaagtccttctggaactgctcctggaacagtttcgccacagaaggtgtcgtggtcctactccttgcgatgtagatgttgtcctcgttcaggcaaggctttctccacgcctctagtccctcaggttcctgggagcgccagtggaggcagtaggaggagtggaacagatgcacactctgacgaggaaacagcctgttgtaataggactccggtagccccatgacatagtagggaggaggaggaggacccctttcacaacctgctgcccttctgaactcctcctcgactgaccgaaacaggtggttgaagtcgttgccggggaggtcgttcaggacgaactgaagctccacgtgatggtcgtcatcgtctccgccgccgctcggcggcttgcaccgttcagcaccagccgcagcagcgatgctgctcaggacgctagagatgaagagcagcgtgttcggtcctgcagagcatccgaggtcggcgacgaccatggttctggggaggagagctgcgtacacctgcttgacggcagtctcgaccattggcctggtctcgcggacagctacttgttggcgcctacaattcttggagtagctccattctccttccccttcggccatatggaaatcacgtcttatatccatatatccctatgatagaggagcttgggattatatgtatcaaaatgaattacttgtcccggctcaatgccccccgcgtacctgcccgggcggccgctcga

SEQ ID NO: 147783 - DNA, 541 bp, Zea mays
  Clone ID: MRT4577_66305C.1
cccacgcgtccgaagtaattcattctgatacatataatcccaagctcctctatcatagagatatatggatataagacgtgatttccatatggccgaaggggaaggggaaggagaatggagctactccaagaattgtaggcgccagcaagtagctgtccgtgagaccaggccaatggtcgagactgccgtcaagcaggtgtacgcagctctcctccccagaaccatggtcgtcgccgacctcggatgctctgcaggaccgaacacgctgctcttcatctctagcgtcctgagcagcatcgctgctgctgctgctgaacagtgcaagccgccgagcggcggcggagacgatgacgaccatcacgtggaagttcagttcgtcttgaacgacctccccggcaacgacttcaaccacctgtttcggtcagtccaggaggagttcagaaggccagcaggttgtgaaagggatcctcctcctccctactatgtcatggggctaccggaggcctattacaacaggctgtttccttggcagaaggtgcat

SEQ ID NO: 147784 - DNA, 1450 bp, Zea mays
  unsure (1)..(1450): unsure at all n locations
  Clone ID: MRT4577_66306C.1
ggccctaggggccttttttttttttttttttatcccatatacactctaaagctagaaatataatacacatgcgagtagctagctacaccctatgagtaataataatacacatataccatgtgagcaatataatacacatatatacgatccatatgcgcacacacgcatccaaatagatctatatatacttaaccatattattctttcttcaagcacatggcgaaggtggtgaacttggtcttctccttctcaaggtgctcagcgacaaggcgcctgaactcggcaaaccatgcgtcaattatggcttctccaaaatggtagacaattgaagacttcagcgcgggtctgatgaacttggcgacattcatgctactgcgagcgctgtcctcgacgacgtcgccaccctccgagtcgtcgagagggtcccagttcgtctcgaactgtttgatcagatccatgctgaacagaccgctctacgtgaccagatccttcacttctcccaccgatggcccgtagatcggcaggttgaaagactctagcttttccttctccacgaggccctggtcggtaggttgaaagactctagcttttccttctccacgaggcccttcgaaacaagagactgcaacgctgttgcgaccagtgcgaagagctggttgaggtcgccactgtacacatcctcgttcttcctgccgagaaatataaggaccatccgccctccatgcacgagttcttcatggcgcagcttgaggaagagggagaagtccttctggaactgctcctggaacagtttcgccaccgaaggtgccgtcgtccttgcgatgtagatgttgtcctcgtntagacaaggttttctccacgcctctagtccctcaggttcctgggagcgccagtggaggcagtaggaggagtggaacagatgcacactctgacgaggaaacagcctgttgtaataggactccggtagccccatgacatagtagggaggaggaggaggacccctttcacaacctgctgcccttctgaactcctcctcgactgaccgaaacaggtggttgaagtcgttgccggggaggtcgttcaggacgaactgaagctccacgtgatggtcgtcatcgtctccgccgccgctcggcggcttgcaccgttcagcagcagccgcagcagcgatgctgctcaggacgctagagatgaagagcagcgtgttcggccctgcagagcatccgaggtcggccacgaccatggttctggggaggagagctgcgtacacctgtttgacagcagtctcgaccattggcttagtctcgcggacagctatttgttgacgcctacagttcttggagtagctccattcaccttccccttcggccatatggaaatcgcgccttatatccatatatttctatgatcgaggagcttgggattatcagaatgaacttgtcccggcctt

SEQ ID NO: 147785 - DNA, 562 bp, Zea mays
  Clone ID: MRT4577_66307C.1
ccggccgggatccacctcctcgacactactaaatgccatccgcgtgcccaagcttcttctcttctaactcagcaaggcccaccccaagctacggcatgaactgctgcccgcgcgtgactagctcccgccggaatagccacaaggcgcacttccatgtcccagttactccggccaacgtgagctcatggacgtggcgctatcgaccgagctccaccacaagaacaatgcgggttgcatcccgatccgcaaagacgtacgatatgaaagatattgcgcggcatctactatggacgtgagggctaagaggtgaacgcgtaccgccgacattgttgcatcaacgctgagcggatctccctcgaaaatgtgaacgggtccagcgtgaactggagcatccacccttacaatgccatggctacaaagctgaagcttgacaaggaccgcaaggcgctcatccaccgcaaagtcctgtatcgcgccgacgacaaggatatcggcaatcttaatgacgacgatgtcgacgccgatgctgtggtcgacggcgccaatggcgcgagtctccagg

SEQ ID NO: 147786 - DNA, 1678 bp, Zea mays
  Clone ID: MRT4577_66308C.1
cgagcaacctcttctcccctgtttcctctcgtgcgttctccgcaggagcgaggagggctcgcggcagcggcagggtctccggtgtttttgttccagaatctgtagcaaatggctgacggcgaggacatccagccccttgtttgtgacaatggaactggcatggtcaaggctggttttgctggtgacgatgcgccaagtgtctgttttcccaagcattgttggacgcccacgtcacactggcgtgatggttggcatggggcagaaggatgcgtatgttggcgatgaggctcagtccaagaggggtatccttctgccccattttttttttttttttttttttttttgcatgcacacatatactcaattattgtacgtcgtcccatgaaatacacatgataacacatatgagtattaggctattaactaccgtacgaaatacaatacacatatacgtatatatatcactctttcttcaagcacatggcgatggtggtgaacttggtcttctccttcccaaggtgctcagccgacgaggcgcctgaactcggcgaagcacgcgtcgagcacggcttctccaaaatggcggacaaccagagccttcagcacggatctgatgagcttagcgacattcacgctactgcgagcgctgtcctcgacgacgacgcgacgtcgttgtcaccctctgagtcgtcgaacgggtcccagttcatctcgaactgcttgatcagatccatgctgaactgcaggccgctacgcgtcaccagctcctccacttctcccaccgacggcccgtacaccggtaggttgaaagactctagcttttccttctccacaaggcccttcaaaacaagagactgcaacgctgttgcgaccagtgcgaagagctggttgaggtcgccactgtacacatcctcgttcttcctgccaagaaatataaggaccatccgtcctccatgcacgagttcttcatggcgcagattgaggaagagggagaagtccttctggaactgctcctggaacagtttcgccacagaaggtgtcgtggtccttgcgatgtaaatgttgtcctcgttcaggcaaggctttctccacgcctctagtccctcaggttcctgggagcgccattggaggcagtaggaggagtggaacagatgcacactctgacgaggaaacagcctgttgtaataggactccggtagccccatgacatagtagggaggaggaggaggacccctttcacaacctgctgcccttctgaactcctcctcgactgaccgaaacaggtggttgaagtcgttgccggggaggtcgttcaggacgaactgaagctccacgtgatggtcgtcatcgtctccgccgccgctcggcggcttgcaccgttcagcaccagccgcagcagcgatgctgctcaggacgctagagatgaagagcagcgtgttcggccctgcagagcatccgaggtcggcgacgaccatggttctggggaagagagctgcgtacacctgcttgacggcagtctcgaccattggcctggtctcgcggacagctacttgctggcgcctacaattcttggagagtagctccattctccttccccttcggccatatggaaatcacgtcttatatccatatatccctatgatagaggagcttgggattatatgtatcaaaatgaatt

SEQ ID NO: 147787 - DNA, 384 bp, Zea mays
  Clone ID: MRT4577_66309C.1
gggacgcgtgtctggatactactaaggaccgacacagccacattgggcgacctgatgctgtagttctggccacctaccgtagctgtgtgaccaccaatactactcccgttgcaccagccggatatatgaaagctcgcgcaggccaccaccaggagacagccctggatctgacttcgagtgctaaagccaatcagcactagaactacaactatgatatgcaatgaggagtgtgcggagactaggcgaagcatcggccacagcaagcccttataaaggagatatacgcgagactggtctgtactgtgaagttatgcgaccgccataaggaaagatatgtgtacaagaacaaacgcatgatctgattggcactgtacctcaagcact

SEQ ID NO: 147788 - DNA, 492 bp, Zea mays
  Clone ID: MRT4577_6630C.1
attattttcttttttttttttttttctcatgggggcagttaaactcacctggggaatcttcatgtccctggcatacatggcctacttaagaaaatggtttccacctttttgccccctttcaattaactggagaccgtaatagccactcctccatagcataacataccctacacaatattcaagggaactcggctctcacacggcaggaagaccgaaatgctgtacttgcgaccgtaagtaatggtcgactattatacaaccctgcatatgggacgaccatttgagtcacattatacatgagtctacatacagagaagggcgccaaagctctacttttcttctttcgacctgaaagcaggttcctaagtgctatctgaggctgatcaggaggcccgtccatgatgatcccaccaagggaagaaaaatcctcccttggtttctttaagggaaacaagcctgcagccttaaggaaggggaccccacaaccacatc

SEQ ID NO: 147789 - DNA, 479 bp, Zea mays
  unsure (1)..(479): unsure at all n locations
  Clone ID: MRT4577_66310C.1
aaagatggaatatttgtttatatatatgnatagannagtgggtattgccctctaaaatctaagctctattggtgtacatgttggactatttgagagggatttttattattttttttttcacgagggcnnnnctgggggggggggcgccttntaaaaaaccccaacaaanncttttcatactgagggggtggattattcccaatttctaaacttaacaacctgcaggaaagcagccattcntgaaaattccgaggcacgaaaaaaaaacaagaacttgttgggtgcttacctgcgggggggcctatgcaaactaaagctttttactgttgggtaaaacaggtngactattattgctataacatgtggatatnctgctgngtgatcaaggttctatgggggtcccgtgcgggaaacatcgagaagggggagagaaacacgttggtgggtaggcagggggaagagggnngggccgggggggg

SEQ ID NO: 147790 - DNA, 463 bp, Zea mays
  Clone ID: MRT4577_66311C.1
aaacaccccttcttttttttatctttaaccccaaaacccgagagcaaaaaggcgggatcacctcgtattcaacctagcccaaagggggggcccccaaattcccggggggccctctgactggccccccgggcggaaggagctaaaattaaaacccaagttggggacccccccacccccccacggggttcattaagcaaaggggggttgggacaacaaaaacaacccggccggggaaccaaaaaaggggtcccccttgggcccggccccggaaaaattgtttaattgcctttccggacccggtccgggggggggcgtaaacgtggtcccccccggggggtaccccttgggggggggtgttgtttgttgctgcgggtgcgctggggcttcccaaacgacagggggagggtaccccggggggggcccccaaccccccccccccgacaaatgcggggggggccggggg

SEQ ID NO: 147791 - DNA, 1086 bp, Zea mays
  unsure (1)..(1086): unsure at all n locations
  Clone ID: MRT4577_66312C.1
cccagcgtccgnacagtttttaggtgttccaaagnatggcgtaatggagattggttctgcagctgtggatctcataactattcatctcgtactcagtgcaaangtgtggtgcacctgtaccatcgggcattccctccnacaacaatgaaagctacatctgatgcctcttccagtaagacaatcagttcctcagtttttacaatgttcttttattttaacccatacaaaatacctactcctcttttggaataatcgctgcatgtttaccactccaatagtgtgcatgctgtgattgctttgccaggtgtggtttagtcactctaattgtcaaggttaatagctgactactgctttcacatctgttggggttttctgccaacttctaccgagttacactggttagactgttggagaaactcccatcatcagtctgtacaaaaacggcagaagaagagcacaacgtatgttctcgtataccaggagtagcaacacgttcactgcttcttacgttcgttgtcgatcaacatcgcaacaaaaacaacaatattaccattcgtgcggggacgagaagtcgcgacgccggtgtgctaggctgctagcacaatacacacaacgaaaagaagggcaggtgtggtgaactctagggacagaggcgatggtggctatgatgtgtctcctagcacttcagccccttcgtgtgtgtgtgtatatatatatataggtatattaggagtcctgggctagggatagaggcgatggtggctaggatgtgtctcctagcacttcaaccccttcgtgtgtgtgtctatatatatatatagtttggcgtgcccgctgcacccactcgtcaagccaggctgtcgggtgcgcccccaccccacgtctgtgcatgccaaaaaataggaagacatgcatgagtcaaacatgtttccttgcattcacgtaaatttagaaaagagatatgtgacagtttatatttttaaatgcttttcctccataaatagaggatcgctgcaacagacatcagacatgcaactagactcgtcaagaccaatttatgatatatactgatactaattatgctac

SEQ ID NO: 147792 - DNA, 399 bp, Zea mays
  Clone ID: MRT4577_66313C.1
gctaggctgcagcttgatcggtgggacttctgagcttggaaattctcacatggctgcctgcgtctgcttagtgctggttcagttagctctcaatccacgtggattgaatgagattatatgggtttaaatcccaaacaagtcaaacttcttaatttttttcaatcccatccaacccatgtgtattaggaataaccgaacaaccccttagggcttgttcggttagctctcaatccatatggattgagtgagattgggtgggattaaatcctaagcaagtcaaagttcttctaatttttttccaatcccatccaatccatgtataataggaataaccgaacaagcccttatatgtctgtggaagacaggaagctaccgtctgagatggatggcaaagaatgc

SEQ ID NO: 147793 - DNA, 790 bp, Zea mays
  Clone ID: MRT4577_66314C.1
acaatcccaatccctaccccgagcccgactggacgcgcagctctctcccagccgaggcggcgcgacctcctcccgccgccccgccggacccctcgccgcccgacgctcgcctctccatccagatccgcccctctcgtctcgccgcctgccagatccaccggccgcctcccctccgatcttgttttgttggtagcagcctctatatcgctgcaatctgacaaagtggagggcctagaaggtgaagcttcttttatgtctgaacaagcatcggtttatttgggatcagttggattgctgggagagtattctcgcttgacgagaaaaaggcacaaggttgtgatcccctgcatgcatcaagagcccattacgttctttggttctgagagttcacttgctacagccagtgcaaaaagtcagctcagttttcttcaagggcccgcagctactgccgtttctgaaattttccacatctgatagcatctgctgcagaaagcttgaatcaagatggcgctgcaaaacattggtgcttcaaacaaggatgatgccttctacaggtacaagatgccaagaatgttgacaaaaatagaaggccgaggtaatggcatcaagacaaatattgtgaacatggttgatatagcaaaagcacttgccaggcccgcttcctacaccactaagtactttggatgtgagcttggagcacatcaaaatttgatgagaaaacaggaattgccttggtcaatggtgctcatgatacttcaaagctggcttggcttcttgagaacttcatcaa

SEQ ID NO: 147794 - DNA, 275 bp, Zea mays
  Clone ID: MRT4577_66315C.1
cgtcaggcgtagcgtgatactttactagcagacacaggactaaatagggtgaatgttgaagatgtgggacgctacaaaagctgaatctacctgtaaacaatggccacgatgctgggacactgatgggattatgattatctaatcccttttgcacaagcgcatttactggatcaactttacccgtctaggtagaacagactgaatgtcgttgctggaagacatcgatcgactctaaaacagcatcatacagtgctataaacctccctttgtcttct

SEQ ID NO: 147795 - DNA, 349 bp, Zea mays
  Clone ID: MRT4577_66316C.1
aaaaaacacttcacagtttataaaaaaacaggccccacaagaagcagggggggggggccccacaaaaaaggagggggggcctcaaaaaaaaacgcgggcgggccaaacgggggaaggaaaacaccccaccctagccaaaaaaataacacaccggcagagggcaccgggagccagagaaagcagggggggggggaaaaaacaacctcgacctaggaaaatcgccaaagaaaaggagggcgggcaccgggagcccaagacagggaacaacaagctgggcagcttggccagacccaccaagggatcgaacaagggaggcgccaacaacagccgaaaaagcttccacccgagg

SEQ ID NO: 147796 - DNA, 387 bp, Zea mays
  Clone ID: MRT4577_66317C.1
agcagccctcgccctttttttttttttttttttttttttttaaagcagctcttttttatttttatttaatttaaacatcattaaatttgagttgaaacagttttagcccaccgtactctggaaccagggacaaggggggcacgccaaacacaaagtggtaacatgaggctgtccttttaataacccacattataatctctccaaacatggttcttgttacaaggggtcaaacacaaaaagggagacagacaaagttgtgaacgaaaaccgacccagattacactcgattattcagggggggctgaattatagctaagctataaaaaaccgttttttaccgacatgcctaacagaatgtaacacaggatactcgggagcgacgcataa

SEQ ID NO: 147797 - DNA, 116 bp, Zea mays
  Clone ID: MRT4577_66318C.1
gtcgaacaaaacatatcatacccatcctcggcggggtgagatagttccaaattttcgtattccagtcagttcatccccagtgccgaagatagaaaatcttatttcaccactcatct

SEQ ID NO: 147798 - DNA, 139 bp, Zea mays
  Clone ID: MRT4577_66319C.1
tctggatctgactccacgctgacctttattttttgtgtcctgtggtatcagaagaaggtctggggccggttggcacgtgctgtccaaggcacgagcactgaactggaagagacctcctcctcggatcctcgctcctact

SEQ ID NO: 147799 - DNA, 763 bp, Zea mays
  unsure (1)..(763): unsure at all n locations
  Clone ID: MRT4577_6631C.1
cattgggtacctcgaggccggccgggctctctcactctcctcagtatcaccatcctctccctccctctgacctccccgcttctctctcaccacgtccctctctctttctctttcgcctcccagccccacacctctgatctccactccccacacccacatccgcgtctgccacgcacgtgcaacggtgcacacacgccgccgccgccgcgtcctcttccgctccgctcccctccgtccaacgccgtcgctcgtgctgcatgaaggcgcacaccacgcggccgggagagagcaagcgtagctagctagctccgaagggatcggaggttcttttgctcaaggaagacagaagcacgacgaggcatggacgcgccgtcgagcagcacgagcacgagcaccaacagcagcaggagcgcctccgagcagcagcatcatcaccagcagcaacagcagcgctaccaccaccatcaccaagcggcggggcaccagccgttctactacgccgctgccagcgcggccgggatggcgcagttcatggggtcgcgggccatcgcgcccgccgtcccggtggatgtgcagctggcgcagcagcagcagcagtcggcggcggcggcggcagcagcgcctgcaggtgcaggatcgtccggcgctgccgcggacaagacgaaggccgtggtgcccgcggctgctgcggngagcaaacggcccactaaggaccgccaccccaaggtggnagggccgcgggcgccggatacggatgccggcg

SEQ ID NO: 147800 - DNA, 323 bp, Zea mays
  unsure (1)..(323): unsure at all n locations
  Clone ID: MRT4577_66320C.1
aacggccncgctggttgttggtgtttttttttttttttttttagggcatgaacgacgcctatcaagggtccatgggaattagcgttaccaataacacgcatagnataccacaaacacaagatcggaaaaagataaacacttatgtttaatgacaggaatggtcctatcgaaggtggcgggggggggggatgggtgtgggtttcttttgtgctttgaccggtctatcgggggccttctcttccatcctctttatcttgggcggcagcgcgcacaggtagtcccgcgcgcgccttccctngccggtgagcccctccgcaagttcc

SEQ ID NO: 147801 - DNA, 397 bp, Zea mays
  Clone ID: MRT4577_66321C.1
cctgcagtccgtccgtatcccggtcgccccgcgtccgccccgcgtcgcccacgcgtcgccacgcgtcggcctgtgtggaaaaggagaacctgtacaaaaacttgcctagagcggatttcaggagacacatgagagctacaagaagctgttgcagacattgaagcgcacgcagcttgtccctcagacaggctgaagcttgttggcaggagtacaagaggcagagaagggtgctattcgataaacacgccaggagtacatacttattgggctgctgcacgtacccccactcattgacatgtctgccatgccatgtgcatgatgaactacttaatcaacaacttgtgtaatatgatggcggcgtgcggtgccaatctggagcggtacaaaaagaagcctg

SEQ ID NO: 147802 - DNA, 269 bp, Zea mays
  Clone ID: MRT4577_66322C.1
attaaacacgttcaaccaacacgataaaataatcacagctgaaactgaagagagaacatgcccacaggcacacaaattcacaaagggtcggggtagctgtcctttgatcccattttggttgccagacactgagccggatttgaaccattgggccattccaaacactagtgctaagcttaacaaaaaggtaccttccgtgcctaagctcggatatggagaactcaatgcctcagaagcatgtccctgaaccaaaaagcccacgccttcgg

SEQ ID NO: 147803 - DNA, 1577 bp, Zea mays
  Clone ID: MRT4577_66323C.1
gacgcaacacttccgtgccctacgccccagaacctcccaccgcatcggagggctccgcgcctccgccacgccgatggcgtcccagccgccgccagagcccgcaccggccgaggcgggtctggaaagcatggagggcctcgtcctcgacacggtcatctcaagagccggcgcgcgccccgcagcggcgctcgcctgcgccagcacgcgcctccgcaccgccgttgccgacgactccctctggcgcagattctgcggtgaggacctggggctcgacgctcccgtcgatccagagggccggcctcttccctccttccaggttgcatataaagtttggtcggagtcttttggcatgtaccctctacctatggtaaagagagtgagacaattctggacttcaatgaaaacttggttgtctgaaaactttcctgaggcatacaaaacgttatgcgaaggtgtttctgaagctcaattaaagtcagcagaggatgatcttggtttcaagctccctatgcccacaaagctgttgtatcgcttttgcaatgctcaactgccttttagtgaggaccatgacacaaataaaagcatttccacttatggattgattgggggctatgcgttttatgatcattgggtgaatgtgcatttgtcaccgcttgagcaaatagttgaagagacgaaggacttctatcgggagttccctgatgtatttcatgggcgcaaattcattgtagtggcaacttcatggtttcatccgaaaacatttcttctagattgctcaaatggtgaactttatgttggtacatacaacttaccgataggaggaatgcttccctgtgtgcccaaagcattgataaagccagcaggtaatgatctagcacaagatggactactcctgtggttagaagaacaccttaggcgtttacagagtggcatgatcaagacccgtatgctgatggcatcgagatatatcagcttatatccagaagcacctccatcatgcagttcagctgttacaaatggcattaaggtacgctcatctgctgtctttgtgccagaacatcctgggaggcctggggaaaaatttatgttcacttactcaattcgcatgtcagttccagaggcatgcatgctaggtggcgtgtactattcttcctgccagctttgctcccgccactggaccatcagatcgtgtgacagggttgtttctgatgtgagcggaggaggggttattggagagtatcctctactgttacctggtgaggatgagtttgtctacgagagttgcacgccactgccccaagtaccaggatctgtggagggctctttttcgtttgtgccgggcaagttgagccgacctgaagggaagccgttcgaagtcatggtggcgcctttccctcttgatgtgccagaatacatcttctgatgatcacagcagaaataaatgtatgtatggttgttgggaaaaagttcggatgcttgtaataaccttattggagtaatgtaaaataaggaaccgtgcgctcttcgtgtaaccaaaaaaaaaaaaaacggccaaaaaaaaaaggggggccccccga

SEQ ID NO: 147804 - DNA, 202 bp, Zea mays
  Clone ID: MRT4577_66324C.1
cccgcgcaccgctcggctggccctccttttcaccccgcgacggcactccgctgaggatgatggaaaagcctaccagacgccgcctgcgccacacggggacgcccccccaccgccgatgcagaaaacggaccagatcccgggctctaaagaggacgacctcgaagcactggccacgtaaagtctcgatctggcccatgacctt

SEQ ID NO: 147805 - DNA, 267 bp, Zea mays
  Clone ID: MRT4577_66325C.1
aaaaaaaaaaaaaaaaaaaaaaaaaaaaaaaaaaaaagacaaaaaataataaaagatccggggttacgtgcgcgtgcatgacgaggtcatatctcttttttggtgccccctttaatggacttcactggccgaccgtgtacatcggtggtgaccgggttttttcttggggtcccccatgttaatcccctggccgctctttccccttttgccaggtgggttaacagcggggaggcccagactgatcgcctttcccaacattcccctttc

SEQ ID NO: 147806 - DNA, 215 bp, Zea mays
  Clone ID: MRT4577_66326C.1
tcgggagtccccactggcaccacatccatccactgggctgggccattcggcagaggaatgaaatatttggcccacctgccctccctcgtgaatacgttacatactgaacagtgttgttttaatcgaaagctccatagattgttacctcctacataggacaaatctcccacgtgcgctagataatctgatcttatctatggttatctcattatccg

SEQ ID NO: 147807 - DNA, 957 bp, Zea mays
  Clone ID: MRT4577_66327C.1
cttggcccggccttgtcttgtgggagcacgctgtggatgcttatgttctcatcggcgttccaggttgagtgtaaggggcttggaatctttcgagtaggagagacaccaatgtctggaaacgcatgcacaagctttaagaaccgtggctataattattacttcgcagtggcgtcggcaaagtctctatgtttgttataggcggcagtgctggcttcacacggcaagggggtgctgcggaaccttaagcctcgcgctcaccttgtgggagcgtagaggcgtgtcgaaaagttgatctcggagttgcacatcaatgtgagtggtcagaggctgaggcgaaggtcatgcgggctcatgctgatggaccgtagatagtgaagggcgagtgtcgggtcttgactgatggatcggaagagccgggtgacaggttacggtagctgacacctgggacacgcactcgtgcgaggacgtggtggagtggactgtattgccggcgtggtcaaggactggcgagacacatgtctggtcgtggaggacgcgcacgaggtgcgttactcatggcaggtttggtggtttggacctggaaaccacacagcgctacggatggcgggttttgctgagtttgggcctcaaaactcagcggcagaggttttagagggaactggtggtgacacgtggcgtgatcgcggagggtgcgtaaaggcgaagcgactccatgtgaaggatgtggccctcgaatcgaaaacctaggagttggtccatttcgtgcccggtggagtggataggctctatgtaaatagcagtagtttaggaaatgacaataaccctctataaatagagagaatggctagttcgtctagcatctcttgagtgctatttgtttagagcactcattctagagctcttagttttctctctaggtagactccagttgagccgagaggtccacaacgattttgt

SEQ ID NO: 147808 - DNA, 304 bp, Zea mays
  Clone ID: MRT4577_66328C.1
tttagagagtatatgaaaaaagctgtatgaattatggatactggaatgtaaattgagtacgttattttagattaaaaggaatgtggttatttaatgttattttgtagtaattaaagcggtgtgtgtgtgggaggttgaatattaataagattagtgagtggtgatttgtgtataggaagcagttaagatatattggtaataggttggttgattggtggggtaatagtggggactgttatgatgaaatggtttgagttgatatgagggtgtgtacagaataatggggtgattgagtatagagtat

SEQ ID NO: 147809 - DNA, 424 bp, Zea mays
  Clone ID: MRT4577_66329C.1
cggaccggaacgcccgggccgacccaccccaccccttcggcgacccggtagccactttttatatccttaatttccagcctctactgggactatttatgctgtagtgggcgccctcacggaaggaaatcaaactccaaccgccagcagtatccaaactctcctgttctcatgctactggggttcaaacgaacaacaccaccacacatacataactcaattcacccccctcctccaatcataaatactaaatgcctgagtatcattatcacaacaaatagcttacaaaacacatacatcaacatgggagccaacggatccgcccttgctttcgtgagtgcgaacattaacaccgtcatcggcaccctttttcacttctttacggaagaacacaccaaataccctgttccttggacgacgttaccct

SEQ ID NO: 147810 - DNA, 311 bp, Zea mays
  Clone ID: MRT4577_6632C.1
taaaaaaaaaaacccaacccccaaataacttaaacccccaaccaaaattaccacacctttaaaaagttacatgcccttttccccttaaacacaacataaaacctttaatatccccttataaccccaaaaaacattttttctacccaaaccaaaaaatattcttatccccccctccaatgttcaattctaatcaatttccaattgaatcctttgcgctcccttcatacaaaaaagcaccccctccatttgggggggaaaactttcaattctttaaactggataaaaaacacctcatccctttccaataaaaa

SEQ ID NO: 147811 - DNA, 612 bp, Zea mays
  unsure (1)..(612): unsure at all n locations
  Clone ID: MRT4577_66330C.1
cgggacggtgacttgggtctcgctgctagcagcttgaagtatgcgnccggccgatcgcctgatcggtagctagggtcacacttagtggcagggtggcagcgaagcatcggacgcaatacgcaggcgccatgtgagggcacgagaaatgtaggagcgggcagctgtgccatcatgggagcgcaggatggcggcccagcggtcctgggagcggcctcatcgcaggcggcgcacgccattcaccacgctcaaggaactctgcaaaaacgcctgctaggacgtaaagggcttatgcaacaagtacgatcccaggacgtcggaagaatctccgccagatccttatcaataaaatcaagggccaatgagggcatcaacccattggacgcttaccggtagaatttgtgtgtgggtgcttcgttttgagcgcctaacaattctgggtactttcatttatagatctccggcgcaagctgagaataactcagcctaccttgaacaaaaaggcttttgatatattccattgatgacagattgatggccaaactattggttttttattgcacaactcaatatatatatggaataaataactggatcggcctgacttgtgtgcac

SEQ ID NO: 147812 - DNA, 332 bp, Zea mays
  unsure (1)..(332): unsure at all n locations
  Clone ID: MRT4577_66331C.1
gggggggggggcgggcgaaaacaaggggggggggggggctgggcaaggaggagggagcaaggggggcccgggaccgaagggggattgangggagggggcaggccaagtaggggcaaaaaaagaagnangaaaaaaccnaaccccggggtannagaacgggtgatttttttttttctacaagaaaaggggncgaaggaaggaggggagcatggggaggggaagctgntcccgctgggcagagtgatgtggtgctgtggacgctgacgctgacggcctccttggtgtggctgaccgtggttacgttggtgttgctgatatttatacccggctgg

SEQ ID NO: 147813 - DNA, 634 bp, Zea mays
  Clone ID: MRT4577_66332C.1
acaggaatccttgccggttcgcggatagcgcatcaaatttagtcgtgggtacattaattaatcacgtgatgcggaggactagaactaagttgaccacaagatgctggaaagcgtgagcttctccgcaagataatgttgatggatcaaccagaagatggacagacgaagcaagtattggaacaaaagctgattgcaagtggacgtcatctgacaaatactaatgtagtgtttattccaggttatagttttgtgctgatgatgatggtgttaagtgccggtgggctcggccttcttataagaacaacgagcagtccgaggttcccgagtgtgttgctggagaccttcctgagcaacatccaggtgaaggttgtccccactgtactaagtgctcaggaggtgatgctggtaacatggaggacttcgaagagttccaggattacaacgagttctagtttattcttagtggcaaacctccagtcagctgcctgtgtaggcttatcatctacgtttcgttttctccgcactttgatgtttatgttaaagacaatggttatgtattagactctgtggatgtcttggacatcttgatgtaattaaagtacctttccgctatttatttcgagcattgtgtgtt

SEQ ID NO: 147814 - DNA, 840 bp, Zea mays
  unsure (1)..(840): unsure at all n locations
  Clone ID: MRT4577_66333C.1
aaaatcaaaaaaaaaaggaaattcgccgtcctcaccctctctccctcgctcgagctctccccaaaggaaggggatccagctcgccggagcccgcacctcgtggtctccttctgtcctggctgcggacgagcctggccccgggcccgcaccgacacggttcgacgaccactcagccgagccgctgctctgcctctctccgacagacaccttctccgcctccgccgccgccgccgccttcttctccgacgcagctgctccaaaggagttagccgtgggtggacgaactaaagcttgccgcgacatttcagctgaccgggctccgacggacgacgatgccgggcagaagaggcgcgaccatgctcgaggatctgccggaggatatcatggacaagatactcatcagtttgccgtcgaaggacgtcggccgttgccgcgccgtcagcgcgtcatggcgtagtgcgacatccacgcccgcattcatgctcgagcaccgccgccgccagccgtcgttccccatcgtcgatggccaggggcggcccgccagcctcgtcgtcgttcgtgacgccaatgtccatgagcagctctggcctttcctcccgggtcctgaacatcgcttgcagaattgcctcagaggcgcctgcgatggcttcctcgtcgtctctcgaggcaaccagctctacatctgcaacccggtcatccgcacgtatgctctcctaccggagcctcagaggcaatacaacaccatagccggtttctactgccaccattcaactgggaggatataggggtgctctggngtctcacagtcacatgactcgtccacatccagcttatacgtcc

SEQ ID NO: 147815 - DNA, 223 bp, Zea mays
  unsure (1)..(223): unsure at all n locations
  Clone ID: MRT4577_66334C.1
tcgaactcgggaggnaacatcctgctgcatgacctatcagtatggtgctaatgtgtctgtggaccctcgctctctgtctccaggcagttctctcgaatactttgaatgttgtgtaacagttagccactggtggtggttaagtgaacatttcctaacnatccaaantccctcnggannttcnnggtaaggctggtngangnnaatngnaannccaagaaatnat

SEQ ID NO: 147816 - DNA, 435 bp, Zea mays
  unsure (1)..(435): unsure at all n locations
  Clone ID: MRT4577_66335C.1
cagaggggcgggcacgggcggccgcacgagcagcagcgaggggcccaancgcccggaaggagccggcnacaangcagggccgncgancaacaacgncgcgacgggcgaaaacccgggcgggacccaacngaancgccncgcagcacaggggggggggggcagcaggcgnaacagcgaagaggcccggaccgagcgcccnncccaaccagagcgcagcccgaagggcgacaggacgcgcccagcagcggcgcagnaagcgcggcgggggcggngggcacgcgcagcgngaccgcnacacnngccagcgcccnagcgcccgcgccgggcgcggncnncccggccgnncncgccacggncggcggcnggccccgncaagcgcnaaagcgggggcccccnnnagggggccgannnagngcnngacggcaccncgacccc

SEQ ID NO: 147817 - DNA, 255 bp, Zea mays
  Clone ID: MRT4577_66336C.1
gcactacacaaaccaaccataacttctcttgttctcgttctcttccctgcgtgaaccgtggaccgggaagaatcgggcgttggggactttgggatttgaaagcctacatattattatttctctaattcaggagtggtccgtgctggtagggaacggatttgcgttgctttttggagaatcctttctgatcgttccaagatgctttccttttgctgctttgtttttgtccgaggatgatttgtctaattcggtcgt

SEQ ID NO: 147818 - DNA, 476 bp, Zea mays
  Clone ID: MRT4577_66337C.1
aaataaaaaaaagggggggaataattatccctagtggcccacaaaccatgctgctaaaacatttttttttcagaagaaccccttacgggatccatgaagtccttttatccaaaccattttatttatccccctgaaaggtttatggcaaaaaggattcccccccccccctaaaaacgaataacctcaggccgcaaaacaactgaataaacccaaagctgaacagttcctaccctggtcgtaaactttcctcctacccaggaaagctgaaggtttttttgattccaggttccctctcctgggttttttaaaaaggaccacttgccttttttttttgaaaaggggatccaagagctcattccaaaaaaggcttccaaacaaaaaaaaaacccattggcgtgaaaatccccttttttcccccctttaccaacccttgtggagccttttccaaaaaattaaaaacccttttactgccctgg

SEQ ID NO: 147819 - DNA, 239 bp, Zea mays
  Clone ID: MRT4577_66338C.1
ctgacctacctttatactctcaatctacatgtgggctggttcggggcacatccttctctacaaactgggcctttctcacaaaccctccaaacacccctaccctatcaccctaaccatgatccacatggcattttccaaacccgtgacacacttcctatccccactttctaaagccactgcacccaggaagatcacttcccatatatatgccacatgctacaaatccaattaaagcgctt

SEQ ID NO: 147820 - DNA, 806 bp, Zea mays
  Clone ID: MRT4577_66339C.1
ctcgagccggccgggccgggatagaaggagatttgagggcgccgcgtgcgatgcccgctgcgccgccgccaacatctcgctgcaggggaagtatctcgtcgacatgctccacctgccctcccatgggtccgcccctggccggcctctacctcagctacaacaccctctagcggcatccagcaggagctggttgcagatcccgcagatggggccaagaccgtgcgcaagccggtcttcaccaccgtcgaccagctgcacccccagatgcatggccacactcttaccatctgcgtcatctctgcctgcaccatcctcgacaaatcctccatgcacattggtcgtacccgcatcgcccagtgcctcgtcggatacaacaccgacaccgtccttgtcacgcccgcaacaatcaggatacactcacggtgtgctggtgtgtgagtggaggaagagcttgatggaggctaagggagaggaatcagtagagcaaatgagcaagacgagacagatgtgtagctgctggtgtttctccactatcgcgacctcactgctcaagcatggcctatatagagtgacgagaacaccatggaattgagttgtgttgttgtggtgcggagtaggagtgtccaagcaaggagagaatcacaggcgatttctctcattgttgttctggcgtcgtttctgattctacgtttaaacaaagtgtttgtctcattagggcgtgtttcctcactttttctcgcacaagaatctagtaaaaaggttctccaaataggctctttgactgctacagttcgtcgattcgattc

SEQ ID NO: 147821 - DNA, 515 bp, Zea mays
  unsure (1)..(515): unsure at all n locations
  Clone ID: MRT4577_6633C.1
cccacgcgtccggttctagatcgcgagcgggccgccctttttttttttttttggaaaatgaaaaccatgcatttctcatatagacatttcatgttccagacgggccctatttgtaaacatctttgatagtgtacaacatcaacgatcagatattaatcatacatccagagtacacatatactcctgagaaggcgattttcatgtgtttacttgccgggcacaaagttggtggcgaaggcccacgcgttgttgttgacagggtcggcgaggtggtcagcgaggttctccagcggacccttaccagtgacgatggcctgcacaaagtatccaaacatggagaacattgcaatgcggccgttcttgatttccttcaccttgagctcagcaaactcctccgggtcgtcggctaggccaagggggtcgaacctgccaccggggtagagtgggtcgacnatctccccgagcgggccaccggggacgcagggcccctgggcggggtcccgtgggtccagcct

SEQ ID NO: 147822 - DNA, 564 bp, Zea mays
  Clone ID: MRT4577_66340C.1
gcggcatccagcaggagctggttgcagatcccgcagatggggccaagaccgtgcgcaagccggtcttcaccaccgtcgaccagctgcacccctagatgcatggccacactcttaccatccgcgtcatctctgcctgcaccatcctcgacaaatcctccatgcacattggtcgtacccgcatcgcccagtgcctcgtcggatacaacaccgacaccgtccttgtcacgcccgcaacaatcagggaagagcttgatggaggatgagggagaggaatcagtagagcaaatgagcaagacgagacagatgtgtagctgttggtgtttctccactatcgcgacctcaatgcgcaagcatggcctatatagagtgacgagaacaccatggaattgagttgtgttgttgtggtgcggagtaggagtgtccaagcaaggagagaatcacaggcgatttctctcattgttgttctggcatcgtttctgattctacgtttaaacaaagtgtttgtctcattagggcgtgtttcctcactttttctcgcacaagaatctagtaaaaaggttctcc

SEQ ID NO: 147823 - DNA, 876 bp, Zea mays
  Clone ID: MRT4577_66341C.1
ctcgaggccggccgggagcacccatcgtggacgcctgaccacaccccatgtgtgttagcaccttacaaggagatttgagagcgccgcgtgcgatgcccgatgcgccgccgccaacatctcgctacaggggaagtatctcgtcgacacgctccacctaccctcccataggtctgcccttggccagcctctacctcagctacaacaccctctagcggcatccagcaggagctggttgcagatcccgtagatggggccaagaccgtgcgcaagccggtcttcaccatcgtcgaccagctgcacccccagatgcatggccacactcttaccatccgcgtcatctctgcctgcaccatcctcgacaaatcctccatgcacattggtcgtacccgcatcgcccagtgcctcgtcggatacaacaccgacaccgtccttgtcacgcccgcaacaatcagggtatgcaatggttcaaggctccgatcttaattgttgatctctaaatcatcgtattcagttaattttctatttaatatttagcaaatttgtcatagatacactcacggtgtgctggtgtgtgagtggaggaagagcttgatggaggatgagggagaggaatcagtagagcaaatgagcaagacgagacagatgtgtagctgttggtgtttctccactatcgcgacctcaatgcgcaagcatggcctatatagagtgacgagaacaccatggaattgagttgtgttgttgtggtgcggagtaggagtgtccaagcaaggagagaatcacaggcgatttctctcattgttgttctggcatcgtttctgattctacgtttaaacaaagtgtttgtctcattacggcgagtttcctcactttttctcg

SEQ ID NO: 147824 - DNA, 848 bp, Zea mays
  Clone ID: MRT4577_66342C.1
cattgggtacctcgaggccggccggggttactcggcacgttctgttgtagcgtcgcctgatacacggtctttaatattctaatttttgtcgcgatgccttcacttataccatagcctcctggcttgcgtcccttcccgctgtgcgcctgcccgctgttgccttcagcgcaccttcccttgatttcaacctgacagtggcggggcttcaccagccagtcttcacccgtcttgaaccacgatacgtcctttcgaactcctgcctcttgttcaaagttcgtcctcaaaatgctgtcgccctctgcacacgaagcgtcccctgtggcgcctgccaccacaattgacgacgctccagccgacgatggcaaccagatcccagacgaaggcatcgcctcggatgcggacgaaacggagagactcaaatttctgacaaccggtactcgagcacaagacgacttggaacgagatattggccggcaggccgaccagatgctcatagagcaggcagatgctcgcgacaaaaagcgcatagagaagttggaggctgaggcaaagcgagcagaggctgctatacagaagctcaaaaaccgtttggctttaccagctctcgatatacagaaggcaaagctccgtggcgagatggcagcatatcgacagaagatcgacgacctggataaagagatggatggcatacaacagcgcatcaacgatcgccacaaagaacctggggcagatgaagcagcgggagatagcgcaaatgggcccctacctaacgaaacacagcgtgagtggcttattcgcacaggaaaaattacgcctttctccaagttggcgcagaatcaaccgggctc

SEQ ID NO: 147825 - DNA, 223 bp, Zea mays
  Clone ID: MRT4577_66343C.1
cagacgcgtggcgagacgcgtgggcggacgcgtgggcggacgcgtgggcggacgcgtggggaagctagcaatcctagaaccatctgcttcagccttcagctagcaccaagtttagtcggccggtcggtgactgaagtagtaatggcctccgccaacagctggaccctcgaggtcgcgtcgccggtagccccgcagcgcctgttccgcgccgccgtgatggact

SEQ ID NO: 147826 - DNA, 215 bp, Zea mays
  Clone ID: MRT4577_66344C.1
atcttacgcactcgacgccttcaggtacgagcctcactatggagaggatgacagcgatcaagttgtgagtggatttatgtccctatccaaggcaccctttgcaaaggatcaatatttcttcagtcgaactgcacagtttcgggaacaactacaagaggcacttgacagattgggctccatgattgttgatctgaatgagttggtgatgttcttgg

SEQ ID NO: 147827 - DNA, 489 bp, Zea mays
  Clone ID: MRT4577_66345C.1
ccaaccaagcagccgctatgccaaggaagtcggctagcttcctaagttgctgaagacggtgatgctctctgtgtgaagattaaccccactcaagcctatggcgcgccggaaaccatccatgagagtgtccttatcttaccaggtaaagctgatagggacataaagcagaatgatggctggccgacacataaagcagggcgatcacgaagaccctaacgaatcataggataccaaggctgatgccaagaaaaactttgatctaacaaatcctgctctaccaataacctagtgttcatcagtacaagttatctctgtaatcactagctgtatccgagtgaaccgtaccattaaacaaaccataacacttttattgatccattcggaacctcacagctataataacttcatgacttacacaagcgctgctaaatctataagacaaccttatgacatctgtcatgtgcctgtagggagaggctggcacagcga

SEQ ID NO: 147828 - DNA, 349 bp, Zea mays
  Clone ID: MRT4577_66346C.1
gagctattattcggcggccgcccttactgttttcgtgggggatggtgtgaagaattgattcccacacgccgatgtcggcggtggggaccaagaccgccgcaccgccgggctatttgacggaaccgtgcgcacctactgagatcttgcgagccgagctgccactccagataggttggtggacgaattcaaaacccgcgcatgtcttagcgtcgacaacgcccccactgaaactgacgagtccgtctctcgagcggtggtctcctaagacacccatgcatacacaactgtctgccgtcaggatggatccaatgactgttgctacacagaggtgggaggatcaggtctatgg

SEQ ID NO: 147829 - DNA, 465 bp, Zea mays
  Clone ID: MRT4577_66347C.1
tagggtcccggttccccccctcgggtcgacccagcgtccggatggcgattccatttctccccgagactcagccgtcgcgctgaacctaatcttatcctgccgcctagactcgaggcgggcgcacacactgtgcagcgctcaggccggctactggccgcactcaagcaggaggccgaatacctggtgacaaacgaggcgcaacctgagtccacaggactcgctgcaacaggtaaccgacgcactctcctaccgcataccagggcgagccgccacgctggcgacgtggccagcacccactgaacctgcagagggagtttcagtggatagaacgaacagtggccaataaagggctcggaggggctttgcacattgctagctggtaggcccgaaagaaatgcacccgaacacaggaattgagggcagtgttatgggcataattgttacaacgaactacaggtgaaacaa

SEQ ID NO: 147830 - DNA, 277 bp, Zea mays
  Clone ID: MRT4577_66348C.1
gtgtcgggaaaaagcacggaaaaaaaatttctcgaaaagttggcgcgattggttaaaaaactaaaaaaaccctactttttttcctgaaaaaggggggaaagggacgaaccgtttttcaagtaagaaaaaccccccccccgcctgggggggggcaatccctccctacaatggggggggtaaatatcccgggaggggggggggcccttgctcttgccggggcccataattgtttgtgcgggaacaaggctccaaaaggggccctgaaccccccccgggg

SEQ ID NO: 147831 - DNA, 233 bp, Zea mays
  Clone ID: MRT4577_66349C.1
tacgtacaaatgttctcagttcttccaccagtagccaaaggtctcacgttggctttgatgtctcacgtctcttgctccctccatgcaagtgcccagccgctgtcacccatggccggctctgatctctagccatcagtcgttcatcttgctccaccggctcaacatccaggcttcagtctccttgccgctgtcatggttcagttttggagctcgcctctactggcccatggcgc

SEQ ID NO: 147832 - DNA, 641 bp, Zea mays
  Clone ID: MRT4577_6634C.1
tgcctgaagctgtgcgccccggttcggtgggcgtgaaaggggagaaaagagggcgggaaggaccgcggattttgctagggtttgcggtttctgcttcacactgcctcctcagtcctcaccaccacagccgtcgcgcgcaggagggtagggaggatgccacgtaagatcaccttggtcaaggagggggagccgcagccggtggacgctgctcaaggggagcccgctccggcaccggcggcaccgacggccgcgttgacggaggcggaggtggacgagctgcccagggccatcgtgcgccgccttgtcaaggacaagctttcccacgtcgccggtggggaaggagccgaggtcatcgtcaacaaggacgccatggccgcgttcgccgagagcgcccgcatcttcatccactatctctccgccacgtctgtaacatcacattccctccacagtcccaccatctctgattagatccagattacccccagttactgtgattcttatcctctgttgctctgtttgggggttggaatttggaactcggaagagaaagcaactaatctgatatttttgttgaacagtagactcagtaatagtgaggtacagcaattttatccaatcaaattctgcgtattttggggtat

SEQ ID NO: 147833 - DNA, 113 bp, Zea mays
  Clone ID: MRT4577_66350C.1
cggtcctgtagcgtcctctctcgcgttgaccacgacgcgccgtgctacggcgccccaatgcttcgtcctgcctgcgtcgcttaccgcctcctacgagccagagcgctacaagc

SEQ ID NO: 147834 - DNA, 292 bp, Zea mays
  Clone ID: MRT4577_66351C.1
tgcacctgccccatcttaaagacgagcctgtagatgtggcactcgtgttgtgcctgcgcctgcttgtctcttctgctgtcgccgtcgaccgactgctgcttgtgtcgtgtgagtgccctggtgttgacgccaaactcaaggcttgtgcgttgcgaggatgttggctgattatacattgtcaggtcttgtgaaattaatcatgcttcatctggaccatcgattaagtaatactacaaaaaaatcagattcaggtttggtcatatctgatgtactaaaatccaggtgaataaga

SEQ ID NO: 147835 - DNA, 571 bp, Zea mays
  unsure (1)..(571): unsure at all n locations
  Clone ID: MRT4577_66352C.1
atttcgaagctggctggccttggtttatagtctgaaggagttctacttcggggaatctggatcttgcagaggttaccttctctcatgcttagggttttgatttgggcattgaggctatcttcatattggtgacagaagaaatgtcgttgtgtatgtttctgtctaaaatcggctgtagcttgtagagttgatgaatatagttgacatgcttatctgggctgtgaagttttgaatgtttacataatgtttcatgtgccttatatgtggaccctgcccattttctccccgctccccaacatcatgtaattcattagttaaggctcgtgttgtgtatacttagtctgtcgagtttaaggcctatcggcaattctgcttctatacagttgtttggtgaaaccgttgctggtaggatcaccactgttacgttatgatacccannnnaaaaaaaaaaaaaaaaaaaaaaaaaaaaaaaaaaaaaaaaaaaaaaaaaaaaaaaaaaaaaaaaaaaaaaaaaaaaaaaaaaaaaaaaaaaaaaaaanaaaaaaaaaaannaaaannnaaaaaaaaaaaa

SEQ ID NO: 147836 - DNA, 310 bp, Zea mays
  Clone ID: MRT4577_66353C.1
cgcgcccccgacgccggggagcaggaggaggagcaagagggattccgaatggacaagacgaggaaccacacggcgcataaccagacaggtcaaggcgcggagagaacgggatcaagaagcccaagcgccaccggcagacctccaccaaggggatggaccccaagtttctgaggagcttgaggtactcagggaagggcaatacgaagaggcgagacgctgactcataggagcgagatgacgcctgagtgtgtggcgacaaatgcatctcttgtatcggtagggacttaatatgcgaactcaatcttcacac

SEQ ID NO: 147837 - DNA, 860 bp, Zea mays
  Clone ID: MRT4577_66354C.1
gggcccttttttcttccttcacacttgtacaaagagtcaatcaatagtcagcagcgagcagttgctgccaaaaatctgaccaccgtgtccacgtccacgtgacattctgttacgatttcgtaacacgaaagaacgaatggtacacattctgttacgatttcgtaacacgaaagaacgaatggtacagcacccgccaaaataaagcacaggatcatccaagctacggccaagcaagcagctcggcctgcgtcgcgtccggtcactgcgccaccgccgacgagccgccctcctccgccctgctctgggccgcttcagcggcggtggccggggtggaggcctcggtggacggccgcgtcccggtcccggtcgcggtcccgctgccgctccgacgcacctcctcgatggtcctcaccacgtccgccatcctgggacgccgctcgggggacctcgacacgcacgccatcgcgacctgcagcatctctaccatctcctcctcgatgttggggtaccgcagcagctcgccgtcgaacacctcggcggtccactcctcccgcacaaccgactgcacccatctcaccaggtggaccacgtcgccgccgccgccgccggttttttttttttttttttttttttttggacgggcgacttcccccacatgagctccagcacgaacccgctggggctgcctgcgtcgccgctctgggacgccttcctcgcaccagcgacctccctgcagcagtaccaccatctcctcgtacatgttggggtacgggttcatctcggcgtcgaacacctcggcggtccactcatcccgcacaaccgactgcacccatctcaccaggtggaccacgtcgccgcct

SEQ ID NO: 147838 - DNA, 642 bp, Zea mays
  unsure (1)..(642): unsure at all n locations
  Clone ID: MRT4577_66355C.1
tgcatgaagcaacagggggttgccaacttgttagcgtggccgaccctgatgctgcagcaactgttggcctcaccgcttcagcagtgccagatgccaatgatgatgccgggtatgatgccaccgatgacgatgatgccgatgccgagtatgatgccatcgatgatggtgccgactatgatgtcaccaatgacgatggctagtatgatgccgccgatgatgatgccaagcatgatttcaccaatgacgatgccgagtatgatgccttcgatgataatgccgagcatgatgtcaccaatggtcatgccgagcatgatgtcgcaaatgatgatgccccaatgtcactgcgacgccgtctcgcagattatgctgcaacagcagttaccattcatgttcaacccaatggccatgacgattccacccatgttcttacagcaaccacgccgagtgctgcatcaccaatgaaatatttgtgttgtacatgtcgcaaatcaccaccccacaatgtcactgcgacgccgtctcgcagantatgccgcaacagcagttaccattcatgttcaacccaatggccatgacgattccacccatgttcttacagcaaccctttgttggtgctgcattctagatagaaatatntgtgtt

SEQ ID NO: 147839 - DNA, 222 bp, Zea mays
  Clone ID: MRT4577_66356C.1
gccggacggattcgaaaagaggcaagaaaccatagtttctccagcgaacatccctcctgctcctccccacctccgcctccacatcggatccctcttcttctcacaacgcctcccactccttcgtgtgcgtgccctgcgatgccgcgtcggatggtgcctcctcctccccgcgctgccgtcaccatcccccttgccagctctcgcggacgcgcaaaagccccc

SEQ ID NO: 147840 - DNA, 459 bp, Zea mays
  Clone ID: MRT4577_66357C.1
atgtcgggagaacacgccaagagggagatgattaccggcgataagcccgaagcctcaggaagaaagaacgacgaacggactccattgaaggaggccggcgacaagcacaaagaggagtccgctagctccatcaagtcacataggaagggtgataagaagaaaaagaaaatgaagaaggtggtctactacgagaccaactcttcatcaccttccacatctggcgccgagtctacatcctcgaagcgccaagagcgcaagaagtatagtaagatgcctatacgctatcctcgtattctaaaacgtgctcctttactttccgtacccctaggcaaaccaccatattttgatggtgaagattattgtatgtggagtgataaaatgagacatcatctaacctcactccacgaaagtatatgggatcaaaatattacattatatttagaaactataatcctataa

SEQ ID NO: 147841 - DNA, 311 bp, Zea mays
  Clone ID: MRT4577_66358C.1
gcaaactaacccaggggactttttattttctccacgcgacccaacataaaaggccagtatgtaacactaccacaaaattacttaaatatgcaagcctatgcgaaaccttgtgtaaacgcggcgccaagtgggatcctacatcccagacatcatagtgaaggagacacgtgtgcattacacctatacccaacaccaagaatgaaggcgggcttaattctgaacatgagcgacccggacagaatggaccaattaaagggggattcctcgactccttaaagctccagacggtggtgatgggctgatggcttaac

SEQ ID NO: 147842 - DNA, 535 bp, Zea mays
  Clone ID: MRT4577_66359C.1
tctttttttttttttttttttttttttttttttttttttttttttttttttttttttttttttttttttttttttttttttttttttttttttttttttttcttgcgggggggctttttttaagggggaatttcaaaaaagggggggggggggggaaggaatccgggtttggaaccaaattggggggattcaggggaaaaaccgtttccggggaaaaattgggaaccgttaaaaataaaaaaaaaaaaaggagagggaaggaaaaaaagaaaaagggggggggcaaaaaaaggggggaaaacaaaaataaaagggggggggccccaaaccggtttaaaaaagaaaaaaatggggggccccccacattaaaaaaaacgccaaccccccgggggagggcttttgggtaaaggggccctttaccctttcgggaaaaaagactcgttttccccgggcttttcggtttcccggggggtttaaattcccttaaagggggaaaaaggggaaaccacaaaaaaagggggtaacccgggaaaaa

SEQ ID NO: 147843 - DNA, 495 bp, Zea mays
  Clone ID: MRT4577_6635C.1
ccatacgactgcgccgtagtggtactgtcgtggtttacgcgagtaggtcaagtacgcactagggatcagctgccgcaccgacagagagcccttcaaggcggcaatgcaggcgactggggagaacatcgagatcatgatgaagtcggaggggcttgttcgagaggaacgatcgggcccatcatgctggcacatgtggggaacgatgtccggctcccatggagtacgccatgggtggccggcgccaacctctacgctaacggcgcattgaagatgcccgaagacactattgcgcggatgaccacatccactctgcccaaattgcaaaagctctatgctgcgattgaagacaacctggctgcggatgagaccttatctattctcgggtgaaacatggacaccaccttcacttctcgggggaaagacgagcattagtccagtcagattgcgtggctggctagccggccacgaacggacttccttggacacgctgatatt

SEQ ID NO: 147844 - DNA, 667 bp, Zea mays
  Clone ID: MRT4577_66360C.1
tgggaccctcgaggccggccggggactacattcacttgtaattctcacaattacacaacacagcacagcatgtcttcgaaactagtacccgcggacccagccaaggtcatggtcattcgcgacgtcgttcccagagctatcacgacactctctgttcctttctggcgctttggcagggttaagattggtggacgcggcaccatcgtgcgccttcaatctggcgctctcgccgtcttctcccctgtcgccctgaccgacgacgtcaaatccaaagtctctgaactgggagaagtaaagtacatcgccgcgctcgatgccgaacaccacatcttcctcggtccctggcacgccgcatacccgtccgcgcaagtcctcggccccgagacgctccctgagaagcgcaaaaagcaaggcaacgaagacgtccccttcgccttcctcttcaaaaaggacgtggccatagcctccatctcccccgaattcgacgccgagttcgactgggaatacgtccccgcgcacatcaacaaggaaatcgtgttccaccacaagcccaccaagacgctgattcaggccgacatgatgttcaatttgcctgcgaccgagcagtttagtaagacaggcgaggacgcgggaagcgggattctgaccaagatctttggcgcgatgc

SEQ ID NO: 147845 - DNA, 314 bp, Zea mays
  Clone ID: MRT4577_66361C.1
ggacaggaaatactataatattaataaaaccatggttttttccaaacaggcctttaattttccaaacatgcccttagctacagaatatggagcaaacggccagccgtagcaactaaaaccgccccatgaggccatgatgaccccaatcaggttggggtttgcaagactgcaaccgcaaatgcgtgacgttgaagattggagaatgggagctcaggcctttgttcatagatagaactctattgcgctcccgtcagtccatatttgccgtggtttacctccaaatatcaagactacaaactgcaatcacacatact

SEQ ID NO: 147846 - DNA, 276 bp, Zea mays
  Clone ID: MRT4577_66362C.1
caaggatcaggctgactacgaggacgtgatagagatcatctcagacggatcagtggaagacgagggcattgacgaaggcatccagcaatatgaggacatctatgaggaaggaaactatgaggcggaacgaagtgacagatgtctgggaagaaggggaagattcggacgactctgacctagacgctgtgcttcaggtcccaaacggttcggccaatccggggaagaacgggaaaaccggataagggttttccccttttggggatcacctctccgtat

SEQ ID NO: 147847 - DNA, 1590 bp, Zea mays
  Clone ID: MRT4577_66363C.1
gaagtggaaaatttactctaccattgcctgggctatcgcaaatcttactgtaagcatactagtacagattttgaccatgcccacaatttggtcacttatctagaaaaagttgaccccaatgctgaagctttgaaatacgctccgggcattgaagcattgctaggaacctatcgctctctggattggttacccaaattatctaaattttctccccttaactccatgctaacggctcgcaaactaactaaacaatgggagcaggaacaccaacagtcttggcctgaagatagacttttttctccccattactcaatttttaacgataatcgccacgaacaacattctttcctttggtttacggatattaccgcttctaaaaaataattatgtttaacagaatcaaagataaactcaaattcaaattagcaaaagtccttgctccagaaattgataaaaagctagcagtggaggaaaaactgtcctccgtacaattttttggcattgccccttggtaccaggaaaacctttgggaaccgccagtgcaaatagtattacgagatcaaaatagtcaccgacggggagtagcaatcaccattctatcaaaacaggaattaaaccgagaggttaaccagggacttttgctcgtggtgggttcgttcattattgggatagtagtaattctcctgcttttagggttattaattagatatgcggtgttgctccctttggggaaactgcaccgggccttaattaactatgacaatactgagcagtttaatttgccccctctaccgagcaatgaaattggttttttgggccaaaccctggtgcagaccttcaatcaattgcagatttatcaacgagaagccctagaaattgccgaaagaaaatatgtggaaattgcccaacgctatgaattagcttcccaggccacaagggtatgggtgtgggaatgtcagcctaaaatacactactttgaagtggaccccaatttgattacttggcttggctttgagcaaccccttgaaccggcagatggggattttttcattcaccttggcgatcgcccaatgttttggcaggccattgagcaaagcttggaagatcccaccatggaactatccacagaactccgtttggaagcggccaatggggaaatttatcattgtttgttgcgggggcaaatccatcaggaacaaggggaggcatttgtgaaaattatcggtacgatcgccgatattacggagattaaaaaagcagaagaacaactaaaactttccaacaaaattttagccaaagccactcaactcaaagacgaatttctggccaatatgagccacgaattacgcactcccctcaactccattttgggcatgatagagactctacaaaaccaagtttatggtcccctcaacggtaaacaagtccagtcgttagaaatagtagaaaatagtggccgacacttactttcattaattaatgatattcttgacctttctaaaattgaagcgggcagaatggatttggatttaaaccccaccagcgtgtcagcattggtcaatcatagtttaacttttgtccaacaatttg

SEQ ID NO: 147848 - DNA, 688 bp, Zea mays
  Clone ID: MRT4577_66364C.1
cctcgaggcggcgggaaatacccctgaaccagacatgggggagggcagcttgcctcaactctgcgaccaaacccagttggctagacggttatccacgttcacagcgggagaaagcataattcggccacgtacagagcctctgagacgcgctcgacacagtgcaacatcacgtgccttttcacagacatggcaatttcacaaacggcttgagtatctcagagcacatagtacactgcaaaatgtccagacagatcgccagcaaataccacatccatccaacaccctccttcaatcacggttccccacaaagaccgtcatcgctctcgttctcatcggcggcctggcatactacctcgtcgacatagtcgatccctcctggacagatgatgtgtacgcggcattttcctcgggcgacgactcgagttcactaacgacaccgctgcatttctaccgcaaccgcaccgaagttcaacacacacttgactaccacatcccggatgccagcgcgccgctcaaagatcccaccgtagcaaagttcctgtctgatcaattcgaaaaactatgtttcggatggatgatgaccgaagacgatgcgcgcaagggcgtcgaaggcatggaggacgtccagatgcctattacccacgctgcaggttccgaaagcacgagcccgtgtgagatttcttcgcgc

SEQ ID NO: 147849 - DNA, 252 bp, Zea mays
  Clone ID: MRT4577_66365C.1
gtctatgaatcgtggaaaactcccgaaactgaggccgttgccgtgtgggtaggggccgctgcgcggagtggggataccacccgggtcgctgaacaggagagcgatgacagagaggaaggagtgggctgccagattcaggcggatccctacgcgagcggggagggcacaccggccgagggccggactgtggacgctgataaggtcggtcgcggcccaaagtggatgacgatcggtgactgctgtatgcacctt

SEQ ID NO: 147850 - DNA, 180 bp, Zea mays
  Clone ID: MRT4577_66366C.1
gcctctcgtacgtactctctttagtctgcatgctgggggcaacattaactacgtagggggcaataacgacctatattctttcactctgtacaccgtacgaactacagggtacagtctactgcttccagcttagatagtgcagattttttgatataagtgctagcatcttttgactgacta

SEQ ID NO: 147851 - DNA, 580 bp, Zea mays
  Clone ID: MRT4577_66367C.1
agtcatagacacatgatttttttttttatttcttttttttttttcttttaaaaaagaagaggggctgaccacatttttagcacggactgcctatatagcatagatccggataaacgcaacagctgggaagcatgcaccagaaaaacgcaaaggctgctgctggctcacaatgcttctaaagcctctgccatcggctcactttaaattctacaaagaatccgtgccgccacgccatgattcaaaacatctgttataatccacgtataacaatttcttgtaatacagggaagccttcggcggagaatatcggcacagaccagaaaccccctttcatttagtataaatttattcaacaccaaacccttaatcaatcccttaatgacaagagtatacaaagaccttacccatagttcaagccgaacatgtcattctgcaccaagaaggacccaccggtctgcataaaatggaatgcctgagagaacttgatggggtgctcctaggggccggcgcgtatggaaccggatacgatacgagcttgcctacctggggacccgatggcttaaagtctacagcgacgatc

SEQ ID NO: 147852 - DNA, 342 bp, Zea mays
  unsure (1)..(342): unsure at all n locations
  Clone ID: MRT4577_66368C.1
tttcagaaaagatgcaagaacatggcctttgcaccctgctcctactcttcccccgccgccagagccccgagatccgccgctgccggcaacaagaagccgacgacgtgcctctgctcgccgtntagnnactcggggtcgttccgctgcagccggcaccggaacggggccgccgcgccggcgcgcgcagtcgccgcccggnccccgtaccgcccggcactgctggcactggcagggccccaccccgccgccccgtgcgcgcgctgctgctccagaggatcggcgcggggcccagctgagccggcgcacgccgcctcccccgccgccgcggggtcggcgccttcc

SEQ ID NO: 147853 - DNA, 237 bp, Zea mays
  Clone ID: MRT4577_66369C.1
aaaaaaacacctccatttttttttaggggagaatgtttttaaaacccttttaacttttaaatgagttgaactgccaaaaattaggttgtccaattttttttccagtgccataaaaaatgcaaggaatgggccgcaaaaacacctgggttaaaacaacgttagcagggcgtattaaccaaccagatcgcttttttggcacaaaattttcaacccacttaacgaattatttccattaaa

SEQ ID NO: 147854 - DNA, 291 bp, Zea mays
  unsure (1)..(291): unsure at all n locations
  Clone ID: MRT4577_6636C.1
gggccgccaaaaataaaaatacggggatgcattttatttacaaccaccctggtccaatgcaggcaggatgcatgggggggggcaaagcggttcctgctaggatccaaaaaaacttacctcccttcacggggaccgggggagggggggggggcccctttcnncccccccnntnnatccccccaatnncacccaaaccaacccctttaaaacctttttcccaaccttaccctccaaaaaaccaaccccttcatttccattttcccccatcctaaaacccacacactccttccc

SEQ ID NO: 147855 - DNA, 172 bp, Zea mays
  unsure (1)..(172): unsure at all n locations
  Clone ID: MRT4577_66370C.1
acatcacagagtcgatcttcatcaacaacgacgctcagcatcacaccagcatgctctagcgtaactccgcgacatgacctgcgcgngtccgatgagagcgacatgcnctgtgctctgaggagcggcacgagctgctcgcgaagagtcacgcagangagacagcgcgtgcgat

SEQ ID NO: 147856 - DNA, 1253 bp, Zea mays
  Clone ID: MRT4577_66371C.1
cattgggtacctcgaggccggccgggctagagatctccatccagttctcgctatatctttttctccccaaggaaaaaatggcggcgagagcataagaaaaaaaaaacacacacacacacagcgcacttttcaaatcgacaaaggggaaaggttcgcttcttgtggcatcttgctttccttcgagtgccatggccgatccggcggaggagaacgttgtctcgccgccaccgacccctgcggccccagccgtgggcgcatcagactcgcccctgcagcctgctgctgacggcgcctcaacggaggtgtctgccccggcgccggaggtaaggtcccggggattcaggctttttggagaggacacttccgtgcacaaggcccttgggggcggtaaaactgctgacgttctgttatggaaagacaagaaaacttctgctgttgtaataggtggcgcaactgtcatctgggttctgttcgaagtgcttgattaccacctcctgaccctgatatcccatgtactgattggtgtgcttgccaccttattcctgtggtccaaagcaaccacgtttatcaagaagagtccaccggatattccagtagtgcaggtacctgaggatcttgttgtgaatgtttcacgagcattatgcaatgacatcaacagagcgcttcacttattccatgagattgcaatggggcatgatctgaagaagtttttgtttgtgatcgtggggctgtgggttaactctgtatttggaagcagctgtgacttcctcaccttgatatacattgccgtcctgttgctccacacggtgccaatcttgtacgacaagtaccaggacaaggtggaccatttcgctggaagggcacacaccgaggccctcaagcagtacgaggtgctggatgccaaggtcctgagcaaaatccccaggggtccggtcaaatccaagaagcagaactaggatcaaccgcagattatgaatgctggtgtccttttgcgtgaatggcttttcgtttgcatggtatatacatgtaatctcgatcggtctgatggcttcagcttggttcttttgctactactttgtgctgattgtgggtgcatgctgctccctatctccgtgatgccagttgatgttactctagtcctatgtatgtcagtgtgtacgtgatacagatgttgggatggtacgtttacggtttatgctactgctgtagcttgtaaatttcagtggtaaataaataaacccttgttgctcagc

SEQ ID NO: 147857 - DNA, 1341 bp, Zea mays
  Clone ID: MRT4577_66372C.1
gtcgacccagcgtccgcattgggtacctcgaggccggccgggtaaaacagtgtgtgtgagtgaatatatctttttctccccaagaaaaaaaaaggcggcgagagcataagaaaaaaaaacacacacacacacacacaaagcgcacttttcaaatcgacaaaggggaaaggttcgcttcttgtggcatcttgctttccttcgagtgccatggccgatccggcggaggagaacgttgtctcgccgccaccgacccctgcggccccagccgtgggcgcctcagactcgcccctgcagcctgctgctgacggcgcctcaacggagaaggtgtctgccccggcgccggaggtaaggtcccggggattcaggcttcttggagaggacacttccgtgcacaaatcccttgggggcggtaaaactgctgacgttctgttatggaaagacaagaaaacttctgctgttgtaataggcggcgcaactgtcatctgggttctgttcgaagtgcttgattaccacctcctgaccctgatatcccatgtactgattggtgtgcttgccaccttattcctgtggtccaaagcaaccacgttcatcaagaagagtccaccggatattccagtagtgcaggtatctgaggaccttgttgtgaatgtttcacgggcattacggaatgacatcaacagagcgcttcacttgttccgtgagatcgcaatggggcatgatctgaagaagtttttgggtgtgatcgtgggtctgtgggttctctccggagttggaagcagctgtgacttcctcacgttgacatacattgccgtcctgatgctccacacggtgccaatcttgtacgacaagtaccaggacaaggtggaccatgtcgctggaagggcacacaccgaggccctcaagcagtacaaggtgctggatgccaaggtcctgagcaaaatccccaggggtgcggtcaaatccaagaagcagaactagttaggataagccgcagattgtgaatgcccgtatcatgagtatcgggcttgtggtttgcatggcatatgtaaatctgtctgttggcttcagcttggttcttctgcgactactttgttgatgttattatagtcctatgtatgtcactgtgtacatgacagaggatgttcggatgctacgtctagactactgctgtgcagcttgtaaattccagtggtgcgttgctaagcacgatgctccccttgttttatgtggtgttggactaatgattactacactaaggtttaatgactcgattaggatcaaacactagttactagtggaaattattatttttattcgaaaaaaaaaaaaaaaaaagcggcc

SEQ ID NO: 147858 - DNA, 354 bp, Zea mays
  Clone ID: MRT4577_66373C.1
cgttgctgtcggttgctgatgccttgttgatgacctgctgtcccctggatggccatgcaagcgacatcatgtaagcagtagccatagtttgcatatcatcgtagggacgagccaacactgcatctctttttaggacacaagtcacaacaacttcacaaaattgccttccaatgggcagatctgcaactatggtactcggattagttgaaactattattcctttggccacaggttgatccgatctcaacaaagcatataatatggcttctcttccaaccaaagaattatgtttagaatgagaagcatcattagtgtctggtgcagtgcttggtgcaattgtgtccgacagcaacg

SEQ ID NO: 147859 - DNA, 250 bp, Zea mays
  unsure (1)..(250): unsure at all n locations
  Clone ID: MRT4577_66374C.1
aacataaattttttttgtgggaaggaaggcgtgtacttgacttaagccgatacatgaacaagggctccggactgaaacctatgggaacaatcaaaaaaaaataaacnccggcaaactgctaatggcatgaatgcctaaaaacatgacccaagcagaagagggtacttaacagggatcctgatacactagcgggaacatattatgacttaaacgggacagaaggtctttttttggaaaccctatggggccc

SEQ ID NO: 147860 - DNA, 142 bp, Zea mays
  Clone ID: MRT4577_66375C.1
attcggctcgagctggcttggtatcacatgctcttgttcaacacgcgtaccagtgacatgcccggggcggcgcgtgctaacctgctggtgtcgcgcgcgccaaaacaaatttaacattttctgcctttcttggagcggtctc

SEQ ID NO: 147861 - DNA, 238 bp, Zea mays
  unsure (1)..(238): unsure at all n locations
  Clone ID: MRT4577_66376C.1
tcgtgtattattatctatccacgggttcacatacgggggctactcatacaacagaggtccgtccacccactatcttctctnnttcacttattttcctttcccgctctactattaaaccatatttctacatgcgtctcctatcccctttcatttttagctcttccttcaccaaccttaataagcttttgtcccattttatctttttccttaactttttttcttttgctattaatttccc

SEQ ID NO: 147862 - DNA, 1288 bp, Zea mays
  Clone ID: MRT4577_66377C.1
tgcctatgagtaaagatgccatatccgtcttcgccgcaagtacattgaagatagtactcacagtcatagggagagggggggagacaaggcaacacagtcaaagaactcgatagaaaccagagctcatcatcaggccacagtatacctatagacgtcgctggaagcaccgggatgattgatctggacgagttcaggctctcatggcgttccaaggatccatcgctgggtcaagtattttgctgcgtgagctagtaagcagaccgcgaaacagtgggctctcggaaactgcgagacaactgcaaagaaatggtatgctcagttcacacaaaactgaacagcaaagaaatgagatagaggtagaactgtcacggtttcagtaaaaaaagagagaaggaggaaatcatcaattcccccaagtagtaattagtagcacactacataaagccctagaagacgtcaacttgtagatgcttcgaacaattatacaggatgacacaaacatatggttgaacaacgttgtagcatatcatcgagcatgttgagggcgcgacccagaggggtttccaatgttccatggttactgctgctgcccgctagggtgagggcactcacaccggaaggacaccagaggagaagcagcagaggtcgtcgagcaccaacgacgaagggagcgaccgtggacggacctaggtgttccaccaccatgtgaccatggctgaacaaggacggccggcgtgaaggggataaggaactttggcccaaacgccatggacgagctagggctgcggctaccagagagggagaaacgctgagcaccacagggatgggcaccgagcgcaggagcagagagggaggcgctaggaagttcctgactggacttgggcggcgcaggaagatggagcagagctgagcacgactggcgagctggagggcagcgagcagggagggcgcgtagggggcgagctcgaacctccctggtggctggcgctagaggaagatggggaggggatggagaagatgaggtgcgtgcaagagatatggcgagctggagggcagcgagcagggagggcgcggagggggcgagctcgaacctccctggtggctggcgctagaggaagatggggagggtatgaagaagatgcggtgcgtgcaagagatagggctgggcggacggctgagtgtgcagtgggcagtggcggcggcacccgccatggctgagggagggggtggccatggaagaagtgacggcgcctcgtgccgaattcggcacgaggcctcgtgccgaatt

SEQ ID NO: 147863 - DNA, 560 bp, Zea mays
  Clone ID: MRT4577_66378C.1
ttttttttttttttttgctctatatatcgtattgcgctatagtactgcttgccaacccgccgctagattcctcatccaggctacttgacctaagtacagcattgtcctctcacttcgtccccggtaagactcccaggtcctggtcacaagtgcaaaggtctagacagtggccatttgacccccatcacgctgaccaacatatgtctctcgctcagagtcatcatagtgatagctgggacacgacccaggctgctgctggtcgccagtgacagccttgcctgcgccaacctcattaccggagatccagtctccgtgttcacgacagaagtagccgcgaccacatttgcatcgcagggatgtccatttctcggactcctcaagccaatgtttgcggtcctcggaactgccttcagctggctctgggcgaggcaagaccttcagagctgcgaacatctgaccgatgttttccagcgtaacacggcaactggggccaccgcacaatgtttgagccttcccaaaaagcatgatgggctttgtggtctcagtatgggtctgggaat

SEQ ID NO: 147864 - DNA, 362 bp, Zea mays
  Clone ID: MRT4577_66379C.1
caacaaaacaacccggcggaatggcggttcactaaaatggcatagccctgaattaaatgatgcccgtccttctagccgtgggaagtttacgctacccacgatccgcgtgcatttaaaacggggttagagtttcccacacaaaagaacggttggacttgctctagcctgcccgtggcctgtaacaggagcaagggtaacacataagcagcgggctcactatggctgttgactaccatgtagacacccataagccaggcctgttaaatgatgcagatgaacttcttgcctccggcctcaagcgttatatggccttttttggaaccaagccatttttgaagggctcgagaatcttgtcatgctcc

SEQ ID NO: 147865 - DNA, 704 bp, Zea mays
  unsure (1)..(704): unsure at all n locations
  Clone ID: MRT4577_6637C.1
ntctggggcgtgnacagnncgttgtttcaacaggnagggggtgaagggagcaaccaatattgggtttggtcgtcaacgcttttcggcttaattcgcttgacggnnagttcgggnacgctctgcctagttcatttcgcggnngcaaacttttctgctaagccagnagnaagnaaaaaaggtatgttttcnntctagtgggnagaagnagnatncannggtcagtgggcgggcggctgggcagntnngtatgaaaatnntgagtaccacacttggnnatagcactttaggtnggagggagtgaaacagnatnncttctcgggtgggcattttgttgctttcaagggaagnnctttatctgcttcaacattagcctagttcagacactccggnaccagtgnnagtcaagaatnntgttctggacagaagcagttccatttctttnntgagttatgtattagtttatagttttctatttggcagaaaatattagtcgtgagtattttggtttgtttggtaaaaagagtgctnaatcagaaagggttgcantttgtcgtcttggtccagtnccttattgcaccttttattcanngtgatgtcagggctatttaagtaagtttcagttttagnataattgaaccttcattctttgcacagtatttgggtagacatttattttgttgttcggaggagccatgttaaaatgt

SEQ ID NO: 147866 - DNA, 918 bp, Zea mays
  Clone ID: MRT4577_66380C.1
gaaatttagatacaatccatggttatatatcatttattccaaactgatatgtagcactaagtgattcatgttgatgctgccaccttcatagtggatgaaaatactcttggattctatggggttgtttgcttggggacctggcctgggcagagccggctaggcagctccgtttagctccaagtgtacaaaatcagactcctgggagcgctgcctgtgccaggcagttatcccagtccacgaagcaagcaggccctatattagatatttgttgtttaactcattttgcctgtttgtttctgatttattttttgcaggcactggatacctaactgcttgctttgcactgatggttggaccagaagggcgagcagttggtgtcgaacatatcccagagttggttgctacttctactgaaaacatcaagaaaagtgcagcagccccacatctaaatgatggatccctcagtatacacgtttctgatggcagggaaggttggccagaactggcaccctatgaagccatccatgttggagctgcagcaccgcagatcccggaggcgctgatcgagcagctgaagcccggcggcagaatggtgatccctgtcgggacagtcttccaggagctgaaggttgtggacaagaaattggatggcactgtcagcataagagacgaaacgtccgtgcgctatgtgccgctcactagcagggacgcccagttgcacgcaagctgagtgatctatcatgtcaaaaaaaaaagttatcctcacctgacaaggtgaggcattcaatcgaatcgctacccttgtaaatgtattaatcctactgtctcagtaaatgcgctggcttggaaataatgtaaatgatggaacatcatggaacgtttgtttccctgcaaaaaaaaaaaaaaaaaaggccccta

SEQ ID NO: 147867 - DNA, 136 bp, Zea mays
  Clone ID: MRT4577_66381C.1
aggctcggagaagcatatcaagacgcaacatgatctcctgcggtcacacggctgtatgagcgacagcagatgatgcgtgcgaagatcgcgacacctgagaatgtctacgctttgtctcgctgaaactccggatcat

SEQ ID NO: 147868 - DNA, 254 bp, Zea mays
  Clone ID: MRT4577_66382C.1
acaaaaaaaactccctaaaaccccctggaaaggccccgcctgacttactgcctttatccaaggcctcaaacgccctcgggggagcccatcaccccggaccatcgaatttattaggggaccaagcaaccctaaaccaccaggggggccgtttaagcctgaaccttggtttgctgttggaaccaaaaggcctggccccccagaacccggtcaagcaattcctgaggcacccgttcccccccccttttttgcgaaaa

SEQ ID NO: 147869 - DNA, 651 bp, Zea mays
  Clone ID: MRT4577_66383C.1
aaatgtttttccatctctacttgcctgacgccgacatcactctctcctgacccgacggtccaactcttcctccgtctatgccacagcctgctctctattacgccgacccatctcagatagcaacagtgatccggacacgatgaggaggatgtcggtcaggctggggcaccccttctgaaggcggcgaattgaagatgaccgcattgatgatgaaatcccctatctacttcctgtcgttggtgagaaggccgctgggtgtgtcatccaagacctcgacgatgaaaccaaccgtgcccctttctacctctatgggaaacagcttcagcacgggcggcggaagcttctaccactcctttaccagaaagctatctgcatcttcgtgtagaacagccttccaccagattcctgtgctgacggctgccatgtactcacctttgattgcaccaacattgactcctgtacatgatctacggcggtgagaataccgttgtgctgctatggacgaaaccacggcggcttgaatcgacatgctatcatgcccctcctcctggacatgcttgaaaagaattgcgctgcatcaagaatccgcagacatgataatctgggaatgtcttaggtgttcaggtgctcgatgcgcccactgtactggtg

SEQ ID NO: 147870 - DNA, 280 bp, Zea mays
  Clone ID: MRT4577_66384C.1
ctgttcttttttctccccacaaggaagatgagaggatattcctacataaccctgggcagggagcacgcctagaatccagatagcgagtgttcagaataatgacacctgcacaagcttctcacaacgtacaggagcaactacaaggaatagaatccccagcctacacaggaggcgcctctgactggcagtgccaaggggtctgtaaggtacacggaccatgaccaggcgagccacctggcaaccgacatgaaggacttgactgctaccagaagtgcacaca

SEQ ID NO: 147871 - DNA, 377 bp, Zea mays
  Clone ID: MRT4577_66385C.1
caacctcatcttctacgcttctagagaactttcacctgctcatcacctatttcattcccaactacactctctccaatcacctcttccactttgaaaaccatacaattgaatcttctttgccttttatagtttcatactacatctctaaatcactctattatttcatcacttatttatatccttcttaccattacctaaattcatatataatcctcttttattataatgatcatcctcaccttatattctttttccttattaaaaacacttttcattttaaaatctatatcactcatctttcatattcaccttcaaatattttaatatatggaatatttacattcataaattttcatattcatctttttcaactattc

SEQ ID NO: 147872 - DNA, 702 bp, Zea mays
  Clone ID: MRT4577_66386C.1
ttccaatcgaatgctaagcatattcccatttcatcccatcccactaccacccatctacgtagtccaccgattccatcccgatatgtccacccatctgcaccgatgtgcacgaatatgagcatggccaccctcctccactggcatctgaacggtaatactgcgttcgtgggtgaccacctcaatgtcccgctcgttcatgccacaaaagatcaccgattacacccgtatccgcgcctccgtacccactagtgaagttcctcctcgagaagatcgctgggtaatcctcacactatgcacctgagtctgacagggggtgccaccccatcgtacaggttgttgcctcgtgatccacgcttgcctgaactccttgtatgtaatatggtgttgatccatgattagcattggtgatgatactgacaaattggggtagccgctttaccgaaaggtggatgactgctcctaaatagtgtatatagtctactaggcagggagacaagaacgaacctgaatgtgctagaaggatatgatctgacgctgacctatatgcttggatgcttttggcacggactctgagctctgcttgaccgtgagagtatgccactatcttgaaatcgtgatgttgctgactgcctcgtgtataacgaccttcactacctatgctgtagatgttgatcacccaaataagacatttgcctgtattgc

SEQ ID NO: 147873 - DNA, 543 bp, Zea mays
  Clone ID: MRT4577_66387C.1
ggacagcagctgctccccccaccttgttctaatgctcctgccctaggctgctgatcagagaacatgggaacccgccgcgacaacctgctgatcctcgaggctgtgctgatgatccaggcgctcctccccgagtagaaggaaggcctggtgcggatagcgctgaataaactgtccggggaccagaacggcacgcgttaccgcgcgcctgttcgccaaggagaggcagcccctactcctccgcagctacaacgctataggatcaagcggagaccaccactcctacgttatggaactgaataactacatgaacgcgcacaactatgatagagatccatgacgggtcgccgcagagaaagataccgaaatcattgacacccgaggacaacctctgaccgccgtgcttcaaagctacttgtcgatcgcttgctactgccactaagactacaaggtagggaatgcaaacacttacaagaagaactgaaaaacagctgccatactctatggaactggttccattgctggtttaaccagcgaggatagcaa

SEQ ID NO: 147874 - DNA, 576 bp, Zea mays
  Clone ID: MRT4577_66388C.1
taaaaaaaaaaaaaaaaaaaaaaaaaaaaaaaaaaaaaaaaaaaaagaaaagacaataataaaggaaaaaagattacgtaacacgaagcatgcaatgtaataggctcttatatagtggaaacctaaatggggtgttactggcacggggttttacaactgaagtgcactgtggaaaacaatgaaagtggggggggggggggggccttgtaattaaattccactgttcgtgggtttggcgaaataagggaagagggaagaaccgtggtgtactcacaaatagtggcggtggctgaatggcgattgggacgcgctgtgtgggggtgaattaagcgtggcgggtgtggcgtttacacgtgggggggaggttatattggaaagggaagtagcttttgttggtttctttatgttggcttcctttgtggtttagtaggggggttttccttgtaatggtgttatttggagggtcgtttttgtgttttttgttagtttttttgtggggtggggtggtggttttattggttgggttttggttttggggttggttgtggggttgggtgtggggttttggggttttgt

SEQ ID NO: 147875 - DNA, 359 bp, Zea mays
  unsure (1)..(359): unsure at all n locations
  Clone ID: MRT4577_66389C.1
ttnataannntnnttttttaatttttttttnaggtnanaataatattttttctttttatctatanncannnatcaaaaaannnccccccctcttccaccaaccttttaacctaaattattccccctttttgtgagggtcccccccaaatgggtaacaaaaaaaaccccacactacaaatgtacccccggttcatttggaccaccccgggccaaagaataacaaattaatggccacccctgccaaggggtgggccgcttttacctgataacctttaaccccgggcgggtacccttaagttttacggcgccttaatttaatttaccacaccccaaccagggtgccgggggggagccctttt

SEQ ID NO: 147876 - DNA, 1128 bp, Zea mays
  unsure (1)..(1128): unsure at all n locations
  Clone ID: MRT4577_6638C.1
attgggtacctcgaggccggcctggactctcccgtcgcagcctgaagctgtgcgccccggttcggtgggcgtgaaaggggagaaaagagggcgggaaggaccgcggattttgctagggtttgcggtttctgcttcacactgcctcctcagtcctcaccaccacagccgtcgcgcgcaggagggtagggaggatgccacgtaagatcaccttggtcaaggagggggagccgcagccggtggacgctgctcaaggggagcccgctccggcaccggcggcaccgacggccgcgttgacggaggcggaggtggacgagctgcccagggccatcgtgcgccgccttgtcaaggacaagctttcccacgtcgccggtggggaaggagccgaggtcatcgtcaacaaggacgccatggccgcgttcgccgagagcgcccgcatcttcatccactatctctccgccactgccaatgatatgtgcaaggaatcaaagaggcagaccatcaacgctgatgatgtcctcaatgctcttgatgacatggagttttcggagtttgtagagccccttaggacttcactgcaagagtttagaaacaaaaatgcagacaaaaggtcagaagcaaagaaacaacagaaggaaaagagaaggaaattaaatgaagagacacttccgcagaaagaaaatgatccagctgatgatgccaaggagaatggagtagcttaatcgcaagaaaaatgaagaatgaatacaattaacttctctgctggaggggcagtaacacgcagaatcaaaaccatggcagtatttgttggtagttgtatttgcttttgctccatgtagcctctactccaaaacactttcttgacttgatatgatgctgtataattctagtgtcctatcagttttcagcttgcttatggtgcaattaaaattctatgtgcctgatgaaattgttcttatgaatgaagaatgataccagcactatgttcgttggcaaattaaaaaaatttattcttccagtatgtaacatcacattccctccacagtcccaccatctctgattagatccagattacccccagntactgtgattcttatcctctngtgctctgtttggggttggaatttggaa

SEQ ID NO: 147877 - DNA, 315 bp, Zea mays
  Clone ID: MRT4577_66390C.1
ccttatctttcacaagaaaccactcaccatgggggtggcacaaatgattggttgggccacctcaaaaccaaacctggacacacccgtacacgagacaggacagaaacttacttccattgcccctaacgctgtaacatctgcccttctcaaccatcaatggaaagacgcacaattcaagtgtgccatgtgaccagaaaccagttggtcccgaagatgaagacacagcaatcataatccctgatcatcacataccccaagccattgaacgcatcacatctcaactctcccatgatcccacccattaaaaatgtgcaa

SEQ ID NO: 147878 - DNA, 743 bp, Zea mays
  unsure (1)..(743): unsure at all n locations
  Clone ID: MRT4577_66391C.1
attcactgctcactctgctcgccactcccctcctctgctcctctctctggatgagagagctgagcaatggcggcgtccaaggcgctgatgctagcggtgggcgtggtggtggtggcggggtgcgcggtggggctgtcgggcgcgacggaccacatcgtgggggccaaccgcgggtggaaccccaacatcaactactccagctggtccgccaaccagaccttctacgccggcgacctcatctcgttccggtaccagaaggggacgcacaacgtgttcaaggtgaaagagacggggtacgacaactgcaccatggacggggtcaccggcaactggacctccggcaaggacttcatcccgctcccgcgccccggccgctacttcttcatctgcggcaacggcttctgccagtccggcatgaaggtcgccatcaccgtcggcatcttcgatctcgcccagaagatctaccccccgcccgcccccggcgccgacnacccatccacctccgcctctttcaccgcaggggcggggccggcagcggcagcgggggncaccgcgctgggagctgccgccatccttgtcctttagttccaaggagtatcatctgcagcgattgaccgagacatggtctctaatctagtctaattggggggcatttagctagctagctttcctgatgtaatgtaaccgcacccgcatttcgagtatcagtagaatgtactcatgaatcaccacgctagttgcaa

SEQ ID NO: 147879 - DNA, 2194 bp, Zea mays
  Clone ID: MRT4577_66392C.1
cattcagggtctcgagccggggcgggaactgaattagaatcccccaccagttggaacctgtctgtatgcggcactgcggcgcccgtggggcccaccacggcgccgccggcagcgtcaccaacccccacccccacctccgccctcccaccggcactcccctcgcctgctccacgacgcttatgcgctcgcgtcccgctctcgccgcccacctccggcgcctgctcctcctctctccctccgcccacctcatcatcatccgccgcgccatggcatccgccgccgccgcgcaggcgcagccaggtggcgccccgccggcgaccgcggagtacgaggaggtgctggggcggctctcctcgctcatcacgcagaaggtgcgcgcgaacagcgccaaccgcggcaaccagtgggacctcatggagcactacgtcaagattctggagctggaggagtcgatcgcgcggatgaaagtgattcacgtcgcggggaccaaggggaagggttccacatgcacattcaccgagtcaatcctgcgatcgtgtggcttccatactgggctgttcacctcaccacatttgatggatgttagagagcgatttcagctagatggggttaatatttctgaagagaaatttttgaagtacttctggtggtgctggaacaagttgaaggagaagactgatgatgatattcccatgccagcctatttcaggttcctcgcgttgctcgcattcaagatattttctgctgagcaggtagatgttgctgttcttgaggttggcctacgagggaaggttgatgcaactaatgtggttaaagcacctgtagtttgtggcatatctttgcttggatatgatcatatggaaattcttgggactacacttttagaaatcgcaggagagcaggctggtattttcaagaaaggagttccggcctatactgctccacaaccagaagaggcaatgactgctctcaaacaaagagcttcggaattgggtatctctctccaagtcgttgatcctttggagccccatcacctaaaagatcagcatcttgggctgcatggagaacatcaatatataaatgctggccttgcagttgctttggctagtacgtggcttgagaagcagggacataaagatacgttaccactcaatcgtactgatcccttaccagatcattttattagagggctatcaagtgcttctttgcaaggccgagcacagattgttccagattcacaagtgaattcagaagagaaggacaaaaattgttctcttgttttttatttggatggagcgcacagtcctgaaagcatggaagtatgtggcaagtggttttcccatgtcacaaaggatgatacaaggctaccatcttctgtggagcagtctcatacatctatgtctcaaaagatccttctgttcaactgcatgtctgtgagagatccgatgagattgcttccttgtctcctggatgcattaactcaacatgaattgccctgtgacctggccctatttgtgccgttactcattcacaacacacaaagcttggtcctaaccctttagcaccagcggagcctgagcaaatcgatttgtcatggcagctgtcacttcaagaatgtgggtgaaaagtcaacacaatatagtggtataaataatacaatatatagggatactagtaaaatttatgattcgcgtagaatcgcacgagagtagcaaaggagaaatgcccgagaacacctatctacctctctccatgtggttgttactgtctccagaaataatcaaggaagtgattcgacgctcgaaatccaaactggaactggactatgatctatactggaactggactctaatatgattagcgacccgaggcaaatgagaggtgcaaggggagacatgtgaacggtgctttgcttattggtgctaaccatgctgcgagctgcttgtgttttttttgtgaggccacggtcgcctgttttccactcgggaaaccaccgcgcccgttcttgtgaaggcatgaaataggatgatcgtgccaccatagaacataactgggaaatgaatttgacatggaactgggacagtctgtatactcacaaaataagatcgcatggggttttcttgttcaagtgcaaagaaaccagtcaattcttatccagagtagcaagaattcattcaaaaaaaaaaaaaaaaaa

SEQ ID NO: 147880 - DNA, 804 bp, Zea mays
  unsure (1)..(804): unsure at all n locations
  Clone ID: MRT4577_66393C.1
cctggaacttccctctgctctgacagttcacctcgccgccaactaacaccagcagtcaccatgtccgactccaaggccgccaaccccatgcgcgagcttcgcatccagaagctcgtcctcaacatctccgtcggagagtctggtgacaggctcactcgtgccgccaaggtgctcgagcagctgtctggtcagacccccgtctactccaaggcccgctacaccgtccgtaccttcggtatccgccgtaacgagaagattgccgttcacgtcaccgtccgtggccccaaggccgaggagatcctcgagcgtggcctcaaggtcaaggagtacgagctccgcaagcgcaacttctccgagtccggcaacttcggtttcggtatctccgagcacatcgacctgggtatcaagtacgaccccagcatcggtatctacggcatggacttctacgtctgcatgacccgccccggtgagcgcgtcgccacccgcaggcgcgccaggggcaaggtcggccacgcccacaaggtcaaccaggccgagaccgtcaagtggtacaagaaccgcttcgagggcattgtccgataaacgcaccttttaatcggngcgagcaaaagagaagaagagaaggaagcgaaacgaagattctgaacgattcaccagcatattccgatacgtctcggggggttatggtcctgcgnagtcccggagtgtaacttaaacgagcaagaacgcattgaacttgcatcatcaagttcaggcctatcaatggagctgactcgtctcccgtgtgtgagcggggtcaagatc

SEQ ID NO: 147881 - DNA, 620 bp, Zea mays
  Clone ID: MRT4577_66394C.1
cccccccaagcttggtttttacacttcagccccagcggagccttaccaaatcgatttgtcatggcagctgtcccttcaaacagtgtgggagaagtttcttcaggataaaggtataaatactacaaaatccagtgatactagtaaagtttttgaatcgcttccggtcgctatcgagtggctaaggaaaaatgcccgagaaaaccaatctacttctttccaggtgctggttactggctccctgcatctcgttggggatgtcttgagaataatcaagaagtgattcgccgctcgaaatccaaactggaactggactatgatctatggtctctcccaaggctaacatgattagcaaggggagacatttgaacggtgcttgcttattggtgccaatcaagctgcgagcttcttgtgtttttttttttgtggccacggtcgcctggcttccactcgggaaacccccgcgcccgttcttgtgaaggcatgaaataggatgatcgtgcccccatagaacataactgggaaatgaattcgacatggaactgggacagtcagtataaaaaaaaaataaaataaaatggggttttgttgttcaagtgaaaaaaaaaaaaaaaaaagcggcc

SEQ ID NO: 147882 - DNA, 2220 bp, Zea mays
  Clone ID: MRT4577_66395C.1
ataagcaaaatggcagccacctaatctggtaatatcggagcaggagcccccccccgggtggaaccggtctgtatgcggcactgcggcgcccgtggggcccaccacggcgccgccggcagcgtcaccaacccccacccccacctccgccctcccaccggcactcccctcgcctgctccacgacgcttatgcgctcgcgtcccgctctcgccgcccacctccggcgcctgctcctcctctctccctccgcccacctcatcatcatccgccgcgccatggcctccgccgccgccgcgcaggcgcagccaggtggcgccccgccggcgaccgcggagtacgaggaggtgctggggcggctctcctcgctcatcacgcagaaggtgcgcgcgaacagcgccaaccgcggcaaccagtgggacctcatggagcactacgtcaagattctggagctggaggagtcgatcgcgcggatgaaagtgattcacgtcgcggggaccaaggggaagggttccacatgcacattcaccgagtcaatcctgcgatcgtgtggcttccatactgggctgttcacctcaccacatttgatggatgttagagagcgatttcagctagatggggttaatatttctgaagagaaatttttgaagtacttctggtggtgctggaacaagttgaaggagaagactgatgatgatattcccatgccagcctatttcaggttcctcgcgttgctcgcattcaagatattttctgctgagcaggtagatgttgctgttctcgaggttggcctaggagggaagtttgatgcaactaatgtggttaaagcacctgtagtttgtggcatatcttcccttggatatgatcatatggaaattcttgggaatacacttggagaaatcgcaggagagaaggctgggattttcaagaaaggagttccggcctatactgctccacaaccagaagaggcaatgactgctctcaaacaaagagcttcggaattgggtatctctctccaagtcgttgatcctctggagccccatcacctaaaagatcagcatcttggtctgcatggagaacatcaatatataaatgctggccttgcagttgctttggctagtacgtggcttgagaagcagggacataaagatacgttaccactcaatcgtactgatcccttaccagatcattttattagagggctatcaagtgcttctttgcaaggccgagcacagattgttccagattcacaagtgaattcagaagagaaggacaaagattgttctcttgttttttatttggatggagcgcacagtcctgaaagcatggaagtatgtggcaagtggttttcccatgtcacaaaggatgatacaaggctaccatcttctgtggagcagtcccatacatctaggtctcaaaagatccttctgttcaactgcatgtctgtgagagatccgatgagattgcttccttgtctcctggatgcatcaactcaaaatggagtccactttgacctggccctatttgtgccgaaccaatcacaacacacaaagcttggttctaacacttcagcaccagcggagcctgagcaaatcgatttgtcatggcagctgtcacttcaaacagtgtgggagaagttacttcaggataaaggtataaatactacaaaatccagtgatactagtaaagtttttgaatcgcttccggtcgcaatcgagtggctaaggagaaatgcccgagaaaaccaatctacttctttccaggtgctggttactggctccctgcatctcgttggggatgtcttgagaataatcaagaagtgattcgccgctcgaaatccaaactggaactggactatgatctatggtctctcccaaggctaacatgattagcaaggggggacatttgaacggtgcttgcttattggtgccaaccaagctgcgagcttcttgtgttttttttttctggccacggtcgcctgcctaccactcgggaaaccaccggcgcccgttcttgtgaaggcatgaaataggatgatcgtgccaccatagaacataactgggaaatgaattcgacatggaactgggacagtttgtctgtatactcacaaaataagatcgcgtggggttttcttcttgaaatgcaaagaaaccactcattcttctccagagtagcaagaattcattcatgttgtgactttgatgatgtatcctgttctttctacg

SEQ ID NO: 147883 - DNA, 166 bp, Zea mays
  Clone ID: MRT4577_66396C.1
aaggaatactcttcaatttttggagctcacttttgggcttttgaagcctatcctggagattgtgttcttttcttacgctgcggcacctaataaatgacttgccttctatgttttcgagaaacttacattattcttttctatataacaataatactgtctattcagt

SEQ ID NO: 147884 - DNA, 292 bp, Zea mays
  Clone ID: MRT4577_66397C.1
acccacgcgttacgcgactcattgaccatactagccaaacttccgacttgacaatgtattccgaccagatcgagccggggaggctcttccttggagccaaaatgaggggcagggccacacttcctacccactgaataagtttaataacgatcaacgtagtgggattacacttgcgccccgactctcccacttatcctacacctctgaagtcatttcacaaattcggactatactcaaactcaacagggtctactttatgtgctgattgcatcaatcccgtttccttaaatgt

SEQ ID NO: 147885 - DNA, 279 bp, Zea mays
  Clone ID: MRT4577_66398C.1
gccacgcgtccgcccacgcgtccgtgtagatcgagtatgtctttaagaattgagtcgcgtcacaaagataaaaaaaggcgacctctgcgtatgatttttcattacaatcagccatggctgaagaagaaacaccacctcccctacttgaagggggccagaaggaccaacatcaagccgcgggcggggcgtcccgaaaggacccccactacacaaatgctacagtgaccgaagtttgtccacaggcgagaacgaataccaagagtactagagggaagacac

SEQ ID NO: 147886 - DNA, 329 bp, Zea mays
  Clone ID: MRT4577_66399C.1
ttgaattcggacgaggcggccttcacgatcctagccgccgcgcggccttgtacctgccctcagccgccgtcgcggccttgtgcctcctctcctgaggcgccggctgagccttgcccctgctgtgctgggcgcgggcttgccccacccacagggcgctgcgccgagcgccgaccgccgccagccgctgcaccctgcacagaggctgcgccgaccctagtggaactccggccgatgtacttgtgctgccgacgaaggcggcagcggcagacagtagacgctgggcaggggggtgggccggccgtggtggggctggggccgatctggtggtg

SEQ ID NO: 147887 - DNA, 367 bp, Zea mays
  unsure (1)..(367): unsure at all n locations
  Clone ID: MRT4577_6639C.1
nacctcatttttttttttttttatgcancaagggcgggtttagcacacctggggttttaggaaaaaaaagtaatctgtactgcaagtacattgtataggttcccttttcaacccggcgggggatagtactccagagtttataaagcacagcgtaagaccattagctatattggtcaacgaattcagtgtttttgccaaaatccaaattgtgggccggctcttttcaggaacattttattcccgcgcttatgcccctaaccaaggggggactttcaccaacccttaatgaattttgaggccaacatttgaggggctcaaaaaccccttcaaattgaaaaaactcaaaccggactcttgggggaggggc

SEQ ID NO: 147888 - DNA, 286 bp, Zea mays
  Clone ID: MRT4577_663C.1
atagtatcaaatcatatcatcgtggaccaattaatatatggtacagcagacgcaatcggatcaaccaacatgcatgtagacacacgtacatgagcacaaagactgacgccaaacatgcagagagagatagcaaactgaagaactttgtttttttttttttcacacacacaccacacaatatcctatgtatggcagccagctcggccttgcttattattggtcaaccaccaccacatgctagatagagtatattcatttacatggtcgttgatcgatgtgatcagta

SEQ ID NO: 147889 - DNA, 385 bp, Zea mays
  unsure (1)..(385): unsure at all n locations
  Clone ID: MRT4577_66400C.1
cgcgagcgtgcgcaatttcacgctcttcccgcgccggcctccagttccctgttggacgtatccaccttcagggggagcgaaggactcaggcggagggacctcttntgtgccaccgcatccgtctacttcggttccatcccggagtacttgacttgccaagttcttgggcctgctgggaatgctaacaaggatctgaatgggaagcgtatcacccctcgccatttgcagctatgccattcgtggagacgaggagctggacaccctcatcaagggcaccatttcaggcggaggggttatccctcacattcacaagtccctgatcaacaagttcttcaatgagggtaaaactagtggatgggcatttttatgtttaactagacttatt

SEQ ID NO: 147890 - DNA, 581 bp, Zea mays
  unsure (1)..(581): unsure at all n locations
  Clone ID: MRT4577_66401C.1
cggccgggccgggnaccttcacccaccgctccggtcgcctggcatgtattcggtcaacactggggcggatcgatcgagatcgcacgatgcccctgcccggcacgatgaccacagccgcaacatggacctggaccgcggcacgctgtcggcgcggcatctcacgagctggacaacacgcagcagagttggctgctacgcccgccggacgtcaagaagaacgacaagcacgtggacctcggttgtgtcgtcgccaagagcaagctcctctggtgagccttgagctgtgtcgtcgccgctttagacctcatcggcctccccatcctcatcgccaagtccatcccgcacaagaagccaggtccgccgccgccagatgagtacacagaggagctggacaaggcgctcctcttcttacacgcgcagaaatccggacaccttcccaagaacaatggcatacagtggcgcgggaactctgcgctgtcacacgggtccgacgccaaggacgtaatgggtggtctcgtcggcggctactacgacgctggccgaccaacatcaaggcccccttctcgaaggacttctccatg

SEQ ID NO: 147891 - DNA, 243 bp, Zea mays
  Clone ID: MRT4577_66402C.1
ttttaatagtgatttcagatacaaatcaaatttatgtttaccttagtgactatgctgatattacacattattctagctctctacttctccaaatcaaaccaactcttgttgtatttattaacaaaacccccttccctcgcgcacggctatatgtataatacatcctcaactaccgttcataataacatgcactcgcattctttgttgaacgtgaagaagatatattactcgactatttcccct

SEQ ID NO: 147892 - DNA, 579 bp, Zea mays
  unsure (1)..(579): unsure at all n locations
  Clone ID: MRT4577_66403C.1
atcgaccccgctccagtgctccacccatctcactttcgatcgcgagttccaacttccaagctagctagtcgtcgttgccgtcgtcgtcccgaccgccagctagcgctcgtggtacgtacgtgcgcgtatacgcgcgtgcgcgctcaatacaacacacacatggcgatcgtcaacaagaagcagagcggcgcggcggcgtcggggctgaagcatatcctgaagcggtgctcgagcctgggacggcgccagcagcatcagcgcagcgttggggaggaggagaaggaggaggaggaggaggccacggggctgccgtccgacgtgccgcgcggccactttgcggtgtacgtgggcgagcggcggcgccggttcgtggtgcccatcgcgctgctggaccgccccgagttccggtccctgctgcggcgcgccgaggaagagttcgggttcgcgggcgccggcgccggcggcgccctcgtcctcccctgcgaggaggtcgncttccgatgcctcacctgcgcgctcgnctgcgcccggtgaacgcgcgcccgtgtcctgccgccgcgtgtctgggatttggatgcc

SEQ ID NO: 147893 - DNA, 1304 bp, Zea mays
  Clone ID: MRT4577_66404C.1
ggccgcttttttttttttttttttgcagctctgaccctttatgttattcaatattgatacaatgtatatttacaacatcaaaatgatctcaaaggcctcagattctcaataatataacatgatgacctactacgtgaatcgtacataaacttttctttttcctctacaaaggaattgggagatgaaacgtcatgataccgagacaatgctgcgggcgacatgactaattgattagcagtagccctaaagaaaacgccggtgcttggttgcaggaaatgttccatatttgcctccgtcgcttagctttctacattcatgtcaatgtttctattcatcgtcgaatttcaataatcacttctactgattcgtgcgtctcctggctattattttgatctctgggatgttgacgagcaggttggaaacactgaggtgctgggttatcagaattctctgggtcggggtcggggtcgggctcgggcgggagttgctggatgctacataccgatggcatggcagcctgcagctcttccagtgagacccggcatattgggcaagtcgtctgcttttccaaccataaatctaagcaggcaaggtgaaagctgtggcggcatgttggtatgattcgtagtatctctttctccctgtattcgcctaaacatattgagcactggacatcgtctttagagttgaaagcctcacaattgtacttcatagtaggaattgcagcaataaccaaaggttccaacccagtacgagtgcgttctatcgggccatcgagttccgcggcgaaatccggcgatggcggcgcacgggtgtcaccacggcgttcgcggcagcagatgaacctcacacagacgaacgccgcgaaggctgcggtcatgccgaagccgagcgccgcgctgactaggttcagccccgacccaaacatgcccgctgatgtgcttcacaccgagtttgccccacctcccctccgcctccgtcctcacactgaatcactgataccacctaccagacactgaaaggcgatagcctaccgcttgaacagacgggctgccgctgccgcggatagataggagagcggtgaggtcgcggcccggggcgcccatttggtggggcacgatgcggagctagccggttgaggccaaccgggtgcgatgcgatggggccgcgaagaaaggggcgaccggtgcggcagcggccggtggcgaggtgcggaggaagggagcggacgagcgccagatgatggaggctgaaggggcggctgctacagtggctcgccccggccggcctcgaggtacccaatg

SEQ ID NO: 147894 - DNA, 304 bp, Zea mays
  Clone ID: MRT4577_66405C.1
ggcgccgcaaacagcaacttttttggggcaatttacaaaaataaggtggagagaatttcaatccaaaaccacctttttggagccccaccaacgccaacggggccagctttttaagcagggacctgcccatcccccaccttacccccattattccccggattaacccccccctgagctggcgccccccggaacaaaataaacgagtggcccccgcacgttcccgaaccccccaccccctaattaaccctcctatcaaaaaatttgtaaacttaaccccgagaaacccaacccctggaagagaagg

SEQ ID NO: 147895 - DNA, 195 bp, Zea mays
  unsure (1)..(195): unsure at all n locations
  Clone ID: MRT4577_66406C.1
aggtcgcttaggctccctggctttaactagggtaggcatgccatgnaatnnttcggtgggnaatggggcaacgcgacgtatcccggtgctaagtaccctgcagggcgagccctgagacgtgatccctcggctgaggcggcgcctatcctagtgcgcgccaatgggcaactgcggtgaccgcgcatnnccggcggg

SEQ ID NO: 147896 - DNA, 289 bp, Zea mays
  Clone ID: MRT4577_66407C.1
caacaatagaccaacaactgtgactttataaattttcccaccaaaacctccttccccgtgctgtgtgtgtttttaaccctacattttctcctcattctcacaaactcctataacttacattcttatcccatacctttcataaatgatagcttcagtttataaaaacccagctattcaatcctaatgctccaacactcaatcgctgcaagcaacatacatctatcatccttctgtcaacaatcgtcaaccctatatttacagcagatatatctacacaccatcatctcac

SEQ ID NO: 147897 - DNA, 727 bp, Zea mays
  unsure (1)..(727): unsure at all n locations
  Clone ID: MRT4577_66408C.1
aactaagtaaccggcacgccaggtgtgcctggaacattcgccatctaatcgtgggtacgcgggcccgagtgtaaccataaaacgggcaagccaaaaatacttttggccctccactcggcctcctctggtactttctggcaaagtgcctgcctacggcgaacaacttttccccgcaatggctcaaaaagtttccttacagccttccatttcatcccccgtacccctttcaccaagcgggtgtctttcggtactgtgagaatccccaaattctttcaaacccctaaagggactcccaaccatggcatactcgcaagcttggcactcttttacccttttacatcacccctttggtttccttcccaaccaattcattcaagcnccttattaaaagcaagtttacctttttgggtggaatttttattgggcaacaaaaaaatcaagggcacaaacaaacttacaacaaaactttggtggcttagccaaaaaccctttggcttggccctaacttcttcaagcaaccaagcaagnttttcttttccattttcaaaccaaactaagncttgcaattganacttcttgcttttctttaattttggcaaccaaccnaccanacttaaccaatttcaagnccaagcttaacccttggtttggcccttaacccccccaagncaaatttntcttttcccattttcaaaaccaaacttggncaaaagcatttgaaacttct

SEQ ID NO: 147898 - DNA, 604 bp, Zea mays
  Clone ID: MRT4577_66409C.1
cccacgcgtccgcccacgcgtccgcccacgcgtccggcaaggtgtgagcatttgattccttcagtttcatgctatcaggtacttcttcattttctgatcagaaacaaaaaaggacgaattgatttgaagagtatatgtggacatacttaaagttggatttggttcttgcaccaaaggaggtattatttattctgttgccatatctttaatcaagaaagatagttttctgcaagctcttggtattcttcggcaactaaagagtttggatcttaaattaagcaagggagccttgtcaactatagaagaagaatttaacaaggaaagcaaattggggatatgatgaatttgttggaaagagtggagatgttcccctgagttgcgtcttcgcaacaaaatctttgtgtctgtgtgtacaaatcttggcactgatcaggcatggttgttattccaaatattggaggccttagggtttgctccagatgcttcgactcttgaaattttcatatttcatagctgtagagaaacgaaactgaaatctgcacatgtatatttatcagagtgcttttctaggcatattaaacctggagtttattcttataatgct

SEQ ID NO: 147899 - DNA, 630 bp, Zea mays
  unsure (1)..(630): unsure at all n locations
  Clone ID: MRT4577_6640C.1
cattgggtccctcgaggccggccggngaatagaattgtatcgttggtaagcaattgtcaaccgactctatctagctctcttcgcaagacagtaggtgaccactcaccactcataagattgtgaaggatgtgagatgggcaaggaggtaggatgtgtccactctaaaggtcgtcggcgtccgtgaccgtgactacgcggaccctccgacgtcaccggtgatcgacatcgacgagctcggcaagtgatccctgtaccgcgcctggatctgccgagttcatggccacgctgctgttcctgctcatcacggtggccacggtgatactgtacaatgaccagacggacgcgacggtgtcggtgaccgacgcttggtgcggcgatgtgggcatcctgggtatctcgtgagcgttcggagaaatgatcttcatcctcgactactgtaccttcggtatctcgggctgtcacatcaacccggacggtactttcgacctcttcctggagcgcaaggactacatggtgcgtcttctgctggacatggtctgggagagcctcggtgacatctgctgagaagtgctcgtctaggtctttcatgttgacatctacgatagctacggcgttggtgatattgatgct

SEQ ID NO: 147900 - DNA, 291 bp, Zea mays
  Clone ID: MRT4577_66410C.1
aaacacgggaaaggaaaatactttttacaaattttgttttctaaggacaccaaagggcatggcacgttttttctgtctttggcgaattttgtatcaccttttgcacatttaacgatgttgtaatgggatgaacctccagtggttcattttttcatatcccagccttcatagaaaatatgggggggcacaaaaacatttggttccacaaaacgctgtggtacgaaattgccatagtcctaatttcggaccaaactccaaagtctttggggaaaagaccccttttgtcttttt

SEQ ID NO: 147901 - DNA, 1047 bp, Zea mays
  Clone ID: MRT4577_66411C.1
taccggtctagaattcacgggccgacccacgcgtccagtgacaacggagcttgtcttaaaagacaccttgtctgcaacggaatgaatgactgcacggatggtagcgatgaaaaaatgtgtgaaaactgggagtgcaattttgatgaattgaaatgcccgtcttccaaccaatgtattccgatcgtctggaaatgcgatggaaccaaacaatgcaccaatggaacagacgaagaaaactgttcagaaacatgcccgaaccctgatgatttcttctgcccaggagggccttgcataagcagcacaaaacgctgtgacggtgtaaacgactgctcgaacggaaaagacgaagccgattgtaaagatacgtaagactgcgacgattccctttaggtcgttaccgctttgttttttaaaaacatttttctttgttatgatttttgtaaatatgtacgtattttcagtctgttacctaaggaaaaaaaaccatgttcctataaaccataaaggatttggattacattccattttactcatgaaatttactcattttctgacattatttatataccttttgttatcaaaatcatttttttcctttttgtcattacgtacttaacttttttttttaaatctagttaattatatttatttaattaggtaataccagtcaagtttaaacgttcaaaggaacgttgtgtgatgcgaactcactttcgcttttttgtaaataattctagtttatattcaaaaaatatgaaaattgtgatgttaattttttttttgtattattatgacattcactgtttttatttaaaacaaacaacgaaaaatcgcgaatagaacaaattcccacttattaacgctcaaatgtgtacatttttatcaatcgattattttgtatagaattagtttatttcttacgctagttatatttttgtaaaaagaaaaaaaaaaatcgtatgaaatagtttatgattaatattttattatatttctgtggcaaattgttaataattttcgaaatttaaataaatgtataaaatatgt

SEQ ID NO: 147902 - DNA, 1270 bp, Zea mays
  Clone ID: MRT4577_66412C.1
gtgaagactctctcctaggcgagggttcgcttggtcgtgtttacaaggctggttttcctaatgggaaggtacttgccgtgaagaaggtagacgacagtgccagcttgctgtctctgtatggaggaggagaagaagacgccttccttgagctggtctcgaacgtctctcggctcaggcatccgaacatcgtgcccctcacaggctactgcgtcgagcacggacaaaggcttctcgtgtacgagtacgttgggaacagaacgctgcatgatgtgctgcagcacttgtctgacgacgatggggcgagcaagaagctcacgtggaacacccgcgtaaggatagcgctaggcaccgctcgcgccttagagtacctgcatgaggtgtgcctacccccagtggtgcatagtaggaccttcaaggcatctaacatcctgcttgatgaagagtacagcccgcatctatctgactgtgggcttgctgctgctctcactactgctgtggtctccgctgaagcggttggctcctttggatatagtgctcctgaggtcgccatgtcaggaacatacactgcaaagagcgacgtgtacagcttcggagtagtgatgctggagctgctgacaggccgcaagccactagacaggtaaaaaaacatgtcactgcccgccatttccgacctggtggcccattatttgttgtatagatcaagctcacgcggttcagtctctccctcgtcggcaattttggataccagctccagagagaggtcagaacagtctctcgtcagatgggcagccccgcagcttcacgacatcgatctcctcgccaggatggtcgatccggcgctggacgggctgtacccttccaagtccctctcccgtttcgccgacatcatcgccatctgcgtccagccggagccggagttccgcccgccgatgtccgaggttgtgcagcagctggtgcgcctgatgcagagggcgagcatcataaggcggcaatcggacgatctgggctactcgtacagggtccccgaccgcgacggcggcgcagcaggcgacgtcctctgactctgagtgaggctaggagacccaagttggttcacgttttgtttccgtccgtcacctactcacctgtaaatgacatttgacatgtactatagggttcggagtgtaccgggacttttcgtcagctgcgagtgtcatgtattgtgtgcgctcttgcaagtggtagatatatatatatagaagggaaaaaaaacgtgtcctttttttgtgtt

SEQ ID NO: 147903 - DNA, 2608 bp, Zea mays
  Clone ID: MRT4577_66413C.1
ttgggaccctcgaggccggccggaaaagataagatctggagctaagaagatactcatcaagatccaagaacaacgtgagctgctccactgtactagtctagccctccaccccctttgaggccgcgaccagaataaataaatagaaaccatgcgaccacatcgactcctgccttcattactaccgtcataaaagcagccaccttagcaccgtctaatcgccattgctctactccaattatgctctcaaatccagacagttcttcgatttttttcagccttttctccttcttctaacggaacaggaaggagcgagcaagacgccgttgagaaaacacggggtggtattctgcagtaaaaaaaaaaaaaaacactcgaggcgaaagtgtccaaagccagaggagagaaagagaagacttgtacttggagggcagctgggcaggtgaaaggaagaggaaagagggcgagtgcgacgggaggcgcaatgcggtggagatctcccgccgtgctgcggctgcagctgtggctgctcgccgtctccgcgtcgttggctgccctcggtgttctcgcggctgatcttagcaaagaaccatttactatccgtataagctgtggaagctttgacgatgtccggacggagcctacgaacacattgtggtacagagactttggttatactggaggcaggttcgctaatgccacccggccaagctttatcgttcctcctcttaaaacgcttcgatatttcccgctatctgatggccctgaaaattgctacaacatcaacaatgttcccaatggccactatcaagttagacttttctttgcgttactggacaaccctaatcttgacagtgagccgattttcgatgtttctgttgagggtactctgttcagctctttgcttctgggctggagcagcgacgatgagaagacatttgcagaagctttggtttttgtccaggactcaagcttatcagtttgcttccatagtacagggcatggtgatccatcgattctttctattgaagttctacaaatagatgacgatgcctataactttggtccaccacgggaaaaggggacagtgcttagagcagtcaaaaggctgaaatgtggctcaggaaagcctgcttttgatgaagatctaaatgggattcactggggtggggacagattctggttaggattgcaaactttatcatccagttctgatgatcaatcaatatcatccgagaatgttatagcagagacattgcttgcaccaaatttttaccctcaaggcatataccaatcagctatcgtgggcactgataggcaaccgagtttgtctttcgaaatggatgttaccccaaacaagaactattcagtatggcttcactttgcagagattgataatggggtaactgcagaagaacaaagagtatttgatgtactcatcaatggagacactgcttttaaagatattgatataattcgcatgacaggagagcgttttactgcacttgtcctgaataaaactgttgctgtcagtggaataacactaaaaatcatcttgcaacctgtgaaaggaacccgtgccattattaatgccattgaggtgtttgagataatcccagctgaaaagaagactttgcctcaggaagtgagtgcattgcgaacgttgaagggttcacttggtcttcctcttcgatttggctggaatggtgacccctgtgttcctcagcagcatccatggagtggagttgattgccagtttgacagcaccaaagggaactggatcattgatggattaggtcttgacaaccaaggtttaaaaggggtcatacctagtgacatatctaagttgcaacatctacaaaacataaacttgagtggcaatagcataaaggggaacattccaatctccctgggtaccatctctgtggtgcaagtactggatctgtcatacaatgagcttaatggatctattccagagagcctcggcgagctgacatcattacagatactgaacctgaatggcaatcgtctttctggtcgtgttccagccagtttgggaggaaggcctctgcacagagctagatttaacttcacggacaatgccggactatgtggaatacctgggttacgtgagtgtggccctcatctatccgtggctgcaaagatcggcatggctttcggcgtgcttttagctattctattcctagttgtattcgctgcgtgctggtggaagagacgccagaacattctccgtgctaaaagattagctgcagcaagggaagctccttatgcaaaatcaaggacccagttcacccgcgatgtgcaaatggccaagcatcaacggacacatgaaaatgctcggagcagcaacagtgaaggctcgccacatttgctttcctagctcggtgagaatactgcgacagtgacttggcttccatctattcttcagttcctcctttgtatgctcctctgcagtcttgaaagacgaagctgctgtacatactagctaggtcacgaatggtgtatatacttgtattttttttggtgatctagaactcagtccaggagagggatcagtctatcagatgagagaaattacccatttcatcct

SEQ ID NO: 147904 - DNA, 1896 bp, Zea mays
  Clone ID: MRT4577_66414C.1
aagcctacaaattcactttcagaactagacgtatctttcaacaacctcacggggaatcttcctttctcaatgggtgctctgtcgaaactttctagcctttatatgcaaaacaatcaactatcaggcacagttgatgtcctcagcaacataagccttgcgacactaaatattgcagacaacaatttcagtggcatgatacctcaagaattcagctcaattccaaatttaatagttggaggaaactcatttgtcaatatgcctgcctccccgccatcaactctgaagccacctctggaggaacctcaaggacccgttagcgctccaactagccctgatacccccattgatcaagacgacaggaagatacagacaggtcctcttatagggatagctgttggctcaatagctgctgcctcatgtgttcttttcgtcttggtgttctgcctccacaatgcacgcagaagaaatgatgacgagatcagcgaaccaaaagatcttgtgggttctcttgcagtaagcatagaaacagcagcatccagtagggaagtcctgaacaacaatcatgaaaatagtgctgtagcaacttcagatctccaacatgttgggaagatgatgatgactccggacagagtactgcatgatacgacgaacggttcttctactgccaaaaggccaaaggttcctgtgacggtgacttcatatacagttgctgatctccaagtcgctacgaatagcttctgtgaagactctctcctaggcgagggttcgcttggtcgtgtttacaaggctggttttcctaatgggaaggtacttgccgtgaagaaggtagacgacagtgccttgctgtctctgtatggaggaggagaagacgccttccttgagctggtctcgaacgtttctcggctgaggcatccgaacatcgtgcccctcacaggctactgcgtcgagcacggacaaaggcttctcgtgtacgagtacgttgggaacggaacgctgcgtgatgtgctgcagcactgcttgtctgacgacgagggggcgagcaagaagctcacgtggaacacccgcgtaaggatagcgctaggcaccgctcgcgccttagagtacctgcatgaggtgtgcatacccccagtggtgcatagtaggaccttcaaggcatctaacatcctgcttgatgaagagtacagcccgcatctatctgactgtgggcttgctgctctcactactgtggtctccccggaagcggttggctcctttggatatagtgctcctgagctcgccatgtcaggaacatacactgcaaagagcgacgtgtacagtttcggagtagtgatgctggagctgctgacaggccgcaagccactagacagctccagagagaggtcagaacagtctctcgtgagatgggcagccccgcagctccacgacatcgatctcctcgccaggatggtcgatccggcgctggacgggctgtacccttccaagtccctctcccgtttcgccgacatcatcgccatctgcgtccagccggagccggagttccgcccgccgatgtccgaggtcgtgcagcagctggtgcgcctgatgcagagggcggccatcataaggcggcaatcggacgatctgggctactcgtacagggtccccgaccgcgacggcggcgcagcagcaggcgacgtcctctgactctgagaggctaggaggagacccaagttggttcacgttttgtttccgtccgtcacctgtaaatgacatttgacatgtactatagggttcggagtgtacctggacttttcgtcagctgcgagtgtcatgtattgtgtgcgctcttgcaagtggtagatatatagatatatttgtactacttattatgaaggtaagagtagtctgcctcccttg

SEQ ID NO: 147905 - DNA, 549 bp, Zea mays
  Clone ID: MRT4577_66415C.1
attgggtacctcgaggccggccggacgacactcaccccctccggacgttagctctccaccaacctcagcacatttaggaaaacaggagtgatcatgctcttcgtccagcgtccaccgtggtgagcacatttgtggggaccctcctgacggagccggtgccgtacaacttgcgcatcatggaccgggatctcgtccgcgctacaaagaccaaggctgccgccccgaagaacgagtccgaagacgtagatctcctctgacagcccgctgtggttccccgacgccggggagcccgactacctctacgtgtcgctggtcgacgattacgagtgcgacctcttcggcctcgaggaacccgtgaagcacctgcagatcgaactggactcgctgcaccagaacctgtacctggaacgatgccggcgagatcatcataatcccgtctcgagtcctccaacgtcaagaccataccgttccaatcctacagagacgtgttctccctcgagcgcgtgcgccagagggagatcatacacggtcgatgatgcatgatcacca

SEQ ID NO: 147906 - DNA, 191 bp, Zea mays
  Clone ID: MRT4577_66416C.1
gcggaggcttattcttacttttgggcccacccatcaattcttatatcgctagcgtgacgtttataggatccaaatttacttacccttgcatactacgacataactcttctatatgcgaacctaaatttaatccactggccctattgttacaacctattgactgcgaaaaccatggcgtcacccaacttaat

SEQ ID NO: 147907 - DNA, 191 bp, Zea mays
  Clone ID: MRT4577_66417C.1
aggacactgctgcccggctataactaacttttttcacatgatggagacccatctgttcacgagccccagcgtgtgtatttgatcgaccctagatttccttctactacacacactctacaacattcacaccagcttacacaaaccctattactatacagagacgctacatctactctacttatacccctgct

SEQ ID NO: 147908 - DNA, 349 bp, Zea mays
  Clone ID: MRT4577_66418C.1
tgcagggtgggcagaactactcggtgctcggcggcaactccatggtgcaggtgaacggcaacacggcctgcctcgggttcgtcaaggcggcggccggacaagcgccggcggcggtcatcggtgggttccagctcgagaaccacctgctggtgctggatgtggagaagcagcagctcggattcaccacgttcctcaatgccatcgggctttcgtgcagcaacttcaatttcactcttgctggctagtgatgaagcaaggtgctgtgttgtactatactgtacgtaataagaacttgtgctgcagtgtattactactagaataaaaataaataaatgaaatgggaattaat

SEQ ID NO: 147909 - DNA, 389 bp, Zea mays
  Clone ID: MRT4577_66419C.1
agtaactgtctcatttcaagtgtcaaccctggcctccaatcgcaacgctcccgaggagagccaggaggaagtgaccgcggcgccgcgaggcaggtggtatctatcgtggatggaggacgtcttgcgcgtgctgaaagagctcaccgagcgccaccgcgaccggaaggtatcggacgcttccatcagagctacacgacagggccgacatctaccacctcaccggcaccattgacgaacccgcccacagtccgtacgatggcggtacgactgtcatcaatatccgtctgcccggatgatattcctttgcgcctccgaaaatgcacctaatgacccaagtatggtaccctaacatcagctggcactatggatcgaattgcttggacattctg

SEQ ID NO: 147910 - DNA, 374 bp, Zea mays
  Clone ID: MRT4577_6641C.1
attcggctcgtggcatactttacactagctgggttctttaccgactgcgggacacgcacgaacacgggggttctgtcttcaccatggggtgcacctgaagccatcgacgctcatagccggctttggcgctggctgcttctggtgtgctcagtgggatccctgctgcgccactccaccttgctggcggctgctgcagtacggaccgcgcgggtgttccatacgtgcccggggcaggactgaaagccgccccactctcacgtgaccgcgcggagaaacacgtagttggtcaagttcacagaggcgttctccgggcgggccgtccagggggcgcagctgtacgggagctactgttaggccgtcgcgcccgtgcccgg

SEQ ID NO: 147911 - DNA, 845 bp, Zea mays
  Clone ID: MRT4577_66420C.1
gtttcgtattttttgctgcgaagtgcgaaggaccaactctttcgaagggaaattatatctcaggtgcttaggagtctgccatggccagcgagaataaggtatttaggttcgaggaagtcgccaagcacaacgtcaccaaggactgctggatcatcatcgccggcaaggtgctgtttttctgctcctctcccatcctcggctccccctcccctttgtggtggcacaggattttggatggctggcggcatgcctttggtggctttgtaggatatggttttgtgaaattgtttggtgttcttgttggtggaatggtaattccttccgtttcctcttcgattgcaaaggttttagggcctaaggaaagcttacgacgctacctctcttcgatgataaggttttgtggagaataattgatggtaggcttggtttcttgcagcagttggactgaatcagttgtgctggcacttagctcaaatcagatttgttcatttgcagaaactaacctggcatactaccaaagatgttttggattgtcaaatatcagttgtagttattcatgagtgggcgactcaattcaggtccagaaaccaccttttagatctactccatgtccaatgctcagttgggttgatctgatcgaggaccagcaactgcctttagatcaactccatgttactcagtaggttatagtacaaaagcttactacaatcacctcttatcgcatgttcataatttagcacaaggatagtgctttaaactgggcacttttttgtattttgaaaattgaaatgacaatgtatgacaaaacagacaaaaatgtggtttgttttttcctgctttttttg

SEQ ID NO: 147912 - DNA, 321 bp, Zea mays
  unsure (1)..(321): unsure at all n locations
  Clone ID: MRT4577_66421C.1
cttcggcacttgacaaaaggggtgggggaggcgttctttgcttcgtctcccttggttggcgtgcgtgcgtgtgtgtgtgaaagtgagaaggtgagcttactttagacatggattagccatggtgcgtgtgttgtttgttaacctggactgctgctccgtggagtggagtagattgcctaagggggtgtttggtttctagggactaatgtttagtcccttcattttattcctttttagtgtataaattgctaaatatagaaactaaaataaagttttagtttctatatttggtacgagtnanananannnnnnnnnnnnnna

SEQ ID NO: 147913 - DNA, 366 bp, Zea mays
  Clone ID: MRT4577_66423C.1
atactgaaaggggcatccttgaacgaggtaaattggtatttctccaaaaatgcaagatccacacatccaacactgacaggtctaatagcttaggttccaaaagtacatagagtagcatactctgctactgataaaaaagctttggtagttcaacccgacgttgccatgtatccaatcagacctcctcgacggtcaaaccttgaacttgacaacatccttgctcctcttgatcttcactgagcgggcatccttcctccttgcggtgaggaggaagtccttaatctcatggatctgcttcggcatcttctcgcgggacctgggaatcgccgagctctttttttaacggcggtggctgggaccgacccc

SEQ ID NO: 147914 - DNA, 712 bp, Zea mays
  Clone ID: MRT4577_66424C.1
ccggccgggtattctggtgtcctaggcgtagaggaaccacaccaatccatcccgaatttggtggttaaactctactgcggtgacgatactgtaggggaggtcctgcggcaaaatagctcgatgccagaatctccggcatttcctcctgtcgtgggatcccagccaccgccgctagaagaagagctcggcgattcccaggtcccgcgagaagatgccgaagcagatccatgagattaaggacttcctcctcaccgcgaggaggaaggatgcccgctcagtgaagatcaagaggagcaaggatgttgtcaagttcaaggtgcgctgctccaagtacttgtacacgctctgcgtcttcgatgctgagaaggcaaacaagttgaagcaatctcttcccccaggtttgaccgtcgaggaggtctgattggatacatggcaacgccgagttgaactacccaagcttctttatcagtagcagagcatgctactcatgtacttttggaacctaagctattagacctgtcagtgttggatgtgtggatcttgcatttttggagaaataccaatttacctcgttcaaggatgcacctttcagtaaaaaaaaaaaaaaaaaaaaaaaaaaaaaaaaaaaaaaaaaaaaaaaaaaaaaaaaaaaaaaaaaaaaaaaaaaaaaaaattgataaaattccccaaaaaaaaaaaaaaaaaagcggcc

SEQ ID NO: 147915 - DNA, 517 bp, Zea mays
  Clone ID: MRT4577_66425C.1
tccgggagacaccccgccgccgaagatttcgagtcgctcgtcagatcctccagcaacacagcaccttcgccgccgccgccatgggtaaggttcacggatcgctgtcacgacttgctcctcaccgcgaggaggaaggatgcccgctcagtgaagatcaagaggagtaaggatgttgtcaagttcaaggtgcgctgctccaagtacttgtacacgctctgcgtcttcgatgctgagaaggcaaacaagttgaagcaatctcttcccccaggtttgaccgtcgaggaggtctgattggatacatggcaacgccgagttgaactacccaagcttctttatcagtagcagagcatgctactctatgtacttttggaacctaagctattagacctgtcagtgttggatgtctggatcttgcatttttggagaaataccaatttacctcgttcaaggatgcaagtatatttcttgtttaactgcacattactttatatttatgcctgtttcatacctttcctcc

SEQ ID NO: 147916 - DNA, 343 bp, Zea mays
  Clone ID: MRT4577_66426C.1
accgggtccgcccacacccttccgtcaaataatggttttaatggttggaatcccgtttgcagggaccttggaaggcccccgcttgtggcggcttggtttacagggtggccgttgcaaaattaggcttgccaaagtttgttagtgacctatttttggttggactgttttaccatttgtccaaccagattgttacgaacaccttggagcggggggttcctttgccacatgctgggggcattgtgttgaagcttttgtttgtcattggcttttaaatcgtggtttttggcaccaaaattagcccccaaactggaatgggcacgtccattgccatagctggggttgt

SEQ ID NO: 147917 - DNA, 616 bp, Zea mays
  Clone ID: MRT4577_66427C.1
cggccacctgcgtgccctaatataattttctcacctcacccgccgtcgtctccgcatttccatcctgtcgtgggatcccagccaccgccgctagaagaagagctcggcgattcccaggtcccgcgagaagatgccgaagcagatccatgagattaaggacttcctcctcaccgcgaggaggaaggatgcccgctcagtgaagatcaagaggagcaaggatgttgtcaagttcaaggtgcgctgctccaagtacttgtacacgctctgcgtcttcgatgctgagaaggcaaacaagttgaagcaatctcttcccccaggtttgaccgtcgaggaggtctgattggatacatggcaacgccgagttgaactacccaagcttctttatcagtagcagagcatgctactctatgtacttttggaacctaagctattagacctgtcagtgttggatgtgtggatcttgcatttttggagaaataccaatttacctcgttcaaggatgcacctttcagtatatttcttgtttatatttatgcctgtttcatacctttcctctacaaacatagttactagatttttgtgcttttatatgatatgccatttgcggggatacttc

SEQ ID NO: 147918 - DNA, 455 bp, Zea mays
  Clone ID: MRT4577_66428C.1
ccgggccgggatctaagcacattctcttggattccatcccactaccacccatctcgtcgtccgccgattgatatccggatcttccaacccacgggctgtgtatggagacaaagaggagcgtgcgcaccctcggagaggcggatctgaaggggaagaacgcgttcgtgcgagccgacctcaacggccctctcgacgacgcccagaagatcaccgacgacacccgaatccgcgcctccggtcccaacatcgagtttcctcctccagaagggggccaaggtcatcctcgccaggcacctgggtcgtccaaaaggtgccaccccaaagtacaagcttgaagcctcttgttccacgcttgtctgagctccttgcagttgaagtcttgatggccacatgattgcattgctgaggaagtcgataagactggttgaagctttgccacaaggcggtgttctgcc

SEQ ID NO: 147919 - DNA, 788 bp, Zea mays
  Clone ID: MRT4577_66429C.1
taccctcgcaggccggccggggcgtgccctatacccttctctccattgccccggccggggtctccgcatttccatcctgtcgtgggatcccagccaccgccgctagaagaagagctcggcgattcccaggtcccgcgagaagatgccgaagcagatctatgagattaaggacttcctcctcaccgcgaggaggaaggatgcccgctcagtgaagatcaagaggagcaaggatgttgtcaagttcaaggtgcgctgctccaagtacttgtacacgctctgcgtcttcgatgctgagaaggcaaacaagttgaagcaatctcttcccccaggtttgaccgtcgaggaggtctgattggatacatggcaacgccgggttgaactacccaagcttctttatcagtagcagagcatgctactcatgtacttttggaacctaagctattagacctgtcagtgttggatgtgtggatcttgcatttttgtggagaaataccaatttacctcgttcaaggatgcacctttcaaaaaaaaaaaaaaaaaaaaagcggcccaaaagcaaaaaaaacaacacgcattttccttgcaaccgattgcctatccccctcccaacccaagaccgatggcgcccaaggccgagaagaagcccgcggcgaagaagccggcggaggaggagcccgcggcggagaagacgaccgccgggaagaagcccaaggcggagaagcgggtccccgcgggcaagtccgccggcaaggagggcggcgagggcaagcgtggcaagaagaagggca

SEQ ID NO: 147920 - DNA, 127 bp, Zea mays
  Clone ID: MRT4577_6642C.1
actgggtacagtctgggaatatctacatggcacgaagttgaatgaagaccccggcttcgaagttctacctcgatgagcgggcagatggcgttggggcgctataccattatctatgagattacgaatc

SEQ ID NO: 147921 - DNA, 281 bp, Zea mays
  unsure (1)..(281): unsure at all n locations
  Clone ID: MRT4577_66430C.1
gtggtttgtttttttttgacaaagcttgtgcaatgatagttcaatcgaaccaaacacccggcgctggactcgaaccagaactgcatatgggtggccattttcaacccatctcactcattccaagcttttttttttttcgcagcnctggtctgtgtggggggagctcaanacccaaaactcaaaacaagccggctcgaaacacaggcatctgatgtcttcacatgaaacaagcccgcccgaatcacaagcttctggtgacgaaacgctggcgttcacacggg

SEQ ID NO: 147922 - DNA, 762 bp, Zea mays
  unsure (1)..(762): unsure at all n locations
  Clone ID: MRT4577_66431C.1
ccttcgtccggcgcgggcggggggtctccgcatttccatcctgtcgtgggatcccagccaccgccgctagaagaagagctcggcgattcccaggtcccgcgagaatatgccgaagcagatccatgagattaaggacttcctcctcaccgcgaggaggaaggatgcccgctcagtgaagatcaagaggagtaaggatgttgtcaagttcaaggtgcgctgctccaagtacttgtacacgctctgcgtcttcgatgctgagaaggcaaacaagttgaagcaatctcttcccccaggtttgaccgtcgaggaggtctgattggatacatggcaacgccgagttgaactacccaagcttctttatcagtagcagagcatgctactctatgtacttttggaacctaagctattagacctgtcagtgttggatgtctggatcttgcatttttggagaaataccaatttacctcgttcaaggatgcaagtatatttcttgtttaactgcacattactttatatttatgcctgtttcatacctttcctctacaaatataataactagacttttgtgataatatatagaatgatatctaagtcgaccattcaactatatgtcaagatgaactcatattttgggggctgatgctattaaaaattttatcataaactcagggttcattggcagtagaaaacacataagaagcagatcatacacaatcattctcgtccatattcttgcctatgcccatacctattntgtcggcg

SEQ ID NO: 147923 - DNA, 638 bp, Zea mays
  Clone ID: MRT4577_66432C.1
acctatacacaccccttgctgctggtgtgtgggtctgggcacaccctgcaccccccccccgacttaccaaggcttcgtctactacctcatgaggagttggtcatttggtcaatattcgagtacattgatagttaaggtatggctaatactagttggttagttaacgaagtgaaggtcgttcgtactaacgctaacgtccttaagtagaacacggtcgttatgggggttacagatgagaacgtccgtttcgtaaacgagacgactacccataagggtagtgagattggtaacaccagggtggctactggctcgatagaggtggaaaccaccttctaggtggccacggtgataggtacgccattgaccgagatgggccaacggtaggacacggcggtcctagggaggttgagtgacatgacgcgcaccgccgtcggaatgtctagaatattgctgctagtagctgtcggtgaagtcctatagaggtgaactactgcgaaacccgggtcctagggcgttgaggaaacgaggtagagcagtgaagccggggtcctgaccagaaccggtgtagtcgtgctagtgaactcgcgtccgacgagtacccgagtctcctacctacgtcggggaaccacaactccgac

SEQ ID NO: 147924 - DNA, 485 bp, Zea mays
  Clone ID: MRT4577_66433C.1
acaaaaaaaaaatttttttttatttgagcgggggcacaagcaaaggtttgagatatatgctatggcaaatgaaaatacccagcctaaggagaaagacagggcgtgcttatattaaaaggggaaggccacccccactgaacatcacaacaagcaaagcaaagctagagcctgagccgcactacactagggtttgggttgggaagacaacacgaggatattctgttttggcattagcctcagcatacctttcctgttctgtgcatgaccataacattacacgttaggccacgctcggggtggagttgagttgggttttttttttcatcacacgaaaaaaataaattacggttccgcatctgacacgaaactgagagagcagaatcgatattcttttccaaaccaaatgaattgcgctggggaaaaaaaaaagctagcgtcgccttgggattggatgtcgaggcaccccacaaaaaaaagattaaatt

SEQ ID NO: 147925 - DNA, 446 bp, Zea mays
  Clone ID: MRT4577_66434C.1
acatcacagttcaagagcttcccgtagctaacgagattcacgcttcctattagccagatgatccggccggcgtatgcaagctcagggccacaatggtggggccacagagcgagtctacagttacagaaccgggtgtggataggttatgacaccgcatgcatgcctgcttgaccgttgctcgcctgttagggctaattgtgtgtcggacacctccgtcgaaactagcacagcatgtccatatgcagagactgctcacactgcctgggtccagtccttaagctcccacaggcgacccgacctgcttttaaatggtgaaccttgcggacagagactgctcgatgcgcaaaatctttcctgtctggagcaggatatcgccccggctcactttggcggcttgatcctgccacactcactatgtctacagctacatgattgttcgacacgcg

SEQ ID NO: 147926 - DNA, 276 bp, Zea mays
  Clone ID: MRT4577_66435C.1
caggagaatgcatgtatccctttcacaccgttacaacatggattacaatttacaagtgctcgattcattctcattcaagcaaattccaatcacccaatccctggcctgagggatgacaatacttccaacagtcagagtgtattcggatctttctttctttctttctttaccttttttataataaacgaatgaagggggcgtgaagaaagcagaaaggacgtacaggttcacaattggaccgccgctgtggccgcggtgccggcccagcttgctcgt

SEQ ID NO: 147927 - DNA, 246 bp, Zea mays
  Clone ID: MRT4577_66436C.1
cccaagacaaacccgtgcggcacggacgtccctgttaactggtcaaacaggtatgccgtccatcaccagaactgaagtgccacaagccatgcaattccaaaatgctgaggcggaagcagcaaagcaaggcgaaggcaactactgaatcaatgttctttcaaaacgagaagaaaccggggggcacaggtcctttgaattctgacccccgaaggacagggccgagccatgcagggcaaaggaaaaacc

SEQ ID NO: 147928 - DNA, 407 bp, Zea mays
  Clone ID: MRT4577_66437C.1
gctccaccttcgccttttgctcccctttcccgccgtcacctacatccactcccaacggatcatcttcaacttctccacgacccccactcttatccactaccaccttccagcacaactccgccaccactacgatcgatctcttcatcgactagagcctcctcctattcctaaatactcttgtgtacccctacaagcacacaatctttctataacttgaccttcctcttctgacctgctccatcaacacctccacaccatcaactatcccaacatccactctcctctacctactctccaactctaaaactcctatttttcgaaatcttctactacccacaatctgtcaccacaagatctgaatactaatccatatttttcctccatcaaatcaatcgtctcacatatcc

SEQ ID NO: 147929 - DNA, 209 bp, Zea mays
  unsure (1)..(209): unsure at all n locations
  Clone ID: MRT4577_66438C.1
tttattgggttgcgacatccattccgtcctgtttcctattcacaaccggcggcgcccnnncaacccacccaatcccgtccctatcgctctccatcgtctctcccatcaacacgcaactttacccgtacccaacttctacatttccacatcgcggcggcccactcacccccccaacgccccaacgactgccgactgcttttccattgcgg

SEQ ID NO: 147930 - DNA, 462 bp, Zea mays
  Clone ID: MRT4577_66439C.1
ggcaacggaagggaggaaacaggcaggaccgcaggcgcccgacaaaggagaaaacaaaaagaaaaccaagaggaacaaacaaggagacccacggcaccaggggccacgacagacggacacagcccgaggccacgcagggggggggccaagcgacaacgaatggaacccgaaagccaactgatggaggaaaagcaggaagagccacagggacagcccccccgggcaacaccagcagaagctccccaccccaagggcaaccccatgcggggaaacagagaaaggaaggcaaccggaacgcaagacgaagagggagcctcatacggaacacgccatcgattgaaagactacactgagaactcgcaactaaaaaaaaaaaaaaaaaagcgggccaggagctacaccatgagatcccaaaagagaggatgaaaggcacacccgccgcaaccatgggcacaaccgatg

SEQ ID NO: 147931 - DNA, 556 bp, Zea mays
  unsure (1)..(556): unsure at all n locations
  Clone ID: MRT4577_6643C.1
ctctggcagctacatccaacaccactcggtgttgagtcatccagtcagctccgagaatgatgtccataccttctaatcccaaaatcaggagtgtggttttgaagattttacttcccagtgagataggcacatttcgatttaattggttcgttgcaatttttcccccaggcgttgctatcagaaaagacccttttgcatgatagaaaggcagntggcatttaatgctgaacttctagctaatgaagctatgagatgcactagaatcaaatagaattaatgcaggttgattaaaaactggaaagataccagtcatgatgggggctccttcaggtaactcctctacagtagtgaaattgagcttcccttgcctgacttgcaccttctgcttccttcctctatcttgatttggtgctggcatctgcctctactgattccttgggcaattcttggcataatgacccacatttccacaagtgaagcacttgttcccatttccctggtggaactattgctgctgctgaggttgattgttccttgaagcgggagctggaaagcg

SEQ ID NO: 147932 - DNA, 403 bp, Zea mays
  Clone ID: MRT4577_66440C.1
ttctggctcttggtttactccggacatgccggcgacatcttactagacgacgggctgttacgccccaacgccggcgtgcttgacgccgggagcggccttgagtgctacagccttctggacgctcaactggacgccgtgttagacgaggtcagcaggctaggcgagggctacaacgccgagcgcgtcgaggtctccgagaccgggtggccggtcaagggccacgccaacgagggggacgcttcggtaggcaacgccggagggtacaaccgtaacctggcgcgccgcgtgctctgcagcaacgccggcaccccgcgccgtcctgacggcgacatcgacgtgtacctattagtgctctttaacgagaaccagaagcccgggccgaccttcgagcgcaactacggtg

SEQ ID NO: 147933 - DNA, 443 bp, Zea mays
  unsure (1)..(443): unsure at all n locations
  Clone ID: MRT4577_66441C.1
gttcggcggcgcacacacacacaaccanatctcccccaaaacacccgtcggcacctccgctttaagatgcagatctttgtgaaaaccctgaccggcaagactatgaccctcgaggtggagccggctgacaccattgacaacgttaagggcaagatccaggacaaggagggcatccccccaaaccagcagtggatcatcttcggtggcaaacagctggaggacggccgcacgctggctgactacaacatacagagggagagcacactttgccttgtgctgcggctgaggggaggaatgctgatgtttgagaaagccctgagcgactagactattacggtggaggcggagtgactccatcgcccttcgtcgtggccccggagccagatccaggaggggaagggagctgcaccagggagcgcccggaggttcgattggccggtcag

SEQ ID NO: 147934 - DNA, 607 bp, Zea mays
  Clone ID: MRT4577_66442C.1
tttttcccccctcgggagtcgcacccagccgtccggaatccatcagcctcatcgcgggcctcggccccgccctgactgcagctactagcacacgaggcttgagaacgagcgacggtgacctacccgcaacatgagctcctcatggcgaccgaccacctgtcgagcgtggtgcgcggctgtacacggcccagaggtgagcatgaacgcgctgcagtgggcgcttgtacaacctccgcctgcgccccgacacaaagcctcgcacagcttcacgttcagccgtcgcccaacctcctcgagacaactaaacctggcgcccatccccttccttggccccaactggttggaggcgtcggcgtctacgctcgccctcgaggcgcaccaagcgaccataacccaggcgataccggagcaccctctgcatattacgttccgatactaatctgcagccgaagactgagtcggtggttctacgcaccctaactagaacatgtgcgacattgatctcaaccgctggctcgatctcttcctaatgggctctccgtgccattccatccgttaaacccgttgctactgctcagtgtgcgcaactactgtatcaaccatgtgg

SEQ ID NO: 147935 - DNA, 815 bp, Zea mays
  Clone ID: MRT4577_66443C.1
ataaaagatcagttcagatttaatattttttttttgaaaaattactgaattcgttaccgatggtaaaataacgaataaatacggtaatttccaaaaattttttgaaatgactcaaactgtttccgtttccgttttttttttttactgatttcgtttccgtatttccggtaaccatttccatttaacactgaatttccgaaaacggaaggaaaagacccatctgcaagcaagaagcttgcacaagtagacgctaacttgtcacaggaatgctgcagctctaattaataaccaacaagttctggactgaagtgcccagttcggttggccgttgttcatattggagcagcacatgtggttctgaagtgtccagtctggttgcagcggctgcaatgaacaacccgcttgactcgcccacggtcctccgctctaaccctcttcttccttggctgtgctgcgggcctcagtgacttcggtggattgatgatcatctccaccttgacctggccttgatctgctgtttcatcccagagggtcctgtcagggattgggtgtatggtctgcgaataagtcttgcggtatgttgccacggtgaagcagctctcagtgtagcggtggacgttctgcctgcaggagaggagagctgccacaccatgagcacacggcacgccatagagctgccacccccggcacagacagcacctgttgcggatgtccacaacgtttgttccctcgtgagctgagatgacctcgaattccgcctcgttggcccgggccacctggtaaccccgtgcacgctcaatggcctcctgaacacg

SEQ ID NO: 147936 - DNA, 507 bp, Zea mays
  unsure (1)..(507): unsure at all n locations
  Clone ID: MRT4577_66444C.1
ggtttttgtggtttttttttttttttttttttttttttttttttttttttttttttttttttttttttttttttttttttttttttttttaacttaaaaatttttttttttttttttttttttttttcttccaaaaaaaaaaatttttttgttttgttttggggctattctttantncacaacattcctttctttaaccttttttttttttgacgctttttctgcctctttttttttccaaggtaatcttttcctttacctcctttttttccatcttttcctcttctgagtcgttttatagctcctcgtaatcatggccatagctgttttctgtttgaaattttttttattttccatttcctcccaccttcgcagcctcatgctcaattgttaagcctggtgtgctttccgaccccctctccctccattaatagcctngcgctcactgccccctttccaagcgggaaacctcttgtgcccactgctttaataatatatccccccccc

SEQ ID NO: 147937 - DNA, 603 bp, Zea mays
  Clone ID: MRT4577_66445C.1
cccacgcgttcgcctttctccttgtctccgtctctcggcaggcggaccgtcagaggcaattttgccctgaattctaccccggtgagcgggaccgccaccgggattccctgctccaagcgcggatctgagcgctgcgcttcgagtccgcggtcgaatgcgccaagaagggggccaaatacaagggcgccgccaaggtcgatgccaagatggcggtgaagaacaagggggccgagaaccccaacgggggcacgaaagggaacgccgacaaggaccccaactagcctaagagggcttccagcgctatgttagagttcatggaggaatttcgggaggagatcacggagaacaaccctctgaacaagtctgtcaatgctgtggggaaagcttgtagccacaggaggaaatccctgagcgattcgtataaggctacctatgtaaccaaggctaacaagctcaagctggagtacaataacgacatcagtgactacagcactggcgatagcactgctgctaacaaggctcatgacgaggaggaagaagaggaatatgaagaggactctgacgagttcaatgacgaggacaatgacgagggtcatgaagagg

SEQ ID NO: 147938 - DNA, 844 bp, Zea mays
  unsure (1)..(844): unsure at all n locations
  Clone ID: MRT4577_66446C.1
cgtcactgcacccttgggcagcgggcgcgtacctacctacgtgcggggggagccacacgcctccctctcgcctcttggcatggacgccggcggagagaagtgcggcgacgcggcggcggagggcggggagggtggcggagacctctacgcggttctcgggctcaagaaggagtgctccgacgccgagcttaaggtcgcttaccggaagctcgccaagaggcaagaaagctttgaggagctgcagcagctttttgtggacatgttccagtccgatattgattcaggattctgcaataggactgccaaggcccatcagtttcaggggccagccaaaagtagaacatgctcgacctcaccttcatcatcaccgtcccctcctcctaccacagcaaaggatgcagaggtgccatcatgtaattgcttcaataagcggggttcatcagctctggactcagggaagcctccaaagcctgttgaaggtggtgcaggtcagaaccaggctggattctgttttggggtaagtgcactttgttattaccaatttactctgcttgataatgatgcagcatatggcaggggccgtggttatttattgggtctgattatgtttttaagatgactgtggtcttaggctttctccatcagccttcctattccaccccatatctctctttttatttcgatttttaatcggtaaacagtacaatctacagtacaaaacattgttttgcatggccatatacacgctctactgagcacggacttactacaatttgcttntgacgacggtcatgcaattgaccacacatctaaaccacaagcaaatgtgcttagcagatttgac

SEQ ID NO: 147939 - DNA, 1502 bp, Zea mays
  Clone ID: MRT4577_66447C.1
ctgcggcgcgtggagagtggagacagggggagaacgaagcagcagcagcagctccatccgctcgcttccttccccccaccgccagcgtcgcctcttcgtgtgcgcgccccgccgggggtggcgtcactgcacccttgggcagcaggcacctacgtgcggggggagccacacgcctccctctcgcctcttggcatggacgccggcggagagaagtgcggcgacgcggcggcagagggcggagacctctacgcggttctcgggctaaaaaaggagtgctccgaggccgagcttaaggtcgcttaccggaagctcgccaagaaatggcacccggacaaatgctcgtcctccagcagcgtgaagcacatggaggaagccaaggagaagttccaagagatccagggcgcctattccggtctcaatcttccttctctcagcacccttacacaatacacccgcctcactgctctgttccatccatattcgcaaaccaccccttcacctgtggcaactactgaccaacgacaactgataaactgaacagcagcaaacggaaccgatctagcctgttggtaaactcattgcgtggagcccttgtgctcccatcccattgttcttgtgcagtactctccgacgccaataaacggctcctctacgatgtgggagtatatgacgatgaggacgacgaggaaagcatgcaggggatgggggacttcatcggtgagatggcccagatgatgagccaggcgcagccgacgaggcaagaaagctttgaggagctgcagcagctttttgtggacatgtttcagtccgatattgattcaggattctgcaataggactgccaaggcccatcagtttcaggggccagccaaaagtagaacatgctcgacctcaccttcatcatcaccgtcccctccttctcctaccacagcaaaggatgcagaggtgccaacatgtaatggcttcaataagcggggttcatcagctctggattcagggaagcctccaaagcctgttgaaggtggtgcaggccagaaccaggctggattctgttttggggtgagcgacacgaaggaaacgccgaagctgccaggtcagaacgccagccggaggaggaacggccggaaacagaagctgtcatccaagcacgatgtttcatctgaagatgaaacggcggccggttcgtaacaccagcagtttgacccattggcttcggtgatatatcattcgttggcccttggctgtgcctaggggccctagtagctagcagcagcagcagggacggcacatcatgccagctgctgtgatctgaagaggcgtttagctcatcatatgcctcaccttaggcctgtgggggattttccattgaaactcgtcgatgatactacatctttctttctccatctgtgtcgtttgtgttgtaagacagtgacttctgaagtctgatcgtctcggttctttttattaacatctgatatacgttactgcctgttggtagtagcc

SEQ ID NO: 147940 - DNA, 706 bp, Zea mays
  Clone ID: MRT4577_66448C.1
ggggtttctggagacttcctgcggcgcgtggagagtggtggcagggggagaaggaagcagcagcagcagcagcagcagctccatccgctcgcttccttcccccaccgccagcgtcgcctctccgtgtgcgcgccccgccgggggtggcgtcgctgcacctttgggcagcaggcacctacgtgcggggggagccacacgcctccctctcgcctcttgggggggacgccggcggagagaagtgcggcgacgcggcggcagagggcggagacctctacgcggttctcgggctaaaaaaggagtgctccgaggccgagcttaaggtcgcttaccggaagctcgccaagaaatggcacccggacaaatgctcgtcctccagcagcgtgaagcacatggaggaagccaaggagaagttccaagagatccagggcgcctattccgtactctccgacgccaataaacggctcctctacgatgtgggagtatatgacgatgaggacgacgaggaaagcatgcaggggatgggggacttcatcggtgagatggcccagatgatgagccaggcgcagccgacgaggcaagaaagctttgaggagctgcagcagctttttgtggacatgtttcagtccgatattgattcaggattctgcaataggactgccaaggcccatcagtttcaggggccagccaaaagtagaacatgctggac

SEQ ID NO: 147941 - DNA, 591 bp, Zea mays
  Clone ID: MRT4577_66449C.1
aaaagttcttacaagtgggacaggcacaagtttggtgttcatggcggttcggtcaccaatcccttagcagagccaaatgattcatctgcaaggagcatagctgtttcccaggaagggaagagaagagactcggttcaatacagatcaaggttgagttaggtgtgacaggaagtggtccatgtgaagtgcatttgaagatcccaattctggtgcattttcgaacttttcttttctccaagcatagagcggagatcatacgaattgtgaggttttattcatgaactgtcaagggttcagtcactgatatacaccctaaactctaaagcaagaccttcaacgctggctcggtaatcatacgatggacagtcgctgagggtatagtgcatgtgtggagtttagcaatgagaaaaattgagaatcgactctgttcaatcatggatgtactctgtactgcttgtaaatagttctgtacagtgaatcatgtgctcgcaagtcgcaaggtgctgtcacacgaaattaagctcggtgtgctgagatcacgacgttgtaaaacacgtcgtcagcctttaaaatatttcccttctatctttc

SEQ ID NO: 147942 - DNA, 583 bp, Zea mays
  Clone ID: MRT4577_6644C.1
ggttctcactgcctggccctcttccctgccatctgtccctggtcttcagctcatcctgcccccaatttacctgtcatgtctcctacaggctggttccaggtgctgctctgaggttctgggcagtgggctgggcctggccccagaagcagggcagctcctgtctgctccttgagttttgtaaagccaaccctttcaccagaatagtattaactcctggtgctttgtactactggtccagctgccttgggctccttttctatattaataaagaaatgagcaaaaaaaaaaaaaaaaaaaaaaaaaaaaaaaaaaaaaaaaaaaaaaaaaaaaaaaaaaaaaaaaaaaaaaaaaaaaaaaaaaaaaaaaaaaaaaaaaaaaaaaaaaaaaaaaaaaaaaaaaaaaaaaaaaaattggggggggccctttaaaagaaccaaatttaacaaccccgggcttgaaaagaaaaattttttttttggggcccccaaatttaattccctgggccgggttttaaaaacgcgggagggggaaaaacccggggttacccaaatttaatccctttgaaaaaaatccccttttccca

SEQ ID NO: 147943 - DNA, 1558 bp, Zea mays
  Clone ID: MRT4577_66450C.1
gtgatttttcctgaataaattttggtatttcagggtttttgcatatatttggatgtggaacgattggcatttttttttttctatctggcacaactaatatcgtgcttgttctaaaggcacccccattttttttttttattttttttttttttttcctttttttttttttttttttttttttgtggcggccgttttttttttttttttttttttttggcagtaacgtatatcagatgttaataaaaagaaccgagacgatcagacttcagaagtcactgtcttacaacacaaacgacacagatggagaaagaaagatgtagtatcatcgacgagtttgaatggaaaatcccccacaggcctaaggtgaggcatatgatgagctaaacgcctcttcagatcacagcagctggcatgatgtgccgtccctgctgctgctgctagctactagggcccctaggcacagccaagggccaacgaatgatatatcaccgaagccaatgggtcaaactgctggtgttacgaaccggccgccgtttcatcttcagatgaaacatcgtgcttggatgacagcttctgtttccggccgttcctcctccggctggcgttctgacctggcagcttcggcgtttccttcgtgtcgctcaccccaaaacagaatccagcctggttctgacctgcaccaccttcaacaggctttggaggcttccctgagtccagagctgatgaaccccgcttattgaagccattacatgatggcacctctgcatcctttgctgtggtaggaggaggggacggtgatgatgaaggtgaggtcgagcatgttctacttttggctggcccctgaaactgatgggccttggcagtcctattgcagaatcctgaatcaatatcggactggaacatgtccacaaaaagctgctgcagctcctcaaagctttcttgcctcgtcggctgcgcctggctcatcatctgggccatctcaccgatgaagtcccccatcccctgcatgctttcctcgtcgtcctcatcgtcatatactcccacatcgtagaggagccgtttattggcgtcggagagtacggaataggcgccctggatctcttggaacttctccttggcttcctccatgtgcttcacgctgctggaggacgagcatttgtccgggtgccatttcttggcgagcttccggtaagcgaccttaagctcggcgtcggagcactccttcttgagcccgagaaccgcgtagaggtctccgccaccctccccgccctctgccgccgcgtcgccgcacttctctccgccggcgtccatgccaagaggcgagagggaggcgtgtggctccccccgcacgtaggtgcctgctgcccaagggtgcagtgacgccacccccggcggggcgcgcacacggagaggcgacgctggcggtggggggaaggaagcgagcggatggcgctgctgctgctgctgctgcttcgttctccccctgtctccactcgccgcgcggccggagatccgcgtgggcgtcaagtccacctttcatctctccagggccccaatg

SEQ ID NO: 147944 - DNA, 1091 bp, Zea mays
  Clone ID: MRT4577_66451C.1
gcaggtcaggtaggtttgaactctctcctataataatcctagctagcacacttgcccagattatattccccgcccccctcgtgtatcactggccgtttaatttctacttacaagcctgaatgagctagagatccatctgcttctgtacgtgctcgtcaggtacgctcgtaaaaagaaaagaaaaaaaaagaagagatcgagatcgatctgttgacgacgcccccgtcgccgatatgggcgacctctctgtcggccacagccgccgctggtgcggccgtttcgcggccgtcctttgcctgtgcgcggccttctgcaagccagatgaactcccgatggatccactgccgaacttgccgccgacgaggtcgctgcagtgcttcgaggacgaacaggtgtacagctgctgcgagggcgcgtacaggctaaacccatcgggaatcatcgccgttcccgtcggcgcggtggactactactgcggcggcgcgtgcgtggtggagacggaggacgtgctcaactgcgtggccagcgccctggacggcttcgccttctacaacggggcctccgtggaggacgtgcgctacgcactcaggcggggctgcagccacaccgccagaagaggcgacttcaacgatttggagccgcatctgggcgactaccctgacatctatggcgacgatgatgaacacagctttggcagcaaggttgttgcagctcctctgaggttgctcgcgtttcttggcggtgcggggctgttcttcctgggcccttgaacgaagatataaaagaactagcgatgtgatccgcgtaaatatatactccgtatatagcatgacatgagtatctagtttgtcttatatggtaaaccatactaaattttcttgtatggcattaaaaaaaattaagactttatttagttatttgactagttgttctctctggatcctctaatcagttcgaactctataagcttttttattccactcctatctagaggtcgcataatatgctaaggtgagatcttgatgtctttcgtttttttaactcgataaagttgttgtgagtctctcttataacattatttttaatgctaa

SEQ ID NO: 147945 - DNA, 367 bp, Zea mays
  unsure (1)..(367): unsure at all n locations
  Clone ID: MRT4577_66452C.1
gcaaggcnaccagggagacaccaagagcacccnnggnngcaagaagaaaaggcgaccacnccaagagagccaagcggggncgggccagcgccacccaaacagnnncnngagacnggcacgggggggagaagngangaagagccaaannacgccaagaccaccncnaagnnggangggacgaccgaagcacccgcgncgagacccaggcagaacganggggcccncaaggggggacagaaacgnggaagaacgcacgcaaancgagaagaagaacaaccnaaaaagaaggncagannagggagcccagcggcncaanggaacncagnnnacaangcnaggcgacccacgaagcagagggaccannaca

SEQ ID NO: 147946 - DNA, 135 bp, Zea mays
  Clone ID: MRT4577_66453C.1
acatcgtccgcacacgcgtccgaaagttcataagacatgataagagactataccctgtgccgggggatcataaatgtgaggaagaagcattgtgtatatagagtagcgtatagacagtctatttaccaaaagaga

SEQ ID NO: 147947 - DNA, 343 bp, Zea mays
  Clone ID: MRT4577_66454C.1
aagaaaatggggggccaaacccaaaaaagccttggtagaaataaaggggacaaaacttggtcccaactaacttttgggggcggcccgggccccttaaaaacaaacagcttggagcctgcctatatacccagtcctaacaaaggtttttgtttgaaaaccaaaaccttttaaaatggacccaaccggggggttccaaacaggaagccaccccttatacctgaatgggtatccccccaaagctaccttaattaggtggcggggatctttcccaccattcccgttcctttatgcgggttccaaaaaaaaccctatgtttcccgcaccgggagggtgaccgaaaaag

SEQ ID NO: 147948 - DNA, 386 bp, Zea mays
  unsure (1)..(386): unsure at all n locations
  Clone ID: MRT4577_66455C.1
agccttcgaccaagccttcggccaagccttcgggttcaaaaccttcaaaaccccggcatgttcgtccccatccaagccgttctccccccggatgccaatgggccttacaaaaggtaccttctccaatccggaaaatggtttaagcaaaacgttcccaaccaagaaggaatagcccttccccaagccaatcttcggccttgactgggcgggtccgaactcaccgactaactaatgaagattctgactgagcgcggctactccttcancaacaccgctgagccgggaaatcgtgagggacatgaaggagaagctcgcctacatcgccctggactacgaacaggagatggagaccgccaagaccagctcttccgtggagaagagctacg

SEQ ID NO: 147949 - DNA, 2215 bp, Zea mays
  Clone ID: MRT4577_66456C.1
atcggtttggccaaagagaatgaagaattgaggctgcagcttaaggttttgattgaggataacaagagattggttgagctctatgaacacactgttgtcaatgttgaggcaaatcaagatggaaaccctgtagatgatctgttgaatgcccaaccagcagccacatcagatttccatgcacataactcatctagtgtggcacaggagtctaagatagtagacgaaaaatgcaccaatgaggacaatttctcaagagttacatctgttgaattgcgtcttcagctggaggagatgcatgaggaaaatgatagacttatggggttgtatgagaaagctatgcaggaaagagatgaattcaaacggaaaattttagagcaaagcgactctgaagctgtaaaacatattcagttggacgagaaagatgtcgaaatgagtgaagcagctgagaatcctgaagtgaaacatattcatgactccacaattgcagctttgaaagaagtgctgcagattgttcggagtaagttggagcttgtccaagataaggttgtgtctgctcaggatgcagtaaaatattttaaggcactcgaaatagctagtggtaaggccgaagaactttctgcaagaattgagcttcagcgtctaggtgcgcagcgtggtcaggaagaaatcactttcctgaagtctgtgctatcagaatcacagaagaagaaaaatgcttttgaaggcaagtatttcttgcctgcagcatcatgttggaacttggttttgaagaccaaaagtcttgcggagtccaagtttgatgccagctttggatcaatgaatcagaagaaagaacagttgaatcatctccaaactcgcaaaattgaactatctgctgcaagaacgagagcacgtgaatctgaaactgagttgaaaagcaaaattgatggccttaaagcgaaacttcgcgctcatgaagctcaaagaaaggaggaagaaaaggtcctgtttgctattgataacctggatacttccactacactaatgcataaacccaagaactatggcaaggcaaccgacctgctgaaatctgaggaggatcggatgaagcttctgtgtgaactacagaaggcccgcggacgcgtggggctccatggtacataaggaaataagaagcatgaatgagtgtgattatattgatcgtgagattgcagtccttgaagcagaaatagaggattcctgcatctccatactggaaactgacattgagaagtttgtccgtgacaacactttagcagagatttgggagggtagcgcaaaggatatggaggcattgctggtcgattaccaagactgtgttttccaagtcaacttgaaggaggaagagatcaaggtgtgcagtgagtccttgcagtatcaagccagggacatggatgaacttcagtcgaagctgaaccaagcgatgcgggagctgggtgagcttctgcaagatagaagaagcctaaccgcttgcagtctggatgaacccacgctgcccgttggtgaaaaggtggcagcagaccttgaggccgtccggattcatgtcgatgaagctaagcagcttttgattctcgacaaccaagctaattcatgaacctgcgcagctagtttcaggtcccttataaagatgcgacgagtgacaggctagtctgtcttggcttctgctgttcagatccttagtacgtagtagcaagacatcagagatgggaagctgcggaatttgcttcattagttggaagctatctgaagccgaatctgctgattcttttttccgtggatcagctaccttcttctggtggtcttgcttcgagtcaaaacaacaggtcctgcaagccactgttccggatccgatttctcctctggtgtacacttcaagatggagcggagaaactgatccgacttaggcttgaccttttgcttctgtaactctccagagactggtagcaactagcaaccagtgggtggacttgtatcacaacttaatctgagccaggtgtcttattttatttatgctataagtgcacaaatgctgcactccagtttcttgtagaaattttcgggctgatcttgaattttacctgctgaagagtttccgtgttctgctgctgtactgtaaacaggtgtgccaggtttgtagggggaccccctggattctgtggtctgttgttttttcattcgactgattttctgtttgcgc

SEQ ID NO: 147950 - DNA, 723 bp, Zea mays
  Clone ID: MRT4577_66457C.1
caggctggactgctctctgctggtgcgttcgctccccgttgactgccactctccttgcgtgcactatcgtcccggcgacgactccgctgccgtcgccgcctacgccaggttccgaagtcttcgtgggccccttctcctacaacgagcactcacaccaatcaccagtgatttattgcgcatgaggactgcatctccccttgaaatttgaggctttggaaaactgctgaatggagtattcctcaagtgaagacgagggattggttggagattttatcgacgctgaggataatacgttcactaagaatattgaccaaggaactggcgtgatggcttcccagatccatggtgatgatccctcggtgggatccatgccacctgttattggaaatgagctgctgatggcagctgatgtattggccaaaaatgacgaacctcgtatgggcatggaattcgactctgatgctgctgctcgcgcattctacaatgcatatgctttatgctttgggtttgggattcgtgttgcccgatcccgtagtgagcgaagaaagggcgtcgaggtgctcgtcatgaagcgttttgtgtgcttgaaagagggacatcacaggaagaagaagccagttgagcctagcaataagaaaaagaggaaacgactctctatacgggattgggtgcccagcaatgatgggaggtggtgcgtaggggcccagatgggtgggtcatcac

SEQ ID NO: 147951 - DNA, 3255 bp, Zea mays
  Clone ID: MRT4577_66458C.1
atgccagtgccagccgagctctcgccgccgtcccctcacggcgcgccgcggaccagagccggcgagcaggacgacagcacgcttcctccgacggcggccgccaccgccacggccacgcggggcggcactggcaggaagcgccggcgcggggcgcgggacccgcgcgccagctgggcctgggagacggagtgggaccgcgcgtacctgctcgcctgcgcggcggggctcctggtggacccgctcttcctgtacgccgtcgccgtcagcgcgccgctcatgtgcgtcttcctcgacgcctggttcgcggccgcggtcaccgcgctccggtgcgcggtggacgccatgcacgcatccaacctgctgctgcggctccgaggggcgtgctcgccgaggcgggaagacacggacgaggaggaggcgcagccggggcgcgacggcggcgtgccgggacgggggacgaggtccaaggagggggttttcttggacgtgctggtcatcctaccggtgatgcaggtggtcgtctgggtggcgacgccggcgatgatacgcgccgggtcgacgaccgacgtcatgatcgtgctgctgacggcgttcctgctggagtacctgcccaagatctaccacgccgtccgcgtcctgcgccggatgcagggcgtctccggctacctcttcggcaccatctggtgggggatcgcgctcaacctcatggcctacttcgtcgccgctcacgcggtgggcgcgtgctggtacctgctcggcgcgcagcgggccaccaagtgcctcagggagcagtgcgcccaggccgggagcgggtgcgcgccctgggcgctggcgtgcgcggagccgctctactacggcgccaccgccagcagcgtgggggcggccaggctcgcctgggccggcaacgccacggccaggggcacgtgcctcgacagcgccgacaactaccagtacggggcctaccagtggactgtcatgctggtggccaaccccagcagggtcgagagggttctgctccccatcttctgggggctaatgactctcagcacctttgggaatctggagagcacgacggagtggctggagatcgtgttcaacatcgtcaccatcaccggcgggctgattctcgtgacgatgctcatagggaacatcaaggtgttcctgaacgcgacgacgtcgaagaagcaggcgatgcacacgcggctgcgcagcgtggagctgtggatgaagcgcaaggacctgcccaggagctaccggcaccgggtgcgccagtacgagcggcagcggtgggcggccacgcgcggcgtcgacgagtgccgcatcgtccgtgaccttccggaggggctccgccgggacatcaagtaccacctctgcctcggcctcgtgcgccaggtgccgctgttccaacacatggacgacctggtgctcgagaacatctgcgacagggtcaagtccctcattttccccaaaggagaagttattgtcagagaaggggacccagtgaagaggatgctgttcatcgtgcgtggccacctgcagagcagccaggtgctccgcaacggcgccgagagctgctgcatgctggggccgggcaacttcagcggcgacgagctcctgtcgtggtgcctgcgccggccgttcctggagcggctgccggggtcgtcttccacgctggccacgctggagagcacggaggccttcgggctggacgccgcggacgtcaagtacgtcacgcagcacttccggtacaccttcaccaacgacaagagcccaagagacatgtatatttatgtgtactgtatcagctgcaatagagagggttctagagacttcaaaaccctacctcaacatgatatcagagccaaagcgcggcggcgtgctactgtagcagcgacgacctacgcggagcaggcgtggccgacggcgagcttcagactgtgcaggacgcgagtagagcggtctgccgtgctgaaggaaggaggaggtgaaggtggggcggcaagcgcagcaagaagcaggcggggaagacagatatctggcaccgcgtggagcttggaggcaccaccagcttggacgcagctgccttcgccggcgctggcatcgactagaaggagacgtaggccagctcttgctctggaagaaggctaccgccgtcgagggccagctcgacccggcagctgctgccatcaacttgctctgctccaactccaagaagactgctgtcggctttgggttcttacccatcggaacacaagagaatgggagagaatcaagggattgagcaagttcttgggggtaaagaattatttagcttggtctaggagagccttgcgattattgaaagcaaaaagactcgagggctatgttgatggaactgtcgttgagcccaaagacaagccaagtgctgaatggaaggattgggatgctataaactctttggtagcagcatggatgttaagttctatgatcccagcaattgctagcactgttgatacaattataagtgctgcagaaatgtggaaagcgcttgaagaaatgtattcgggagctggaaatgttatgttgatggtggagactgaagatcgcctccataatatcaaacagggggagcgaactgtggcggagtatgttcaggaattacagtgtttgtgggctgatgttgaccattatgatcctattgagctaccacactcagagtgtgttgtttgggcaaagaaatgggtggaaataagacgtgtgcttcaatttttaaggggtctaaacccagagtttgagggaagacgagcctccatgtttcatcaatccactcttcctagcctacaagaggcaatagctgctatatcccaggaggagtcacgactcaaagtgatgagggaaagtcctccagtgtcatctcaccctgtgttttcagctatgagaactaaagatgctagagagtgttacaattgtggtgatgttggacacattgctcgtaattgtactaaacctttcaagtttaaccgcgggagaggaagaggggctgctagaggtggtagaggtcgtggaggtagaagttgggcaagagctaatgcaacaactacaaaagaagaccttgagatctttatggagaatgaagctgaaacaaagtcgactgagcaacataaaattcctggaaataaaaatcaggagtcctacactagggattttgtcaacttcgcctacacagatgaaggagaggagaacagggaaaagacttgggacagctaccaggcgtag

SEQ ID NO: 147952 - DNA, 530 bp, Zea mays
  Clone ID: MRT4577_66459C.1
agagcagatgagtccatgtaatgaggtgtacctcccgatgctgcttgttccggggctcaaggagtgtcttcactgcgggatcctttgcaatgagagattcaatgtgatgcatatggacagaaacaactacgatgcatgagatctccacctcactcaactttaatcagctgtggaagaggtatatcaggggaagacaagcgccccgaagatctagagcgttagcagagactataatgagggcatggtgtgacagcttatgatgtcaaaagggacattggatccaaccctcatcgacattgatgagacatgagaacttgtcattcacagctgctgatgggagctctgtcttcgtcaaagggaagatttaccaggtccctgccagtgatatggaggctctgaagtcccctttgatgtgtctatgtcgagaaccgctcagcaaggaaattctgtctttatgcccagattacaatgaagctgtttccatgacacatcaaggattagaacttactactgtgacaactagaaaactt

SEQ ID NO: 147953 - DNA, 473 bp, Zea mays
  Clone ID: MRT4577_6645C.1
ggaaaaagtgcatggactgctttataacatcgttcgagccaagattcttggggaggaaaagcagcttaaaccaccagtgtcgtggaacagtaccccgatgaacgatccagtgctgtacaacaaaaaatgattcatgcgcctactagaaaacctaaacatacgttgcttgggctgaatttgagaacatgagctgttgtggtgccccttaagagacgcccttggaggaatgatactcaccctggtgagcaagctttttgcccaacagctcgtaacactcactcttttcaagaggttaggcaatctcaagaggcatggaccttgcactgattgaagaacttgagcactgattccacaaggaagctgagcttgatatccgcgagctccctgataaactcgtcaggggtggatccgcatacctctccagaaaggatcctagtgttctgccgcacgagggctacaccagacaccattcc

SEQ ID NO: 147954 - DNA, 263 bp, Zea mays
  Clone ID: MRT4577_66460C.1
atttttttatttttatgggttgtgttaatattttttttttcccgccataaacaccaacaccagtttaaaaatatatttctaaatattttcaaaaatcaaaatgcaaaatgtataaaaaatttttttaaccacttctataccccaaatactaatggaatcatccacatgttcaactaaaataaacaatccacacgtttcgcccgacaaaatgctccattaactcaaacaaaccttttttatatacaccaccctactatttagct

SEQ ID NO: 147955 - DNA, 278 bp, Zea mays
  Clone ID: MRT4577_66461C.1
catatcattcatggcacaattcatttaaactaacaaaattttggattccgcagcaataacaacacttaatatattcccccaaaaatagaaccctaaataaaattgagcccttatttcctggcacttattcaaaacaaccttgagcaagtccataataaacctaaacacggaggcataattcagggcactgcccaattgccttttaaaaacaacaactttaaacggaagctttaaaaaggagccccaagagtaaaaccccccccccaggatgtctcaaa

SEQ ID NO: 147956 - DNA, 1149 bp, Zea mays
  Clone ID: MRT4577_66462C.1
gccggccgggccgggctgcactgcagcacacgcgccgccgaagcgctctgcccacctcgctcccctccagtggccgccggcgcggctcagcggtccatcctcctgacgccacctgcaacggcgccaggcggtgatccattccaactcgcggtcatctcaagtgggtgcggcaaccatgcccaaggttaagaatccccacattttcatggacatatcaatgagtggaggcagcgccgagaggatcacatttgagctactcgcaaatgtagttccaaagacagcggagaacttcagagcactctgtactggtgaaagtggacttggagcatctacacagaaaccactctattataagggaacacatattcatcgcatagttaaagggtttgttgctcagggtggtgatttttcaagaggagatggtattgcttcattagcccaggcttctttcaactgacttctcgctgtagtgtactttataagttcaatgttgcatgctatttccaggaaaaggtggagagagcatttatggtggaaaatttccagatgaaaacttcagattactgcacaatcagcctggtgttctgtccatggcaaattccggcccagacaccaatgggtcacagttttttattacattcaaggctctacctcatcttgatggcaaccttaaatgaatttcaagctataatatttgtagcaaacatgtggtctttgggaaggtggtcagtggaatagctttgcttaaaaagcttgaagcagttggtagtgaaactggaaatccttcttatcaagtgaaaattgtagactgtggtgaagtttccaacacaaattctcaggatctgctaaagggagagaaagaaaaaaaactaagaacggcagatggtaactccactgctgaagggagagccaaattaaaaaaaacatccggtgatcataagcaaaggaagaagagaaaacactattcgtctgattcatatagctcagatacttcagactcattgtcctattcttcagatagtggctctgattcagaatcagattcatcaatggatactagctcatccagtgatcataggcgtaagagaagaaaaggtctaagaaggataagcgcaagcccacaaagagaaagggtaacatacaaggagt

SEQ ID NO: 147957 - DNA, 210 bp, Zea mays
  unsure (1)..(210): unsure at all n locations
  Clone ID: MRT4577_66463C.1
cgctagtattaatcaacgaatgtaagatagggaactttctgcttctatgtcattgccttcagtatcaacgctgcatggagaaaggatggcagccttggggcntccttacttgctcctcctttcccaatagagcagtctttctgtcctgctctctgctgcccctcccaatagtacatgtacccaggctggttcttgggcaaggtagtgggg

SEQ ID NO: 147958 - DNA, 747 bp, Zea mays
  unsure (1)..(747): unsure at all n locations
  Clone ID: MRT4577_66464C.1
ctcgaggccggccgggccgggactctctgctgacctcgctcccctcccgtagccgccggagccctcatcggtttatcctcccgctgccacctgcaacagccccgggcggagatccatcctaactctccgtgcaggtgaccccaagtcctcaagtgggtggcgcaaccatgcccaaggttaagaatccccacgttttcatggacatatcaatcggtggaggtagcgccgagaggatcacattcgagctatttgcaaatgtagttccaaagaccgcggagaacttcagagcactatgtactgggtggtgatttttcaagcggagatggaaaaggtggagagagcatttatggtggaaaatttccagatgaaaacttcaagccactgcacaatcagcctggtgtcctgtccatggcaaattctggaccaggcaccaatgggtcacagttttctattacattcaaggctctacctcatcttgatggcaaacatgtggtctttgggaaggtggtcagtggaatagctttgcttaaaaatcttgaagcagctggcagtgaaactggaaatccttcttgtcaagtgaaaattgtagactgtggtgaagtttccaacacaaattctcaagatctgctanagggagagaaagaaaaaaaactaagaacagcagatggtaactccaatgctgaagggagagccaaattananaagcatctggtgattataagaaaaaaaaaaaaaaaaaggccccta

SEQ ID NO: 147959 - DNA, 363 bp, Zea mays
  Clone ID: MRT4577_66465C.1
tctgcattggccattatctcaaaagtttaagacgtctcaaaagctctggatcagaggatatggaatattgacaacaacactttcagcattcaaaggaagaaagaaggtggcaatgttgtccataatgtttacacgcaaatctttataatcacaccatactgccatcttattcaaattaaacaaaccaatgacgatctacttgaagacaataaactgttagtaataaactttcttacaaagttaaaaatcattatttatacctgacttattataatctgcatcaaaaattacttatgtaagttttccgtacattctgtaattactacatatcatattttatttttttaataaattacatttaat

SEQ ID NO: 147960 - DNA, 265 bp, Zea mays
  Clone ID: MRT4577_66466C.1
cgcgctccatcaccaaccttcggcacaccgcgatcgggatcgcctcagcaagaaggacgccaggaaggcggagaaggctgagaaggtggcacaacgccaacagcagcatctgttcaacaccgaagacctattcgcggccaactacagtgatgtcgtcgtcgaggagattcagttaaaggccatctccgtgatgtttgatacatcctaaagtgcttcatagacaataatgcagggatagggaagaatgtgataatctccaactctg

SEQ ID NO: 147961 - DNA, 521 bp, Zea mays
  Clone ID: MRT4577_66467C.1
gaaatcggtaaggttatgattccattactgatggccaaaactgtgttatgttactcggaaacaacagtatagaggaactactccataacaacagtattcaagctgtcgaagtcacaattgctactaatttctcatatccgttccacactataaaactatacatagaactactaatttctcaaattaaaaatacgcagtcaccataataatgtgtaccctcaagcagagagctagtagtaagccgcataccccggggtcctcaagcagagaaccaggagcccccacggccccacccctccttcaggcaaaactggcgttggttggttacgacgtgccgctaagaaagcagcagacaagggaagccatggcagagcagatagctttctcagctcatcgcatggacatcaggacgcgcctctggatggtcctcttggaaggctgagcggccttcgaagttctcttcaggtttcgccgcaccatcttctcgatctgctctatcgagctggacagcttcttctcca

SEQ ID NO: 147962 - DNA, 2407 bp, Zea mays
  Clone ID: MRT4577_66468C.1
cttcgcctgcacctgcacgcgcccccgacctcaccctctgctgacctcgctcccctcccgtagccgccggagccctcatcggtttatcctcccgctgccacctgcaacagccccgggcggagatccatcctaactctccgtgcaggtgaccccaagtcctcaagtgggtggcgcaaccatgcccaaggttaagaatccccacgttttcatggacatatcaatcggtggaggtagcgccgagaggatcacattcgagctatttgcaaatgtagttccaaagaccgcggagaacttcagagcactatgtactggtgaaagaggccttggagcgtctacacagaaaccactctattataagggaacatatattcatcgcatagttaaagggtttgttgctcagggtggtgatttttcaagcggagatggaaaaggtggagagagcatttatggtggaaaatttccagatgaaaacttcaagctactgcacaatcagcctggtgtcctgtccatggcaaattctggaccaggcaccaatgggtcacagttttttattacattcaaggctctacctcatcttgatggcaaacatgtggtctttgggaaggtggtcagtggaatagctttgcttaaaaatcttgaagcagctggcagtgaaactggaaatccttcttgtcaagtgaaaattgtagactgtggtgaagtttccaacacaaattctcaagatctgctaaagggagagaaagaaaaaaactaagaacagcagatggtaactccaatgctgaagggagagccaaattaaaaaaagcatctggtgattataagcaaagaaagaagagaaaacattattcatctgattcatatagctcagatacttcagactcgtcgtcctattcttcagatagtggctctgattcagaatcacagtcatcaatgaatactagctcgtccagtgatcataggcgtaagagaagaaagggatctaagaaggataagcgcaagctcacgaagaggaagggtaagcatacaaggagtaagagaaagagtagaggatccaaaaggcgtcctagacggagctatgggagttccagtgatgattcagtaagctcaaagacagataacagcagttctgacagtgaaaatggtggtcattataccaagcgttccttgccgaaagcagataaagagagtaccaaaatgacaaattcagaacaaggaagaacgtttccagatgtagacaaagtcaaacaaacagttactaccatcaaccgatcacaatcacatgatggaagtaaaccctcaaacaaagatgacaatggggctgatgacagatctggaaattacagttcaaaagataggaatgatccaggtgcaagctctaggatcagtcctatacagactgatgtaaatttaacgaaaccagtaaatgtatatggcaacattggtggtgataatgcagatgctggcatgtctataactggtacagaaaggcacctgccaagcaatgaacctgtgtccaccaatggtaaagatttagctgtgggttctgcagacaatgggcagcctcagcgaatcaggaaagggcgtggttttactcagaagtatgggtttgcacgccggtacaggacaccatctcccgagcgcccccctgttcgaccccgctacgatggagggagagaggataggtggaacaatttcaataggtatggaagaactggtccttatagtagacgctctccagtaaggagataccatggctcgccaagagccaatagcccatccaggtaccaaagaagaggccggagcaggtcacgcagcccggcgacgcgtcatgaccgtggagggtatcgccgccccagcccaaggcgcagccgcagccctgcagacccgagacgcgatgcgaacgataggcctcgatcaggtcacggtggaggcggtcctgaccaccgtggccacagcccccctgccaacaacaggtccaggtcgaagagcctggatcccttgagatccaggtctcctgatgctgccccagccaagagggagagctcgagatacaaccgcaggcgcagcagcagctcgaggtccagcagccctgatgctgatggaaacaaaggcttggtctcgtactgagatgtaacgccacaacgatttacatgcgccaagaaccatctttcttgctagtttagcgttatgtacgcttttgtaatggcttctaaacttgtttttttgatgtagctgtacatttggatgtcctgttagacgtgaaatgttttttacgtcagatatttataactacttctgagtcagtataacgcgaagagtgctatgcgttcttaggtcgaggcatgaatgttcgagtgtggttttgggtaaaactgaaacgtgttggtcaaaaaaaaaaaaaaaaaac

SEQ ID NO: 147963 - DNA, 688 bp, Zea mays
  Clone ID: MRT4577_66469C.1
cccacgcgtccgctgcaacctgtttggaggatggcaagctgaagacatctgactgctccttgcaggccactccatccaaaccaaacgatctagctctcgcagatctcgtggagaagaagctgtccagctcgatagagcagatcgagaagatggtgcggcgaaacctgaagagaacttcgaaggccgctcagccttccaagaggaccatccagaggcgcgtcctgatgtccatgcgatgagctgagaaagctatctgctctgccatggcttcccttgtctgctgctttcttagcggcaaccggcaagtcgtaaccaaccatacgccagttttgcctgaaggaggggtggggccgtgggggctcctggttctctgcttgaggaccccggggtatgcggcttactactagctctctgcttgagggtacccagtattatggtgaccgcgtatatcctctctacgattttaagcaccatgaattagtgctacgtggtcttttttagtttgagaaattagtagttctatgtatagttttatagtgtggaacggatatgagaaattagtagcaattgtgacttcgacagcttgaatactgttgttatggagtagttcctcaatactgttgtttccgagtaacataacacagttttggccatcagtaatggaatcataaccataccaacttccctt

SEQ ID NO: 147964 - DNA, 184 bp, Zea mays
  Clone ID: MRT4577_6646C.1
ataaaaggatacgccgcaagctatttcaagaaaactttgtactacagcgccgggttctaccaacacaaaaactgcagaaaaaacatccccacgacacctgttgaaaagggccagctcttacacgatggctccagccatgggggagcccgacgaatactccgtgaccgggtccgacctccaaggc

SEQ ID NO: 147965 - DNA, 564 bp, Zea mays
  Clone ID: MRT4577_66470C.1
aacgcatagcaagctcaagccagttcacgaggctcgagcctttcccctgctctactcagtagttctataaatatctggcataagattcattcaaatctaacaggacatataaatctacacctgcatcgaaagcacaagttcagaatccattacaaaagagtacataacgctaaactagcaagaaacatggtccatggagcctgcaaatcgttgtgccgttacttctcagtacgagaccaggcctttgtttccatcagcatcaggctgctggaccttgagctgctgctgcgcctgcggttgtatctggagctctccctcttggctggggcagcatcaggagacctggatctcaagggatccaggctcttcgacctggacctgttgttggcaggagggctgtggccacggtggtcaggaccgcctccaccgggacctgatcgaggcctatcgttcgcatcgggtctcgggtctgcagggctgcggctgcgtcttgggctggggcggtgataccctccacggtcatggcgcctcctgggctgcgtgacctactcctcatcgcctcgt

SEQ ID NO: 147966 - DNA, 326 bp, Zea mays
  Clone ID: MRT4577_66471C.1
ttaacacccgcatgctcagaccatgagggggggggatttggaatctctgaggggcatttgagagcgacccgccaccgccacgcttgggcgcgagccaagaagagcgccgggccgggagaccggacgattatggatccgtatcagattcgcttatggacgatacggaggacatggagcggagcttcacccagccgcagcaacctggacaggcagaggtagctgtctgaggtgactggaggcgctaccgacgctggggtccacctgtgccgaccaggtgcatacggatgatgtgccgggagccacaccgcccgcgacggctgcatcga

SEQ ID NO: 147967 - DNA, 2837 bp, Zea mays
  Clone ID: MRT4577_66472C.1
gatcgtcccaacagaacgacggtggaaccctggtctcctccctcttcacccgcacctgcactgcagcacacgcgccgccgaagcgctctgcccacctcgcttccctccagtggccgccggcgcggctcagcggtccatcctcctgacgccacctgcaacggcgccaggcggtgatccattccaactcgcggtcatctcaagtgggtgcggcaaccatgcccaaggttaagaatccccacattttcatggacatatcaatgagtggaggcagcgccgagaggatcacatttgagctactcgcaaatgtagttccaaagacagcggagaacttcagagcactctgtactggtgaaagtggacttggagcatctacacagaaaccactctattataagggaacacatattcatcgcatagttaaagggtttgttgctcagggtggtgatttttcaagaggagatggaaaaggtggagagagcatttatggtggaaaatttccagatgaaaacttcagattactgcacaatcagcctggtgttctgtccatggcaaattccggcccagacaccaatgggtcacagttttttattacattcaaggctctacctcatcttgatgggtattgcttcttgttcttcagtcacctagctttattggattctcagttctctaaccacaaccaaacactaatactgtcataaaatttattaatgacatgtggcaagtaatgatcgttgcattaagtataaagttttagaaatacacgtttacaacatgtcacatcacacccctatatatcgtactgcactttctttgatactatagtatagtatttaatgctgttagtttctagttatctgtgatgtcttgtcttatatttcctgcctattctccatggcccagcaaccttaaatgaatttcaagctataatatttgtagcaaacatgtggtctttgggaaggtggtcagtggaatagctttgcttaaaaagcttgaagcagttggtagtgaaactggaaatccttcttatcaagtgaaaattgtagactgtggtgaagtttccaacacaaattctccggatctgctaaagggagagaaagaaaaaaaactaagaacggcagatggtaactccactgctgaagggagagccaaattaaaaaaaacatccggtgatcataagcaaaggaagaagagaaaacactattcgtctgattcatatagctcagatacttcagactcattgtcctattcttcagatagtggctctgattcagaatcagattcatcaatggatactagctcatccagtgatcataggcgtaagagaagaaaaggatctaagaaggataagcgcaagcccacaaagagaaagggtaaacatacaaggagtaagagaaagagtagaggatccaaaaggcgatctagacggagccatgggagttcaagtgatgattcagtaagctcaaagacagataacagcagttctgacagtgaaaagggtggccatcataccaagcgttccttgccgaaagataaagagagtaccaaaatgacaatttcagaacaaggaagaacttttcaagaagcggacaaagacgaacaaacagttactaccatcaatcgatcacaatcacatgatggaagtaaaccctcaaacaaagatggcaacagggctgatgaaagatctggaaattacaattcagaagataggaatggtccaggtggaagctccaggaacaatcccattcaggttgatgtaaatttaacgaaaccagtaaatgtagatggcaacactggtggtgataatgcagaggctggcatgtctagaactggtgaaggaaggcaccttccaagcaatgattctgtgtccaccaatggtaaagatttaggtgtgggttctgcagacaatgggcaacctcaacgaatcaggaaaggacgtggttttactcagaagtatgggtatgcacgccgatacaggacgccatctcccgagcgtccccctgttcgaccccgctacgatggagggagagatgatagatggaacaatttcaataggtatgaaagaaatggtccttacagtagacgctcgccagtaaggagataccatggctcgccaagagccaatagcccatccaggtacccaagaagagaacgaatgaggagtaggtcacgcagcccagtgaggcgccatgaccgtggagggtatcaccgccccagcccaagacgtagccgcagccctgcagaaccgagacagaatgtgaatgataggcctcgatcaggtcatggcggaggcgatcctgaccacagccctcctgccaacaggtccagatcgaagagccgggaccccttgggacccagatctcctgatgctgccccagccaagagggagagctccagatacaaccgcaggcgcagcagcagctcaaggtccagcagccctgatggaaacaaaggcctggtttcgtactgagaagtaacggcacaacagtttgcaggctccatggaccatgtttcttgctagtttagcatcatgtactcttttgtaatggattctgaacttgaactgctttcgatgcaggtgtagatttatatgttctgttagatttgaatgtttcttatgccagatatttatagaactactgagtagagcaggggaaaggctcgagcctcgtgaactggcttgagcttgctaaggcttggagaggctcgcgagtttgtaagcctgaatcgagactacttttatgactcgctcaaacgccgagccctgagcgaacttgagtcgactcgggagtctgcctaataatattgtgctacgttgttatattattatgtttttt

SEQ ID NO: 147968 - DNA, 240 bp, Zea mays
  Clone ID: MRT4577_66473C.1
aaggatgtcctctccgttgccttctccgttgacaaccgtttttttttaaaaccaaacaagcgaatttaatatacttcattaacacagcttagcttagtcgttgggcgaccataaagtgccatgcgggcgatggtactcacataaaaaaaactatgttccgtattgcaattgtttagacaaacaagacctcctaaacccttgagtggattgggacctctaggctgggtagtcatatctaaa

SEQ ID NO: 147969 - DNA, 196 bp, Zea mays
  unsure (1)..(196): unsure at all n locations
  Clone ID: MRT4577_66474C.1
acgaccacgcgtcagngctgaactacgacctcaggaagctggcagtgnacctattccacttaccccgtctcagcttattcatggtcggctacgcgaagatgncgtcacgtggatcacagcagtaacgagccatctcagtccacgagctaacgcagcagatgtgagatgcaaaggacatgatgtgagccgctgaccc

SEQ ID NO: 147970 - DNA, 258 bp, Zea mays
  Clone ID: MRT4577_66475C.1
aatttttatcccatcaacattgcatctgggatggtcaacaaagttcgtcgggccacaggctttaatataagcttggctcagagccggtaaccgacacacagtcacacattgttgggaaaaaaacaaaaaaggttctctttatgagcggggcagaaaaatctgatcaaaacccatttaaagccctctggtttatgatttcgggggatacgggggttacatatagggtccaaactggggttttgcccccgtttttcggga

SEQ ID NO: 147971 - DNA, 231 bp, Zea mays
  Clone ID: MRT4577_66476C.1
cggtaacaatctgttagaattagaaaaatctcagcatggctcacgagtgccagcaacagggcaatctgccagtgatgaattattgtataacaacgcgttgaatcaagcgcatactggctggatcactgtcttattcacaatgctttggacctctctcataagtagtttcacaccgctactgctcatataaggccaacaaaactaaacgggtccattactggtgttagctgc

SEQ ID NO: 147972 - DNA, 400 bp, Zea mays
  unsure (1)..(400): unsure at all n locations
  Clone ID: MRT4577_66477C.1
ttccttaagattaacttggggtaaagcctgacgggggtaacagcatccatcgatccgcagtccatgctgtttgatgcatgtttttttttaaaccgnagataaacacagggggtagatcgggggnctttctaccttncaatcaaaaacacanatgggggggagcaaacacgactcgaacgaagataaaccctttggactagggtgaacatnacggtagcgaacaggataacttggccgcgcgggccccaccgctcagttcctccagttcccgtgggagttgccgtagtcgncgtctctgttgccaccggcgtagccgggggctccaccaccgtggtcgtcggcgtcgccgtaggcgtcgtctccgtcgttgttcggcgtcgtcattaggggggccggcacc

SEQ ID NO: 147973 - DNA, 987 bp, Zea mays
  Clone ID: MRT4577_66478C.1
atggacaattttttgagcttgtatcatggaggcattgtggaacaagatccgtatggaaatgccaagttcattgacatgcgacacgtgccggtactattcgatggtagaccctccttgagtgatgtgtttacaaaggctaaacaaaagctaggtttccatcaagctgatgacattgcggttgacggagtgcttaacaccggtcatccaccaaatgtcataaggcgagtcatcccaattgattgtcaactggattgggataattatgttacttcggctatgaagacccatttgcaactcatggaggttgtggtgcgtccggttgtagtagaccgtccccctgaagattttgatcgtcctatcgatgacgtgccaactgttcctgatgctcaatctggccccaatttgatcccattaagtcagccaggagatggcctgcagacagattctgctgcgtgtatccctttggcacaaaccaattgcagagagacccctgctcgtgtggttgatcctcagaccgtggcacgtggctgcttcggtgatggttttattgcctccaacagtcctgagtttaggaatgaagaggagccatatgcgtttgctatggctgccgatttagatgatgatcgtccggttggtgaactctcagagagtgacattgagatgttgcaacgtgtttttccagacggtcgggatccaagagttcatgagttcagcgatcttagtctttctcatcaggcaaatgcagaaggaagggatgatgagctgctagatgctcttgaggccggtcctagcatgatgattgaaaagggaagggtcttcaaggacctaactgccttgaagaggtggttgcagcattacacagtcttacgtaagatgccgtatagagtacttcattcatacgagaaacatcgttacatggttgtatgcgacaaggataactgtgcatggagggtttgtgctaggctacaaaagatcaccgcaaagtga

SEQ ID NO: 147974 - DNA, 479 bp, Zea mays
  unsure (1)..(479): unsure at all n locations
  Clone ID: MRT4577_6647C.1
ggaaacaaaaaaccctcccccttgaaatttttgggagaacgaattggccgcctccccaagaaacggggggaaaaaacaaaagaatccctgggcaatttggcagggggctttgtccccttgcaaatttgcaagggccctcatgccccgctcagggggggggggctttttggttttttaacggggctggggtaccggttccgcagggggctttccgggggcacggccgacatgacgggccttttgccctgcctggcggccgcctccgggttcgcattggggtngccggggacaccggcctgcgccgggggggccttgggggggcctccaccgaccgggaacacaaacgggcccatgggcccctctttttcgagccccaacagggggttgggggccttaaacaacttccccatgggggggcgcccccttggggcaccctcttgaggcactgggggcgccaccccgggggggttttttccggg

SEQ ID NO: 147975 - DNA, 987 bp, Zea mays
  Clone ID: MRT4577_66480C.1
attgggtacctcgaggccggccggtgccattgagacgagcagacgaccttcctcgcctcctctgctctgtcaagcttctcgcgcgcgcgttctctctctctcccatccacttcttgatcgagacggcaatggcgaagggcgggctgagcaagctcaagtgcatgctcaagaggtggcactcctcgagccggatctcgcgcacgccgtcagggtgctcggcgcgctcctcgcacgacgtcggcgacgctggcgccggcttcgctctggagaactcgtggaggaagggcgtggctgcctcgtccgtcttcgccttcggcggcggaggcacggggtcggcatcgttccacggcgccgacggcgtgcccccgggcctccacccggtgtacgtcggcaagtcgcgccgccgctacctcatcgccgcggacctcgtcggccaccccctgttccagaacctcctcgaccgctctggcggcaccggcgccggcgggaccgtcgtcggctgcgaggtcgtgctgttcgagcacctcctctggatgctcgagaacgccgacccgcagccggagtcgctcgacgagctcgtcgagtattatgcgtgctgatcgcctgctcacggtcacgtacggtacggccatgtcggtccgatccacgatgccggcagcggcaccgagccgagctcgacggccggagtcaaggggtaattaattaatctggttcttttgtttaaggttagggggtagagttgtaatagactcaggattgcgagggcagggagtaagacgtgtggagatagttaaccttggggtgtttgtggtaattatctcgagatagcccgtgtaattaccgtgcacccaagagaatgctctcccggggcagttaattagtccttgatgtaatgtaatggcttgcatgttaatttcttcttctgtttctttgaagcgtaattgaataagatcaggaatgggtgtatccatgtacattatatttcac

SEQ ID NO: 147976 - DNA, 433 bp, Zea mays
  Clone ID: MRT4577_66481C.1
ttctttttttctagcggacgagcagcgcactactctgtggcattggctgtcttggcagatttcaaaatctgaacattcatggcttagggtgacagtggttacatccaaaccgggggagctcaaggtttattacatgcttatgtgcgctaggtattagacatttattgccatcactccttgccggcgtaagaatccagcgatgaactgctccgcattctacaacatcaccagatgctatctgttggaagatccatcactccaaacagggcctacttttgatctacttgctgtgcttgcccaacttgctactcttcctctgcgcacccactggccacgcatgttggcctaaattaacaccgatcatccgccaatgtctactaatacaccggccgatcatttgcaacaccattaccacggtactgacatgcccggc

SEQ ID NO: 147977 - DNA, 315 bp, Zea mays
  Clone ID: MRT4577_66482C.1
gcacgcaaatgaattcattgtaaatgttataatacaattatcacctccctccatttgaaaccaaatgatatatgtgtgagcgaagaaccatttgttcagcgtattgcgcttcgaatagtctgaacaagatttgtgtgagctcattagctcgtactctatttattttcaaatacctaatgttatgtttccatcttggtagcctggcctaaacgtcacatgagacggcgctgcatcaagctgtaccatatgttgccgttgttcagtttacagaagagcagaggtctgagtgtctaactgtaacgtctgtgagaacct

SEQ ID NO: 147978 - DNA, 172 bp, Zea mays
  Clone ID: MRT4577_66483C.1
cgcacccccggcagccgagacgcccagtccccgtcagacccttcggcaggtcttcttcggccccttcgccggcgacgaggcaaaccaggggtaccatgtgtccacccaggccctaaactgagccggcccctaggactggttttcctgctgatttatgtagatttggctgccg

SEQ ID NO: 147979 - DNA, 159 bp, Zea mays
  Clone ID: MRT4577_66484C.1
gggcaggggaggaaaaaaatctaaccctagcatccgcagcgctagggttcggcggttgcgatggcggctgcactcatgtaccctcagacgttgaagtgttccagcagccctaaatgctcagacatcctcatcgtaagaagctcctaacaagatttatta

SEQ ID NO: 147980 - DNA, 188 bp, Zea mays
  Clone ID: MRT4577_66485C.1
ctttagatgattcttcatctgaaccatcgttcgttgacaatacaactagattaaagagcgtggtcatgaaaatagctgatttgacctgtctttttgaaaacttgggatcgcttgtgtgccgtactcttaatggcaacttcatacaataccttggcatggaaaatggttaccgtctctcgtcgttattt

SEQ ID NO: 147981 - DNA, 519 bp, Zea mays
  Clone ID: MRT4577_66486C.1
gggggtccaattaccaaacatttttttagtcccacaggtgaatgttttctaccactggtgcgatgagaaactgcccccgccaaacaaccacaaattttacttggagaccgcggagacaattgtggcccttgcataccaacaacagattggattatagcataagggggaagacccacagaacagacccgatgttctttttctttcctccataagaataaacccagctttgtcgacctcctccattttgcttttgccagggttatcctccaaagggggcatgttggtgtcagcctccggagcccccttgtccttgtggatgctcaggcccaatttgagcctgcgggggatgcggctgccaaaggtgttgggatcctcggggctaaagccaaaagtgggcagccccctttcgaacagcaacatgacaggggccttaacggacttttcgtttttgtaaacctcggcccccttggggggctcctccatgatggggttctcggggttgatctccatcgctttttt

SEQ ID NO: 147982 - DNA, 124 bp, Zea mays
  Clone ID: MRT4577_66487C.1
cgtggattttggtgcaaggagatgccggcttgctttccttggcacaaatgctggtggtagaacattggcccgaatcattggaattttaacctccaaaccccagggggaccagggcagggaaaaa

SEQ ID NO: 147983 - DNA, 288 bp, Zea mays
  Clone ID: MRT4577_66488C.1
cgcccttttggcaaccacgctgctcccgcaaccagatccctcttttgtctgctgtggctaatcactcgggagagggtgccattgcctcgatccacatacgtatcgcagaccccttcctattgtgcagcaaaaacgatatgcattatgcgtaatccaaccatgcgccgaactccaacaggctcaaactcatacacgtgaacagttcacctccgatcgcgctgagcgccgttcatctctggcagcagagcggatccccattgatccctctggccgagtcttcagacgtaa

SEQ ID NO: 147984 - DNA, 162 bp, Zea mays
  Clone ID: MRT4577_66489C.1
gtcttatgttttggacccctagagggagcccatggcgctgatggtctacactagaacgggggtgagcatactacgcatactggtggcacggactaagcagaccaaggcgctcgtggacactgcccagtttcgggcgaccaccactgagtccaaggcgctcac

SEQ ID NO: 147985 - DNA, 437 bp, Zea mays
  Clone ID: MRT4577_6648C.1
attttgacaactttccataattcactatcaactgcttctaaaggaagttgaaatgcatgtgtcatggtaatgctgataacaatttggttgtttggaaataagaaattgaagtaccatattcgtagcaatttatatttcgtcgcactattttcttcattattgatgatgatggtgctgtacagttactatgaacaactacacagggtggtcacagatgaatttaaggacatcggatatgatctgtacaaaaagactcttttgagttaatgccatagcccgtagtgcaattaggtgtacctgatcgatatctgctgcaatgcacatcaaactgcaatgtgtggtacaggcctaagcatgggcagttaattcaagatttttaagatcaggacgaactaatacagatgcatgtgtgagaagtttcttggagaaattaaaat

SEQ ID NO: 147986 - DNA, 308 bp, Zea mays
  Clone ID: MRT4577_66491C.1
agctcgcactccgtgcagccgcagcggatcgagctccccgggtcgctatcagaggcggccactgcacacgacggtgctggtatgttgcaagcacgtgcaggatggcgcaggtcgcgaacacgcttctccctgtgagcctgatggtcgtgtcggctgtggagctgtgccgcgccatcgagttcggcgaacgacatctggcatcggacgaagcgctgtgggacctgtgagagcggtgtcagacgcaccatcgggtgcaccgggaccatcggcataagggccgcctgttcgggaccttcaatgagaacgcg

SEQ ID NO: 147987 - DNA, 382 bp, Zea mays
  Clone ID: MRT4577_66492C.1
ccccggcgacccacgcaaccgcggacgcctagtcttactcatgggcaatattatcaatcctatataaaaattgatacccgcggtacgcttataaatgaattgcggccgcatactatctaccacagctacctggattattatccatttctgctgtacttattgtattgtatcttattgtctctaaaacaaattaacattcccataggattacagtgtcacgcactatcaatctgtatctcatagattttgttctcttatataaattccttgctatattcacattcttatattcatctcaatagcaactccttactttccttatgttcatcattcaacatactactaaattacttgctctacctttttatttccatgtttgaac

SEQ ID NO: 147988 - DNA, 321 bp, Zea mays
  Clone ID: MRT4577_66493C.1
ggggtcacgggacaacgggggacaccgaggctttcttgcccgggtaaaaaaaggcacacatggacgggggcaaccggggtattaacaccggtttttcaaaccccaaaggcacaggcacaggatttaaaaatttcaaaactggggcatgcaaccagggagctgaggggggggggggcactgccaggctgaaagcgggctctggggcttccattccaagagaggggggcacactaacaacagggctaacccgggattattcccccacaaaaaggtaaagcgtcctgggaacccggttttttataaaagggggaacaaaacccc

SEQ ID NO: 147989 - DNA, 557 bp, Zea mays
  Clone ID: MRT4577_66494C.1
ccggccggggttcatgttcctgttcctgcggcgaacttgtcctcgcacgtcggcaacgcggcccggccggagccgcaaagccgcggcatgcatgcgccggggcccgcgcgccgcgtgtcgtccgctgctctcccacgcgccggcggctggatccgcggcggctccgatcccggcgcgggggaaactcggggggttctccttctccaatctccaggctccacacgtcgtgctgacggttgtccgggttgcccgaggcgggacgtggcgacgctggcggcccgcaacgtgcaccatggacgcacgcctgtggtgctggtgcgaaccggtttatggtcgaccaaccagcagatccgcagatgcgatgccctgagtattctcgcacccgcggtctggcgcgtggcgtctgggtctggctgaaatttcaccgagagccccgacaagacaacgccgctcgctggtgcacccctatccaccgcgaagggaaacgacgaaaggccagcatcggaagaactcggagtgaagtgacatgcaaaaaaaaaaaaaaaaaaggggcggcc

SEQ ID NO: 147990 - DNA, 382 bp, Zea mays
  unsure (1)..(382): unsure at all n locations
  Clone ID: MRT4577_66495C.1
gtagcttggatctctagagcgccgcctttttttttttttttattttttttttctttttttttttttttttttttcttttattttttttttggattttttttttgtttatttattaaaaagaagaaataagacgagtagaggcagacttgaaaattagaggaaaagaagtagagcttagatagaaagtgaaaagagcagctcaactgaaaaatgaagctcaacaagaagccgaaaccgaacccagtcaaaagcactcacgccgcaacaaaaaaaaaaactacgcacaacagaaggagattacatatctgaatnntccccaaggtaggggctccagaagggagggcgccgtaccacaagaccaggaagagcaagacgtatgcct

SEQ ID NO: 147991 - DNA, 260 bp, Zea mays
  Clone ID: MRT4577_66496C.1
gtcgcctttttttgcatagttttttgtaacatagtgtcagctggaacggtgttgtggattaaaacaaaacaactttggctctggtgcatggtgctggaataggatccaaaaaacctcacggccatagcactggtcacacagagcggagagatcgctatggctaaaataggcttgagcatttaccaagcaccaacagatgacgtgcctgaggggaaggactgatcgaaagttacgcctagctcttgtttaaagcaactatg

SEQ ID NO: 147992 - DNA, 501 bp, Zea mays
  unsure (1)..(501): unsure at all n locations
  Clone ID: MRT4577_66497C.1
tcctttaacaaccttaagtaatccaacccncnaacaaaccanncaacgggtgggaatttttgggggggctcgggcgcaaaataaaaaaaaaagcgggggaaacacagaccgggcaggggggcaagaccacagggaaaagaaaaagggaacgggggggaccagctagataaccgcagattttttttcctgagagaacgggaagcaggggtcacggggccacaacccagggggccccccttcctactagaccttgctcggccggggaaggccccagggctgctgcgacaacgaaagcgcccccggagaacccgcaactttgcaccccggaagaaccaagaagggaagctatctgtttgtatccaaaccgaaacagaaagccgggccaaacagaaacactcctgaagaacgggggccggttgcgtccccaaggggaaaaaaaagggattatcccaacaaacctaattaaactgggaaaaaaaaggggccgcgggggtcgacccg

SEQ ID NO: 147993 - DNA, 350 bp, Zea mays
  Clone ID: MRT4577_66498C.1
ttgtttttttggggttgaaatttttttcttttcccaaagaagaaaaaaacttatttttggggatcaacctttggatcgatcggccggttcgcccttttttttttttttccaggggcccttaaaactggcaccccatgaatgaacacaccccccacccttcagttggcaccaactcgaacgaaaaacggggggaaaaaaaaaaagtttttcttccccgactttttccccttttaagcctgcaccccaaagggggaaaaagaaaagggattgccaaaaaaaaaagaaaaagtcgtccgagggattaatcaattttgtggccctttaggggccctggtcgtttttttaaacca

SEQ ID NO: 147994 - DNA, 320 bp, Zea mays
  Clone ID: MRT4577_66499C.1
gctatagatgagccaagattaccttctcgcgcgcaggacggaagatccacgagtaggtggcatccaaactcgcctcgctggccgcaggcttagatgctgccgcactaaggaaccgctgaccctcggcgtgttaggatgccagcaacccaaccgccggtagctaggcctcggctaaggatgaagagaccactggggcgggctacataaaagctaagaccatcatgaggccactgggcagctttatgaagaggaaggctcagcctcatttgttgatcaagaaacacaagagtaaagcttgtgagaccggaaagttttctttt

SEQ ID NO: 147995 - DNA, 225 bp, Zea mays
  Clone ID: MRT4577_6649C.1
cccacgcgtccgtctatatgttagtgtttatgtatatgtggagatacggtacaaccatgacacccgtatataggcacaagagagctttatttgacgcgggactagacgacgaaggcttccggtagtaaagaaggctcgcttgtgcctatatacggcgctcattgttgtgccgtgactcgatatggtagtgcatatgcgtgtgtggggatcccatggcggccttgc

SEQ ID NO: 147996 - DNA, 258 bp, Zea mays
  Clone ID: MRT4577_664C.1
cccacgcgtccgcccacgcgtccggccgaatggtcgggcgaatgttcgcatctctccgacctcttacctttccgactctgttttgattttacacgttttcatctggctgggggtagacaaatcgtgagaccaagtaatttgtgccttggtttgaccaaagttagcagaaatcttggcggctactccatcagttccatctacaaacattcttcgtagggcttcaaaagtccagcggagaacgtttcaccaataataacg

SEQ ID NO: 147997 - DNA, 256 bp, Zea mays
  Clone ID: MRT4577_66500C.1
atactatcttccatctgacactaacattattgaaaatgggagcagttaatactttctaataaaaccgaaccctcttaaagttaaaagggggtgggttttacgtttattggaaccacacctaaggcatccctggcctaatgcacatgtattccatagccctaatcaatctattgttttcccatgcaattatcttatttacatgcatgtgatactatgctctcttcattctaatttgaagaagcagtagacatgtcat

SEQ ID NO: 147998 - DNA, 292 bp, Zea mays
  Clone ID: MRT4577_66501C.1
catctggatagtcttcagaaacaggagctaaatcatcacatcgtggtccacaacaattacatatatctaatatatctatagaagggtcggctgatatctctcaagcaagtgtagcttcagatagcatagatggcaggtcagtgacgtacgagctagtagccgatttgctatggcggttgagcaacaacatttatacagatgaagatgcacatctcacagagctagaagaacctatacgctaaggtgaagccttatagtatcggaagaacagataagctgatatcctatcaaa

SEQ ID NO: 147999 - DNA, 596 bp, Zea mays
  Clone ID: MRT4577_66502C.1
cacacacaacaaccaacttgcaccgactagcaccaagtaggcgaccaaacacttaggctctttgcctacttgactactacttagcataggcatgggcatggccaccgctgctgcaaaccgcaaactggattatggccccagagagaggaggtggcgatgatggtagcggtgagaaccgtggttacagaggaccagactatatgcccagatcatggtatgggaagggccgcgacaccggatgcgcttctgtaaggtatagacatagagcctatccaaggggatgtagtactgaagcaagccacgaactatgccctctgagtacgagtccgcgcaaggataggcctacccaactaccagcgggcctgccggcgcataaggaactgccgcaggtgggagaacctgaagaactgggatgcagacttgcgcaaggtcaaccaggccacgcttttcgacctgatcttggctgcaaactatctgaacatcaagggtctgctcgacctgacctgtcatactgttgctgacatgatcaagggcaagacaccataagagattctcaagaccttcaacatcaagaatgacttcaccccctgagagga

SEQ ID NO: 148000 - DNA, 306 bp, Zea mays
  Clone ID: MRT4577_66503C.1
ccggccgggaccgagtcaaattctcacaagctactgcaatactgtgactgaccaaaccgtgcaagttcccccgccgcgcacataaaaaacagccagtgctcggcgacgtacgacgtcgtccatgtctgtgggcagcaagtccaagtcgttgccagaccacgacgacctcgacggacgctaaagccgccaccgcgccgggcacgagggacaacggcgactcgttctcgcccgtcaacgacggcagcaggaacaaggatcacaatcgctcgacgtgcgcaacgaccgctcctcctccttgctggagat

SEQ ID NO: 148001 - DNA, 864 bp, Zea mays
  unsure (1)..(864): unsure at all n locations
  Clone ID: MRT4577_66504C.1
cattgggtacctcgnagccggccgggaggctccacagatgaagatgctgcggcggctcatgctgagcctgagcttcatcctcctcctcccttcctatctcgcctacccactatgcaccgatgcaagggcgccggtgctgctcaacaccacgctcaagttttgcgcctcccccagcagttcgacgccatggccatctccgacgctgcctgcgctgccgtcgtcaagtcaatcctctgcgctaaatgcagtccatattccgcggacctgttcggcgcggggccaaagatccggacggttccttccctctgcaactccacgtcgtcggcaaactctgctgagtccaaggaaaccaccaccaccaccactcaggactactgcaaactcgtctgggatacttgcaaggacgtgagcatcgccagctctcccttccaacccccgctgcaaggcaccgcgccgcctcctacttcaccgtcgaagctcaccgacgcgtggcagtcccagagcgacttctgcggctccttcggcggccggtcgtctgtatgcctcagcggcgacacggtctcgttcaacgccgccggaccttcaccctccccaagaccagaaccaagaggggtatgcctgggagaggatcgacaacgggtcctaccttagcctggctcctcaccccgacggctccagcaggatcttcctcggcagccaagccggaaagatatggctggccaccgtccccgagcaagggtccgngggcgcgctgcagttcgagggcgcaggcccatttgtcgacctgaccgaccaggtgcacttcgactcggcgttggggctcatgggcatgcgnttccacccgggtttcgcgacaacggccgc

SEQ ID NO: 148002 - DNA, 2405 bp, Zea mays
  unsure (1)..(2405): unsure at all n locations
  Clone ID: MRT4577_66505C.1
cggggcagtgtgcacgccagaccccgtcactgtcagtcgtcctcttccactctagtattaccggtagatcgacaaagctgtcagcctccgttttcgacgccatcagagcaggctccacagatgaagatgctgcggcggctcatgctgagcctgagcttcatcctcctcctcccttcctatctcgcctacccactatgcaccgatgcaagggcgccggtgctgctcaacaccacgctcaagttttgcgcctcccccagcaggaacagcagaggctgctgcgacgccaccgctgatgccgcgctcagcaagcagttcgacgccatggccatctccgacgctgcctgcgctgccgtcgtcaagtcaatcctctgcgctaaatgcagtccatattccgcggacctgttcggcgcggggccaaagatccggacggttccttccctctgcaactccacgtcgtcggcaaactctgctgagtccaaggaaaccaccaccaccaccactcaggactactgcaaactcgtctgggatacttgcaaggacgtgagcatcgccagctctcccttccaacccccgctgcaaggcaccgcgccgcctcctacttcaccgtcgaagctcaccgacgcgtggcagtcccagagcgacttctgcggctccttcggcggccggtcgtctgtatgcctcagcggcgacacggtctcgttcaacgccgccggaccttcaccctccccaagaccagaaccaagaggggtatgcctggagaggatcgacaacgggtcctaccttagcctggctcctcaccccgacggctccagcaggatcttcctcggcagccaagccgggaagatatggctggccaccgtccccgagcaagggtccgggggcgcgctgcagttcgagggcgcaggcccatttgtcgacctgaccgaccaggtgcacttcgactcggcgttggggctcatgggcatggcgttccacccgggtttcgcgaccaacggccgcttcttcgcctcgtacaactgtgaccggaccaagtcgcccagctgcaccgggaggtgctcctgcaactccgacgtgggctgcgacccttccaagcttggcaccgacagcggcgcccagccgtgccagtaccaggtcgtggtgtcagagtactcagccagaggctccgccgcggcgaatgtttctcaggcaacttctgccgccgatccatctgaggtgaggagaatcttcgcgatggggctgccttacacgtccgggcatggaggccaggtactgttcggccctgccgatgggtacctctacctcatgctgggcgacggagggaagggggaccctttcaacttcgcccagaacaagaagtcgctcctgggcaagatcgtgaggcttgatgtcgacagcacgccttcttcatcaggaggagatctcggcaacacgagtctgtggggcaattactccatcccgaaggacaacccttacgccgatgacagcgagctagagccagagatctgggcgctgggccttagaaacccgtggaggtgcagctttgactccgagaggccctcctacttctactgtggagatgttgggcaggacgcgtacgaggaggtggatctcatctccaaaggcgggaactatggatggcgtgcgctggagggtccgctcgtctatcacccgcagtgggcgcctggaggaaacacctcgctcagctccattgacgccattcctcccatcatgggatacagccattcagatgtcaacaagaatatcgggtcggcgtcgatcatgggaggttacgtgtacagagggtccgctgatccctgcctgtatggaaggtatttgtatgctgacctgtacgcctcggccatgtggaccggcgcggaggctccagagagcagtggcaactacacctccgctctgatccccttcagctgctccaaggagtctccgataccatgcgacgccgctgctgggagccctctcccgtcgcttggctacgtatactcgttcggcgaggacaacagcaaggacatgtatgtgttggccagcaaaggcgtctaccgagttgtgaggcccagcctctgcagctatacttgcccggcagagagacaggagacatcgccgcctgctgctccttcatccaacaaggcgtccatggcggagatgggaatgggaatgcttttggtgtctgtcattgtggtttgggttttggtaacataggatcatgctgtgatgagacatgtcatatgcaacgaccagtcctgaggaagaataagagtgccagtcagtcagtgagattagaatagaagtgataggcagtcagttaggctgtctccaataaattgtgtatatgatcatgtaaaatattattttatattatagactgtattgttcacagaacgaagnnttgg

SEQ ID NO: 148003 - DNA, 252 bp, Zea mays
  Clone ID: MRT4577_66506C.1
ggtaaaccctagcgctctttccaccccctcgctttttttttttgcccgcattcgctgtgacgtgaacgactgaagcgaaaccctgacgttcctacggtacttgagcccgtttggtccagttgcggccattcctgggatgccgcgtatcggcgtatgtggatttattcgctgttccgagttagccctccgtgtggccccacgttttgagcacgcgcccaaggtctcagtggggttcataatccatcagttagg

SEQ ID NO: 148004 - DNA, 428 bp, Zea mays
  Clone ID: MRT4577_66507C.1
cgcgtaatagatttgtaagttcgacaaaaaaaaaaaaaaaaaaaaaaaaaaaaaaaaaaaaaaaaaaaaaaaaaaaaaaaaaaaaaaaaaaaaaaaggggcggccgttttaaaaggaaaacagggttgggcgctcttgcgtgcccaggcttactttttctttcgtgcgacctaatttcttttttttggggcgccctttttcaaattcgggggcgggaaatttctggcgttgcccctgttaaacccctggcgttacctccctttttcgcctggtggcgtattaccttttaggccgctgccgttttatcttaaaggcccttgcccatcctttttggcaaatggggccccccctgtatgggcaatttaaccccccctgttgcggtgctttcaccccggggggcgggttgttttcccaccgccttaccgctc

SEQ ID NO: 148005 - DNA, 255 bp, Zea mays
  Clone ID: MRT4577_66508C.1
ggatccgagtgctgtgtacggaaccgctgattaacgagatgattctgtacgcacggcgttgacaacggccacgactaactacgggctttactacgaaaaatatgcttgttgcaagcgcaacaggcaaaagctacctcaacgcgccgattaaccggaggtccttcgcttcagatgtattctagactgctatctccaagacgatgtgctacttccgggagttatcgttctcgcacgacgacttcacttctccagtct

SEQ ID NO: 148006 - DNA, 565 bp, Zea mays
  Clone ID: MRT4577_66509C.1
gcaggattttttttttttttttttttttaggctaatgaagaggagaggcttgttcaacaagatctacatgtggagttttcacacctaaaaagaatgtgtgtttgcgctcttgggaaacaactatctcttcactgcttggcctgctccagctccttgacgagctctggcacggcctggaagagatcctgcacgaggccgtagtccgacacctggaagatgggggcgtccgcggcgttgttgatggccacgatgagcttgctgtccttcatgccggccaagtgctgaatttggcccgagatgccgacggccaggtagagctgcggggcgaccaccttgccggtctggccgacctgccactcgttgggagcgtagccggcatcgacggcagcgcgcgaggcgccgacggcgccgccgagcttgtcggcgagatcctcgatgagcttgaagttctccttggacttgagggctcggccgccagacaccacgatgttggcgctggtgaggtcgggacgctccgacttctgctggacctcttcgacccacttggacagatcgttctcgccgc

SEQ ID NO: 148007 - DNA, 376 bp, Zea mays
  unsure (1)..(376): unsure at all n locations
  Clone ID: MRT4577_6650C.1
ggcaaaaaggaataaaattcaactaaaaatatgcatataagataaggggaatattctcatgtttttgtgtacataagaaaatacactcatacattgaaaatttagacaatgtatcgaacaaaaaggtttcaaaccgaatgaaggaagtaaaactgacatactaaccgaccatcattggtctggtttagcctaatataacatggccgcatgaatagcaaagcatggagcaagagacccagtaacaatcaggacgccgtactaaccaacgttattatctttcttctcacctactatatattacctnctcatggttggatcatcgaccatttggtatgtttaatgaattaataaattaattaatccatctgctctggga

SEQ ID NO: 148008 - DNA, 191 bp, Zea mays
  Clone ID: MRT4577_66510C.1
cttgttctataggtccttacggtatcagaccagggggatttatacgaggcaaacgggggaaccacctccacccgagacaagtgaaccacgacacgtcaaaccctctcctggactcccagcaaatcacacagcggacgcactggtcatcgctcccggggctggacccaatactagcatggaccccacgggac

SEQ ID NO: 148009 - DNA, 420 bp, Zea mays
  Clone ID: MRT4577_66511C.1
ctcgaggccggccgggccgggaatctggaatgttgagctaagtcattgggggtctcaagaagaggtccaggaatcctaagaatgatatgataaccatgcttaaatacagatggcataaattttgcattgataacgatgtaggttggtgataggtgttttttcatgtccattcatgggcctcaccttttctgatgtgacgaaagaaaactatattgatcttgatctgagctatacattgaaggtcgatatagtaaaggagcacttacacattgttgctcatagatttaggtactgccatcaaacattgtcttctgatccttatatgcagtgtctggttcttatagcttgcatgtattttatgcattgactatagggaaaagaagtgtgcgaaaaaaaaaaaaaaaaaaggcccctagggcc

SEQ ID NO: 148010 - DNA, 296 bp, Zea mays
  Clone ID: MRT4577_66512C.1
gatcggatcaagaggatgttgtcggagcgcccgccggacgagttccccccgctgccgcagtcgcccccgatgcagatgccgcactatccgattcgacggaagccgcggaggagaccgagggaggaaggaggaggaggaggcggcggcggcggtggcggtaacggcaacggtaacggcggggactcgtcctcgggaggggacggcactagcgcttcgcctaagacggagtcgtggggtggagccagcctcggcgatgacctgccgacccctcgggagttgtgccggagcttgatgat

SEQ ID NO: 148011 - DNA, 463 bp, Zea mays
  Clone ID: MRT4577_66513C.1
ccttgatggccataggtttggtactggctcagatgatggcacatgtagattatttgatatgagaacaggacatcaacttcaggtgtacagtagggagcctgatagaaatagtaatgaactacctactgttacatctattgcattttcaatatcaggaaggctactttttgctggttactccaatggtgactgttatgtgtgggacacacttctcgccgaggtggtacttaatttgggaaacctgcaaaactcccatgatggccgtataagttgcctcgggatgtcatctgatgggagtgcattgtgtacaggaagctgggacaacttttctcccccatgttgtatgttccttgttgccccttaacaacggacagtggtgattggtgaccaactcgacttgttcctgggaatccctttgttgttttgtaagctctgttcgcgctatgtttaatggaaaaatgtg

SEQ ID NO: 148012 - DNA, 381 bp, Zea mays
  Clone ID: MRT4577_66514C.1
ctctgatccggtggtctcggcggcgtcctctagcgacgacctactccaatcctctgtttatgcatgtggctattggttgagtccatactaggatatttttcattaattgtgatgtacgatgtaggtatttatgctattttctataatgatttatgctttacgcgataccagccatacaatttatgcaactacgctatgagaatgaaaataccattcaaaacttgtgtgcatgcattggaaactcacacgacctactataattttcagatctggataaaaataggaccgcatgcttttgtctggtgggggatgcgcctgagtgcatgttcttggtggagggacgacatagaatcacgtacatatttttatgtcactttgtat

SEQ ID NO: 148013 - DNA, 315 bp, Zea mays
  Clone ID: MRT4577_66515C.1
cccactcgtcctcatgcactttcccttactcatagacctatatgttccataacaattccactttcaccattgtatgttcataaacttcttatacaacatacactaaactataactaccacactccctaaccctatctacttcaatctacttcaccttaaacccttcacaacaactactcctcaatcttcagatcttatccgatattccaacacacactgacattaatcaacattacaattctcatcacatccctactacctatcaccaactatcacactatctataataatatacaataaaaataacacttttca

SEQ ID NO: 148014 - DNA, 371 bp, Zea mays
  Clone ID: MRT4577_66516C.1
ataattttttttttttttttttttttttttgggggtttttttttttttttttttgggtaacaggattagtatcatggcaacggggagggattccatatggatacaagtttgcgttgcaaaatggggtcccccccttatttgtccccatagtaataaacaaagatgccgattggatcccctgggattaggaaaaactaaaaaaggggaccaacagggggggacatacagttttattggtgcaacagtcgtgcaaacagaaactggatttttggggtgaatttaaaacaggggtgagaaacttgacctttgtcccacgaggggaaaagttgccatgatcggacccgggggttgacccgggaaattcggaccgg

SEQ ID NO: 148015 - DNA, 188 bp, Zea mays
  unsure (1)..(188): unsure at all n locations
  Clone ID: MRT4577_66517C.1
ggcgactcggctcctccctccacgcctctcctcgtcgacgagcggacccggtccaaacaaccccanaccccncacccccgtaccccgaacccctacccgctcccgctaccctaccacgattcccagcatacccgacacctccgataccggaccgcgtaccgctggtaggagttccggtcttcccctcc

SEQ ID NO: 148016 - DNA, 182 bp, Zea mays
  Clone ID: MRT4577_6651C.1
ttatttttttttttttttgtttaagcaacaacggtaggggggacaactatgctgagttacccgcaaactatactggggaataaacacctattccaacatctgttgtagactaccatacaatactttagaacaggattacctaattttaataatttagcatctattgctatatcacgttataa

SEQ ID NO: 148017 - DNA, 221 bp, Zea mays
  Clone ID: MRT4577_66520C.1
cccacgcgtccgggccgacctgatgacaaaggcgggtcgtgctgtttatgttcagttttgttctcacagcaaaaatgatttatgctgcgatggctttggacctccctatttggaccatcaaagctattgacaagataagaagaggtttcctttggaaaggaagaaaacaagccaatggtggtcactgtttagtggcgtggggtaaggtcactaggcctaaa

SEQ ID NO: 148018 - DNA, 403 bp, Zea mays
  Clone ID: MRT4577_66521C.1
gaacattgaaaagccggcctttttttttttttcgctttttaggggggtccaaggggacccgggtttggccccctttttttcttcgtttttaggggggggcttgggaaaaaaaaaaaacgggttttggattttttacaaaggcgagaggcttatgctgctttagggggggggggttttttgggcctttacttcgcttccttagacaaaaaaattgggcctggttggcccttacgtgggggaggccattcaccggttttccccgtttgaacacaggttgtgcccccattccaaatcccttacacatggggacaacaccaaatttgaggtttttgccccggggcttttttttttttaaaaaagtagccccaccccgggcacctgttgcccccaaagggtgtccaag

SEQ ID NO: 148019 - DNA, 311 bp, Zea mays
  Clone ID: MRT4577_66522C.1
agaccattagctttatctactacaacacgcaggggagcgcctcacgacaccgggacggcgttccctcacgccctcgctctcctggctctcgctgcaagctccacctacacccatacaagctgggtatgaaagtgccagccaccatcgacctttcatctaccctcaccgacacatcagccacctaccctacacctgccaccttcggtgcatatcccaccatcactacacctgcctgcgcctttccacctatcaccacccaaacatgtgctcccgacggttcatatcacgacaacaccatgccactaccctac

SEQ ID NO: 148020 - DNA, 808 bp, Zea mays
  Clone ID: MRT4577_66523C.1
cctcgaggccggccgggatgacctatcttgggatggcctacgacttaaaagaggaacttggtaacttgtcgtcatgatttataattttgaacagcacaatatcaatcactgaccatgatattagtagcaaagtttcagtgtaacatgtaactttttcagatacttttatttaaattttagcaattatcagtattttctttgttatttggggaagtttgtggagccacaaaatctttcacattgttttctcctttttattcctgcgactttgtgcctccagtatttttttcatggaaccatattttatcaacccatatccctaagccttgttcccttatactgcatcctgcatacatgcactatgttctgatgtagtgattggtttaatgccaaggaaaagattggcatggatgaagaacggccaatggcattataaagtttcagcaaaagatgaacttgtgcctggtgatattctctttctacctgttaacattcaagaatcttctgttaccgagaagaccaagaaatttggtaacaagaatgagattgattttctacgtgaccttgaaatctacaaggatagagccatcattgtgctcaacaaaccacctggaatgccagtacaaggtggtgttggcataaagaatagcattgatatactggccccgatgtttgagaacggttcttctgaagtacctcgactggtccacaggcttgatagggattgcagtggcgtccttgttctgggaagaactcaatttagcgcttcccttatgatgctatattcctgagaaactgctgatgcttt

SEQ ID NO: 148021 - DNA, 149 bp, Zea mays
  Clone ID: MRT4577_66524C.1
caaaagccacatatcaaggtccagatacgtggatagctgattttggtttgctcctattcaaggctaacaacattcatgatcataatgttgaattattgaattttgatctatgtggctagcaccagatgcctagcatgattgtgtttctt

SEQ ID NO: 148022 - DNA, 811 bp, Zea mays
  Clone ID: MRT4577_66525C.1
ccccagccccggctacctggcgcggacggtccggccacggtggcacagggcgcggcccctgttgacgcgctagcgcggtcccctgacggcggcgcgcgggctcgcggccctcctgcgcgcgcgagcacggccccccggcggtggtccggttgccaggcgcggcgagcccgctgtgtcctcccggcatcagcgcgggcgtatggcccctcggcatggcggccccctcgacgtgcaggcgcagtggccctgtcaatgcgctgccccgacgaccggtccggcgcggctaggccagcgcgtgtgcgcagccccgacggggcgcagtaccatgggcaggacgcgtgcgaagcccccgcagaacccctggtggcccgtggccctgatccggcttggaacatggccggtggccccgatgagccatggccgtgaatggcgaagcaaccatcagaaacaagaaagattaaacaaaatagtgataatgcgtaccacataatccttctgcacatttctgtttcttaacttctgtgagcgattccttctctcagcaacttcaacttctctctgtttctcacgagcagtgctgataacgtgttaaactctatcacaacgctcagtggcaaatgaagattaacagagacaaagacaaatcgctgggacaatcctttattgcagagtagtgaagtatatatacaagagtttccaaggggtgtgtcccttgggaaataactgtcactacgacatatggatggattagatcacatgtataaaatgttttataacaatgtgaaaccacatctgtggaactttcagtgtg

SEQ ID NO: 148023 - DNA, 1041 bp, Zea mays
  Clone ID: MRT4577_66526C.1
gcaagcccatcggggcccctctagagcgcattagcactaggttttcccatctcttaaggctgccaccgccagcgccgccccctcggtgcatcctcagtgcgtactgtctgtgcgaaggcgaccattccttcttcgctccttcgccgccgctatggttaagtactcgcaggagccgggcaaccctaccaaatcggccaaggccatgggaagggacctgagggtccacttcaagaacacaagggagacagcttttgcgcttcgcaagctgcctttgaccaaggctaagcgataccttgaggatgttattgctcacaagcaggcaattcccttccggagatactgtggaggtgttggtcgcaccgcacaagcaaagtctcgccactccaatgggcagggtcgctggcctgttaagtcagccaggttcatattggatttgctgaagaatgctgagagtaacgctgatgtgaaaggcttggacgtggacaacctctatgtttcacacatccaggtgaaccaagcccagaagcagaggcgccgcacctaccgtgctcacggacgcattaacccttacatgtcctccccttgccacattgagctgattctgtcagagaaggaagagcctgtgaagaaagaggctgacaacattgtcgcggcaaggaagcagtgaagtatgttagcctgctgataatggcatcctttcgaagcattatagccgtagctcttttatgtaccttttcaggctggtaccgataccgtggatctggatttgctatgttttgtactgtgctcgagtgtaaggtcagttcgtaatacaatcaatctgcgtggaacaatttgatatccttgaatatgttagtgagatcatttcgacaatgaaagttgagaacagaagttacaatgtcagtgcccatttttttttgttttgttattagatgctaacgccgtgccacaaatcagctcgtgaatttgaacccagattttcaaatacagaaatttaagtgattttgagaggaaaaaaaaaaaaaaaaaaaaaaaaaataa

SEQ ID NO: 148024 - DNA, 442 bp, Zea mays
  Clone ID: MRT4577_66527C.1
attcggctcgagctttgaccagctactactttttcagttggaaggaggggatcggccagggggtctgcgtccttaagatgagcaaacgttaggacgtggagacctggaaaaaggagggtgcccatatgtgcatgggtacttactgctacaattttctcacaaggatcaaggactggacgctggcgctaaaccttgcaagcgctaaatatggggagacccaaaacatcttcaggccagcctgcttgatgtttatccagcgccttgtcattgaggcgcatgatatcgcatacaccaaaaacctgctggaaaagctctgcctacctattgtgcacaagactctcctgggcactggggaagacatagcaggtcattgcggggagcccgaggtcgcccacgcatgaagctgcagccctacacccccaatgcagactgttggctatgg

SEQ ID NO: 148025 - DNA, 363 bp, Zea mays
  unsure (1)..(363): unsure at all n locations
  Clone ID: MRT4577_66528C.1
agaatcataggaaatagcagatgttaagttaatccgataaaaaaaaaaaaaaaaaaaaaaaaaaaaaaaaaaaaaaaaaaaaagaaaaaaaattgtttatacgctcgggcgcgcacgcgcggtctgatttgtatctgggaaaaatgggggggggggggggggtttatctttcttngatccgccggggccgaggccgggggggggggggggggccttactgggggggggccggctcctagggtcgggcgttttcgcagctttcgctgatgctcttggttcgttggctccagcagggggccgggggcctctgttgngcacgcgggtgagcggacggtccggcccttgggccctggcggtccgcgt

SEQ ID NO: 148026 - DNA, 605 bp, Zea mays
  Clone ID: MRT4577_66529C.1
ggtacacgcggccccccctcgagtttttttttttttttttttttttttttttttttttttttttttttttttttttttttttttttttttttttttttttttttaaaaagcaaatcggggaaaaaattttctggtaaaaccccaaaggggaaatttttccccgccccccggggtttctaaaacatttaaaaaattttaagggttttcccaccataaggggcggggcccctttggggggaaaaaaaaaaaaaacctttcgcccccccataaaatttttaacccttttttcccaactaaccagggggaccccttttggggggggggccacacaaggggttaattttgaagggaaaaatttttgaaaccgccaccccatggttttttccggcccaaaaccggacaaaatttgccaccaccggtaaagggatgggccccccctttcaaggggaaaatttatgcgcgggggggggaatcaaaatttagaattgggaggggcccccccctttttcctgaaatattaacccttccaaaaagaagcccctttctttttttttccggggaaaaaaacaccgggagggtttttccccattttttttaaggctccc

SEQ ID NO: 148027 - DNA, 1356 bp, Zea mays
  Clone ID: MRT4577_6652C.1
cctgcctatccgcggccgaaagagcattgtccgcgcgcggaggggcggccggcggccggcggcggcgaagggagagatttctactcaaggctatcaaattctttatcttcagtttcagactgttatttgtgacgtcaagatggttaatttcggaaagaaattgatggccgatcaagtggaagaatggaaaggatactacatcaattacaagctgatgaagaaaatgttaaagcaatatgtccaacagacccagcatggcgggaaagatcgtgaacaagttcttaaagagttttcaaggattcttgatgaccagattgaaagaatcgtgctttttctgctacaacaacaaggccatcttgccagtaggattgaggaattgggagaaaaacgctctgctctggaagagtatgacatatcacaagtttatcagctacatgatgcatacagagaagtcgggcttgatcttataaagcttctccgctttgttgacgtgaatgctaccggtatacgcaagatactaaagaaatttgataaacgctttggctacaagttcactgattattatgtcaccactcgtgcaaatcatccttattctcagcttcagcaagtctttaagcaagtgggaattgtagctgttgtaggtgcattatcgcgcaaccttgaatatctgcaacatcatgaaggaagctttgtatccatctatgatcgtccagcagttactttgaaggaccctattatagaccaagtaaaccatgcagtacagaagctcacgcatgccacgaattttatgcaattcttgggacaacactcgcttattgtccaggaagatgcacaaagcgggtcagaggatcttgttgatgatcagagctaccatttcatgtcgctgatgcttaatctagtgaacacattcctttacatggtgaatacatatatcattgtgccgactgcagatgactatgcagtaagccttggggctgctgcaactgtctgtggtataattattggatcgatggcagtcgctcaagttttctcctcagtctacttcagcgcctggtcaaataagtcctacttcaaacctcttgtattcagtagcattgtgctgtctcttggaaacctgctgtatgcattggcatttgatctaaattcactgtcagttctcctaattggacgactgttatgcgggttaggatctgcaagagcagtgaaccgtcgctatatcagtgactgtgtgcctctcaagatgaggctacaagcctctgccgggttcgttagtgctagcgctcttggcatggcatgtgggcctgctctggctggttttctccagactaaattcaagatatactcgatcacttttta

SEQ ID NO: 148028 - DNA, 385 bp, Zea mays
  unsure (1)..(385): unsure at all n locations
  Clone ID: MRT4577_66530C.1
gtacaagcttttttttttttttttttttttttttttttttttttttttttttttttttttttttttttttaattttttttttttcttttttttatntnntttttttttttattttttttnttacctntaaaaaatttagccgagggggggggaaagttattttggtaagacgtacgcccagccccgggggcgggacgcgcaacgggctcatccgccgcccggtcccgccggcgccggggcccctcgggctggcccaccgaatgggcatgcgtgggctcggtgcattacggcggaaagtccactgctgcccgcgggggcaaaggtagctgtcggcgggggtcggcagctggttgccggctgcaaccaactgggggcctggcccact

SEQ ID NO: 148029 - DNA, 481 bp, Zea mays
  Clone ID: MRT4577_66531C.1
agcgcgtggaggtacggtgtcggattcggctcgaggcgcagcgcgacatcgacaaagttgatctagatctagaggttgtcagtgatgaagtcggtggggaaggcggagttggcatggatgcttccaacatcggaggccatgaggaccacatagcgcgggcgctcggcgtcggcggtgaagaaggcctcaaagttagcctggcgggtgaggtcaagcttggcgtgggtgtgggccacgacgcaggtgaagacaagcatgaggaggcgacacacgatggtttaaccgacaagatcgttgcgcccgacgacgaagacctttgcgtccttgtcgacgaggaaggacgggtgtgcatggcgaggggctgtggagcaagaagagggcgagcgacggtgatgcatggcgagggtgagggtgttggtgtggctatgaccagcggctgctatggtcacagtggtcgctggacgctaggagtttgcatggt

SEQ ID NO: 148030 - DNA, 370 bp, Zea mays
  Clone ID: MRT4577_66532C.1
cctttccacatttttttttttattccactacccctccgcccaagaccagattttatatttatgaatttcgaatctcaaataatttccctttttacatttgcacagaggggcttgtttaccatcttcccttctccttatatggaacctttgctgcctattcaaccaatgtccggcggtaaggagggcaattccggcccccaacccaaccactgtcacctccagtgtcactgcccgggcacctttctctcaaagatctcccccagggctcaatctaggaactccctgaactccggatagccctcaaataggccacccttgaacgccaccaccggtctgccttatcttgccctaatgctttccccgcttagag

SEQ ID NO: 148031 - DNA, 498 bp, Zea mays
  Clone ID: MRT4577_66533C.1
aagcctcttgatgagcgggcgcttccacgttcacttcaggaatcttcggtctttgatatcagaaagggatttgaggacattttggatgcagcatatactgatgcccttaatcgttaagagatgttccaccgcagcatgctttctggcgttaaagccaagcttctgtagagaagagtacgacaaatggtccaccaatgcattctttcactcagcagggaggacaaacccttgatataagttgtttgcattatgacacttcgagcggccgcccgggcaggtacagtatcacctttggtctcactaaaattgcaaaaaaaaataaaaggtcaacccagtgtcttatctgtttcttcaaacgtagtgagtagatctatcctggcatcaagatcatgacctgtccgacctttgcccccagacagcgtgcctcacactgacatgtaagcataaatgctgattatgaaattctttatttgataaatgcatcctagataaattgaa

SEQ ID NO: 148032 - DNA, 469 bp, Zea mays
  unsure (1)..(469): unsure at all n locations
  Clone ID: MRT4577_66534C.1
ggcttggaacctttgggctgatttatgtgcttgcgaagagttcgcgcacgcaaacgtaaagtaccataacgttacaccaagatggtgctaactgtgggtcaaagtcgaactagaatgaaagtccactaaggggtgcaagtttcactcttacgagctatgctactagtacgttccgaaaagggttaggggagtcggaggctggccctctaatctaaagctagacgataaggaagagaatcttgatctgagctataaagagaactagaatggagccgtgttttataggagtggttaattgctaattttcttgctctttaatggcgtactgctagtcaactagggtaggtagctgcgaacgacgacctanaatctatagtcgaagagaccctagttttcgagtcagacacggtagtagccccgcatagaaaatgtcagcgggtagtaataatacggcgctgactggctgcgg

SEQ ID NO: 148033 - DNA, 259 bp, Zea mays
  Clone ID: MRT4577_66535C.1
gcacaattattgccgacacgacaagtaatactgcacgcaccaccagcttatataacgagcggagcatgggcataccaagagctcattgctatacctgttatgggcagctcaatgtgcattctgctgtatcgtcttttagaactgcttacacaaacttattaacaaggaccgcgtccaaagcttcatgctttatatttgagtctgcttttagctgaaggaacaccaccactctcaggtacgtgaaactggatatccaact

SEQ ID NO: 148034 - DNA, 198 bp, Zea mays
  Clone ID: MRT4577_66536C.1
gtgttgggcaccatgcaagaacttggatgaataacagtcacgaatcaatatgcataatgacccagatcatcatgttctgcaactgagaattatatttcatcattgcttctagaagtctgcaattcgcaactgcactttggagcagtaatatctaggagcaatcactggataacgtggagtgattagagaagtcacatg

SEQ ID NO: 148035 - DNA, 779 bp, Zea mays
  Clone ID: MRT4577_66537C.1
ctcgaggccggccgggacgacaaaggcagactgccttcactctcactcccgcccgtgtccctcggcctttccgcgctgcggtgcgccctccctcgccggcctccctgcgccgctgttaatggaaacggcgcggcgtttccttcccaccgcccccctcccctcctcctcctcctcctcctcctgcacggcctcttcgctacgattcgccgcttctccgctcttcttctccttcccctgcagataaagcggctggttggcctggaaggtggagacggtctcggatccaggggagacacgcggatttgctgccatggtgaggtggggcgagatggtggaggaggaggaggacgactagtacgctaagctggtcaggaggatgaatccaccgagagtggtcatcgacaacgactcgtgtggcaacgcaactgtcatccgggttgatagggtcaataagcatggcattttactggaagcagttcaggtccttgtcgatctcaacctcgtcatcaccaaggcttacatttcttcagacggcaactggttcatgcatgtgttcaatgtgaccgatcaggacgggagtaagcttcataacagggaggtcattgaccatattcagaaatgcctggaatcagacggctaccttgttcctccggcgaacggttatgcgctgtcggaagaccagttcacctccattgagctgacgggcgcggaccgcccgggcctcctctcggaggtgtgcgccgtgctcgccgccctgagctgcaacatcgtgaaggccg

SEQ ID NO: 148036 - DNA, 534 bp, Zea mays
  Clone ID: MRT4577_66538C.1
ccggccgggacgaagcaaagtatcaccgtcttcggcgctcggcggagagacggcgctgggcaacctcagctccggtcgctgctcccgtaccacgcgctgcccaggtactactccctggcggagttcgaccggctgagcagccacggcccggcggccaccctaaacctcaccaacgacatgggtaccgtccgggtgaagtcggcgtggtccggccccaagatcagcagcagcgtgtactccacccgccccgtcgcggtgtacgaggtcagccaggtgctcctgccagtgcaaatcttcaagagcgactccccggctggcgccggccccttcccctgcccccgccccggacgccaaggcctctgacgacgtcgcccccagcccagcgtcagggaagtccgcgagcgcgaaggccaaggcgcaagagaagagctcgtcgtaccgagtcggcggcgcccgttgcttggcgcttgttgctgtatcgtcggctgggctgacgctcttgtggtgggaagagaaccgacagacaccttgtcg

SEQ ID NO: 148037 - DNA, 1851 bp, Zea mays
  Clone ID: MRT4577_66539C.1
accaaagcaagtgggcggcagactgccttcactctcactcccgcccgtgtccctcgccctgtccgcgctgcggtgcgccctccctgcgccgctgttaatggaaacggcgcggcgtttccttcccaccacctcctcctcctcctcctgcacggcctcttcttcactacgattcgccgcttctccgctcttcttctccttcccctgcagataaagcggctggttgccctggaagccttgcggtggagacggtctcggtctcgaatccaggggagacacgcggatttgctgccatggtgaggtggggcgagatggtggaggaggaggaggacgacgagtacgctaagctggtcaggaggatgaatccaccgagagtggtcatcgacaacgactcgtgtggcaacgcaactgtcatccgggttgatagggtcaataagcatggcattttactggaagcagttcaggtccttgtcgatctcaacctcgatttctttggtttttttgtttgtttgttttggttcacgtcgtgttcagtgttcaatgtgaccgatcaggacgggagtaagcttcataacagggaggtcattgaccatattcagaaatgcctggaatcagacggctaccttgttcctccggcgaacggttatgcgctgccggaagaccagttcacctcggttgagctgacgggcgcggaccgcccgggcctcctctcagaggtgtgcgccgtgctcgccaccctgagctgcaacatcgtgaaggccgaggtgtggacgcacgacgggcgcaccgccgccgtgatccaggtcaccgacgaggccaccgggcgcgccgtccacgacgcgggccggctgtccagggtgcaggagcttctccgcgacgtgatgcggggcgacggcacgtgcaaccacggcggcacgggaatctccgcggagaggcgcctgcatacgctgatgctggacagcgtcggcggcggcggtgccgaggaggctggtggcggcggtgacgagaggggtggatgtggcgtggcgaggcccaaggtcgtggtgatggactgcgcggagaggcggtacacggtggtgatcctgcggtgcagggaccggccgaagctgctgttcgacacgctgtgcgcgctcgccgacctgcagtacgtcgtgttccacggcacggtcgacgccgagggagccagcaaggacaaggaggcctaccaagagtactacatccggcacgtcgacggccacccggtgcgctccgacgccgagcgggcccgcctcgtccggtgcctagaggccgccgtcgagaggcgcgcgtccaacgggctggagctagaggtgtggacggaggacagggtggggctgctgtcggagatcacgcgcgtgttccgggagaacagcctctccatcatccgggcggcgatcacgaccagggacggcaaggccgaggacacgttctacgtgtcggacgcgtacggcaaccccgtcgacggcaggaccatggacgcggtgggggagcagctcgggcacgccgtgctgagggtgaagcgcggcggccacgacgcgcccgtcaagcacgaggccgagggcggcgcggtgtccgtccttggcagcctgctcaagagctcgttccagggcctgagactcatcagatcctactcgtaagccgtaatcgaagaacataataactccgattagttataaagccctgggccttgtacatatataaaatctcacgtaggttaggaaatagtgaagcagcacggcattgtaaatatcagaccagtcgcatggtaaatatcataccgttacaagtgcataaatctcattacattacagcaaaaaaaaaaaaaaaaaagcggcc

SEQ ID NO: 148038 - DNA, 321 bp, Zea mays
  Clone ID: MRT4577_6653C.1
gatgtaaaaaataaaaaaacaaaataaaaagaacccaaaaaaaacccaaaaaaggggaaaaggaaaacgaggacctagaaaaccccccccccccaaaaaaaaaaacaaaaaggccagaaaaaaacgccaggggaaaaaaacacgttaacccgagagaaaagaaaattcttgggggacgggcataaaccggaagccagcggacaaggaaaaaaccagacatctcgaaaaggggggacataaaaaaaacacatacgaagaggagggggggtatccaggcccccaaaaggggaggggtattaacgacaaaccgggtttccttaa

SEQ ID NO: 148039 - DNA, 407 bp, Zea mays
  Clone ID: MRT4577_66540C.1
ggcggccgccctcctttttttttttttttatttttaaaggattagccatgcataggtaccaaacaaaaggacaggaacttcacagactaaactagcatacagtgcctgaccgaaaggaacatcccatacaccatataacccccatttgatagatcaacacattgacagactagcggattctatctaagatacatatatcactgatccttaaacaacggcataacatggtatattgagcagcaacaaggtgctcgtatctacaggcggacacgaaaagcagatgccagggttgccaatgcatgacgagctagtcggctcgcttgttgtcaaagtagccccggacggccaccttcttgagcaacggctccgcctgcacgtgcaccaaggtgattgcctgcaccggtact

SEQ ID NO: 148040 - DNA, 320 bp, Zea mays
  Clone ID: MRT4577_66541C.1
gaaaaaaatgaaatctttttattttagaaatgcatttatttaggggaggcacacgtgggtattacatcaattattcatacccacgcgtttttgttccaagagcttggtgaatacacacaggcaggagatcgggttcagcaacaccacatcggaacacgcatacacgggcatgcgcgatcaaagttcgtacgtgcggaaacaaaaaaaagcaacgccacactttgtccctgtgcaaggggccacgctttttccgacacaaggacggctcaagccacttacttacgcgcgcgggggggggggggctaacagaagtttaaatt

SEQ ID NO: 148041 - DNA, 432 bp, Zea mays
  Clone ID: MRT4577_66542C.1
ccaccaccgcccatggaagaagaactggtgtagccgcaactcgccgccatgggactcgtcgggtccagggccgccaagacaccacgctcggacttcgtatctgaactgcactcggttaaggttctacgatcccacctggctggcgtacttctccctcgaccgatcccctcaagcagcatgctgtcgttctccccaacaccatcgcgctcaccttgtcatggtctcacgctccctggttgacgcctcctgccgcatctccctggagtgtgcgcaccgcctatgctggtcaggttgtgagtccccgcgtcgaagcacacgtcctctccgctccacgtccacagtccagcggtgcttggccacgttctcttcctgctgatgctcgcgcacgacggatgttcgacggtttgcgcagccaagtctatgtgccatcat

SEQ ID NO: 148042 - DNA, 119 bp, Zea mays
  Clone ID: MRT4577_66543C.1
gaacgaggatagcgcttgtggcgctcgctcgaattgttcggcgtcatcggagagatcgagttctgggacacgggcggtcgctatgatcgtggccagctttcgtatgcgtgcactgtaca

SEQ ID NO: 148043 - DNA, 459 bp, Zea mays
  Clone ID: MRT4577_66544C.1
ccacagccgaggctacagaaggaaaaacttccccaaaccctagcttcggatctcgatggagaacccccgcgtcttctacgacatgaccgccggcggtgccccagccggtcggatcgcgatggagctgtaccccaacgaggtgcccaagaccgcggagaacttccgagcgctgtgcacgggagagaaaggcgtgggcaagtccgggagagccgctccactacaaggcgtctaccttccaccgcgtgatcccccagttcatgtgccaagggggcgacttcacccgcgttaacggaaccgagcggcgagtccatctaccggcgagaagttccctcgacgagaagttcgtccgcaggcacaccgggccacgaagtgctctccatggccaacggcggtctcaacaccgacgggtctcaatacttcatcctgcaccgagcagaccccctggctggaaggcaagaa

SEQ ID NO: 148044 - DNA, 474 bp, Zea mays
  Clone ID: MRT4577_66545C.1
ggggcccaacagggggccaaatttaaaatttcaatcaacggaacacaaaggggggtctaacggggggggacaaacatggccaaggtcggtaaaaaacagggggcttttacaattaaggggtaaggggaacatgggggccccctcaagggtttttcaacaacagggttaaacaaaaacagggggggcattggccatttcctgttaaaccggggttttttgaaccgggtagtagggggagggcaattccccgacattatccccaaaaaggtttgtccaacccttagggccaacgggggaaaaactaaaacaacccccacttggtggataacggaatggggccccaaaaaaagcccggggggctaattgggggggttcctcaacgggcagggggaagggggaacccttttccaaaaaccctaagcttaccgggaaccagagccaacaaaaaacctgttccccaagagccgggcaccc

SEQ ID NO: 148045 - DNA, 633 bp, Zea mays
  Clone ID: MRT4577_66546C.1
attggtacctcgagccggcgggagattatattgtttgtgcgaggagggtggaagattaacgcgtctctatccgttatttgcataaaacaagaaccatatacgtcttggttgcctccgcctctcatagtgctcgccgacccgtcccactactattttctctatgctccctcagatatgtgttatatttgaattggaatcagcgggtacgcaagtatcaccaggatcgcggcgagggccaacctccagagggaggatggccagctcgcctcccctgacaagcccttcatatcctcgaggtacatgacctacctgttcaactgcgacaccgtccgcgggctgtggaatcacagagacattgcactcatcgactctgacacgcttctctgcattgacttaactgccttcgtctttgccattaagaaatgtgattaaatccctcgctacgactgttgaaatgctgactgctcgagagaccaccggccttttcgccgaaagggacatagctgctgcatatgtgatggggggtgccaaaaactctgttatctctgaaccaatacaagatgcatgcttgccagttgctgtagacagagaagaccagccctcctcgtgtggcaacatcgtctccaatgctaa

SEQ ID NO: 148046 - DNA, 622 bp, Zea mays
  Clone ID: MRT4577_66547C.1
aataaaccttttgggcccaaattttatttaaaaaaaaaaaagggggcctttgttttaggaaacaggggttaaaataggggggaaattggccccaaaacccctttggaacccccccgggttgcccctaaaaccggggggggggggaacccattaagggccccttttgggggttaaaacccaaggggggccccccccctttcggggggggaaaaacttggcccccctccaaaaacccgggggaaaaaaacgccccctcccaaaaaaacgggaaaacggggccccctttgcccccgtgggaaaccccccaacccctttgggggggaaggcccccccccccagggaaaaaaaaaccggccggggaaaacccgaggcccccccccccaacaaaattttaagggccaaaaaggcccccccttccctggggggggggggggaaaaaaggggcccgaacccccaaaaaaagggccggggttgccccctccccccaggaaaaggggggcaaccccccaacggggttaaattgggccccccccccgggggcccaaaggggggacagggcccctttaggtcaagcccccaaggggaaagggccctcggcccaaatccctgaccccggggggac

SEQ ID NO: 148047 - DNA, 292 bp, Zea mays
  unsure (1)..(292): unsure at all n locations
  Clone ID: MRT4577_66548C.1
ctccagtttcaacattactcgtttgagaatttaatccctaaaactgttgaggggtaaacgtctaatctatactaccattactcacatgcctatcagccaaccaacaaccttgctgaaatcctcagcaatatccttgctctacacaaaatgacaactttgaatcgtgactagctcggccaggaaactctgctgcatctattcatgcagacttacctccactacancgngngtgatcagtccgnnnnncttacatccaacgcacctaaattggaagcacattccaaccaacaat

SEQ ID NO: 148048 - DNA, 662 bp, Zea mays
  Clone ID: MRT4577_66549C.1
gaccctcgcggcctccgggccgggtcagttttgaactcattgaatttgatacttgtacccgtagttttgcaaatgcccccatgttatgctctggtgaaaaaaaaaaaaaaaaaaaaaaaaaaaaaaaaaaaaaaaaaaaaaaaaaaaaaaaaaaaatctccccttttttaattcgcctccactcccccctccaaggggctgccaaggaaagtgggggggggggatgacaacgcgcttaaagaaaaaccgaaagaagcgcggccacgtgtccgccgggcacggccgaatgggcaagcacaggaagcacccgggaggtcggggaaacgccgggggcatgcaccaccaccgtatccttttggacaagtaccatccgggctacttgggaagggtgggcatgcgttacttccataagctccgaaacaagttctactgccccggggtaaaaatcgagcgcctttggtcgatggggcccgccgacaaggcgggggaggccggcggcaacaaggccccgaaaatggacgtcacgcagttgggttacttaaaggggctcggaaagggggtgctgccgccaaagcccattgtcgtaaaggccaagctaatctccaaggtcgccgaaaagaagatcaaggcagaaggcggcgccgtcgggttcaccgcctagg

SEQ ID NO: 148049 - DNA, 118 bp, Zea mays
  Clone ID: MRT4577_6654C.1
gctatagcatagcttagtctctataccgtcttaggattgcacacgagctgctgcgcgcctttatatcacattatcgtacttagactaaatatgacggccgaaagataactcaactgga

SEQ ID NO: 148050 - DNA, 1866 bp, Zea mays
  Clone ID: MRT4577_66550C.1
gcgttcgttcatggcgccgtcgtgcctcgtcgacggcgggggacgccgcaagcaggtgagagtgagacgggcggtgactagcgggcgcttaggccgacatcggccccgcagcggcggggtagggtgcgtcgacacgcgggactgcgacttgggggggattgattcccttcgctgttctctcttgtggggggcgggcgcgcgggatcgaaggtagggtttgggccccaaagttcgtgtctttggggacagcggcggcgatggactacaccaacgccatccacatcatcccggacgccgcgggccccgacgcctgggccaacgcggcgtcggccgcgggcgccgacgccagcatctgggccaccgaggacgactaccgccagtggagcgccgaaccaggctacggcgaccggaacccctcgtcgcgggcggggagcgagcagccgccgccgggcaagaaggctcgcggcgggggcggcggcagcgatagcggcggcggtggcagcacgagcaagtcgcgcgccattggcaagatgttcttcaagaccaagctctgctgcaagttccgggccgggacctgtccctacgtcaccaactgcaacttcgcgcatggcatggaggagctccggaagccaccgcccaactggcaggagatcgtggccgcccacgaggaggccacggagcagcgggaggagcaccagatccccatcatgacatctggaagtgttgtagctggagacggcggcggtggcagtggtggcggctcgcaggggggcagggcattcaagggccgtcactgcaagaagttctacactgaagagggctgcccctatggtgacacatgcaccttcctgcatgatgagcagtctaaggcacgggagagcgtggccatcagtctctcgcccaccgttggtggtgggggatacaatgctgcctccgccaacggagtgatggtgcagaagccgtccaactggaagacaaggatctgtaacaagtgggagatgactggatactgcccatttgggagcaaatgccactttgctcatggttctaccgaacttcacaagtacggagggggcctcgtggacatcgacggcagggacatcttgtccactcctgattcgaagcaagccggtggctctgctaaagctcctctagagtctgctgctgcgtccactgcgttgccccctcatgcagacgtgtaccatctcggcatccagtcgcagcgctcggccatcgccagccagaggtctggacagctgcaaaggcccatccagaaatggaagggccctgacaagatcagcaggatctatggagactggatagatgagaacgaatagaagaaggatcttctacggtgggccgaagggaagctgttacttggtatccgtccgactccacatcagctggtggaagctttacctggcttagaagatctcgttagcgctgcaaaaccagagtcaagatcatctttgcaagacctgtattggggagataaactgctggaacatagtgccgctttcttccgttgaactcagtagcattgctatgcttgtgtaatttgtgtgttggatggaggagcataatagcatatagcgagtcatggtgcaccctgtacagggtggctgagctgcatcctgaaggctggttgttcaggtgcgtccgtgactgtctgttggttcttgttttcgggctattattattgggccggatatttctagccttactctttggcccattgagcaaaaaaaaaaaaaaaaaaaaaaagaaaaaaaaaaaaaaaaatcaaaaaaaaacaatatcaacaaacaaacaagaaggaacaataaagcaaaatcaactaacaaagaatggctaggtccatccggg

SEQ ID NO: 148051 - DNA, 340 bp, Zea mays
  unsure (1)..(340): unsure at all n locations
  Clone ID: MRT4577_66551C.1
gctatccttccttctaatatataatgatgcgcagctcttctgcgtgttcgagaaaaaaaagataaatcgtttcttaataaaagcagtttgattggngagaaaccatattttgcagcctgtctgctaacctgttagccaacaatttagtcaccaacttcgctaaactatgaaccagactgggggggcggaaatctctcacactagtggctccctcaaccttgggcagaagtgtaataaaagctgaattcagcggacccaggtttctgatctttctggcgctcggcgttacacagccgccgggcccctcccgttggttcccggtttgttcccctcgcggggg

SEQ ID NO: 148052 - DNA, 553 bp, Zea mays
  Clone ID: MRT4577_66552C.1
ggtaccgcccccctcgtcgattttttttttttttttttttttttttttttttttttttttttttttttttttttttttttttgctgttaaattgttggaacccgtctaccacgggtgggaaaccaacccctaaaactgatagactgacccccatgaataaactgaagggatttttaggataacttattttccgagacatatttttttgcgcccaacatttaacaccaccaaatgggagggctcggcaaattccggtcaggtttcaaccaatgattgaaacccttagccccccccaaataaaaaaggggccccaaataaacattctttttggcttaaggaaaaaggtgccctgattttttttcccaccctaaagcctttaaaaacattggttccattgaattctgggggggaagcttttttaaaaacaccccaccaatatattgaaaatccctccacgcctggaattaccctttggaacctaaaaaaatgtggactcccttataaactaacaggatcgggaaccctgatgacaaaatggtaaaaaattttttaa

SEQ ID NO: 148053 - DNA, 711 bp, Zea mays
  Clone ID: MRT4577_66553C.1
cggccgggtcctcatctgcctcgtccatggtctggccgggggtagccatttcacacacgccaagacgctggtcatgcctccctggtggccgctccctcgtcgtttcccatagctgctcgcgtcgctcggtccgagcaccggcatcctacccgtccacggttcgctgaccgagcccctcacttgtgctcgaatccggccactgacgcccagctagcccctgctcctctgcacgcccaggccgcgacctggccatcgtgccattgtttttcccaagctccggcgttcgtcgcgctcccagtgtcacaaccttgtcgaacaacgccccttccttttccccatcctcgccatgttcccagcgctcacctggtcggccatggcgtttttttttttcggtagttttttttttgttgccgggtcttgggcaccaaaccccgtctccctctctattccatgctcggccaggatgcgccctttcctcgccggcagctgtttctccaaacccctggctcccaacatcgtcggctgctacgccctggtaatggagcttactagtgcccagccaccaggcctaaatcgccatgtcgcgtcctggcgctcctctcccatggtagcgcccccacatgctcgccgtggctgggggtagttctgttcatcgcgcccgacataagtcttgttgctcatcgtcgagacatcgcctcgtcgtggttcagc

SEQ ID NO: 148054 - DNA, 1202 bp, Zea mays
  Clone ID: MRT4577_66554C.1
agcaagcagcaggtgttcatccagtccgatgactcgtctgtgctcgcggcgttcaagaagttcgccaggttcaggagggtgctcaacatcgaggccaagatcagcggcgcctccaaaccgtcggtggatgacatcaagaagtacgcggacacggtgagggtcaaccggaactccgtggcgcagatcaatggctacttcctgacgcacttcaccgacacggtcagcaacctacaggacgccaacatcaccgtgcacgagggcgtgctcaagaacgagttcatgaacctcggcttcgacttcttcgctgacccgacgatcgagatcgttacctactcgtgggcggtgctggccgacgggctcgtcacggactaccctgccaccgcggcttcgtacttcagaagtccatgcagtgacatgaacctgaacctgagctactcgatcctgcctgcacaacctggcgctctggtgaacctggcagcccccgggacgctggctccggcgggagcaccggcaccattgctccaaccctccgacgttgtggacccgccgctgcctccagttaaagctgtgatcaccgccgacgcgccagcgccagaggcggctgacaatacctcctcggcgtccagctccaacgcggggaatggcctcttgtgggctgccatcgttgccctcttgtccctgagctttctgcgctgatcccttcctcgatgatggcttccattgtactcccgcatgtccccctcccccctacagcacattcgaggatgtaggctcgtgccgaattcggcacgagcgccggcgtcgtcggcgccaggggcggctgacaacacctcctcggcgttcagctccagcgcggggaacggcctcttgtgggctggcatcgctgccctcttgtccctgacctttctgcactgatctttccttggcgtggcttccattcacgttttccttcttcctctccgtgtttccctcttactcctcaaatgtagctctaactgtaacataatgttccttaaatagatataaattgtcatcaacctgcacataaatacagatcagaaaagaagtaccggtgcaccagttcaaaaggaggtaaatctatttctataaatactgacaatatacaaaacagacatgtggggcgggcctttcaagaggtcccaactttctctcccccggggggcagctctcaattttttttt

SEQ ID NO: 148055 - DNA, 105 bp, Zea mays
  Clone ID: MRT4577_66555C.1
gcccaacatcgtctttgtactttaccggctcctcatcttggagatgcaagcaactgggatgagacaacaaggtggatcaaaaggcggattaccaagtgaattttc

SEQ ID NO: 148056 - DNA, 369 bp, Zea mays
  Clone ID: MRT4577_66556C.1
tccgggcacgcgtacgcccgactttctgtttgtcctggacgcattcacgttccgcgccggggccattcatggcctgaagggggccccgtcgtcggccgctgaggacacgctcacaatgcctaccagcgcgcgcgctgggcccacgcaccagcatcaggcgcgcctagggggcaggttcacgtagctcgctcatgtgcaccagcgcctgcatgaacgtcgtcttagtcggcgccgcgattgagccatgtaccaagaccggaggcctaagcgacgttctcagtggcctgactgcggtcattggcctcaactggctccgtgtcatggcagcctctaccacctacgaccagtacaaggactcctgggacacca

SEQ ID NO: 148057 - DNA, 321 bp, Zea mays
  Clone ID: MRT4577_66557C.1
ctccatagagcgcccgccctacattttttttttaaactagaaatggcaaaaaaggggaatcacgaagaatgggaaaaaaatgggcgtccaccaagaaccataacgtgactagaaccaggcagacaccaaaatcatcacattcctagtaaagcgggaacaagctagactagaaaacaaaaccgaaagccaaaagcacgtccttgtcgtaggacgacggctccggatccggctccttctactccaccttcggctgctaaaaggacaagaaaatcctcctccacggtcgagtcggggccaaaaaacagggggcttatgcaccga

SEQ ID NO: 148058 - DNA, 251 bp, Zea mays
  Clone ID: MRT4577_66558C.1
gtcgtccgtcagcacgccgcccgttgggaagagagcttcgaggcggcccgccgcggcgcgtcggccggtcggtctgagccaagtggcacgggccccttggggcgcgaacgccctaacgtggatcgctgcggtcggcgagcagatgcgcctgatgctagcttggattctgactcagaggcgttcagccataattcggcaacacggcacgcttcccgccactggcttgtgagacctatcgcgaagaccaaatt

SEQ ID NO: 148059 - DNA, 241 bp, Zea mays
  Clone ID: MRT4577_66559C.1
ccccggccgcccttccctaccaggggggacatctaaaagcaatcgcgcatgcatcagcccattatattccacatatatttgcacaaacgcgactgcttgtacaatcgtccaaacgatccctttctactggccaaagaaaagagcacgacacgtgggtctaacgcggcaagcacggtcaaacctgacaaggcgccgagcgagccgaccaagcccgcgacaacaggggcagccgtggaaggct

SEQ ID NO: 148060 - DNA, 958 bp, Zea mays
  unsure (1)..(958): unsure at all n locations
  Clone ID: MRT4577_6655C.1
aaaaaaaaatgccacgtcgattgggcggtangcctgcctaanccatggcggcgggcgtggctgttcatcatccttggcttcctcctggtgctgccgtcagcaacggcaatagggcaggtctgcggcaacgccggcaactacacggccaacagcacctaccagtccaacctggcctctctcgccgccgcgctcccagccaacacctctacctctccccaactgttcgccaccgccaccgccggccaatcccccgacgcggtctacgcgctcgcgctctgccgcggcgacaccaccagcagcagcaacctcaccggctgcgccgcctgcgtcaagaactcgttcgcctacgcgcagaggacgtgcccccacgccaaggccgccagcgtgtacgacgacgactgcctcctcggcttctccagcagcgacatcctcgaccccgccaacaacatgagcacgctgttccagtactggaacccggcgagcatccccagcggcgacgcctccgtggtgagcgccgacgtgaaggacctgctgacgcagaccgctagggcggcggccagcagctcgcggaggttcgccaccgccttcatggacgcatccggcagctccatcccgacgctctactcgctggcccagtgcacgcccgacctgtccgccggcgactgcctggcctgcctccagcggctcgtcggcctgctcaacgccaccacgtccgtgcgcctgggcgggcgggtcctcgtgctgcgctgcaacttcaggttcgagaacatgatggttctacgacggcgcgcccacgacgcgcgtcaccacgccctcgtcgtcagggcccccggcgccaccgtttccggcgccgacgacgacggataagagagctgctgngacgaagccctgggtagntgccgtgtctgtactctgtagcacctcctctagcggtagtagcagcactctgctttcgtct

SEQ ID NO: 148061 - DNA, 341 bp, Zea mays
  Clone ID: MRT4577_66560C.1
tcggttagacgctgcagcaacccccgaggggggggggggtatagggtctggtggcgaggctcttgcaccggttaacacatacaacctcacgttgagagccagcgggagactctccgacagaggggttgcacctgagggagctcccgacgacatgagtttgattcatgacgctcacgtaactgattcacaagacatgaaataccttggttgatggtataaatctagctggatgcaccatgactccaaaggcggaacccgctctgagttaaaaagcgaatagcacagccactcctactcaagaagcagaagccggagttatagcaagagtaggagcccaagat

SEQ ID NO: 148062 - DNA, 128 bp, Zea mays
  Clone ID: MRT4577_66561C.1
agcgaagcgcacagagggggggaacgaaggatacaccacccagatagagttaccctctgcgaagatgaaggacaagaggctgatacgatcgaacaccatagcaccacgagccgcagacaatgtccaca

SEQ ID NO: 148063 - DNA, 316 bp, Zea mays
  unsure (1)..(316): unsure at all n locations
  Clone ID: MRT4577_66562C.1
ccctcgagccggccgggccgggactagcacaaaccattagctagcttcttctacctctaactaagatcgtctgctgtaagaaggtaacaataaacaagaggcatggagaagaanngangaggacgtgcggctggtgcgcgcaccacctctcggagcgacatgccatcgcgcgcgacggnccaggtcacggacgacaaagactagcaacgagcccgcgccggagccctcttcaagcccggtgagctcaagtcgtgaggctctaccgccgcggatcggcgagttcgtagccagctacctctacctctagatctgcatc

SEQ ID NO: 148064 - DNA, 2686 bp, Zea mays
  Clone ID: MRT4577_66563C.1
gattgggttgggttcacatcctagccgggggccatgtttgctccaccgttgccgcttggcccggcccggcggatgcagattgtgtggtgcgaggcccacacgtcagtcgcgtagccgctcagggtccacccggtggccggtgcggtgccgactgctcctcgcctgtcgcctcgcacaccggatctcgtcgccgccctcgcttctgtagtttgttcctcgcgagatctcgtgcgccgtccgtcctaccacgctgccctctgccgccaccgccaccgccaccatcaccacctgcgccggcgctcctctaggacgcagttcgcctccgaccccgattctatattttacatgcttctctagtagtccattggagtaattaacatcgattacacagtcatggaagagcaccaagtcaagccatcggatctgccacccactagtttgcacaaccaggattcagccgcaactcctgttaccagtgctgaccctgctcgtcctgctgcttcaaatgattctcccagtcaggttgccagtgcagctcctgctgctgtttctgcacctaccgctgctcctgcagaagatgctgcagggcgtgaggcgtcagcatctgtgttctctgcgtctggtttatcctcctgggctaagaacctaaaaattcctcagccttcaccaggtcaagaatcacctacaggaaagaatacctttgcccgtttaacaagtggccttggactgcgtttgtctccaaaagcggcacagcaagatgagggtgctgaaggaagcacctccccaacaacaggacagcctggtgtttttggttctttaacgaaaggcattgtggattcctctaagaatgctgtaaaggcagtgcaagtcaaggctcgccacatggtctcgcagaataaaagacgataccaggaaggaggatttgatttagacatgacatatattactgagaacataattgctatgggttttcctgctggtgatttgagttcagggctttttggatattttgagggtttctaccgcaaccacatggaggaagtcatcaggttctttgaaatgcaccataaggggaagtataaggtgtacaatctttgttctgaaaggctatatgatgcatctctttttgaaggaaaggtggcctgctttccttttgatgatcataactgccccccgatacaacttgtcatatcattctgccatagtgcctactcatggttgaaggaggatatagaaaatgtggtggttgtccattgcaaagctggtaaggcaaggacaggattgatgatctcgagtcttctactatttctaaagttctttcctactgctgaggagtccattgaatactataaccagaaaagatgtgtagatggaaaagggctgattctaccaagtcagattagatatgtgaagtattttgagcgcatcttaacttacttcaatggtgaaaatcagccacccaggaggtgtatgcttagggggtttcgtcttcatagatgcccctattggattaggccatcaattacagtctctaaccacaatggtgttcttttttctacaaagaagcatccaagaacaaaagaactaatgccagaagatttctggtttagtgcaccaaagaaggggattatggtttttgcattgccgggagaacctggcttagccgaggtagctggtgatttcaagatccagtttcatgatcgacagggagatttttactgctggctaaacacaacaatgatggagaacagggtaaccttgaacccaactgatcttgatgattttgacaagagaaaactgccctcacctggattccagattgaggttgtcctggtagattacgatggctcgcaaccagcaaaaccaaaaccaggcgctggacctgctgctgataaatctcatgctgattcctcggctagcacggttgcaaaagaaaatagtgctgcacctgaagaatccaacaagggaactggaagcaataatgatagagatgaagtcttctctgacagcgacggggaggatggatcttctaacggaaggaaggagaagactgccggcggtggtcaaagcagtgtaaatgctgctaaaccatcccagacaggcaacatggaggaggcggcggcatctgctgctgctagcagactggacaaagtggctataagcagcgaacagggaaccacaaaggcacctgatggtacatctctcaaaactgaagtcagcagcaaggccagctccaccacagcaccacctcctccagctgctgactcttccagcatgagcgaattcaaggcgattgccgcagatgcctcggtgttctcgttcggagatgaagatgattatgaaagtgagtaatgattctatgggtgggtacggtgttgagtttccgctgtacagtttggtgcttctaggacccctcatcatagaatgccaaagtccagagatgttaattcattcttgcatttcgtctccactgtagcagtgtcatcggtctgatgttgtacccagatgatgaaacttgttgtaactcaaccaggtcttgaacctctcctgtttgtttacagaaatgccttgtacacgaactcacttaaacagcgcaactactttttattattgatagttaaaagaaaaaataaaaaaaaaaaaaaaaaaaaaaaaaaaaaagaaaaaaaaaaaaaaaaaagcggcc

SEQ ID NO: 148065 - DNA, 389 bp, Zea mays
  unsure (1)..(389): unsure at all n locations
  Clone ID: MRT4577_66564C.1
ggaagaaaggatagcccctgggactctatatgggtcaagccatacgtatgtgctgggaacacaagataaancancagcgccgaaaagggtggatcggcttaagaacaaaagncagacaaggtggacgtcaccaccaacccgaggaacgggagccaggagagbtctgagcggaccgaagtgagggagggaggcgcggagggggaggggtaggctnsgggaaccgagaaaggggggacggcgggggacagggtggcgaggggaagcgcgacgaggggaggggarcgagggaggaggcaangcgagagaggaagcagggagggcggcgggcgagggggncagnrgcaccgtgtrcgtkccaaatagacggcgtaggtttattgcgcgacgac

SEQ ID NO: 148066 - DNA, 271 bp, Zea mays
  Clone ID: MRT4577_66565C.1
gtgcggtgcagttttcaactgacctctggacgcagaacttcagccatgaaggtaacaggcatctttcgtctcagtgccttggccctgttgagtctatctggtaacactggagctgactccctgggaagagaggccaaatgttacaatgaacttaatggatgcaccaagatatatgaccctgtctgtgggactgatggaaatacttatcccaatgaatgcgtgttatgttttgaaaatcggaaacgccagacttctatcctcattcaaaaat

SEQ ID NO: 148067 - DNA, 296 bp, Zea mays
  Clone ID: MRT4577_66566C.1
atctatgagggctatgccttgccccatgccatcatgcgtctggatctggctggccgagatctcactgactacctcatgaagatcctgacttttcttcggctattccttcgttactactgctgagcgtgagattgtccgggacatcaaggagaaactgtgttatgtagctctggactttgaaaatgagatggccactgccgcatcctcatcctcccttgagaagagttacgagttgcctgatgggcaagtgatcaccatcggaaatgaacgtttccgctgcccagagaccctgttcc

SEQ ID NO: 148068 - DNA, 386 bp, Zea mays
  Clone ID: MRT4577_66567C.1
aaaaccgggggaggttaatcaagggggggggtggaaaactttactaaaagtttgtttggataaaaggggtttggaggggattaaaagagaaataacctgattgtgatcaaaatctttttgggtttttacgagcctttttaaaccaaacaggccctaaaaatcaaaccttccagaaaacagaacctagccggccaactttttgtccggcttttttgcaaactcacatgacccattccttggaaacagaaccgaggggctggcgcatacaaatgcaagtttgagaaactttttttggcccaaacacggttaccaaaagtttttaacaagcttgtttgttgaggttttcagttttgagagaagggaacctttttatgaaccccgttcca

SEQ ID NO: 148069 - DNA, 751 bp, Zea mays
  Clone ID: MRT4577_66568C.1
cattgggaccctcgaggccggccgggaacgtttcttcctttaaccgtctcacaactcgagctttcatatcaactgcacgcgcaatgggtgtccagaagaccattatccaagagggcaacggcccatcccctaagaagggcgacaccgttaccatggagtacacgggctggctgaaggacgcccaatccgacaagggcaaacagtttgacagcacaactggccgcggtccattccagacccagatcggtgtcggccgtgtcatcaaaggctgggatgagggtgttgtgcaaatgaagcttggcgagaaggccaggttggacatcaccagcgactttgcttacggaaaccagtcattccctggtctgatccctcctaactctgaccttatcttcgaggtcgagcttaagaagatcaactaagtcgcggataaaggataaggatgatgggaggcgaacgcggcagtcgcatccaggctgcaaggagagggcctatggaggagtggaagctgtgctgtaatcgggaatcgaatcttgagcagcaggttcgtcgccgcggcattatgactccatattcttctcctctctctctacaatcaatcaccctccttttaaacgaacaggtcattgtttcgttccatatttcatcccatgtgtagctgtgtccaatatcttcaaacatgcttctctttgaagatttaatctctccaatggagctttttggtccttgtaaaaaaaaaaaaaaaaaagcggcc

SEQ ID NO: 148070 - DNA, 242 bp, Zea mays
  Clone ID: MRT4577_66569C.1
ctcggagcagtaataccaaccatggtcataggtgttttcttcttcttcttggtacagaatgatgcagttaggagccgtggcaaaacaaagaagggtaggaccaatgaagcagaagccagataccacaccaactcgttagttacaaactcctaactgagacattctgtaccaagaagaagatgataacacctcggagcaggtatacgaaccatggtcataggagacatgagcgccagcgtgct

SEQ ID NO: 148071 - DNA, 325 bp, Zea mays
  Clone ID: MRT4577_6656C.1
gaaccaaaaactgtttgggcttttaaacgaaaaatccaaacaatggcccaattccagggccttgattttacccaaaagtttcagggaaacttgaatttacaccctaaacatttttacaaactttttaaaaaaacttttgggggggggagggggggttcattgccaacatcaaaaaattccaatgctttggttggaaaaaggaccttttcttatcccattgaaaacacttcccccgaaataaatggtttaaaagattccaaacaatccaatatttgccttttttaaaggggacgggggttttattccctcggaaaaactggttttt

SEQ ID NO: 148072 - DNA, 375 bp, Zea mays
  Clone ID: MRT4577_66570C.1
gtatgtcctattcagggggatttttattataattgaggttatatcccacacaaggaggagtacatgacaatccggcaccaaacaagcgaagcgaaaataccaaccagacccacaaaacaacaaaggaactacaacatcaaaaggaaaaacacaaaacatttaaccctagagccagcggaacacccacccccccccccggaacccttaaagcgacaaaacgcacggcacacttggaggagccagaaaaaggaaaggaggcccggcccccccgccgggcagggggaaaaggcggggttcccccagaaacgcgcacggccaacacgaccggagacaacagggcccttaccgcaaccagccacaggaaccgaaaattgg

SEQ ID NO: 148073 - DNA, 444 bp, Zea mays
  Clone ID: MRT4577_66571C.1
caagtggaaaaccctcaagaaccggaggctacaaaactggggtactctttgtcttcttcgcacttggtggttttggcttggagattgctttagcttcctcctttccttgacacggtgtcggattgagcaggaggagtggtgcatgagaaggggctcctgccgcaggccttgccttcatggctaacaaggataaccgacagaatctgccagtggactggtttatttccttctgcaatcaatcacgtgctgataaatgagtatcatccctacccaaagggatcatgccacaccaagatggtcctgcctactaccctgtcgttgctatcatatctcttgcttcacctgtcgtgattaatttcacaccccatcaaaagcttaaagagcagcaggacactgatccacaggacttactggcccatgagttgccttcgccagctgagacag

SEQ ID NO: 148074 - DNA, 580 bp, Zea mays
  Clone ID: MRT4577_66572C.1
gcttgatatgcagaagctgctctgcgcctacaaggacctatgaaaccttggctagacttggggtatactctgctctacacttaactagctgtgaggaaacgtacatcgaccagctggaactatgaagtgtgcatgcatcggaatgcctcattgactacttacacatggtatgacatgcaccaacacactcattttttgggacattggcacaacaaacttcactgggcttcgttcatcatcaaaataaactaaatgacacctgacctgtgacatgccattatgacacatattacccctgacgtgtacagggtgtgctcaaacctgttccaagaggcgaataagatgaaatgctttctgcgggacgttgctcataacaccatgcacaatgtctcaaggacgctagcacgaaaccttagttatgttgcacattaccaaaatataacgtcgcaatatttcacactgttcattatgggtagatcagttcttttccctatattaatcttgtcattgcaaaactgcatttccttgctggtcatttttagtataagacctttgctgctattctttttgatcattgtgc

SEQ ID NO: 148075 - DNA, 823 bp, Zea mays
  Clone ID: MRT4577_66573C.1
ggggtaccctccgcgggaaaaaagcaacagcaatggagcacacgacgaccgaacacacggcagccgccggggagcaggagagcccccccacggcgttggccttgagaagcctcgccgactacaccgtcggggccatccccaccctattctatgtccccgacttcatctcccactccgagcaatcacagctcctccaccatatttaccaggcaccggcgcccaagtggaaaaccctcaagaaccggaggctacaaaactggggaggagtggtgcatgagaaggggctcctgccgcaggccttgccttcatggctaacaaggataaccgacagaatctgccagtggactggtttatttccttctgcaatcaatcacgtgctgataaatgagtatcatcctaaccaagggatcatgccacaccaagatggtcctgcctactaccctgtcgttgctatcatatctcttgcttcacctgtcgtgattaatttcacaccccatcaaaagcttaaagagcagcaggacactgatccacaggacttactggcccatgagttgccttcgccagctgagacagagaacaacggctctggatcacaagaacgtggagccacaaatgaatctgatccttcatcttcatcacttatgctgatgccgtgcagcctgttgatatttaaggatcaggcttatacagactacttgcatggcatacaagatagtgagctacataatctggacaaggtggagaatgtgtctcagtgccaagaactgaagcatctacattcggactctatcctagggggcatgagcatggaagagcatgacac

SEQ ID NO: 148076 - DNA, 1080 bp, Zea mays
  Clone ID: MRT4577_66574C.1
cacgacgacccaacacacggcagccgccggggagcaggagagcccccccacggcgttggccttgagaagcctcgccgactacaccgtcggggccatccccaccctattctatgtccccgacttcatctcccactccgagcaatcacagctcctccaccatatttaccaggcaccggcgcccaagtggaaaaccctcaagaaccggaggctacaaaactggggtactctttgtcttcttcgcacttggtggttttggcttggagattgctttagcttcctcctttccttgacacggtgtcggattgagcaggaggagtggtgcatgagaaggggctcctgccgcaggcctccacaccaagatggtcctgcctactaccctgtcgttgctatcatatctcttgcttcacctgtcgtgattaatttcacaccccatcaaaagcttaaagagcagcaggacactgatccacaggacttactggcccatgagttgccttcgccagctgagacagagaacaacggctctggatcacaagaacgtggagccacaaatgaatctgatccttcatcttcatcacttatgctgatgccgtgcagcctgttgatatttaaggatcaggcttatacagactacttgcatggcatacaagatagtgagctacataatctggacaaggtggagaatgtgtctcagtgccaagaactgaagcatctacattcggactctatcctagggggcatgagcatggaagagcatgacacgttccgcaggtccgccacaagagtctcgcttacgtgtcggttggtgctgaaagtccacaaaaagctattcaaaatctagaaattctgattatagcttgtgatttagaatagggctgccattattctttgtaagatatatataggtgttgtgggagttgtttggccagcatggtgtccacaaaacaaaaaaacattttctggtcaaggatcccaaagagctgttgagcccagtttcttagaaatcgaccaggaagcatgggaaaggaacaataaaccattggttatgatgttcgagtaggagatgatgctgttttccgtgcc

SEQ ID NO: 148077 - DNA, 137 bp, Zea mays
  Clone ID: MRT4577_66575C.1
ttcaccaacatatcacaaacttatttttctactaccaacacaccctagcattcgacgcgaacttactatatttaacactccatcctacctacaacacatacaacagctactttaatccactaccaatggttaaccca

SEQ ID NO: 148078 - DNA, 274 bp, Zea mays
  Clone ID: MRT4577_66576C.1
acgtattaagacattatgtctgttcaaagcgttatatggtaatataatctttagagacgcgggtatgcctcgttcttatgatacattaccactatgacgtcaacatatgtatggaaataaattctggcacacatatgctatgcacccgtctctgcccttttagaaacgggtgtgatagcttgaaaatttaattgtccccaaaacatctaacatattaaccctccctttttctctttggggtcactgctggacccttttgaacttttgttgcctc

SEQ ID NO: 148079 - DNA, 246 bp, Zea mays
  Clone ID: MRT4577_66577C.1
ctttcttcctctggtcttcttagggcactttattgaggactgttcacgatgtaaccacacgcaacaataaaatcagcaaatccagtgcatgatacaatttgtaaatccggcatcgagactggacatgactcatgagcacgtttcagatgaacatgaaccccaggagcgaccatggatcaataaaggcagggtgctgttcacaggatcttattaagaccccgctattatatttatacgactcaccga

SEQ ID NO: 148080 - DNA, 383 bp, Zea mays
  unsure (1)..(383): unsure at all n locations
  Clone ID: MRT4577_66578C.1
gattggaaaanccggcccgagcgacgcgtccgatcaaacttcaggggggttgaatgttaatttaacaccctatcgagatatggcggcggggaagataatgatgggaacagacatgaagcttcagtaactgaaacactgtaccatggtttctgaactggcgacatatcttctcttagaacacttagatagattttcctgcataacccttatcaatgaaatatggggctgcttcatttgaggaaccaccttattcttacttgactacgcccatcatgattcatgatttcatcacatgaatattggtgtgatggatccaaccttcatgctcttttaagctttatattacacatgtttaaagctcattacttgatccctaacttata

SEQ ID NO: 148081 - DNA, 273 bp, Zea mays
  Clone ID: MRT4577_66579C.1
gaggcattgatgcctctggctaagatcgaccccgtggcgccctaaggacacaaatttcttctacaagtccagtgtcaagctgaagcatgcaagccactcggacggggatactatagttgatgcagctgggaaagctgggtccgtggtgaatattcggagggctgacttacatgaagctaagcaaaataatgagtaggatcaacgtccgacgcatgagacagtgcatgagcgtatgatcactgctgctggctgcactagctggcttttcaggaa

SEQ ID NO: 148082 - DNA, 799 bp, Zea mays
  Clone ID: MRT4577_6657C.1
ccataactgcagctcttgctcagctggcctgttggaaccaaaggatgttgatctcctgaacataacctccatggcatgccctgccttacctctgtgccctctagcacaaacagaagctgaacgagggatcctgccaattcttaaacgaattagagcagtttttgacaaggttggtatcaaggacgaggagtctgtagtggtgaggataactggctgccctaatggatgcgccagaccatatatggccgaggttggcttcgttggtgacggcccaaacagctaccagatatggcttggaggaacaccaaaccagaccaccttggcagagacgtttatgaataaagtgaagcttcaagatattgagaaagttttggaaccactgttttcctattggaatagcacgcgccaggaaggcgaatcctttggaagcttcacaaaccgaatgggatttgagcaactgaaggaggtggtgaacaagtgggaggggtcagcgtcagccgcatgagagttgtctttgctggacatatcccagcaccatttttgctggggtgagaatctggtggcgaccaattactccacggattacttttatataaaaacttaggagaggaggaggaaacctgtcaattccgttgacaggcggaggacgaagaaagagccgggtctgaagaagttgctcctttgtgtttgttgtgaggttttatttttttgtgtgtacttgtatggataactccgttggccccttttgttagcctgagaataaattcctttgcaaaaaaatactacttgataatatgat

SEQ ID NO: 148083 - DNA, 579 bp, Zea mays
  unsure (1)..(579): unsure at all n locations
  Clone ID: MRT4577_66580C.1
attctgagggttgcaaacgtgccccatggctcagttgngactgttgcaggtcgtcgtgctatagctcagggnaaaccctgatgaagttgctgcagcattgtgtagatattcagcaccagaagaggttgatactttaccatcaacatgtggagcctgtggaacagaatgcgtcacacgtttctttgctacaagtatcctttctcccgactttcaccattttaatgtttaagctattaaaaatagattactcacaatacctatgttgccattagttattttcatgaccaagctcagtaatagagtaagaatagtatcttggctatgcttatttggttttgtgatgacgtttgttctcttagaacaaggactacaagaaggatcttgttatttgtgtcagaacacctctgctgcctttatttctgtaccatggattttgcatgtatttttcatagttgaatcttgaaacttccaccggaaaattttcttctttattgttaaggtacttattgtgaatagccattaaccacctggagaggctgcaatggttgaatatcttggtaatatgcaagaattagctat

SEQ ID NO: 148084 - DNA, 225 bp, Zea mays
  Clone ID: MRT4577_66581C.1
aactacccactcggtcggacctatatactaggcttcagaaataccccatttgagatcttttcatcccttgtttcctaacaggctatagggtcaacacttctaaatgcaatcaccttcagactaatccaatcaatcttagccactgtgcataccttactcatatcgatagtccagctcgcttcccgcttaaagatcaatggaaaacaatagcctcaacagatctgc

SEQ ID NO: 148085 - DNA, 288 bp, Zea mays
  unsure (1)..(288): unsure at all n locations
  Clone ID: MRT4577_66582C.1
ttctttttggttctttgcgttttttttttgtttctgctcccctcgtgctgtcctttgccgggggtggggcttcttgttgtgtgcctcgtctttggcgtgctccttccnttggtctccttccgcgcccttcgtttttctgggtcgctgctgcttgccgctggtgtgcgtcgtgctgcttcgcctcttcttctgtgtcttctcttggcttgccctgttgtttgcgtcccgcgtggtgcgcttcggctctctcgtggtgcgcgtgtttgttcctccggtctctttcctggc

SEQ ID NO: 148086 - DNA, 274 bp, Zea mays
  Clone ID: MRT4577_66583C.1
ttcgcctctgagcgcctgccgcagctgcgccgcctagccatctgctagaatgccgaatctggcgactcggcatgaaatgtgctgtgtgtcatacgacggcttactttgccgaagaggctcagtgcgaaggcatcagcttccataaatgctgcttgctgtgcatggtctgcaagaagaatctggacagtaccactgtggccgtgcatggagaggagatttactgcaagtcctgctacggcaagaagtatgggcccaaaggctatggctacgggca

SEQ ID NO: 148087 - DNA, 2652 bp, Zea mays
  Clone ID: MRT4577_66584C.1
atggccagagttcgctctactgctaggattgatcgtaagggagatgagatcgaagctgctgagactgttccgatttccgaagccatgaagcggtccgggctggtaacatcggaggacgtccctgccgctggagcagaacaagttgatgttgaggagaccgattatgaggatgattatagcagcgcggtgccgagcaaacccagtcatctggattttggaaaatccacagtctccgaagaaactactccgaagccaggaaaagatgaaatagtagtttttaagagtttcttcaatgctggtttgagattccctttgaataagatgattgccgatgtgctgaagaagtttgggatctactttcatcagctaactcctaacgctatcgttaggcttatcgtttacatttgggctctccgaagccaaggggtggaaccgtttgtcgaaggtttctgccgagtgcatgagctgcattaccaaaccaaggccagaagagatgggttacatgacaacttcggctgctacaattttgcctaccggaagactacaaaatttccagtgatcaactaccgaagcaagtggccggcaggctggaaatcggaatggttctacgtcaaagttgacgatgataaggagaagttggcccagagcccgctagagttgatcttcggagagaccagaccccaatgtaatatgacaccagagggttcaactcaaactgcactggctgaattcaggattatcacagagcacattggcactagggacttagtgcaggaatttttggctttcaaaaaggaaaaggagcccataaaaatgaaagaacctaggccgaagaggcaaagaatcgtgattgtgacagaagtcattgaagcaacaccaccaagggcttcagctccgaaggtgccagctattgaaagcacgacagctactgaagctgtaccttcggaggctgccccagaagaggctagagccaaagatgccaaatctgaagatattaatttagagaccatagctgctgatatagacaaaatgctattaaacatggccacggaagaagctgccgcagccaccgaagagactacggccgcaaaacccgagaaggaagagatgaccgaagatacttcggaagatgaaacttttgactttcaaaacttagttggccaagagctaacaaaagctaagaaagaggaattaaaagaatatgctatatcctgcgggtattggctgggagcgcttctcttcggtggcattgatgacgaagggttaggctgcatacgagatcagactggcgcgaaggttatcggtactctatcaaagagtatcagtttcccgaagctcgaagcggatatcagccgctaccgacgacaacacattgtcggcagtttgttctattccaattttaagagtatgcttttgagcaaggctttaaaaatgcagcaggacttagaggataaaaggcacgaagttataattgagaacttagaaaacaagataaaagagcaatcagctgccatcgaaaagaaagacttcgagcttcaaacagccgaaggcttattagaggatgctgaagccaaaataacaaaattaaatttgaagcttctttcacaatcagaaaatttcgaacaagaaaagctgaaacttgatgcaaagcttgaagccgaagttcaaaaaagttcggagctgaaagaatccttgacaaatcttcagaataagtgcctggagttcagcaatcgatgcattcaacagttgaagcaggtgttccattttgttggagccagtagcgagaagttcactccttcgactgaagacctgcctggtgccttcgagcatattgaatgtgaaattaatgatcttgatgaagttatagctgggcatggcgacttctgtgccctggcagcttctcggggcacagctgttgcctttttgaagtctggctgtgaacacggaaagattgttaatagacccaactttagcctgtcaccagcagacttagataacattcccagcttggcccgaagtattgcgaatagagttataaaattagtatggacaaagggtggacggagcaaagctagtgacgaagctcgaagccaccttaagttggttgaccaagccgaagctgaagctgcagagtaagatgatgatcctaaagattgtaaaggtttatttaagaacttaaagttctacttgagtcgagaggtgcctagggagtccctgttatttataattccagcatttggagggactgtttcatgggaaggagaaggagctccatttaaagaaatagacgaagatatcactcaccaggttgattccatttgcaataatttattacaccaaagtttaactatatagacggagacattgtgtaccatccctaaagtaagatgccactctaagtaccacgacagcaatgccatactagggcaatagttactacaatacaatttttgtatgtggctaactgttcatattttacactctaccatcatatgatcatatctagcgaagtaaaataaaaaaaaaaaaaaaaaaaaaaaaaaaaaaaaaaaaaaaaaaaaaaaaaaaaaaaaaaaaaaaaaaaaaaaaaaaaaaaagatgaaaaaaataaaaaaactaaataaaaaaaaccatgcattgaacttcctaatt

SEQ ID NO: 148088 - DNA, 2539 bp, Zea mays
  Clone ID: MRT4577_66585C.1
atggccagagttcgctctactgcaagagtcgatcgtgagggagacgagaccgaagctgttgaaactgttcctatttcggaagcaatgaagcgatctgggttggtaacaccggaagacgcccctgctgctgaaacagagcaagctggtattgaagagaccgattctgaagatgattacaacatcgcagtgccgagcaagcctagccacctagacttcggaaagtccaccatctccaaagctgattttcctaagatggtgaagctgggctattttagcgaagataagaaagagttgattcgcttcggtggagaagaaactactccgaagccagaaaaagacgaaatagtagttttcaagagtttcctcaaagctggtttgagattccctttaaataggatgattgccgatgtgctaaagaagtttgggatccactttcatcaactaactcctaacgctatcgttaggcttagtgtttatatttgggctctccgaagccaggggtggaaccgtttgccgaagactacaaaatttcctatgataagctaccgaagcaagtggccggcaggctggaaatcgaaatggttctacgtcaaaattgacgatgacaaggagaagctggtgcagagtcctctagaattgatcttcggagaaaccagaccccaacgcaatatgacaccagaagcagccttcggcacccgtccgaaacgaaggctaaacagagtgctggatgttataggctttgaatatcctgattatgaacgactcgacaagggtgccgaagggcagaaaagaaaaagggtggttggcgctttgaacaaagacgacgaagatcaatcaaagaagaaacaaaagcctgaagcaaaagtattagcttcgaagaaaagaaaggactcgatctcagagcaaaaatcaattgatgaagaagagaagacttctgcaacatcttctgatgctgaaatagagggaattctaaaggtaatgactgaaactttgcctgtcaaactaagtccattggggcttcatctgacgaagctttttcatatgaaaaaggagcctacaaaaacaaaggcatctaggccaaaaaggcaaaggattgttaccgtgacagaactgattgaaacaacaccaccaagagctccaactccgaaggtgctgacgattgaaggaacaacagctaccgaagctgtaccttcggaggttgccgcagaagaagccagagccgaagatgccaactacgaagatattaatttagagagcatagctgctgatatagataaaatgctgctaaacatggccgctgaagaaactgctgcggcgaccgaagagaccacggccgcgaaacccgagaaagaaggaataaccgaagatatttcggaagatgaaacttttgacttccaaaacttaattggccagaagctaacagaagctgaaaaagaggaattaaaagagtatgctatatcttgcgggtaccagccgggggcgcttctcttcggtggtattgatgatgaagggttaggctgcatacgagatcaaaccggtgcgaaagttgtcggtactctatcaaagagtatcggcttcccgaagctcgaagcggatataagccgctaccgacgacagcacattgtcggcagcttgttctattctaattttaagaataagtgtttggagttcagcactcgatgcattcatcagttaaagcaagtgtttcattttgttggagccagtagtgaagagtttactccttcggctgaagacctgcctggtgccttcgagcacattgaaggtgaaattaatgatcttgacgaagttatagctgggcatagtgacttctgtgccctggcagcttctcggggcacagctgttgcctttttgaagcctggctgtgaacacgacaagattgttaatagacccaacttcagcttgtcaccagcagacctagataatgttcccaatctagctcggagtattgcaaatagatttataaagttagtatggacaaagggtggttggagcaaagctggtgacgaagctcggagccacctcaagctgattgaccaagctgaagctgaagctgcaaccaatgaacctggtgcactgatgaatcttgtagaagaatcaactgccgatgatgcagatgatgatgatactaaagattgtaaaggtttatttaagaacttaaagttctacttgagtcgagaggtgcctagggagtccctgttatttataattccagcatttggagggactgtttcatgggaaggagaaggagctccatttaaagaaatagacgaagatatcactcaccaggttgattccatttgcaataatttattacaccaaagtttaactatatagacggagacattgtgtaccatccctaaagtaagatgccactctaagtaccacgacagcaatgccatactagggcaatagttactacaatacaatttttgtatgtggctaactgttcatattttacactctaccatcatatgatcatatctagcgaagtaaaataaaatggcctgtggattttttt

SEQ ID NO: 148089 - DNA, 171 bp, Zea mays
  Clone ID: MRT4577_66586C.1
atttcacctcatggtactctgctcgtcatggctaagtacgactatggcttatctagaggagcacttttcgcgagcaggagtcgcactctgctatgcatgctggtatgcacaggcgatatcctgtgtcacttaaacgtccacgtccctggtgccagcagatcccctggcgtt

SEQ ID NO: 148090 - DNA, 2466 bp, Zea mays
  Clone ID: MRT4577_66587C.1
atggcaagagttcgttccactgccagggttgttagtgagggagatgaaaccgaagctactgagactgttccgatttccaaagtgatgaagcggtctgggctggtaacatcggaagatgtacctgccgctgaagcagagcaggctgatgttgaggagactgagtctgaagatgattatagcagcgcagtgccaagtaaacccagccatctagatttcggaaaatccaccatctccgaagctggtttaagattccctttgaacaagatgattgctgatgtgctgaagaagtttgggatctaccttcatcagctaactcctaacgctattgttaggcttagcgtttatatttgggctctccgaagtcaaggggtgcaaccatttgccgaaggtttctgccgagtgcatgagcttcattaccagaccaaggctagaggagatgggctacatgaaaactttggctgctacaattttgcctaccgcaagactacaaaatttccagtgatcagttaccgtagcaagtggctagctggttggaagtctgagtggttttacgtcaaagttgacgaagataaggagaagctagtccagagtccgttagagttgatcttcggagagaccagacccccgtgcaacatgacaccagagggtccaacccaaattgctctggctgaatttagagttattgcggagcacatcggcactagggacttagtgcaagaattcttggctttcaaagtgtttccaactatgaaacagtgggccatgccgaagcttgaaggaaaaaagaaggaaggggaacttattcggttgccttaccattacaaattcaagaaacatttcaaagtgccttgccaagaatggctggacacgatcgaagtaatccttcggcacccgtttgaagcgaaggttaaacgagtaatggatgctctaggctttgaatatcctgactacgagcggctagacaagggtgccgaagggcaaaaaaggaaaagagtggctgatgttctgaataaagatgatgaagaacaactgaaaaagaaaaagctgaagccggaaccaaaaacaaatgcttcgaagaagagaaaagctacagctccgaagcagaaggcaattgacgaagaagaagaaactgctgcatcaccctctaccaccgacgtggaggaaattttaaaggtaatgactgaatccttgcctgtcaagctgagtccattcgggccacatctgatgaagctttttcagaaggacaaggagcccgcgcaaacgaagaaggcagctaggccaaaaaagcaaagaatcattacagtgacaaaagccatcaaagggacaccaccacaagcttcagctctggctgttgaaagcacgacagctactgaagctgcaccttcggaagcggaagatattcatttagaaagcatggttgctgatatagataaaatactattaaacatggccgcggaagaggctgccgcagccaccgaagagactgtggccccaaagcccaagaaagagaaagaaatggcggaatacacttcggaagatgaagcttttaactttcaaaacttagttggtcaagagctgacgaaggctgaaaaagaagagctaaaggaatatgccatatcttgtggatatcggccgggagcgcttctcttcggtggcatcgatgtcgaaaggttaggctgcatccaggatcagactggtgcgaaggttattggtactctatcaaagagtatcggtttcccgaagctcgaaacagatatcaaccgctaccgacgacagcacatcgtcggtagtttattttattccaatttcaaggttgtttgtgcgcagagcatgctgctgagcaaagctttgaaaatgcagcaggacttggaagataaaaaacacgaggttataattggaaatttggagagcaagataaaagagcaatcaactgttattgagaaaaaagacttcgagcttcagacaaccgaaggcttactggcggaagctgaagctaaaataatagaattaaatacgaaacttctctctcaatcagaaaactttgatcaagaaaagcagaagcttaacacaaaacttgaggccgaagtgttctattttgttggagccagcagcgagaaatttactccttcggctgaagacctgccaggtgcctttgagcatatcgaaggtgaaattgatgaccttgacgaagttatagctggacatggtgacttgtgtgccctggtatcttctcggggcacagctattgcctttatgaagtctggctgcgaacacggaaagattatcaatagacccaatttaaacttatcaccagcagatttggataacattcccaaccttgcccgaagcatagccaatagatttataaaattagtatggacaaaaggtggacgaagcaaagctggtgatgaagctcggagtcatcttaagctggatgacgaagctgaggccgaagctgaagagtga

SEQ ID NO: 148091 - DNA, 2504 bp, Zea mays
  unsure (1)..(2504): unsure at all n locations
  Clone ID: MRT4577_66588C.1
cttcgaaagacggagccaggagactgttattgcctgaaatccgcttgtgaagctataacagatgggtagcacaacaatccgaaaggagcagaagctagagcgggtgaagctggagctggagcgctaccacgagaacctactcccactctcccagtcataaccagcctgtccaactagtaccatcatgacctcctagcacgtgttaatctactcaccagtaacaacagtaaggacagaggcacataaaattacatcatgtatgtctttgtaactgatgtcttaatgcgtgcattgtagagtcacttatagatggaacatgcactctcctggcacctgaactgcccaccgttctagcatttatatgtaaacattgactagatgttgcttccgggttgtccccagaaaccgtgtcccctactctctctctctctctctctctctatctctcttctcccctcgatcaacagcaacagcggcggtcagaagcttccgtcgcgacagctcccgacctcctgccggtcttcccctctcctagtcggcgcgaatcccgaggcggaggaggaagaggggagcggagtgggggtgggccccatcagccatgagtcttgcgggctccgcgctggaggcggcgctacaggcggtggggcgcggcctcgacgcagctggagaccaccggctgctctactgcaagggagatggaaggctcgtcgcgctcgaggaccgtgcgcgggacctcccgctccccgacggcggcgtcctcccgagcgtgccccacgatgtcgaggtcgagcagtgccgcagagaccccgagcgcatccgccccttcccctctggcccaagctccgccgcagcggatgggccctttgtctgcagcttcgataagatggctgagtatttcaacaggaagtcatgtttgtccgagacagtaccgctgggttccttcaactctctcttcagcttcaccggttcttggaagaatgatgcggcgaccacgaaggcccttgcgattgatggctattctctgcctctgtttcgagttaaaattaggaattctgaactgacgctgcttgagagcgttaagcgaaggatcccaaatgtttgggatccatcagcattggcaagctttattgagaactatggtacccatattattatctctgttacggttggtggtaaggatgaggtatacattaagcagcattcattgtcccaattgtcagagctggagttcaaaaattatgcgagggaaattgggagggaaagatttgcagatgtggaaaataagtcaaatgcatcttctatcaattacagtgagaaggatatgacagtaatattcagaaggaggggtggttgcgaccttgttcaaagttttagtgattggagaggaactgttgcctcagcaccagatgtcataggcatcacctttctatcaattgtctctcttgttgacgatataccaggaaagaagcaccttgctcgtgcagttgagctatacttgacctacaaacctccaattgaagaattacagtacttcttagattttcgagtcccactagtttgggctccagctccaccaggtattgctggtcaccataggaaagaaccagtctgcccatcgcttcagtttagcttaatgggcccaaagctcttcattagcacagaacagatctctgttggccgtcgaccagttgttggcctcaaactgattttggaaggagccaaacagaatcgtctggctattcatttgcagcaccttggctcattaccaaaaatattcctacctcattgggactcctatattactattggacctccaaaatggcaaggtcctgaagaacaggacagccgatggtttgagccaatcaaatggaagaactttgctcatgttagcacagcacccatagagtacactgaaacaaatattacggacctatctggtgtttatattgttacaggagcacagttgggagtgtgggattttggtgcaaagagtgttctccaccttaaacttttgttctccagggttcctgggtgcacaattagaagatcagtgtgggaccacagcccatcaagttcttcaattcataaagcagatgaatcttcatcatcctcgagtgataatgctaaacttctgaagattattgacatgacagaaacattgaagggcccacaagatgcacctggccactggctgatcacaggtgctaagttgggtgtcgagaaaggcaggattgtagtgcgtgcaaagtactccttattgaattattaaccaaatgtttaaagcattcattcactcactctgatattgagcactgtgttttaaggtagcatttgttcttttgtttttcatgtatgactttccttcccccttgtaacttgatgtggatccatgcttcttgttgatgccgtgagtgaagtagcatgaagatgtttatgctcctgcccgaaaaaaaaaaaagaggatcccgagtnctctgcgttgttaccactgcttaagggcgcag

SEQ ID NO: 148092 - DNA, 1923 bp, Zea mays
  Clone ID: MRT4577_66589C.1
atggcaagagttcgttccactgccagggttggtagtgagggagatgaaaccgaagctactgagactgttccgatttttgaagcgatgaagcggtctgggctggtaacatcggaggatgcacctgtcgctgaagcagagcaggctgatgttgaggagactgagtctgaagatgattatagcagtgcagtgccaagtaaacccagccatctggattttggaaaatccaccatctccgaaggtgatttatctaagatgttgaatttgggctatttcaatgaagcgaaaaaagaactgattcgttttggtggggaagagactactccgaagccaggaaaagacgaagtagtggtctttaaagtttctttaaggctgctgactcctaactctatcgttaggcttagcgtttatatttgggctctccaaagccaaggggtggaaccatttgccgaaggtttctgccgagtgcatgagctccattaccagaccaaggctagaggagatgggctacatgaaaactttggctgctacaattttgcctaccgcaagactacaaaatttccagtgattagttaccgtagcaagtggccagctggctggaagtctgagttgttttatgtcaaagttgacgaagataaggagaaactggtccagagtccgttagagttgatcttcggagagaccagacccccatgcaacatgacaccagagggtccaacccaatttgctctggctgaatttagagttattgcggagcacatcggcactagggacttagtgcaagaatttttggccttcagagtgttcccaactttgaaggaatgggcatggctgaatctgaaggaagaaaagaagggggaatttgttcgattgccttaccattacaaattgaagaaacatttcaaagtgccttgccaggagtggctagacactatcgaacggctagacaagggtgccgaagggcaaaaaaggaagagagtagctgatgttctgaataaagatgatgaagaacaactgaaaaagaaaaagctgaagcctgaaccaaaaacaaatgcttcgaaaaagaggaaagctacagcttcgaagcagaaggcaattgacgaagaagaagaaactgctgcaacgccctctgctaccgaagtagaggaaattttaaagctttttcagaaggacaaggagcccgcgagaacgaagaaggcagctaggctaaaaaagcaaagaatcatcacagtaacaggagccatcgaaggaatgccaccaggagcttcagctccaaagacgccggctattgaaagcacgacagctactgaagctgcaccttcagaagccacaaatgccgaagctgccggaaccgaagatatcaatttagaaagcatggttgctgatatagataaaatactattaaacatggccgcggaagaagctgcttcagaagaggctgccgcagccaccgaagagattatggcctcagagcctgagagaaagaaagaaatagccgaagaccctttggaagatgaagcttttaactttcaaaacttagttggtcaagagctgacacaggctgaaaaagaagagctaaaagaatatgctatatcttgcggatatcggcctggagcacttctcttcggtggcattgatgacaaaaggttgggctacgtgcgggatcaaactggtgcgaaggttgtttgtgcgcagagcatactgctgagcaaagctttgaaaatgcagcagaacttggaagataaaaaacacgaggttataattggaaatttggagagcaagataaaagagcaatcagctgttattgagaagaaagacttcgagcttcagacaaccgaaggcttactggcagaagctgaagctaaaattacagaattaaatacgaaacttctctctcaatcagaaaactttgatcaagaaaagtag

SEQ ID NO: 148093 - DNA, 247 bp, Zea mays
  Clone ID: MRT4577_6658C.1
gacggatgcgagacgtcatcacttggcctgctcgattcaacggtgtacagcatgacacagagcgccaccagaaccagcgactccgattttggcggtgggcccacccccacagaccaggagctctattgaaggcatctgatggaggagggcctcatggggtgctatatacggaatcgcctagtgatagaccgcctccaccaatccaactgttatgcgtgaccgcaaccaatggcgttagatgcatgac

SEQ ID NO: 148094 - DNA, 256 bp, Zea mays
  Clone ID: MRT4577_66590C.1
caacccttccggtttgtgtttaaagtttgcattttttttgcagagctggcggatacggagtcgtaggtgggcttggtacgttgatgatcacagacaggacacgatcggatcggggtagataaagagggataaaagtggaggacggctgtacagacacgtacggagatgccactgctgtgatgagacacgctatttgcagggcgaaccctgttactatcatgtgcttcttgtcaggtaccatatgctactcgatggt

SEQ ID NO: 148095 - DNA, 369 bp, Zea mays
  Clone ID: MRT4577_66591C.1
ctgacgaaggaacgctagaccacgctgagcgaccacaggcctacatggagtggctacgaaggaaatggaatacggggccgggctcgccgacgcgcatattatccacggggttcaggctcctgccataggctgccgacactgataggcggccaattgagctgaagaatagtgtttaatggatctaaggccgcccacgaaaggttggacctgccaggccatgaagagattcagcaagcctgtcacccgcaaacagccgaaacagcgcaacccgacagagagaacccgcgctaagggattgcgcgcacggattgtacgcctatcgctgggcgcgggacacgacgggcaacctcctgacgaccaaacggcgcc

SEQ ID NO: 148096 - DNA, 2634 bp, Zea mays
  Clone ID: MRT4577_66592C.1
cttcgaaagacggagccaggagactgttattgcctgaaatccgcttgtgaagctataacagatgggtaacacaacaatccgaaaggagcagaagctagagcgggtgaagctggagctggagcgctaccacgagaacctactcccactctcccagtcataaccagcctgtccaactagtaccatcatgacctcctagcacgtgttaatctactcaccagtaacaacagtaaggacagaggcacataaaattacatcatgtatgtctttgtaactgatgtcttaatgcgtgcattgtagagtcacttatagatggaacatgcactctcctggcacctgaactgcccaccgttctagcatttatatgtaaacattgactagatgttgctttatcctttacaggatattacagtaatattcagaaggaggggtggttgtgatcttgttcaaagttttagtgattggaaaggaactgttgcctcagcaccagatgtcataggcatgacctttctttcaattgtctctcttgttgacgatgtaccaggaaagaagcaccttgctcgtgcagttgagctatacttgacctgtaagatctgctttcggttactttcatttgtcctatgcagttatgcaactcaagaactcattcaccacattgaatatagtatatttataatgccctgaggaagctaacttacgatgtgatttctcttcaattatactgttttgataagttctgttttacagacaaacctccaattgaagaattacagtatttcttagattttcaagtcccactagtttgggctccagctccaccaggtattgctagtcaccataggaaggaacctgtctgcccatcgcttcagtttagcttaatgggcccaaagctcttcattagcacagaacaggtaaaggttaccccttaaatctgaacatatgagtacagtgattactttttggagttttacgctagaaatgttattttaattgttgtcaggaaatgctatagctaagtatgaaacacaattaccatcataaacaattttctactaggttgggcctctagctgagttggttaggtggtagcacttaagttctgagttcgattccccatgggagtcagactgctgttaaaaaggtcctctcgtttgtcccaaaataaagcacaggtaaaagaaccgactcttacataggctacggcgccgttgtgtatgggtgagatatgtgttcggatgttttctagaattgcaagagaaggtcttcttaatgcaatacctgggatcccagatgttgtcttaccctcgcaagccaagtttttttttaaaaaaatataattctaaagatcaaggcatgcagaagaacaaaaatgtgtaaattgcaccaggggtacaaattttgtacctatagtgcattttactgataaaaagatacacttttaagacaatcaatttttttgtgaacatgctaactctgaagaagacatgtgcagatctctgttgggcgccgaccagttgttggcctcaaactgctcttggaaggagctaaacagaatcgtttggctattcacttgcagcaccttgtctcattaccaaaaatattcctacctcattgggactctcatattaccattggacctccaaaatggcaaggccctgaagaacaagacagccgatggttcgagccaatcaagtggaagaactttgctcatgttagcacagcacccatagagtacactgaaacaaatattacggacctatctggtgtttatattgttacaggtgcacagttgggagtgtgggattttggtgcaaagagtgttctccacctcaaacttttgttctccagggttcctgggtgcacaattagaagatcagtgtgggaccacagcccatcaagttcttcaattcataaagcagatgaatcttcatcgtcctcgagtgataatgctaaacttctgaagattattgacatgacagaaacattgaagggcccacaagatgcacctggccactggctgatcacaggtgctaagttgggtgtcgagaaaggcaggattgtagtgcgtgcgaagtactccttattgaattattaaccaaatgtttaaagcattcattcactcactctgatattgagcactgtgttttaaggtagcatttgttcttttgtttttcatgtatggcttttgttcccccttgtaacatgatgtggatcatgtttcttgttgatgatgccgtgagtgaagcactacattcgttctcgaaaaaaaaaaaaaaaaaaaaaaaaaaaaaaaaaaaaaaaaaaaaaaaaaaaaaaaaaaaaaaaaaaaaaaaaaaaaaaaaaaaaaaaaaaaaaaaaaaaaaaaaaaaaaaaaaaaaaaaaaaaaaaaaaggggggcccctttttaaagaaccaaattttacttccccgtgtttgaaaagtaaaattttttttttggggcccccaaaataaaattaatgggccgggttttaaaaacgtgggaatgggaaaaacctggggtttcccaaattaaatgcctttgaaaaaaatccctttttcccaattggggttataacaaaaaaggcccccccgaatcccctttccaaaaattggcccaccttaattggaaaagggaac

SEQ ID NO: 148097 - DNA, 2436 bp, Zea mays
  Clone ID: MRT4577_66593C.1
atggccagagttcgctctactgcaagagtcgatcgcgagggagacgaaaccgaagctgtggaaactgttcctatctcggaagcaatgaagcgatccgggttggtggcaccggaagacgtccctgctgctgaagcagagcaagcagatattgaagaggctgattctgaggatgattacaacatcccagtgccgagcaagcctagccatctggacttcggaaagtcgaccatctccaaagctgattttcctaagatggtgaaatcgggctactttagcgaagataagaaagagctgattcgcttcggtggagaagaaactactccgaagccacagaaagatgaaatagtgattttcaagagtttcctcaaagctggtttgagatttcctttgaataggatgattgccgatgtgctaaagaagtttgggatccactttcatgaactaactcctaacgctattgttaggcttagtgtttatatttgggctctccgaagccagggggtggaaccgtttaccgaaggtttctgccgggtgcacgagctacattaccaaaccaaggctagaaaggatgggttacatgaaaattttggttgttacaattttgcctatcggaaaactacaaaatttcctatgatcagctaccgaagcaagtggccggcaggctggaaatcggaatggttctacgtcaaagttgacgatgacaaggagaagctggtacagagtccgcttgaattgatcttcggagaaaccagaccccaatgcaatatgacaccagaaggctttgaatatcctgattatgagcgactcgacaagggtgccgaagggcaaaaaaggaaaaaagtagctggtgctttgatcaaagacgacgaagatcaatcaaaaaagaagaaagaaaagtttgaatcgaaagtgttaacttcaaagaaaagaaaggaatcaatcccggaacaaaaatcaattgatgaagaagagaagacttctgcgacatcttctgatgctgaaatagaggaaattctaaaggtaatgactgaaactttgcctgtcaaactaagtccattggggcttcatctgatgaagctttttcataatgaaaaggagcccacaaatacaatggcatctaggccaaagagacaaaggattgttaccgtgactgaagtgattgaaacaacaccaccaagagctccaactctgaaaatgccggcaactgaaatcatgacagctactgaagctgtaccttcggaggctgccgcagaagaagccagagccgaagatgctaactccgaaggtattaatttagagagtatagccgctgatatagataaaatgctgctaaacatggccgctgaagaaactgctgcagccaccgaagagaccacggctgccaaacccgagaaaggaggaataaccgaagatacctcggaagatgaaacttttgacttccgaaacttagttggccaggagctgattgaagctgaaaaagaggaattaaaagagtatgctatatcttatggatatcggccgagggcgcttctttttggtggtattgatgatgaagggttaggctgcatacgagaccaaaccggtgcgaaggttgtcggtaccttatcgaagagtatcggcttcccgaagcttgaagcggatatcagccgctaccgtcgacaccatattgtcggcagtttattctattctaatttcaagagcatgcttttaagcaaggcattaaaaatgcaacaagatttagaggataaaaggcaagaagttataattgaaaatttagaaaacaaaataaaggagcaatctgctgccattgagaagaaagacctcgagctacaaacaggcgaaggcttattagtagatgctgaagcaagaataacagaattgaattcgaagcttctttcccagtcagaaaattttgaacaagagaaactgaagcttaatgcaaggctcgaagccgaaactcaaagaaacttggaattgaaagaatctttgaaaaatcttcaaaccagtagtgaagagtttactccttcggccgacgacctgcctcgtgccttcgagcatattgaaggtgaaattaatgatcttgacgaagttatagctaggcatagcgacttttgtgccctggcagcttctcagggcacagctgttgcttttttgaagtctggctgtgaacacggcaagattgttaatagacccaactttagcctgtcaccgacagacttagatgatgttccaaatctggctcgaagtattgcaaacaaatttataaagttagtatggacaaagggtggtcggagcaaagctggtgacgaagctcggagccacctcaagctggtaacaaaatcataccttatgcttaccttttcctttgaatttttgaattcagcttataataccttcgtgcagattgaccaagctgaagctgaagctgtagagtag

SEQ ID NO: 148098 - DNA, 557 bp, Zea mays
  unsure (1)..(557): unsure at all n locations
  Clone ID: MRT4577_66594C.1
ctcttctaacccaactgacttgtatnnctgtccgtggaaaatttcagtccagaagaattgaccttgaccattaataaagacactggcagagagatcttcccataataaagcaatctgattcagcatcaaaaaaaaaaaaaaaaaaaaaaaaaaaaaaaaaaaaaaaaaaaaaaaaaaaaaaaaaaaaaaaaaaaaaaaaaaaaaaaaaaaaaaaaaaaaaaaaaaaaaaaaaaaaaaaaaaaaaaaaaaaaaaaaaaaaaaaaaggggggggcccttttaagggaccaaattttactcccccgggcttgcaaggaaaaattttttttttggggcccccaaaataaaatccaggggccgggttttaaaaacgggggaaggggaaaaccctgggggtacccaaattaaatcccttggaaaaaaatccctttttcccaaggggggtaaaaacaaaaaagccccccccggatcccctttccaaaaattggcccaccttaatgggaaaagggaccccccctttaagggcgcaattaagcgcgggggtggggggggttacccc

SEQ ID NO: 148099 - DNA, 2583 bp, Zea mays
  Clone ID: MRT4577_66595C.1
atggccagagttcgctccactgctagggttgatcgtgagggagatgagaccgaagctactgagactgttccaatttccgaagcaatgaagcggtctggactggtaacatcggaggacgtccctgccgctgaagcagagcaagctgaagttgaggaaaccgggtctgaagatgattatagcagcacggtaccgagcaaacccagccatctagatttcagaaaatcaaccatctccgaaggtgacctacctaagatgctaaaattgggctattttaatgaagaaacgaaagagctaattcgctttggtggggaggaaactactccgaagccaggaaaagatgaagtagtagtttttaaaagtttcttcaaagctagtttgagattccctttgaataagatgattgttgatgtgttgaagaagtttgggatctactttcatcagctaactcctaacgctatcgttaggattagcatttacatttgggctctccgaagccaaggggtggaaccgtttgccgaaggtttttgccgagtacatgagctacattaccaaaccaaggccagaggagatgggttacatgaaaacttcggctgctacaattttgcctaccgcaagactacaaagtttcccgtgattagttaccgaagcaagtggctaactggctggaaatctgaatggttctacgtcaaagttgacgatgacaaggagaagctggttcagagtccgctggagttgatcttcggagagaccagacccccgtgcaatatgacactagagggtccaacccaaattgcgttggctgaattaggcttgaaggaaaaaagaaggaaggagaacttatccggctgccctaccattacaaattcaagagacatttcaaagtgccctgccaagaatgggtggatacaatcgaagatgtgcaacgaaatacttggaaactattctaaaaaagaggaccaattgatgactgcggccttcggcactcgtccgaaacaaaggctaaaccgagtgatggatgctataggttttgaatatcctaactacgagtggctggacaagggtgccgaaggccaaaaaaggaagagagtagctagtgctctgaataaggacgatgaagatcaaccgaagaagaaaaaacgagagtctgaggcaaaaatagttgctccgaagaaaagaaaggcttcgactccgaagcaaaaatcaatcgatgaaaaagaaaggacttctgcgacatcctctgccgccgaagtggaggaaatcataaaggtaatgactgaaactttgcctgtcaaactaagtccactgggactacatctgacgaagctttttcagaaggaaaaggagcccacaaaaacgaaagcacctaggccaaagaggcaaagaatcgttactgtgacagaagtcattgaagcaacaccaccaggagcctcagctctgaagacgccagctattgaaagtatgatagctactgaagttgtaccttcggaagctgccgcagaagaggccagagccgaggatgctaaattcgaagatataaacttagaaggcatggttgctgatatagacaaaatgctactaaacatggtcacggaagaagctgccgcagccaccgaagagactacggccgcaaaacccgagaaggtagaaatgaccgaaaatacttcgggagatgaagcttttaacttccaaaaattagttggccaagagctgacaaaagctgaaaaggaagaactagaggaatatgctatatcttgcgggtattggccgggagcgcttctcttcggtggtattgatgatgaaaggttgggctgcatacgtgatcacaccggcgcaaaggttatcggtactctatcgaagagtatcggcttcccgaagctcgaagcagacattagccgttaccgacgacaacacattgtcggtagcctattttattccaatttcaagagtatgctgttgagcaaggctttaaaaatgcaacaggacttagaggataaaaagcacgaagttataattgagaacttagaaaacaagataaaggagcaatcagtagctatcgagaagaaagacttcgaacttcaaacaactgaaggcttattagcggatgctgaagccaaaataacagaattaaatttgaagcttctttctcaatcagaaaacttcaaacaacaaaagctgaagcttgatgcaaaacttgaggccgaagtgttctattttgttggagccagcagcgagaagtttactccttcgactaaagacctgtctggtgccttcgagcatattgaaggtgaaattaatgatcttgacgaagttatagctgggcatggcgacttctgtgccctggtagcttctcggggcacagctgttgcctttctgaagtctggctgtgaacacgggaagattatcaatagacccaacttcagcttgtcaccaacagacttagataatattcccaaccttgcccgaagtattgcaaatagatttgtaaaattagtatggacaaagggtggacgaagcaaagctggtgacgaagctcgaagccaccttaagtcggatgacgaagctgaagctgaagctacggagtaa

SEQ ID NO: 148100 - DNA, 276 bp, Zea mays
  Clone ID: MRT4577_66596C.1
ggataacacggtggttaataatttgaacttccggttataaccaaaaaaaaaactttattagcgcgaggaaccgaggggacaaaaaaatgaaccgccggaaaacaaggaaaaaaaaactttttatgccatggggcccggggccagccccccagaattaatccaattttctacagggaccaaggacccccccccatcatgtccccttctagaaacccttttaaacccaagtggtgagtctgaacaagcacccccccaaccccttgtttttgttcgccc

SEQ ID NO: 148101 - DNA, 263 bp, Zea mays
  Clone ID: MRT4577_66597C.1
ctgccattgttgccgagatcaagatctggatgttacaagttacggaagatccaaattttccgctgagcatattgtcttgcgttattcacggccaaggaaaatgatattttataactcgcggtgattattaacacccaggttggcaaaaagaaaatttgtgaaaagcttcaaccgccttgttcttgcactagttctccacccctcctggcaacactcttccgcctttcacgtggcaggcccagggcaccgtcccagatgagctg

SEQ ID NO: 148102 - DNA, 625 bp, Zea mays
  Clone ID: MRT4577_66598C.1
gtgaaaattaggagttctgaactgacgctgcttgagagcgttaagcacgcgatcccaaatgtttgggatccatcagcattggctagctttattgagaattacggtacccatattattatttctgttacggttggtggtaaggacgaagtatacattaagcagcattcatcgtcccaattgtcagggttagagttcaaaaattatgtgagggaaattgggagggaaagattctcagatgtggaaaacaagtcaaatgcaactcctatcaattacagcgagaaggatattacagtaatattcagaaggaggggtggttgtgatcttgttcaaagttttagtgattggaaaggaactgttgcctcagcaccagatgtcataggcatgacctttctttcaattgtctctcttgttgacgatgtaccaggaaagaagcaccttgctcgtgcagttgagctatacttgacctgtaagatctgctttcggttactttcatttgtcctatgcagttatgcaactcaagaactcattcaccacattgaatatagtatatttataatgccctgaggaagctaacttacgatgtgatttctcttcaattatactgttttgataagttctgttttac

SEQ ID NO: 148103 - DNA, 2625 bp, Zea mays
  Clone ID: MRT4577_66599C.1
atggccagagttcgctccacttctagggttgatcgtgagggagatgagaccgaagctgctgagactgttccgatttccgaagcaatgaagcggtctgggctgataacgtcagtggacgtccctgctgctaaagcagagcgagctgatgttaaggaaaccaattctgaagatgattatagcagcgcggtgccgagcaaacccagccacctggattttggaaattccacaatctccgaaggtgacctacctaagatgttgaaattgggttattttaatgaagaaaagaaagagctggttcgctttggtggagatgaaactactccgaagccaggaaaagacgaagtagtagtttttaagagtttcttcaaagctggtttgagattccctttgaataagatgattgctgatgtgctgaagaagtttgggatctactttcatcagctaactcctaatgctatcgttaggcttagcgtttacatttgggctctccgaagccaaggggtggaaccgtttgccaaaggtttctgccgagtgcatgagctgcattaccaaaccaaggccagaaaagatgggttacatgaaaacttcggctgctacaattttgcctaccgcaagactacaaaatttcctgtgatcagttaccgaagcaagtggccggctggttggaaatcggaatggttctacgtcaaagttgacgatgataaggagaagctggtccagagtccgctagagctgatcttcagagagaccagacccccatgcaatatgacatcagagggtccaacccaaattgcactggctgaatttagggttatcgcggagcacatcgacactagggacttggtgcaggaatttttggctttcaaagtgttcccaactatgaaagagtgggcaatgctgaagcttgaagaaaaaaagaaggaaggagaacttattcggctgccctaccactacaaattcaagagacatttcaaagtgccctgccaagaatgtctggatacaatcgaagtaatgtgccacgaaatacttggaaattattctaaaaaagaagatcaattgatgactgcggccttcggcacccgtccgaaacgaaggctaaaccgagtgatggatgctataggttttgaatatcctgactacgagcggctggataagggtgccgaaggccaaaaaaggaaaagagtagctagtgctctgaataaggacgatgaagatcaaccaaagaagaaaaaacaggagtctgaagcgaaaacagttgctccgaagaaaagaaaggcttcgactccgaagcaaaaatcaattgatgaaaaagaaaggacttctgcgacatcctctgctactgaaatagaggaaattttaaaggtaatgactgaaactttgcctgtcaaactaagtccactggggctacatctgacgaagctttttcagaaggaaaaggagcccacaaaaacgaaggcacctaggccaaagaggcaaagaatcgttactgtgacagaagtcattgaagcaacaccaccaggagcttcagctccgaagatgccggctattgaaagcatgacagctactgaagctataccttcggaggctaccgcagaagaggccagagccgaagacgccaaatccaaagatattaatttagaaagcatggctgctgatatagacaaaatgctactgaacatggctgcggaagaagctgccacagccaccgaagagactacggctgcaaaacccgagaaagaagaaatgaccgaagatacttcggaagatgaagcttttgactttcaaaacttagttggccaagaactgacaaaagatgaaaaagaagaactaaaagaacatgctatatcctgtgggtatcgaccgggagcgcttctcttcggtggcattgatgatgaaaggttgggctgcatacgagatcagaccggcgcgaaagttatcggtactctatcaaagagtatcggtttcccgaagctcgaggcagatatcagtcgctaccgacgacaacacattgtcggtagcttattttactctaattttaaggttatttgcccgcagaaaaatttcgaacaagaaaagctgaagcttgatgcaaaacttgaggccgaagtgcaaaaaagtttggagctgaaagaatctttgacaagccttcagaatagatgtctggagttcagcaatcgatgcgttcaatggctgaagcaggtgttccattttgttggagccagcagcgagaagttcattccttcagctgaagacctgcctggtgccttcgagcatattgaaggtcaaattgatgatcttgacgaagttatagccgggcatggtgacttctgtgccctggtaacttcttggggcacagctgtcgcctttctgaagtctggctgtgaacacggaaaagttgtcaatagacccaacttcagcttgtcaccagcaaacttagataacattcccaacctggcccgaagtattgcgaatagatttataaaattagtatggacaaagggtggacggagcaaagctggtgacgaagctcgaagccaccttaagccgcttataatacttacatacaggatgaccaagccgaagctgaagctaaagagtaaaaagatgaagctcaatgaatgctga

SEQ ID NO: 148104 - DNA, 310 bp, Zea mays
  unsure (1)..(310): unsure at all n locations
  Clone ID: MRT4577_6659C.1
cgggccggccggcgcgtccgcngcggtnggtccttccttttnncgtnggcttgtggtgccgncgngngcggggngtttctggccnnggtgcngctgnntggtgnngcttnngnnngggttgcgngtgctgctggnngtgcccggttccngtnnntnntngtnttttnggcgcngnttgcttcnccgtgttgntcccggtgntgctgtttctgcttggnnnttcttncccntgtgntgttctttcnnctctggnnntnngngcnccctcttccnngtcngnnngtgnnntnntccttccngtgtcggttct

SEQ ID NO: 148105 - DNA, 282 bp, Zea mays
  Clone ID: MRT4577_66600C.1
atattgccgggtcgacaagctcactatatcggcggccgcccttcgttatttgatgcatacaaacaaaccaagagactactcacgttgataagggtttggacgttctgctcattacaatatgatcttctatgtataaagtgggcactagatgttaaggatcaagactcaagagaactcatggactgtgactcggggctacatggatgtctatttggaagcttacatacaatggaaggtaaagggatatgtaggacacttgcaacctcaatatggacacacctg

SEQ ID NO: 148106 - DNA, 578 bp, Zea mays
  Clone ID: MRT4577_66601C.1
caaaattatgtgagggaaattgggagggaaagattctcagatgtggaaaacaagtcaaatgcaactcctatcaattacagcgagaaggatattacagtaatattcagaaggaggggtggttgtgatcttgttcaaagttttagtgattggaaaggaactgttgcctcagcaccagatgtcataggcatgacctttctttcaattgtctctcttgttgacgatgtaccaggaaagaagcaccttgctcgtgcagttgagctatacttgacctacaaacctccaattgaagaattacagtatttcttagattttcaagtcccactagtttgggctccagctccaccaggtattgctagtcaccataggaaggaacctgtctgcccatcgcttcagtttagcttaatgggcccaaagctcttcattagcacagaacaggtaaaggttaccccttaaatctgaacatatgagtacagtgattactttttgggagtttacgctagaaatgttattttaattgttgtcaagaaatgctatagctaagtatgaaacacaattaccatcataaacaattttctact

SEQ ID NO: 148107 - DNA, 2514 bp, Zea mays
  Clone ID: MRT4577_66602C.1
atggccagatttcgctccactgctagggttgatcgtgagggagatgagaccgaagctactgagactgttccgattttcgaagcaatggagcggtctgggctggtagcatcggaggacgtccatgccgctgaagcagagcaagctgatgttgaggagaccgattctgaagatgattatagcagcgcggtgccgagcaaacccagccatctggattttggaaaatccacgatctccgaagatgacctacctaagatgttgaaattgggctattttaatgaagaaaagaaagatctggttcgctttggtggagaggaaactactccgaagccaggaaaagatgaagtagtagtttttaagagtttcttcaaagctggtttgagattccctttgaataagatgattgctgatgtgctaaagaagtttgggatctactttcatcagctaactcttgatgatgataaggagaagctggtccagagtccgttagagctgatctttggagagaccagacccccgtgcaatatgacacaaaagggtccaacccaaattacactagctgaatttagggttatcgcggagcacatcggcactagagacttagtgcaggaatttttggctttcaaagtgtttccaactatgaaagagtgggccatgtcgaagcttgaaggaaaaaagaaggagggagaacttgtccggctgccctacctttacaaattcaagagacatttcaaagtgccctgccaagaatggctggatacaatcgaagtaatgtgcaacgaaatacttggaaattattctaaaaaagaagatcaattgatgactgcggccttcggcacccatccgaaacgaaggctaaaccgagtgatggatgctataggttttgaatatcctgactacgagcggctggacaagggtgccgaaggccaaaaaaggaaaagagtagctagtgctctgaataaggacgacgaagatcaaccaaagaagaaaaaacaagagtctgaggcgaaaacagttgctccgaagaaaagaaaggcttcgactccgaagcaaaaatcaattgatgaaaaagaaaggacttctgcgacatcctctgctactgaaatagaggaaatcttaaaggtaatgactaaaactttgcctatcaaactaagtccactggggccacatccgacgaagctttttcagaaggaaaaggagcccacaaaaacgaaggcacctaggccaaagaggcaaagaatcgttactgtgatagaagtcattgaagcaacaccaccaggagcttcagctccgaaggtgccggctaatgaaagcatgacaactactgaagctgtaccttcggaggctgccgcagaagaggccagagccgaagatgccaaatctgaagatattaatttagaaagcatggctgctgatatagacaaaatgctactaaacatggccgcagaagaagctggcgcagccaccgaagagactacggccgcaaaacccgagaaggaagagatgaccgaagatacttcagaagatgaagcttttgactttcaaaacttagttggccaagagctgacaaaagctgaaaaagaagaactaaaagaatatgctatatcttgcgggtatcggccgggagcgcttctcttcggtgtcattgatgatgaaaggttaggctgcatacgagatcagaccggcgcaaaagttatcggtactctatcaaagagtatcagtttcccgaagcttgaagcagatatcagccgctaccgacgacaacacattgtcggtagtggttttattccaattttaagcaaggctttaaaaatacagcaggacttagaggataaaaagcacgaagttataattgagaacttagagaataagataaaagagcaatcagttgccatcgaaaagaaagacttcgagcttcaaacaaccgaaggcttattagcggatgctgaagccaaaataacagagttaaattcgaagcttctttctcaatcagaaaatttcaaacaagaaaagctgaagcttgatgcaaaacttgaggccgaagtccaaaaaagttcggagctgaaagaatctttgacaagccttcagaataaatgcctggagttcagcaatcgatgtgttcaacagctgaagcaggtgttccattttgttggagccagcagcgagaagttcactcctccggctgaagtcctacctggtgccttcgagcatattgaaggtgaaattaatgatcttgacgaagttatagctgggcatggtgacttctgtgccctggtagcttcttggggcacagctgttgcctttctgaagtctggctgtgaacacggaaaagttgtcaatagacccaacttcagcttgtcaccagcagacttagataacattcccaacctggcccgaagtattgcgaataggtttataaaattagtatggacaaagggtggacagagcaaagctggcgacgaagctcgaagccaccttaagctggatgaccaagccgaaactgaagctacggagtaa

SEQ ID NO: 148108 - DNA, 1134 bp, Zea mays
  Clone ID: MRT4577_66603C.1
atggccacgaaagaagctggcgcagccaccgaagagaccacggccgcaaaacccgagaaagaagaactgaccgaagatacttcggaagatgaaacttttgacttccaaaacttagttggccaagagctgacagaagctgaaaaagaggaactaaaggaatatgctatatcttgcgggtaccagccgggggcgcttctcttcggtggtattgacgacgaaaaattaggctgcatacgagatcatactggcgtgaaggtcatcggtactctatcaaagagcatcggcttcccgaagctcgaagcagacatcagccgctaccgacgacaacacattgtcggcggtttgttctattccaattttaagagtatgcttttgagcaaggccttaaaaatgcagcaggacttagaggataaaaggcacgaagttataattgaggacctagaaaacaagataaaagagcaatcagttgacatcgaaaagaaagacttcgagcttcaaacagccgaaggcttattagcggatgctaaagccaaaataacagaattaaattcgaagcttctttcccaatcagaaaatttcgaacaagaaaagctgaaacttgacgcaaagcttgaagccgaagttcaaaaaagttcggagctgaaagaatccttgacaaatcttcagaataaatgcctggagttcagcaatcgatgcattcaacagttgaagcaggtattccattttgttggagccagtagcgaaaagttcactccttcggctgaagacctgcctggtgccttcgagcatattgaaggtgaaattaatgatcttgacgaagttatagctgggcatggcgacttctgtgccctggctgcttctcggggcacagctgttgcctttttgaagtctggctgtgaacacggaaagattgttaatagacacaacttcagtctgtcaccagcagacttagataacattcccagcctggcccgaagtattgcgaatagattcataaaattagtatggacaaagggtggccggagcaaagctggtgacgaagctcgaagccatcttaagctggttgaccaagccgaagctgaagctgtggagtataaggacgaagctccatggatgttgtcgaagctcgaatag

SEQ ID NO: 148109 - DNA, 158 bp, Zea mays
  Clone ID: MRT4577_66604C.1
aaaggttagcatgttgttgcgtggtgaagtgtaatttgacttgaacgttttttgtttactggggaattaaaacatgcaaatattcttagggaggtgtattgttatagtttgtgacacttgtggattaataagaatcctatatttatcctaaaaaaaaa

SEQ ID NO: 148110 - DNA, 167 bp, Zea mays
  Clone ID: MRT4577_66605C.1
cggacgcgtgcgctgacgcgtggtggattgagaggaacagcgctgaggaagtgttaccggatagggcccgagcacggtacgattacctcatgcaactgatactgatacgagatagctgagtcagacatgggacgaaaatgataaagctctgagagagcgattaacac

SEQ ID NO: 148111 - DNA, 250 bp, Zea mays
  Clone ID: MRT4577_66606C.1
ccacgccttccggcaaggaaacctggaaagggttcttccgaccggaacggcccttattttccttggccccgaccttcccgacccggtggggcccaaagggggaaaaaagcccggggaaaaaaaacccgccggccgaggggaaggcgggaaaaccaccgcaggggaaaaggccaagggccggaaaggggttgcccgggtccaagtcctccgcaagggaggccggcgagaaaaaggggaggaaaagggccaa

SEQ ID NO: 148112 - DNA, 456 bp, Zea mays
  Clone ID: MRT4577_66607C.1
ggggaacaaaatcagctagggtaggcagccccgaacgtttttttagcaaagggcacatgcatgtacaccatccgcctccgccaccggccgggggggggcaggggcctccgtcgggcgtcgtctttccctccctaattaaagaccaccggacgcctgcctaccacctgccgaaaccctttttggccccgggggcaagggccccggcccgctcaaaccgcgcgggggggcaggggatgctgataacccccgggtgctggaacccgaactcctccttggcctcccttaaaaacttgccaaacgggggggggttgaagtacaccacgggcaccacgtaccggagggactgggacgccttgcccttgccgccgacgtacacgggcacctgccccttgggggggggcaccgcgggctcgccgccgccgtccggaaaaattctgtgcccgccgccgccggccg

SEQ ID NO: 148113 - DNA, 285 bp, Zea mays
  Clone ID: MRT4577_66608C.1
ccgccgacgcgtgggctgacgcgtgggcatgatgattggtgcgctctttagagatgttaactagagggggtgtttaatgtggtatttctaatgatttaggggtaacaaataaggctatttcaggcgaaactttacttactacgcaggctatcctaccttgacacggatcgcaaacttgtactcctcaacctcaaaggctgtaacatcctgattctgcccaccacgatcacagagtcgctctccaacttctgtctcttacatctgtgcgcatgttataatgtacat

SEQ ID NO: 148114 - DNA, 327 bp, Zea mays
  Clone ID: MRT4577_66609C.1
attcggctcgaggatctatcagaccctggttgtcgtatggctattacaggctacccagaatagtgtgtacatcacttggcggatacgttcatctatgacggtgattaacttagcgcacgacgatggcagcttgaccctacattctgtgtccttaggtgttatggtaggttggttgtgcgtgaactattggtgggacgccgatatccctgcttgacacgatgcttagttcataccctctgacggcggcctttctgctcggccgagcatagtggatatcagtagggttcatagccattctgctgaggaaactcgatcgccatgccgcgc

SEQ ID NO: 148115 - DNA, 490 bp, Zea mays
  Clone ID: MRT4577_6660C.1
tcgaggccggccctttccacggcgcgatcagcgctgcttgcgttggcgggggcgcgtcctgtggagctaggcgacgagcagcgggagttggaggctgagctgcgaaagatggcgccgcccaacggccgtaccgttctcatcttccgcgccccctgcgggtgccccaagggccgcatggaggtctggggcgccaagaaggtgcgccggatcaaaaagtaaagcggggcaaggatcggatggttactagttagtgcaatagtaccagtgcactcttgttccttcctcaatcctcataagtagctcctgctagaaaaaaatttaaaaaaaatcctcagttagcaataataagtataagtatagggtgattaaataaacggatcacagaaccagttatatcacagatagcttatatagacaatcatatactccttgtattatgaatcatggggaatttcgacagaaatacatgctttttacttgttcattctcc

SEQ ID NO: 148116 - DNA, 339 bp, Zea mays
  Clone ID: MRT4577_66610C.1
cttaggagctggaatggtaaactcttaattttcaaccggctagttttcttgagcctacagatgcctgctacaagacaaatttttcattagaattggaccataatacttggaatattttagataggttggagagaacataccttttggttttaatggctttctaccatcagacctttaagaggttttccaagggagaaaacttttaaccttaccccagggagggacggtggaatctcattcaaggccaaggcttttaaggcacctccttttgtaaaggagcttccagccgggaaggccattttaaaaaatgctggggggggattccccaaagggcttttt

SEQ ID NO: 148117 - DNA, 347 bp, Zea mays
  Clone ID: MRT4577_66611C.1
ataataatattgatgttttttggtttatcaaaaaaaataagggagaaattgggaaaataaaaaggcattatgggaccctttaaaaagaattttttttttgggggggcccgtgttttcccgagagcgaccagtatcacctaaaatttgccacaggagcatgagctgactactttttttctttatgagggttccattgaacattggggaaactagggtccacgctgatttccaagaaaaagctgcttgcacgccaaaaggggctaacattagggggcctaagtacaaaagcaaacctgtggggggggaaaggggtgactgctctataataatacgtgacacccctccca

SEQ ID NO: 148118 - DNA, 2243 bp, Zea mays
  Clone ID: MRT4577_66612C.1
cattaatttaccaggcacaaagagaaagtatgatgttatggcctcacctgcaaaatcaatatcaagcccaaatccaatgtctcctccacgcttttgtctatctcctaaaggaaacggcttttgcaactcaaagatggctcctagcactccagtgagcacagccatgacaactgccaagtggcttcggaatacagtatctccccttccatcaagaccttctggggaactgttgcgcttcttctcggcctgtgacaaggatctaacagatgacattgcacacagagctgggattatacttggagccatattcacgagcagttcttttggtgaacgaatctgtactagtatgcgaagcgcaagtaggatggatgctatctggacagagcaaagaaaaatggaagctcttaagctatattatagggtcctcgaatctatgtgtagggcagagtcacagatcttgagtgggaacaatcttacatcacttttgtctaatgaacgtttccatcggtgtatgattgcatgttctgcggagttagttcttgcaactcacaagactgtcactatgatgttcccagctgtgctggagaagactggcattacagcattcgacttgagtaaagtcatagagggttttgttcggcatgaagatacactcccaagagagttaaagcgccatctgaattctcttgaggaacggcttctggaaagcatggcatgggagaaagggtcatcaatgtacaattccttaatcgttgcgaggccggcactgtctgtagaaataagccggttaggtttactggctgaaccaatgccatcgcttgatgcaattgcagcacatcataacatctcattgggtggcctgccacctcttcccttccagaaacaggagcgtttgcaagacaaagatgaagtcaggtctcccaaaagggcatgcactgagaggagaaacgtgctggtggacagcaattcattgcggtcaccagtgaaggatattattaaaccaaagttaccacctctccaatcagcttttgcaagtccaacaaggccgaatcctgcagcgggaggcgaaacgtgtgcagagacaggtataggcgtgttctttagcaagatatcgaagctcgcagccattagaatcagaagtctctgtgaaagactgcagcttccccagcaagttctggaacgggtgtattcccttgtgcagcaaatccttagccaacagactggccttttcttcaacaggcacattgaccagatcatactatgcagcatatatggagttgccaagatctctcaactggaactttcattcaaggagattattttcggctacaggaaacaacctcagtgcaagccacaagttttccgaagcgtctatgttcattggcccccaagaagccgtaacgggaaaacaggagaagaccacgttgacatcatcactttctacaacgaagtattcattcctgccgtcaagtccttgttggtggaggtagggcctggcgccagtccaaagaagaaagaagaggaaaaaggtcctgctgatgtaggtccattcccagaatctccccggctggctcggttcccgaacctccccgacatgtctccaaagaaggtttctgctacccataacgtgtacgtctcaccgctacggtcatcgaagatggacactctgctgtccccgagctccaagagctactacgcgtgcgtcggcgagagcacctacgcgttccagagcccctccaaggacctgaaggctatcaacaaccgcctaaacagtgtgtccggcgggaagaaagtcagcggccggctgaacttcgacgtcgtcagcgatctggtcgtggccagtagcctcggcagtgaccgtgacgccaagcctgcggccgatcctgccaagacgacgccggtgaagtgcgagccatctgactcgtgatcgtcgtcgactctgacgaggcccttgttatagattgttatgtttcagatactcgtgagttagtagatggtaactagacgaggcccttgtttctgtttgcgtcttttctttttttgacgtgggaaacatctctgcgagcagctctacgttgtgtaaaatatatataaagaaagctgccccgatggctccccttaacccaactcgcgttgtagggagatgacaagcaccatggccatgtaacttcatagaggttttgagagagttgtgtaaaaatgcaagatggtcgttgaggtaacacaacagcggatcttttgtt

SEQ ID NO: 148119 - DNA, 618 bp, Zea mays
  unsure (1)..(618): unsure at all n locations
  Clone ID: MRT4577_66613C.1
gtcctgctgntgtaggtccattcccaggatctgcccgggtggctcggttcccgaacctccccgactgtctccaaagaagtttctgctacccataacgtgtacgtctcaccgctacggtcatcgaagatggacactctgctgtccccgagctccaagagctactacgcgtgcgtgggggagagcgcctacgcgttccagagcccctccaaggacctgaaggctatcaacaaccgcctaaacaggcaagatcatcaaaaagagcagttcgctagaggtttgctggtccagtttccaaagcaacagataaactgatgcccagatcgatcacctgcagtgtgtccggcgggaagaaagtcagcggccggctgaacttcgacgtcgtcagcgatctggtcgtggccagtagcctcggcagtgaccgtgacgccaagcctgcggccgatcctgccaagacgacgccggtgaagtgcgagccatctgactcgtgatcgtcgtcgactctgacgaggcccttgttagattgttatgtttcagatactcgtgagttagtagatggtaactagacgaggcccttgtttctgtttgcgtcttttctttttttttgacgtgggaaacatc

SEQ ID NO: 148120 - DNA, 371 bp, Zea mays
  unsure (1)..(371): unsure at all n locations
  Clone ID: MRT4577_66614C.1
tatttggaatcacagacncgcccaacacaagggggggcactaacttattttcgtatcaccancatcatcgacgtgagcccggccaaaagcgagggagaggcatggctgctccgaagctcgcgacgctcgcgctggccgtgctcctggcggccaccacattggctcccccagccgcggtgcgcgcggccatgtcttgctacaacgagtacagcacgctgatgcttaacgaaaaacaagtacacattgccttataaaaagaaatcgagtgactaaaaaatggaggtactctcattcgtttgtgacaccattgtactaacagagcaaataatagagagagggttggtctggaatgtttataataaagcgctaac

SEQ ID NO: 148121 - DNA, 264 bp, Zea mays
  Clone ID: MRT4577_66615C.1
aaggcaagccaaaggatttaaaaactgggttgaagtatgtcactaatttaagatattgttagcacctgtttggatacggaaccgataggattacagagaagaacagagaagaacagcgagggaggcataaagtagaacttagttcagaaggggaataatattctggtacaagtaataactatcaactgctgtctaatctacttaagccttacgcaatactttcatgaagttgatccacgttggccatataaccattttgttgat

SEQ ID NO: 148122 - DNA, 227 bp, Zea mays
  Clone ID: MRT4577_66616C.1
tctgtcttcacccacatttcactctttcttatcaacaccccacccctttctcgaggaagctcttttaaacagcagcgagcccccccccctctcttataacctccccttctccatctcttcccattataacattaacaccttctacacacaccacacctacttctcctccaatttcttcccacaaaacaccacttctattactttcaaacctaaccactttctttacc

SEQ ID NO: 148123 - DNA, 255 bp, Zea mays
  Clone ID: MRT4577_66617C.1
tccacacccacatgtgctactacaacttcaacgacatcatccactctatcatctacatgtacgcggacctaatcaccattgacaactcgctgttctacaagaagctgatctccaaattcctcgaggtcctcaagtacatcgctttcatcgaccttcgtgtttacgacattcactcccccactatcccgtccgctgaggagatcgtttaccacatctacaagatgctaacggtgcttgacaccaacattctctggg

SEQ ID NO: 148124 - DNA, 130 bp, Zea mays
  unsure (1)..(130): unsure at all n locations
  Clone ID: MRT4577_66618C.1
ggaagcttagctggngctaccagcgaagcgncatcttctgccacttggnaataatggngctatgggaaccgtgggancatccatcannacgtnctgnttggcaatttcnattcaagggcnncntgcnggc

SEQ ID NO: 148125 - DNA, 273 bp, Zea mays
  Clone ID: MRT4577_66619C.1
atccattgttagaggttcaggcggttctgatgtggtgtggtcatcatctctagacagctcaggagcaaatgacagggaatcggggtggaatgccccctgctcctagaaatgtcatatgtaatgctggcatctacaaggctttctggtcagtttcggtttacattgttgtacaagagatagcagctattgtgatcccactgttacatgaaccccagctcccccagaagtattagtgtgtttacttgggtaggttatgaattatctactgtagtg

SEQ ID NO: 148126 - DNA, 1726 bp, Zea mays
  Clone ID: MRT4577_6661C.1
gaactaaccccaaatatcaataaaatgtccagcaaagaacagcctaggaggaaaaccactccacggtaaccaccagacacctttataagcatttttcagctcacaactgctctaccccttttgacagttgagggatcatctcctccacatcaacatataattggacctcaattctggcctaacaacccagtagaatgggagcacaatacatttacatacccgagtgggttgcagcctgcagatggagctcccttcttcctctagcgctgcacagaaggatatttttgcaatcttctatggcctgctatagcatatgttgtgtatcagcgttcaaaacaatcacactctaggtttccatatgattcatttattgcataatctagccactttctatttttaataactactcaacaatttgagatatgcacaataaactgaaatcctcataagggataagatcttttactttggaactgatcattaacttcatatttatgcaaacataatcgagtttctgctgaatgttatttgaagtatgtctttttcatcatatttttttgagagtgtaatctgtttaagatttattaacttaatacatgaagtagattttacaaaggatatgctatcaatttcttgtgttaatattatgcttcccctgtcattgttcgtgttaatagtaatctgcccctgctgaatacacattatctgcaacgatatatacttaatgcttgccatatttcattggctgtcaatttatttcagctgcaatattctttgggcacctttttaatgaatctgaagctacactctaataaatagtatcatccttgcttcagctgacttatgcaccaagaatacacattgcaatttctgggtctacagttaaatcaaggtttacagatgatcgctttcatgcatgcaaggaggacgccaaatttgcatgggtcagagcactagatttcacacctaatagctcttttggcgagtgttccactcttgtcctgaaactgagcaaaggtgcatcagtatcatatattcttgaaagtttacccttctcaggagaattaggggaattggccattgcttcgatggatgtgtttggctcctcctccaatgtggttcctcttgttgactgcccaaatggcttttctgtgccttatgaagtactttttcgtctgaactctcttgttcacatggggaagctagttgccaggcatgttaatgctgatctgtttaaagtccttgaagatctgtcaatcgatactttaaggagaatatttgagaaaatgagcaaattaaaatctacctgctatgaacctttgcaattcatcagacatgaggctcatagcatgaatatgagaaagaaagccttgtccaacaagagggagagtggaaaattgatgaggtgttacagaattcacatcacaccatcaaaaatatactgcttggggcctgaggaagaagtttcaaattacgtggttaagtaccattctgagtatgcttctgactttgctcgagttacttttgttgatgaagattggagcaagctttctcccaatgcattgtcagctagaactgaacaaggtttcttttctaaacccttgaaaactggcctgtatcatcgtattctctccattctaaaagaaggattttgcattggccccaaaaaatatgaatttttggccttttcagcaagtcagcttcgtggtaattctgtttggatgtt

SEQ ID NO: 148127 - DNA, 786 bp, Zea mays
  Clone ID: MRT4577_66620C.1
ccggccgggtagacgccgacacttctcccgtccatcccttatccacctccattcacctcgagctctcctgtttctgagaaccctagccgccgccgccggcgccatggatcgttcccccgtgtcgtctctgtcgagtagctttcgtcttcccccaggagcatcggtctccgatgcgcgcgatgacgctcgcgccactgctgctgcggctgaggaaacatgtagcgcatcgagggctgcggagaagaaggccatagctgccgcggagcttgccacacttgctgtggacaaggcaggagatggcgtacatgctgtgcacgacgccgccaccctggaagttaacccaaatggccagatttgtgcatatcactgttttctgccagattgggcagttcactagtttctgcctttctggcactttgtgcagttcatctggcacttaatctaccaaaacagaaactgggagccaattcatatgaattgcttcatctacctcaaaccgacaatatacattgcattgcacaaatgtggcacaaaaaactgctgcagcaaagaagactcgcactacataaactgatgcagctcattgaaacagacacacactactttgtctaaatccatggcggcacctgcaggtgagaaaggaggaaaaactatgtggaggaggtacttggaggcaagacctgacgcgaaacaggtctcggtgatggagccgggtttgacatgtacgttaatggtgacgccactggcttactgagagttaaggacgagagcagacgtcgggttgtc

SEQ ID NO: 148128 - DNA, 283 bp, Zea mays
  Clone ID: MRT4577_66621C.1
cggacgcgtgggcggacgcttggaaggacatttgactaaggcttgagaacgtcgaacacaaggatcccggactttgtggccgtaggagacgatctcttaccatactgttgatgatatacgaattcgttgccctgacccatttacatctgacgagcggaggatccctcagccaacatggacctgggcaaatgggtggatcctacgcttgaccatacagaccatcgatgagacatatactccggtatcggtgcaaggccatgaccctagctatgaaatatatgct

SEQ ID NO: 148129 - DNA, 401 bp, Zea mays
  Clone ID: MRT4577_66622C.1
aaacaaaaatccaacggggaacgggggtttcaaaaaaaagaaaaaaaactttgggcccgggacattccacccgaataggacccaaaaagacgcacgggaaaataactggccacccaaagcaaacatatagctttggaaaaaaaaggggggggcattgcccaacccccaccattgccagccccccaggggaaggactgatcggaaatcacccccaaatcttggggaagggaaatatgtcgaaattttgcacgtactcgttcactgggtcaacccacaaaaagcccccaaagaaaggggcaacaaaaacaagggcctcgacaaagggcaaaaagaattggaactttttggtaccatatccaactgggacaaacttgggtgccccccaaaacaaccctttccat

SEQ ID NO: 148130 - DNA, 265 bp, Zea mays
  Clone ID: MRT4577_66623C.1
agcacaagccaccctatgctcactggctaccccctgattgacatagcagtggtgatagggcagcgtgcaaacaacttcctaaggcactcctgtgaggcgaccatgccggacggcagggctgaatcgtgagcctatgcggctgacattgcagagataatacatgcccgacgataattatagggagtgggtgcacagggcatggccctggcagcctgggccagcaccagggaaggcactggggccagaggtccttgtcgaccatggg

SEQ ID NO: 148131 - DNA, 726 bp, Zea mays
  Clone ID: MRT4577_66624C.1
gccgggggcgcgtccggaaggtcgccggcgtcggcacagccgtggcgggcaaggtccagcaggccacgcagtcggccggcacggcgacgcccggggtcggcgcgcagcgggacacgggtgccgccgccacggccacccccggcgccggcgagcaggacaagggggtgaccgtcacggggtacatcgccgagaagctccggccgggcgacgaggaccgcgcgctgagcgaggcgatctccggcgcagtgcagcggcgcaaggacgacgctgggggcacggtagcgcagcgcgtgccggcgcccggccaggccgtcgcgtcgctcaccggcgggaaccgggtctccgagaccgtacagccaaccacaaccacaggggaagacgtgaaggaagggtatgcggcggaggcgcccgtgacccgcgggaaggagatcggcggcgcgaagctgaacacgaatgccatctgaagtgatacgcaagaggagagcacggctgctctctgattactgtgtcaggtttgtgtacacgtggatgatgtgggttgtgctgtggagtagcagctggaataaacgtgctggttgtgttcgacgtggtacgttttgggttttacgtggtggtgtgatcgtgtatccacatgttttcttactcgtgtatgtattccgtttgtatatgttgagtattgttctgtttttgttgcgttcgtacagtcgcattctaaatcatatactc

SEQ ID NO: 148132 - DNA, 154 bp, Zea mays
  Clone ID: MRT4577_66625C.1
cttgcttgtgtctttctgttttgttggttaaaatgatggctgccaacagacgttctgataagtggtgcacccaacccttgagacaagacctccgacaaaggagctgatacgtgccgttttgactgctctgaggtgtttcgacttagaatgctga

SEQ ID NO: 148133 - DNA, 2420 bp, Zea mays
  Clone ID: MRT4577_66626C.1
ggccggttgagctgtggcctcggccgccgttgtgtccgtctgggtctctcggactgtgtgcttggtcgtttgccaccccctgtggccttgtcccttgaattcgaaccccgcctcctgcttcccgatttcaaatagctggcccgcggtgcctgcagtgcagcactgcactgcacgcctccgccatactgcgacgccgccgtgcatcgcttcacgcagagcagtgatggaatcccatcacggcggcgacgggaaggcgcgggacaagttctcggtgtaccagaacccgtccctcacccgcgccctagactcccgcagcgcccgcccctccgtcacagtcctcctcgtcctcgcggtcatatccgtcgcctccgcatcctccttcctcgccctcacctcccgggaggagcagctcaccaagctcgccggacgagcgggtatctctgtccttgctgctgtttttgtcattaggttggtggaagcagcactcggtcttgttgcacttttcacactgctggggttcttcagggcactgatgttatacaatgggcagaaggcactggccaaggccgacaaggttgtcttgtctgatcgccaactggggcttcttgggttaaagatggcaggttcagaaggaggtgggaaaggtgagcaaatcaaaaggcctcccaagaccaagccatcaacaccatcggaaccaattgtgcctatcaggaggtcttcgttcagctatacaccatctcggccttcggggcaatctaggattggttccagccatttgagccctggtggtgagagactgatcatggcattgccaatgtcaccctccacaccattgcagaagcatgtctcttctccttcaactccatggtcaaggaaaagctcaggcagtgccaagggcatacagacagaggcaatgctggaccagttcttggctggcttggatgtaaacattgacaaaatcatggatccagagactaagactacaacacctccagcaaccattacaagctttggtgttgctacccctgtttcaattaccacatcgaccaccccttctggtgctgcaaggagcacacctctgagacctgtgaggatgtctcctggctcccatcagaaatacagcacgccaccaaaaaagggtgagggtgaacttccaactccaatgtccttagagcaagcagtggaggcctttgagaacttgggtgtatatcctgagattgagcagtggcgagatagtctcaggcagtggttttcttcagttgtgatgaacccacttgtacaaaaaatcaaaacaagccatactcaggttaagcaaacaacagctactgttggggcttcagttactgttagccaagttggaagtgatctgccaagcacaacaccaccagttgccttgtctcctcttggtgggactaaagattggcaaccgactgtcacggtagatgaggatgggatccttaaccaattgcactctgcactcctacattctcgagatgcccctgttgcgcaaacttttggcagtctacaacagccacaacggaacccccaccttccagctattcaagcatgtattgatgcaatcacagagcatcagaggctcaacactctgatgaagggagagctgataaaaggcttgttgccacagagtagtgtccgtgctgattacactgtccagagagttcaagaactcgctgaaggaacatgcttgaagaattatgattacatgggtcatggaaatgactatggtaaatcagaaaagaaatggaccaccgagctacctactgactcacaccttcttctgtatctgtttgctgctttccttgaacatccaaaatggatgcttcatgttgaccctacctcgtactctggttcccagtccagcaaaaatcccttatttctgggagttcttccaccaaaagagaggttcccagaaaagtatgttgctctgatatcaggtgttccagcaattattcacccaggggctcttatactggctgtgagcaagcagaatcctccaatttttgctctatactgggacaagaagcagcaattttctcttcagggaagaacagctctgtgggatgccattctacttttatgtcaccaaataaacgttgggtatggcggtgtggttagaggaatccatatcggttcgtctgccttgaatctcctgtcagttatagattcagattcagaaagctgaaagttagtttggtagtcttgaggggatgaattatgtcaagctagtttactggtgttaatgttgtaatttacactagcatgtttggaattgacatagctttatctagctgtaatatgccctgtggtaccttggatttgtgactatattattattgttctttgaatccttcattaatgtaccggtcacttctccttaaaaaaaaaaaaaagggcggccg

SEQ ID NO: 148134 - DNA, 164 bp, Zea mays
  Clone ID: MRT4577_66627C.1
ggcaaaaaaaaccctttcaaccttggttttaaaaggggcaacaagggcgttgcgccccagggttaaagattggctcagggccggcacccgtggggcccatggaccccctttttgggccgcaggacaaatatggccccccttttgccccctttttataatgggtt

SEQ ID NO: 148135 - DNA, 147 bp, Zea mays
  Clone ID: MRT4577_66628C.1
cattgggtacctcgaggccggccgggaactccttcccacaattaattatctgacccggcatcgtatgaccatgacactcctggattgtgacatggcccctggagattctagaatcaaacacctctcgcgtgcgtggtctctccctcg

SEQ ID NO: 148136 - DNA, 382 bp, Zea mays
  Clone ID: MRT4577_66629C.1
cactccctgagaacgttcatctgctggggcttgtctcagccaccgacgctgagctctgtcatacttgtagcaggcgccaactgcctgccgctctggctcgctgctgcccggccacagcactcgacgcccctggtggtttggcctcatctcacttgcgtgtgtgcgacgctgcgcccaggagcacgcgggtgcctggtcgaccaggccgtgatcttgcaaaacctcgcagtgcctgcagttgttgcacagccgggctcaaaccataccttactccttcgaccttgtcgagctctgtcaccagcctcccaacgacaacaggacgcaaacctagagctaccccatggcgcaggcccaaccagcggaccctaacctgacgcaccgc

SEQ ID NO: 148137 - DNA, 439 bp, Zea mays
  Clone ID: MRT4577_6662C.1
gccacccctgaggaggcgggcgccgccgcttctcattcattgtcttgacaagagcatcctgcgcggacggtctcaggctccgccggctccttcctcctcctcctcctcgccctcctccgtctggggggtcgctcatctctcagccgcaggatgagccggcaggtggtccgttccagcaagttccgccacgtgtttggacagccggccaaggctgaccagtgctatgaggatgtgcgcgtctcacagaacacctgggatagtggcttctgtgctgtcaaccccaaattcgtggccctgatctgtgaggccagtgggggaggggccttcctggtgctgcccctgggcaagactggccgtgtagacaagaatgtgcctatggtctgtggccacacggccccggtgctggacatcgcctggtgcccacacaatgataacgtca

SEQ ID NO: 148138 - DNA, 427 bp, Zea mays
  Clone ID: MRT4577_66630C.1
cgtcgagcacttggcactgccaatggcggcagccgcccacaccccttcgatgcgcgcaagccgcctcctttcctcctgagatcgacgcacctcctcctctcgtactccgcgtgcttgtctgcggcttgcgacgcagaagagtacaagcagaagcattgctgccccggcggaagcggcgctgggggcggcgtcatgctcggcctgcgccgccgcctcggcgcgcggcgtcgcggcttggcgcgctctggaatggctatggctgttgccttacaagctgaaagaagtgtcattgaaaagaagaaacccgatatcaaacaaaggagggtggttgtcactggcatgggtgtagtgacaccattgggccatgatcccgacgtcttttacaacaatcttcttgatggtgttagcggaataagtgagatagaga

SEQ ID NO: 148139 - DNA, 2421 bp, Zea mays
  Clone ID: MRT4577_66631C.1
gattaaaggccgaacagggtcgccatttacatatctttaactcggttatgaacagcaggaaacagaaacaaccaaagcgaaaacgtccagtgatgcttacagtgggaaccagcaattcatggctaataacgatactgttggcaacaacaatacaacataagatcccatcacctccgcagggaagaggattaagctacgggactacaccaaatgtaggaaatagtactgacaatgggcaggtatggtgaaggcgaaaacactggcccaggtacggtaagttctttgatagttaccatatatattttgcaactttgtgatagtagatgaaacatgtaggggggctgatgttttgttcgctcaaatgtgtgtggcatagtattgtacgaccttcactttggacctccatatgcagtatgtgtggcacggaggaagttgcagaatccaccagatttctatgtggagttccagatatatgaagccatttgcgcgatgaggaagatgtcggttcttcgcctcggtcatgttcacttaaagggggcaaagagaatcgatgagttgtgcccaccgaatccgaatgagttggacaacgccaccttcacttcacatctctccttatgtgaccctaccaagacgcccacgtccacggtgtcctctggattttctaaattcaaatttggatggacccaaccagttcttatagcttgtatagaagcaactgcttctattccaccagctgctcctataagatgcccagtcattgatttggtcgagttcaccctcagttgagggttctggcgaaaacagcgcacgatagcctcatactccttcaagtcacctgcttgtgtagatgttgcatgggcattcacgtagttgatttcttcccttgctacccctgcatcagctagtgccttttcgatgcagagagtaatccctcttccttcaggatgtggctcagtcatgtggtaagcatcacatgtgaagcttccaccaagaaattcagcatatattgttgcacctctttcataaattgcatgtttaaaaccttggcatgctcaagttcttccaatacgaggacaccagccccttcccccataacaaaaccatcacggcccatgtcccaaggccgagaagctttcgttgggtcactgttcctctgtgaaagagctctgcatgccacaaaacctcccaatccgattgggataagaggtgcatcagaaccaccgcagagcataacgtcagcttcgcctcttctgatgtagtttgctgcgttaaggatacagaagttactggtagcacaggctgtggaaatagaataatttggtcccatccatcccagatccattgcaaggatcgcagagcccatattggtagttgcaaaaggaacacaaaatgggttcattttcttgtaagagaccctcagtgcttcaattgcatcattaaaaaccttcatgccgcccattgcagaaccaatgaggaccccgcacctggttttgtccaactcattcctcagttcttcagtgagtccaccattttctaatgccttctttccagcagttatcagatatagcataaacttgtccatccgctttgcaagtttaggtacaacccaaccatcagtagagaaggattttatctctcctgcaattctcgtggggaagttggaacagtcaaacctctcaatctcacttattccgctaacaccatcaagaagattgttgtaaaacacgtcaggatcatggcccaatggtgtcactacacccatgccagtgacaaccaccctcctttgtttgatatcgggtttcttcttttcaatgacacttctttcagcttgtaaggcaacagccatagtcattccagagcgcgccaagccgcgacgccgcgcgccgaggcggcggcgctggccgagcatgacaccgcccccagcgcggcttccgcctgcgcagaaatgcttctgcttgtgctcttcagcgtcgcatgccgcagataagcacgcggcgacgagccacgtgcagagtgggcctgccacggccgccattgcccccctcccctccggttgtgtggacgccgcccctcccacccaccgcctgatggatctcttccaccctacggagccgcacgagggactcgtatttcgcgtagtgggcaccggtggacagtggtgcgcccctgtcgaagaacggcggaggccaaagaccttaaagcacgacgagatgcggaggcgaccgcgcgacggctcgggggcgaagaaacgaaggacgagcgggaatgaagcacgagagggggaggtgcgtcgatctcacggggaaagaaggtggcttgcgcgcatcgaaggggtgtgggcgggagccgccattggcagtgccaagtgctcgacgggaggagtggagggacagggaccccggccggcctcgaggtacccaa

SEQ ID NO: 148140 - DNA, 1043 bp, Zea mays
  Clone ID: MRT4577_66632C.1
caggaattcggcacgagggcacatcgccttacccatttcatcttaagatttcttagaggtgcatctcatgagcttaactggaatatcagcttcaaaataatacaaggaatttgtcatggtttacagttcttacatgaatcgcaaagacccataattcacatggatctcaaacctggcaatatattgttggatgataacttaatgcccaaaattgccgattttggtttatcaaggctctttggcgaagagcaaacacgtgcacccacaacatttgaagtgagatcaagagggtacatggctccagaatattactacagaggtgaagtctcaaccaaatcagatatatacagtctgggcatccttataatcgagatagtaacagggttaaaagtcgattctaacactgtagacttatcgtctaagaaccttatcgacaatgtacaaaggatttggacaaaaatgccacagatagcttctaagtacccgacgttggaagcaagcaacctccaacaagttaaaagatgcattgatgctgggttaaattgtgtgagcgaaaaaccaagagaaaggccttccgcaggggaaattatcaagcagcttaacggaagcagctttccatctcgcaactagatgcttagggcctttggtctttttctagtttctgaccactaaaagctgatgcggaccgtcaatcgccctggcttttcaatcactttttatgagaatcgtttcagtaaaaaccatctaaaattaacataaacacataaccgattaagtcgtcacaatagtaggaatatgtcactttctagattatgaactctttggaccacttcattttcttccatacgtgatctctacgatacttagattctcttcacaaccagattctttctgcagccagattctcaaaaaagctggtcagaaaaaaatgaaccaaataggccttagatcttgatctaaatcaaattcttagggcaaattttgtaaccctatttttctaatagatttctattttactaaggcttcgtttgtttcgttggaat

SEQ ID NO: 148141 - DNA, 227 bp, Zea mays
  Clone ID: MRT4577_66633C.1
gtggtcgttgcattgatcgtggatggtgacgcgagcaagtcgacgcggcggcgtaagcagccgtcatgtatggtcggtccggtccggtcgttgggtggttcagactcacgcgtggtggggggaggtttctcgtggctgggctgggctgggctggcggcgtgcgccaccttgtgtctctgtgtgtggacgccggtatgccttttgctttggcgtggccgtggtgtggt

SEQ ID NO: 148142 - DNA, 477 bp, Zea mays
  Clone ID: MRT4577_66634C.1
cccacgcgtccgaaaaaaaaaaaaaaaaaaaaaaaaaaaaaataaaaaaaaaaaaaaaaaaaaaaaaaaaaaaaggatataaagaagatttttttaagggggcggccgttcttgaggatccaagttttcgtccccgtgctggctgcgttataatctttcttttggggtgcctatctcttatttttcgcccgctgttttacaaccttgcgattgggaattccctggcgtttcccaattaaatggctttggcgcacatccccttttccccatatggcgttatttttaaggggcccgggccgttcgccctttccaatcgtttctcgccctgaatggggttggggcccccccctgttgcggttcttttggcccggcgggtgggggggtttccccctgtgggaccgcttccctttgctccgccctaacgccctttccttttctttcttcccttccttttttcccccgtttgccgggtttccc

SEQ ID NO: 148143 - DNA, 943 bp, Zea mays
  unsure (1)..(943): unsure at all n locations
  Clone ID: MRT4577_66635C.1
gccggccggggttagtgctgcctgtccgtgccagtcgtttcccgggggcgctagattcagatccatgccgcacgcttctccattcctgtaagctcctgcgcctcctcctcgttgcttcactccaaatccaccgaggccaccgcccgggcccgggggaacccctagcgccgccgccggctcgggcgccctctcgcgcgcgcgtgcgtcgctccgacagcagctgcagccatggcgcagccgctcgtcgtgaagaaggacgacgacctcgacgaggaagagtactactcgccattcctgggcatagagaagggcgccgtgctgcaggaggcccgcgtcttccacgaccctcagcttgacgctcgtcgatgctgccaggttatcaccaaactcctgtacctgctcaaccagggtgacacctttaccaaggttgaggctacagaggtcttctttgcaacaaccaagctgttccagtctaaagatgtgggccttaggaggatggtgtacctcatgatcaaggaactctcaccttccgccgatgaggtcatcatagtaacaagctctttgatgaaggacatgaatagcaaaaccgatatgtaccgtgcaaacgctattagagttctttgtcgtattatcgactcaactcttctcacccaaatcgagaggtatttgaagcaagccattgttgacaagaatcctgttgttgccagtgcagcccttgttagtggcatctacttgcttcaaacaagtccgggaagttgtaaaaagatggagcaatgaagttcaagagctgtgcagtcaagagctgctcttgtgcagtttcatgcccttgctctccttcaccaaattagacaaaatgatcggctggctgtcagtaaacttgtcactagcttgaccagggggttcagnttcgctctccttttggcccagtgccctacttattcgc

SEQ ID NO: 148144 - DNA, 2287 bp, Zea mays
  Clone ID: MRT4577_66636C.1
caactcagttatgaacagcagaaaaacagccaaagcgataaacatccagcggtgcttacagtggaaccagcaattcatggctaagaacgacattgttgacaacatcaatacaacataaaatcccatcacctccgcaggggaagaggattagctacgggactactccaaatctaggaaatagtactgacaatgggcaggtatggtgaaggcgaaaacactggcccaggtacggtaaatccttttgatagttaccacatatctgcaacttcgtgatatagatgaaacatgtaggggggctgatgttttgttcgctcagatacgctcagtttggacctccctgtaatatctatggcaccgaggaagttgcagagtccacttgtcttctatgtggagatccagatatatgaatctatttggacgatgaggaagatggcagttccttaaagggggcaaagagaattgatgagttgtgcccaccgaagccgaatgagttggataacgccaccttcacctcacatctctccttctgtgatcctaccaagatgcccacatccacagtgtcctcaggattttctaaattcaaatttggatggacccaaccagttcttatagcttgtatagaagcaactgcttctattccaccagctgctcctataagatgcccagtcattgatttggtcgagttcaccctcagttgagggttctggcgaaaacagcgcacaatagcctcatactccttcaggtcacctgcttgtgtagaagttgcatgggcattcacgtagttgatttcttcccttgctacccctgcatcagctagtgccttttctatgcagagagtaatccctcttccttcaggatgtggctcagtcatatggtaagcatcacatgtgaagcttccaccaagaaattcagcatatattgttgcacctctttccttggcgtgctcaagttcttccaatacgaggacaccagccccttcccccataacaaaaccatcacggcccatgtcccaaggtcgagaagcttttgttgggtcactgttcctctgtgaaagtgctctgcaggccacaaaacctcccaatccgattgggataagaggtgcatcagaaccaccgcagagcataacgtcagcttcgcctcttctgatgtggtttgctgcgttaaggatacagaagttactggtagcacaggctgtggaaatagaataatttggtcccatccatcccagatccattgcaaggattgcagagcccatattggtagttgcaaaaggaacacaaaatgggttcattttcttgtaagagaccctcagtgcttcaattgcatcattaaaaaccttcatgccgcccattgcagaaccaatgaggaccccgcacctggttttgtccaactcgttcctcagttcttcagtgagtccaccattttctaatgctttctttccagcagttatcagatatagcataaacttgtccatccgctttgcaagtttaggtacaacccaaccatcagtggaaaaggattttatctctcctgcaattctcgtggggaagttggaacagtcaaacctctctatctcacttattccgctaacaccatcaagaagattgttgtaaaagacgtcgggatcatggcccaatggtgtcactacacccatgccagtgacaaccaccctcctttgtttgatatcgggtttcttcttttcaatgacacttctttcagcttgtaaggcaacagccatagccattccagagcgcgccaagccgcgacgccgcgcgccgaggcggcggcgctggccgagcatgacgccgcccccagcgccgcttccgccggggcagcaatgcttatgcttgtactcttctgcgtcgcaagccgcagacaagcacgcggcgacgagccacgtgcagagtgggcctgccacggccgccattgcccgccccctcagttgtacgggcgcctcctaccgctcaccgcctgatggatctcttccaccctacggagctgcacgagggactcggatttcgcggagtgggcaccggggcgcgcccctgtcgaagaacggcggaggccaaggacctgagagcaggacgagatgcgggggcggccgtgcgatggctcggtgccgaagaaacaaacttggagcgggaatggagtacgagaggaggaggtgcgtcgatctcaggaggaaaggaggcggcttgcgcgcatcgaaggggtgtgggcggctgccgccattggcagtgccaagtgctcgacctcgtgccgctcgtgccgctggtgccgctcgtgc

SEQ ID NO: 148145 - DNA, 1881 bp, Zea mays
  Clone ID: MRT4577_66637C.1
ctcgagccgcacaactacaagacccacacacccgtcggtaaatgcaaagatcgcaagtccacggcccaccccccaaatcggccaatctccacttcttaagctccctgtcgcctccgcctcctcgtcgtccggcctcccgcgccaccaccggggcctcgccgccacgaatggagtacgagcgcatccacgagccactcccgcgccgtcagtccggcggattctccccagctaagctgcgagcgatgcttcgcgggctagagaaacaccagcgcaacagcggcgaggacacgtcgccggaggccaacgactccggcgagctcgacgaccggaggagcttggaatgctccacctccaccgagatgtcgagcaacagcggccacaggtcaaggaaccgggccccggacgacgacagcttcgactcggagagcagctcgtcggggccgcccacggtgaagaggtcggccgcggtggccgctttgctgccgcccttctctcggccaacgccgtccaagtgggacgacgccgagaagtggatttccagccccacgtccaaccgtactggccgtgccgggcctaccgctggaactatgccaaagaagtccgcattggcatttcctgaacatggagcccgccagccagccgttgctaaggtggtcacggatgtgcctactatcgctggaccattggttaagaattcagatggtctcgcccatcctgatttgcttaaacctgcacacgatgcttcaatagttgatggaccagctcctgcagttaggtctgtctctatgagagacatggggaccgagatgactccaattgccagccaggagccttctcggaccgcgactcctatgattgcatccagtccaacctcctctcggacaccaactcctcaacgcaccacagaattcagtgtgagcaatatagattctaacaagatggcgatgtctgaagaggaggtccatataagtacaagacaggaaattatggatcttggcgaaaggttaggcaagactactatagctgcatgggcaagcaaggaggagaaagctgctgcacgttccacggatactgcagccgataatgctgttgatgtcaacagggagaatcgagcggcagattggcaggaggcagagaaggcaaagtatcttgcaaggtttcatagggaggaggcaaagatccaagcttgggaaaatctccagaaagcgaaaattgaagctgaaatgaaaaggatagaggccaagatcgagcggaaacgggcgcgcgagcaagacaggctcgccagcaaactggcagcggtgagccaccgagcggaggcgaagagggaggccgcggaggcgaggcgggaccaggaagccgcgagaacggaggagcaggcggctcagatccgagaaaccgggcacacgccttcctccttctcatgctggtgctggtgcctgtgactctggttccttcactgcatgaccagcacagcacgtcacccaactgtaacatagcatgacccgtgagactgatctccggccatggtagaaaaatttgctcactgtacgacttgtgtagttccttggtctaatggtgtccagttttttggtgcctcgcggttggcggcccggatccgatacaccgggcatacgccttcgtccttctcctgctggtgctggtgcccgtgacacccagcatggacagtggtagaaaaattccaacggttctatctttccccatgcatgaacatggagaaggaaaccttcccgttatcgcgtcgtcgtcactcacgcggttgcatggagtggactggggtagtagggtggcgccacctgtcctcgtccaccttccacccctctcgcccggggctataaatggttacgagatccggatagcgcg

SEQ ID NO: 148146 - DNA, 205 bp, Zea mays
  Clone ID: MRT4577_66638C.1
acttacgggtggaacataaatttaaacatggattttgtatattaatcccacgccctaaataacaatgtcctgaattacactttaatttgtgcaagcacctgatggatagaccgtctattgtatctgggccctaaaaaccattttctcgtatgaagggggggcgcgctccacgattgctggtctggtggtttttatagccacccca

SEQ ID NO: 148147 - DNA, 1611 bp, Zea mays
  Clone ID: MRT4577_66639C.1
cattgggtacctcgaggccggccggggaagatctcaagtccacggcccaccccccaaatcggccaatctccacttcttaagcctccctgttgcctcgcacggcctccgcctcctcgtcgtccggcctcccgcgccaccaccggggcctcgccgccacgaatggagtacgagcgcatccacgagccgctcccgcgccgtcagtccggcggattctccccagctaagctgcgagcgatgcttcgcgggctagagaaacgccagcgcaacagcggcgaggacacgtcgccggaggccaacgactccggcgagctcgacgaccggaggagcttggaatgctccacctccaccgagatgtcgagcaacagcggccacaggtcaaggaaccgggccccggacgacgacagcttcgactcggagagcagctcgtcggggccgccgacggtgaagaggtcggccgcggtggccgctttgctgccgcccttctctcgcccaacgccgtccaagtgggacgacgccgagaagtggatctccagccccacgtcaaaccgtactggccgtgcggggcctaccgctggagctgtgccaaagaagtctgcattggccttccctgactatggaggccgcccgccagccgttgctaaagtggtagcgggatgtgcctaccaacgctggaccagatgtgggtttatattttcaggtctcgcccatcctgatttacttaaggctggacacaatgcttcagtagttgttgacggagcagcacctgcagttaggtctgtctgtatgagagacatgggaacagaaatgactccaattgcgagccaagagccttctcggaccgcgactcctataatcgcatctagtccaacctcctctcggacaccaaccccgcaacgcaccgcagaattcagtgtgagtaatatagatcctaacaagatcgagatgcctgaagaggaggtacagatgagtacgagacaggaaattatggatcttggtgaaaggttagggaagaccactatagccgcatgggcaagcaaggaagagaaatccgctgcacgtttcacggataccacagcctacaaggctgtcgatatcggcagggagactcgagctgcagattggcaggaggcggagaaggccaggtatcttgcaaggtttcagagggaggaagcaaagatccaagcttgggaaaatctgcagaaagcgaaaattgaagctgagatgaaagggatagaggccaagatagagcggaaacgggcgcgcgagcaggacaggctcgccagcaagctggcagccgtaagccaccgagcggaggcgaagagggaggccgcggaggcgaggcggaaccaggaagccgcgaggacggaggagcaggcggcccggatccgatacaccgggcatacgccttcgtccttctcctgctggtgctggtgcccgtgattttgacggatattttccgccaagtcacccagcatggacagtggtagaaaaattccaacggttctttctttccccatgcatgaacatggagaaggaaaccttcccgttaaaaaaaaaaaaaaaaaaaaaaaaaaaaaaaaaaaaaacaaaaaaaaaaaaaaaaaagcggcc

SEQ ID NO: 148148 - DNA, 1143 bp, Zea mays
  Clone ID: MRT4577_6663C.1
gagctgtattgtatcgacagcgtcatacccacgtggtgccgctgctgagcgtggcgggccgggagagcgagaacggagtggggaagatggagacggtgaagagccttctgaagccaaagccgacgccgcagcagcagctgcgcgagtggcagcgccgcctccgcaacgagggccgcaacatcgaccggcagatccgagatgtgcagagggaggagaagaaggtggagaaggccatcagggaggccgccaagcgcaacgacatgggatccgccaaggcgctggccaaggaggtggtgcgctcgaggaaggcagtcaaccgcctgtacgagaacaaggcccagctcaactccatctccatgcaccttggcgaaatcgttgctactgctaggacagtaggccacttgtccaagagcactgaagtgatgaaacttgtcaacagcctcatgaaagccccggaggttgcagccacaatgcaggaattcagcaaagagatgacaaaggctggtgtgatggaagaaatggtcaacgatgctttagattcaactctggacagcgaggacatggaggaggaaattgaagaggaggttgacaaggtcctcactgcaatcgctggggagaccgcctctgagctcccggatgctgtcaggaaggaaaaggagaagatgaagcagccttcaacaagtgtacctgcggagagaactgctatagcagaggctgttgatgacggtgagctagaccagataagggaaaggcttgccagagtgaggtcatagaagatagctgaacaaggtcagatcattgaggtgttacggcacatgacatctcacttgataatgtatacacgtatcacacacaatcactgtgattagcagaccgatttccccacatccagcaatatgtgattttgtccaggccctgttgtaacctgtatgggtcatgatttctaatatatatcacgtattatatgtttggaagcaccgtttttaatactctgaataatccatacatttcattgcactgcgacgaagtggaaagagaagagaagtggatggcacagtacatgacaccttcccagcactgatactgtaaactttgtacctcacttattacgtacttattattataaaatgtttttcttttttt

SEQ ID NO: 148149 - DNA, 530 bp, Zea mays
  unsure (1)..(530): unsure at all n locations
  Clone ID: MRT4577_66640C.1
ttnttttttttttttttttttttttttttttttttttttttttttttttttttttttttttttttttttttttttttttacgggtttcacccctggggggtaacaacacacggcacaaccaaacaaggttccaacaaaacaaattggggaccttttccgggggagcccacctgaaacaacaagaaaacgaccccgggccaagggcggcgggaactggaccgaaccaacaaggaacccggaggtttcaaaccatacaaaaaagggggggcacccaacacaaggaaaccccctaagctggaaaaacggacccgccaggcaatcaagcaggaaaaggggtgaccccaaaggcgaaagcttgccatccgctttgagggggggcaaaaaccgggaaggtacaaatggggggggaccggccctaaaggccgctggtcaaacaattaagggaaaaaccggagcaggaaccccaactgctgctgaaaaaaggcccaaacccgatgccttttccgtccggccaccccaaaaccgccccg

SEQ ID NO: 148150 - DNA, 1027 bp, Zea mays
  Clone ID: MRT4577_66641C.1
ccggccccgggctaaaatactgaaaacccggtgcaagttcatgcatagcagtcaaagtgcaagatatgcgcattcactacccaccgattatctgccgaacacgcagcgacagatggaggaattctttttgtctcgcgaaacaggggcggaaggatccaatccaatccaaccaaacctctccccccaccacctgctgcaatcgctagcgtgcgcataaattaacaaatcccacctccactaatcgcaccacccggtaattgcaaacatcgcaagtccacggcccgcccccaatcggccaatcctcaccccgcatcttaaggttcctgtcgcctcagcggctgcctccagtcctccgccctcccgctccagcggggctcgccattgatggagtacgagcgcatccacgggccgctcccgcgccatcagtccgggggattctctccagctaagttgcgagcaatgcttcgcgggatagagaaacgccagcgcaacaacggcgaggactcttctccggaggccaacgactccggcgagctcgacgaccggaggagcttggaatgctccacctccaccgagatgtcgagcaacagcggccacaggtcaagaaaccgtgccccggacgacgacagcttcgactcggagagcagctcgtcggggccgccgacggtgaagaggtcggccgcggtggccgcgttgctgccgcccttctctcggccaacgccgtccaagtgggacgacgccgagaagtggatctccagcccaacgtcaaaccgtactggccgtgcggggcctaccgctggagctgtgccaaagaagtctgcattggccttccctgaccatggaggccgcccgccagccgttgctaaggtggtagcggatgtgcctaccaacgctggaccagatgtctcgcccatggtctcgaccatcctgatttacttaagcctgggacacatgcttcagtagttggtgacggaacagcacctgcagttaggtctgtctgtatgagagacatggggacggaaatgac

SEQ ID NO: 148151 - DNA, 502 bp, Zea mays
  Clone ID: MRT4577_66642C.1
gtatttatctgtaatgtctataagtaccgcaacggtagtcgttagaactctcccttttatgttatgtccaattctgtcgccctataaacgaggcaaagtgtgcattgattaatataaacggaggcaatgtagaaacaatagtagcacctaatataaacagaggcatttttacaactttgttctgaacgtgaacgtcttgaatccggcacaggttttaggcattcctttgcgtgctacactggcatgcaacagcaacatgctgtacaggtggtgcactccattagtttttatggcaacgacaatcaatttttttttaaatgacaattattcttggatagtagatatcttgtatacatttgtttagtttgttgccttttcttttctcctaaacattttaattaatcactaattacttagttattgcaagcacttcaaaaatgaagggccaaaatttatttgagatattaccaactatgaggtaagggagtaccttagcaagaat

SEQ ID NO: 148152 - DNA, 415 bp, Zea mays
  Clone ID: MRT4577_66643C.1
aaaaattttagtggagactccagtgaggcttcatgggctcggcagcggtagagggtgttgagtttgtgatctaaattctgcatatggagccccccgtggtatatattagtgaccctaattagggtttgctgtgcatcgtctttttttactcctcttgtaagccatcgtctatgaacaacgttctgtaaacactccacatatagtggaggtttcgcttggctggtaccgtggtttttcccttcacattgaagggttttccacgtaaatctatgtgtcgtgctctgtgaaatgttggttgatctacttcgtttttcctgtcatttctgctaacagagggggctcaagccccacccaccccaccattggctccgtccctgcctcaacatttttttttaaaaaaataatagggtgacta

SEQ ID NO: 148153 - DNA, 205 bp, Zea mays
  Clone ID: MRT4577_66644C.1
ttttttttttttttttttttttttttttttttttgggggtttttttaatgttagggagcgtcaaacaaccgacagggaaaatagcgaatttgctcaacgaaatcaactttgttcaatatctccaagaacggcggaagcaactgtttgcagacaccgggcaaacaactgaagggaaaagagggtggcctaaaaccctggaacaacg

SEQ ID NO: 148154 - DNA, 168 bp, Zea mays
  Clone ID: MRT4577_66645C.1
ttttggaccaaatccgactaactaaggggggggtctataaaaaaaattggggggaatacaaaactagggactccatatagaatgactggttctataatttctcttgcgtgacagccggtctcccaatgctcaaggaatctttttactccaagactttaaatatcgaaa

SEQ ID NO: 148155 - DNA, 484 bp, Zea mays
  Clone ID: MRT4577_66646C.1
aaaaaaacctttacggggtggcttttccaacaaaacgggggaaaaaccagacccaaaattttgggaccccaaacttttaaaccggaaaattctttgggggccccaaaggcctgctttttttggccccaaaagccaccggtttggttccaaacctcacttttttggtttttttggccccccaaaaaaaggaactggggcttccaaaggggcttttggtttttttgggccctgggcccacctttcctcccttctaagaaattttctttcaagggttggcttggtttttggacccctggccccaaactggactgaaaggggtttttttttggccctttcaaccttggacctggggataccctccaaaaagaccctgggccggaccccccttagggggaattccaacccactggggggccgtaccaggggaacccagcccgggaccaaacttgggggaaacaagggcaaaagcggttcctgggggaaa

SEQ ID NO: 148156 - DNA, 268 bp, Zea mays
  unsure (1)..(268): unsure at all n locations
  Clone ID: MRT4577_66647C.1
aaacacaagccaagccgaaaccatgggaacactgatcgttttggcaacaaaagactattttgtgcagattaatcacacggaaagagtttaagaaaacaacttgggcagtgtttggagatgtancacacaaacacatgcgtttccatttccaattttccatacaatacaagggtggaagacaaacgaatgaagtttggggcaggggaacttttaaaagggtgaggcccgggggaaacaaaaacccacaaaagcctttctttcccgggag

SEQ ID NO: 148157 - DNA, 307 bp, Zea mays
  Clone ID: MRT4577_66648C.1
ctggccacgcgtcccccgtcggactcaccctggatgagctggacatcccgaatgattcgcagcggcagatcggcgtgatcgacggcaacagcacgcacctcggcatagggtcctaccgcgagtagccccatgacaagaggcaggcagtagctgctgtcggagctacgaggcgaacgcccggtggtgcccccggaccttccgcagagcgacgagatcgccgacgtcatcggcgcgttccacgtcctcgcggagctcccgcccgacagcttcggcccctacatcatctccatggcgacgccccctcaga

SEQ ID NO: 148158 - DNA, 601 bp, Zea mays
  Clone ID: MRT4577_66649C.1
cattggtacctcgagccggcgggaactctccaaaccgagctaacaatccgcgatgtctcctatcgagggttgtctcactccgatacctccaagcctgactgctttcagcgttctccgattgcctgccgtggaccgacgatctgtcccgtacgatcacaccagggcctcagtgcattatcaatccagatcagcccgcttgtaatacttcccttcttggccgattgaaaaataggattgcctccagcctggtgttccggtagaggtccatacgcccacagaagacattttgctgctactctgtgacgttctaccgagctgcttcaaggacagtgtcgctgctaacgatgggccgccgggtgattttgtttcgcttaaaaacattgccctagaagatccgtcgactgcgacctgccgacagctcttcaaacttgctcacctcttgatcgaccgagaggatgacgtaaagatgtttgaccgagtgaacaacaccattagaaatcgagtaggggtactatatggcgtagccgtaccagcgaagtagcggacgactgcatggtctgcccaggatacctctacatcgaccttggtgtgactcatgctc

SEQ ID NO: 148159 - DNA, 183 bp, Zea mays
  Clone ID: MRT4577_6664C.1
ttgtcgcgtgggcggtcacgccggtctacgacaaagacgtcgtgatacgaccggacttcgaggcgtcatgcatcacactattcatcaaccgacactatggcgcgctgagatcctggctactctgatcgtgaacagatcccttttggcgtgcttgtatcgtgtcggtgagatcatgtgatgaac

SEQ ID NO: 148160 - DNA, 498 bp, Zea mays
  unsure (1)..(498): unsure at all n locations
  Clone ID: MRT4577_66650C.1
naaccaaacgcgtagtcatcacctatctatagacagagagaggaaagctagctagctagcatggagagtggcagcaagaaggccgcagccggtgtgttggcgctgctgcttctccagctgatggtagcaccgacgacggcgacgtcccgcttgctgcagcaggcggatacctcccccttgtttggcctggacatcatcgcgagggagtttggccatccagatggaaccatcgtctgtagtgaatcctgtgtcttcctaccatgcgtttcgtcagtctttggttgccgatgcgaaaacaaagtctgcgtgcacgactgaagaaaccttcttcagtctctgatctttctctctcgtcatttgcgtgtgaagaaccagctccatctttgtaacgaatttgtgttgggagaaacagaaagacggtggtgttcaacttattgtgtatggtgatttaataataatatataataaacgggatacgttggatgtgtgtgcaccgcc

SEQ ID NO: 148161 - DNA, 562 bp, Zea mays
  Clone ID: MRT4577_66651C.1
atcacctatctagagagagagagagagagggaagagagaagagagagagagagagagagagagagagagagagagagaggaaagctagctagctagcatggagagtgccagcaagaaggtcgcagcctgtgcgttggcgctgctgcttctccagctgatggtagctccgacgacggcgacagcccgcctcctgcaggcggatacctcccccgtgtttggcctggacatcattgcgagggagtttggccatccagatggagccatctactgtggtgaatcctgtgtcctcataccatgcatttcgtcagtcattggttgccgatgcgaaaacaaagtctgcgtgcacgactgaagaaaccttcttcatctctgatctctctctctcgtcatttgcgtgccataagttgctgtttccatgacgacccgttatgtgtgaagaaccagctccatcttttgtaacaaatttgtgttgggagaaacagaaagacggtgtgttcaacttattgtgaaaggtgatttaataataatatataataaacgggatacgttggatgtgtgtgtc

SEQ ID NO: 148162 - DNA, 791 bp, Zea mays
  Clone ID: MRT4577_66652C.1
cgggcattgccgctcatatctagggacctacaccctatcccagaggagagagttgctgagaacttcaacgtgcaagaaaatcatgaagcagcaatttttactgattcagttgttgccttgactgggttgcatgtatttgaggagcactttgatgatggaactgacataactctaagctctgaagttgtttcctcatatcctcgagctaatggtgtcacccaatctccatcaagtgagcatgcagaaatcttgaatccatttgtttttatggctgctgaacataataaggtggatataagcgacatgcatggcgaagcaactgccggatatctacttgattctgatgatgaggctggtaaaatctatcctgagcctatggaaggcagtggaattgatgaaagtttcctgtctgaattggatgtggtgggagactttggagttgaaccgatgagactggaccagcaggtgacagatcaggcttctcatggtgataacactaccgatagtgttactgcagattctgttattagtcctcagacatctgacaatgtctccttgaccatgtcggaagttggtgctgaagaatccagggagcagtctccattggctgatgacctaaatggctccgaatttggctactcgtttggagcatctcatgatgaccctgagcagactgtctacaatcctcggagacggatccttgaagcaagcccctatgaagcaatgataatgaatgtggagatgaaactaccacatggtgagtcagaagtgcctgctgatgatacaccatc

SEQ ID NO: 148163 - DNA, 953 bp, Zea mays
  Clone ID: MRT4577_66653C.1
aattcggcacgagggcagcatgcagtggtcgtcgtagcagagatgtcctagctacgtgtgtgtcatgcatcagactggcacataataaagaagtagatcatgcacccactagtgatcacttcgtctagtgtccctccgttcaatgtcgtcgtcgtcgtcgtgtaccttacgtgacatgctgtggcacgtacgctagcttatcatcacctcaatgtccttgggtttgctttgctggctctctgttttcgtcttgagttgcttttaatctggcacaggtttctaaattataacaaagaatgaaaaaaataagccggcgggccgggagagcaaagcgtagtcatcacctatctatagagagagagaagagagaagagagagagaggaaatctagcatggagagtggcagcaagaaggtcgcagcctgtgtgttggcgctgctgcttctccagctgatggtagctccgacgacggcgacggcccgcttgctgcagcaggcggatacctcccccgtgtttggcctggacatcatcgcgagggagtttggccatccagatggagccgtcccctgttttgaatcctgtgtcttcgtaccatgcatttcgtcagtcgtgggatgccgatgcgaaaacaatgtctgcgtgaaataaactcgtgacgccgctgctacagtcgggacgaggccatatatctctgatcccgttacgtgtgaagaaccagctccatctttgtaacaaatttgtgttgggagaaacagaaagacggtggtgtttaacttattgtgaaaggtgatttaataataatatataataaacgggatacgttggatgtggtgcaaaaaaaaaaaaaaaaaaggcccctatcccccagggagggggggggggggggggggggggggggggggggggggggggggggggggggggggtggccgagggggggggcccggggtaccc

SEQ ID NO: 148164 - DNA, 173 bp, Zea mays
  Clone ID: MRT4577_66654C.1
ccttatctctatttccgatctcaaacttcatcaaatgctctatgccacttcttttataggaggaccatctattcttgctacagctgtagctctctatgcactttatgctacaatctatcctgtcacttatgacaaggatataggtgattataccctattctacccacgtctta

SEQ ID NO: 148165 - DNA, 960 bp, Zea mays
  Clone ID: MRT4577_66655C.1
tcgaggggctgcccgggtaaaaaaaaaaaaaaaaaaaaaaaaaaaaaaaaaaaaaaaaaaaaaaaaaaaaaaaaaaaaacactctcagcaacggatatctcgacgctggcagggatgaagaacgtagcaaacctgtgtctaggttgggagcaaagcaaagagagagaggaaagctagctagctagcatggagaagtgggcccctcggccggccgggccggggagagcaaagcgtagtcggtcatcacctgtgtctaggttgggagcaaagcaaagagagagagaggaaagctagctagctagcatggagagtgccagcaagaaggtcgcagccggtgtgttggcgctgctgcttctccagctgatggtagctccgacgacagcccgcctcctgcagcaggcggatacctcccccgtgttaggcctggacatcatggcgagggagtttggccatccagatggagccatcccctgtggtgaatcctgtgtcttcataccatgcgctacgtcagtctttggttgccgatgcgaaaacaaagtctgcgtgcacgactgaagaagccttcttcagtcgggacgagacgaggccatatctctgatctctgtctcgtcatttgcgtgctaagaaccagctcacaaatttgtgttgggagaaacagaaagacggtggtgttcaacttattgtgtacggtgatttaataataatatataataaacgggatacgttggatgtgtgtaccaaaaaaaaaaaaaaaaaaggcccctagggccaaaaaaaaaaaaaaaaaaaaaaaaaaaaaaaaaaaaaaaaaaaaaataaaaaaaaaaaacggcccctagggccgagcatagtcgatcatgaagggtggcaagaaggaagtggccggtgcgggggtggccatactgctggttctgcagctcatggaagctccaccgacggccatggccgcccgctcgccgc

SEQ ID NO: 148166 - DNA, 496 bp, Zea mays
  Clone ID: MRT4577_66656C.1
cctgccgagacgaatacacaaccacttcacaggagctgctagagggattgcatgctggccacacacacacagcgcaccacttggctagcctagcctatcttagtcagagaggaggatcaagaagggcgcgcacgcaagcatgcaagctagaagagagccgatcgaccgagagctagtacgcgatggcgaggtcttccaagatgatgggggcgtgagctctgctggccttgggccgtggccggtggacgtagatttgagaaacatcatgaccacgacgacggagaagaaggacgacgcggtggtgcaaccgcagaccttcccgccctttgaccgactggggggtggcgcgtccccggtgttcggcgggctccccggaggaagcattcctggcagcagcattcccgggttcagcatgcccggcagcggcagcagcctacccgggttcagcttgcccggcagcggcagcatgcccctcttcggcggcggatccccgggc

SEQ ID NO: 148167 - DNA, 234 bp, Zea mays
  Clone ID: MRT4577_66657C.1
tatagtgagtcgtattaacagctcccatctaacactacctgtcaagctacccagcccatcgatcacaccgcgcactgcaatggcgcttggcgacagtccagtcacagcctcagcagcgggagtatcctgtcgtgccgcaaccgagtcgcattgcacggcaacgtccgttcagcagccgatgcacaccatcacaggcatccacgcagccgacttgtcaatggttaacgggcccga

SEQ ID NO: 148168 - DNA, 336 bp, Zea mays
  Clone ID: MRT4577_66658C.1
cggaattccgggctacgacgcacgcgtacggaacaaacaattgtgggacacgtgacccttctgcacgcatgctgatctagtcctggagaggcagtatggtcatcctgcttgacaccttgactccacgagtgctatacatgagctactatgtttcgatcgatgacgaaatcacattgcttcatgttgtgcaggctcatatgtgcatgctggattcagcaaacccgtgacggatcctgtatcgcttagtcctttgctgcaagggtcttgtcggcttgttctggcggtcgagcactacatgttctgcttctggatacaaatctggagaaatcgcgaagt

SEQ ID NO: 148169 - DNA, 437 bp, Zea mays
  Clone ID: MRT4577_66659C.1
agcagtggtaacaacgcagagtacgcgggatatcacagacacaagtttggtagggcctctatgaaagccaaaaaaaataagtattttttcacggttcctcctcaccccacctctcatctctagtctcatttctagagaccctacttcattccgctctcagcgtgcaggtggaatcgacttctagagtgtagcacccaagtttcaatttaagagttaaatagatattttatttaatttagtgaattatcctttttatatgtacttgaaactaaacaaataaattgcaaacacaaataattttgtgtgtcatgctggattattttttattgatgcgttttaagtgcggacttgaaatttgaagtatggtttaaaatttgaaattgaaaaaaaaaaaaaaaaaaaaaaaaaaaaaagtactctgcgttgttaccactgct

SEQ ID NO: 148170 - DNA, 1176 bp, Zea mays
  unsure (1)..(1176): unsure at all n locations
  Clone ID: MRT4577_6665C.1
taaaactgatgctaccaggatttttccaagaaatttttagtagaatacctcctactgacaagaactataaccttgtgtgtgttcctcgttacctaacgtcggactagcttccctctgttcctttctttcaaccactgacatagatcatgtggatcattctttattgtgtccttatccgtaaacatggtaatgacactcataagtgcaatatagtaatcgcagtatgattgtatgaaacttagaggttgtacaagctgtactgacaataagctgggaataccgtaatctttcagctacagctaggacagtaggccacttgtccaagagcactgaagtgatgaaacttgtcaacggcctcatgaaagccccggaggtcgcagccacaatgcaggaattcagcaaagagatgacaaaggctggtgtgatggaagaaatggtcaacgatgctttagattcaacgctggacagcgaggacatggaggaggaaattgaagaggaggttgacaaggtcctcactgcaatcgctggggagaccgcctctgagctcccggatgagcgcaggaaataaaggaggaaattaagcagcaggttcacatgttcctgactgcaatcgctggggagaccgcctctgagctcccggatgctgtcaggaaggaaaaggagaagatgaagcagccttcaacaagtgtacctgcggagagaactgctatagcaaaggctgttgatgacggtgagctagaccagataagggaaaggcttgccagagtgaggtcatagaagatagctgaacaaggtcagatcattgaggtgttacggcacatgacatctcacttgataatgtatacacgtatcacacacaatcactgtgattagcagaccgatttccccacatccagcaatatgtgattttgtccaggccctgttgtaacctgtatgggtcatgatttctaatatatatcacgtattatatgtttggaaaaaaaaaaaaaaccccccagcgggccgccctttttttttttttttttttttttttttttttttttttttttaaccaaccatgtatcatcaattcatcatccatgtgaggtgtggcaaaacaaaaacgaggacggcgtggggagaagctacacagagagggagaagcgctcatttcatctcgaggcttntgaagtcgag

SEQ ID NO: 148171 - DNA, 466 bp, Zea mays
  unsure (1)..(466): unsure at all n locations
  Clone ID: MRT4577_66660C.1
aggtggaccaaccacctgcgccccgacctcaanaanagcgtgtggactgaagaagacgacatggcgctgatcaaggcgcacaagcggtgcggcaaccactggtcgaccatcgccacgttcctgcccgggcgttccgagaacgccgtgaagaaccactggaacgccaccaagcggagcctcaaagccaagcgccggctgaagaagaagagcaacgcgcagcaggtgccggccgggcagtggtccgtcctggaggagtacatccgcagcctgtaccctgacctcgccgacggcgccggcgccgaccagaccccgccggcggccgaggactcccccccgtcgtcctacaacctcgggtcgtactcgtacggcgaggtgatcagcagcccagcgtccgccgccgcgccgcccggcagctttgaccagatgaccgccatggggctgtacctgggcgcgtcgtcgtcgtcgc

SEQ ID NO: 148172 - DNA, 440 bp, Zea mays
  Clone ID: MRT4577_66661C.1
ggcgcggttcgcttgggggcagggtccgccggaggttgcgctagtgtgggagcggcgggagctgctagggccgaggcgcccgccgcgagtggcgacgcaggtgttcgaccggtcctcgcgctcgacggcggcgtcgcgcggcgcgggccgtacggaaccgatgtggaacggcgcgaacagcagcgtctgctcacgagggaatgcttccacgtgagcaacgcgcgcgtggaggcgctcagagcgcggatcgctgacgaggctggcgtcaagttcacttccttcgaggttgtcgccgcgttcatatggcgcgccagggtcaaggtaacgggagcagccctggcgaggtggtgaaaatggtgtactccatgaacatcagcaagctcgtcgacccgccgctccccgatgggtactggggcaacgtgtgcgccccggtgtacgtc

SEQ ID NO: 148173 - DNA, 854 bp, Zea mays
  Clone ID: MRT4577_66662C.1
gttccattgggcgaacgacactgtacacaaacctagctatactagcttagacaacgacccaaaccaaccagcaaccatggctggtggtgctcatcaacaggtggtggttgtgctcgctatggtggcgctcatggtgacggcggccgagggtttcatctccaagaagacatggagcgccatccggcgagcggaccgcgacggcccctttgtggggctggtggtgcccaacacctacgagatggaccccgtcctaagctctcctgacttcaagcctagcaacaacatccccattctagatgtccaagggcgacgattccgcttcggaactattggaagccaaaacgttgtcatggtcatgactgggctgagcatgctgaatgcagggctcaccacccagctgctgctgagcctgttcagggtgaaaggcatcgtccactggggcatcgccggcaacgccaacgaggaccttcagatcggcgacgtgaccatccccgagtcctgggcgcacctgtccctgtggaactggcagaggcacggcgatggtgcggctcgtctctcagcaacgaggccgccacgttccttgacatcgcggccaagaacgccgtcgacgtcatgctcaagttcgtgcccctccttggccgcggtggcgagcaggagcaggccgacggtctggcccaagacatgtaatgtaaggcgggccaggagacagatagacgacgctgagcagtcacgtcgtggtacaatacaatttcgtcttgtaaggtttttatttaaaataatttcccacccacgaattaacttgtatcgctattgcaaacctatcttcgggaataaataagattggttgtcgtgcc

SEQ ID NO: 148174 - DNA, 402 bp, Zea mays
  Clone ID: MRT4577_66663C.1
ttcgcggtccgcgaagccgaccgcatcgccgtcgtcgccagcgggagggtcgtcgagttcggcggtcaccaggagctcctggccacccatcgcgacggcttgtatgccgccatggtcaaggcggaggtggaggcgcaggcgttcgcgtagaagatacataatctgatttctcaattctttttttcccaggacacagtattttggaatgcggatgctgttaaggattgaataaagtttgtagatgctgttctattcttcaaattttgtgtggaacttacacgagcccgccgctagctacccatacagacgagagcgtgttacgcgccctaattaaggttattactgggattggaatactgtttgacgagataattggaactcacaatgttgtcttcttgttat

SEQ ID NO: 148175 - DNA, 557 bp, Zea mays
  unsure (1)..(557): unsure at all n locations
  Clone ID: MRT4577_66664C.1
aataatataaaaaacacatcggcacgacaaccaatcttatttattcccgaagataggtttgcaatagcgatacaagttaattcgtgggtgggaaattattttaaataaaaaccttacaagacgaaattgtattgtaccacgacgtgactgctcagcgtcgtctatctgtctcctggcccgccttacattacatgtcttgggccagaccgtcggcctgctcctgctcgccaccgcggccaaggaggggcacgaacttgagcatgacgtcgacggcgttcttggccgcgatgtcaaggaacgtggcggcctcgttgctgagagacgagccgccgccggcgaggtcggagagggagcggatggtaatgaaggggacgccgtgctggtgcgccacgagcgccacggcggcgctctccatctccacgggggtgcacccgaagtgagcgcggatgaactgccggtagctggcgttgtcggtgtagatgttggcgctgcaacccctgngcacacgcgtcacccggggcgcacggggcaggcacgtcgtctcgttcacgcacgcc

SEQ ID NO: 148176 - DNA, 363 bp, Zea mays
  Clone ID: MRT4577_66665C.1
cgggcgacccacgcgtccgcgataggggacagcgtgtttctgcaaccacatatccatgagccacaacactccttggctcaggtacctatactgaccattttaacgcagcgacccacaacaatatgtactgcactgagccagctagctatggtgaaccctggcgcactacttgcgccatcattgactatgtatcgaacccagtatctccgtcgaacgtagttgcaaaccgagcacagaaacaaatgcaccagtgtctggcagcgcttactcaacttgccatggtgaaccctgccggctacctacaacagcaacaactgctttaatctagcccgctcgctgtggccaatgcacctacatacctgc

SEQ ID NO: 148177 - DNA, 1490 bp, Zea mays
  Clone ID: MRT4577_66666C.1
gatcacagcacaccatatgcacgagctctagcacaccataccgacacacacagctggtgcccgcccggtcgaaccacgctagctgtacactagctagacgatcaccacgccagttagttagcgcagcgccatggccggcggcggtactcagcatctgctgcaggtcgcggccgtgctcgcggcggcggtggtgctcatggcaacggcgtcggagggcttcatctccaagaagacgtggagcgccatccggcgggcggaccgcgacgggcccttcgtggggctggtggtgcccaacgcctacgagatggtccccgtcctcaactcgccggacttcaaacccagcagcaacatacccatcctagacgtccaagggcgacgattccgcttcggaactattggaagccaaaacgttgtcatggtcatgaccgggctcagcatgctgaacgccgggctcacgacccagctgctgctgagcctgttcagagtgaaaggcatcgtgcactggggcatcgctggcaacgccaacgaggacctccagatcggcgacgtgaccatccctgagtcctgggcccacctgtccctgtggaactggcagaggcacggcgacgggcctgagaacgagctgccgctagagaacgccggcgactacacgagggagtacggcttcctcaacttctccgactacacggtggggcaggacgccggcaacccggagctggcggcgaacacgctgaacagcgtgtggtaccagccggaggagatcttccccatctccggcacgccggaggagcggcagcacgcgttctgggtgcccgtgaacaagcgctactacgcgctcgccgggaagctggaggggctggagctgccggcgtgcgtgaacgcgacgacgtgcctgccccgcgcgccccgggtgacgcgggtgcccaggggctgcagcgccaacatctacaccgacaacgccagctaccgccagttcatccgctcccacttcgggtgcacccccgtggagatggagagcgccgccgtggccctcgtcgcgcaccagcacggcgtccccttcatcaccatccgctccctctccgacctcgccggcggcggctcctccatcagcaacgaggccgccacgttcctcgacatcgcggcgcagaacgccgtggacgtcatgctcaagttcgtgcccctcatcgcgcgccgcggtggcgaacaggagcacgccgccgacatgtaatgtaaggcgggatcggagacagatccacgacgctgagaagtgcacctgcatgcgttgcgtgccgtgccagtgccacagacacaacacaatgcgtgttttcgtcctccaagtttttacttaattttccacgagcccacgatcgatcgaataaatatagcatgtatcgctatactatcttgcaaattaacctatcttgggtggaataaatgaaattggtcatcgtggccaagttatatagaaaaaaaaaaaaaaaaaagcggcc

SEQ ID NO: 148178 - DNA, 170 bp, Zea mays
  Clone ID: MRT4577_66667C.1
agctcggctgcatcagcatggtaaatagggttgggagcattctgatgtttgatgtcctcaacgcatcatcaatcctaaaagttaatgtgcccacccaggacctctatttggcccgcaaaaataattactaggctctactcccttctctttggcaaacaaaatgagaccct

SEQ ID NO: 148179 - DNA, 336 bp, Zea mays
  unsure (1)..(336): unsure at all n locations
  Clone ID: MRT4577_66668C.1
gtccacagagatgagtngatggccctcatcatttggtgggggatcaacggctgatcactctacgaatagtcctgggcctatgcaaaattttctaaatcaaggataaccttgcgctgataatggaactgttaggaatgatccctcaaaagatcccgttggggggccggtactaactgaattctttaaatcggtccggggatttgaggcacatccaccccttgcggttttggcctttaaacaagggcttgatgggaaattttaatttaattgaaataaatcctaatgggatggcggttttttttgttccaatccttgattttgttcctgaaaagcccc

SEQ ID NO: 148180 - DNA, 145 bp, Zea mays
  Clone ID: MRT4577_66669C.1
agcaacacacgacggccctatctctacatttgcggatgcagctttccatacaggtgtaaagccaacacaccaccgttgaaagactatgcagtcaaccaaactccagcacatgattgtcgaccaaaggaagccttacagagacaat

SEQ ID NO: 148181 - DNA, 236 bp, Zea mays
  Clone ID: MRT4577_6666C.1
ctatcgccagcgccatcctgcggctcgcgctcggggccggggggggggtcaccatctacatggggttcctcgtcgagtcccattcctaggaggagctgcccgagaggctgttcagctccgtgcgcatctctcggattgagataggcgctgtcaggtactttgagctgacttttaatgaggccatgcctgaaactgtctgcatcttcagggcctttgctcggtttcatggtaagctc

SEQ ID NO: 148182 - DNA, 407 bp, Zea mays
  Clone ID: MRT4577_66670C.1
attcggctcgagcgtcaatgtggaacggtggtttttaacaataatggcaggagttgatcgggacgcgaactccatgagtatcaagaaggggacagtcaatatatagaggagtagcagtagcaggaccgattgacggacgaagacctatcttcttttaagccctatgaatacgctaaactgggttactataaaaattgacatgacgatggacacgacaaaaagaccgaatatgccacgtcggacgctgttcaggatacttttgttttacaaaaatgatcggaagatcatgccgcttatcacggtcatgtgctgggataaaactacaacgcatgctgaggactatattaacgtccaggcagcggatctaatggccttccttagaataatgaaccattacaaagtaaggc

SEQ ID NO: 148183 - DNA, 315 bp, Zea mays
  unsure (1)..(315): unsure at all n locations
  Clone ID: MRT4577_66671C.1
cggaatattccgggtacgactccacgtcgtctcggtcgccccgtgtcagggataccactattncttctccgagcgtagttcnnttggttgacccctcttctcttncttcggaccagcctctcaagggcttcttgnnngtgtagctttggccacctttctcacacacatcaagattttcatgggtctgagtnnntcgacattctagaatcctcaactggnccttcganntcccttctgctgagggccacannggctggggacctcctggctgcggcatgcatgggtcataaggaagctatcgtacanccgtgcgca

SEQ ID NO: 148184 - DNA, 282 bp, Zea mays
  Clone ID: MRT4577_66672C.1
tttatacatcccgagcggtcgctgttttttgtgtcctttactggttcttggaacagaacgcctgttgtagtaacgcataagaactatctcgttcaatatacctatcacccaatccgatattacttatgatgttaattttgacgctcgtattgttaacatggaccacaatttgaatatgcccccaagggccatagggaccctaaagaaccggggggtctatacagaaactatacggcaggctgggcagatatccgaccagcctgagggatgcggaaacaataa

SEQ ID NO: 148185 - DNA, 321 bp, Zea mays
  Clone ID: MRT4577_66673C.1
gccaagaggcatcaccgccgcgactacgatgtcagcctcgctccaagccgcggccaggctgatgcagccggccaagatcggcggccgggcgccctttgcctcgctgccgtaccgcccgtcgtcgcaactcgcctgcagggcgttacggcgtcgaggccgaacaacctagtcatcacaggcgttattcatgaccctagcagccagcgccaagacgggctcatgctggacgcctatgtgctacccgcagagcctcgtcatgaccgtgcagagcgggatcaggtgatgccagttcctaagaagggccttgcgggccatgatctt

SEQ ID NO: 148186 - DNA, 216 bp, Zea mays
  Clone ID: MRT4577_66674C.1
gggatgggtaatcaaagttccgaaccaaatcccgctttatataaaagcttctccgacaggtattatcgataaataaaatagaaaaatgaaccatgacaacatacacacttcatttttagcagagttcatcacatcttcattcaagagaaaagcagacgacaaaaacacaaggcctgccgggcgaggacaaccaccacacttttccccacgcgtcca

SEQ ID NO: 148187 - DNA, 287 bp, Zea mays
  Clone ID: MRT4577_66675C.1
gagaaaggttccatgtgaacggcacatggctcagatggtgatagttgttgtaactagtcatcttggacatagtaaaggaaagagagctcgaaggcttgaacacactcaaaaaaaaaaaaaaaaaaaaaaaaaaaaaaaaaaaaaaaaaaaaaaaaaaaaaaaaaaaaaaaaaaaaaaaaaaaaaaaaaaaaaaaaaaaaaaaaaaaaggaaaaaaaaaacatattgtacatataaaaaaagaaaataaattaaacacgaaaaaccaaaatgggcgcccactttcctt

SEQ ID NO: 148188 - DNA, 785 bp, Zea mays
  Clone ID: MRT4577_66676C.1
agaaagtcagctgatcctgcttaagagctttcatgttaggctcatgagcattgtacttgatgttgatgttgatccctcaacaactccttgggatccagcaaaagcatacctctttgttcctgtgggagctgagaaatgtatggatcttttaagagagatagattggactctagttaatagcattgtgaattctgatgcctggaacaaccctcttcagagggcacgcccagatgtctatctaggcacgaacgaaaggacacttggaggggataggagggaatatgggttcgggaagttgcgccatggaactgcatttggacagaaagcccaccctacgtatggtatcagaggagccatcgctgaattcgatgttgtcaaagcgtctggattagttcctggtcgtggatggggacattttaatgattatcaaaataaaggcaagttgttcatggcagattcatgttgggatgccaaagatcttgctggaatggttgtaactgccgcccactcaggaaaaaggttctatgtggacagtatttgctataatatgaatgcagaaaattctttccctaggaaagagggctatctgggtcccttggaatacagctcgtttgctgattactacaagcagaagtaagataaagtttgagtgctggaagcaaaaggagttctctcttagctctaccttcttttgatttccctttttttttggcaaagtagctttatggcagcataccatgatgattctttgtttttctctcaaggatggtgtggagttagtttat

SEQ ID NO: 148189 - DNA, 589 bp, Zea mays
  Clone ID: MRT4577_66677C.1
gagcctacccaggtggctgtaataccatggctcgcatttttatttttcagaaacttccctggaccacgaggcagggtttaaggccatgatcaggtccgcccctcttccaatgagctctctggagtcccttgcatcatctgctgtgaggactgccaacaaggtcaaggctgcactgattgtcgtcctgactcgcggtgtcaccacggccaaactggtcgtcaagtaccgccccagggtttccatcctttccgatgtcgtacccgtgcttacgaccgactctttcgactggaccattagctccgagggcccagctaggcacagtctgatctacagaggcctcattcctctccttgccgagggttttcgcgaaggctactgatttagagtttacggaggctattcctgatgccgtgttgaagtcagtcgtgcagaaatagcttctgaagcctggtgatgccatcgtggctcttatcctattggcgtcgcctccgctatacaatctgcatcgtgaagtgatcatcaatacctggtttttactgttgcgaattcatgaaacagattatctggctccttttaactgccaattttt

SEQ ID NO: 148190 - DNA, 2537 bp, Zea mays
  Clone ID: MRT4577_66678C.1
gtatccccccatccccccttcccctgtaccattggggacctcgaggccggccgggaaccaatccctactctccctccttccgtgttccgtctctcaccacctcggcacaccctagctgatctggtggcatcggccggcgcacggcgatgcctgccacggtcttcgcctccccctccatcgccgcgtcgccgttgccgtctccgtcgtccccacgtccgcctcctcgtcgcgtccacgtccgtgtccgcgtccgcccgcccccgccgagaagcggaagcagcgggggcgacgagccctctaatgccaccccgtgggcgagccccgactggctcacgtctctctcgcgcgcggtcggccggagcggcggcgacgactcggggatccccgtcgcgtccgccaagctcgatgatgtgcgggacctcctcggcggcgcgctcttcctgccgctcttcaagtggttccgcgaggaagggcccgtgtaccgccttgccgcggggccacaggactttgtcatcgtcagcgaccccgccgtcgccaggcacgtgttgcgtgggtacggctcacgctacgctaagggactagtcgctgaagtctccgagttcctcttcggctccggcttcgccatcgcagaaggcgacttatggacggtgagacgcagagctgttgtgccttccctgcacaaaagatttctgtccattatcgtggacaaggtattttgtaaatgtgctgagagactaatagacaaacttgagccatatgctttgagtggggaacctgtcaatatggaagcgaggttttctcagttgacattggatgtgattggtttatcattgttcaactacaattttgattccctcacaacagatagtcctgtcattgatgctgtttatactgcactcaaagaagcagagcttcgttctacagatcttttgccatactggaaggttggtttcttgtgcaagataatcccaagacagataaaagcagagaatgcggttacgattataaggaacactgttgaagagctgattatgaagtgtaaagaaatagtggaagctgaaaatgaacagattgagggtgaggaatatgtaaacgaaggggatcctagcattctacgcttcctacttgctagccgagatgaggtaagcagtgtacaattacgtgatgatctcttgtcaatgttagttgctggtcatgaaacaacaggctctgtactgacgtggacaatctatcttctcagtaaggatccgactgcactgaggagagctcaagatgaagtagatcgtgttctacaaggtagactacccaaatatgaggatgtaaaggagctgaagtacttgatgcgctgtataaatgagtctatgcggctgtatccacaccctcctgtacatttcttgtgctagtgacatgcaactttataattggttttgttgactcatggactaattactgataggtgctgttacggcgtgcaatagttgatgatgttcttcctggaaactataaggttaaggctggtcaagatattatgatatctgtgtacaatatacataggtccccggaggtctgggatagagcagatgagttcattccagagaggtttgatttagagggacctgttccaaatgagtcaaacacagatttcaggtttattccattcagtgggggtcctcggaaatgtgttggagatcaatttgctctcctagaagcaatagtggcacttgcagttgtgttgcagaagatggatatgcagcttgtgccagatcaaaagattaacatgactactggagctacaattcatacaaccagtggactatatatgaatgtaagcctgcgtaaagttcagcaagaagctgagttagcgctgagcgaatcgaaatagatggaaacgacttcagacaagaatagagcacctgaactggctacaaatatgtttctccagtttctcgttgaaagctctactgtactatactagatgtcaatgcgtcggcatacagattacagattcgcttctcttgaaacatgaaaggatccttcgctggctgattcgtttggctattcgtgtgtaaaatttatcttaggctttgtttagatactcaaacattgaccccaatccatatgtgttgaggtggatttaagtgtaaattagtttaagttacacccaaatccatctcaatactcaatacatgtggattgaggtcaacactagagtacccaaaataggccttagtggtaatccaagaccaaacagaaacattgtcagggcctaagaggcccacggaggggctgtggcagcagcagccatgggctctccaagagggattagataaggatagttagagataagattagaagattagttaaaattatttaggagattagttgagattatctaggaaggttattagttagtagttgtttagagtttttataagagttttaaggagataaggatttctagctagatagggacaggcagctgacctatttatgtaatcaatggatgacaaataaagtagccaagaattagaagcgag

SEQ ID NO: 148191 - DNA, 625 bp, Zea mays
  Clone ID: MRT4577_66679C.1
gctctcgcttgattatcgccatgaactcctcgacgctccaccactgccggacaggtttctgctattctgctcttcctgtgcatcttcacacgatgcacctatgctgacgctctcttctcgtaggaaaaatactgcttccattaaaactagacattcatatgtcaatctaacagcgatggatgacagttcaacacataagcataataccacacaatgctattggaggaggatcgccaaacaatgtctgcttagccggtttatacttccctcacatcacaaatactcacacttatgttcatgaaccagtcgattcatctgcacaatcgctgaacactgagatgattatctgtatttacatctcatctactttatttttacatatgtgatcgtacaagcttgcttgtagagtctgtcaagaattacagcgcgacatctgttccctttcctctactttcttcttatcattggatgaactatgacttccttctaggctcatcaagacaagtcatcattcacaggagaatctgcactgtactttaataggcatcagactgaataatgcatatcatggatgcaggtgatatcctcgacgcaccattacttctgtgctagagaaatctacatg

SEQ ID NO: 148192 - DNA, 1207 bp, Zea mays
  Clone ID: MRT4577_6667C.1
ttcggccgggaaaaaactggacaggactggaccccgtcccgtacggcatcgcaccccgcagccgcaggccgcatcttcctcgcgtgctctgccctctgtgcctgcccatccgttgatcccatcggcttccccttcctcttccccgatccccttcctcccccgatcccatccaattccacttccacaccccgggcctcgccgccgacgccgacgccgccggccatgtccaagtacggcaccattcccacctcctcctccgcgggcggagggcccgtgcccctcggcggcgcctccccgctcgatttcatctcccgcgccaaggctcggggcgcctcggcgctggcgacgcgccggccctggcgcgagctcgtggacgtccacgccgtcggcctgcccccgagcctcggcgacgcgtacctccgcgtgcgcgccaacctcgcccacttcgccatgaactacgccatcgtcgtcctcgtcgtcgtcttcctctccctcctctggcaccccgtctccctcatcgtcttcctcgtctgcatgctcgcctggctcgtcctctacttcctccgcgacgagcccctcgtcctcttcggccgcgtcgtcgccgacggctacgtcctcgccgtgctcgccgtcgtcacgctcgtcctgctcctcctcaccgacgccaccgccaacatcctctcctcgctgctcatcggcctcgtcctcgtcctcgtccacgccgcgctgcacaaggcggaggacaacgccgccgacgaggctgaccgctggtacgcgccggtgtcacagcagccgtcgcactgaggatctgaatgtggccattccgcgccttggctgtgatcctattctgtactccctgtttccgagttcctccagctgcgcaagctgggccatccccatctcatctgcgatgaaaaacctgtccctgttggttgtgattcacctgctgccggttccatgggaagttttggatccagcgacgacgcagggctgttaaacttgttctccacgcccatttctgtgatacgtttaaagcgtctcgttcacgtgtatcaaatccggactgaagtctagtgtacattttgagttggagaaatgtgatgccagggacctgcgttcagattttatcgacgccatgcatgtaggcaagcgatgctgatatttcaaacatggttttattctacgtggtgtctgggagcctgggaag

SEQ ID NO: 148193 - DNA, 263 bp, Zea mays
  Clone ID: MRT4577_66680C.1
agcgactcatcggttccgcgcaggggccacagccagctcatgaaaccgaggcgacccatacagaccaggctcgctaacaccgaacgacagcacgacactccatcacacgaggcgagccccgcatgcggcagggcacaccagcaacaacccggagaacggggcgagccgcactctacccctaccaccagactatatggatgagcttcttcccacacggcgagctgccaccattacacatacgaaaaacacctgctacaaacact

SEQ ID NO: 148194 - DNA, 412 bp, Zea mays
  Clone ID: MRT4577_66681C.1
aacccagctaaacatgaatttattaaggggcgaaaacaacaattcgaaaataactttggtctgacatagttcagggagaaaaaataaaaaacaagtcaaatccagggaaaagttcaaaaagtaaggggggggcgagttcactgcaccaggggatcagggttcccagcagcaaaaatataaagcaacgagttttggggttccagctcgtcggcccaaaggggaagtttgtccccagggaaaaagttccttttaaccccatccgaatttattgaaactgaacggaaaacccttccattagcaccatcacgggccatagaaaggaaaactaccttaaccaaaaatttttttgccttttcctgactaattccctttttccattcatgaccaaaaaaagcatataggtaactggaac

SEQ ID NO: 148195 - DNA, 332 bp, Zea mays
  Clone ID: MRT4577_66682C.1
gcccggctctgcgtcttcgagttctttttgctctcctgctttttcgacatgacctgcaacaacgggtgcgtgggagcttaccgcatccacccccctgacatgtatgatctgacgaacatgaccgggctggagtgcctctgcgagcgcagcgatggaaacttacctatctgtgatccggtagcagattcggaacagcccagaaacatctagacggatgctctcctactacatcctacactgatccatctaccaggcacaagaggtatgatacctcgcccactgacgcatgagtagggctgtgcattatatatttgaaccctgaaccatgtcat

SEQ ID NO: 148196 - DNA, 126 bp, Zea mays
  Clone ID: MRT4577_66683C.1
atgcccccagaaccattgcatgatgagtcgacgcctatgaccgtggccctagaccggattcctttgaaaaactactttgttcgaaagaatactgtaaagaagagcaagctagaaattaggccttag

SEQ ID NO: 148197 - DNA, 385 bp, Zea mays
  unsure (1)..(385): unsure at all n locations
  Clone ID: MRT4577_66684C.1
agatccgcctgagcagattggctcgtcggactccggcgctgccgccccggctcggcagccgccgccggtgccgccgccgctgtggggtcggctgcggcgctggtctacagaaancgctaatcccgacaccgcggcagggaactccatatgaaggaaacttgccaggctgttaccatcattgaaacccctcctcttgtcattgttgggctggtggcatatgtgaagactcctcgtggcctccgcacactcaactctgtttggacccaacatcttatcgaagaagtgaggagaaggttctacaagaactggtgcaagagcaagaagaaggctttgacaaagtatgctctgaaatatcaaaatgaggctggaaaaaaggaaatacacg

SEQ ID NO: 148198 - DNA, 728 bp, Zea mays
  Clone ID: MRT4577_66685C.1
aatgcgctgtgtcgcgagtcggatcagagagagagcagacctatcaccgtaccaaacgcctggtacaagttaccatctaatgacattccccggatggcgctgatctcgctgtgctcggatacgtaccacactcaccttcggcagacagtaaataagatggacaggctcaggacctcgctatataactgggaacgtgaggacgagggacacacctgacacgatgtgtgaccagcgattatatgatatactagacgcttggcttggtgacgaccctgacagctaggttgcttgggagacctgcacaaataccaacatggcactagcttgtggtgatatcatcaccagcggcaatgcttactgcctgaacactgctaaccaaacctgcgataacatagggttcagacgagacgatgatgtactggacgaccaccactgtaaggatgtccagaacattgataagaagaacgctgatattggtcagggtgggcatggacactgaagaaatcaccacgatggagattgtagtctgccgaccattgactcatgtcaacagcatgcgaacgatgagaactctgagttgttgcccatcattcatgtacttgccaccaagcttgaggggctcgtctcactgatgtccgcaagaacggaacctgaccctggctcaggcctgatgggaagacccaggtgacagtcgagtaccgcaatgaggggtgttgccatggtcccca

SEQ ID NO: 148199 - DNA, 176 bp, Zea mays
  Clone ID: MRT4577_66686C.1
cccacgcgtccgcccacgcgtccgcggacgcgtgggcggacgcgtgctctttcgcgcgggccctagtatctacgacgctactacataccgtacgcctccttcgacaagctttgacgaggggcacggacgatgaatactccgatcgtcgaggtgcagcacgtctttacacgccagat

SEQ ID NO: 148200 - DNA, 188 bp, Zea mays
  Clone ID: MRT4577_66687C.1
gtgtgtgcaacaagggatggtgctggggccatccttgggctctttcaagatccctgcgggggcactatctactttcgacaccctaagtggcatcatatgtggcccgatgtatgactacatcgtgggtccgatagccaggagattcactggcaacgataggggctttacagagttgcagaggggggggg

SEQ ID NO: 148201 - DNA, 224 bp, Zea mays
  unsure (1)..(224): unsure at all n locations
  Clone ID: MRT4577_66688C.1
tatgacgtcctgcacgctactagcttgatcctctaacgccggccgagggggggcgctagcccaaacggagcggcggtcggtgncanatcttggtggtgagtagcagaatatttcaaatgaggaagctttgaaggcgcgaaaaggaggaaaggtgccatgtgaacggcacttgcacatgggtaagccgatcctaannnaggcgcgggtcggggggagaactantc

SEQ ID NO: 148202 - DNA, 409 bp, Zea mays
  Clone ID: MRT4577_66689C.1
gtatagtggctgtgcggtcccggtcccgcgcagccagtggcgtcgacgcgctcgtagccactgaggccgccggcggtggcaacactgcagagcggtgccgagacaccatttcaccgaggaggctgatgctcctaacagcgaacaacggataagagcagctgaacatgcaggcgagaggctgcagctatgctcaccgcacaaccgccacctgaagtagcgggtgaggatgacagcagtagacaccatgtctttgtggcgtttatgaccaaagtcggtcaatttgacgagcttgctgtatctgtcgagcgattgctcgggagattccgatgggagcttgagtatgatcgtacggccctgatttctaaggaatcagatgtaaatgaatcagatactaataatcaactgcact

SEQ ID NO: 148203 - DNA, 843 bp, Zea mays
  Clone ID: MRT4577_6668C.1
tgcgcattgcgggccgggagagcgagaacggagtggggaagatggagacggtgaagagccttctgaagccaaagccgacgccgcagcagcagctgcgcgagtggcagcgctgcctccgcaacgagggccgcaacatcgaccggcagatccgaggcgaggcagcccgcttctcccattctccgggcccagactcaccctcgccgagtgtggactaacgaagtccaggctgtcgccctcgatctcgatgtgctgcagatgtgcagagggaggagaagaaggtggagaaggccatcagggaggccgccaagcgcaacgacatgggatccgccaaggcgctggccaaggaggtggtgcgctcgaggaaggcagtcaaccgcctgtacgagaacaaggcccagctcaactccatctccatgcaccttggcgaaatcgttgctactgctaggacagtaggccacttgtccaagagcactgaagtgatgaaacttgtcaacagcctcatgaaagccccggaggttgcagccacaatgcaggaattcagcaaagagatgacaaaggctggtgtgatggaagaaatggtcaacgatgctttagattcaactctggacagcgaggacatggaggaggaaattgaagaggaggttgacaaggtcctcactgcaatcgctggggagaccgcctctgagctcccggatgctgtcaggaaggaaaaggagaagatgaagcatccttcaacaagtgtacctgcggagagaactgctatagcacatgctgttgatgacggtgagctagaccatataagggaaaggcttgccagagtgaggtcatagaagatagctgaac

SEQ ID NO: 148204 - DNA, 488 bp, Zea mays
  Clone ID: MRT4577_66690C.1
gatatccgagatcgtccctgctactcgagggttgcggggaccaggcctgccggctcgctggacatgaaggagaggacagcaagccggatgtcgccccttaatcagcaagaaccggcgcctcgggcggacaccgcggcggacggcgacggcgatggcggacctcgacgtggacccacccccgcgactcgatgttatatcctacgccaaggatgcgggcacctcgctcttcgtgtccagccgttcaactctatatcgctcatacgcggctatctctaggatgaaagaggatgcgacctttgtggcgcgctgatcttcgacaacgctaaggaggcgagcgaacactcgttccgcttcagctacgtgcgctacatcttcggcagatgatggcaatgcgacatttcacgagaactacgcgagatatgtgacttctaatgtgacctccctcatcatgctgcggtgactggatctcgcaacggtactggtgcagc

SEQ ID NO: 148205 - DNA, 284 bp, Zea mays
  unsure (1)..(284): unsure at all n locations
  Clone ID: MRT4577_66691C.1
gggcaaaaggggggttgttctatttaacgtaggcagcagcgcttgcaaaatttccgtcaagtgaggggggaaaaacccgaaggaatacagctggggtttacaacatgtggggtggggaaactgaattttaaagcgtggggaccatgggggggcctnnggccagatgccgccggtttatcgcctgcagggataatcccgggggctcttctcctatcttgccagtggtcccggaacatttctccttggcttcccctttttcggcggcgccttgccttatatacggt

SEQ ID NO: 148206 - DNA, 621 bp, Zea mays
  Clone ID: MRT4577_66692C.1
aactgagctgggatagccacctgcctatctctctacggagagacacaaacccaacctatctacgtctgatgcagccgtggagacctcagcgacgatgtctaccgccgccaatgctgcctcttctgtcgggccagctcctacctgggcaacccgccgactcctgtaggcctgtacctgcaccgtgagtgcgccgaacatcatctcgagtgacattggccatccagcgtcaccgatcctctgtgccgcaacctgtgtaatcctaccatgatatacctcctccacgtcgtggccatgtcttggcccaacctgcatgaggtgatatccgaactagccttattcgtaactggcgtttccagaaacaccaggacggtacacctactggacaaattatcggatgagcatgatgacctagtaagcagaggtataataacgcagcggatatgaacggactcgcgccctccgcgcaagagctcaaggaggaccccacgtacctggagctgcaagctatgtagaacactctagtcacctacaatagcaacgccgtgtgaactctgctcatatgtgtctcgtgcgggaacgtggtatcagaatcagatcatctgcccatgacacggatcccag

SEQ ID NO: 148207 - DNA, 365 bp, Zea mays
  Clone ID: MRT4577_66693C.1
atcctgtatagcggacacccttcgcccttttttccattttttttttttttcccccccccccctctccgcaggccacagtttaaataataaaaatattctttcacttacccacttaataacacccaaattcccaaataaaaacaattaaaccaaaccatatccacccaaaaactttggggaccattcaaccacttttccaaaaaaaacacaaccctaaattctctatacaaaacccaaacccttgtactattcaacaaaccaatccaatttgccccacggaccaaaaatttttccccccactcttattttacaacccaaaccccaacttaaaccacaaaaaaaatgcaaaaccaccaacccccatt

SEQ ID NO: 148208 - DNA, 359 bp, Zea mays
  unsure (1)..(359): unsure at all n locations
  Clone ID: MRT4577_66694C.1
gtgttggggggtttttttnnaaactatacaatctgagatggtcttacaggatgaaaataaggggatcctacgatggtgaagtggcctccttattactcaagccatctgctggaccgctaggagatataagactgtcttaatatctgcatttgaatgggggaggagggtgaacaattgggtaagttcacnnnngcncnctgccacgcggggcgcgggggcgggggcngncgcncgacccccacccgggcgnccacggcccccacgggccggagcagggggagagcgcaagccggcgagcncgaggaggaggcgcgccnccggggcgccgccccagggcgagccgccccccgcggggcccc

SEQ ID NO: 148209 - DNA, 1312 bp, Zea mays
  unsure (1)..(1312): unsure at all n locations
  Clone ID: MRT4577_66695C.1
aagtatggcgcagttggcttttgcctcgtcccctgcgccgtcccgttgccgaaacaaaactcgctcttcggacaaaacgccaacgccagggcgagcgagtgaggtgaggtcacctaccagctcccacagtcgcactcccccctcgcgccgtcccgctgccagggcaacgactcattggcctacgtcgacggccccttggagaccgctaagggctccggcgaggtcgacgacgacgtgcccaccagctcggggtccgacgacgacaggggcctcgccgacgtcgacggcctcagggagatgctgcagaggtccaggaacgagctggaggtggccagggtcaacagcaccatgttcgaggagaaggcgcagcggatatccgagtcggccatcgcgttcaaggaccgcgccgacggcgcccagagggatgtgtgcgcggccgtagccaccgtgcaggaggtcatcagcaaggaggcggacgccaaggaggccgtccagaaggctaccatggcgctgtccatggccgaggcgaggctgcagctggcggcggaggcgctggaggccaaccggggctcggtaggccccacggaggttagcatcgaaggcatggagcaggaggccctcgtgtctgcacaggaagagatcaaggattgccgggcagccctgtcgcggtgcgcggaggagctgagtcgtgtccaggacaagaaaatgaagctgcagaaggaggttgataggctgacggatctcgctgggaaggcccagatggatgcgtccaacgccgaagaagatgttgccaatataatggtgctggctgagcaggcggtggctcttgagatggaagcctcacagcgtgtcaacgatgcggaaatggtgctgctgaaagcggagaaggccatagcctcgattgataccatggtggagctaccgtcacctgctgaagagcagagaagcactgaagaagacagcgtttctgaagggtacgagtatagcagcgatgtcactgatgatgtttatgtaagggatgaggtgtcaagtattgagcgcctaatggtcggtgacttgactgttcagggctttgagcagcttgaaccatcccgtgaaatatatgatgaagaaagcagcgtggtggagtctgttgaggagcgggtagatctcgccagatccaaggaggtggggacgagatggtgagctcctcgtcgtcggtggttaacgtgtacccgctcgccaactacacgttcggcaccaaggagcccaagatgagaaggacacctncgtcgccgaccgcctcgcccgcatgaaggtcaagtaagtgcgc

SEQ ID NO: 148210 - DNA, 410 bp, Zea mays
  Clone ID: MRT4577_66696C.1
ttaacaataaaacaagtttcctcttattatcaaaaaaaaaaaaaaaaaaaaaaaaaaaaaaaaaaaaaaaaaaaaaaaacaaaaaaaaaaaaaaaaaaaaaaaaaaaaaattaaaaaaaaaaaaaaccaaaaaaaaaaaaaaaaaaaaaaaaaaaggtttgtccctgccgggggggccgttcaaagggggaatttttgaaaatatccaaaaaacgggggggggttaaaccatccttttaaggggcccaattccccctataggggggggtataaaaattaaggggccgtggtttaaaaacgtgggaatgggaaaaaccttgggtttcccaaattaaatccctttgaagaaaatcccctttttccaagttggcttatagggaaaaaggcccgaaccaatcccctttccaaaa

SEQ ID NO: 148211 - DNA, 543 bp, Zea mays
  Clone ID: MRT4577_66697C.1
ctatattgtggcctgagtcattttttctctgttaatcataaataaatgcagtttatgtttataagctagaaatacattagctatgttttgctaaagtatcgttgggtactactccctccattcttttttatttgtcgtggtttagttcaaaaatgaactagcgaacgacaaatattcgagaacggaggtagtatatggaaccgagaaggaatatattttgttaatcaagaaaaaaagtgcgtgggtcaggattgaaaaaaaaaaaaaaaaaaaaaaaaaaaaaaaaaaaaaaaaaaaaaaaaaaaaaaaaaaagggaaaaaaaaaaaaaaaaaaaaaaaaaaaaaaaaaaaaaaaaaaaaaaaaaaaaaaaaaaaaaaaaaaaaaaaaaaaaaaaaaaaaaaaaaaaaaaaaaaaaaaaaaaggggggggcccttttaagaaacccaattttttttcccgggggttggaaagtaataattttttttagggggacccaaaaaaaaaataaggggcccggttttaaaaacctttgggctggaaaa

SEQ ID NO: 148212 - DNA, 492 bp, Zea mays
  Clone ID: MRT4577_66698C.1
tattaacaataagaacagtttcctcttattatcaaaaaaaaaaaaaaaaaaaaaaaaaaaaaaaaaaaaaaaaaaaaaaaacaaaaaaaaaaaaaaaaaaaaaaaaaaaaaattagaaaaaaaaaaaaaccaaaaaaaaaaaaaaaaaaaaaaaaaaaggtttttcccttgccgggggggccgttcaaaagggggaaattttgaaaatttccataaaatgggggggggttaaaaaatgcatttagggggccaaattccccttatagggggtggtttaaaaattaatgggccgtggtttaaaaacgtgtgtaattgggaaaaaccttggggttcccaaatttaatccctttgaaaaaaatccccttttcccaagttggcttaaaaggaaaaaggcccgaaccaatcccctttccaaaaatttgcccaccctaaaggggaaagggaccccccttttaccggcccataaagcgcggggggtgggggggttccccc

SEQ ID NO: 148213 - DNA, 557 bp, Zea mays
  Clone ID: MRT4577_66699C.1
gggcaaagtcatccccgccgtgggcttcggcaccttcgttttgcgttttcaaccctggccagacctacacaggcgccggggcagcgctgaagaccggctaccgccacctcgactgcgcctggttctaccagaacgagggcgaggtcggcgaggcggtgcgcgacttcctcaaggagacgcccagcgtcaagcgcgaggacctgttcatctgcaccaaggtgtggaaccacatgcacgagccggacgaggtcaagtggtcgctcaacaactcgctggagaagttcgggctggactacgtggacctgttcctggtgcactggccgatcgcggccgagaaggacggcaacaacatgcccaagctgaacgcaaagggccagtacgtgatcaaggaggagctcaccaagaaccacaagccgacgtggggcgccatggaggagctgtacaaggagggcaaggccaaggccatcggcgtcttcaactggacgatcccgcacctcaaggacctgctctcgtggtgcagcgtcaagccgaccggcaaccagatcgaaattcacccc

SEQ ID NO: 148214 - DNA, 528 bp, Zea mays
  Clone ID: MRT4577_6669C.1
caccagaaaagcggacagtcattaactggaatggggtctccggttacaaacagactcaaaccgcccaattttagacgccacggtgaactttcaataacccacatgccatgcagctgaacccgactaggactactcaggaacagacgcggttcaggaacgctcatgccagactacacggcccgagttgtataatgtacccacgggattcgctgcccacggattccaatacatcagtgggttccccactctggacaggtcgagtattgacacagggccgggtcaacagctagaggctttgcgtgccagccaagtgctgctgacatggcggcatactggtcagctgggttgtgaataaggtcccttgtcaatctcacgagataatctttagcttactgctaaactctacctatatgaatagacgagctaaagtttagctctaattaccaccattagcttttctgggttaattacaaacgggtaataggcacctaaaaaaagctggtaaagttcatcccgcgagattggaac

SEQ ID NO: 148215 - DNA, 542 bp, Zea mays
  Clone ID: MRT4577_666C.1
agcctgcacggactggcccggtctgacccaggccgacccacgcgtccgtttgcatgattcagctcacacttgactactcgaaaactgtagatccaatggctgttcaatcagtagtgcttggtgcttgcggcaatcatcccagctgcctttaagtcggtcgggatcatgacggggggaccaagctttcctgataagccctccctattagtctatcactgttgcctcgagcactctctgcacgcatcatttttttttgtccgaaaccttgcagcgctaattaaggtcgccggttattttatcagatctgatctagcatgaatccacctgttgcctagatctgtcagcccaccgaaagcacgcagcgcccacgatgacagttgacagctataggcaaaactgtccaataatccgccagccatacaattttttttttgacaattagttagtagcaacccgtcagcagaaacgagagcaaccatattttatatacatctacctttcttgatctggccgtgtccggcacaagagcagcagcaaacaaa

SEQ ID NO: 148216 - DNA, 457 bp, Zea mays
  Clone ID: MRT4577_66700C.1
tggcttggaacctttgggctgatttatgtgcttgtggatgtgcgggtcccgtcgccgcgactccttctccttccggcctggccgagggacctagtgtgaagagttagtttcgtattcacagtaaggataagcatcgtaagttcgtatcgcctatcgtatctcccagtatcgcgcttcctccgtccggagttactattctctcggctcttggcccttccggtacgaagaccgttatacacgtgaacgttagaatcatttcggaagtcaggaagggcgccggtaaggtccccactattgtcccctgtctcggcgtcgacacgggtccttcgtccgtactaagcgggtccgcggcctcgcatactattaccaacgcacccaagccgcaccatggcgacgatcgggagggctcccccgagctcactatcggtcacggttccggcgggctgcttacggtctc

SEQ ID NO: 148217 - DNA, 731 bp, Zea mays
  unsure (1)..(731): unsure at all n locations
  Clone ID: MRT4577_66701C.1
gggagcggacgcgtggagccggagttcggggacacgagggacatcgtgcactgggtctccggcaaggtggcctccggcgccggagccgaggcggacgcgctggacaagcgtctcgcgtggagcccctacaaggaggagatgctgcaggcgctgcgcgtccccgtgcgatgcacctgcagcatgccgggactccgccccaccatggccgacgtcgtgcagatgctcgccgaggccgggccgcccgccggccggacgaccaaggacgactccaaagtactcgtagcagatcatcatcatcatgctcctgctccttagaattgattgaactgaagcaacgacgacgacgacgacgaacggagtacaagtgcgatctcgacttaacacacatcattagctgtgtacgtgctaagcagccgattatatatataaatatttatatatactaattatgaggcgatgagttacataaagataaagagccagcatgcaagttgcaaagattgttcgctagctcttgcactagtagctagagagagagagatgtataggaaggggaaggatagctagctaggcagctttattgtctccacactgcttggtgtttaagcagaatctgatgctccgatgactgagtggacgggaaagacaagtatatatatttatttatacgtatatcatatatatatatatatatatatatatatnggaatggaagcaaaaaaaaaaaaaaa

SEQ ID NO: 148218 - DNA, 131 bp, Zea mays
  Clone ID: MRT4577_66702C.1
cggccaacgcttcggcggacccttggccggccccttggggaaccaaaaagtttaattaggccaatccgcaatccaaacccggatccaaggataacaattgcagaaatttgggaagatgaatggttcaaaaa

SEQ ID NO: 148219 - DNA, 282 bp, Zea mays
  Clone ID: MRT4577_66703C.1
tttttatagtcacacaccaaaattttacagaatcaacggccatattggggcaagagaaacagtcaacagtccatcccgctgcaatgggggcacacggaagaaaagaggaaggaagaatggcccagccctgacccgggaagcaaaaaaaggttgggcagcggacacaagcaatgggtctaatctacggagggatccctacaatacaatgacaagccccactacagaggcaagaacagggtggacatcctaacagaagcaccaatctcaagcctaacaaacaat

SEQ ID NO: 148220 - DNA, 239 bp, Zea mays
  Clone ID: MRT4577_66704C.1
cggttttcgccggaggggggaggacgaggcctccttgttccgggtcctactcccgccgtctatatagtgctttcattctactcgcttacctgcatacaatagtgtgctgtgcgtgctggataggaccctgctaagacgcagcctgctggctagctccctcctacgtgagaaacgaatcgacctcaagctgccgacgcccccatcgagttcttttcccaaaggccagcgtgcccggacca

SEQ ID NO: 148221 - DNA, 375 bp, Zea mays
  unsure (1)..(375): unsure at all n locations
  Clone ID: MRT4577_66705C.1
cgacggccgcttcnccaccccgaacgacgacaccangagggagngcaccacganccacaacggccaggccggcagccaggccggaaacgcgcgcagggagcggaacagcccngagcagggcacncaggcngacggccagaagcccggagacaagaccagagggggaggagaagangcccacaacaccnaccccagcgagacaggcgcagggaagcacgagccccgagcagcnaccgaagacaccgaacccacagttttttttgttgcccccccccccccctaccgccagctcttccaccctgagaagctcatcagtgggaaagaagatgccgccaacaactttgcccgcgggcactacaccattggcaaaggaga

SEQ ID NO: 148222 - DNA, 607 bp, Zea mays
  unsure (1)..(607): unsure at all n locations
  Clone ID: MRT4577_66706C.1
gagagaagcatgcattactgcctgattagttaaccgcaaatcaccacctactcaggttcagcaagcttcttgccttcttgttgagagcttccagaaccaagtcggaaagagagtcaaaaacatagaaaactttaaatggatgttctcgtgtcaactagctagtaaatgtttgccccccaaaacaacctgagaacacaacggcaagaatccaagcctaatcctccgagtcgcaaattggtagctcacgagcaccaatcgaaccgaagcccttacagtgaaatcactataagtctatagcgaacctgtgacttgagatttttgaaacaaagctagacacagggtctgaggccatgtataaattctgaagcgaggcttcttttactgttagttgaggacgtcgatcgccgatgaacaaaaaaaaagctagacacagtgcatgaggtctcttttactatacgaggtaaatacccgtgcgttgcaaccgaaaaaatgtatacaaataaattatatatggtcatatattgtattgttnnnnnnnnnnnnnnnnnnnnnnnnnnnnnnnnnnnnnnnnnnnnnnnnnnnnnnnnnnnnnnnnnnnnnnnnnnnn

SEQ ID NO: 148223 - DNA, 249 bp, Zea mays
  Clone ID: MRT4577_66707C.1
agcagtggtaacaacgcagagtacttttttttttttttttttttttttttttttgttggtccaaatattagcatgtaaataaaacaggtatgttatccccaaatccaaagcatgaggaacttattgagtattgatttatctttagcaatgtattactagactttgttgtacatttctaaattatttttctaaacttatagcttgtttgtagctcggaaaccccgcgtactctgcgttgttaccactgct

SEQ ID NO: 148224 - DNA, 1198 bp, Zea mays
  Clone ID: MRT4577_66708C.1
tgggtacctcgaggccggccgggccggggttctccatcctcgtgcactcgcggccgggcttcgtgctcacacgagccaccactcgatcccgattcttctacaaccgtcaggtcaacgatagcatccaggtggattggggggaggcgagcatgatcacggctgagcgcattttgctcagccatgctctcaaggatccactcaatgaccgctttgtttttgtatctgacagctgtgtaccactatacaatttcagctatacttacgactacataatgtcgtcatcaaccagctttgtagacagttttgctgatacaaaggcagggagatacaacccaagaatggacccagttatcccagtggagaattggagaaaaggctcacagtgggctgtgctaattaaaaagcatgctgaggttgtggttgatgatgaagtggtgttaccagaattccagaagcattgcaggaggagacccttgccagagttctggcgggattgggatcgtcctattcctgcggaggcatggaaagcccataactgcataccagatgagcactatgttcagacgttgcttgcacaaagtggtctagaagaagaacttacgcggcgatcagtaacacatagtgcatgggatctttcagcttctaaagatcgtgaaagacgcgggtggcatcctgtaacatataaagtctctgatgctactccaagacttataaaatctataaaggatattgataatatatattacgagaccgaaaatagaagggagtggtgtacaagtaatggaaagccagccccctgcttcctttttgccaggaagtttacacgtggagctggtctgaagcttcttgattcatcactgatagcttcaaagtgatgaatattagtgacagatgcaagtgccttttgattgtttcacctttcgagaatatttcagttcacacaaatgtaaaggtacgggaccacggaaaagacacaaaataacaggactttctttttattcagtgtgtgattatcatatattattttgttgcttcatagaaaggcacgatacatgttgtaaagaattatcttcgttccttttatttcctaggatagcacgtccattaacacatgactcagcattataacatcagtcgaccagttggtcgtggagtcctgagaaaacttgtcggcaaaattatgaagaaatgttctctc

SEQ ID NO: 148225 - DNA, 733 bp, Zea mays
  unsure (1)..(733): unsure at all n locations
  Clone ID: MRT4577_66709C.1
ctcgnagccggccgggatgggatctttcagcttctaaagatcgtgaaagacgcgggtggcatcctgtaacatataaagtctctgatgctactccaagacttataaaatctataaaggtatatagttttttttccaaatctggacactatttttgtttaggacttatatatatttgctaaaacaacttaaaaaatgacaacacttttggcgccagcaagcttggctagggttgttttatgctcaattaaaggggaaactaaagggtccatcaccctttgtattttggtttgttttgccttaatttgacaagtaatgcagtcacatcacttgctataatgaataaagcaacaagcaccttttataggaaaaggaggtggagtgtcttaaaccagtaacacctgtggtggtaaatacttcatcaatcgaagaaccaatgtcttaaacaaatgtctcaaacatgtctttttcgaaggctgatgcttttgtaacagggttatcaacatcgattcttgctgtttgctgaggatctattcttctcacttttaggatattgataatatatattacgagaccgaaaatagaagggagtggtgtacaagtaatggaaagccagccccctgcttcctttttgcccagaagtttacacgtggagctggtctgaagcttcttgattcatcactgatagcttcaaagtgatgaatattagtgacagaatgcagtgccttttgattgt

SEQ ID NO: 148226 - DNA, 441 bp, Zea mays
  Clone ID: MRT4577_6670C.1
ccaacaagcaacatagaacgtggaatgcacaatcaacaatcgagcatcaatggcgaccaagatattctccctacgcatgctccttgctctttctgcatgtgttgctaacgcgacaattttccctgaacgctcacaagcttctatagctttccttcttcccacataccttccatcaatgatagcttcagtatgtgaaaacccacctattcatccctataggctccaacaagcaatcgcagcaagcaacataccttaatcacccttgtttcaacaatcgccagccctatctttggtgcactcattgggacataccatgagggcacaatagctgcagcaactcgtgctacctgtgatcaaccaagtagctctggctaactctttatgctactgtcagcatcaacaatttctttcattcaaccgactgtctacattgaaccgcgc

SEQ ID NO: 148227 - DNA, 925 bp, Zea mays
  unsure (1)..(925): unsure at all n locations
  Clone ID: MRT4577_66710C.1
gatcgatcgaccccctcgaccgcaccacgctctcactgcgattccgctctcagccacctcctcttcctctcccctcccgggatcacgaggcgacgccacccgcgagattgacgggagccgaagccgatagatctgcgcggctacgctacgcagtcacactgcgctcacctgacctgactccgctctgttcatgccgcggaggtagagtccgcgggccggcggtggccacggccagcctcctcggccgtcgggatgaagccgcggaggttcggctacggctacggctacggctacggctacggccgggtcaggcgcgcggcggcgctgctgctgctgctgctctgcctctgcctcagcagcctgttcctcctgcttctccatggctcctccacgccgctggagcccgcggcggcggcggcggaagcaagagttgccgaggcgcaggcggaggtcgaggaggcgccgctgccgccggggaactccaaggtcgccttcctcttcatcgcgcgcaaccgcctcccgctcgaactcgtctgggatgccttcttccgcggtgacaaggaggggaggttctccatcctcgtgcactcgcggccgggcttcgtgctcacacgagccaccactcgatcccgattcttctacaaccgtcaggtcaacgatagcatccaggtggattggggggaggcgagcatgatcacggctgagcgcattttgctcagccatgctctcaaggatccactcaatgaccgctttgtttttgtatctgacagctgtgtaccactatacaatttcagctatacttacgactacataatgtcgtcatcaaccagctttgtagacagttctgatacagaggaaataaaggaatgggcccactaccccacttnccacgcggtcaaacacttctataccctaacccccgcgc

SEQ ID NO: 148228 - DNA, 221 bp, Zea mays
  unsure (1)..(221): unsure at all n locations
  Clone ID: MRT4577_66711C.1
ctagttcatgacggatgctctggataaccaagttnagagtatggtttctgncnagggttgggtgcgcacctacaggttctgtgacaatgtttggacctncanctntacagacgcaagctttaagaacgaggaggccacggagcacgtncgcatggtgaatattgtggcatgttattccaaattgctcggacaatatgcccgtgtaccctctacgtcaatga

SEQ ID NO: 148229 - DNA, 849 bp, Zea mays
  Clone ID: MRT4577_66712C.1
gccggctgctcggccgtcgacgcccccgtctccggcggcgaccgaggggcccgcaacgccaccatatggatccaagtcgctggaactgtaggggaagcggatcctggagagggatatggcggctggcttctatgtccgctgtacatgggcgggcccggcgcggggcagcgcgcgaagctgggcaaccagatcgccatcgcatccaccatggtagggctcgtggagggcatggtgtacgcgcacaaggccgggctggacgtggccaagtggctggaggccatctccaccggcgcagcggggtccaagtcgctggagctgtacgggaagcggatcctggagagggatatggcggctggcttctatgtccggcacttcgtgaaggacctcggcatctgcctgtcggaatgccaggccatggggctgtcgctgccggggctcgccctcgcgcaacagctgtacgtgtccctgatcgcgcacggcgagggcgggctcggtacacaggcgcttatactggccgtcgagcggctgaacaacaccagcctcgagaagaaggacgaatgaaaggccccaggctctagctttgatgaacttgtgggaagctttgcttggtgccttggtgcaagtatgcaagatcgaggtgactgttaagttgtctttcagagttctacagctgttcacttttgtagtagtatatatgttatgcacttgtgcaacggttggatgattgcttagctctacctgtttacatccgccatgggttccaataagattttacaaacaatgtggcattccttgcatagttgtattggtttagctatggtggttgacataacagatttagacatatat

SEQ ID NO: 148230 - DNA, 396 bp, Zea mays
  Clone ID: MRT4577_66713C.1
gacggtatcgataagcttaatttgaatatgtttagatcaagaaccaaagaaatcagatttggatcaagggaaaacgaaagttatcgactagctgccttgttccgttttgtatcgttcgaggtaagtttataaggaaatagacatgtttaattgtagtttaatattaaatatgtatgatggaacgaaatgtatgaagttatagatgctatggctgaatatgaataagcttactcgacttgtataaaacatttgttttactatttaaaattaataaaataataaatatatatttataattaaaattaaaattaattttacattatttaaattgaacttggataggatcaaaagctttgtgcttttaagatattggaatatttagctgaaatttccttg

SEQ ID NO: 148231 - DNA, 395 bp, Zea mays
  Clone ID: MRT4577_66714C.1
cgtcaatctgagcaagtgggagtacaaccttcaggtgcgctctgtaccaggactagacgcttgcagactcgacttggtctggtgcggcctcctgccacacagctcgttagcgcttacctagagacgcctggctatcgagatgttagacaactactaccggagcgccgctgactacgaccgtgcacaggaagctggggcaaacggacaacggcctgaccaagagtatgttcttctcacaccatggtctgtgggaaacttgcggacgagctacgtatgcacgatgaggactttgtggtcgcgctagattgtatggctagcgaggacacggccaacgtgtatgcacactcttggacgcacatggaagatggagcgggtctcgtggtgcggagcgccca

SEQ ID NO: 148232 - DNA, 647 bp, Zea mays
  unsure (1)..(647): unsure at all n locations
  Clone ID: MRT4577_66715C.1
ctggaggccatctccaccggcgcagccgggtccaagtcgctggaactgtatgggaagcggatcctggagagggatatggcggctggcttctatgtccggcacttcgtgaaggacctcggtatctgcctgtcggaatgccaggccatggggctgtcgctgccggggctcgccctcgcgcaacagctgtacgtgtcgctgatcgcgcacggcgagggcgggctcggtacacaggcgcttatactggccgtcgagcggctgaacaacaccagcctcgagaagaaggacgaatgaaaggccccaggctctagctttgatgaacttgtgggaaagctttgcttggtgccttggtgcaagtatgcaagatcgaggtgactgttaagttgtctttcagagttctacagttgttcacttttgtagtagtatatatgttatgcacttgtgcaaaaaattgtgccggcttggatgattgcttagctctacctgtttacatccgccacgggttcaaataagattttacaaacaaaaaaaaaaaaaaaaagtagtctagttggtttagctatggtggttgacataacagattagacatatatatactnnnnnnnnnnnnnnnnnnnnnnnnnnnnnnnnnnnnnnnnnnnggccgcgaa

SEQ ID NO: 148233 - DNA, 407 bp, Zea mays
  Clone ID: MRT4577_66716C.1
cccacgcgtgcgagctcgcgtctgcgagggctcttacaaggggctccgcaagccctgtgggtgaatgagaatagtggtgtccaaacaactaatggacacctgattgtactactccttgtaggagcccggctaggtgatggagttgctgttgcggattgacgagggtgagcgcctctccacggcctgtcccaagtgcgtgtccaatctacgaggacagatgaccatcgcactgggagtaacaatacagtatatatgctcaatatataatgacttatactgagggcgatggatgaattacaggaatagggccagcctcgagtgagacaggaatgaatgacgggctaccgcactctttacataatcttaccacagctaaggtgagaccagagctctgtgagctgtgcact

SEQ ID NO: 148234 - DNA, 426 bp, Zea mays
  Clone ID: MRT4577_66717C.1
cgaccgaatctaatcccggccgaccgaccacacaagacctttgacctaacacgggcactagtctcagacacaccaaacatcggcaccggtgggttactaccagcaggtgggctactgctcggaggaggtcatgtccatggcccccgacagctttagccgccacagggggcccgtgcagccaaacctcgtcaacgagaacttcgaggacgtcgacacggtctcactcgccggggccaaccaccaccaccaccatggtcaccacggcggccaccgcttcgtggtgcgcgagaccaccgtcgaagaggacatcaacacctgcaccggcgaggtccaccagcgcaaggagagctttcttcccaaggctaactgagccgcccggcgggcggcatccacgcccgttcgtgcttgcctgcgtgccttatgtat

SEQ ID NO: 148235 - DNA, 518 bp, Zea mays
  Clone ID: MRT4577_66718C.1
ggcccaactcggacataaattatgaactttggggaaaacggtttggggggcacaaattaccaacccaggcccagtttgaaaaaggaccttgctttttacaaaattttacagcgcttacaacgggggggtccatcaggacccctgaaaaaaaccctaaataccaaacgtttgtggctggcgggaaaagctgagttattatcctcccctttacaacccctaaatcaaaacgacctttttggggaaaaaaagggccccctttccgaccaggggctaaaaaccaggccaggccaaaaggccgggcaaaaattattcttcaagttggccgaccattcctggtgaagggtaattggggggctacaaaccccacttctttttggctctgatattctaacccgggttattgctgccgccaatgggcaaactatgccacccttatcctaatcctttgaccttgggcttgggtgtgacactgagccacattctgattggggtctggcccagggaatttggggggctat

SEQ ID NO: 148236 - DNA, 228 bp, Zea mays
  Clone ID: MRT4577_66719C.1
gttccttagtagttctttctttcttttcttttactttgggggggttttggattccttactgcttcagttttcccccttttatatatctgatggatgtagaaggggacagggaaatctttgtttccagaaagaggatttaaggctgtagcaagcagtgaattatgaagatcatgtacagatacactttgatccagagaatggggattataatttaattcagcatcttca

SEQ ID NO: 148237 - DNA, 184 bp, Zea mays
  Clone ID: MRT4577_6671C.1
tcctgggacacaggataatcatacattgtttgctagatctaagtaaagcggtacagcagccgagaaaaaaaatgcgtgcgagcaaattacaatttaaccgtcgaacacagctgatagccaatacaaatccgggtacagcacctatggcgcaattcatgtgaaccactagaattctacctgaaat

SEQ ID NO: 148238 - DNA, 301 bp, Zea mays
  Clone ID: MRT4577_66720C.1
tctcttgtcattgtttgactcatgtcatatgggtatacttcctggggccttcgctcactcaactctgattcaagcccaacatcttatctcataactttcgagaacgttctacaagaactcgtgcatgaccaacaataaggctttcacaatctatgctttcaaatatcaaaatgatctttgcaacaatgaaattcacctagcatttttagaagattaataaataagcttcttttatccacctcattgttcatactcatattaagaacattattggtttgtaccagattaaatctcaccttat

SEQ ID NO: 148239 - DNA, 1102 bp, Zea mays
  Clone ID: MRT4577_66721C.1
caaactcttcaccacatgtgggtataactaaagcatcatgtcacacttttataagtcataacaaatgggatacaaatggaatctgtgggtagtaaaatcataccacagctactgctgtaaaccgaacacaggtctgagctggtcaaacctacctggacgctggtcaaacgccgtgacgtggaaatctgtgggtagtgaatggaatcagaagccaagccaccagcgctacgcgcggtccttgagctaaactgtttagttattaggagagactgatcaaaactgagcttgaacatgactgagagcaatccgattcatacatacgcactgctctcactaaattgtgcagcttcataggcatagctactgttacacagtgcgccataaacgcacccttgttgatctacctggtacaactacagatccagtgaacatccagtttcataatttcaccagaacacacttcaaaatccccccaaatgcacctcctggcgattttatcagcaatcagtcttcaggtcctcaggccacagatatctgtggaactactgactcgcctttgacctgccaccactgttgctcgcggcattctcttcctcattctcattcaatgtctgctcgagctcaagtttgtgggctgacattcgggcaatctcagagatagctgcatcacggacctgcacatcatcaccagcaagttcctcgtatgcagcctcaaacgcctcctgccagaaccgtggaagccgtacctcatcactggtccgtgtgtacatgtcccacattcgtcccactaatttctccctctcctccatctgcgggacgtccaggtccccgtagacggaggcgaggtcacccgaggaggaccagcggagtgagacggaggcggcggacatggaccagagcgcgaggagcgcgatggcgcccaagccccagaccttgtaccgccccttcccgaggagcgccgcctccgtgccgcccaccgcggaaacgggaatggtgatcttggtcgccggcatcggcatcggcatcggcaccgggggcgcggcgctgtcggctggcacggccttcatcccagcgccggtggtggcggggtggggagcgggac

SEQ ID NO: 148240 - DNA, 457 bp, Zea mays
  unsure (1)..(457): unsure at all n locations
  Clone ID: MRT4577_66722C.1
ataatgaaaaatagtataaatatttttaattagagtgaatagagagtatagggttcagaattaaggtgataggggtaaacaatgattgggacaaagcctagcatctgtggtngtgttatcagatggggtgggggatggggtccattaggatcttttttctcatagaggatgatgggaagggtgaggaatgttgaatatgtttagaaccggtaaaagaacggtaggaagcttagaagctggtttatctctgaatgtgatatggacaagatggtaggaaccaacttcttaatttagtggagatagaattgttacggaaaatggtttttccggagatgaagtgggggagggagtgatagggtatagtttgaatagaatgaagagaaagttgggggcagatggttaataaatagaagaacgggatattttgaaattataagttatagtaagggtgggggta

SEQ ID NO: 148241 - DNA, 656 bp, Zea mays
  Clone ID: MRT4577_66723C.1
aactaaagcatcatgtcacacttttataagtcataacaaatgggatacaaatggaatctgtgggtagtaaaatcataccacagctactgcagtaaaccgaacacaggtctgagctggtcaaacctacctggccgtggacgtggaaatctgtgggtagtgaatggaatcagaatccaagccaccggtccttgagctaagctgtttagttattagcagagaatagtacaatagcatcttgaacatgactgagaccatggtcacatcatagcaatccgattcatacgcactgctgtcactaaattgtgcagcttcataggcatagctactgttacacagtgcgccataaacgcaccttgttgatctacctggtacaactacagatccagtgaacatccagtttcataatttcaccagaacacacttcaaaaaccccccaaatgcacctcctggcgattttatcagcaatcagtcttcaggtcctcaggccacagatatctgtggaactactgactcgcctttgacctgccaccactgttgctcgcggcattctcttcctgcacaaggtcactggagataagaaagtcgtgttgataaacccttattatcgtgcatagccagttttattagcgcacagttgttgagtctcaagaataaac

SEQ ID NO: 148242 - DNA, 1138 bp, Zea mays
  Clone ID: MRT4577_66724C.1
aaaaacaagagccacgcaaaccaggacccagagaaaaggaacaacaaaagaaagaagaaaaatcataccaaagccacagctactgctataaacccaacacacgtctgagagtacctgtgcgtcctgaactcgcttttttttttttttagtgggctaaactgttttgttattagcagagaatagtacaatagcatcttgaacatgactgagaccatggtcacatcatagcaatccgattcatacatacgcactgctctcactaaattgtgcagcttcataggcatagctactgttacacagtgcgccataaacgcacccttgttgatctacctggtacaactacagatccagtgaacatccagtttcataatttcaccagaacacacttcaaaaaccccccaaatgcacctcctggcgattttatcagcaatcagtcttcaggtcctcaggccacagatatctgtggaactactgactcgcctttgacctgccagtctgccaccactgttgctcgcggcattctcttcctcattctcattcaatgtctgctcgagctcaagtttgtgggctgacattcgggcaatctcagagatagctgcatcacggacctgcacatcatcaccagcaagttcctcgtatgcagcctcaaacgcctcctgccagaaccgtggaagccgtacctcatcactggtccgtgtgtacatgtcccacattcgtcccactaatttctccctctcctccatctcaagggaatcgaggtcgtcggcgagcgggacgtccaggtccccgtagacggaggcgaggtcacccgaggaggaccagcggagtgagacggaggcggcggacatggaccagagcgcgaggagcgcgatggcggccaaggcccagaccttgtaccgccccttcccgaggagcgccgcctccgtgccgcccaccgcggaaacgggaatggtgatcttggtcgccggcatcggcatcggcatcggcaccgggggcgcggcgctgtcggctggcacggccttcatcccagcgtcggtggtggcggggtggggagcgggactgcgggagggagaggatccgtgggcgtggtgagctgcctttgtaatagcagctcactcccgccggctcgaggtaccca

SEQ ID NO: 148243 - DNA, 342 bp, Zea mays
  Clone ID: MRT4577_66725C.1
ctttctttttttttttttttttttcaacgccaagggtaatgggccattgggaaagggggggaataaagtcttacaacgtaagttgtaaaccacacaacgacagatagataagaaccgacagaaacataacacgataggagccactcatggcagatcacaggatagcagtggcacacaagcccgacaactccgcgccattaaagcgtgtattactcgtgaccctcgtcggcggcctcaccctcgtaaaactcagcaccgacctcctcgtagtccttctctagcgcagccagatcctcacgaggctcggagaactcggcctcctccataccctcaccgacgtac

SEQ ID NO: 148244 - DNA, 262 bp, Zea mays
  Clone ID: MRT4577_66726C.1
gtggtggggtcctgcttgtgtgctctgcgttcctctgtggcgtggccaggccggggctggctcttacccggggagtggtgtgcatctcgatgcttctttgccttaatgattggccacatctgggctgctctgcacccacgggataggctggcccactgcagactgcttagggacttctgtgtccatcctggggggtaagcccacgtgacccacattcttggcactatgaacagagaacatttgcctgttggcttctgaagtg

SEQ ID NO: 148245 - DNA, 568 bp, Zea mays
  unsure (1)..(568): unsure at all n locations
  Clone ID: MRT4577_66727C.1
gggggggggggggtttggccnanaaccaacacctaaaatggcggagaaataaagcggtaaagataaaatgaaaataaaaaaggagaagggcaataacacatggatagcgcaatgcataacaagggcttgcgaagagccggtgaccatgcgataattgaacctgctgtaaatgcagatacctacgacagtactgccatcttataagatggcgcgcttagctaccgctagctggagggatctatctcaaatccctgatgactcgcgaatcctctccactgcgatctatatagcgacgtggcccctatctatggcttatacgacggcatcaccctaggcaatggcagacccatagtcaatatcatcttcaccatcggctttggcagccttcnctacacctacatcctccctgtcaacgtgctaaccttgggcagcaccggctactagcctgtacggccgattggcttacttgtcatgggcatcaccttcaatctaggcatctatatcttcaatggcactctcggtactccctatggtttatgccaccagcaaaccccgccccacgaccacc

SEQ ID NO: 148246 - DNA, 231 bp, Zea mays
  Clone ID: MRT4577_66728C.1
tacttccttctgtcgcctggacatagatatggataattttatccctcatgtccatttacatgagaaaagtgagaacaaaactcattggcatggggcagagattgaagttataattgagggaaattggacaactcatcgttcaaagatcctccattatatgcgtcagatggcagtcatcacaccatatgctcagttcctttttaaatttctatctgatgcggcagacaaaaa

SEQ ID NO: 148247 - DNA, 771 bp, Zea mays
  Clone ID: MRT4577_66729C.1
agaccattttttattattttaataaattatttttttttaagagataattattcctgtactcaactatgataatgtcgtgtttacattttagttgttggtacatacacacaaaactctgtttcacaataacaccactgttagcaaaaaaatgagttcaaaaggctcttccggctttcctaatgtggagaaaaccaccgaggtccatatctataacacagatgtcatgtgattctgactattttaggaccaacaaaccatttggaagccaaacaaatccctgttcaatttgcctcaaagcaactcgaacagcgtcgggtggagcacgccggagagcaggttctccccgaggtcgagcacctgaaaaaaaatcgagcaactttgaagaatccttgaagaacctctgcgagaactgatctcacggcgggacataataggctaccgtgttgccagtgaaggccggaggccgtttgtggggactggagagggtagcgctggcgtccagatcggatctcctgtactcggccaaacagctcgttggcatccagatccttctccaacgagcggtagtacgcggagtcacccaccttgtccccaggcttcccgcttggtggtgtcactctcgcccattgaagtcactaacgtcgcggaagaactcgtccaccggccaatctgggatcccaccggcgatgcgttcgtgttgcctggtgccgagcgcgataaagggagggagatgatgggagacgaagaagcggcggcggcgttcccggccgg

SEQ ID NO: 148248 - DNA, 283 bp, Zea mays
  Clone ID: MRT4577_6672C.1
tacattttccaaaaataccatgtctcctgcaaccattgacttaaagagttcttgtgccagtagagttcttttgaccttatgattctgccttgatgatgcatgtgatgctgatgatatattggcacaacattccaataggaaaaagtgaattctgaactcacaagttatggtagttaaaccctgtttctttatattgcctgtttttttacatccgaaaatgtgctttggcccatcttcgtccctattctttggctgataaaagtggccatttttgccaaattct

SEQ ID NO: 148249 - DNA, 502 bp, Zea mays
  Clone ID: MRT4577_66730C.1
aagagataattattcatgtactcaactatgataatggcgggtttacattttagttggtggtacatacacacaaaactttttttcaccataacaccactcggggcaaaaaaactgagttcaaaaggctcttccagcttttttaatggggagaaaaccaccgagggccatattttggccatcattctgaaaacatagaaaaactgaagaaacacttcgagcaccctggtccagcacggggaaataaaatggcattcgttcagcacggagaaaacagtccacccgccagtgcccactcgctgtctccagcgaggatgaaaactctgagatggggctcaccacatcaacattcttgtatttgtttgcacatggcgcctccaccaccttatacatgagaagacagtcatgcagcaccccgtcgctggcaccggatctagcgcgggccttcagcacggggccgtagtcgccgccaccggatctagcgtgggccttcagcacagtgtcg

SEQ ID NO: 148250 - DNA, 1500 bp, Zea mays
  Clone ID: MRT4577_66731C.1
taacatcatttaccgtttcttgtgttgttgtagttttgcgtcataaaacgtatcaacaaatttcgtaaattgatgtaagatacaagtgatctgaggtaattgtagcgtaaaatgcaagctaaccatctacaggagaactgtttcagattttgcaataagatataagagataattattcctgtactcaactatgataatgtcatgtttacattttagctgttggtacatacacacaaaactctgtttcaccataacaccactgttagcaaaaaaatctgagttcaaaaaggctcttccagctttcctaatgtggagaaaaccaccgaggtccatatctgcaaatgtaacatgaactgttaatatgatctttccttgttaatatgtcttttcaagtttgttatgactaacataacctaaagtctaaactgaatgcaaatttgagttagaagatcagattacctatagcacagatgtcatgtgattctgactattttaggaccaacaaaccatttggaagccaaacaaatccctgttcaatttgcctcaaagcaacatataagaaattacataattagcttctgaatatgtgcactgctcttggaatacattctaagagttttgaaaagccttttcttgagtgcatttctgaatttgatgctacagaaggtgttaaatatatacaacaatctgatattctagactacctgaagcatgtagaatcaaggttgcaagaacatgaaaggtgtacgtgaaggatcctgacaacctgtgtgtgctgagttgctagtcactcttgttacttatttatggcatattcatggtgtggtttaccatggtatatataagacaaatgaacctaaaaggcttaaggcaggtgaaagttgatgagtaattaagtcacagcagttagctagtttctgtcccttacaaacaatgcagctggagaagcctagtggacagtaagaagctatgaacctatataaaccctatagtcgtagcaagtgctaagatcataaattaacccatggaagtgaggacatttcattctttaataaccttaatttacaaaaatacaatggataaactgccagcaagtgaggacttttctttctttaataaactctgttatgcacttatgcatacttccagtattacaggacttgagaatcgaagccctattatgcacatatgctgaatacaaaattcattctttttcctgaaccctccctaacacatagttgtaatacttaagttgtctctactagaaattatataactaaagaataacaaatcttacacttcaaaaggctggtgaggttaccgaacagcgtcgggtggagcacgccggagagcaggttctccccgaggtcgagcacctgtaacccgaaccattgtcacatatccatgaagagcttgtgatatcgccattgcaaacaattataccaagagttgctcacagaacggtctaaataaaaagttcccggcaggccccgatgggta

SEQ ID NO: 148251 - DNA, 425 bp, Zea mays
  Clone ID: MRT4577_66732C.1
cgtccttattcccgctcggccgcccttttttttttttttttctttattttttctcttttcccgcttttaactagcatgaattaactgaaaattgttaagccttttacatattgttgaagcttaacccttacccaaaatatcccaaatacatttttctcccgtgtttccacatatctgttattacacctttattttcatccattctacttttgtgcttttataacgtttaacttgcttttcttttctttacactggatatttttaatctcttttaatttttttttttttaaaatttactctattttgcttttctttctttatcatttacaatatttccttatcttttttctcaccttattattaactctaatatttatactaattttttttttattcttttccatatatttctttttttttaatat

SEQ ID NO: 148252 - DNA, 1355 bp, Zea mays
  Clone ID: MRT4577_66733C.1
ggatttagcttagcaccgagtgaatcaataagaatgctcatttcttttcaagctgacttctcttcagctatggttcagagagatcttgagttggtcatgactactggcatctttccgatccctatgactgcaacaattccggtctgcatgcttaaccagtgcagaaaatcttatctcagatctgcccactggaagctgttggtaatcttgtttggagctttagcactgcttattctggtctttgtccgttatgccccagattctttgacagtgggctctcaagactacatcaagattgatgacaaaaaaagtaccatttttgaggagaacaagaaaagtaccattaacaagacccttttccttaatcaaagcagcaaaaagtccaggactaataaggaacacaaaagaactgaagaagctgttgctgagaagtaccctgccagtgttgttgatagctcaaagagagcagatgacaagaataaacctgatgaacaactgcacacaacttcgacggtatccgtgtcccgaggtaatccagtggaagataaggcctcaagagaagctccgcagaccagtgaaaacctcacgatcaggattgctcgagacaaagggaaacgaaggaagcggaaagttggtgcaggactggcagggaagtttgaggtttctagcagccacagcgggaactcaacaccgtcttcgccattgtcgcagagctcaaccccgaaacatggctggtctttttctggggcgccatcagagccgaagcatgaaaacaaagtcgagagcagattcgatgtcgaggcaacggcatcaccaactcgcgctaatcatgagaagaagaaaacttggtcgcaagtcgctaaggagcagcctcgctctcgttcagcctcaccaggaatcacatcaccacctccaagccctgcagtgaccgcccccgtcgcatggcgctctccgtcattggcccccacgtcttcaccgacagctccacagtctcgtgctcctggctccaatctggtgaaagacaaggctgtgaagagagacgtgggtgctgctgcggctgcggctgcgccttccccgaagaaagagttcacctacgacatatggggagaccatttcccaggaaacctgctggtggtcgcaagggaggccgcgccacgcaagatgcctgacgcttctgaaggcgcctcctatagcttgtttgctagagagccccagaccctcatgatgaagccatcatcatctgcaccgccgcccatgtctcgcggccgcggttcgccgccgtctcatgtagcatctggttacggaataaaatgaccctgaaagcttaaaataatttgaccctgcgtcttgcatgc

SEQ ID NO: 148253 - DNA, 305 bp, Zea mays
  unsure (1)..(305): unsure at all n locations
  Clone ID: MRT4577_66734C.1
cttgacagatcactaacaacgagcaggagcatttngtattagattgcgttgtacaagcaatgcantccatgagaatcacactgaaagattcagtgcatctacaaatatagtgagaacgcgattaagcaaaacagcataaaacaccatgcgatatcaatatagctagtggcgcaaacagtgcacgattcgaaacacaacataccattaccatcgtgataataaatggaaacgataggtgagaaaacaagacgacgtcacacatgnaattatgtgctttctcgatgcataggacaatgaataagcat

SEQ ID NO: 148254 - DNA, 2284 bp, Zea mays
  Clone ID: MRT4577_66735C.1
ccggccgggtcccaacatgacgtccagaccattctcctctccgaattcaataattcctccgccgcaccacgcttcctcctcctctgctccgcctcttcatccagcgagcgtcctccgattgctgacggatccctcctcgccgccgccgcgggccgaccgtggggagaggaggggaggcgggagcgatggaggccgccgactacggcaagctctttgtcggcggcatctcgtgggagacgagcgaggaccgcctccgcgagtacttcggccgcttcggcgaggtcaccgaggccgtcatcatgcgggaccgcagcacggggcgtgcccgcgggttcggcttcgtggtcttcgccgatgccgctgtcgccgagcgcgtcactacggaaaaacatatgatcgacggacgaatggtggaagcaaagaaggctgttcccagggacgaccacagtattgtgaccaagagcaacgccagcagcatagggtcacctggaccgggacgcaccaggaagatctttgttggaggcctgccctcgaacgtcacggaggctgacttcagaaggtactttgagcagtttggcgtcatcaccgatgtggttgtgatgtacgaccacaacacgcagaggccgaggggctttggattcatcaccttcgattcagaagacgccgtggacaaagccctgcacaagagcttccatgagctcaatggtaaaatggttgaggtcaagagggctgttccaaaggagcagtctcctggacccgtcgcacgctcacctgtgggagtggggcagaactatgctatgaacagggttcatagcttcctcaatggcttcaaccagggttacaatccgaaccccataggaggttacggcatcagggtggatggaaggtatggcttgatttcaggtgcacgaaatgggttctcttcttttggaccagggtatgggatgggcatgaatgttgaaggtgggttgggcggaacatttggtgcaagctctggtttcatcagcaactccaacgggaggcaaatgggttcgtacttcaatgcaagttcgaacagattgggtagccctattgggtaccttggccttaatgatgttccgggatcaatgttgagttccatgtctaggaatgtttggggtaatgggagtctaaactacccgagcaatcctacaaatatgagtgcttttgcttcacctaggaatgggggccaagtcagtcttcccagtgacaattggggaggtcttccttctgctcatgggatggacaacatttcaagccttgggtcagggaaccttggtcgtggaactggagataataactttggtttgccttctggtagctatggcaggaacaactcaactggtacaattggtgagcctttttctgcagcaggcaatacatatgaagtaaacaatcgagatacatatgggagcagctctatttatggtggcacagcctggaggttcgcatcatctgaggttgacatgccttcttttgttcatgatattggaaatgttgatccgactattaaatgatacatgtcagcaagtcacatgggcaactaccctgttaacaacaatcagccaagcagaggcatcagttcctagggggcggcgagtattacacttgggggtagtagaaggaagaaacacccattcagccaggcaatcccggcgcacacggctgtgaatcggtcggtgatttgtcaggttaatacacaggttagtttttgtgtagctaacccagcggcgtggtttgcgaacaccgacatgctagaggtggaagctgctaggctagctagaggaaaggagcgcggatggatatacagaaacatttcgtgaaggttttgttttgtttcttgttttttgttttgtttttggcggggggtggtggtcatgttctagttttggttcgtacgcgcgtggtgaggccttttggagttttgaatgagatgtagtagtaattgttgcggcacatattttagaagtgaagccatgttccaacagaagctggaaagagatgtctgctgtatacgggtgagcatgtataccaaccaaagggatgctgtattatacattagcctgtgtgtgtgtgtgcgtgtttttttttggtttgatccggtttttagccatttgtcttttttttcactctggagattttgctgacttgctctgaattattatgcatgcagtggtgtttattttgttctcttcatgtggtgtgataatacatatgcctttttttcttcttctggtgtacataactggatccgattgtttggcat

SEQ ID NO: 148255 - DNA, 333 bp, Zea mays
  unsure (1)..(333): unsure at all n locations
  Clone ID: MRT4577_66736C.1
gcggggactcctgaacagcggccgcccttcctttaattatttcccccgccacaagccaggccagggaggcaattttataacgaaagcgcgagggcgcccacaacagagacggncaaaacagcaccggaaggcacacacaaactgccagtaaaacacaccaacttgaggtacatcctgcccgccctcccatgagataagaggggcgcacacccgatgatgcgacaaccactaaccggaacagctgccgatgcctaagacccactcaggagggacggcgcccatgcaacctaatcttggaggggggtcgcgcgcgggttcatagatctaggcgtc

SEQ ID NO: 148256 - DNA, 3034 bp, Zea mays
  Clone ID: MRT4577_66737C.1
ccagaacccagatcaagaaccccgaaatcccagcgagcgagtcttttttgctcctcagcgttgaggaactcgtcgacgtttcggcgcgctggttcgagcatcttgtttgggatcccaggaagttcgttacttggaacttctgtcccgaggaagggcgcgcggttcgatgctggggcggagcagcggcttgcgacactcagatctggtgtgaggaggagatgccggtggtgacacggtcgcggctctccgccgcccgcggcgacggcgcgggcgcgctgccgtggggctcggcgtcggcggcgccggctctgaggcacgacgccggggcgccgcgggaaggcgtcgcgagcaagaaccaccaccaccaccacgggctcaaggagaagctgcgcgcactcacccaggactacgagcagcagaagcagaagctcgccgcgtcgcagctccgccgcagcatccggtgcctcaacgcgtgggaggcgatcaacgacgagaacgccgaggaggaggaggacggcggcagggtggccaagttccgctacgacgccttcgctcaggtccccgagtccgcggtgctgagggagaacgtggcgccaccgcaggcgcgagcaccgtccaacgacggcgccgtgctcgcgcggacgactgaaccgcaggcgaaggagaacgcggtgggccgcggcgccaacgccatgtcctgccccaccaagaaggcggtaccggcgctcccggtgcttccggtgccaccggcgaggaaactctctttgggaggggctgtgggcggcaagctgaaggccgccggggaggtcggggccggcactgccgaggcggcggagagccggatcctcgtgttcgtgaggctgcgccccatgtcgaggaaggagaaggaggccgggtcgaggagttgcgtcaagatcgtcaacaggaaggaggtgttcctcacggagtccgcctcagagaacgactacctccggctgaagcgtggccgcgattcccatttctgcttcgactcggttttccctgattctacgacacaggcagaagtctacagcacctcaacagcagaccttgtggagggtgttctgcaaggtaggaatgggacagtgttctgctatggagctacaggggctggcaagacctacaccatgcttgggacaatggaaaaccccggggtaatggtgcttgcaataaatgatttgttctccaaggtgacgcagaagaaccactcaattaagctgtcatacctcgagatatacaatgagacggtgagggatttgctgtctcctggtagcccccttaacctgagagaagataaacagggaattgttgctgctggtcttacccaaagaagtgtatactccacggacgaggtcatggagttacttcagaaaggcaacaagaatcgaacaactgaaccgactcgagtaaacgagacctcatcgcgttctcatgcagtactgcaggttgtcgtagaatacagatccttggatggagttaacgtaaaacgagctgggaaactatctctcatcgatcttgctggatccgaaagagctctggcaacagatcaacgcacgcagaggtcaatcgaaggagcaaacattaaccgctctcttcttgcactcagcagctgcattaacgcccttgtggagggcaagaagcacataccgtatcgcaattccaagctgacccaactcctcaaggactcgcttggaggagcatgcaacaccgtcatgatcgccaacattagcccctctaacctttccttcggcgagacacagaacacgcttcactgggctgatcgtgccaaggagataaaaacaaagacgcaacaaaccactgtgaatgaggaggttctggaccaaccagactctgaaactatgcttgtactggagctccagaaggaaaaccgcgtgctgagggagcagttggcgaagcaacaacagaaattactgactgccgaggctcagctactcgcttcaaaaacctcgccacaacgatctcctgctcccccgtctcacgtctcaactccaggatcaactcaaaggaagaccagacgatctatcttggctgctggtggtgggaactacttcagcaaactggactcaaagaggcatgcagccgacaacgcgcaggtcagggagctgcagaggaaagtgagcacgttggagtccgagatcgagaagatgaaaaaggagcacctactgcagctgaagcggaaggacgagttcatccgtgacttgatcaacaggaaggatcctaataacaacagtgaagagacagcaacaggtgatagaagagttgtcacgagggcgagcgtgcgaaaggcacagagagatgcatcagccgcaggcgagctgaaaagccccagccgggtgttcacatcaccagcgccaaccgcaaagaagcgtactttctgggacatcggaggcaacagcccttcagttcttgctgccaacggaagaaagactcgaagccatgtggcaacagagacaccaaagaaagcatcatccaaactgcttcagccaggatttgcacggcaaacatcgacccatcaaagattcacatgaaagactgcctacagctcattaattactaattggagtttagtcgaaatacatcgtaatgctttttagtttttttatccatattgagttattgaaactgttttttttaaattaacttgaggcagggttttccttttcttcggaacatataaggttttttccccatcttactggtattaatcagaaaggcagcaataattttgtgcagcttagggacttggtgtcttctatgtgtgcagtacccattcttatcatttctgaaggttgtccaagtggagatcataaatgttttccgcaccagcctgtacactaaagtgaccaagataaaaaagaaggaaaagttaaaaagtaatattgtttcaattgttccatgtacaagtactttttcccccctccatgtacaagttgaattttatgttgggatagcagcagacctcagcttatatgttaaaaaagtttatattatgccc

SEQ ID NO: 148257 - DNA, 303 bp, Zea mays
  Clone ID: MRT4577_66738C.1
acccaaaggacaattttatcactggggggcggcaaacccagaggacagatgaatatgaacatcaagcagggccaaacaaacccaccccccatcatacataaagcagggcatcaccaaccactcaaaagtatttttagaggccagggagggggccaacatattgggttgccaccaaagggtaaaatccccaataccaaggatgagtaggtgtatgccaataaacatgtttcacttaggggcagcgaaaaaattgtaaactgccgccacgacctcaggagcttggtcgtgccaaaagttttttag

SEQ ID NO: 148258 - DNA, 296 bp, Zea mays
  Clone ID: MRT4577_66739C.1
tttttctttttctttttttattgcttttgcaggggtgtttaaattactgggaacggaggggacaaccgaggccccccaaacccacaaatgaaccatgacctcacattgagtacagctaggagctctcttctccgagaatggagaaaaaccagactggagcctcagaccagagcttagatttccgatcaagcaaatcttgtacatcagacaaaaaacagcccggtcttattgccagaaagcacaaaacagtccgcgggaaaacactggaaagcaactccatggtggaagcaccaacc

SEQ ID NO: 148259 - DNA, 442 bp, Zea mays
  Clone ID: MRT4577_6673C.1
gtgctggaatactatccgtgcaacacagaagctaaatgagctgctgtagcacacattctggcttgtttgcttcgccgtaggcgaccaataatgatacatgtatgacaacagggtgctcatctcttgttcggatgagactatggtcattatacactccggactgaatatgaacactcttgatatacattgcgaagatgcagaggagactgattccaattgcatgaaggcgtatgcatctggtagaagacatcttggctctcctcccgcatatgaaggacaaccggcacacggtctagtccaaccaaagtaaggggcacacgcctggcaagctaatcgagctcaagagtgtgcatcagctgtctttctacgagactttggctacagaccatgcgactggtgaaggcgcgattgtaccaactggatcgcagtatgatgcacattt

SEQ ID NO: 148260 - DNA, 1169 bp, Zea mays
  unsure (1)..(1169): unsure at all n locations
  Clone ID: MRT4577_66740C.1
aatctctcactattcaattttcaattttaaatagcgagagattttagcctaaaggtctgccattgccattgccaattgctaaagtttttttttgtgtgtgtgcttggggcacctgaactcggcttttgacatggaacaatgcggatctgatcatttttggcacattggattgtgctatcagttaccataagggcaccagcttaaaaaaccctaagttaaagctatctaggtgtactgctggtcaagcaagctttagggaatcgagttctgtacaggcacactgcattaaggctagtggtgtggcctcgcctaaaactagtaaaacacattagaaaaaggaacattttgattccggtgtcttgtatatggtgtctgtgttcatttccttccatgttcttctgtgctggtgtgacactctgtccgtttcatcactccatcagtgtcctacctgtatcttacatgatctttatgctataaactttcaggttcttcaggctgctcttaccctaccggtgcaagcgccgttggaaccatgaccccgaccactgcaggcaccatgggaggaggaaccgcagggacctccacaggcacaggcacagccggcgctggcatggggacaggcactgccaccggaactgcgggtacggggttcggcggcctaggaccaggcacggacgctagcatggacaccgcggcggcggcggggcttgctcctccccacaagagctggtgggctggccctggccaccgccctcgtcgcgcttctcctctccgccatggtgctcgcgtgacgcttggtatggcctcggaaacatggcctgcctgttgctagtagaaagctagcactgcccttttggtaagggcgtttcaggagtactgtggtggactatagagagaaaggctcctcctctgtgactgtgaccacctcacgttctgcgtactctgtaatctggtaggatgcctgtctctatcatgattcatgaaggacgattggcctgtctttttttgtcgtgctgtttattaatcgtgtgtaaatgtagtactagcgaagggaaggcactggtagctaggttagctcgagtccggatggaatgagaatgctactaatacaacaatgccgtggtngtgggtgtgtgtgtttttagcaaaaaaaaaaaaaaaaggcccct

SEQ ID NO: 148261 - DNA, 905 bp, Zea mays
  Clone ID: MRT4577_66741C.1
acctcttctccgctcctctttaagccgccgcccgtccccctctgcgttccaccgcactaccgccagcgcagcgacaccagagctcgttcgatagcttagagcggaggcgaggaggaggaggagatgaggatgtcgctgctgagatccgcgtcgcagcacctgcgccgccgccgcgactactcctccgccgcccgcgcagccggagcggaaggtggccatcctcggcgcggcgggcggcatcggccagccgctggcgctgctcatgaagctcaacccgctcgtctcctccctctccctctacgacatcgccgccacgcccggcgtcgccgccgacgtatcccacatcaacacccgcgccctggtgaagggcttcgtcggggacgaccagctcggggaggcgctggagggcgccgacctcgtcatcatccccgccggggtgccccgcaagcccggcatgaccagggacgacctcttcaagatcaacgccgggatcgtcaagggcctctgcaccgccatcgccaggcactgccccaacgctctcgtcaatatgatcagcaaccctgtcaactcgactgtcccaattgcagctgaggtgttcaagaaggctggtacctatgatgagaagaagctgtttggtgtgaccactcttgatgttgttcgtgctaaaacattctatgctggaaaggcgaacgtgccagttactggggtgaatgttcctgttgttggtggccatgctggaatcactatcctgccactgttctcgcaggctactcctgcaagtaatgcattgtcccatgaggaccttgtcgccctcacgaagaggacgcagatgggtgggacggaaagtgttgaagcgaaggctggaaagggctcagcaacattgtcgatggcatatgctggtgcag

SEQ ID NO: 148262 - DNA, 274 bp, Zea mays
  Clone ID: MRT4577_66742C.1
tatggaattcggaacaaggtattatgtctacagctttcactacgcctgctacagaatgagaccagaccggccgtctcttgcctttcctgctgcgcaggaccggtgaagatggcgttgagacgttcgctccgcacaggcatgaactgctgcctcgacaagatgaaggcctccgagaacacgctattggtactctaggtcccagatctgaatgggtgtctccctgacaactcgtcttgtgggcagataggtcataaattaatatagcaagagctag

SEQ ID NO: 148263 - DNA, 537 bp, Zea mays
  Clone ID: MRT4577_66743C.1
tctgttccgctgcaacctgagccggacgagccacgtcagagatgcttacggaggcgggcggacgatgatgcaccggagtcctggcgagggtgctctaccacggtcagaccggccgttccacgggctacagcttcttctgctactccaccagggtaggagatggaccaggcactttcctcactcaacgagaatggaaatggaatgcaggtagatcaccgtcaacttggccctcgacaagaagacacagagttcaaatatgtggatgaaggtgaaatagttatgttatggattcctatgcgatgcaaccgagcactactacccttgctcatctcatccagagcacatacgatgagagcagacagcaggaaaaggaaaaggaaatggaaaccttactgatctagcatatcattacattgtcattgccatctggtgtgagttcagcaaatatatacggatcatacagtgccaattgtgattcttgcgagattaggatgctgattccttcgatcaattggagcacagtttaggtcttgatac

SEQ ID NO: 148264 - DNA, 294 bp, Zea mays
  Clone ID: MRT4577_66744C.1
acgtcacgcgagactcgaacatcactcgtgctaacgatgtcaaacgcgtaatcgtttagcatataggcgctaatcatacgacgattccatcctaacacatggtgactacaagcactcgttagaggcatgtgcttcatcactcgaggaccagacttatttagcgtccgcagagacaagctcactcactgagcacaatttgcatttgccaacagaagccatctagaatgcagtgcacgcgaataacaacgtacgtaacctccgtctccttgttttgccgattgcatcgccatcata

SEQ ID NO: 148265 - DNA, 239 bp, Zea mays
  Clone ID: MRT4577_66745C.1
tttttggttttttgggcgagatctctttgcactccccaacaagcaccattttgtccttaggattaactgagaacacaatcttacaggagtaacaaaattcgttgatccacagtccatgctggtagatgcatgggtctaatagaggcgctgattaacaccttgctaactacgtgcacataagctccttggaatcaaaaacacaggttggcgactacctaccctacgaagccttattaacc

SEQ ID NO: 148266 - DNA, 133 bp, Zea mays
  Clone ID: MRT4577_66746C.1
cctttacaaagttcgacggtgtctttttaggggcatttagggtgacattgcccccccttgggaagccaatgccatccttgatgcccgggcgtctaccgctatagaacatacttctagccaaattaaacttctc

SEQ ID NO: 148267 - DNA, 290 bp, Zea mays
  Clone ID: MRT4577_66747C.1
ggaccggggggaaacctttttaaaaatttttttttggaaaagttgaaatccccctgcatctcaaatagggctcatttcctcctttgcaaaaaagatacaggtttcaaatttttttttggatggaacaacatgatggttaagcaaatgggcaccttttatgatttaacccttttagggtccttttttgaaagagggatattccggtgttaaagcaaatcattttttttcctatagggtgctacggaaaagggcttttttgtttgctctggacagataacccttttcggttt

SEQ ID NO: 148268 - DNA, 150 bp, Zea mays
  unsure (1)..(150): unsure at all n locations
  Clone ID: MRT4577_66748C.1
cacaaagatactcncacctgctaggaggtnttatntctgcagntcagtaccgntgancngtcgntnttgnngacacggcgtngcganagaaatcgacnacggtcgtccctcnaacgngtcacnagncccggggagaccatctgcaaggag

SEQ ID NO: 148269 - DNA, 342 bp, Zea mays
  Clone ID: MRT4577_66749C.1
tcgcccacgcgttcggttattgctgggctatccactttttactgctatgcaagagctggcagcgggggtgctattagagattgtatcaccgttgtttgttcatcacacaactcacagctgttaaccaccacacatgtatccaaagtaaaggcatttgaacgctgaagtgcaacacgcaccctaaccatgcacgatcgacctgtagacgacggcaccgactccgtcatccatgctacattcaccgatcaccctcaggacgactcgcctgagcccaatgtcaactgcagctcaaccttgacccgaacttggcattttgctggaaccattccacttggctggaac

SEQ ID NO: 148270 - DNA, 625 bp, Zea mays
  Clone ID: MRT4577_66750C.1
tttggatcctaatataatatcgacggcctaagtttatgtgagctatcactctatttctgagctttcaattttgcagattcctattaggccctgtttggaagtgtggtatttttgcagttttaaaataatactatggtatttgatgatactatagtattcaaacttaaaaggtgtttggtttgtacaggcaaaacacagttttaaataccatggtttatccaaaactgtggtatttttggagtttttgaaactctactcgggacctcagttttcttctcttctctctacgtatactttgtttttccaatggaaccaaacatatcttggttttgagcaatattgtggttttactgtggtaaagtaataccatagtatttgtgtcatgtacaattgtaaactatggtatctcaaaactatagtatttcaaaactgcatttccaaacaggcccttagtgttttttctgtatgccatgtattgggcaggaagctgacagcactagcagtggtgtgcaatttgctgaaaaccgaaataccgaataccgacccggattattggaaacccgaatcctttgttattatacattttggctaccgaccggttttctaatatggaaactgaagtttt

SEQ ID NO: 148271 - DNA, 789 bp, Zea mays
  Clone ID: MRT4577_66751C.1
accctcccgccccgccactcccaccctacaccgacactcccctatcctccgccgccatggaccgcgaaccctccgtctccgacgaggacgacgacctcgagaccctcgtcccccagaaccacacaaagcccccttccccctcctcccgctcccgggcctccttcggcatctccatctccggcttccgccccgcgcttccctcctcggccacatccctcggccgcgtcctctggtcccgccgatatctcctcatctgcgtctgcctccccgtcctcttcatcatcctcttcttctccctcggcggcgcctcgtctctccccgcctccatccggctaccctccgcctcgcccgccgccgaccttgcctcctcccgcatgcgcgaggccgagctccacgccctctacctcctccgctcccagcgctccggcctcctcagcctcttcaaccgcactgccgcccctgagcccaccaacagctctaccgccgcccctgtctcgctgtctgatctccagactgcgctcctcagccagatcaagatcaaccgcgagatccaggaggcgctcctctcaacgcaccactctggggtcggcaatgctacggatgatgctttggatcttgatctgccaggtcccggatgcaggaggagggaactgccgtacaaccggcggacgatagagtggaatcccaagaagaatcggtacctgttcgccatctgtctctctgggcaatgtcgaaccacttgatttgcttggagaacacatgttcttcgcggcacttctgggccggatc

SEQ ID NO: 148272 - DNA, 1174 bp, Zea mays
  Clone ID: MRT4577_66752C.1
ggacatcataatcatatcttacaggttgctagtatacaggtctaaaacgaggagagacctgttcaaggaggggaagaagcttctcatatgaatggaagcctgtgtacaagaagagcggcttcactatccgcaatgggaagctccacggttcgttcctctacgtaaaaacaatggagtagacaggggatggcggcgggagcgatcaaatcaaaaagaatacagccggggtctcagcccgtcaccgagcacgcgatgtgcaaccaatccaagagagagcctcccgtggggctgggagaacccaaaaaaaaaaaagaatgatcaatccgtctgtcgtctggtgatggcccatcatcagctgttgccccgtttatgccgcttcgtcgcgtgggggagaccgtcagcgctagctcccaacgttgtcaggtgatggccgcctagttcgttactagatgctggatcggctggtggtggttccttggagttggaggacacaccagcagcagatcgcttgccagcacgctttcccaggttgatctgcacagagatgctggtttgggacagatctacacctgagctctgaagggcgtgagacaacgacttaagtaactcttgggaataggtactggacacactgatcattccttcatctattgccaactcctggctgttaagcatttcacttttcactgcagagtcatccacaggggacggacctgtccgttgaggttgggactgagacatagcattatttgtaatattcgccggagtttctgctgatctgtagcacccgctagccatgtggtcggtttctacctgatcctgtgcccctgatgcagctgcagatgtgtgattatcatcgagtttcccagtgaaattagatccaggggaggatccatttctcagaaatgtgaagggtcaggcggggaatctcctgagatttggcctttactctgtgcatttttccagaatgatcgaaaatacatatttgcctcgtgccgaatttttgcattttcttggttccattctggaaatgttgcctcatatttttgccttctcttgcaaacccggcccggccggcctcgaggcccaatttttttttttttttttttattttttttttttttttttttttttttttcccgaagcccggccggcctttcgaagcggccgccac

SEQ ID NO: 148273 - DNA, 542 bp, Zea mays
  Clone ID: MRT4577_66753C.1
agttggcaatagatgaaggaatgatcagtgtgtccagtacctattcccaagagttacttatctcgttgtctcacgcccttcagagctcaggtgtggatctgtcccaaaccagcatctctgtgcagatcaacctgggaaagcgtgctggcaagagatctgcatctgctggtggtgtatcctccaactccaaggaaccaccagccgatccagcatctagtaacgaactaggcggccatcacgtgacaacgttgggagctagcgctgacggtctcccccacgcgacgaagcggcataaacggggcaacagctgatgatgggctcccagacgacaacagacggattgatcattctttttttttctgtctctcccagcccgacgggaggctctctcttggattggttgcacatcgcgtgctcggtgacgggctgagaccccggctgtattctttttgatttgatcgctcccgccaccatcccctgtctagcccattgtttttacatagagatcgaacgaaccgtggagcttcccattgcggattgtg

SEQ ID NO: 148274 - DNA, 461 bp, Zea mays
  Clone ID: MRT4577_66754C.1
aaaagttcaattggtttttggacaaatttcggattaatttgaatagccttaacattgacccagatctggattcggtacaaacgtaagactcaaaaaacactcgtcgttaaaagcccagtcaaacgaaagcggtaaacacgagacccaactacaatttgtacaaacaagcaacagtgatctctcattaatccgaccatggattcttgtgctccgggatgtccggactgagcctctccttgccctttcccttcccactcccacttccactggccgaaccattatcaccaataatcctattctcccaaggctgctcgtggcccgtaatatcaaacccaggcttatcgcccacagcctccaaatcatcggtatcgctgtcccccacggcgaaaggcttggtgagagtgtgcgtcgaaacagtgctggcttccttaggcttatccggattgaaaccggtgcggacc

SEQ ID NO: 148275 - DNA, 631 bp, Zea mays
  Clone ID: MRT4577_66755C.1
cctcgaggccggccggaactggcaaaaggaagaagacatctgatctgcgagaggaggcagcgtccgaggagatgcatggagagccagcacggtgtacggcccgacagccacggctccaccccccggatctgcacaaccagccggagctccggcgagcgccgcccccgtcaaggagttcacgcatacctgcaatgttctcgcacgccgtgctcatcgctaggatacgatgatgctctcacgtcctctctgccgcactcaactacctcggcatcatcccatccaagacaatcccctatgtatgaaccgttttcactgcctgattacataaagcgaggcctcccagcggccattggcagttctcttggtcgtctcttttgtggaaaggacattgaatcatgatggggacgctacgaattcttgaacatcattattatgatcaactgcatctgaggcattcttgcaacttgatttgctattgtactctactacgttactggaaaggagagcttccttgtcacgacactttctggattcgcacggatgcttgctggcttacttgggtcctagaagcaggtcttaccaaagcttgagcttactatgtgattattctggaaaataaggcaaagcggat

SEQ ID NO: 148276 - DNA, 455 bp, Zea mays
  unsure (1)..(455): unsure at all n locations
  Clone ID: MRT4577_66756C.1
cctagttaaagggggttaaaccaaaagcctaaaacgggcctttgggggcttggccccacatgtccaaaacaatcggccatatagaccgttttattcaacaagcagcctttgcatgcaaaaatagcccccccccgggttaaatgggactaaggcatgctggggagggaccaaagggaaatgctgggggggatcccccccccggggactcccggtttggaaaagggcttgagcagttcgtacggcacaatcccggggccgaaggggtttttggggcccaggttgtggttgccctcggcgaagaacccctggatctccttcatcctgccgccgaacttttggaacgccgccttcaccaggggctccgccagccacgagggctccgggaacccccccttgtcctcctcgtggggcgagggcgacgaggggatgcccagcggngtcaggaccttgggggc

SEQ ID NO: 148277 - DNA, 415 bp, Zea mays
  unsure (1)..(415): unsure at all n locations
  Clone ID: MRT4577_66757C.1
ggctgctgcaatgtgcttaatgatagctgcgaagctactttatgttgaagataggctgataagcaattctgtttctgagaaagccactgaggcatttgaggaccctgggcttgttgggatgcctcaaattgttggtaccactgctttatctaatacacgaacttaggctggaggctttactatgggccaagttgttcaagaagcataacctttgttttctggtgcatatgaagggctttgtttgtgctcgtcaagactactttatctcatatgggagtttcctattatagtgattcgaagaccggctggtactaataaatgcaaggatggtgtaaatcgtttgtaggctttcagctgnggccatgaaaattcttgagagcaagattcattcactggaaacattntttagatctag

SEQ ID NO: 148278 - DNA, 437 bp, Zea mays
  Clone ID: MRT4577_66758C.1
cacagcgatccacacaagcacttcgacgtcgtacgggcgctgcacacagacacaccgagcgttggcaccaatggcttactaccaggaggtggactactgctcggaggaggtgaggtcggtggacccggacggcttcggccgccacggaggcggcgttcagcagcacgtcgtcaaggagaagttcgaggaggtcgacacggtctgacacgccggctccaaccaccaccagcaccaccatggtgaccacggcggccacggcttcgtggtgcgcgagaccagggtcgaggaggacatcaacacctgcaccggcgaggtccactagcgcatggagagcttcctcgccagggctaactgagccgcccggtggtcggcatgcactcccgttcgagcctgactgcgtgccttatgtatgtctgccggtgactggttgtgcaagg

SEQ ID NO: 148279 - DNA, 309 bp, Zea mays
  Clone ID: MRT4577_66759C.1
ggggggaaaaagggtatttattattcagcttttggtgggttactccccactggggctttattggggaacaaactagcacccgggttacatttttccaaccaagggccccaggaaaaaaacccagcccttgttttccaaggggaaacctgaatcggggggggggatgccattcacaaaaaagggggggggcccggtcacaccttgggcccagccgtttttgaaagaaatccttggaccctgatcaaaatgggaatcgttaaaacctgttttgaatgccgccaaattagtttcaccgaggaggggcccaac

SEQ ID NO: 148280 - DNA, 551 bp, Zea mays
  Clone ID: MRT4577_66760C.1
cacagcaatccatactagcacttcgtcgtcgcacgggcgctgctcacagtcacaccatgcgttggctccaatggcttactaccaggaggtggactactgctcggaggaggtgaggtcggtggccccggccggcttctgccgcctcggaggcggcgtccagctgcacgtcgtcaaggagaagttcgaggaggtcgacacggtctcacgcgcctgcgccaaccaccaccaccaccaccatggtcaccactgcggccacggcttcatggtgcgcgagaccagggtcgaggaggacatcaacacctgcaccggcgaggtccacgagcgcagggagatgcttcttgccagggctaactgagccgtccggcggacggcatccacgcccgttcgtgcctgcctgcgtgccttatgtatgtctgtggttgactgagtgtgcagggtcatcgtacttggctatcgtacgtgcacgcacttagctcctgtacgatatacgactataagctcgtgacctgataaaacttcttcgaatactaatacctataaaattatttttt

SEQ ID NO: 148281 - DNA, 793 bp, Zea mays
  Clone ID: MRT4577_66761C.1
cccacgcgtccgcccacgcgtccgattcccgttccccgccgcccctcgcctccgctgcacgcgatcgacgatccacagccaccacctctgcgttccccaccggagcatcttcaccaatcaccactgggctggctcccgcgttccccactggatttctgcacccagcgcttcttctgaaatttagaaggcggtggaaccgtcaaatcaaatggagggatcctcttacgcgtcaaggagctacagcgaactagctgccgcagcttccggaggtggaaggacgctgagggtaataccgctgcggcatccgctgggttctctgtcgacgtcttccacgtcgccgtggtggcgggcggtggtgggaagggctcggggcatggggccgcttgattgggcggaggcggccttgccgtgtgtggcgtggacacggaactacagatggaagcaggacctccaggccgacctcgcctcgggcatcaccgttggagtcatgcttgtgccccaggcaatgtcatatgcaaagctggctgggctgcacccaatttatgggctctacacaggctttgtcccgttatttatatatgcaatatttggctcgtcacgacaactagcagtaggtccagtggcacttgtttctcttcttgtatccaatgttcttgggggtatagttaattcatctagtaagctgtacacagaattagccatattactggcattcatggttgggatattggagtgcttgatgggactgctaaggcttggttggctcattcgtttcattagccattctgtaata

SEQ ID NO: 148282 - DNA, 578 bp, Zea mays
  Clone ID: MRT4577_66762C.1
ccgcgatccaccatcacacacagcaatccacacaagcacttcgacgtcacacgggcgctgcacacagacacaccaagcgtcggcaccaatggcttactaccaggaggtggactactgctcggaggaggtgaggtcggtggccccggccggcttcggccgccacggcggcggcgtccatcagcacgtcgtcaaggagaatctcgaggaggtcgacactgtcgcacgcgccggggccaaccaccaccaccaccatggtcaccacgccggccacggcttcgtggtgcgcgagaccagtgtcgaggaggacatcaacacctgcaccggcgaggtccacgagcgcatgcagagcttcctcgccagggctaactgagcagcccggccggtcggtatccacgcccgttcgtgcctgcctgcgtgccttatgtatgtctgagattgaggaggggcatcggacttggctagaggacgtacgtgtactcactcacctcctggacgaattacgactataagctcgtgacctgaataaaacttcttcgtaatactaatacctacatcatcaacgctaaatgaatgtgaag

SEQ ID NO: 148283 - DNA, 365 bp, Zea mays
  Clone ID: MRT4577_66763C.1
gcaaaaggctactctcggagccggggttgaaccggagcggcgggcggccgggcggcctcgcatcttcgccggaggaaaacaaaattaaaggcacagatggccgacccgtcagcatcatcggtgccgccggttgtcaccatgggatccgtggtcactgtggcctcgccgcccacgggtggtggatcgacggtctctgcaggtatcacaggcggcggcaaaggcgggccgtgcgcagggtgcaaatacctgcggcgcaagtgccagccggactgcatatttgcgccctatttcccgcccgacaacctagacaagttcgcgtacgtgcaccgcgtcttctgcaccagcaacgtgatcaagattctcaa

SEQ ID NO: 148284 - DNA, 539 bp, Zea mays
  Clone ID: MRT4577_66764C.1
gatccaccatcacacagcaatccacacagcacttctacgtccacgggcgctgcgcacagacacaccaagcgtcggcaccaatggcttactaccaggaggtggactactgctcggaggaggtgaggtcggtggccccggtcggcttcggccgccacggcggcggcgtccagcagcacgtcgtcaaggagaagttcgaggaggtcgacacggtctcacgcgccggtgccaaccaccaccaccaccatggtcaccacgtcgggcacggcttcgtggtgcgcgagaccagcgtcgaagaggacatcaacacctgcaccggagaggtccacgagtgcatggagagcttcctcgccagggctaactgagccgcccggtggccggcatccacacccgttcgtgcttgcctgcgtgccttatgtatgactgtgattgactggttgtgcaggatcatcgtacttggctatcgtacgtgcacgcactcagctcctgtacgaattacgactgtaatgtcgtgacctgaatagaacttcttcgtactatct

SEQ ID NO: 148285 - DNA, 449 bp, Zea mays
  Clone ID: MRT4577_66765C.1
tgggtaccctcggagccggccgggcgcttgttaccgtgcttggtcgccgggtggacgacgtgacatactggatctcgcggctatctgaaatcctgtgagggataccgactgagagcctgacgcgagaaccaaaagtggacgcgggacgcattcgcgccgagctggccagtggctacttaggacgggtgcccagagtgtcaccacctgtcgcgacagccatttctggtctcgttgtccaatctattcgcggacctcagtaacaggactctgcccgaggcgaagaactaccatgtggaggtattacacccgacaaccgggcgcgtgttgataggcatggaccctattttattattaatgaaaccgatgccaccagccaaagtgacgttaactgaccaactccacgcagaggctacaataacactgacaggaacaggccaggtgacgtatgc

SEQ ID NO: 148286 - DNA, 346 bp, Zea mays
  unsure (1)..(346): unsure at all n locations
  Clone ID: MRT4577_66766C.1
accggcgccgcagccagggggggcggaggggaccgccaaaacccagacacacgccaggaacaccgacaagaccagcgcgaccaagccgaacgacccggggacggagcggaacccggccgccaccaacggaggcggcaaccgccccgcccccaaccacangcagcccgccaccaccgggggggcgagcgacaccgacgcccaccacaccgggaacaagaaccagagccgggacccgccgaaggacacaagcgcccgcacaaagggcaagagaagccgaaagaacaaccaagaaaacacaaccccgcccggaacgagcaccgaggccaacaaggggggaggccaacgc

SEQ ID NO: 148287 - DNA, 494 bp, Zea mays
  unsure (1)..(494): unsure at all n locations
  Clone ID: MRT4577_66767C.1
gccnggccgggttttggatcctccatcacacagcaatccacacaagcactatctacgtcacacggcgtcgctgcgcacagacacaccaagcgtcggcaccaatggcttactaccagtaggtggactactgctcggaggaggtgaggtcggtgcccccggccggtttcggccgccacggcggcggcgtccagcagcacgtcgtcaaggagaagttcgaggaggtccacactgtctcacgcgccggtgccaaccaccaccaccaccatggtaaccacggcggccacggcttcgtggcgcgcgcgaccacggtcgaagaggacatcaacacctgcaccggcgagttccacgagcgcagggagagcttcctcgccagagctaactgagccgcccggcggccggcatccacgcccgttcttgcttgcctgcctcgcttatgtatgtctgtggttgactgggtgtgcacggccatcgaacttggctatcgtacgtgcacg

SEQ ID NO: 148288 - DNA, 2770 bp, Zea mays
  Clone ID: MRT4577_66768C.1
aacctcccttgctttgactggcggctatcccctaatctaaaaaaatgaaatacaaccaactctcccattcggccatttgcccatttcccatctcgccttcgcttcccacgcccctccgtcccgcctcgccgcggtaaggcaccgccgccaaccgccctcgtccctcttcgactcgaccgcgtgagtgagacgaccgcgcgcgcccctcgcccgcccgccaggaggagatcgacccccgaacgcattgggcacctcgggcccggccgggaaccaaccctccttggctggactggacccccaacccaacaacagcagcaggaacaggaaaaagaaaaaactctctcccattcccatctcgcctcccacctcctccgcctcgccgccgcggcaggcaccgccaccaatcttctcttccgccccctcgttcgttcgctcgctcgctcgccaggagatcgactcgaggcgaggccatgaagtacgtgctggtgaccggcggcgtggtgagcgggctcgggaagggcgtgacggccagcagcatcggcgtcgtgctcaaggcctgcggcctccgcgtcacgtctatcaagatcgatccatacctcaacaccgatgccggaaccatgtccccattcgagcacggcgaagtgtttgttttggacgatggtggtgaggtggacttggaccttggaaactatgagagatttctggacatcaagttgactcgtgacaacaacataaccacggggaagatataccagtctgttattgacaaggaacgtagaggagattacctaggaaaaactgttcaggtcgtgccacacatcacagatgaaatacaagattggattcaacgtgtggcaatgaatccagttgatgacaccgaagagccagctgatgtttgtgtcatagaacttggtgggactataggggacattgaatcaatgcctttcatagaagcactaggccaattttcataccgtgtagggcctggaaacttttgcttggtgcatgttagtcttgtaccagttctaaatgtagttggtgagcagaaaacaaagcccacccaacatagtgttcgcggacttcgaggacttggactcatgcctgatattttggcatgtcgcagtacacagccacttgaagaacacgtgaaagtgaagctcgcacaattttgtcatgtcccgatatcaaatatcattaatctccatgatgtcaccaacatttggcacattcctttgttgctcagagatcagaaggcccatgaagctattttgaaggtgttagaccttcagtgcgcgagtaaagttgctcgagaaccccaattgtctgaatggactgaaagagtcagcagatgtgacagattgaaatctccggttaggattgcaatggttggaaagtatactggcctgtcagactcctacctatctgttataaaggctcttttgcatgcgtcggttgctttggacaggaaacttgtggtggactgggttccttcctgtgatcttgaagattctacagcaaaagagactcctgacgcctatgaaaaggcatgggagtcgttgaagggtgcagatggtgtgttggtgccaggaggttttggagacagaggagtccaagggaaaattctggctgcaaaatacgcgcgagaaaacaacgttccatatcttggcatttgcttgggcatgcaaattgcagtgattgagtttgcacgctctgtcatgaagttgcacggtgcaaacagcacagagttcgatccaaccacaaaaacaccatgtgttattttcatgccagaggggtccaaaactcatatgggagcaacaatgcgccttggttcaaggaggacctttttccaggtcactaactgcaaatctgctaaactgtacggcaatgcttgctacgttgatgaaagacaccgccacagatacgaggtgaatcctgacatggtcccagaatttgagaaggcagggctttctttcgttggcagggatgagagtggcgaacgcatggagattatcgaactaccaactcataggtttttcgtcggagcacagtttcaccctgaattcaagtcaaggcccggcaagccatctccgcttttcttaggattggtagcagcgtcatcaggccagcttgaccacttgctccaacgtggccttaccagttcagcaggcagagacatctgcggcaaagggggagcgcagaaaccaaaagcttgccagaacgggcatgtcatgaagccactgaatggcctggtgcacgggcactattcagcgactcgctgcaatggcgtcattcccatctagcagggctgttttcgcttgttctttttctttccgttctacctacctgcagggcaaccaggaagagaagggctgtttgctctagcgacacggcagccgtttccgatgttttaacgaggaagcaattggcatgcaaagctgtcgcgcgcattaagaggcaaatctagcagcttattagctagggttcgattagtagtagtagtaatccgatgttgctggtttatttgttagtttgtttgctaagaaagattacaagggttagtgatgtgcagctagctccagtgtagcctgccgtctcgccccatttgtacattgtaaaaccactgctactctccatgattgactgaatggatgagtataaacgtattggaccaacatgctcggtgttataaaaatctaagttgcaaaacaaaaaaaaaaaaaaaaaaaaaaaaaaaaaaaaaaaaaaaaactcgagggggggcgccggtacc

SEQ ID NO: 148289 - DNA, 562 bp, Zea mays
  Clone ID: MRT4577_66769C.1
ctggccgggatccctcatacacaggaatcacacaagctcttcgatgtcacacgggcagctgcgcacagacacaccaagcgtcggcaccaatggcttactacctggaggtggactactgctcgtaggaggtgaggtcggtggcccccgccgacttctgccgccacggaggcggcgtccagcagcatgtctttaaggagacgctcgatgatgtcgacacggcctcacgcgccggcgccaaccaccaccaccaccatggtcaccacggcggccacggcttcaagatgcgcgagaccagggtcgaagaggacatcaacacctgcaccggcgagttccacgaccgcagggagagcttcctcgccagggctaactgagccgtccggcggccggtatccatgcccgttcgtgcttgcctgcgtgccttatgtatgtctgaggctgactggctgggcagggtcattgtacttgggtatcggacgtgcacgcactcacgtgctgttctatatactaccatgaagctcgggctcgtgcataaaacttcttcgtattcctgaaagaattaaaa

SEQ ID NO: 148290 - DNA, 471 bp, Zea mays
  Clone ID: MRT4577_6676C.1
atgaatgcagaatggtttgaagttaaacatcctcaggtatagtcagttacatgtgtataccaccaggtatagcatcacaaaagacaacactgtcatcgatgatctcacatcatcacacaaacattattaaccatgccggccggggtaagcttccatatatatagggggttattattataaggagaaagaggtagctggatggtggttttattccaatatcttatttttatttgcatttgcatgagctccgatccaacatacaggcagacacgtactagctagatcagttccgaactttcttccgctttggaacgaactggcgggcccacagatgcttccctcgtatcacgaacttcacccttgcgctcccacggaggatgtggaggatcgtctcctgcgtgaaaaatgtgatgtgcgcatatagcggtggcctgggttcgattggatcctccacgcatatgacttcaacac

SEQ ID NO: 148291 - DNA, 863 bp, Zea mays
  unsure (1)..(863): unsure at all n locations
  Clone ID: MRT4577_66770C.1
acccacgcgttcggttccgaaggggtcaaaaacccatatgggggcaacaatgcgccttggatcaaggaggacctttttccaggtcactaactgcaaatctgctaaactgtatgggaatgctagctacgttgatgaacggcaccgccacagatacgaggtgaatcctgatatggtcccagaatttgagaaggcagggctttctttcgttggcagggatgaaagtggtaaacgcatggagattatcgaactgccaactcataggtttttcgtcggtgcacaatttcatcctgaattcaagtcaaggcccggcaagccatctccgcttttcttaggattggtagcagcgtcatcaggtcagcttgatcacctgctccaacctggtcttatcagttcgactggcagacacacctgcagcaaaggaggagcgcaaaaattaaaggctgggcacgtcatgaagccactgaatggcctggtgaacgcacactattcagcaaccggcaatggcgccattcccatctagcagcgcagagctgcgacgcgtcgcgtgcttgtttgggatttctcttctaccgttactgcttgttctttttttttccctttccctcgaagggtgttcttccgtacgttctaccaggccaactgagaagaagagaagggctgtttgctctagcgacacgggcagccgcgtttccgatgttttaacgtggaagcatttggcatggaagctgtcgcatgcatcaagaggcaaatctagcaggttagctagagttttagtagtggtaatccgatatatatgctggttgatttgttcgtttgtttgctaagattacaannggctgtgatgtgcagctagcttgtagtgt

SEQ ID NO: 148292 - DNA, 334 bp, Zea mays
  unsure (1)..(334): unsure at all n locations
  Clone ID: MRT4577_66771C.1
cggccgcancgccggaaccctagcctggcgnacgagctcggccttagcggnggngtngttaatcccggggctcccggacgacgttgcngntgtcattctctggctgctcatctttccggnccagtcccgnctccgtgcctggtggggcgctgggtgcttggtgctttttggggntacgctgctgccggtccggcgtggcccttgtttgccgngccgttgccttgtgtgcctgttgcccgccggcccgtgcttggggtgccgggtcctgttggtgcgtggcggtgctaccaggtggtgggcttttctgttgtttgtttgtttgttgttgtttacg

SEQ ID NO: 148293 - DNA, 1343 bp, Zea mays
  Clone ID: MRT4577_66772C.1
agtattacgaagaagttttattcaggtcacgagcttattgtcgtaattcgtacaggagctgagtgcgtgcacgtacgatagccaagtacgatgaccctgcagatccacccacacacagcaatccacacaagcacttcgacgtcgcacgggcgctgcacacagacacaccaagcgtcggcaccaatggcttactaccaggaggtggactactgctcggaggaggtgaggtcggtggccccggccggcttcggccgccacggaggcggcgtccagcagcacgtcgtcaaggagaagttcgaggaggtcgacacggtctcacgcgccggcgccaaccaccaccaccaccaccatggtcaccacggcggccacggcttcgtggtgcgcgagaccagggtcgaggaggacatcaacacctgcaccggcgaggtccacgagcgcagggagagcttcctcgccagggctaactgagccgcccggcggccggcatccacgcccgttcgtgcctgcctgcgtgccttatgtatgtctgtggttgactggttgtgcagggtcatcgtacttggctatcgtacgtgcacgcactcagctcctgtacgaattacgacaataagctcgtgacctgaataaaacttcttcgtaatactaatacctacaaaacaaaacaaaaggtcattgtcgtaattcgtacaggagctgagtgcgtgcacgtacgatagccaagtacgggacccgccccggatccaccatcacacaagcaatccacacaagcacttcgacgtcacacgggcgctgcacacagacacaccaagcgtcggcaccaatggcttactaccaggaggtggactactgctcggaggaggtgaggtcggtggccccggccggcttcggccgccacggcggcggcgtccagcagcacgtcgtcaaggagaagttcgaggaggtcgacacggtcgcacgcgccggcgccaaccaccaccaccaccatggtcaccacggcggccacggcttcgtggtgcgcgagaccagggtcgaggaggacatcaacacctgcaccggcgaggtccacgagcgcagggagagcttcctcgccagggctaactgagcagcccgggcggccggcatccacgcccgttcgtgcctgcctgcgtgccttatgtatgtctgtgattgtgcagggtcatcgtacttggctagcgtacgtacgtgcacgcactcagctcctgtacgaattacgacaataagctcgtgacctgaataaaacttcttcgtaatactaaaaaaaaaaaaaaaaaaaaaaaaaaaaaaaaaaaaagcggccctcgcgatcttagcggacgcatgag

SEQ ID NO: 148294 - DNA, 1377 bp, Zea mays
  unsure (1)..(1377): unsure at all n locations
  Clone ID: MRT4577_66773C.1
gcggggatactccacttaacaccagacagcaatctgaacgagtttttgcacctcagggtgcagatggtgtgttggtgccaggaggttttggagacagaggagtccaagggaaaattctggctgcaaaatacgcgcgagaaaacaacgttccatatcttggcatttgcttgggcatgcaaattgcagtgattgagtttgcacgctctgtcatgaagttgcacggtgctaacagcacagagtttgatccaaccacaaaaacaccatgtgttgttttcatgccagaggtaattgttttgctacaggtgctagtgtagttacctaatttatttgtggttgaaaaccatctatgcttctgttctgcaggggtccaaaactcatatgggagcaacaatgcgccttggttcaaggaggacctttttccaggccactaactgcaaatctgctaaactgtaagaagcaacctcccacatctctcaccactgtttccacaggagttttacatctgggtccctctttcaccacttgattgtctacggtagataaatcgtttgagttctgaactgccttaggtacggcaatgcttgctacgttgacgaaagacaccgccacagatacgaggtgaatcctgacatggtcccagaatttgagaaggcagggctttctttcgttggcagggatgagagtggcgaacgcatggagattatcgaactaccaactcataggtttttcgtcggagcacagtttcaccctgaattcaagtcaaggcccggcaagccatctccgcttttcttaggtaagcaagacatcctcaaacatgtacttgttttttgcatgtttaaaagcgttttctttgcttctgaaagaagccctttaaactttggaacaatccacgaacaccttggcaggattggtagcagcgtcatcaggccagcttgaccacttgctccaacgtggccttaccagttcagcaggcagagacatctgcggcaaagggggagcgcagaaaccaaaagcttgccagaacgggcatgtcatgaagccactgaatggcctggtgcacgggcactattcagcgactcgctgcaatggcgtcattcccatctagcaggctgttttcgcttgttctttttctttccgttctacctacctgcagggcaaccaggaagagaagggctgtttgctctagcgacacggcagccgtttccgatgttttaacgaggaagcaattggcatgcaaagctgtcgcgcgcattaagaggcaaatctagcagcttattagctagggttcgattagtagtagtagtaatccgatgttgctgggttatttgntagtttgtttgctaagaaagattacagggttagtgatgtgcagctagc

SEQ ID NO: 148295 - DNA, 403 bp, Zea mays
  Clone ID: MRT4577_66774C.1
aaaaaaaattgcccccagggggggggggggggggggccatttttaaaaaaaagaggcacccttaaggggttggaaattgggggggacctttttcaataaaaaaaaatatggggtaaaaacaatttgcggggcccccaaaacaaaaaaaaaaaaaaagggtttggggggggtttttttccaaccgagggaggggcaaaaaaaaaaaggggccaaaccgggcttgtggtaaaggaaactggcacaattccccccgaaaatttttcaaaataaaacggggcaaaattgggcccaatgaaccccctgggagaaaaaacgggatcccccccccacacaatgggcttttttgaggttggggggcaccgaaaaaccccccatgaaaaattcagggggaaaaacccccggg

SEQ ID NO: 148296 - DNA, 315 bp, Zea mays
  Clone ID: MRT4577_66775C.1
cattgggatcctcgaggccggccgggccgggatctgctacgcatagacacctgcctatctatctactgcatggacacgagatgcgaaaggtagatacgcctaaatgcgagtcggcgacagcacgcagacgcataaggcaggagattggcgatgttgatactacagctggcgatagctccgacgacggcgacgctccgcctccttggaggagggtacatcaacacgaggacgagcagcacctcgtggcgttgctagcgggtgcatggcagtgatgcctactgtcggtggtgctcatcgtggccttcgactctgtga

SEQ ID NO: 148297 - DNA, 2494 bp, Zea mays
  Clone ID: MRT4577_66776C.1
cggggatattcgagaggtggaggcgacgagtacaatagtaaccgtgggaggtcaaacggttacggtcgtgctcctcaccaagagaggggcatacttgggagccacactccaaggaactgattcagtcgagcagcaaacataaggttttgatccgtgtcgtcaaagcgagagagagagatcctaaacaatccgcctatcagctactaggccgcgtttgggttttggggcttgttttgtcgatgaatgtgtgtgcgcgcgtcatcgacctatgtgacacttaaaacttttgctagtctgacgctatctctttacattaagatcggctgttctattaaaaaaaaaaaaaacacaatgcgttaaaggcttcaccaattgaaataaatgggcgggagatatatgttgaggagaggaagccaaatagcggaataagaggtggaaggaggggagagacgtggccgtttcaatggtggaggccggggatattcgagaggtggaggcgacgagtacaatagtaaccgtgggaggtcaaacggttacggtcgtgctcctcaccaagagaggggcatacttgggagccacactccaaggaactgattcagtcgagcagcaaacataaggttttgatccgtgtcgtcaaagcgagagagagagatcctaaacaatccgcctatcagctactaggccgcgtttgggttttggggcttgttttgtcgatgaatgtgtgtgcgcgcgtcatcgacctatgtgacacttaaaacttttgctagtctgacgctatctctttacattaaaatcggctgaaaaaaaaaaaaaaaaaaaaaaaaaaaaaaaaaaaaaaaaagttccaccatcacacacagcaatccacacaagcacttcgacgtcacacgggcgctgcacacagacacaccaagcgtcggcaccaatggcttactaccaggaggtggactactgctcggaggaggtgaggtcggtggccccggccggcttcggccgccacggcggcggcgtccagcagcacgtcgtcaaggagaagttcgaggaggtcgacacggtcgcacgcgccggcgccaaccaccaccaccaccatggtcaccacggcggccacggcttcgtggtgcgcgagaccagggtcgaggaggacatcaacacctgcaccggcgaggtccacgagcgcagggagagcttcctcgccagggctaactgagcagcccgggcgggccggcatccacgcccgttcgtgcctgcctgcgtgccttatgtatgtctgtgattgtgcagggtcatcgtacttggctagcgtacgtacgtgcacgcactcagctcctgtacgaattacgacaataagctcgtgacctgaataaaacttcttcgtaatactaaaaaaaaaaaccggccccggctgcccgaggcttctagtagagagcacagctagcaaaacagagctccagaaactgaccgattggtttcacaccagagttagcgggatggcggtaacgagcggccacagcgaacgagcagacgagcctctgaaggaggcgctgttggctgcccgcaacggtagcggcagcgacggcgacggcgacggcgagaaggacctggaggagatccggagcgtggggtcgttcctgcggcacgcggcggaggagaaccggaagctctggtaccttgcgggccccgccatcatcacgtccatcacgcagtactcgctcggcggcatcacccaggtcttcgccggccatctcaccacgctcgagctcgacgccatctccaccgagaacaacgtcatcgccggcctcgccttcggcatcatgctggggatgggcagcgcgctggagacgctgtgcggacaggcgtacggcgcgaagcagctgcacatgctgggcgtctacatgcagcggtcgcttatcatcctcaacgccatggccgtgctgatgctcccgctctacctcttcgccacccctatcctgcgtttcttccaccagacgccgagatgccgcgctcgccggccgcctagcgctctacatgatcccgcagctcttcgcctacgccttcaacttccccatccagaagttcctgcaggcgcagagcaaggggatggccatggcggccgtgtcggtggcggcgctgctgctccacgtcgccatcagctggctcctcatggggcccatggggatggggatcgaaggcctgcccgtcgtgctgaacgcgtttcggtggctcgtagtgctgagccatctcgcctacattctcatgggctactgccccagcgcccggaacggattcgactggctcgccttctccgacctctccggattagctcgcctgacgattggatgaggcgacatgctctgcctggagatgtggatctacatgtccctgatcggcatagcgggcaacctggacaacgctgaagtcgcagtcgctgactcatccattgcgcacgaacctgtgcaggtggacgatcatggagaacttcggatacaacgcggcc

SEQ ID NO: 148298 - DNA, 1229 bp, Zea mays
  Clone ID: MRT4577_66777C.1
gccggccgggctgcagatccaccatcacacaggaatccacactagcacttcgacgtacatgggcgctgcgcacagacacaccaagcgtcggcaccaatggctttctacctttaggtggactactgctcggaggaggtgaggtcggtggccccggccggcttcggccgccacggcggcggcgtccagcagcacgtcgtcaaggagaagttcgaggaggtcgacacggtctcacgcgccggcgccaaccaccaccaccaccatggtcaccacggcggccacggcttcttggtgcgcgagaccagggtcgaagaggacatcaacacctgcaccggcgaggtccactagcgcatggagagcttcctcgccagggctaactgagccgcccggcggccggcatccacgccccgttcgtgcttgcctgcgtgccttatgtatgtctgtggttgactggttgtgcagggtgcatcgtacttggctatcgtacgtgcacgcactcagctcctgtacgaattacgacaataagctcgtgacctgaataaaacttctttcgtaatactaatacctcaaaaaaaaaaaaaaaaaaaaaaaaaaaaaaatccaccatcacacagcaatccacacaagcacttcgaacgtcacacgggcgctgcgcacagacacaccaagcgttggcaccaatggcttactaccaggaggtggactactgctcggaggaggtgaggtcggtggccccggccggcttcggccgccacggcggcggcgtccagcagcacgtcgtcaaggagaagttcgaggaggtcgacacggtctcacgcgccggcgccaaccaccaccaccaccatggtcaccacggcggccacggcttcgtggtgcgcgagaccagggtcgaagaggacatcaacacctgcaccggcgagttccacgagcgcagggagagcttcctcgccagggctaactgagccgcccggcggccggcatccacgcccgttcgtgcttgcctgcgtgccttatgtatgtctgtggttgcctggttgtgcagggtcatcgtacttggctatcgtacgtgcacgcactcagctcctgtacgaattacgacaataagctcgtgacctgaataaaacttcttcgtaatactaatacctacaaaaaaaaaaaaaaaaaaaaaaaaaaaaaaaaaaaaaaaaaaaaaaaaaaaaaaaaaaaccaaaaaaaaaaaaaaaaaagcggcc

SEQ ID NO: 148299 - DNA, 288 bp, Zea mays
  unsure (1)..(288): unsure at all n locations
  Clone ID: MRT4577_66778C.1
acaccctacaaaacctctgtttttttcatttttanccgggttaaggccaaacaagagggtgggtgactcttgtatgggttggccagagagttaattacaaaaaaaccaaaaccattttccactttttccaaccataccaatacacattggttggtttaccaagacatcctactctctctctttaaatgctgtccaccaaccaatataacaattaacgaacggacaatggcttaccaactaaccaaatcgactcttaagtgccacacatgtaaagatgatgcatcagca

SEQ ID NO: 148300 - DNA, 503 bp, Zea mays
  unsure (1)..(503): unsure at all n locations
  Clone ID: MRT4577_66779C.1
ataaaatttaaatacaataaaaaaaaatagtgtgaagcgatttacacacacaatacacgaccanaactcccggatgcgacccacacgtacgctcgctctttctaaagggggaggctgaataacattcggaaatttaagaggtatatggagttacagtattgccatacgtttggtgtatgcaatgaatgttttggtgctgataccaaaaagtaaaaaacggaggctgtttgtagaatatggaagaaaagacagctgtgcatgtaataaaattaaacctggtgcacctgctagcttgggggaggctgctggaattggtgtactgggagggggggaggaattgggacgggaatatgaaggtactgcttgttaatgtgcagtggagaaaaaatgggaggagattctgggctgccatactgagttattatttatgcccgtaaaggaagaagaaccaaggtgtgggataacccgggaggcacctgagattgtggagcgtagaagttttg

SEQ ID NO: 148301 - DNA, 152 bp, Zea mays
  unsure (1)..(152): unsure at all n locations
  Clone ID: MRT4577_6677C.1
caccctatagaaagtcgtattaaacngtngagagacgaactagatagatcgcaaactgttttggtaacgtcgtggacaattacaagctagccacaatgccacgatatatcggggggggggaagactcgacaagaccggggacgagggggggg

SEQ ID NO: 148302 - DNA, 701 bp, Zea mays
  unsure (1)..(701): unsure at all n locations
  Clone ID: MRT4577_66780C.1
gggacctcgagccggccgganaaaaacttccaaaaaaggggaaaaaaaaaaaaaaaaataaaaaaaaaaaaaaaaaaaaaaaaaaaaaaaaaaaaaaaaaaaaaaaaaaaaaaaaaaaaaaaaaaaaaaaaaaaaaaaaaaaaaaaaaaaaaaggggggaaaaatcgggaaaaccgggggccccacaaaccccggggggggggccccccatttcccgcgggggggcctccggtttttttttaaaaaaaaaaaaaaaacccgggggggaagggccgggggggaaaaaatttttcggggtttttttttggaaagggggggccccccaaaaccagggggggcccaatgggaaagggccccccttttgaaaaaaccttcggcgaaaaaaatgatggggccaaaaagggttgttgtggggttaaccccccaaacaaaaaattcccctggggtggggggaaaaaaaatgggaaatttctttaggagcgggcttaaaaaaagggccaacattgccccgggggggggttttcccgggggaacctgtgtcggggaaaattatggcccgggggggggcccccacaaaagaaaccccccccggcgggtggggggtatggcagaaaccggaaaaaacggtggtttttctggggggaacccccggaaatggttttgggcaaagggttgtttttccttggggaaaaattcccccc

SEQ ID NO: 148303 - DNA, 462 bp, Zea mays
  Clone ID: MRT4577_66781C.1
aaaaaaaaaaagggccccgccccccaatggatggattcacccccggaggaccaaccgggggggggggcttaattaacatcccccgtttacagggggcagcctttgactttgttgggggaccccccattgttcatgagcttcccccggggggggcaactcctacccccctacaatttgaaaaaggggggtccaaaaaaacccccccttttcactcgacgggcggacaaacaaagggggggatctgaggggagaccacatgtccggggttgctaaaacaattagttcccggggacaaaattcggggcttttccccaggcttttttggcaacggggtcggcaacctggccaaaaaggtttttaagggggcccttgccgggaacaatggcccgcccaaaaaaccccaacatggaaaacatgggaggggggccgttcttgacccccttaaccttgacctcggggggg

SEQ ID NO: 148304 - DNA, 455 bp, Zea mays
  Clone ID: MRT4577_66782C.1
gttattgaaaaatttaatactagctgcatcaaaaaaacattacacccctaggatcaaccattacatcaaaatagagagacctagtgtaatatccaccagtagagagacctagtctaatatccttctgacgagagagcgaggtactatgcagcactaccgatgaacactgaaaaatagacagatacacataacaagaacataatccactaaaatgccgacgctaactgatccagtgctcgttatatcatcacaggatcactaacagctacccttcaacaccttccttcggattcaaagtgccttggctaccaagaggcaacagctgaaaatttcggaagacatgtcccatcatcttactgcctccttttaggacaggcatcgcaattcctgcagcaggctaagctaattgaccctgcaaatttagctgatcattgtcctgcttaatctccttttct

SEQ ID NO: 148305 - DNA, 552 bp, Zea mays
  Clone ID: MRT4577_66783C.1
atgctgcagacgcgatacgtatccggatccagaattcgttatatttaagccaacaagctactttatgatggtgatcatttacatttagatttggcgcttctttttcacatatttccatacaatgctcacaacgcccactaaagtaacaaaactcacctaaaccaactaaattcggaacttgccctggaatagaatatagtttatctattcgttttcccattactggttttgatttcaataatcctttcgtataaggatgttttggattttggaatatctctagtactggggcttcttcaataactttcccgccatacataacgacaacataatcagccatttccgctacgacacctaagtcatgtgtaattaataaaatcgacgttttaaattcttctttcacttgtcttagtagatccaatatttgagcctgaatggtaacatcaggagctgttggttggttcatctggcaataataacttaggaatacaactaagcgcaacagcaattataatacgttgtaacatccaccggtcagttcatgcggataag

SEQ ID NO: 148306 - DNA, 300 bp, Zea mays
  Clone ID: MRT4577_66784C.1
cggttcactccttatttttttattcaccctaaattgtttttttaggtatctttatgaccgaaatgattgatttaagcttaaagaaaacaccccctggctactgtaaaggcagcagcacctacgaactattaaaactcccgttatcccaccctaacatccctaaagacacaattttttccctccccgcccttttcctacaaaattaaacccccaagggggtttttcaaacacgccaaaacgttccaattaggctcaagcctcctcccccccttgttcctccccccacccttttgttttttt

SEQ ID NO: 148307 - DNA, 350 bp, Zea mays
  Clone ID: MRT4577_66785C.1
gtccctcgtgctcctattgatcttatcgccatcccacattctgaaataatgaattttgatgcttctcgtcgtgctgaactgattataaagctgcatgaacaaactaaagcaaatattaaagccatgaatgctaagtatgaagaagcaggtagcaagggtagaaagcatattacctttgaacctggtgatttagtatgggtgcatttaaggaaagatagattccctgatatgcgcaaatctaaattacaaccaagagctgctggacccttcaaagtgcttcacaaaattaatgataatgcatataaagttcagttgcctgcagattttggggtgagttcctcttttaacat

SEQ ID NO: 148308 - DNA, 319 bp, Zea mays
  Clone ID: MRT4577_66786C.1
ggggggaaaaaaaaccctttcctgtttttggggggccccaaagtccttttcccccctttgttgggcccccctttcccggtttggggaattcccggtgggccccccaaaagcccctgggagctttttttttacctttagaccccccaacccctttgtacccgaataaaatccaccccctcccttttgggcccccagggtttcctttgccccccccccaactttgcaccggtgggttgggagccccaggccctggggagccctttagggggggcttcccaggaagccctttttgccccccttgggctcccacccattattt

SEQ ID NO: 148309 - DNA, 345 bp, Zea mays
  Clone ID: MRT4577_66787C.1
cctttgttttttttttcagatgaacaacagcaatagaattacccctaaacagtgacgtgcccgaaaacgagccccaaagtactaaaacactgtctggtgtgagcgcggaatgccgcgagcaggccacactgcttcaggcatcaagtgtagcagatcacagagcctacacacctgtggcgggccacggtgaccggctttccataacagagggagacatggagctcacacagggaaccctcggcgatggtggcggtggagcgcaccatggtggcgaccacgccctgcaaggagggcgaacaccagggttccccctcgttccagggcttggactaagcaaacccgggc

SEQ ID NO: 148310 - DNA, 760 bp, Zea mays
  unsure (1)..(760): unsure at all n locations
  Clone ID: MRT4577_66788C.1
ttgggtacctcgaggccggccgggtcaattattaagagcatgtggaaatgcaaattgttccagtaccctctgaaaaatctggtgttgttttattagaatggagaaactgtcaactaacaatttaacattttgagttgtgaacaataactacaaatttgtgatgtgttagtttcacatttgccatttgctgcttacgtctaggtaaccttaattctttactagccaggtgctcgtgtgctttgctacggtttttatatctcatataaataggtattgagatatttattcaaatataattatttttatttctaaacattaaggtacgtgtggtctggtgttagctgtgcaggcggggtcaggtgctgggcaggcgtagtagctggctgcgtgggcgctggggtccacagggcagtagctgagagagcactgcgtaggcacatggcacgaccctttaggcggggcgcgtggggcgggtccaaagtatcagcgcggaggatgaagccgtggtagcaccaggtgcatacattaggttcttaatagattaccatagatataaattagtagttggtcgagtgaagtgaacacctttgccatttgttgcttaagtctaggcacccttaattctttatcagtagttagtcaagtgaagtgaacacctttgccatttgttgcttaagtctaggtacccttaattctttaccagtagttgntcgagtgaagtgaaccagtatgtacaaatttgaccatctgttttcgcctc

SEQ ID NO: 148311 - DNA, 289 bp, Zea mays
  unsure (1)..(289): unsure at all n locations
  Clone ID: MRT4577_66789C.1
taccaccntaccactccagcgaggtttcaattcaaagtagttctcctcactcacaatctcctcctcaatacccattcaccttaatgccacctccgacgacttcatatccgccatctccttcattacccactcagtcgtcactaacaacttttcatcacatacaccaactgacgctaagctgaatgtgtccatcaacttattctgccacattcatcacaacttcctactgtacttacactttctcagcaactcctctcccctcaacttcatcgccatcaactacaccttc

SEQ ID NO: 148312 - DNA, 106 bp, Zea mays
  Clone ID: MRT4577_6678C.1
gcgcgccaacgaaacgcgcctgatcttattggttattccaaacaatccacactaacagcaaccatctcaagaatgcatcacttgtaattacccagacgcaaacata

SEQ ID NO: 148313 - DNA, 530 bp, Zea mays
  Clone ID: MRT4577_66790C.1
tttgataactatgcgcttccgctgcgatcgacctggtctcttctgaccactgagccaatggttatatcttctaaccaactatcagattgccgtattccatgagaccttcacacccttctactaccactgggatggtagcctctgttccaaagacctgggaactgtcttgatctctctgattccaatacctacagatgctgaattcctgtacatgtgcaataagactgatactaatagatattgcactaccgatttccaataactactccaccttatagaacacaagagaacagccctcgactctattgaagagcttaaggacgtctttcgcatggatcaccaagaccagaaccgctacgtctgtgccggagaacacagatgtgtcatgacaagtgtcggtgacaatctcaactgatgaactcgctgactaaagaaatcgcgtagttgatctctgtgaagaagcgcagataccttatgcagagtgtgtcagaacattatcgacaattgagccgcagaaccataatctgaat

SEQ ID NO: 148314 - DNA, 848 bp, Zea mays
  unsure (1)..(848): unsure at all n locations
  Clone ID: MRT4577_66791C.1
ccggccgggccgggagaggccagtttctgtcgaccgaagtcaggctgagaaaggcgtcgtcgatagatcgatcaaccctgaaacgatagcgctatcgacttttcagtatatatataggatgcggaaggcgaaggctctctacggtattgccgccgccgtcgccttgatggcggtgcttgagcttaggctcgtcggcgccaactttgtgagcgactgcgacatcacgtgggagccgaagaacgccaagacagacgagggaggcaaccacctcacgctgccccttgtcagcaactcctcaggcagtatgctccggaccaagaagcagttcatctacggcagcgtctccactcggatgaagctggtgaagggcaactcggccggcacggtcaccacctactacacgtcatccatcggagacaaccacgacgagatcgacttcgagttcctgggcaacgagactggaaagccctacaccatccacaccaatgtctttgccgacggcataggtcagaaggagatgcagttccggccgtggttcgaccccaccgccgattaccacaactacaccatcttctggaaccagtgcatgatcgtatggctcatcgacggcatcccgatccgcgtgttccggaaccactcggcgcagggcgtgccgttcccgacgcgcaggcagatgtacgccttctctagcatctgngcggcggaggactgggccacgcagggcggccgcgtcaagacggactggnacaagggcgcctttcgtcgccgagtaccgcgacatcaacctccgcgtctgcgactgcgccctttatggncgcgcagggtgccccgacagctgcgcgtcgtca

SEQ ID NO: 148315 - DNA, 652 bp, Zea mays
  Clone ID: MRT4577_66792C.1
attgggtacctcgaggccggccgggcttccccctccgcgcgctagggcacgaggcaaatctgtggccctctcctagtctcctgaagtccgactcagccgtctcccagctcccgctcgctcgaactcgggttggggaggcacggagtcactgaccccttcgcgttaggcggtgcccttaccggctcttcgtctaaggtgtagtcaagctgccggccacgcccggcacccccctatccagtacaaggccttctccgagatccagtacaaggtcgtcgtctccaagatctgaccccgacgctagtgaggcttgctttgaagggaacccattcaagacagttccaggcccatttaagctcttctggcaatgcatgcgctcaaaacctggaggtatttcacgaatggacctgtggttttcagggaggaaccaaccgagccctatacctacctgcagctagatcctccgagaagggtggaagtgaatctggagcaaacaggaagtgaaccttgaacgagcatgcctagtttagcatctcgtgcctatttgtcttcacctttcgagcagacttttttctcctagggatcacatcatgtgagcacaaagctgcatatggtttggatgttatataatctaccctaataaacgtgatcccca

SEQ ID NO: 148316 - DNA, 1287 bp, Zea mays
  Clone ID: MRT4577_66793C.1
cattgggaccctcgggccggccgggaaaacaatccgaagtcacgtcgccgcctccccctccctcccgccgccacacggtggacgctgcagctgctgcagacagctgctgctcgccctctccctgtctcctctctatttcccagccacggtttccccttcccccgtccgcacgttagggcacgaggcaaatctgtggccctctcctagtctcccgaagtccgactcagccgtctcccatctcccgctcgctcgaactcgggttggggaggcacggagtcactgaccccttcgcgtttggcggtgcccctgcaccggctcttcgtctaaggtgtagtcaagctgccggccacgcccggcacccccctatccagtacaaggccttctccgagatccagtacaaggtcgtctccaagatccagtacaaggtcgtctcctccaagatctgaccccgacgctagtgagaagggaagagagggtggacgaagtgggggaggatgagcgaggagaggccggtgccgcggcgggagagcccatggggtcttcctgagggcgacacacggcagcccaaggctcaccgctgcaacgaccgcgccgaggacgtcgtccaggcttgctttgaagggaacccattcaagacagttccaggcccatttaagctcttctggcaatgcatgcgctcaaaacctggggaggaaccaaccgagccctatacctacctgcagctagatcctccgagaagggtggaagtgaatctggagcaaacaggaagtgaaccttgaacgagcatgcctagtttaccatctcgtgccgatgtgtcttcacctttcgagcagactttttcctcctagggatcacatcatgtgagcacaaagctgcatatgtttggatgtttatataatctacctaataaaccatgatccgcagagctgcctgtccaggctgccaactccttgaaatttgctgatgctggtgtaagaattgtgcccctttcttctgataaatggtgcacgtccaagtccacatgccgccagacatcagagctagtgcatctgaatggttgtgctcctgttctgaaacagagtgctccatatggtttttgtgtgtttgtccatatatagcatactagtgtagccgtacagtttacaagctgtatataaggccatccatccgtctccagtttttggtgccgggaatctggattaacttaccagagcatcaacttatcggctgcttatgaaaaattttataaacctttagtgcttttcttattatcatcttgcataacta

SEQ ID NO: 148317 - DNA, 862 bp, Zea mays
  Clone ID: MRT4577_66794C.1
ctgtgcggcgctccggccgggccgggaaccctaatcacacacactcctaactcccatcccatcccatcccatcccagccgccacagctgctgctcgccctctccctgtctcctctctctttccagccacggtttccccttcccccatccgcgcgctagggcacgaggcaaatctgtggccctctcctagtctcctgaagtccgactcagccgtctcccagctcccgctcgctcgaactcgggttggggaggcacggagtcactgaccccttcgcgttaggcggtgcccttaccggctcttcgtctaaggtgtagtcaagctgccggccacgcccggcacccccctatccagtacaaggccttctccgagatccagtacaaggtcgtcgtctccaagatctgaccccgacgctagtgaggagggaagagtgggtggacgaagtgggggaggatgagcgaggagaggccggtgccgcggcgggagagcccgtggggtctgcctgagggcgacacgcggcagcccaaggctcaccgctgcaacgaccgcgccgaggacgtcgtccaggcttgctttgaagggaacccattcaagacagttccaggcccatttaagctcttctggcaatgcatgcgctcaaaacctggggaggaaccaaccgagccctatacctacctgcagctagatcctccgagaaagggtggaagtgaatctggagcaaacaggaagtgaaccttgaacgagcatgcctagtttagcatctcgtgcctatttgtcttcacctttcgagcagactttttccctctagggatcacatcatgtgagcacaagctgataatggtttggatgttatataatctaccta

SEQ ID NO: 148318 - DNA, 674 bp, Zea mays
  Clone ID: MRT4577_66795C.1
gtcttcttccccttgctcttcctggactcgctcgaccagtaggcgacaggggaaccgaagccgccgtcgtctcttctctggatcgcaagctgcgcgcaagggtagggaggcgaggagggaagaggggagaagagaagagaagaggtggtggtggtgggtggaagaagtggggcgggatgagcgcggagaggcccgtgccgcgccgggagagcccgtggggtctgcccgagggcgacacgcggcagcccaaggcacaccgctgcaacgaccgcgccgaggacgtcgtccaggcttgctttgaagggaacccattcaagacagttccaggtccattcaagctcttctggcaatgcatgcgatctaaacctggggaggaaccaaccgagccctatacctacctgcagctagatcctccgagaagagtggaagtgaatctggagcaaacagcttctgaatcttgaacgagcatgcctagtttattatctcgtacaaatttgtcttcacctttcaagcagccttttcctccttgaagctgcatatgtttggatgtttataataatctaataaaccctgatctactctgagtcgcttttccaggcggcgaattccttgaaatgggtgttgctgatgtaagaatcgtgtcccttttctgataaatcatgcacttccaagtc

SEQ ID NO: 148319 - DNA, 1132 bp, Zea mays
  Clone ID: MRT4577_66796C.1
accacatccctcactcccatcccagccgccacacgttggacgctgcagccgctgcagcctgcagacagctgctgctcgccctctccctgtctcctctctctttcccagccacggtttctccttcccccgtccgcacgctagggcacgaggcaaatctgtggccctctcctagtctcctgaagttcgactcagccgtctcccatctcccactcgctcgaactcgggttggggaggcacggagtcactgaccccttcgcgttaggcggtgcccctgcaccggctcttcgtctaaggtgtagtcaagctgcaggccacgcccggcacccccctgatccagtacaaggccttctccgagatccagtacaaggtcgtctccaagatccagtacaaggtcgtctcctccaagatctgaccccgacgctagtgggaccgacgggtgaccggaggtttcgggatgggattacacgagcacgccgccgccgaaaattcagaagtggaaggataagtggtgtgcgcttgcagcccattagggtttatacccaccatctctcaacgagggaagagagggtggaggaagtgggggaggatgagcgaggagaggccggtgccgcggcgggagagccccgtggggtctgcctgagggcgacacgcgccagcccaaggctcaccgctgtaacgaccgcgccgaggacgtcgtccaggcttgctttgaagggaacccattcaagacagttccaggcccatttaagctcttctggcaatgcatgcgctcaaaacctggggaggaaccaaccgagccctatacctacctgcagctagatcctccgagaagggtggaagtgaatctggagcaaacaggaagtgaaccttgaacgagcatgccatctcgtgccgatttgtcttcacctttggagcagactctttcctcctagggatcacatcatgtgagcacaaagctccatatgtttggatgtttatataatctacctaataaaccgtgatccccagagctgcctgtccaggctgccagctccttgaaatttgctgatgctggtgtaagaattgtgcccctttcttctgataaatggtgcacgcccaagtccacatgccgccagacatcagagctagtgca

SEQ ID NO: 148320 - DNA, 441 bp, Zea mays
  Clone ID: MRT4577_66797C.1
gggaaaaaaaaacttaaattttttttaaattgggggcccatggaagggtaaattggcaaaaattggcccctttcccaaaaaaaaaaaaggggggaatttttttttgaaagagggaaaaacataaatgggtttccaagacccccattttaattttaaaacggggaggtttttttttccttccgggggatgggaggaaccaaagggggcccccttgaaaaattttaaaaaaccgggggggccaaaaagcttaagtttggcggggaaaaattaggggccaagggtgccctggaagccttgaaagccacccctttttaaaattaaagagggggttaaaaaccccaaattgggggaaaacctttttttgataaaaaaaaaaaaaatttcccggggaggggggctttttggggggtccttttccagcagttaagcccaatttttttg

SEQ ID NO: 148321 - DNA, 606 bp, Zea mays
  Clone ID: MRT4577_66798C.1
gtccccccctcgaaattttctttttttttttttttttttttttgttttgtttttttctttttttgaacgaaaacttatttatttttgataagtttaccacaggccggaggtattgggaccacccctcacaaacaaccattagaggtcagggactttacacctcaccaaaccaaaccttgaacactaaccaacttaatccacctcctcgatcttgggaccagggccggtcccaacaaacggggcattcttatccatgccaacaggagcgcccatgcccgcgcccttgccctgggacatttttgcgaagaaggggttggaaaacccctcaagctcctttatcttgggttggaactcccccaccttaaccagctggttgctggccaaccagctgatggcgccgtcaacgggattttcgatctttttcttgtcctcagcggggaacttggaggcgaacttggcggccctgatgggggtcctcatggtggaagcataattctccagcgcgtttttggcgtccaccttttttttgacctcctcgtcctgtggcttggactttttaggctcctggaccattttctcgatcttcttcttggtaagccgggcctt

SEQ ID NO: 148322 - DNA, 205 bp, Zea mays
  Clone ID: MRT4577_66799C.1
aactagacttcctagacagactagaccctatttagaattcgtaatatccacactaaactgatccgctcagggctgactcttactatcaacagaagtattgacaaaaatctgtatatccaactgatgatctacacactccaactccatctcgtcatcaagataaacctgcacataaaggtactgatatatttactgatttttacag

SEQ ID NO: 148323 - DNA, 791 bp, Zea mays
  Clone ID: MRT4577_6679C.1
gggtacctcgaggccggccgggattgacgcctgtcatcccagccgtatacctcacggcttcttttggttgtgttccctccggccatcttcaccatgttccgctcactggcaccccgcgccgctcaacgggcgtcgcgacccgtcacccgaagcacattctgcgcatccaacatttacttccagaaccggttacgacgtggatatgcgtcggaagctgaggagaaggacctagtcatcatcggcggtggtgttgcgggatatgtcgcagctatcaaggctggacaggcgggcatgaaggtcacttgcatcgaaaagcgtggttccctgggtggaacctgcttgaacgtcggctgcatcccctccaagtccctcctcaataactcgcatctctaccaccagatcctccacgacaccaagggccgcggaatcgaggtcggcgatgtcaagctcaaccttcccgccatgatgaaggccaaggagagctctgtttcgggtctcacaaagggaattgaattccttttcaagaagaacaacgtcgagtacatcaagggtactggtgcgttccaggacgagcacaccattgccgtcaaccttactgagggtggcgagactactgtccgcggaaagaacatcctcattgccactggttctgaggccactcctttcccgggcttgaccatcgacgagcagaaggttatcacaagcaccggcgccattgcgctccaggaagtgcccaagaagatgaccgtcatcggtggtggtatcatcggacttgagatggcctccgtctg

SEQ ID NO: 148324 - DNA, 450 bp, Zea mays
  Clone ID: MRT4577_667C.1
agtatatatatatatatatagtatcaaagatatcatcgaggaccaattaatatatggttacagcagacgcaatcggatcaaccaacatgcatgttgtacacacgtacatgtatcacaaagactgacgccaaacatgcagagagagagatagcaaactgtaagaactctgtttctctctctgtctcacacaccacacaatacctatgtatggcagccagctcggcctcgcttattattgatcaaccaccaccacatgctagatagataataatcatatccatgggcgacgatcgatgtgaacagcaaatgcaggggtagcacttgcagctgctaccgtaggcgcacgcgtgggcggactcaacgggactccgccgcgggctgtacaaactagggcgcgaactaattatgggggggcacgccgtagacgaacctggcctgcacggcggtgct

SEQ ID NO: 148325 - DNA, 295 bp, Zea mays
  unsure (1)..(295): unsure at all n locations
  Clone ID: MRT4577_66800C.1
tnnnncangggaaattttgatttttttttggggattaaaacaacacacaactgtcaaaaaaaaataccattttttgttatttcctgcatctttccggcacaaaaagcgaccaaaacccccatttaccccgggtttttaaaaaggcccttctaaaacatttccctttcacatgggcccacacccaaaaaaaaaaacttttggtctcccaaaaagcccccctattatactttccccttatatacttttcccaccacattccaattttttaaagactctcaacactattccccctttt

SEQ ID NO: 148326 - DNA, 512 bp, Zea mays
  Clone ID: MRT4577_66801C.1
ggggcccccaaaattgaaaccccattgtttatttttttaacaaagcccaaaagaaactaaaacttagcgaattcgttacagggcgggggccgataagttaaacccaaaaaggacaaccgggtccaaaaccagcatgggtcccgcgtccaggggccccggtcacatttattttcagcataaacaagccgcaaaaatgggctgggaccaaaggccattggggaccacccttgatggggggggaaaaatatttttttttactgggtcttgaacatgggggggatcagggcgaccacccggttgctgtaaccccactcgttggcgtaccaaaaaaccaacttgatgaaatggtcgttcaaggcaatcccggccttggggttaaaaaagctcgacctgctgtcaccggggaaatcgggggaaaccaaatcctcctccacgtagcccataatacccttgagggggccctcaaaaacagccttaatagcttttttgatttccccggaagaggccccctt

SEQ ID NO: 148327 - DNA, 435 bp, Zea mays
  Clone ID: MRT4577_66802C.1
aagatcgcgatgaacctccggctcaatcttatctatctttgcttgccaattggtgacaactcagaggattgcgacacgtgttacaaggctttgtacgagaacctgacccttgtgatcgatgacgactcgcataacaggacctacaccgaccatcttctgagatacctgttcaacatgagcgatgatgagctgaccagcctgtacgactacgtgaccagcatgatcgagggcacgcttgacatctatctatatcactggtgacagcaagatcgcagtcgagaactccaccttccttgacaagctgaagaccagacgctatgaggttctgtacatgcatgatgcccttgacgagtatgctggtggtcatgttattgattctgaggtcctgaaccttgtgtatgtcacccaggacgatctgaaccttcatgacactga

SEQ ID NO: 148328 - DNA, 287 bp, Zea mays
  Clone ID: MRT4577_66803C.1
cgctcttttcggcgaacgcgatctgatccacaacctccggatccgctgcaccgtgctgcacttcggctgtcgaatgcacccgctccgatccagatcaagtacctcatggaagggcgcgatcaggcaccacagtgggccccagctgtttctgcttgcggagccccatgctcagtagattgtgaacgccggtagatatgccacgtcagtgaggctcgcgcgatctcatgaggaggctgcgcgggaactagtcctgctccttgcgcagatggacgctgccttttggagga

SEQ ID NO: 148329 - DNA, 287 bp, Zea mays
  Clone ID: MRT4577_66804C.1
gccacagcccgatcgctgagggaagtggcccgggcccagcatgctctgcggaacagtgtacggagactacaagtgcagctgagaggtgcatggctaggccaagcccaccaagaatttgagaatttaaaggatcgagccgataagcagaaccacctgcttgtgggctctcactggtcacgtgcagcgacagcagcgtgagatggcagagcagcaacagtggctgcggcagatccagcagaggggtccacatggcagccctcccagcctgagactacctggatgccact

SEQ ID NO: 148330 - DNA, 244 bp, Zea mays
  Clone ID: MRT4577_66805C.1
cgccaacccgtccgttttccccgtgcttttcccccgtcgaggccggttcccatggcaaaaagactccgactaaaatggccggccgttggttccggcccgaggtgtacccgttgttcccggggacggccatggccgccggcatttgcgggtttaactttttccggaacataactggaaacccggaagtcagggtaaacaaggccgggagggaacctggggtgcttgaaaaccatgaggaggggag

SEQ ID NO: 148331 - DNA, 376 bp, Zea mays
  unsure (1)..(376): unsure at all n locations
  Clone ID: MRT4577_66806C.1
naaaaatttctttttttaaattttttttttgtgttttttttaaaggtttttcccttttttcccccaaacggttttttttttttcccaaaaccccaaaaaaatcaccaaacctccccacccaaaggggaaaacctaaaaaaaaagccccaaaagggaaaccccccccccagaaaacccccccaaaaaaagggaaagaccacctggcccacccaaaacccaaaggaaaagccctttttgcacaaaaaccctcgaatcaaaaagaaagcccccccattaagacccaaaaaaccccaggggcccctaaaccaaccaagggttgccaacagggaaaccagggaccaaaaatttttacccaacccctgggaaaaaggcctaa

SEQ ID NO: 148332 - DNA, 414 bp, Zea mays
  unsure (1)..(414): unsure at all n locations
  Clone ID: MRT4577_66807C.1
acccccgcgagagaaaccgngcccccggcgcccaaggccgaccgccgggcgccgcgccacccggacgacgacaccaggagggagggcanngcganccacancgggcaggccggaaaccaggacggaaaggcgagcagggagccgnacggccaggagcacggcacacaggcggacgggcagaggcccggagacaagaccacagggggaggcgaggaggcnnacaacaccnnncacagcgagacgggagctgggaagcacgcgccccgagcggcnacaggagaccaagaacccacgggcancgaggaggggagaacgggcaccnaccgccagaacaaccacccggagcagcncancagggggaaggaggaggcaggcaacaacnnggcccgaggacacaacaccanaggcaaggag

SEQ ID NO: 148333 - DNA, 1338 bp, Zea mays
  Clone ID: MRT4577_66808C.1
cccgggttcggccgggaaccgcttttgcttgctgctactcgccgccagccaaaagcagccgccccccagcccaaagcgacgccacacccgcatctgcttcattccacccgccccgcgaggagcttctagaagggggagaccccggcggagccatggcggaggaaaaggagtcgacgtcgatcccgaggacccagctcgcccaccacctccacacgcaaggcatgctgtgctgttcttcaaagttgggtctcaagaaagtttatgactggatgtgtagtcctttttcctgttgcagtcacgttcttcatcacatggtggtttattcaatttgttgatggttttttcagtcccctatatgcaaaaattggaatcgacatatttggtcttggttttttgacttctctggtattcatatttctggttggaatatttgtttcttcatgggttggttcaaccatcttctgggtgggagagtggtttataaagaaaatgccatttgtaaggcatatatattcagcgtcaaagcaagtcagcactgcaatttcaccagatcaaaatacgacagctttcaaagaagttgcaataattcgtcatccacgaattggtgaatatgcatttggattcataacatcaacggtggtccttcagactgacaaaggcgatgaagaactgtgtagtgtgtatgtgccaacaaatcatttgtacatcggtgatatatttctggtgaactctgaggaggtcataagacctaatttatctattcgagaaggaatcgaaataattgtttcaggagggatgaccatgcctcaggtgattgcatcactggagcccatgccacggaaaagccagaacattcgtctaaatagaatgacgtgatgtaaaacaagccacatgcatcaaggtcaaagtttccaacttatataacccagctggtttgttttgcatgtttactgatattgggttgtgcatcaagcagatagcatgacctgtgtgcttagccatgtgatttggatagaggagcagctttgtgctgagctattgtggcattctgtagtgcaggggaagcatcgtgttgatgcccagggatattattcccacacaagttgtgctactcattgtgcggggtgtttggtttctaggtactaatttttagtctcttcattttattttataaattatcaaatacgaaaactaaaatagagttttagtttccgtatttgtcaatttagagactgaaataaaataaaatagatggattaaaaattaatcctcagaaaccaaacacccctaacactggtccaaaatgctaacgtctatgcttgaggtgcattattgatt

SEQ ID NO: 148334 - DNA, 359 bp, Zea mays
  Clone ID: MRT4577_66809C.1
ttttattaataaaaacaaggattgtgaagattacatggtgattttgatgatgattaacatacttcatagaaaacaggcgacacttactgtagcttggcaggatgacccagggtctcgatcaaaacagttacatctttaggtaagagtcgttggatgtcgtacagacacaggttgcaagcaacaatatttcttattgtcttcgagatgatggacacttaaagcaagacgccgttgatggagagcaggcgatggctggttcgaagaattggatactaactactttctttccatgagtgcgatcgtaccgtcctttttggcgacaatggctagggtggctatgcccaagaacatgtcgtgct

SEQ ID NO: 148335 - DNA, 308 bp, Zea mays
  Clone ID: MRT4577_6680C.1
acgacttccaaacatttcaacaagaaggttggcactatgagcttgacaaccctgaagaagagataacatacaaaggtgtcgtcttcaatgagatgaaaggagtttactctcaacctgataacataatgggacgtgtatcccaacaggcactttcccctgataacacatatggtgttgatagtggtggggacccaaatgaaatcccaaaacttacttttgaagaattcaaggagttccatagtaagtattatcatccaagcaatgctaggatctggttctatggtgatgatgacccaaaagagcggctg

SEQ ID NO: 148336 - DNA, 439 bp, Zea mays
  Clone ID: MRT4577_66810C.1
gacacaacatagcataaaagccatattaggtgagccactagtataggtagcaaattaacaaacttctcgatatacagacatctgtggacaagtgcgggaacagctctattacaaagggggagccaagattataggggagagagaaggaaacatccgcctgcttgagcacaggactatggccccatcaaataacaatgcttctcagagcctatgatgtaccgtgcaacaaactgagcagagtcttgcactgacgctcattgtgctccctttgacaatgtcatcagctgtggggacccatatagtgaccccatttgtacaattatactccgtataatgtgaagcaaacttcctgtatcaaagcatatgcaagtgaatgttcacaataagattgggattctaggtatgatgcacacttgcacagaaagaaatcggtggaagc

SEQ ID NO: 148337 - DNA, 1524 bp, Zea mays
  Clone ID: MRT4577_66811C.1
gttcaaaaaccgcggctgtcccttgcggccttgcgtactcggccaccaaccgcttttgcttgctgctactcgccgccagccaaaagcagccgccccccagcccgaagcgacgcctgacttcgcatctgtttcgttccacccgccccgcgagaagcttctagaagggggagaccccggcggagccatggcggaggaaaaggagtcgacgtcgatcccgctcagccaggcggcagaggctgtcgaccccgaggacccggccaagtcgccgccgcggcccagctcgcccaccacctccacacgcaaggcatgctgtgctgttcttcaaagttgggtctcaagaaagtttatgactggatgtgtagtcctttttcctgttgcagtcacgttcttcatcacatggtggtttattcaatttgttgatgggtttttcagtcccctatatgcaaaaattggaattgacatatttggtcttggttttttgacttctatggtattcatatttctggttggaatatttgtttcttcatgggttggttcaaccatcttctgggtgggcgagtggtttataaagaaaatgccatttgtaagacatatatattcagcatcaaagcaagtcagcactgcaatttcaccagatcaaaatacgactgctttcaaagaagttgcaataattcgtcatccacgaattggtgaatatgcatttggattcataacatcaactgtggtccttcagacaacatatgaggatgaagaactgtgtagtgtgtatgtgccaacaaatcatctatacatcggtgacatatttctggtgaactctgaggagatcataagacctaatttatccattcgagaaggaattgaaataattgtgtcaggaggaatgaccatgcctcaggtgattgcatcactggagcccatgccacggaaaagccagaacattcgtctaaatagaatgacgtgatgtaaaacatgtcacatatgcaacaaggtcgtgcatcaagcagatagcatgacctgtggggcacgattagggtgccttggctatatgcgtagccatgtgatttggatagaggagcaactttgtgctgagccattgtggcatttccatactgcagggaagcatcgtgttgatgccctgggataatttattgtcttaggctagtttggcaaccccatttttacaggggattcctattttttcaagaaaatatagtttattttcccttaaaaaatagaaatctctttaaaaaatggagttgccaaactaatcagtaaattgaaggggatcatgggcttcaatcaattcactggtcaccaaaccagccctcaaacttgtgctactctttgtgcacttactagtactggttcaaaatgttagcgtctacgcgtgaggtgtataattgattaaattcgtttgtaactacgtgctgtataacatcttacgttacaaagagatcacacaacgctctgaccagatttcttctttcaaaaaaaaaaaaaaaaaactcgaaagggggcccggta

SEQ ID NO: 148338 - DNA, 385 bp, Zea mays
  Clone ID: MRT4577_66812C.1
gttgctgtcgctcgggattcgggggcgtggtttctgacgagaaggcagggcacgccgctgccgctgccgctgctcggctggcattttgataatccggaagggcgggtgaaaagccgcgtcgtcacatgcgcgcaaccgacgaccacgcggggctctcgagctgttgttcgcttgcgttgcgtccccggccggccagctaaacaaacactgcctgcccttgccctgtagcggcccgtgcagtagcttttggcaagccccatttccttttctttcttttcagcacgattcagaagagcagcacagggctcgcgattgagccaagccaatggaggagaggaactggctgggaagcaaagaggcaggcgcgacagcaacggaattcgag

SEQ ID NO: 148339 - DNA, 702 bp, Zea mays
  Clone ID: MRT4577_66813C.1
atggtcggagtcgtcctggccacgtgcgggggcggaagagctcgtcggcggcaaggagcccgacctacacagggcggtctagttcaaatggatggctcggggaggttcactagatgccatggaagctgtgcgcacaaggaatttgacaatggcgcagcagcttacccggttcacgtgctccggcaggcggacggattccagcgaggacgactcggcgtttccattgaggttgtgctcggtctggaggctagggaagcttcatgggactccgaggaggctagccgagcagttggcgcgagcgagagatggctggggcgagttggccgcggtggccggcacttgggtggctcgggcgggcggtgtagagctcgccagagttggggacatgctcggggaagtcaagcggggtacggagtgggttgctacgcacttggggagggctttataggcgtgagcgggcacaggcgagcggtcggcctgacaggcgctcggggagtgcacggaggagcaccagtgcgcgctcagccccctcggcatgacattgagcacgtggcagagtttagtgtagtcgctttcaagcgctcgttggctccaaatcttcacgaatttgggcaagatcctattgtaagatttcttctcccgactaccctctatcgtttatgtgtggaggtcgaggcgtttcttgggctgtgcagtgagtag

SEQ ID NO: 148340 - DNA, 286 bp, Zea mays
  Clone ID: MRT4577_66814C.1
ctgcctttgaagcacctccacagtacgttttgccaacctatgaaatggctgtgaagattcctgagaaagagccaccacctccttacctgcctgcctgaggacgttctatcttgtcaataaagcctataccagcttcttgtcttgtttattttacagaaagctgcaatgcagggctctcagactcgtttgatgtaaagtgcactgtcttgtctgagcatttattttcaaacactaaggagcttttggacattattaaaaattttgttaagaatcacattgtagaaac

SEQ ID NO: 148341 - DNA, 414 bp, Zea mays
  Clone ID: MRT4577_66815C.1
cctgcatggtaccgccccggacataattaccgggtcgacgagctgctcattcggcggccgccctccttttttttttttttttacatagtgctaaacactaaagacaatattttcaattaatgcttgcataacataccaggttgtttccctaataatgaaggcaagaccttcaagtctagcatgaatttagcttcatacttatgtttctactacgggccctaaatgctaatttagttttggcaagtgaaggatttcatcatttagaaagtggaggatttatgctgtattattgctagacccaaaatatatctctaaaactgcacattgcagattagcatcaatttgtaagtagcaggtttaggatgtattatatggcatagctagaccctaaatatatctgtaaaactgttcaat

SEQ ID NO: 148342 - DNA, 754 bp, Zea mays
  unsure (1)..(754): unsure at all n locations
  Clone ID: MRT4577_66816C.1
acagtaatttagcgatgaacaaaaataattctgataataataaaatgagtagtagcatgtttcataaacgtataattcactagcatttcacaatctagtgctagtgattgaaagaatacgagaataaacgacaggaaaaatatagccattctcatagtggggttgtcggcgccagaacagtgcaaaagaaggaggaagaagactggcgagaatgacgatgtcgacgtggaggaagcaaacgaacaacgagcaatagtgacggcgcttcccaaaaacatgatatgacccctaccccgtgtagggacacgagaggaagtaggcttcggagatcctgctttcccgaccccgatgacacctttgtgcggcgaatgggagaagacaaaggcagcgtttgtgggaggaggagaaagtttgtaacaaggacgacacctcaccctcattatatacacacgacacaactaagacaattaaatagccgcgtaatcacaacactaatcgaaattaatgtgagaataattacttatcaaaacaggccagtgcactgcgcacccacaaagtcggacgcgagaaatcgtcagaccatacatgtcgtgcggtcacgacaattgctcggcctagcaaggcgagcgcgtgcgtgggttctcactttttcttccctcaatggctccaaccaggtagagacaactcaattatttaagttgacgacactcctagagtagcatgggtggtaantaaagttttcaccacaccatac

SEQ ID NO: 148343 - DNA, 512 bp, Zea mays
  Clone ID: MRT4577_66817C.1
ttcttttttataacaatggattgcacagcgaatctatatatcgtgtcacgaagttctcatttaggcaacagaggtgtagactcctgcgtgctggtccgctgtataacttccgtagctatacactgtacacgctgtcgcaagagatcatgtggtatcggcagataattagtactagtacgtacaagaaaaaccaaaaacttacgcatgtcaagataatggacaggtcaacacttggccgattctgcacttcgcctccgacattgcgtggtgacatgcaccttggacacaataccattggcacttgcgcaacaatgcttacaccttgaatttatcgacctcatattacaccgcaatcaggagaagctctgagcccagcaattccggaacggtgaccataatgcgaccaattttgcctataaacagggcgctgacaactgggcctatgcattctcatgagcaactgcctgagaaaaaaagttaaaagctcagaaatctacacaacataccgagcc

SEQ ID NO: 148344 - DNA, 843 bp, Zea mays
  Clone ID: MRT4577_66818C.1
caaggaacatacaaccaaggaatgggttatatgcaacctcaggtgattgacaaaaaaattcttggtagttgttatttgttgtttatttgtgtttataagcacaatgtatagcttgggtccctgctgtatttgtttatttactaggctgaaaacttgaacatcttggattggcagattagcacccttaatttattgcaaatttgcaaatcagttcacagcatttgcctagctgtaatgagtattgattaggtgcccccacaacaacttgctccttgtgcttaccggtcgtgactattgaggtgcccccactaacaattttcagtattggttggttccacttccataatgctacctccatatgttaagtttttttgttcatctatgactataaatggtttttttaatcacactgtggttggcatccatatgtttgctgatagaccatctctttcccttctccagtaccataacggagatatctcgaactaatgaagacatggaccttttctgcaacagctgctcttccccgaggcgggtttttggtcgcagttatttactaagtaagacaccttgcggtgaccattaaagagtaaccaatcaccctgggtaggtcaatttttatctgcaagaactgatgaggccgcttggtaggagtaaatcgcttttcctgggaacgattgttggttagcgccgctactgtatgtatattgagataccttaacgattggtcttttggctgccatttggttacatgtatttgtatttggaggcataagtatcgtgtaatttgtgttatgactagtgtattgactattgaattatgagaagagctgctttagttgt

SEQ ID NO: 148345 - DNA, 398 bp, Zea mays
  Clone ID: MRT4577_66819C.1
gaagagccgatcatggtgtcgcagttcatgatggagctgcaggggctcaagacggtggacggcgaggatccgcccaggattctccacttcaacccgcgcctccgcggcgactggagcggcaagccggtgatcgagcagaacacctgctatcgcatgcagtggggcactccgctccgctgcgaaggctggaggtcacgtgccgacgaggagactgtggatgggttggtgaagtgtgagaagtggattcgggatgatgaagggcggtcggaggagtcaaaaacgtcatggtggctgaaccggcttattggccgcacaaagacagtctccgttgattggtcatacccattcgtcgaggaccgcctgtttgttctcactctcactgctgggttcgagggtta

SEQ ID NO: 148346 - DNA, 298 bp, Zea mays
  Clone ID: MRT4577_6681C.1
ggggcaggccaaaccgaccttttttgtaaaaagggatagggaccccacccggccacaaaaaaaattttcgcactgggataatacaaggccccaacaaacctttttatttaggtcccttatgccgggggaaaaaagggggaaattaatcacgccgggcccccctgggggactcggaaagcagaccatatagccggcttctgtagccgggggaaaattgggctaccgagtggggaaacgaaattttccaacattgaaaaagggggtaaagagttgcggacacaaattttggaggcttcca

SEQ ID NO: 148347 - DNA, 254 bp, Zea mays
  Clone ID: MRT4577_66820C.1
attgccctcataatccctactttcttctttgagcaccctggcatatgattctttttgggggaaaaaaaaaaacccctttcttcttccaaaaaagaggggccacttgctcctctttccttaagaccaaaatcccctactagatccaccgctcaagaggcaacaaagaaaaaaccgaccccggtcttacctgaagaaaaaaaaacacacggatgcttttaacaaccttgggaagctcactaagcacccatgggggc

SEQ ID NO: 148348 - DNA, 514 bp, Zea mays
  Clone ID: MRT4577_66821C.1
aaaaaaaagggtttttggaaaaaaattgggccccctcaacaataaagtgggggcgggggggtttttatagactcagttccgaacaaaattttgggggtggactaaaaggggtaaaatgggtttccagcacaaacttggcggggtgggcccttgccgttgcccaattttaaaaactggacttttaattttggtgaaaggcaaaatggggaaactttgggcgttctcattgggggggttttgggtaaggggggcctaaattagaggggggatggaaaaaaaattggggacaattgtaaaaatgataggaatttttttgggggcggatccaaaagggacaagctttggtgtttcccaagtaaaacccttcatttggaccctgggggaaggcttctccagcttttttatattaatttaattggcccatgggttggcattcataagggccgggggtttaccactttttttttttttaaaaaaaggacccgtgggcggccccttgggttccccccggaat

SEQ ID NO: 148349 - DNA, 278 bp, Zea mays
  Clone ID: MRT4577_66822C.1
ccagcctgggcaataagagcaaaactccgttaaagaaaaagaaaatttcatgcctggtgaagtactttgcacataggaggcatcttaaaaattggattcaagagcttcagaagctctcttccttggcactgcctgcagaggtggcaccatctcctacttggcatcatggctgccctcaaatcctttgtgaagcccaagatcatcaaaaagacaactaagaggtttatctggcaccatcaggccaatatgtcaaaatttagcttaactggcagaaacct

SEQ ID NO: 148350 - DNA, 485 bp, Zea mays
  unsure (1)..(485): unsure at all n locations
  Clone ID: MRT4577_66823C.1
atgtgatttggtgtacgctacatattgtttattatggctgcctgctgggtatcctctctgtgcacctggtgtacccttacttttatttttttttgacctcggcctgctccagagggggggggggcggcttnncnatnctngggctnactgcatcnacctgcttgacgaggtccttggggtcgttgggcaggaacttcgcagccgtcttgagcttgtcgtcgatgttgttggcaaggtcctcgacgtcggtcttcttgtcgtcggccttggccttgagccaggactcgatcgtgtcggcgggcaagccggcctttcgggcggcctccttgacctgcttgatgaggtcgtcgacgtcacccggggcggcctgcttgagaccggtaacaagagcgttggcctggcccttgccctccttcttggccttctcgacctgctcccagaccttgctggcgggcttctctgcggccttgatctgctccgcgccc

SEQ ID NO: 148351 - DNA, 256 bp, Zea mays
  Clone ID: MRT4577_66824C.1
gggggggggaaaaagaaaagaaaactgcctttttactgggaggtacaacaatgaaactgactaaaggtttatattgggcattggtcacttttgcaggaagcatcaatcctgatttggggggtatttttttctcctaaaagggactaatgggtggcgatgggaggctattttaccaaattgggcaagggaaggctacttttcaaaagggggttggggtaacccccaccctctattggggcgggggggttccatcata

SEQ ID NO: 148352 - DNA, 288 bp, Zea mays
  Clone ID: MRT4577_66825C.1
gggggcagctcttttttttttttttttttttttttctttttgttcataccaaaatgctttatgacctgccttcttattgggcgtccacccatgataatgtgtgggcccttcacggctgattgcgtctattgatgcgaggggggggggggggggagatttcccacttaacatgagccacctgttgggcgtaatgggttcggctgacccctcacggctttggttcggtagatagggcgcttgtgcttacatgtccggcgttgcaaaggggtaatgccggcacgctggtgt

SEQ ID NO: 148353 - DNA, 279 bp, Zea mays
  Clone ID: MRT4577_66826C.1
attcggctcgaggtcaaatgaagacccgccttagtatgagtcccgggctaatggcttttgctgagggggattttctaagggatcctcgggtatttaactatcaaatgaaggtttaatgtaccaaataaagggtggtcgtatcctttaatctaactatgcctggaggataagttctcttacttccactgcattcggagctactaatcttgtggtgggtagctctagacattgtcccatacattcaattcgtagggcgaggggttaaactttaaggctggg

SEQ ID NO: 148354 - DNA, 2951 bp, Zea mays
  Clone ID: MRT4577_66827C.1
cattgggaccctcgaggccggccgggatcgcgccgcgtatgcgctatcacactccagtacagctctcactgcgccctgcccgcatcgtctctccaccacgctccacgccccacgccctacaccggccgggaggtcggccgcacacacacaccccgacactccggacagagggggcgcaggcacgagaacagctcagtcgcggcgagctcccgggtctccagcgaaagtgccggaggagagagtggtggcggctggcgcgggctccctccgaggctctacgcggcgcctcagcgtaatgctggccttccccggggacagatcggcctgagtcgccgttgccgctctcgaatcggcgtcttcctcgcatggttccggccagagcttggatctcgcggcggaagacgcgaggcggaaaagtggggagggtgtcgttccttggttttcttctcgccaaagaggattgaagttatgatggaaaagcttgtatagtagcgctgaatccaattctcttgaagcaagtctcaaccatgcagcgtcttacagcgatagtctttgtggctacttctttcctcgttgcaagtgttccacatgccaaaagtgctgatctgaactctgataagcaggctcttctcgcatttgctgcatcactgcctcatggaaggaagctcaactggagctccaccacacctgtctgcacttcttgggtgggggtgacatgcacaccagataagagtcgtgtacatacactgcgcctacctgctgtaggacttttcggtccaataccatcagacactcttgggaagcttgatgcactggaagtaattgagccttaggtcaaatcgccttactgttgacctcccacctgatgtaggatctattcctgccctccattccctctaccttcagcataataacctgtctggaatcataccaacttccctctcttccagtttaacattcttagacctgtcatacaacactttcgatggagaaatcccattgaaagtgcaaaatcttactcaacttactgcattgcttctccagaataactcactttctggacccattcctgacctccaacttcccaaattgagacacttgaatttgagcaacaataacctcagtgggccaataccaccttccttgcagaggtttccatcgagttccttcttagggaattcttttttgtgtgggtttcctttggaaccatgttttggaactgcaccttctccttctccagtatcaccaccatcccccagtaagaccaagaagagcttatggaaaaagatcagaactggtgtgataattggaattgctgttgttggaggggtattgttgcttattttgattctcgtgctcttgatatgtattttcaagagaaagggacacactgaacctaccacagcttcgtccaaaggaaaggctattgcaggtggcagggcagaaaaccctaaggaagactacagcagtggtgttcaggaagcagagaggaataaattggttttcttcgagggcagttcatttaattttgacttggaggatttgttgagagcttctgctgaagtccttggcaaaggaagttatggaactacctacaaagctgttcttgaggatgcaaccatagttgttgtcaagagattgaaggaagtggtggttagcaagaaggattttgaacagcagatggagataattggtagggttggccagcatcaaaatgtaattccattgcgggcttactattactccaaggatgagaagttgttggtgtttgattatgtcccatctggtagccttgctgctgttttgcatgggaataaagctgctggaagagctccattgaactgggagacaagagtcaagatatctctggacgtggcccatggaatcgcccaccttcatgccgagggaggagggaagttcatccacggcaacatcaaagcatcgaacgtcctcctatcgcagaacctcgacggctgcgtctccgagttcggcctggcacagatcatgaccaccccacagaccccgccgcggcccgtcgggtaccgggcgcccgaagtcctcgagaacaagaaatcgacccagcagtccgacgtctacagcttcggcgtcctgctcctcgaaatgctcacgggaaaagcccccctcaggtctcccgggcgcgaggacccctccgtcgagcaccttccgaggtgggtgcagtccgtggtccgtgaggagtggaccgccgaggtcttcgacgtggacttgctacggcaccccaacgtcgaggacgagatggtccagatgctccaggtcgcgatggcgtgcgtggccgctcaccccgaggagcggcccaagatggaggaagtgatcaggagggtcacggaggtccggaattcttactcttctgggacgaggacgcccctggaggacaagccatcggagactgcacgagcgccatgagggggtacagcgtagtttagcaggagacggtagctaggttgcatagtggattccttatagagcttcagcaaagttgatagccacctgcatagcgcagtttccctcgcgattcccgatcgtttccagtaaatctgttgtgttgtttcctctcttttttttccccctgattctagcggtctggttgtcgatccatgccattgtattgttgttcagttaaatcagcagctcttctggttagtgttgcactgtaatttgacataatctttgcagcgtgattaatgaatttcatttgcctaaaaaaaaaaaaaaaaaaaaaagaccttaaaacttcaaattttaataaaattaaaaaaagaaaaaccgggccgcgaggacccctccgtcaagaaccttccgaggggggggaagcccgtggtccgtaaggagggaaccgccaaggttttctacgtgaacttgttacggcaccccaacgtcgaggacgagatggtccaaatgctccaggtcgcaat

SEQ ID NO: 148355 - DNA, 547 bp, Zea mays
  unsure (1)..(547): unsure at all n locations
  Clone ID: MRT4577_66828C.1
aattcggcacgaggttataatctaccgaatcccgccgcgagaagcctctgccgcctggcacaggatcccgccgcctggcactccgacgcgtcccgcgcgcagcagattcccgcacggcacacgatcccgccgccagaagcctccgcgcggtcgacggggacgcgtcccgcgcccggcataggatcccgccgcgccgtcgtcgcccggcacaggatcccgccgccagaagcctccgcgcggtcgacgaacacgcgtcccgcgcccagcacaggatcccgccgtgccgtcgtcgcccggcacaggattccgccgccagaagcctccgcgccgtcgtcgtggtgatggatcctccgtcggaaccagcagacattgaatcaggagttggtgatgttacgacacctgaacgaggcagaccaaccatggtacgtggttccatgacggcaggtcgtcgtggcgcaggatttacactggcagggcgtagtgccggtcgtggcactagttgtgtgatgcgcgatagtnggagtgccgggaggagcatttctggtgg

SEQ ID NO: 148356 - DNA, 305 bp, Zea mays
  Clone ID: MRT4577_66829C.1
attcctgggcacgccaacattacacaaaaaccttattatggcactataactcatacgaaacatctacgagggctccagctagcatgggttgctggctgattgctgcagcgtcagtcaatgccagtcggccgagtgggggcatttgactctgctgtttgtaggtgccagcgacaggcgcaatgcgctgggatatcggctgcactcgcggttgtgtttataaggttgcaaggaattcaccagtttgaactctgcttggtatttacagcagctgctgctactaccattgagacagctaactggtgtga

SEQ ID NO: 148357 - DNA, 316 bp, Zea mays
  Clone ID: MRT4577_6682C.1
acgacgcctgcacgcctgcgtcagcattagaattaagctcgagctcgagccgcgcgcatcgcatagattgacttaagctcagtagcgtgctgtgacactgagatacccagcgtgaaaggtggactgtcacacactctccgaggacggtctccgagtgctcatgtccctctacgagaaggaggtggagattcacgtgataccagtcgactcatgaccaacctccaatcgcatgccacagaatcttaagctgtgctcataaggatatcgcgctcacgttataagactagagcccaaccctttcctactccaggtggga

SEQ ID NO: 148358 - DNA, 687 bp, Zea mays
  Clone ID: MRT4577_66830C.1
aattcggcacgagggtcaaaggttcagcatcagcaacttgaatctgtgaggtccaagttcagggagtcacttgttgctgccctgagtttggattctgatcagcagaataagagtcagtctgataatgtgcagtctgctgggtctatagataatttcaaaccaggagcaggagatgcggtacaggatttagtggcaaccacatcaaaagatgtgtgcacaaccaattcaggtgtagacacaactgtagctcccagtagatgtgaggaaaatgagaagttaagcagtgatttagctttagagatgaccacaagcataaatgatgacatgcagcaacagtcaattcaggtttcctcagaagatgacttattgggtcagtgtatggttgcagatgaacttttgcaaggtcatgggcttagttgggtttctgatcttgatgctgggatttctgaacctaacgcagaacctaatgatctaaaaaggccgcggacttctaatgtggagtctgagtcaaaaagaataaagtctgccaatgagttagcaatggagaaggagaaatttaatcaaagagctgaaattctggcgtttagaattgaagaggagctgttcaagttctttggtggagtaataagaagtaccaggaaagggcagatctcttctgtttaaattgaagacaaagcaccctgagtt

SEQ ID NO: 148359 - DNA, 400 bp, Zea mays
  Clone ID: MRT4577_66831C.1
aacaaaatattagggtttaaaaaaggaccccgcatattttagtgggggcaaaaacgatgcattccccacttgcagggtcagggccacattttattcctactttgcacctgagcggacaacaaaaacttaagaaccatacagcccatagacgcacttgcccacttgaagagcaaccaagcgatggcagtctgcttagtgttgcgcgcattgaacatctcgttatcctcctcatacacctgttgagcagttttgttttaatataaatacaaacggactctaatcattttgagtatgacggtgctaaatttatatcccatggaaaggaagaaaacatggtttaggttttaccttaagaggcgaccagtgtttagggtctaaaagccattccctcctttaacaa

SEQ ID NO: 148360 - DNA, 242 bp, Zea mays
  Clone ID: MRT4577_66832C.1
aatactactattcctctatctgtggtgcatggtgtaattgttgtttgtcgcattcatgtggataacgtgctatgcctatagcaattctctgatttcccatagcttggaaggtctacacttacaactgaagggaagacagtagccgtagctaaggttgctgatgttccgcttgctggtagctcaacattctgagcttaagccaattttgatcaggatggatcatcatgaagctgtgcgctgtc

SEQ ID NO: 148361 - DNA, 379 bp, Zea mays
  Clone ID: MRT4577_66833C.1
acctacaccgacaccacctctaaatcccagcctccgcctccgcctccacacgagaagagagactcagcagcaacccacgccaagagcaggcagctccgtcctagcaccaaccaatggcgacgtcgcgggcggacgtggagaagggcgggtcgtcgccgaggaaggcgaagcaggagccgggcaaggtgccgtcgccgctgtacccgcagcacgagggggagcgggagtggacgccctggctggcgccctccatcctggtcgccaacatcaccgtcttcaccatcgccatgcactaccactcctgccccgcccccctcgccccagcccgcggcgcgacccccactcgcccccccccccccctctcccccggctcctccct

SEQ ID NO: 148362 - DNA, 259 bp, Zea mays
  Clone ID: MRT4577_66834C.1
ccaacccggagggaccttttaaaaaccccccacattcgccaattacaaagaagagaaccccccaaaaaacccccaaaatttacaacggcaattgaaaaaaaataagcccccctcttatgaaaaaaatccccaaggttcccgatgaaaaaatgcccactagcctctaaaacccctttgaggattcccaaaaaaaaagggcccaaactaatacccccaaaccaaaaaatttcaaccaaatccttaaaataaaagggttttt

SEQ ID NO: 148363 - DNA, 661 bp, Zea mays
  Clone ID: MRT4577_66835C.1
ccccggccccccctcgagttttttttttttttttttttttttttttttttttttttttttttttttttttttttttttttttttttttttttttccccccaaaacttttccctgatttttttggggtttccttttttaaccttcggggtttggggaaatttgcccacccccaattcccccaaaaaaaacttgttcccttgcaaaggaaaaaggggggggcccccaaagggtttcactgggaacccccccttccttttcctaaatttattggacccccctaagcttccccggggcgggcgggtaaaaccaaaaaagggtaaaaaaccctttttttttttttttttaccctttaccaccattttgggggtttttgcccctgtttttgggaccaaaaaattaaccggcccgtttttgggccccctctttgggggccctttttccaaaaaaaagtttccccaaatttttcccgttcccaaaaacccccccaaaggcccccccgggggcccccctttatttgttgggacccccgttgtttccctcaaagggttgtttcccagggttttttttaaaagcttttacggccttagccaagttttctttttttcaaacccctttttaataaattggttaagttttgggacccatgtttccccagcctttt

SEQ ID NO: 148364 - DNA, 673 bp, Zea mays
  Clone ID: MRT4577_66836C.1
ccggccggggaacctccattcgccggccggcccggggagccacggagagcaaaggcagcacactcagctatccagcaaaagagatcgcgagaggcaggagtcatggccaccgtcagcgccgccgtggtgaccaccatcgttgcccgcgccgcgatcgccaggaccaatgctctagggctgcctgcgttgagggcgaggagcgagagggtgcggtgcagctacgccaaggatgccaagaacgcggccccagtcagcaccaagggcgcaggcgcgtcgctgctcgccgcagcgggcgcggtgaccgcgtcagcggggcccgcgctggcgctcgtggacgagcgcatgtccacggagggcaccgggctgagcctcgggctcagcaacaacctgctggggtggatcctcctgggggtcttcggcctcatctggtccctctacaccatctacacctctgacctcgacgaggacgaggagtccggtggcctctcgctctagatccaccctctcctgttaatgatctgaatgtaaacatggtggcggtcatcggtgtaaatttagacatggctatttgcatctaagatccatcctctcctgttaaaaaaaaaaaaaaaaaaaaaacgcctgaaaaaataacaactttgcaaaaaaaggaaaaaaaaaaaaaaggccccta

SEQ ID NO: 148365 - DNA, 236 bp, Zea mays
  Clone ID: MRT4577_66837C.1
aaggaaaggaactagtattaatttgtatatcacagcaggacgatttggtgattcaaattaaaagtttatttttcacaccaaacaccttattccatcctttccacagagattcacttacaactagatcaagcaacctcagtcttaagccaccggcacttgcaagcctgcaccaacaacaaccgcaggtgcatttttggcgtcaggccttgtagagcatgccgatttttacgcgcttt

SEQ ID NO: 148366 - DNA, 144 bp, Zea mays
  Clone ID: MRT4577_66838C.1
tcggtcacaagcacccttcgaaacacaaacgcaaagacccgctcacagatcgaaacggaggatgaaggtggagggggcggttaccctactggtgccaccgtcaaaggccatccccccgttcatgccgtgggtttgcgacctttt

SEQ ID NO: 148367 - DNA, 714 bp, Zea mays
  Clone ID: MRT4577_66839C.1
ccggccggggcccacgatttgcagccacatcggttggcgataatttcgtgtattcgccttttttaaaaggaatcgcccccgacggccgcccgggagccacggagagcaaaggcagcacactcagctatccagcaaaaaaaaaaaaagagatcgagaggcaggagtcatggccaccgtcagcgccgccgtggtgaccaccatcgttgcccgcgccgcgatcgccaggcccaatgctctagggctgcctgcgttgagggcgaggagcgagagggtgcggtgcagctacgccaaggatgccaagaacgcggccccagtcagcaccaagggcgcaggcgcgtcgctgctcgccgcagcgggcgcggtgaccgcgtcggcggggcccgcgctggcgctcgtggacgagcgcatgtccacggagggcaccgggctgagcctcgggctcagcaacaacctgctggggtggatcctcctgggggtcttcggcctcatctggtccctctacaccatctacacctctgacctcgacgaggacgaggagtccggtggcctctcgctctagatccacctcctctcctgttaatgatctgaatgtaaacatggtggtggtcatcggtgtaaatttagacatggctatttgcatctaagatccatcctctcctgctaataatgtttggagactacgtacgccttaaaaaaaaaaaaaaaaaagcggcc

SEQ ID NO: 148368 - DNA, 338 bp, Zea mays
  Clone ID: MRT4577_6683C.1
ccatgagtagatagcaacctgagtctgccaaggatgccatctgacagattgttggggatgccaaggacaagaataggaagctactgagactgtgagaacttcacattgggctgagcaattataatccacaggaggacaaacgattgagtggcgtgtggtaagttgccccatatccctcatgccaagatgaaggtgtgcatgcttggtgatgcacagaatgttgaggaggccgagaagatgggacttgactacatggatgttgaggctctccagaaactgaacaagaacaagaagcttgataagaggcttgccaagaagtaccatgcctttcttggtat

SEQ ID NO: 148369 - DNA, 760 bp, Zea mays
  Clone ID: MRT4577_66840C.1
gtgcggcgctcgaggcggccggtctcgagaaacttgcctcggattgactttatatataattgctccagtgaataactaaaaaaaaaaaatagggagccacggagagcaaaggcagcacactcagctatccagcaaaagagatcgagaggcaggagtcatggccaccgtcagcgccgccgtggtgaccaccatcgttgcccgcgccgcgatcgccaggcccaatgctctagggctgcctgcgctgagggcgaggagcgagagggtgcggtgcagctacgccaaggacgcggccccagtcagcacccaagggcgcaggcgcgtcgctgctcggccgcagcgggcgcggtgaccgcgtcggcggggcccgcgctggcgctcgtggacgagcgcatgtccacggagggcaccgggctgagcctcgggctcagcaacaacctgctggggtggatcctcctgggggtcttcggcctcatctggtccctctacaccatctacacctctgacctcgacgaggacgaggagtccggtggcctctcgctctagatccacctcctctcctgttaatgatctgaatgtaaacatggtggcggtcatcggtgtaaatttagacatggctatttgcatctaagatacaaaaaaaaaaaaaaaaaagcggttgggaactaagcaacgcctggaaaatatcaactttgcaaaaaaaaaaaaaaaaaagcaccccactaaaggtccgcgcccgtttttaaaataatggtttcccccg

SEQ ID NO: 148370 - DNA, 427 bp, Zea mays
  Clone ID: MRT4577_66841C.1
ctcgttcttctctccctgcacgccggatccccgccgtccccaccatcgcccgtgttgggtccgacccaggccgctcatgcctcgccgcgcagtccttccgtagcaccgccacaccgcacgcgttcgcggcggcgtccgccttggcgccggtctcgcacaccgtcccgcagcggatccaatgacgcctcctcaccctccgctgcttcctcccatcccctctcccatcgaatccacgattacgtgtcccggtgtccacccagttccccgctcgccgtcgatgaagggcggccgcctgcaccgaccggagccgtcgcagacccacctcgccatggcggcggcggtcgcggtgccttccattctcgcccctaaccacacttccctttcatcctcgctcactttcaggcggccccattccagttgaaggagc

SEQ ID NO: 148371 - DNA, 1891 bp, Zea mays
  Clone ID: MRT4577_66842C.1
ttttttttttttttttttttttttccttaaaaaaactcaaaagctagttcggaaatttaaatccccaggattccctgcgagaaaaatgagcaaatttcctgctaatttccaaactaaccattagaagatatagctcatgctaaaacccggcgtgaactgattcttgtgctacggaatcaagtttctgtgactgcgcagaacagaaacaaccaaaactacagagtacagaccccttgtcgctaagacaagatttttacgatgatgaaactacccgatggatgaattacaatgaaatgactgcgatatggtggcagtctatcatatagaaatctaaaacgggtattcatgagtccatctccacgggttctgtggctgtaaaaattggttccttgcccctaatcactgcagtcatcatcaatttaccagcatctggaaaatcctcgtgctgcatcaacacttcttcaactgacaaacatttactctccaaacctctcagatgtacatcctctttcttcacaggcagaacatcctcaaaggtgccgtcatacaccacagcatccgggctgtaacacaacctggaagctttgaagaggacagttgcttgaagagattcttcgatgacctcgtcactccaaccttctgacatggatgcctctgaaagctttacccaatcatcttggtcagttgcattcatccagcatgcctctagaaggcctctgttggaacttcggaacgatgagcttgtcaaagcaaatacttcaaaggctttaagggagagctctcggtctctcctcaagcacatctcaatcagttctgatggaccaagcaatgtgtttgtagatttgacttgtgcatattctggatcatgctgaacaatttcttcctgcagttttagaatccgaatgtccgcttctatccgtgcaaccttcacttcataatcaatgtccttacctgctgttgcagcaattttagagagataaagaagacgtcttctttcagcaaaggatagtggctttctgctggttgtgaagctggcatctccatcaggactacgacgcagagcataggtatgaagggtgtcggaagcagatgagaactggtttaagcatatctcatgaacccacagcagatcactccgctctttcagaaagcttgcaagctcttcctggaattcttcacctagccttaacagattagagtagtctcctctgttgactaactccttaaagacaaagaaactgaatcccccatgaggccctacgctatcatgcattaggctgcggaggagacctgaatcatctagatcatagcaaatctgccacagtgtttggtacccttcatgtcgtttggctgttgctaaaataggagaaataacctctctaagtatagattccttcagatctggcttgtccgtaccatttcttgactcctggtatttggcctccactatttgtttagcaaggttgtagagggatctgagaagttcatctcttcgttcacaatattcttgcactagcacaccatgttcctgcccacgttcaaattgggcagttaaaaggcacatatatgcctccagtagaatatctgtaagtccttccagctgagaccatagactggatttcattgacatgtctgcagctcctgattctcccaaaagctccataatcaaggatgccaaattccagattccagaccgtagaacaggttggctgttccatgttatcagtccttcaggagatggataccattccttgtgatccttcttgtagtgtgatgctgcctgaactatggtgatacaagcatttgctaactcaagtgcacgttgcatctgaacagaagggtgtcttctctactaatgatgtattgaagttcatgagataaacaataaaat

SEQ ID NO: 148372 - DNA, 419 bp, Zea mays
  Clone ID: MRT4577_66843C.1
ggcaaagaggggtaccaagtttccaaaccattttgctcaaaaaagcgtttttacggggggattctggctaaaaacaggggggcttcatgtatcaaatgaggacaaacttgacagacatttggatatgagggatggggggaacaagtttggtggtggtgcctccctccctgggatggagaagaagctccaccataattcctgggaaaaaaactcgagggggcaggagccgtcgtcaacgggggctagggggtcaaacatgtcggagctggggtccgggcatccgctaaaaaaggccaggttggaccgatccccccccttctcgagggagccccccatggggcaactggggaaggggatgttctcctccgggtagaaggccaggtcccaggccccctccctgttgagcttgtcccccaggc

SEQ ID NO: 148373 - DNA, 150 bp, Zea mays
  Clone ID: MRT4577_66844C.1
ggaatcagatttgcacgtgtatattgatgcctgcatgatgaacttgtttgtttgtttgaactctagagtggtctcattattgaaacccagtggcaaccgtgggccggcttattcagacgacctcgccggaacgggcgaatctcaccgaat

SEQ ID NO: 148374 - DNA, 334 bp, Zea mays
  Clone ID: MRT4577_66845C.1
ctccgccgccgaccgacgctacggctcagtgcatagcccgccgagacctcatcgatcaccgttaacggtcaatcatggcggacgtcgatgcctaaccggatgttgcctgctgagctcccaagaagaggacgattctcaagtgcagctaccgttgcgacgacctagatgcgctaatcgacatgtccacagacgacctcgtacagtttttcactgctcgctccattagaagcgctcagaggggcctgaagaggaagcccatggcgcttatgcagaagctgcgcatggcgcttaatgatgctactgctggtgagaaaccatagccagtgaagacaca

SEQ ID NO: 148375 - DNA, 383 bp, Zea mays
  Clone ID: MRT4577_66846C.1
tttgttttttttgaatcaaactcagccagactggccctgaatcaccactactaacaaccaccacgcccgggcatactcaagcacatggtcacaccatgcaacatggcctgcaggcattcaaaggcatgtccgtctgcctaacacaatccgcatcgccgcggagacctcacatttgcaaacattattgacagatgagaacgggcttatagagtcatctaaaataacttaacgggctactattacagtataatgtcagtgggatacgtgcgcggttatccaagttactggagttgcgtaacacaagcgtatgtctcgcagagcatatatctaacaggcggtcgcttacaggcgttctcaacatgatcctattccttgtggctaca

SEQ ID NO: 148376 - DNA, 320 bp, Zea mays
  Clone ID: MRT4577_66847C.1
ggaacgaacggggaccatttcccccaatatataaagaggcaaaattaaaagccacaagtacctctgaaagaaaatccaaaattaaccaggggcccccaaagggggctttgaggagggctcggaaggacacttaattccttttaagggtttgccaccccccccccccaacttggggcctttggaacccttttgaacagcacccttcgtttgccccttttgggacttggacacctaaacctttttcgcctttttctaaaccttgggcttcttgaggccccccttgatctcacaaaaagcagtttttttacccacccctcccg

SEQ ID NO: 148377 - DNA, 178 bp, Zea mays
  Clone ID: MRT4577_66848C.1
agtttttcgttgacatcatgttaatctacagaattggtttgcaccggctcagcgacagccttgatcactccgttacgttgaggtaaggtcagcatggtgagggtcaatgtgctcaacgatgcgctcaaatccgtgcctattattcttaggtttacgaaacaaattgctattatagtgg

SEQ ID NO: 148378 - DNA, 1401 bp, Zea mays
  Clone ID: MRT4577_66849C.1
cgcttgatggcatgaggggaggagggcaggtggcttctttggccggtgcgcccgaattcttccctgagccagcctcatttgggcggccttgggagtccaggcagatgtaccggcagggtggtggcatgccaatgccaggcagggagaagaatggagggcgccatggtccgtccagctcatttggtgagcatgagcttggtcatgtgcccaatggggtgaataggaaggcccatggcgatgcggcttatgaccagaggattgtaatagagagaaaggagggcctgaggcactctcagtcggagactgacaccaaacgagccaaacaacaatatgctcagagatctcgtgtccggaagctccagtatattgcagagcttgagagaagagttcagtccttacagacagagggaatagaagtaactgctgaaatggattttctcggtcagcaaaatatcatgttagacttggaaaataaagccttgaagcaacggcttgagagtctatctcaggagcatctcattaaacgttatcagcaggagatgtttgagagggaaattggccgccttagaacattgttccagcagcagcaacagcaacaacatgtgccgcagcagcaggctcctacccatagccgcagtaacagtagagacctggattcgcaatttgcaaacctgtctctgaaacacagtgatcccagttcagggcgcgacgctatctctggcctccgcatttaagatccctttgttccagcttttggatccctgagctttgcagaacctgctgcccctttatgccactctttgtggttgttagtagcatcatgagaggagcagcaccggtgaaaccgggaatctcatcccacggtgaataaagctggaaaggttaataactgtggatctggtccttagttctttcagaatgtgcacctggcggtcatcgttagcttctgtccattattgatgcttgaccagtcggaggtgtttaggatctgtttgcagattgatgacttccatggatccttgtatcagtttgaatctagaacactaaggttctaatccattcctttttagtcgattctctgtcgagtttaggcgccatggcccttgtattagtgtggcacacgaatggaatgtgagctggtcctctttaggttatgccacatcctggaaaaccgttgcgtgaggagttgtcgggccatgtccattgtcctaataagatggtgaggttgaagggctggtgcagttcagtttcattttatttgtgatgtgcacagcaagatattggatactttgggttcttacatttatttgagcactgtatttttatcgcattgtgatgacagtatattccaagttcattttagctgccaaaaaaaaaaaaaaaagggcggccgctcgcgat

SEQ ID NO: 148379 - DNA, 362 bp, Zea mays
  Clone ID: MRT4577_6684C.1
ctagggccttgtaccgctcgccggctcctacaacgagtcgaggtgccagggcctggacggactgacgtcacgcgaggccgactactaccagcagggctcgcggttcgccaagtggctcaccgccgtcagcatgcctaacggtccctacgagctcaccgtcaaggaagccgcgtggaggctcgaacgctactccggcatatcacaggacaacgggcttgttccgatcgtggagccggagatcctgctggactgcgagcacggcatcgaacgcacattcgaggtgtcgcacaaagtgtggtccgaaaccttctacgccatggccgtgaacaacgtgatgttccagggcatactgctgaagccgt

SEQ ID NO: 148380 - DNA, 1336 bp, Zea mays
  Clone ID: MRT4577_66850C.1
agacagcgtatgattgctccattccgttagcaccactagttgctgatgttatatgttgccccaagttaatagcttgatgaatattttccaagctgcatatggcagtggaaatggtaccctagttctcaatcaggcttcagcaaatgcttgtttctctgacattatgaacatccttgcaagcaaaggggcaaacaccaacatccctgagttatgtactctgaggccatcaaatcttactgatgtttcttgtcctgtgaaggatattagctcttttgagaaaatagtcaacatcagtaaactccaagatgcatgcagcaatgttgacccactgaaagagtgttgtaggccagtttgccaacctgctatagcagaagcagctattcacatatcctctggtggggctaacatgtttggaagttctagcatgccagggagtgctgttgggattgatgttgttagcgactgtaaaggggtagttcattcctggttatctatgaagctttcatcagaggaagctaatagtgctttcagagtattatctggttgcaaggtgaacaaagtttgtccactggagtttgatgaaccttcttcagtcgttaaggcgtgtggcaaggcatcatcttcaacgttatcatgctgcgcagcattgcactcttacattggaactaggcaaaaacagatatttgtcacaaacctgcaagcaattaattgtgcaacaatgtttggatcaatgttacagaaagctggtgtggtggatgacatttatgggctttgcgacattgatttgaaagatttcagcttgcaagattttggacagcaaggctgtctacttcggagcttacctacagatattgtgtttgacaacgctacaggcattagctttacatgcgatttgagtgacaatattgcagcaccatggccatcctcatcttctgtccaatcattgtcactttgtgctccagaaatgtcgctgcctgctttgcctgtctcgccgaaatcagaaagctcaggtccctccagaactgggatcggcgttttgttgctgcttgtattcctcactaccatcactatctgaggaatacttccatctagtgagccagaagcttcttacccctgttgcattttttccccatctgtgcaggcccgcgtgtaaattgtctgaattacattcttgtaaatgagcctcccccttgtgtctctttttggtccagtggatagatcacagtgctgttgtgttagagattactgttgtaccattttgtgtctgagcactggttgaaagtaagctagatctggagcttcaccgcggatgatgatcgaatggcatttaacaacc

SEQ ID NO: 148381 - DNA, 273 bp, Zea mays
  unsure (1)..(273): unsure at all n locations
  Clone ID: MRT4577_66851C.1
cgtccgttcaaatcccggggtggggagggggagtttgacacaaagtgttgctgtgctgttgggattggacaaactgtgaggaagttttggtttttgacccctccaaaaacggcccaaaagaaaacaaattttttttgggtggcttttngaccnnggncanagttttgttgggggggttactctcacccattattattccaattctttagcgggggggggggttttttctttccgacgggggatatgcatatatctacccgtatcatgatcctg

SEQ ID NO: 148382 - DNA, 855 bp, Zea mays
  Clone ID: MRT4577_66852C.1
gttgcaccactgccatcgactcctggaaaggactccgggacaagttcctgctcaacttctaagggtaccgacccgacactgacgccttggccgagctatcactctgcaagcagcaagagaaggaaacccttcgggagtactacagaaagttcctgactctcaagtcacaactgccatcggtcgacgaccacatcgcgatccattacgccatcagtggccttcgggctggcgtcctgtacatccactacatcagggatccacctaaaactctccaagagctataccagctattcgagaagtacgccaggtccaaagagctacatcaacaaaaggtggaactcagaggaagccaaaggaccctccgcagtctagcagaacctggaccaggccttcgcatccagactccggtcgggacagccgaagccaacaataggtgcacaacatagccaatcagcacccagctagagaaaacgtccgccgtcaagaataccccccaaggctgcgacaacgacactagagggagaggacgaggacgggcgcagcagccacacagattctattgcctattccatggcgaggaccgtgcgcacccaacaagagattacgcagaaacgaaggccaccatggacaggatgtccagggcacagccagccaacaaccagagagttgttgcgcacacataccaccaccaccaccaacaaccacgtctaacacccacccaaccatgcgtaccaacaccgccaggaagtgcaagtccttccgaacccgcctccacctccgcatcacccaaatctaccccaccataatcacccccaagcaccaaagcaagaagacttcgccgagcaaccctggtgc

SEQ ID NO: 148383 - DNA, 346 bp, Zea mays
  Clone ID: MRT4577_66853C.1
gcttagtgtgattgccaggctggttgtctgcacgagagatctgaggaagacatgttcggaatgacgttagcaatctagaccattgttaagccttgcggcatcacgcaccatcagataccgaatctaggtaccctctgcttacttacagctagtacttggctgagtgcgactactcttgtcatcttttaggatggaattaagccttgtgagcctcctaacactcctgagaaggcaccattcttgttgcgttgaactccatacctttgtggagagatctatggtgagcctactgccctctcacggatacacacttaaggacctgtccagacgctcgctcgacggggct

SEQ ID NO: 148384 - DNA, 309 bp, Zea mays
  Clone ID: MRT4577_66854C.1
gtgtgggggggtgttgtttgtttcattcctggtggtggcctttcgttaatttcttttagttttagtccagcagagatgctgcccccagaacgggggggggcgcccccccccccggtgaaagaagaaggggggtaagtaacagccgccgatccctggtcggcggcggttatggttgcgactgggggggaaaaaaaacgagggggaccccccaacggggggggccgccccatgaaaacataattgggaaaggggtgaacaaaagttcgcccgacaagaaaaaaagattttaactttagagggggggggggg

SEQ ID NO: 148385 - DNA, 146 bp, Zea mays
  Clone ID: MRT4577_66855C.1
tgtactattttaaaatcccttgaaatgatgatatcaggagtaaaattgcttgtagtgtttctgaagttctgtctggtaggcacgttacaaatgcctaataggcagttgagctagagcaaggctacttgttatggccataaatgcct

SEQ ID NO: 148386 - DNA, 274 bp, Zea mays
  Clone ID: MRT4577_66856C.1
aattcacctaggggggactgaacatgcttgaaatacccgcaccgaaactgccaaaaaggagaggagagggactgatactacaggcccccacaaggacacagggtgcagccgaacacacgaaacaccgcgtcccactacaactaccagacctaacgactcctactttatttagaccatctaaattgcaatacggaccgggcactgatatagctacggcacccacactgtcacacacggagagaaggacagaaaccgccacgtgtgggattaactg

SEQ ID NO: 148387 - DNA, 498 bp, Zea mays
  Clone ID: MRT4577_66857C.1
agagtcataagcctgcccacctttataaaaaggttaacaggagttgtgcttcattgttcacaggattacagcaaagggaacgatatgcaacatttgagctcacaaccaattgttgcttaacttgcgattttatagtgcactaaaaattttccaaatacgaaatactcaatccgtacctgctgtgcaacaacaacatccagaaaatcgccaggggctgtagaataaagcacttcttgaagggaaaggaacaccctcttcaaggcacagggctgggcttcactgatctcttgaactgatacttattcattacccccttaattgtctggcgctggagggacaagtcctacaactccacccttttcattcccgctgtccacttacatcttatccttggaggttactttgcttcctgcaggttcttgatcggtagcccgacttgccctctgtggtttctctttacagctgagagacttccttccattcttttgcttcctttga

SEQ ID NO: 148388 - DNA, 352 bp, Zea mays
  Clone ID: MRT4577_66858C.1
cgttttctctagtccatggcagcgtccctcgccgagggcggggaccccattggcgatcgggagagggtgctcacgctcctccgtggcctcagcggcaagttccgccacatggtgtccatactaaagatgcaccggccgttcccgacgttcgcggaagcccggacacaccttctgctggaggaactggagatcgacgcacgcccttcgaccccgcctgctcctgctgcccttgtcgctgcggcgccgcgcccagcggcacccggcgcacccgctgcgcgacctaatgcacccaacggtggccaacgcaacggccgtatgttgtggacgccactggaccctggagggtcacttc

SEQ ID NO: 148389 - DNA, 551 bp, Zea mays
  Clone ID: MRT4577_66859C.1
cattgggtacctcgaggccggccgggaacccacgacactcatctcaaagcaacccagccgacaagatgagagcgaaatggaggaagaagcgcgtcaggaggcttaagcgtaagaggagaaagacgagggctcgctccaaataaacgtctcgcccccaatctcagcaaccaccacttcagtcctgaacgataatgatcactgaacgaaccgatctgcgcatcaccttccgtccgctctattcgctgttcactcgacgacgttgcccagctacgtcatacggcaagcacgcgacctgaacctcaactaccaccacggagggcgattgcaaggctgagagtggcactggatactggtcaactacccattgaggtcttcgagagtttacttgaaacgatggtcactctaacaccggccgtacttcaccagcgctttgcatgcattgcacttctggaaacggtctttgactgatacatctccgtgtgagacatgatatcgaatgaaaaaatgcttcacggcaaaaaaaaaaaaaaaaaaaaaaaaaaaaagcggcc

SEQ ID NO: 148390 - DNA, 684 bp, Zea mays
  Clone ID: MRT4577_6685C.1
ccgcagcgctggagctgaacagggtgccgcagccaccaccgcagccagagccgcagccaccagacttggcgtggttggccttgaagccttcgatagccatgccgctaccacagccgccgccgccgccacacccggagccgcacccgccgccgccgcagccagccgacttattgtgcaggccctctccggcagcagtgctagcgttgaacagggcgccgcaaccaccgccgcaaccggagccaagccccaaagcaagaagacttcaccgatcagccgtatcgcggagtcattcacatgattactgggggtccagcgtcgacttcgacacgaagtgacagaagagggaccattaccgcaacatcaaccacgtcgccgtcaccggtccagtcgtgcagacgaagtggtcccatgtgccattgaccttcgacgcccgagacgtcgatctgcgtagcgcaccccacatcgacgccatggttagtcgacaatggcagccaggcggatatcattttcctccatgccttcgaccgcatgggcataagccacagcctgctcaagccttcggacaacccactgtatggcttcggcggcaagggcacctttcctgtcggcaaaatagagttacccctctccttcggtgtagcacccaatgcacgaagtgagcaagtcacattcgacatcgtcgac

SEQ ID NO: 148391 - DNA, 185 bp, Zea mays
  Clone ID: MRT4577_66860C.1
cccacgcgtccggcgagagcggccgaggcgctggcgttagggggtccgtcgcgtgcagctctgctcgagtgcgtcctatacctggtggcttgcgaaggcatggttaacgtttgaagtttgacgagtgtatttacttgtaataaaaaaccactaattttgtaagctttgttccagaaaatattcaa

SEQ ID NO: 148392 - DNA, 924 bp, Zea mays
  Clone ID: MRT4577_66861C.1
ggggcatcatgccgggcctcggcgccagcaacctcaagatcaccaacatcctcctggaccagaacctcgtcgccaagatcggcagctacaacatccctatcctcgccgagaccgccaaatccgagggaggaggaggaggaggaggaagcaagtatccatctgacagcagggtgccccccaatggcgacaagatcgacatctacgatttcggcgtgatcctgctcgaggtcgtgaccgggaggcccatcacgtccatacacgaggtggaggtcatgaaggagcagctgcagtcggcgctgacgtcggagagcccggggcggacggagggcgctggtggaccaggcggtgagccgggcgtgctccgacgagtcggcgcggacggtgatggagatctgcctgcgctgcctggccaaggaggcggagcagcggccgtcggtggaggacgtgctgtggaacctgcagttcgcggcgcaggtgcaggacgactggcgcggggactcgcggagcagcgccagcgaggagtcgccgctgtcgccgtcgcagatcccgccgcggagggacagggagaccagcgcctggtaataagccaagcccgctctaggtgactgttgttgggcgatccgattaggcggcgaggcaggcatgcatcaagtgagatttcgttggtaaacaagtgtacagcagctgcaggctgcagctgaagctggaaacccaccacaggatgtgtacagctctttgcttcggcctactagtactagcactgctttattttatttttttcaatgcgtctttgccacctcattgattcacctactatatggatcgtttgactatgtgtaagcacaactgtatttggcgtcaatcttaccagaggtctcagttgtaggaccaaaaaaaaaaaaaaaaaaaaaaaaaaaaaggcga

SEQ ID NO: 148393 - DNA, 414 bp, Zea mays
  Clone ID: MRT4577_66862C.1
cggcaggaggctgctgttcgagcgggaggtcctcgcgcgctgcgccgtgaacgccatagcctgcgagggagccggccgtgcgcaccatactcggagctacaagcagtggcaggccaggagccggcgggcagggctgcggcagctgcctctggacggtgacgttgtccggacgctcagggacaaggtgagcagggaataccacgagggtttcgtgatcaccgaggatcagcagtggcttctccagggatggaaagggagggtgctctacgccatttccacgtggacggcagacgatggattggcagggaattgacgatctttgtttgtgcattgagcttgtcatagaatattaatttatgttcctgatgtactcactctgttcaaaattttaaactgttctggatttttaagtac

SEQ ID NO: 148394 - DNA, 234 bp, Zea mays
  unsure (1)..(234): unsure at all n locations
  Clone ID: MRT4577_66863C.1
aaaatnncatcatatcactcctcatcatactgatctctttccctctttgaataacaccttaaaacttacatctatttctcatccaaccaatatctctttcttacaaactcanacaactctccttctatagcccacatcaatatcctaaaccatctaatcaataaccagaactattacttcattcacttactccaaaacacttgcataccctaaatattacactctcatctctta

SEQ ID NO: 148395 - DNA, 2741 bp, Zea mays
  unsure (1)..(2741): unsure at all n locations
  Clone ID: MRT4577_66864C.1
gccggccgggtctgccactctctctccccatccgcgccagtccaaccaagtcagcacccgcgcgcggcaaggagttcacgcccatggcgagcaccaacatggcgtcggccacctcgcggttcatgctggccgcgggcgtgcccaccgccagtagcggcagcggccgcgtcagcttcgcctcggcgcccaaccggcttggcaggaggcttgtggtccgggccgatgaggagtccccggcagagccggcgccgacggcggaaggggagggcgccgtggccaccaagcccaaggccgagaagccgccgccgatcgggcccaagagaggcgccaaggtgaagatcctgaggcgggagtcctactggtacaacgggatcggcaacgtcgtcaccgtcgatcaggatcctaacacccgttacccggtggtggtgcggttcaacaaggtgaactacgccggcgtgtctaccaacaactacgccttggacgagatcctcgaggtgaaatgagtgaggccagtctgctcaaggaccccatgggggccttttttttttttttttttggagagcctggggtttttttcttttttttttttttaaagcaagcaattacatgatatgattatgtggattatgctattacacataggatcgatgttgtgacgctagccagcacagcatgcagcttcacagcctcatttcacaactactacaaatcaatcacacggtagctagcgcggagcccttgagccggccggccccactcatttcacctctaagacctcgtccaaggcgtagttgttggtggacacgccggcgtagttcaccttgttgaaccgcacaaccaccgggtagcgggtgttgggatcctgatcgacggtgacgacgttgccgatcccgttgtaccagtaggactccctcctaaggatcttccccttggcgcccctcgtgggcccgatcggcggctacttctcagcctcgggcttcaagtacaaatcacacaggagcatggggtccttgagcagactggcctcactcatttcacctcgaggatctcgtccaaggcgtagttgttggtagacacgccggcgtagttcaccttgttgaaccgcaccaccaccgggtaacgggtgttaggatcctgatcgacggtgacgacgttgacgatcccgttgtaccagtaggactcccgcctcaggatcttcaccttggcgcctctcttgggcccgatcggcggcggcttctcggccttgggcttggtgacaacagcgccctcattctaaggaaaacagtgtattgcctgcggaattataatatgaaacccgtttttttagtattttttcaaaaagacgacaaattaattccagttagcctctcgaaccctaaaaggaatacagtgggggtcatcacaccacaggatataagtatcatagtctacgagtttctttactagatgcacatatatatattcagaaaacttcaaaaatcaaataatgttctccaaaccttgatacttcctccttaaagctattatcaagcatccttgtcagccaagatactcttgctgtacaattgaagattatcaatctcgaagaccaagctcaacctcaatgtcgtcatcctcttcaaatagctttagcagacgtgcatgctgttcctgccttttcttcttctgccaatacttgaaaataacaaatgacaacagaatgacagcccccactcctaggaggacgaacaaaactgttttgccggtatggccctttggctgagcttcagccttcttatcatcgttggatgtttggggatcaccagctagcactgcggtgaactgggcgcagatcccggacgcagcgaggagaaacaggacgaccggggccggtctggatccgcccctcatctccggccggaacgcgccgatccttcctctccctcggttcgcttttttcgtgggggtgatggtgggctggtggcctcgtggttggttgggtggtgcctccctgcttgagcgcgcggtggtggcgcttgtcggcctttttttttttttttttttttttttttttttttttgagagcgatttatgtgcatgtacaaaaccacatataacaatacaacaattagagagcaagagagattattgagtacacggtgaataaagcaagcaattacatgatatgattatgtggattatgctattacacataggatcgatgttgtgacgctagccagcacagcatgcagcttcacagcctcatttcacaactactacaaatcaatcacacggtagctagcgcggagcccttgagccggccggccccactcatttcacctctaagacctcgtccaaggcgtagttgttggtggacacgccggcgtagttcaccttgttgaaccgcacaaccaccgggtagcgggtgttgggatcctgatcgacggtgacgacgttgccgatcccgttgtaccagtaggactccctcctaaggatcttcaccttggcgcccctcttgggcccgatcggcggcggcttctcggccttgggcttggtggccacggcaccctccccttccgccgcctcagctgcggcggcctcgttgtcggcccgggccacgagcctcctgccaagccggttgggcgccgaggcgaagttgacgcggccgccgctgctgccggtgggcacgcccgcggccagcatgaaccgcgaggtggccgacgccatgttggtgctcgccatgggcgcgaactccnttcagc

SEQ ID NO: 148396 - DNA, 254 bp, Zea mays
  unsure (1)..(254): unsure at all n locations
  Clone ID: MRT4577_66865C.1
cgtcgtttacgcgtncgnccacgcgtnncgccacgcgtgcgtccaacgcgtgcgtccacgcgttctgccacgcgttcgtcacnnctaaacccagaacccagcccggcccaaccctagtcgtcgtcggcgcgcgcgcgcgggattacaccactggcggcngcacccccatggccgggccgtcagaggacgcgttggggcgcgcgctcgcgggtcgcaaggctgccgtggacccccaagcctaggccgtgcgcgcg

SEQ ID NO: 148397 - DNA, 214 bp, Zea mays
  Clone ID: MRT4577_66866C.1
actataattccatagaggatttttatttatcacttagttggggccaggaagggaaagggggaagcagtttaaaggaaaaataaaaagcctggggggggtacacacacgaggggcacaggtaggatcccatgcaaaaagaaaaactcatggggggggacatatttggaaaaaagggatttagcttttaaaaaaagcctaaaaatggccggtggcg

SEQ ID NO: 148398 - DNA, 371 bp, Zea mays
  Clone ID: MRT4577_66867C.1
ggtattaaatgattttatgggggacaaagtaaaaaatggtatcaggggggaccaaataatatatggcatccgtggacacactcggaccaaacaacaaggatggacacccaccatgctgagcaagaaggctgacccaaaacctggggggggaggtagccaaacgaacacctctgttttcctttgtatgccaaacccacgcagccattcttattgttggccaccccgcccgcccgccttattaggtgacaaccaccaccacgggcttcaagggaaatgatcagcagcagcgggggtcgcaggggtcagacgcagggggcggggcggtaattgccgaacgggtgggaccggccaagaatgccggcccacttcca

SEQ ID NO: 148399 - DNA, 316 bp, Zea mays
  Clone ID: MRT4577_66868C.1
gacaggcgaacgaacaggcgtttttattgaaagagaaaggagcagacaattcacagcatactagggactagggcagtgacaccaaaaaacgctcatacacggaaaaacaacgagagggacccaccggtcttgaaaacaaagtgcacataactccaatacagaactaacaccgccaattgctgagaaacaaatcgaaaggcaggcgaagggcatcagaacagggcttctgatgcgtctgcgttccccgtactaacaaggggacagggagacctgtctaggcaggctgctgaacttgacggcggagaacatctagatg

SEQ ID NO: 148400 - DNA, 298 bp, Zea mays
  Clone ID: MRT4577_66869C.1
cccacgcgttcgcccacgcattcgaaaactggtggtcaagcgctttgactttggttgggggggatctatttgggtggaaccggggatgtttggcctacctgaccaattggtgacagggatgcattgtttggtatttgggattaaaaaatggagaaccttggcctgaaaaaaaatggttaggcaatgatgtgatccctgtgaagtggtggctttttttgattggataacaatatctgctttcatgctaataatttgaatgctccgttggcgtggatccacaccacttacggcatgacag

SEQ ID NO: 148401 - DNA, 493 bp, Zea mays
  unsure (1)..(493): unsure at all n locations
  Clone ID: MRT4577_6686C.1
atatatataaaaaacaaataaaaaaaaaatggaaagttgaaactaattaaaaccaaacacccatccatgtacccatccggggggcccgcgtcgacgccacncatccaattaatatcaactcatgctggatcccttagtatcaaccttcatacttcggcgcccataggtattgggggtgggtcatntaatccaacacataatctccaaaccatttatctagtttggaggtattgccaaaccaaacctgtatatacctacctcctaattgcacatcaaacaatggaaaataaaatatataacctccatgttacaaaagaaggcctttcatcaagggtggtggatagacactaagtttcaagaaccatctccaaagaataaatcctgcatctttttcaattttgtgaaaatgaattaatggaacataactaaaattgttctactatcattgataaaccattcacttataacactattaaaaccttcttaccttttc

SEQ ID NO: 148402 - DNA, 443 bp, Zea mays
  Clone ID: MRT4577_66870C.1
gcggcgagcgatagcagcacacactgcacgcaggtagctaggagcagcagcagcggccgcgatggcggcctacatgatctcctcgtcagctctggcagtggcgcctcagggcctgtcgaccctcggacgacgcgcctccttctgtaacgtcgtatgctccaagaagaatatcaagaccgacaagccctacgggattgggggtggcctgaccgtcgacgtcgacgccaacgggagaaagggcaagggcaagggcgtgtaccagttcgtcgacagatacagcccaatctacaacgaggatgactggtctcccaccggagacgtctacgtcggtggaaccactgggcttctgatctgggccgtcaccctcggtgggatcctcggcggcggcgccctgctcgtctacaacaccagcgccctctgcggctaaagatatccaatgcatg

SEQ ID NO: 148403 - DNA, 383 bp, Zea mays
  Clone ID: MRT4577_66871C.1
aaaagaaaacccatcccataccctgggggaaaaacaacttgtccagggggggggaatttttttgcccggaaccggggggctaccttatacccccttaagacggggccagcaattggtaccaggggggtttaagggcctttaaagaaccccccccatgggtgtccccggcctgaaaatggcctccaacgggccggcccggggaatggacagcccccccttagcctttatggaaatcggggcttcataaaccgtgccccattaaaatcactggagtaacggggggagccccaaccccacggtttctaaggcggggggttcccggggtaaattgtggccccccaatccgagacggttttaggggggccccctgggtcttgccgggg

SEQ ID NO: 148404 - DNA, 634 bp, Zea mays
  Clone ID: MRT4577_66872C.1
gccggccgggttctcggaatgcaagcatctacccgcgactctgtgagagagagcaacacacacgcagctagctaccgagcagcagaagcggagggggcgatggcgtgctccatgatctcctcgacagctctggcggaggagcctcacggcctgccgcccctcgatcgccgagcctcctccttcgccgactgctgctgcaagaataatatcaagaccgacaagccctacaggattgagggtggtctgaccgtcgacgtctacgccaacggaagaaagggcaagggcaagggcgtgtaccagttcgtcgacaagtacggcgcgaacgtcgacggatacagaccaatctacaacgaggatgactggtctcccaccggagacgtctacttcggtggaaccactgcgcttctgatctgggccgtcaccctcgctgatatcctcggcgatgacgccctcctcgtgtacaacaccagagccctctccggctaaggatatccaatgcatgcgcttcttgcgattcgtcatgtaaaatcacggtgtctgtctataatctagactccatggatgctcaaccttcgtcatgtaacaataatcagtgctactcttcattacatgaatttgatgctatatatataaa

SEQ ID NO: 148405 - DNA, 660 bp, Zea mays
  Clone ID: MRT4577_66873C.1
ccgggatattggctaacttttaggtcggcagctaacgacctgcagccaaccatctaccagcgactcatcgagcgagagcagcacacacgcagctagctaggagcagaagcagcggcggaggcgatggtggcctccatgatctcctcgacagctctggcggtggagcctcaggccctgccgcccctcggccgtcgcgcctcctccttcgccgtcgtctgctccaagaagaagatcaagaccgacaagccctacgagattggggggggcctgaccgtcgacgtccacgccatacgggagaaaggacaagggcaagggcgcgtaccagttcgtcgacaagtacggcgcgaacgtcgacggatacagcccaatctacaacgaggatgactggtctcccaccgggcgacgctctacgtacgggtaaccactgggcttctgatctgggccgacaccctcgctgggatcctcggcggggacggcctcctcgtctacaatcaccagcgccctctccggctaacgatatccaatgcatgcgcttcttgcgattcgtcatgtaaaatcacgatgtctgtctataatctaggctctatgtatgctcaaccttcgtcatgaaacaataatcagagctactcatcatcacataatgttgctgctatatataag

SEQ ID NO: 148406 - DNA, 200 bp, Zea mays
  Clone ID: MRT4577_66874C.1
tcttcacacatcttatttaacgataccgacacactctctctgtggagactcccatacccaattcttacctatatcagagtctatattagcaacgacctcactagaacgtcgccttatacgactgacatgacctgccgaaaagcctagtcgtcctccgagttaatccgcttgcaccacatccgcctttcaaacgctgatgt

SEQ ID NO: 148407 - DNA, 1907 bp, Zea mays
  unsure (1)..(1907): unsure at all n locations
  Clone ID: MRT4577_66875C.1
gcggctgtttacaaactacaaagggaatctttggaccccttgagtattttagtttacttctatgtactgggagaacaccatgtactattctctgtttagtgccaacaatgaaaacttggaatccattgctgatagatgaaccataataaatactagatcctaaaattatattatttattaccaatccctggggcttttatatggaactgcctagttccaggtgacaacccacctcaataaatagtaatgagcaccacactgcatcaaaagttttgtaaactttaactgtgataaatttagttagaaatctgtgttgtgcctaacatcaacctccttttaacccctgagaaaatgggcctctataatattgttgaaatgttatggtgtgcttgattttcgggagtgcaggtcatgtccgttttgtacatgcggaacaatatgtccaatagggccacccattggtgttatgcctgtcggcgcccaattcgtcttcgtgggcaggatatcatatgtcccaactgcaatgatggttttatccaagaaatcagtgagatgggtggcgtactgaacacttatgggctaattgaaccggactttgaagagcgccaggccagaagatttggaatgatggatgccatatcttccctcatgcggcaacggctgtcagaaataggaagggatagtttgtttgatattcatggtagacaagggacaggtactgaatatggaaggaggtcaactgctattcctacgctggtatttggtggcatcccttctcctgcagttggtagcagtgatatcaatgttgtcatcagggaaggccgcagagctggcgctgcccgtccgaatttcagtagcttagttgttggtcccagtctggaagctctatttgagcagctactactccagaacaaccgtcaaggcccaccacctgctccacagtcagctattgactccatgcctgtggtaaagataaatcgcaggcatcttgacgaagatccacagtgtgcagtttgcaaagacaaattcgaggttggagcagaggcgcgggagatgccgtgcaagcacttgtaccatactgactgcatcatcccctggctggttcagcacaattcctgccctgtttgccgtcatccgctgccatcacagcgatcaggcagtagtaccagcagcgcccgtgtgccttcagcatactacaacgaaacagcttgccctcctgcggtcgccagggcagatttcgatcctgtgccttcagcatactacaacgaaacagcaactgatcctcctgcggtcaccagagcagatttcgatcctgctccaggaaactacggcagcgaaagccaggaaagtcacgaccccttctcctttctctggccatttggcccgtcgagttcttaccaatatgaagaaaatgttgatgaacctgcagtatacgatccaaaccagatagcatattctgcgtggcactatgaccactgactgaaaccctgagttaaaatcaagatatctgcaattcgtgccttgagctctcagctttggtgaggcaaagggctgcttgccgtataaaaaatggatggttattgtgttcagtgcatacccttgctacgcatgtccgttgtggagatatcagctgtgtatagaactgggcgcaacaaactctgctgtaatgcccgtatatattccttttcggtatatcaagtctaaagctatagtacataatcctgtatgtgctgtaatcggtgaactgagtgcatccagaatatcatgtcatgataaacatgattataattacatggttgtctttttagactgaaaaaaaaaaaaaaaaaagcggccaaagcactctgcgttgtccttctgttccggctatactgaaactgaaaganacaccaggatgtgtttggttg

SEQ ID NO: 148408 - DNA, 636 bp, Zea mays
  Clone ID: MRT4577_66876C.1
ctcgaggccggccgggacctgctcccaaccatctacctgtgactcagggagcgagagcagcacacacgcaggtagctaggagcagcagcatgcggcggcggcgatggcggcctccatgatctcctcgtcagctctggcggtggcgcctcaggttctgccgcccctcggccgccgcgcctcctccttcgccgtcggctgctcgaagaagaagatcaagaccgactagccctacgggattgggggaggcctgaccgtcgacgtcgacggcaacgggagaaaggtcaagggcaaggacgtgtaccagttcgtcgacaagtacggggcgaacggcgacggatactgcccgatctacaacgaggatgactggacgcccaccggagacgtctacgtctgaggaaccactgtgattctgatctagtgccgacaccctcgctgggatcctcagtggaggcgcccgcctctgctacgacaaccgagccctctccggctaaggatgatctgtgcatgcgtcttcttgagattccccatgcaagatcaagagagcctgtttagattctagactccatggacgctcaaccctccgcatgatgcaataaactatgctacatcctcatgacatacatgttgacggtatac

SEQ ID NO: 148409 - DNA, 131 bp, Zea mays
  Clone ID: MRT4577_66877C.1
acgacgcctcctccttcttcgacctggagttcgcggtgcccggcgacgagagcgccgcgtccgacgccgaggaggagcgggtcgagctcagcttcgctgcggaggacgaaggcgtcgtggcgcccgtggcc

SEQ ID NO: 148410 - DNA, 629 bp, Zea mays
  Clone ID: MRT4577_66878C.1
ctttccgcagccaaccctctaccggcgactcattgagcgagagcagcacacacgcagttagctaggatgagcagcagcggcggcggagatggcggcctccatgatctcctcgtcagctctggcggtggcgtctcaggttctgccgcccctcgttcgccgcgcctgctccttcgtcgtcggctgctccaagaagaagatcgagaccgacaagccctacgggattgggggtggcctgaccgtcgacgtcgacgccaacgggagaaagggcaagggcaagggcgtgtaccagttcgtctacaagtacggcgcgtacgtcaacagatacagccccatctacaacgaggatgactggtctcccaccggagacgtctacctcggtggaaccactgggcttctgatctgggccgtcaccctcgctgggatcctcggcggtggcgccctcctcttctacaacaccagtgcgcctctccgggtaaggatatccaatgtatgcgcttcttgcgattcctcatgtaacatcagggtgtctgtctataatctacgctccatggatgctcaaccttcgtcgtgtaacaataatgagggctgctcttcgttacagaaatttgatggtatatatatatacccca

SEQ ID NO: 148411 - DNA, 330 bp, Zea mays
  Clone ID: MRT4577_66879C.1
tccagaatgtgcgttctacgcacaaaccttctacatgcgccgacggacgacggcgcggcggtaccctctcggatctcttcccttcttcgcctcattccctctgcctcttgttctgaggtcagcagacgtggggaagaatggggcgcctactcacccggaagcagcaggcgcagatgtgcatgtgtggaacgaatggagctccacctggtataccggcctcaccgaagaccatttcgacgggtcctcgacctccgtcggacgttctgttccttacgagtcagcgcccgtgtctcgtgagcggtcatacattcacgctatggatgagtggga

SEQ ID NO: 148412 - DNA, 2117 bp, Zea mays
  unsure (1)..(2117): unsure at all n locations
  Clone ID: MRT4577_6687C.1
cagcgctggagccgaacagggtgccgcagccaccacctcagccagagccgcagccaccagacttggcgtggttggccttgaagccttcgatagccatgccgctaccacagccgccgccgccgccacaaaaaccaggtcgccgatgccgcctaccgtctgacatcgatcacccaggcagatcgcgcgcaagccacccaaacaaatccaaaaccgaatcctgatccgatcccgtctatcggcggcggcggcgatggaggcccggcccggcgcgtggcgcctgcagcagcggggccccggcgcgcccgtcgcgggcctgcccatcggcttccgcttccgccccaccgacgaggagctgntgctgtactacctccgccgcaaggcgcatggccaagtcattcatcatcgccctcgaaggcccggccctcacctggtacactaggttgcccccgctgtccatcgactcctggagaagtctccgggacaaattcctgctcaacttccaagggtaccgcccagacaccgacgccttggctgaactttcactctgcaagcagctggaaagggaaactctgtgggagtactaccgcaagtttctgactctcaagtcacaactgccttcggtcgatgaccaaatcgctattcactacgccatcagtggccttcgggctggcgtcctttacagccactgtatcagagatccgcctaggaacctccaggagctgtatcagctattcgaaaaatacgccagatccgaagagctccaccaacgcaaagtcgagtctcagaggaaacccaaagaccctctgcagtccagccgaggtacaaatcgtacctcccccacccccacctcctcatccgcaacaacaaatcatccaccaccccaccacccccaagccccaaagcaagaagactttgtcgatcagccgtatcgcggagtcattcacatgatcactggggggtccagcgtcgacttcgacatgaagcgacagaagagagaccactaccacaacatcaaccacgtcgccgtcactggtccagtcgtgcagacaaagtggtcccatgtgccattgaccttcgacgcccgagacgtcgacctgcgcagcgcaccccacatcgacgccatggttaccaactgcagcgtggcaggctgggacctgcacaaagtcttagtcaacaatggcagccaggcggatatcattttcctccatgccttcgaccgcatgggcatcagtcacagcttgcttaagccttcagacaacccatatggcttcggcggcaagggcacctttcctgtcggcaaaatagagttacccctctccttcggtgtagcgcccaatgcacgaagcgagcaagtcacgttcaacattgtcgacatggtgtacccatacaatgccataatgggtcggggctccatcaacaagtttgaggcagccattcacggactttacctgtgcatgaagatcccaggtccgcaaggcacgatcatagtctacggcaaccagcaggccgcgcgcaacatagaaagagacttcgttcctgggcaaaggaatgtacactgcctcatggcccagtgcgaggtccccgagtctgccagcccaaccgccaaagaacatgacaaggcacagttgcagagcaacgacgggaccaagactgttcccctcgaccaggcaacgcccaaacaaacagtcaccatcagcgaagacctcacttcacatgacgaggagagactcctctgctgtctgtcaaaaaataaaggcgtcttcgcctggtccaccctcgacctggtcggagttagtcgctccatcatcgagcacagcttgggaatcgacccttcggtgaggccgaagaaacagcggttgcgcaagatgtctgatgagaagacagaagccgccaaggccgaggtacatcgcctgcttgaggctaaatttatcgagccagtcgccaatcctacatggctcgccaatgtagtgatggtgcaaaagaagagcgacaaatggcggatgtgcattgacttcaccagtctcaacaaggcctgccccaaggacaacttcccgctgcctcggatcgacaaaatcgtcgatagtgcgggccgggtgcgaagccatgtctctccttga

SEQ ID NO: 148413 - DNA, 1172 bp, Zea mays
  Clone ID: MRT4577_66880C.1
actcagcgagcgagtgcccacacacgcagctagctaggagcagcagcagcggcggcggcgatggcggtctccatgatctcctcgtcagctctggcggtggcgcctcagggcctgccgcccctcggccgccgcgcctcctccttcgccgtcgtctgctccaagaagaagatcaagaccgacaagccctacgggattgggggtgggctgaacgccaacggcgacggcgaggtgacaaaggccaaggtccagggcgtggctcgagtccttccacctcaccgacggagacggcttcggtaccgcccagtcgacgccgatcctgcgtgaggtcgccgcggctctgcgatgccgtcttcgagcagtgcgacgccgaccacagcggcgccgtcgaccgcgccgagttccacgacgagatgcgccgcatcatgctcgccgtcgccgacgggctcggctcccagccgctccaggtcgccgtggacgaggagggcgggagcttcctgctcgaggcagccgagcacgaggccgctgggatcgccgccaagatcgaagccaaccgcaaggcggaggcgaaggcggaggcggccaagtgacgacgtgtccctcgtgcgggccctgcgcttgattttctgggtgtttgctactacgtactagtactacttacctggcggccgatgtgccgccgcacgtgtacggtatactacgtaactagaagcggccagcaccagctactcaaatcactgctgatgctacttgtgaaaagaataaaacctgtcaatcattttagtggtcttgcttgcataaaacacttctttgtcgtcaattcggcacgaggctttcttgtagccctaacagcacttgttagtgaggagatttttgtcattgtgaaagacgacacgctgccgagggcttgtttggatagttctagctcaagcaaattattttctttttaattttttccgattctatctaatctatatataataaaaataatcaaacaaggtctttttttcaatcctatttaatatgtataatggaaataatgaaaaacctttccaaataaaaaaaaaaaaaaaaaaaaaaaaaaaaaaaaaaaaaaaaaaaaaaaaaaaaaaaaaaaaaaaaaaaaaaaaaaaaaaaaaaaaaaaaaaaaaaaaaaaaaaaaaaaaaactccggg

SEQ ID NO: 148414 - DNA, 215 bp, Zea mays
  Clone ID: MRT4577_66881C.1
gttaaacataatttgccatcacgtaggagtttcagattatcatgcaccgaaatataagcacggacaggtcaaaaacataagacgagggcagtatatacactacggaggagacataataccagctaccacctctaactgtggctgccctgtttaagattcccaattcctcagtccctacattgcaagttttttatctttttctggggtcggaaaat

SEQ ID NO: 148415 - DNA, 459 bp, Zea mays
  Clone ID: MRT4577_66882C.1
tttcgaaagaaagcgagggcctgcgcagaacgtaacatacgtacctgacgcgctgcagagaagcaaggcgagggagaagaagatgcatcccttccgtcgtttctgcgacgacatcatccaaagatggtgcgatccaaggcactcctccggcaactgaaaaaaattttgtcagcccgacggtttcagagtttgatgcagagataacgatacgtaagaatatttatatacactcgtcctcggttgaagaacacacggtatcttaactttgtctgaagatttaacggccaaggaggggaaaaaacaagaatacatatactgcagcactcataatactccctctgtcccatattagatgaattcgttttggggttatactacagtatttgattgtatgtattttatacatatatatgtgtctaagattcattatcatgcaattgaatgtaaaaactagctagt

SEQ ID NO: 148416 - DNA, 584 bp, Zea mays
  Clone ID: MRT4577_66883C.1
gccggccgggccggggcagccaaccatctaccagcgactcatccacgcgagagcagcacacacgcagctagctaggagcagcagcagcggcggcggcgatggcggcctccatgatctcctcgtcagctctggcggtggcgcctcagggcctgccgcccctcgggcgccgcgcctcctccttcgccgatcgtctgctccaagatagaagatcaagaccgacaagccctacgggattgcgggagtgctgaccgacgaacccgaccgcaatcggataaaggctcatgggatggatggggacgtcctgcgccccgagccatcaacggaaacagcctcacgacggtcttctctctccagcatcaggactggagctggcccacttccccacgaccccgcccgtcacctcccagttctggctgtggctagtgacgtggcacctgggcctgttcatcgtgctcaccttcggccagatcggattcaagggtaggactgaggactacttcgagaagtgaagcgtgtaagatcctatccatcattcctggagccgcactgcgtcgcgttgggagcgtgctcgccgtctatcgaac

SEQ ID NO: 148417 - DNA, 328 bp, Zea mays
  Clone ID: MRT4577_66884C.1
gtttttagcgcactcacctgcctaaggtgtagggggcatatgaaccagcgagcacgtagagcccggcccgctaacagcagtcaaacatggacgccgagaagtctcttcgatgagccgcaccaaggcaaagcaagaagcaccacaggtacaaggagcactgcagaggagaacagccagtagtaaaggtccaagcgcagacagaggcggagacgcatacgcagacagttgcggcggggatagaactgaacgagtctgacaagcgccgggactggaagaagctctgtgagaacctgaggaaccacaagcacgcgatgacgctggcacgcgt

SEQ ID NO: 148418 - DNA, 358 bp, Zea mays
  unsure (1)..(358): unsure at all n locations
  Clone ID: MRT4577_66885C.1
tcnncgaccgttgactattctctacaaaccacaaagacattggaacactatacctattattcggcgcatgagctggagtcctaggcacagctctaagcctccttattcgagccgagctgggccagccaggcaaccttctaggtaacgaccacatctacaacgttatcgtcacagcccatgcatttgtaataatcttcttcatagtaatacccaccataatcggaggctttggcaactgactagttcccctaataatcggtgcgccccgatatggcgtttcccccggctcaacatcgttcgctttctnacttcnnttctatctgtcganntgnnntnttgaggcggncaggacagtgaa

SEQ ID NO: 148419 - DNA, 442 bp, Zea mays
  unsure (1)..(442): unsure at all n locations
  Clone ID: MRT4577_66886C.1
aaagccccccccataaacccggggggggcccaaggccaaaaaagcaggggcggggggaaggggccccaacatcccaagggcagccccaacaaccccaaacaggggagcaggggggaacccagggaaaaacccaaccccaaaagcaaaaaaggggaaaagggcgggttggaaccccaaagcaagcccaaaaaggacattggggggggccccagttctggaggaatcaacaacattttaaacaggggtggaggcattgctgggggngcccccagaaaaaaaaccaaggactaaccccccccaaaaaccaacccccacacacaaaaacaatggccagctttgccctggctttggggccccaaaaaaaaaagggggaagggggtgggaaaaccaaccccacaggggcccaaggccaaggggcaacacaaccgggggaattaaaagg

SEQ ID NO: 148420 - DNA, 557 bp, Zea mays
  Clone ID: MRT4577_66887C.1
cctcgaggccggccgggacctgcagccaaccatctaccagcgactcagcgagcgagagcagcacacacgcagctagctaggagcagcagcagcggcggcggcgatggcggcctccatgatctcctcgtcagctctggcggtggcgcctcagggcctgccgcccctcggccgccgcgcctcctccttcgccgtcgtctgctccaagaagaagatcaagaccgacaagccctacgggattgggggtggcctgaccgtcgacgtcgacgccaacgggagaaagggcaagggcaagggcgtgtaccagttcgtcgacaagtacggcgcgaacgtcgacggatacagcccaatctacaacgaggatgactggactcccaccggtgacgtctacgtcggcggaaccactgggcttctgatctgggacgtcaccctcgctgcgatcctcggcgttgtcgccctcctcatctccaccccaacgacctctccggctaacgatatccaccgcatgcgctttttgcgattcgccatgtaaaattattttgtttgtctatcatctaccc

SEQ ID NO: 148421 - DNA, 136 bp, Zea mays
  Clone ID: MRT4577_66888C.1
ttcattctaacgcgcaaacgagctgaattggggggggttttttgttatccccacccatagttgtccgtcctgtgatcaagaaagcgtccactcgattgtgaatcaatattagctgcaatgagagctagtgtgagga

SEQ ID NO: 148422 - DNA, 322 bp, Zea mays
  Clone ID: MRT4577_66889C.1
aaaaaaattcccccccccataaaataaaataaaataaaaatcaaacagaattttgaatccatatgccgcctacagagagggggggccgccttaaactaatttcggccccacatggttggttaaactactaaacagcctcaggattccaacctgctttcatgttttgggggggacaggttttgccaaagtgagcgccgttacctaccggggggtttatttcaaaaaaaaaccaggctcccagaaatacctaccggttaatttttgcgcccttgggttaatgcaaagggggtcgctttaccggggcttggggtttaggaaggaa

SEQ ID NO: 148423 - DNA, 357 bp, Zea mays
  unsure (1)..(357): unsure at all n locations
  Clone ID: MRT4577_6688C.1
agacaggtctgctgggggcgctggggaacgtgagggtcgcgatcaaggagaagctgacgctgggccagggacagcacgtggacgtccggctgggcggcgaggacgagcgcgcggcgaaggaacgcgcggcggagaatgcggcggcggtgtacttgtaggagaaggaccggttgatgcatcagggggcggcggagcgtggggtccnttgcatccagaagtgcgcggagggctgcgccgagtgggcctgcgtgcactcgccacccgaagatgtgatcatgtgatgccgcggcgcgcgcccgcccctacggggacgacccaactgtggcgggcgtgcatggacgatgagcgatagtaaat

SEQ ID NO: 148424 - DNA, 894 bp, Zea mays
  Clone ID: MRT4577_66890C.1
ccggccgggaacgacctgcagccaaccatctaccagcgactcagcgagcgagagcagcacacactgcacgcagctagctaggagcagcagcagcggcggcggtgatggcggcctccatgatctcctcgtcagctctggcggtggcgcctcagggcctgccgcccctcggccgccgcgcctcctccttcgccgtcgtctgctccaagaagaagatcaagaccgacaagccctacgggatatgggggtggtcctgcaccggtcgacgtctcacgccaactggaagaaagggcaagggcaaggtcgtgtaccagctcgccgagaaggacggcgcgaacgtcgacggatacagcccaatctacaacgaggatgactggactcccaccggggacgtctacgtcgacggaaccactgggcttctgagctgtcccgtcaccctcgactgagatcctcggaagagcgcgtgctcctcgtctacaacaccaaccgcgtctcctgctaaggagatccaatgcatgagcttcttgcgattcgtcatgcaaaagcaggctgtctgtctataatctagcctccatggatgctcaaccttcgtgatgtaacaataatcagcgctactcttcattacataattttgatgctatatatatataccccatccctccctaataattcgttctatctgcgtagcgaagttaattcaaaaaaaattcgtaaaagatggtgaagctaattaagtgaaatataaaatatgtgacatacatacatacgtacgcacgtgcatacatactcctccggttataaattcaaccaaatgatgatcagctcctccttaggtcttgtttaggagcaaatgtaacgaagggaatttaaatagtaaaataatattctagcctgctc

SEQ ID NO: 148425 - DNA, 1889 bp, Zea mays
  unsure (1)..(1889): unsure at all n locations
  Clone ID: MRT4577_66891C.1
cattggtaccctcgaggccggccggggcggtggagggatcgggcgtaccccggtgcccgttcaccgccgttcacgccgcgtgtgcgctctgggtctgccgctctctctctctcctgcgcgtggcgcagctgccgtcctataccaggcgcccaggtctagcctcgtcggtgccttcgccaggtctttctcgggcccttcgccaacgacgagcgcccgctagaaggtatgcattcgtgttcataatattgtatttgactaaaaagactgggcctacgcatgggggctccaaaacagaggtggacttctgaggaagaggctgctcttagagctggagtagccagacatggagttggaaattggcgcatgatattgaatgatccagaacttagctccacattgcgctaccgctcgaatgttgacctaaaggttaaatctattcactcgtttttacgtaagattgatttagtgaagggactgccatatttgggtattccttgaaatcatgtgtcttttggttttcaaatttctagattcatcttcaatcttaatgctcatatgttccttttttatttatcactacttaggacaatggcgcaacatgaatgtaattgtcacttcatcgagtactcgtgacagggggagaacttccgaagagctgctcctaatgagcacaccatggcaattaccagagttacttctgatattgatgatgagattgttgacgaaaagcctatagtatcattgcctagtgaagcaaagaacacatcaagttcgaagaaatctcacaggctagataatattataatggaggctataaagaacttaaatgagcctacgggatcacacagaactactattgctaattacatagaggagcaatattggccacctagtgattttgatcacttactatctgcaaaactgaaggacttgtccaccagtggcaaattgataaagatggcctaaggttgatcctacttggactctcggcctcgcggctgttctgaaacggcttttctgtgccatgtagatttgtacaacagtacgtgtttactacacttcggtttaaagcagctgccccggtgagtgtatcaccttatgttagtgggagccatgtgaaaactccagcctccagcgcactagtagcaacaatagcagcttgccacaacgccattcagaaaactgggtggcataaactcttccagtgtcaaatgtttcgctaaaaaaaaaaaaaaannnnnnnnnnnnnnnggacctgcagccaaccatctaccagcgactcagcgagcgagagcagcacacacgcagctagctaggagcagcagcagcggcggcggcgatggcggcctccatgatctcctcgtcagctctggcggtggcgcctcagggcctgccgcccctcggccgccgcgcctcctccttcgccgtcgtctgctccaagaagaagatcaagaccgacaagccctacgggattgggggtggcctgaccgtcgacgtcgacgccaacgggagaaagggcaagggcaagggcgtgtaccagttcgtcgacaagtacggcgcgaacgtcgacggatacagcccaatctacaacgaggatgactggtctcccaccggcgacgtctacgtcggtggaaccactgggcttctgatctgggccggcaccctcgctgggatcctcggcggcggcggcctcctcgtctacaacaacaacggcctcttcgggtaaagatattcaatggatgggcttcctgggaatccgcatggaaaatccaggtggctggctattatccaagcttcatggatggtccaccctccgcatggaaccataatccagggtactcctcattacataaatttgatggtatatatatataccccatccctccccg

SEQ ID NO: 148426 - DNA, 181 bp, Zea mays
  Clone ID: MRT4577_66892C.1
gcggacgaatagtatacgacacttcgcttactcactagattcccacatacatagctcggtgtacctttccttatcgtggggtctctatcccgaatctgctgggctttatttctatacatatatactatccctcgctattcgcatctctatactgtccgagtactctacggagttccgtaca

SEQ ID NO: 148427 - DNA, 236 bp, Zea mays
  Clone ID: MRT4577_66893C.1
ggcggagaacagcggtcgcgccggcaagagcagcgggagggcgcggggaagggggcggtgtccgcagagcaggtgattgctggcttcaaccgccttcggcaggaacagcgaggcctggcatccaaagcagctgagttggagatggagttgcatgagcacagcctagtgatcgatacactgaaggaggtagatgaaactcgtaagtgctaccgcatggttggaggagtgctggtgga

SEQ ID NO: 148428 - DNA, 442 bp, Zea mays
  Clone ID: MRT4577_66894C.1
aattcacgggccgaggcacgcgtccggttgtatcgtgtgggttgagttgtgtgttgtgttgtgctgtaccttcttctatctattaatggaaagatacgcagatctcctaaaaaaaaaaaaaaaaaaaaaaaaaagaaaaaaacaaaaaaaagataaaaaaaaaaaaaaaaaaaaaaaaaaaaaaaaaagacaaacgaaaaaataaaaaaaaagacaaaaaaaaaaaggggggctgcccaaaaggatcaaagctaaatacccggtcaattcaaattaaaaccgcttcaaaagagaccccaaagtcgaaataaggggccgccctttaaaaaacacttgacaggaaaaaccctgagatatcccaactaaaccgcgttgaaaaaaatcccccttttaaaagctgaggaaacacaaaaaaggcccgaaccaatcgccattccaaaaa

SEQ ID NO: 148429 - DNA, 266 bp, Zea mays
  unsure (1)..(266): unsure at all n locations
  Clone ID: MRT4577_66895C.1
gaagctagctaatattatangctaataantatagcggcgtcgctgtgtgtgtttcgagtcagtcagtcagttagttgcgtgccacggcatgctctgagtccgagatgatgatgatgcctgatggcggcgtcgtgtcctgtagtcctcccctgccccctcgggcgcttctggcggcgagcagtgtgttgtgttgtgttgtgtggctgcttctctctattctgctgttcgtgtgccctgctgggttgtttcagcatccgtccctcgtg

SEQ ID NO: 148430 - DNA, 486 bp, Zea mays
  Clone ID: MRT4577_66896C.1
aatgcaagaaaaccaggcgatggaaaaaaaagggggagattttagaaaaggccagaccgggccgccggggcccgccgggggggcccgcccaaggggcgaaggggccaacactggcggccccggccccgggacccgggggggccacccaacgggccgaaccggggggaaaaggggatcccggggcgaacccgggaaccccccacaccgccacccaaaaaacaaaccccagggccgcgggggaaaaccgggggcccccaaggagggaaataacccaactgacccgggtcgagcccaaagcccggaaccccccggggaaaccgggaaaccccccccccccaaagaaagggacaacccgccgggggaggggggacgcgtactgggccacttaccccctccccccgcactgacccgttgggctggggggatcgggttccgcaaacgggaaaagcccactaaaggggcggaaagggggtaaccccaaaaaca

SEQ ID NO: 148431 - DNA, 509 bp, Zea mays
  unsure (1)..(509): unsure at all n locations
  Clone ID: MRT4577_66897C.1
tggcttggacctttgggctgatttatgtgcttgtttatgtgcttgaagctagtcctagtccgtcaaatagccctacggtgagatccggagtacgaacatcctaggcatccactacgctacactagatctaccccccggtctacccaccatcgaaccaaaccgggacgaaagctgaaacgtaaaatccccagacggaacgtagactcctcgactcctacccggccgtcttcctagcgaagttactatactagataaacggtaactacggtacctaaatccaatccgccagtctcttcgcgagtagtacgaagttggcctcttcccgaccactaatcggtcctcgcctgcaatagacccggtacgtagcggtaatccggctaggtacagacctctccgagcttaattttagcaggaactaaactaagacgtcctatanaacacgaaaaatcggcgatatacgtatgccgacggaagcattacgtcggtttacgaggagaaaacctagaaca

SEQ ID NO: 148432 - DNA, 330 bp, Zea mays
  Clone ID: MRT4577_66898C.1
cttcaacctcatacacagtgctttcagctgggatgcagttccacatcggcaaccttggccaccaccacatttgcacgagaatcaaatgatgcagtacaaatgggagcaggaactcatcaacgaagtactggcagtagagagtcgtcgacctgtgtttggtgtggctgtggattttgcagactctgatgggtgcacagaggcgaatgcttgctcgtcgccaccttgcggttgctgctatgatgaggaattggtgagagattctcgctccgctgtttatgggaggtatcaaatcacggaggaccgcacggaggggcttgatgagtgtgatac

SEQ ID NO: 148433 - DNA, 316 bp, Zea mays
  Clone ID: MRT4577_66899C.1
accaaccctaactatatcaccttcctccatccggaatgcgtgacatactacatctgggacatcttctacccttaaaaaatcatacaacataatactctgacatcagaaaaccatactattgataaaatcatactcccatcctacaaccagctgcagtacatgcgctttctaaactctcaatatacaactttagatccatataaatacctcaagatctacacccttctaccatcaactcaacacaacattcatttggaacttttacgccttattcataaccttcacccatccgatcagccttcttatcatcacaact

SEQ ID NO: 148434 - DNA, 1818 bp, Zea mays
  Clone ID: MRT4577_6689C.1
cattgggtacctcgaggccggccggggaagaggattcttttatcttttgccaacgggcagaagggagaagaccaggaataaaaaagaggcgtggtagtggacagtgtgagctgacagggacagtgcccaccaatggtccccttctcacggtcacgctagcagcagcagccctcccccatcaccgaggagagagaagcctgtcgccgcgcgaccgccccacatggctaccgcgctcggtggggagcccaaccccaccgccgacgccatggaggtcgaccctccgcgcgcctccgccgacgagaagcatgtcgccactattattgcggggggtagtgatgcagtgacaggccacataatatcgactacgattgggggaaagaatggtgaaccaaagaggaccatcagctatatggctgagcgagttgttggaactggatcgtttggggttgtcttccaggcaaaatgcattgagactggtgaaactgttgcaattaagaaggttctacaggacaaaagatacaagaatagggagttacaaataatgcgatcaattgaccattgcaatgtcatttccctgaagcattgtttcttctctaccacaagtagggatgaacttttccttaacttagtcatggagtttgttccagagtcactttatcgcgttctgaaacactacaaagacatgaagcagaggatgccccttatatatgttaaattgtatatgtaccagatattccggggactagcttatattcatactgtaccaggaatttgtcaccgagatattaagcctcagaatatcttggtggatcctctttcccaccaagtcaaggtttgtgacttcgggagtgctaaaatcttgattaaaggtgaagctaatatatcatatatatgctcacgctattatcgtgctcctgagctcatatttggtgcaactgaatacacaacatctattgatatatggtcagctggatgtgttcttgctgagcttcttcttagtcaaccattatttcctggggaaagtgctgtggaccagctggttgagattatcaaggttttgggcaccccaacacgagaggaaattcgttgtatgaatcccaactatacagaattcaagtttcctcagataaaagcatgtccatggcacaagatcttccacaagagaatgcctccagaagcaatagatcttgtttcccgtcttcttcagtattcgccgaatctgcgatgtagcgcacttgaggcgtgtgctcattcattctttgacgaattacgagaatcacatgcaagactccctaacggacgcccatttcctccactattcaactttaagcaggaactagcaaacgcaccaccggagcttgtcagcaggctattaccagagcatgctcgacggcattcaggattcggttccttatttgggagtggaccgtagcccgtaggaaaatctcgttttaatgttgggctgctgtacgccgtcagagggcaatctgcatatcccaaatctaagttttagaacctgaccatcttgtcgaaaagttaccagccttagaaaaacccgaggtggcctcttgtgtccatgttctgccagtagcggcacataatgctggggggatggttaggtgtaattgttaagcacagagggtaactgactgagctaatgtattttcacgtttcagtctgtatcgaacttgtacctgtgtaccctgtaccaatcgcagctgatgtaatcatgtaaatgcttctaaactacttcaagttatcatgatggccaattcgcaattttacagtacaaaaaaaaaaaaaaaaaaaaaagcggcc

SEQ ID NO: 148435 - DNA, 808 bp, Zea mays
  unsure (1)..(808): unsure at all n locations
  Clone ID: MRT4577_668C.1
gggtacctcgaggccggccgggccggtacccaagcaaataagacgacttgtttcattgattcttcaagagatcgagcttcttttgcaccacaaggtcgaggatgtcttgcagctgcggatcaagctgcggctgcggctcaagctgcaagtgcgggtaatatataataatatataagtgcaccgtgcatgattaatttctccagccttcttcttgtcttgtctagttaatttcccttctttatttattttttccattgcaaaacaaacaaacaaaaaacaaagttaatctggatcgagtagttcaatccatttgcgcgctgtccttttcagcaagaagtaccctgacctggaggagacgagcaccgtcgcgcagccaccgtcgtcctcggggtggccccgngagaagaaggccgcgcccgagttcgtcgaggccgcggcggagtccggcgaggccgcccacggctgcagctgcggtagcggctgcaagtgcgacccctgcaactgctgatcacatcgatcgacgaccatggatatgattattatctatctagctntgtggtggtggttgaacaataataagcgaggccgagctggctgccatacataggtattgtgtgngtgtgtgtgtgaaagagagagaaacagagttcttcagtttgctatctctctctgcatgnnttggcgtcagtctttgtggctcatgtacgtgtgtctacatggcattgggtgggtgatcccgattgcgtctgctgtaccnatatattaattggtccacgatgaaaaaaaaaaaaaaaaaggcccctagggc

SEQ ID NO: 148436 - DNA, 335 bp, Zea mays
  unsure (1)..(335): unsure at all n locations
  Clone ID: MRT4577_66900C.1
cccacgcgtccgcccacgcgtccgcggacgcgtgggcgcggtgtacctcgtcggctgggtcgccgcggagggcggcggcgtcggcgtggcggcctacagcctggttgccggcctggtgttcctcagcgtcttcggcaaggtctaccggttcttggcgtgggtggaggcgaggcaatcgcagtggaaatccagcctctgccatagcgccggttgattcatgaaagctaattctctcagaaaatctgtataaagaaagaaaggaatcngtgctttagttcatctccttcttggggtacaatctacacggtgggtaaagaaaaggtgcggattttttt

SEQ ID NO: 148437 - DNA, 240 bp, Zea mays
  Clone ID: MRT4577_66901C.1
acgggaaacagcccattttaatttacaggcaagaaccctggtacatgggtttatattggcacagcatacaacagttaattttaattagggggggggtgggggggggggaaaaagctttttttttcccccacgcctattggcctaagttaaaaacccacttgctcttaatggcgactcaaagattctcagggggcttctttatgggaggggggggtgtttcacttggcaccggttttttgg

SEQ ID NO: 148438 - DNA, 198 bp, Zea mays
  Clone ID: MRT4577_66902C.1
aatattttcccccaaaccccaaaacccaaaaaaaatgaggcccttgtctaggatatatcgatagtatcaaatcaaactcatcctggaccaattaatatatggttatcagccaacccaatttgatcaaccaacatgtatgtagacacacctccatgagcacaaagactgtcgccaaacaagcaaagagagatagtaaac

SEQ ID NO: 148439 - DNA, 544 bp, Zea mays
  Clone ID: MRT4577_66903C.1
aatatcccctttcgcagtggttggcctcccgacccctatcttctcccccactaatccccccattcccctcgccgccgccgccgccgccggcgtcgcctgcccaagatgaatgtcgacaagctgaagaagatggccggtgccgtgcgcaccgggggcaagggcagcgtgcgcaggaagaagaaggccgttcacaagaccacgaccaccgatgacaagaggctccaaagcaccttgaaaagagtaggagtcaacaccattcctggtattgaagaggtcaacattttcaaggttgatgtagtcatccaatttcagaacccgaaagtgcaagcatctattgctgcaaacacatgggttgtcagtggaacaccacagacgaaaaagctgcaagatttactgccgacaattatcaaccaactgggccctgataacttggacaacctgcggaggcttgccgagcagtttcagaagcagatgcctggcggtgaggctggcggcgccagcatcggtgctgcccaggacgacgacgacgacgttccagagctcg

SEQ ID NO: 148440 - DNA, 399 bp, Zea mays
  Clone ID: MRT4577_66904C.1
cggtaatgcaagtgagtgccaggaaaccatgtatcatgtgagatcatgtgagtttaacatgggcattttgtatacctttttattcagcctaggtataaatatttattcttttgggttttaattttttttcattagtgggtactgcatataaaggtccttgcgccaaactggtttaatgtcggataaaaaaaattatagattgtaaagtaatatgcactttgcacgaaagataaattttgttttgaatctatagaaaaattgtgatatcatggaccatggttagtttacatagatagtagacttatgtttgcgattggagaagtaagaattagttagacttatgtttgtgattggaggagaactaaaaatcagttcatattccttgctacttgaaacggt

SEQ ID NO: 148441 - DNA, 1084 bp, Zea mays
  unsure (1)..(1084): unsure at all n locations
  Clone ID: MRT4577_66905C.1
gaccttctcctcgccgataaggctgccgcgccctccctcactcccgcggtcctgctccctatggagtcggcggcgattgggtcacagtctccgctctccttcccctccagcctctgcaaaggaaaagtatcatctagtttatcaatatacaatgtgaagatcaagagcaactgtaggcttgaggtggtttgccatgggatgttagctacaagaaagtttatgcaaaggcagccaaccatctaccagcgactcagcgagcgagagcagcacacacgcagctagctaggagcagcagcagcggcggcggcgatggcggcctccatgatctcctcgtcagctctggcggtggcgcctcagggcctgccgcccctcggccgccgcgcctcctccttcgccgtcgtctgctccaagaagaagatcaagaccgacaagccctacgggattgggggtggcctgaccgtcgacgtcgacgccaacgggagaaagggcaagggcaagggcgtgtaccagttcgtcgacaagtacggcgcgaacgtcgacggatacagcccaatctacaacgaggatgactggtctcccaccggcgacgtctacgtcggtggaaccactgggcttctgatctgggccgtcaccctcgctgggatcctcggcggcggcgccctcctcgtctacaacaccagcgccctctccggctaaggatatccaatgcatgcgcttcttgcgattcgtcatgtaaaatcagggtgtctgtctataatctagcctccatggatgctcaaccttcgtcatgtaacaataatcagtgctactcttcattacataattttgatgctatatatatataccccatccctccctaataattcgttctatctgcgtagcgaggttaattcaaaaaaaattcgtaaaagatggtgaagctaattaagtgaaatataanatatgtgacatacatacatacgtacgcacgtgcatacatactcctccggttacaaattcaaccaaatgatgatcagctcctccttaggtcttggttaggagcaatggtacgaagggaaatttaatagtaaaatatattctagcc

SEQ ID NO: 148442 - DNA, 803 bp, Zea mays
  unsure (1)..(803): unsure at all n locations
  Clone ID: MRT4577_66906C.1
gcgacagtcttcctctatctcccgttcgtctctctccctgagttctctcacgtcgcgccgtgactccctgctcgctcgcgcacagctcggagcttcctcgccgcgctcgtctgccgcgcccgctgcttgctcctctgctgcgcgctccacctcgtctccatggccgagcgctccttcttctccacgcgttcagccagcgcctgatgcctctccctttctaacagcgcccacactcggagctcgtcggcatggtctgccgcggtgctcgccccagcctcgactcccgtccgggccttgctgtcgtgctgctatggtgcctaggtcctggcgcgctcgtcgtcggctcggcatctcctcgagctcgcccctgccttcctgctcggttacttgtgctcgcgtcgacctcagtcaccggggccgactgcccagcgcctgctccatccatggtcggctgcagctcgctagactgtctctgctcccttgccgcgacacccttgctcggtcgcgcctgaccggatcttcctgctgctcgccgagacccctcccatggatgctcccagccgaggcccttgtctcccatggccgccgtcgcccgtctgcagtactccccatgccgcgcccagctcgcgaagtccctgcgtgtcgccgttccgcctcccacgccggtgagaacctttgttcacgctacgtcgtctcatcatacagcgtcttttcctcatgctgatgtacgtttatgggtatgatacaagggtcgattaantatgcgaacaacaggtttcgggtctcgaaacgttagttgatag

SEQ ID NO: 148443 - DNA, 315 bp, Zea mays
  Clone ID: MRT4577_66907C.1
atgtaaacattgaaacggaaacaggcctgtttggattgacacaacatgtacgatatgatccatggtacaatacaattgtacagacgcgaccttatattcaaattatttgtatttacaagcaagtaggtagcgttgacgcaataaggaaaacccccattggatggggaggactgacgggtaaaatggagatgctggtggggatgcccctcactatgactccaggcttggaaaatggcttgtgcagataaaacggtacgatccctgcatcacacgcggttcctgagctacaggttgatgctgaacttacaaaggaat

SEQ ID NO: 148444 - DNA, 983 bp, Zea mays
  Clone ID: MRT4577_66908C.1
gacagagacagagagagaggggcaggaattgaattccaccgacccacgcacctctaggtcaccccgctcccacccctttcctctatttacctccacctatatagctccccataattccccgggcctcccctctcttgttaggagtacacacttctccttagaattggagctgtacgagccacccagcaactttcttcatcatcttcttcagctctctctctgtccgtcgacacaccaagctagccatgcgagagaagaagggtagagaagaaggagaaagaaggagaggaaggtagccccctttccatggaaggatccgccactgctgagggccgctcagggttacgacaaatggcgagtgtgagctctctcgtctctcctatataaagggaggacgcgccttggcgcaaaagcaagccccgcgcgccaatggccaaccgagcagaaggcgccgccgcgggtgaccgcgaggctctccagaacctcttccttgacgtcgcgcgcgtgctggtggtgttcggcgcgctcggcgccacctcggccggcgaacccgtgctggcgttcctcagcctcctgctctggctgctcggcgtgtggctcctcgcgctggtgctagtgctagcggcaggacgcttcccgcacttggcactggccgccaccgccatggccatcgccatcctgaagaacttgctcgccttgtggaactagcttcatcggtcgatcgatttgcagatggtgaggtatttactagagccttgagtatgatttaccaagtgaataaggagggattggactttcttgcttgctatatatcagagtatatatgatcatatatagctgtgactgagttgtgacctggctgttgtcgctcgcgtggttcgttcagtttgatgtatttatgatatatttaatctgctacgtaaacatggtttcatttgctacacgtgatttatattcataattcgtatgatatggttgcttta

SEQ ID NO: 148445 - DNA, 367 bp, Zea mays
  Clone ID: MRT4577_66909C.1
ggagggggggccctcttacccccaaaaaaaaccccctcaaaaaagggtcacaaaacccccgactgatttgtcttaacccaaaaccctggattttgcttgaaacccccatagatggcccaccgaaaggccgggttccaaaaccagcccttggccccctgggaaaccgggaccaccaaccaagatgggacatttttccatgaacccaccccttgaaaaaacctaacacaactatgccggcccccccatccacaatccccattaacccacttggatctctgccccaatttttggggcctccctttaaacccccccaagcccttttttttccacttggcccctaaaagccccctcttgcgggccctccttg

SEQ ID NO: 148446 - DNA, 488 bp, Zea mays
  Clone ID: MRT4577_6690C.1
ccccagccccgccggaattcgcgttcaatcacctgcgggaaaactaacctttacctattgtttggaagcctgcaaggtggacataaacccggcgaagggcggtccctacttaaactttaaggccaaggaacaggatggcaataaggtgttctttagcataaagaggtccaccctgctgagcatactgatgaacccttattgcgaccgtcactctgtgcacattaatgcctttgcgttcctgttagatggccgcacgcttcgctgagagcatacccctgatcacctggagatgcaggacggctactagatcgacgccgtgcttcaccataccggaggcagagttcctagcaccacactagaagtctcgttctgctcttcgtactgcgtagtagtaaacaaacaggataaagtgtttttaaggaacttgtgatgctctgactccttgtgccattgctgatggacagacttagcctttgtttagtagtatg

SEQ ID NO: 148447 - DNA, 450 bp, Zea mays
  Clone ID: MRT4577_66910C.1
aaaaaaaatttttggaatggaccatttaaggccccgcagaaaaaccaatttttggggaaaagcacccgccccgggttggttaaaagggccccaacccccctttccgggggacatggggggaaaaaattccgggggaaagcaaaaaaaggctgccaggaaaaaatgggggggaaatggcaccacaccgatggaaaactaattaaacccccccaggttcctccttaaaagaatttccggaaaccgggggacaaatggccaaacctttttttgaaactaaccccgtttttttttcaaatcctttggaagggaaaagtggggtttaacttaaaaaaccaaggcttttgaaaaaaaaaaaacactacttttaagggaaaggcaaaaaagttttaaggttgggggcaaccaaaactagtcaaaacccttttggcccacccgtccccccggaaattc

SEQ ID NO: 148448 - DNA, 1925 bp, Zea mays
  Clone ID: MRT4577_66911C.1
gcaaatgcggctgaacaaacccttgtatattagcatatatccttttgaaactgccaccacctccaagcagtcgtcagaattgctcgttccagtgccttacatattacaacaaccaattattctcctgtcttaaaatccattccaggacaaaactacagtccataacacatactctgcttctgattttactgccgaacagatccaccgaatctcgtgtcatttgtgacaaatgtggggcatattacaaaaaaagaactggccaccgaccacaacctgaactcattatgcgtatttgtacgaactccctcataaaatacatgagagaaaactaatctagcacactatgttcattaggtttgggctaaatctacccactgccaaaccttgagctcaccagttccatccccggtaaaaaataaaccaccaggacccatctgtattgccctaatttcttttttggagaataatctgcctctgtcactgaacgatggcagatcatataagcggacagtgttgtcatttaatgaacacagtagcacaggttttgactgtgcgtcaggcataccactgagggcaagtgcaccctgatcctctttgtgtgtatatgttacttctaagtttccactctctgtagcggcccaaacttttattgtttgatccaaagagcaagataatagaaattgatcccagcaaagcacggacataacaacatcggtatgatcagaaagagtctgtatgcactgcaaagttgccaaatcccatactctgatagttttatccattgaagcagaataaagcctcatgcctcctactatcaatgaaacaacagcaagcttatggccatctagagaagcagctggctcaaaacagttagttgcggcactaaatctccatgctaaaatcctcccagcttgtgttgcagcaaagagtaactcactggcaacggcgagtgcatagacttgcccagttggtccagtaaggctcatttccgctgctgtttgcatattccaaaccttcactgcatcaggtattccaacaaataaccacggaccttcaatgatcatacacccaacctcacgacccatggtgatgacaccagcacactgcccagtttggcaatcccacatgcgaacagttccatccttactcccggaataaagcttgtctgacccagcgggcagtgcaatgcccgtgacaccctgctcgtgtcccttgagcaaggtaagcatcgcgatactatcgcttatgcagtagctgtgcggatagcggcacctctcgccatagctacattcggtaccggcgagaaagtacttgcagggcctctcaggcggcttgtggctcgcaatcccgctgccccctcctgggcccttcccccatctattgtgatggccacctcctcgtcctccggtgttggggttgcgccatacgttccccccgggtccagtggggcgcttgggcggcgcagcctcggggagctcgctgtggaggaaggggcacggaaagcggttgcaccgaccggcacgccagtagttgcagacctttccgttggtagatggtggagcgccgccggagcccgggcctaggcgattgtgcactcgtttgttgccgaatcgtccgtcggcctctatgtccatgggtggcggcggctagggtttgctgggctcgggagaagataagcaaacaggtaatatggtgaacgcaaccttggtgcgtgcggcggcgggtaagccggatagatagattgatatgagaagtagtcggtcgcgtggaggcgacgcggcgatggctcgccggagcgggtggggagatccggatcggagaggaaaggagcggtggcctggttgctgggtcgggtttagctaacgcggtcgcgggcagaagggagggcccggcgacggccgcccgcttcccactctttgaactgt

SEQ ID NO: 148449 - DNA, 119 bp, Zea mays
  Clone ID: MRT4577_66912C.1
tttttttgggtttatataaaggccgaatgtgaaatttcagagccgtgaagcaggccaaccaaggtgattgcatacacctgaccgggagaattgatacacaaatgcatgaggaggagctg

SEQ ID NO: 148450 - DNA, 929 bp, Zea mays
  Clone ID: MRT4577_66913C.1
aacacttcctgcacccatatcctactgatggagacaagcaaatgcttgctaaacaaacgggtttaacacggaaccaggtatccaactggtttataaatgcaagggttcgtctttggaaaccaatggtggaagagatccacaaccttgagatgaggcaggtgcacaaacaccctgttctcgacaagggccagcacgtgctgcatcaccaaacccagcattcgttcgagagcagtggaaagccttctgacccttccgactctcagcttggccaaagcagcagcatcacgaggaaccacaacatccctgcgtcccagggatttgccgatgagctctccgagatgtcccattctattcagcaggggcaggtaaccttcgcatacaatgggatgtcggcgccacaccacagcctcgcttcgtcacagcaccaccagcaggccgggccgatgagcggcattggtggcgcggggaacggtggcgtctccctcaccctcggcctccaccagaacaacagagtctgcatagccgagccactcccggcgtccgtccctcccaacctcgctcaccgttttgggttggaggaggtcagcgacccctacatgatgggctctttcgggaaccaggaccggcatttcggcaaggagattggcggccatttggtgcatgattttgttggctgacatggcagctgctgctgcattgttgcttctggtcagctgatctgatctcagcttgctgatggtgcacaagcatgtatttgtaccactactagtatgttagaatggtatataagtgtatcacttggtggctttggcttgatcagtttgaatcaattcctgaggatggagaaaaaaaaaaaaaaaaaaaaaacaaagggcggcggacgcgtggccacaccctaacatactacaacattcaaaaagagagcaccc

SEQ ID NO: 148451 - DNA, 372 bp, Zea mays
  Clone ID: MRT4577_66914C.1
ctctttttttttttttttttttaatcggaagttaaaaaatgatgaacattttgaacaccaagtcgagcgcctcgtgccccacccaggttaacaatcttttccaagggaaatgaagtgtgctaaaccggctaagtgtttacactaaggatcagcgtaagtgtcctaaaacaaaagagagcttaaaactaaaaccggataagggccaggagaggcggtcaagagctactaaagaggtacctacgcctgtgcctgcagcagataaatcctctgcaagtagacctccaggtccaaaattcggtgcatcggtcagtcttgccatcacatggaaatgggcaccccaagttgcgggtcacgcggctggagaccaaatgg

SEQ ID NO: 148452 - DNA, 159 bp, Zea mays
  Clone ID: MRT4577_66915C.1
atggcgagagtagcgtgtacccttcgtggcaagaggctggacggtggtgtatctgttctctcggtgaagaagcgacaaacttttgttgcttctgttcaaaggtggtacccaaagaggagaaccaagactagagctgcgggagggaaggccctgcgttaa

SEQ ID NO: 148453 - DNA, 465 bp, Zea mays
  Clone ID: MRT4577_66916C.1
atgttttttttttttttttttttttttttttctttttttttattttttttttgttttgtttttgacccccaaaaaaaggaacatttggatttttgggcctacaccaaaggggggaaaaaaaaccttatccagggggaaaaggggggtaaccccgtgaatccttccaaacccccaccgggaagggtattattggccaaaaatcccggggggggataatccaggcctgaaacgggaccaacagcgggggaaactctgggggggggggggggggttgttcttaaaacggcccgtcccttagaaatgtcggccggttgcacaccaggggcggggaggaacgcgtttcctcggggggggaacccgggggcgccaaagaggcccttcccaagggacacatgggggaggataaactgggggttattttggccaaacatgttctgggtattccccgggaaaaaggcccccaac

SEQ ID NO: 148454 - DNA, 156 bp, Zea mays
  Clone ID: MRT4577_66917C.1
tggcacagggaattggcaatgggctaccattggcaggtagttgtgacaactcctgagattgctagtgtgttagctcaacaaatctcgctttgcacatttcgtggaaatccaatttgattctgctggtgggttagctgtgcttaaggttcttgacaa

SEQ ID NO: 148455 - DNA, 779 bp, Zea mays
  Clone ID: MRT4577_66918C.1
ggaaaacccctagaacttaagattgaggttatgaaatgaagtaaatagcatagtaaatattacaaatccttattacatcataattgagcagcaaccagtgttaggaatctaataaattaaatggaacagtgctatcagaagcacaaaaccaggtatacattgatggtttaccaaatttccatggaaatgataattgctagcaaaataaatcccctaccgatgagtttgagaactaaattcagatatagtgaggtttaaaagactagcttggcaaaagcatgcttgtgctgttcaacttctctaggatgtatcaacaaacaacaagttatctaggtgagagaaaaaaccaaatcaccggagcacctccaccttcttcttccccttgaggaagacctctctatcaacaacatcacgcatgtaaccaatcaaagagaaaaaaccaaatcaccggagcacctccaccttcttcttccccttgaggaagacctctctatcaacaacatcacgcatgtacccatcaaattccacaggaacgccaccattgagcctcttcatctccaagaaccacttgctgtctgtcccccacaggtcctcaaactcatccagataatgcacaatgcacttttccttgagtgactccagcaatgccctgttgaccccaacccctgcaacatacacctgccgccctccaccaagaacttcctcgaccctctgtctcaggtcctcacccttggcatcgatatggaccgaataaagctggtgcatcctgaaggatatca

SEQ ID NO: 148456 - DNA, 474 bp, Zea mays
  Clone ID: MRT4577_66919C.1
cttcctttctccctcgcgccgccgcctcctcacccgtcccggcgcacttggagctcgtcgtacccgcgcgccgcccaccatgatcatctccaagaagaaccgcaatgagatctgcaagtacctcttccaagagggggtgctgtatgccaaaaaggactacaatctggcgaagcacccgcagattgacgtgccgaacctccaggtgatcaagctcatgcagagcttcaagtctaaggaatatgtcagggagaccttctcgtggcagcattactattggtacctcaccaacgatggcatcgagttcctgcgcaacttcctcaacctgccatctgagatcgtgcctgccactctcaagaagtctgccaggcctcctggccgccctcttggctctggcccacctggtgaccgcccaagggggccacctcgctttgagggtgacagacctaggtatggtgacagggatggctaccgtgg

SEQ ID NO: 148457 - DNA, 450 bp, Zea mays
  Clone ID: MRT4577_6691C.1
cggacgcgtgggcgccgtcgccgcctccggcatctgccccagcgcggccgccgtcgtagccaccatgggtcgcgtgcgcgccaagaccgcgaagaagaccttcacgcatgcgatcgagaagtactactcccgcatgaccgctctcttccacaccaacaagaaggtgctcgaggaggtctagatcctgccctggaagcgccttcgcaacaaggtggctggcttcagttctcacctgatgcgccggattcagctcggtccattccgtggcattttgctcactctgctagaggaggagcgcgagctccgcatggacttctatccggagaagatcacgctcgatgtcctagagatccgcgttgacaaggagaccatggagatgctcgctgacctcagcatggccgacctgcccggcgttgagcgccatgcttgtgtctccaacgcccgcggcta

SEQ ID NO: 148458 - DNA, 700 bp, Zea mays
  Clone ID: MRT4577_66920C.1
ggccgctttttttttcttttttttcttaacagtacatagcaatcaggttttgtagagaagggtactacaattttggtgccacgcataaaaatagtaggaaataaatagtggcataacaaagtgtacattgctcaaagaaaacataaaatctgaagaacgggtgtttatagaacagcaagtttacctattttaggcctccaggaatcttgacctcttgatgcctggaactcatcttcatggagcctgaattattcgtcataggaggaatacacatgtctgtccacacacctattttaggcctcctggaatcttgacctcttgatgcctggaactcatcttcatggagcctgaattattcgtcataggaggaatacacatgtctctccacacacctggaaaagcaatctgtactattcatggttgcaaacattatcacgaccaaagaataggaaacaagtataggtaaattgctcaatgcttaataggcatgagtttataactatagagtcacgcgtataagtgttgaccgattgagctggacttgaagtgacagtgttgaccgatgctacattgttaagctttttgttgactggggtgatatcataactaatctatcaaccaatgcgtatgaaatgcagtggaggagaacaacagttggttaacaaaccaaagctattttatcaaacctgtggtccctatc

SEQ ID NO: 148459 - DNA, 292 bp, Zea mays
  Clone ID: MRT4577_66921C.1
ggccgcgtgaggctcaaggtgcgccatgggagaccacgggaaggaagggcctcggctggggaggagagaggagcgctccatgggaggtcaggggcgagcaggcagcagaggatcgcggtggagaagaagcctgcacgccagggaacctcgcgagctcacgaccggggaggagaacaccgagcggaactccggcgggatttgtaggaatccagggcggcggcttgagcggcgactgaggataggagcgcgcgcgtagaaaaatcttcaacagcggcggccggatcccggccgg

SEQ ID NO: 148460 - DNA, 237 bp, Zea mays
  Clone ID: MRT4577_66922C.1
accaccggtgggagagctggtgccctcactctcacagtgacaacaggggcctccaacgacgacactgtcaaatgtacgcgtgatgcttgttaaggtagactccatggtatcattggctaccgggtgcaggaactgctttgcactgactggtctggcgacaggatgtatatcatgaaggacgctaacgtcggcattgccctgagccacctctatatcaaggtcctgtgtaggcaccac

SEQ ID NO: 148461 - DNA, 574 bp, Zea mays
  Clone ID: MRT4577_66923C.1
gtccgcccacggtggaagccagctgcctagcggaaggtcggcggcggcccgcctcgctgatcgcgatggagcggcggagcagcagcggcgcggggagctgcctggggctgctggcggtcgccgtggtgtcgacgagcgtcatcctcgtctcctaccgcctccaccgccgcctggaggcggacctcagggtcatgatactcggcgaaggcgacggagccgcggaccagggccggcgccgcacgaagaagaacaagaaggtgcgcttcgcggccgacgtggcggagccgtcgtccagccgagaggagtaccggcggcggcgggcgtcgacggcggcggcggtcacccgagcaagatagcacgccgccgccgcgcgtcagcctgacttgtggtgcatggctgtgtagcttgcgtgacgtggcggcatgcacgttcagctgccgtacgtaagccgttgcggtttccgtgggctgtgtgtgcttgtgtggtgacttgttcagtgcgtatcgacgcgtgtgctttgcatgccgtatgggacatacaaggggaacaaaccaactcgatcttttcaggctcc

SEQ ID NO: 148462 - DNA, 336 bp, Zea mays
  Clone ID: MRT4577_66924C.1
gttcgtctacacgtgccagcgtatgtttgagtactggttttacgcccattacatgatcgggtccataaccaacatcttctatatcgaccttacagacagtgaaaccttggcctctctcgtccgttattacgcacatttgactgacattatctcagaaaggtctgccatcttctttagcgaggctgactgaattgtgtactacctgcgcacggaagcgcacgcggttacccaccttttcggttgagggagcgacctttctttgacttctgactgtgccaccgaatctctgccgtgctgatggcagacgacattctggcataatggtcatagattgat

SEQ ID NO: 148463 - DNA, 278 bp, Zea mays
  Clone ID: MRT4577_66925C.1
aaagattgagccactgaataaggaacgaaagagtatggccaatatactacagggaatggactaaatgcctgttccatacgaaccaagctactcggatacacatgaggagccctcagagtacacgaaagcctgcctagcacgttcattgattaaaaccggtgagaatcggtaccatatgattgagcgatgacatgacacatcaggcccctataaagaacatacgtatgggaacaccaccgctaggcgccagcaagctgcgggcgcatgatacccatttt

SEQ ID NO: 148464 - DNA, 119 bp, Zea mays
  Clone ID: MRT4577_66926C.1
aatctgcggcctcgcgagcgctcgggcactccaccggaaaggaatcgcgagccttgagctgaagaagacggaggctctgagagtagatggcgagtacatcgtcgctcatgtcaacggat

SEQ ID NO: 148465 - DNA, 358 bp, Zea mays
  Clone ID: MRT4577_66927C.1
aacaaaacaaccaacatatttgtttatgcatgagagaaaaaattaataacaggtgggtgaggaggagcggttaagatccactcgcctggaagaagtgagaggtcgctggcggctaaagaccgctgcccgtccccgtggtatgatagacggtcagcggacaagtaaaatttacttgcggttgtggcggcggcgcgtctatttccccgacgagccttcctcctgggcagagcataaggcgtcgccggccccggacccacccccttttttgacgaagtgggcgagcgacagggtgccgcttcccgcgacgcggttctcgtcggacaggaacttccttttcatcacctgctccaccttgaac

SEQ ID NO: 148466 - DNA, 2292 bp, Zea mays
  Clone ID: MRT4577_66928C.1
ctagccaagctccaactgccgccgctgcgcctctgcgcgtaccgccgctgcctctgcccccagctcgtcgcggagcaaccgaaggtccgccacctcagcgctccgttgggtgaggcgctcggtagcctcggcaagcgcggccctcagaaaccgcagcgaaccccagacgtcggcctcgcggtggatgagcgatgacttggcggtgcttagatccgtcagatcctggaggatcctgggaacgtccctggataggacctccatggtcgaccgaagcgaccccatcgttgccttggcacactcacgaagctcgtcccgagactgctcctcccgctcatcgtcaagaacgaagaggggtttcgaagcgccacgggtccagaaccggagcgcctgcccacgctgctcattaggatcgcgtcgtgcgaggacaaggtcgccgctccccagggcgggccgtggctctgcgcccccctcctccaaggcatcggcaccccctgtagtcggcgcatcaggtacctcctcggccaagggggcaggtttccgatcgccggccttgagtagcggcgcctcggccatctcagcatcggcggcgacgggtggctccacagccagaacggcaacggcctcggcagaagccggtgccggcgtcggcaacacgtcaggtgggctcaaagccgcggccacgccagtagtctccctcggcacgacggccgcctcgacggaggggtcagcctcggaagctcgccccacggcgacttgtgccgcctgagccccctgcttgggggcatcttgtgtagaggccagccggccagcgaggcccggtgcggcaccggctacagaagccggcgccgtcttaaggaccttccgggaagccagactggtcgaaccgtgcctccgtttgccactccggaccacagccaatcgtgcctgcggggaggcccctcgaacctcggtcctcgcgggcactaccaaggtttgccccgctgccggcttcggcaccatccctgcctcgggcgcccggggcgccgaagggacggtccgcccaggcgcagacacgacgacctgaggatcagcctcctgtgcagccggcacgggcaacggctcttgggggacaggcgggtcggcctgactccccgggatcacctcaactacctcggccaaggggtcaagtaccccctcgacctgcccctgttcttcgaaccaggaccctgatgtcccggccccggatatcgacggcgccagcccactcgggggctggctcgacgacccctggcccagcctcagatccggactgaggccaaggcgggcagccatgtcgtcgtcttcatcatcatcatcatcgtcgtcgtcgtcgtcaggcgtctccggcgacggctccaacgggagcccgtccctcgcctgcctccgacgacgcctctccaaggcttcccgagctcgcatcctctcgcgagctcgggccttttccgcatccttcttctcctttttcttctctgcggagagcctacacacggctcggtccgccgcgtcctctaggaccggtggcagggaaggcttgtgaaaccccaactcctggagacggacggaaagtctcgacagggacatgcacccgcgctcgggacgcatcgggagctgggtaagggcgccgacgtctagcctccctaccgtgctagctacccgcctatggaggtcatcgtcggagagggggacagaggacatctgcgagccctccaagttgacccccggcttcatctccgtaagccgcaaccgccgctctgctaaagggagcaccctccaatgatggatagcggcgatgacccccgcagcggtaaggcccccatctcgtaacttctgcaaggcctgcagaataggctggagcttctccttcttcgcgtccgtcgtcgcggtgaagaactccacggagaagagatgggtccacaggtcccagtgagggtcaatccccaaaaaaccctcgcaaaccgccacgaagatggccgcttgcgcaatagagttggggttgaagttgtgcagctccaccccgtagtagtgcaggagcgcccgcatgaagcggctcgctggcactccaaacccccgctcatggaaggggatgaaactgaccacataccccggcggtggagttgggtcggcctcgctcgcgggggccatccactccagctgcagcccaccggagaggggacgaagcaaaccatcggcaacaagggcctccagatcctccacagcgacagtggagaaaggccacgggtcgcgtggcggaacgatggtcaccttgtcagccat

SEQ ID NO: 148467 - DNA, 232 bp, Zea mays
  Clone ID: MRT4577_66929C.1
ctttctcttttttttttaaaaaacattaatttttagagggtctttaaaggcttttgggggccacaaaaagtcacaaatattgcccacaatgaaagaacacccttatcggagcatcttattacatgtttttacaccattcgctggtccatgaaaacgaaaaatccaacacaaacaacaaatctaactcaaaacctcctcatacatctgaccactgtcaccttccagggccagg

SEQ ID NO: 148468 - DNA, 1867 bp, Zea mays
  Clone ID: MRT4577_6692C.1
ggcagatctccagtccccggccctccgtcccctcctcctgcgaaggctcctccagcaccactagctagagctaaccccgtgctgctgctgctgctactacctgctgccgcgcgccgttcgttgccgtgcgggcgtgttgtggtccgctgatctcgttcgcgggacgccggggggtggtggtggtggcagcggtggttggtggtgcgcggcgtgaaagaaagaaagaaaaaaaaaaggcccgccgctttgcgctgctctgcttccgtaggtgtcacgagatttggccctagcctttcgctttcctttttcatctcgctcacaagggaagggaccgagggacgagggagacgttggggaggggagcgagcgagccgtaacatccgagctgttccaatggcgacccctgccgttgctttcgtcgccagcgctttgttggggcggtggtagcgctaggagcggagcagtactaggttggtaggtggttgtagctttgcgcgtgacccgagcgcgcgctcgctcgctcctgtgcctctctacctcgcttgcgtgcgccgggaaggcagtgggtggctggtcggttctcgcaagaggttgctggtgctgttcctcctcccccggttgatgagcatggggcattgctccgagcagcggacggggttcgaggtgactaaggactggaacggcgccgaccagttcgcgatccggtccccgcggggggcgtccgttcgggtctgcctgcacggcgggcaggtcgtctcgtggaggaaccaccgcggcgaggagctcctcttcagcagcagcaaggcaatcttcaagccgccaagagcgacccgtggtggcattccgatatgcttcccacagtttggaaactgtggaacattggagcagcatggatttgcaaggaacaagatatggacaatagacgatgaggctccacctctaaattatggtgataataacagcaacaaagcttctgttgaccttctgctaaagccatctgaagatgacctgaagtgctggccacactgttttgagttacgtctcagagtctctctttcaatggatggagacctttcactgatatcacgggtcagaaatgttaatgggaagccattcagtttcgcatttgcttaccatacatacctttctgtttctgacatcagtgaagtgaggatagaaggtctggagacccttgattatcttgacaaccttagccagcgggaacgttttaccgaacagggagatgccataacatttgaatcagaggttgatcgagtctatgttggctgcccaggcgtaatagctgttcttgaccatggaaagaaacgcacattcatcgtgcggaaagaagggcttcctgatattgttgtgtggaacccctgggagaagaagtccaagacgatggcagacttcggcgacgacgagtacaagcagatgctgtgcgtggatgcagccgcggtcgagagggccatcacgctgaagcccggggaggagtggacggggaagctggagctctccgccgtggcgtcgaccaactgcagcgaccacctggatcgcccgggcaggctgtagagcgctgggtgggtgggttcgttcgcccctgacgaaaggcatgtactagttttttttcatgtacatgggggcgctaggtccggcccttgcaggctgcagtatcatctacctgtcaggtgtgtcatgtgtgagtttaaacttatgtcagatccaagtattgctgtgatcgacatgttcgatgttcctggactgcgaagtctcaagcgcaggctgttcgtttggctggctttaatccgaaacggcatctatagattgtagctgcagcggcgaaaaggacaaaccaaccaaccattgg

SEQ ID NO: 148469 - DNA, 233 bp, Zea mays
  Clone ID: MRT4577_66930C.1
agcaaaagggcttagaccaccccaaattcagatattttactgctaacacaacacgtgcagacatagattttttttttattggcttacagcgagctaaaattggcgcacagcttcaattttccctaagattaacacttgctgcaccagatacaatgggggatttacccaaatgcatatacctggaagggagcattcctataacaggccccccaggagaacaagttttgttccag

SEQ ID NO: 148470 - DNA, 2895 bp, Zea mays
  Clone ID: MRT4577_66931C.1
atggctaacaaggtgaccgtcgttccgctgtgcgacccgtggcctttctccaccgttgctgtggaggatctggaggcccttgttaccgatggtttgctccgtcctctctccggcgggccacagccggagtggatggcccccgggagcgaggccgacccgactccgccgccggggtacgtggtcagtttcatccctttccatgagcgggggtttggagtgccagcgagccgcttcatgcgggcgctcctgcactactacggggtggagctgcataacttcaaccccaactccattgtgcaagcggccatctccgcggcggtttgcgagggttttttggggattgaccctcactgggacctgtggacccatctcttctccgcggagttctttgtcgcgtcgacggacgcgaagaaggtccgtatggcggcgtgggccggtggctgcaccctccagctgaggtaggcgcgggcccccccctacatccgtgccatcctagggtcctcgcccaaagggtggcagtgccggtggttttatctccgaaatgacgacgggaggctctcgtcgttttctcaacgagtggccttgcataagttacgagatgggggccttaccgctgcgggggtcggcgccgctatccatcgtcggagggtgctccctttggcagagcggcggttgcggcttgcagagatgaagccgggggtcgatttggagggctcgcggttgtactcgacctccctctccgccgatgacctcctcaagcgggtagcaggtacgatagggaggctggatgctggcgcccttagccagcccgcgatgcgtcccgaccgtggatatgtgtccttggggttgaggatttttaaacccgcccggccaccggtcccggaggatgcggcggaccgagccgtgcgtaggctcgccacagagaaggaaaaggagaagaaggacacggaaaaggcccgagctcgcgagaggatgcgagctcgggaagccttggagaagcgtcgtcggaggcaggcgagggatgggctcccgttggagtcatcgccggagacgcctgacgacgacgacgacgacgatgatgatgatgatgatgatgatgaagacgacgacatggcggcccaacttggcctcagcccggacccgaggctgggccaggggtcgccgagccagcctccaagtgggctggcaccatcagtgcctggggccgggacaccaaggtcccggtccgaggagcagaggcaggtcgagggggtacttgaccccttggccaagataattgaggtgactccggggagtcaggccgattcgcctgtctcccaagaacaagcgcctgtgtcggctgtacaggaggttggtcccccggccgttgtgacgacgcttgggagggccgccccttcgactcctcgggcgcccgaggcggaagcggtgccgaagccagcagtgaggcaaccctcggcagcgcctgcggagactggggcccgaggggcctcctcgcaggcacgattggccttgccccagagcggtctggcccccacgaaggcccttaagacgaagccggcttcggcggccggtgctgcggcgtgccatgccggttggttggcctccgcacaaggcgccctccagcggggggcccaggcggcacgggttgccatggggcaagcctccccggctgacccccctattggagcggccatcatgccgggggagaccgctgatgcggctgcggtcctgagcccgcctgacatgttgccggcgccggcatcgactcctgctggggccgtcgctgattcgcctgcggagccgcccgtcaccgtcaacgtcgggatggttgaggcgccgccgcccatggtcatccccgacctccccgttctcggccatgaggagagggcggccgtcgttgccgagagccgcgccacctcggactcagaacccctcctctccctcaacgatgagctggaggagaggtctcgggataatttccgtgagtataccgaggcggcgatgaggtcgcttcggtcgaccatggagatcctttccagggacgttcccagggtcttccaggaacttgcagacgtgagcaccgccaagtcgttgttcatccgccgcgagagcgacgtctgggattcgctgcggtcccagcgggccgcgcttaccgaggccaatgagcgcctcgcccaacggagcgccgaggtggcggaccttcggctgctctgtgatgagctgaagtcagaggcagcggtggcgcggatagaggcggcgtcggcacgagcggaggcttcgttggcccgggagcaggtggcttcccaggccgaggagatgcagcagcggcagctggagcttggccaggtcatcagcgagcgggaccaatcccggagccaagctaccgaggccgtgagccgggctgaggcccttaggggtcagctggctgaggctacggagcggctagccgaggcgtccgctcgagccgggacccttgcggagagcccagccaaggccgtcgggactgctccgtccgcccaagctgtggccgcacagcagcgtgcccgggccgaggggttcgagatggctcttgatgagttcgtcaagaactgcaaggcgcttgctcaggcggttgagcagaaggaggccgatcgcgcggccatgtccaaggctatctcggccttttgccaggccttgggcctcgacggcgttccctcgggtacctccccccagagtcacctgtgggccttgggcggccatgtgcgcagcagactctgcggggcactgcaccacgacattaggcgggccttcgccgtgctcgcttcccactatgacgtggatctggagcgggtcagcgagggggtactgcttacccgacaaagaggaggctgccttagccgaggtctagaggcttga

SEQ ID NO: 148471 - DNA, 261 bp, Zea mays
  Clone ID: MRT4577_66932C.1
gcagcccaagccatacatctacacttgagaactttgttgaggctgactcagctgatgatcctcagtattggcagtgacgaagatcgtcatgaggagtctagttggcgcctggcggcaatgaacttgcagcaggaacacctgttgttctcggtctcccggcctgcttccaggccgtcggcggcaacgacgacgggcttccaggaccacgggctcggcggcttccaggtgatcgctaccgacggcggcgccggtccggccgcg

SEQ ID NO: 148472 - DNA, 265 bp, Zea mays
  Clone ID: MRT4577_66933C.1
cttctttctgttctcctcgcgtgctctgtctctctcttcctctctgcctctctctctctctctcagcggcgactagggacagtcgctgcctcactacgtctggtgctcaggtattctttgccggggacgagcacccggggtaatggaatggatctcgttagtgctgaagcagcaccagcagaggtcaaaatatccgatggagaagtgaatctattccaagagaaggaaagcatagcaactgcaaaagaacgtgaggaggcagctg

SEQ ID NO: 148473 - DNA, 455 bp, Zea mays
  Clone ID: MRT4577_66934C.1
ggacccgggtattaatattattataaaaaaaaaagggggaacttaaaccaaggccctgaatttaaaagggggggggaaaaaaaaaagcaaaccggcttaaacatgggggggtagttaatttcgacaaacccaaggggaggggaaaactctatttggagaaaaggcccttttaaaagaaagaaagcaagctttgaaaagggaaaaggggctttttgaaaaaccaagtcatttacgggtggctttaaagggggcctaaatttttttgagcttaaaaaacccggtttttatttggaaaatcactagggacatttagcccggggggatttttgccagcatagttgaattttgacaaaaatgacccaaggatgcttttgaaaaccaaaaccattaaccgtattttggaatttgaaaagggcttgcaaacttcgccttttagggggggagggaaccccttg

SEQ ID NO: 148474 - DNA, 275 bp, Zea mays
  unsure (1)..(275): unsure at all n locations
  Clone ID: MRT4577_66935C.1
cgaggaaaaaggggannggcaccaggcaccaccagaaaacaaagaaccccccccacggggcacaaggcccaggccaaacaagagcaacacccggcgaccaccaaaacggggccaggaggacccggnccaaccggacaaccccaagggcccaaacaagggaaaccggaaagggcccaaaccggacaacccccaaggccaaagaaaaaaaaggccaccaaccaaaggaccacggggcaaggcccaaaccgggacacccccaagggcaaaaaaaagac

SEQ ID NO: 148475 - DNA, 133 bp, Zea mays
  Clone ID: MRT4577_66936C.1
gccgaatcgcacatatcctgcagcgccgagcacacacataatcccaatggtacagacaacaccacaccatgggcttacagcagcaacatgggtggagctgccttgtacatagagatatacatgaatggccact

SEQ ID NO: 148476 - DNA, 1466 bp, Zea mays
  Clone ID: MRT4577_66937C.1
gtacctcgaggcggccggggcgaccgggccgggatttcgaaccaaagggggcagaactgagagatcgagagaaataataaaaaaaaatccgtcttcttgtggtcttctccaaaccctagcgcccccggccccggtctccgcccccccgccttcgccgtcgcggtcgcgccccatggcggggaagtcgcgaccgcccaagcggatcctcgagtcctataccatcaagggttcggacagagtcatcaagcctggcgattgcgtgctaatgagggcatctgatgcttcaaagccaccttatgtggcaagagttgaggcaattgaagcagcaggatctcgaggcaccaatgtgagagtacgagtgcggtggtattatcgaccagaggagtccataggtggtcggcggccatttcatggttccaaggaggttttcctctctgaccactatgatgtacaaagtgctgacaccattgaggggaaatgcaatgtccacagcttccgtagctatacaaagcttgattctgtcaatgctgaggatttcttctgccgcttcgagtataaatcagctactggcagctttgtaccagatcgtatagcagtgttttgcaagtgcgagatgccatacaatccagatgaccttatgatccaatgcgaggaatgttctgactggtttcaccctgcttgcattgggatgacaatcaaagaagcaaagaaactcgagcattttttctgccagacctgtacagctgaaaatggtaagatggttgagaattcacatgaagctacagcgcaatcagaagaaaagccggtggagtcaaaaaggcggcgaaggtgatggccgtgctgattaaatttatgaaatctatgctcggttgtacaaagccttcccacgtttcacgtttgagaactgtaattttattgttcgtcgcagtttgtggtcctgggctggggtccctctaatgtcaggcacactgtatatagcttgtaacctggtcagattgttgtattagagcacactagggtttgtgtgatagcacggaagttcggactactgagtatgtgtagagtatggcattataatgccagcatcaggtgatcaggcttcttctgggcattaggactcctgcatgatccagcaataatacttccatgcagctggacctggttagtcactagtaagttgtcaggaaacttagtactgccatgtgaactttttttgaaaccctctatgtaatgtaagcatctgtgtcctacttgcaaactgttgcacgaaattgggcacccaccctggcccattggctgcggttgcataattgcggcaactaacttgtgttttaagtttggaggaacaataataaagtttaggctcattgaactggtctggttcaacgaaacaaaccctcactttttgcttgtattttgagttaatgtgatgtttattcaaattatgggctaataaattgctgtcc

SEQ ID NO: 148477 - DNA, 538 bp, Zea mays
  unsure (1)..(538): unsure at all n locations
  Clone ID: MRT4577_66938C.1
ctcctataggggattggttccatcacaagcngccgggagaccccgttccccctcaactctaaccccgtcggttccggctaccgacgagggcccgagctttacaccccgctgcttcctccgccaccatgggtgaagacacgaggtgatgggagctcgcgggtaagctccacgacccaccgcgccgaacccgaggggtggctcgaccaagcatacaagaagagccacttcgcgcaatgagtggaaaaaaccccttgctggatcatctcacgccaagggcatcgttctggagaagattggtattgaggccaagcagccaaattcggccatccctaagcgagcccgcgttcagctggcgaagaatggaaagaagatcgctgcctatgagccgaatgatggatgactaaactacatccaccacaatgatgaggtgttgattcctggatattaccgtaagggtcatgttgagggagaattcctggtgtcaggtccaaggttggtaaagcgtctgatgagtcactgcttgcactcttcaaagaga

SEQ ID NO: 148478 - DNA, 506 bp, Zea mays
  Clone ID: MRT4577_66939C.1
gccggccggttcgggaccagaagttcgagatgccgaagcgggggatgaagatctccgcggttttccaggccatggagcaggcgaagagcagcctgtacatcgtcgcctggggcctggctgacaccacgctggaagacgtcttcgttcgagtggccaagcagactgacatgtccactgtgacctgactgaatacctcaggtgatgaactcatgaacgcgagacgcgacacagatttgagcagcctggacttttgcaaaacctcggtaaatgcggtcaggcgcaagcaagcggatcccacggcacgatcgagcgtgcgcgtcaggagcatctgccgcgtgtttcatttccacgcgtgagctagctgctagtagacattgcacctgcacaaccctatagaaaaaaccaatggattcgagttgagtcattttcactgtgtatcattataaaagtttataattattgtgagaatgtctacattacaaaaaaaaaaaaaaaaaaggccccta

SEQ ID NO: 148479 - DNA, 173 bp, Zea mays
  Clone ID: MRT4577_6693C.1
aagtaaacacttggagagaagatggctcctggcatcaggacatgttaattatttcatgtatctgacttaatgagaacgatcttgacatactgggccgtcaatcaatacaggcaagctaagggccgcaactatacctatcttgcactatcacactcgatgaaacctagctatta

SEQ ID NO: 148480 - DNA, 2253 bp, Zea mays
  Clone ID: MRT4577_66940C.1
gttcactggtacttcatgacagaccatttgctgttatgacgaatatggaactgccgatccgaatacttttttgttattctaagcaggctatgttctacgagggcaagcattgttgcggataacaaacaatcacatgagtcaaggatttggatagtggaactatctgaagtgcatgccgctactaggggtggacatcacagttggaaggtgatattatgtgaggttattccggatgttcaacctgccatggatgctatggagtatgctgaatgtgaggctactgtcaaaagttatcctccatttattgaagctatgaagagaagaggtgtggatgacatggatcttgttatggtggatgcttggtgtgctggctactacagcgaagctgatgctcctagtcgcagacttggcaagcctttgatattttgcagaactgagagtgatagccccatggagaatggttatgctcgtcctgtagaaggaatccatgttgttgttgatatgcagaataatgctgtgatagagtttgaagataggaagttggttcctctaccccctccagatcatttgagaaactatactcctggggagacaagaggaggtgttgatcgaagtgatgtaaaaccacttatcatcaatcagcctgagggtccaagttttcgaattaatggctattttgtggaatggcagaagtggaacttccgtattggcttcacccccaaagagggtttggttatctattctgttgcttatgttgatggtagccgtggacgtagacctatagcacataggctgagctttgttgagatggttgttccttatggagatccaagtgaaccacattatcgcaagaatgcatttgatgctggagaagatggacttggaaaaaatgctcattctcttaagaagggatgcgattgcttgggctacataaaatattttgatgcacatttcacaaacttcactggtggtgtggagacaattgagaactgtgtttgtttgcatgaggaggatcatgggatcctttggaaacatcaagactggagaactggtttagcagaagtaaggcggtcaaggaggctcactgtttcatttatctgtacagttgcaaactatgagtatggtttttactggcacttctatcaggatgggaaaatagaggcagaagtaaagcttactggaattctcagtttaggggccttgatgcctggggaatcgaggaaatatggcacaactattgcccctggtctgtatgcaccagttcatcagcatttctttgttgcccgtatggacatggctgttgattgcaaacctaatgaagctcataaccaggtggttgaggttaatgttaaagtggaaagtgcaggcacacataatgtgcataataatgctttctatgctgaagagaagttgctcaaatctgagttgcaagcaatgcgtgattgcgacccttcatctgcccgccactggattgtacgcaacacacgaactgtgaatcggacggggcagccaactggctacaggctcgtacctggttcgaactgcctgcctttggctctgcctgaggcgaaatttctgaggagggctgggttcttgaagcacaacctctgggtcactcaatacaagcgtggcgagatgttccctggaggggagtttcccaaccagaatcctcgcatccatgagggtctgccaacatgggtcaagaatgataggcctctggaggaaaccgacattgttctctggtacgtgttcgggctcacccatatccccaggctagaagattggccagtcatgccggtggagcacataggcttcatgctcatgccacatggattcttcaactgctcgcctgcggtcgacgtgcctcccagctcgtccgatgcggatgtcaaggaagccgagtcgcccaaggccatccagaatagcctcatatcgaagctgtgagctttgctgttctgccgaggaaaaaggatccgcgcgcggctgctctccctactatttttttatcgtattccgcgagtaaaaaggaaaactgctcgatgtccttttgtttgttgcttggtaataccgttctgtttgctataattgtttgatggttttctatgattatcgatcagcgggatgtgaagtactgtttacattgctcgcgttctaataaagtactgtttggacttgcttaaaaaaaaaaaaaaaaaaaaaaaacctgcaaacaacaccacattgcatatattttgcctccctgttcgtgcgttc

SEQ ID NO: 148481 - DNA, 187 bp, Zea mays
  Clone ID: MRT4577_66941C.1
acccacaccgtccggggtgttcacatagttcctcgtcagttaccctaaatctcagaattatagtcctctctccattttctcagagatatagtgttggcaagatgttgcattgatcacgtattgtcttgctttccatgcggagcctgagggtgcgttcttggaggattaggcctactccccctttagt

SEQ ID NO: 148482 - DNA, 283 bp, Zea mays
  Clone ID: MRT4577_66942C.1
gccgggttccatcacctgtcctcccccgcgtctgcttctctcctcggccccgaggcatggcgccctgcgcgtccccgtccgtcctcgacgctctccgccagaacgacggatggcactcgccaggtcgaggtactccgccaccgtatgcaagctatggaacaagtcccaatcggcgctgcatgaactcgccgaggaagacagagccgtacgccacggaggcgagctgcacgaagggccatgccggctcacgcgtgtagaagtcggcggaggcgcgcaccacgcc

SEQ ID NO: 148483 - DNA, 368 bp, Zea mays
  Clone ID: MRT4577_66943C.1
gagctctctagtcggcggccgccctttgtttttttgtttttaatggactgggcaatgcgctctatggcaattgatttaaggtacggccaaaagacccgtgatggtccaacatgcattagtgcccgcacgacagcaacaaatagaccctgacagtaaagcgagtccatatgacgccccgcagtggccctaaccagacgaaagagcccacaagccaattgtgtggccatgcatgcgactggaataacgggcatcatgacttaaatctggccgactaaaattacatatacgggcgcacactacagtagaacccgatggagccgaatatcgagcttacgtacacctacatccaacgacataagtgttatata

SEQ ID NO: 148484 - DNA, 1153 bp, Zea mays
  unsure (1)..(1153): unsure at all n locations
  Clone ID: MRT4577_66944C.1
agcttgcgatggcaatggagatgattgagaaggctggaaggggtgtattagtctatctccgtggacatgaaggaaggggtattggtttgggccacaagcttcgtgcttataacttacaggatgatgggcgtgatactgtggaagcttccgaggaacttggtcttcctgtggactcacgggaatatgggattggcgcacagatattgcgggatctaggagtccgttcaatgaagctgatgactaataaccctgcgaaatatagtggtctcaagggctatggattgagcattgcgggcagggtgcccttgattacgccaattaccagtgagaaccgtaggtacctggagactaaaagaacaaagatgggacatgtatatgggttggccaatgcgcaggccaaccaagcaaatggcagccagagcacagaagagaatcattaggcccccaagcatgtttccattattattccagcaatccagcttggtgtggtggcacaaaagagtgatatgattcttcgtttggggagttcctgaaatcttctcccccgatatttccgtagattctttcgcaaaaaagccgatatttcggtagatcgatttgttcttcaattgtaactgtaggtttcaaggtggctaatgaacggtaggtttcaagatggccagtaatgatatacacggagttagtcgtcatattgtactgtgttgagttttacgacttcatcgccttggtgtggttgtcctgatggagttgtgatcgaacggtgtggcttttcgctgccctttccttcacccactaaaaagcatagaatgtggagaattttaccttgagccattatagaagtttataatactttatgtgccccgaaaaaaaaaaacctgccagcatcntcagttcatcgagatctatcaccttcttggacagcgccgcaaagaggcgggactgccgagagatctcgaattccggcgtaggcgccggcggaggagatcgcggcgagctcgccatggatttgggcgtcgggatgcacccgtccgtgtggttgtcgcttcagaaacgtgcaggttggccagatatgcatccgaatctctgaaccgtcgacttgcggcccctgtaataatccaccgtccagatcgtccgctgacttttcgtgctaacg

SEQ ID NO: 148485 - DNA, 3406 bp, Zea mays
  Clone ID: MRT4577_66945C.1
ggaggcgtcctctaaaaagggaacactgaccgagcaacacgtgtcctcctacgatcgccgacatcgccgtttttttttcttgtccaactgcaacggttgtttagttcctaaccgtgtaacccagcgtccccgtctcgcatggattcgcatccgcgtctgccttcctcaggcgatgccctcatccgcccaccggccccattctagaaacgctgcagtgtctctaaggtgccaaacccatcggcctgcaatttcttggcctcaacttcaatcagaactagggtgaaaccagtgggcttgagcttagcatcatcctacaaaaaggagggtggttatctcgctgacggtttctctgggaatggcaacacggtgttgacaaagaggacatccagtcgtgtcgagaacagtacaagcattggtcctgaactcccgatggattctttgatgaggccaccaatcctctctactaatttggcacatgtgttggacaagttctcggatgaggacaccagagtctgaacttaggttggagagctcgatacagcgctttgcgtcgatagcacatgagattgaggacttcaggtaggtaaaacttttgttctaatcgtttgtcgaattttgcgaaaatgagggagatctgatcatggctgcatccttggctaccccagaggcgatggctttgtatagttaggcatggaacaggaattgattgtaaacagcatgaaagaagatgatctgaaaagactaagccttcctttgatggttaccacaagagtaaacgaggagaacctatgcactgcttttactgttacagtggatgcaaaagagggaactgcaattggagaatctgtcaccttcagggcaaaaacatgtatgactcttgcatctcctgactctaggcctgagggacttcaaccaccctggtcatattttccctttgaaatacagagaagggggtgttctgaaacgagctggacacacagaggcatcggttgaccttgccatgctggctggattacctcctgttgctgtcctttgtgagattgtggatgatgcagatggttccatggctcgcctgccaaagttgcgtgtctttgctgaaagggaaaatttgaagattatatctattgctgacttgattaggtataggaggaaaagagacaggctagttgaacgtgcttctgttgcacgcttgccttcgcaatggggcaatggccatggatattgctacagatctgctattgatggcatcgagcatcttgccatggtgaaaggtgatagttgggtgacggccaagacattttggtgagggtgcactctgagtgcctcacaggcgacatttttagatccgcaagatgcgattgcggtgaccagcttgcaatggcaattgagatgattgagaaggccggaagaggcgtaatagtttatctccgtggacacgaaggacggggtatcggtctgggccacaagcttcgtgcttataacttgcaggatgatgggcgtgatactgtggaagctaatgaagaacttggtcttcctgtggactcacgagaatatgggattggcgcacagatactacgggacctaggagtccgttcgatgaagctgatgactaatagccctgcgaaatatagtggtctgaaaggttatggactgagcattgcgggcagggtgcccttggttacgccaattaccagcgagaaccgtaagtacctcgagaccaaaagaacaaagatggggcatgtatatggattggctaatgcgcaggttaaccagccaagtggtagccagagcacagaagagaagcattgagcccaaaaaagtgatgcattcttctttttgggagttcctgaaatcttctccctcgatatttccatatattcttttttttctatatttccatatattctttctttcacatagaaggccgttttgttcttcaactgtagctgtaggtttcaagatggttaatgagcttaataaaagcaagtttaataatataagcaactgttcttgtaatgagctttacagtctgtcttagccgatatgtataatggttagcctttacaatgaatatatggtcaactgtttttctcacaaaatttaaagtctatcttaatggccgatatgcataagagcaagttaaataatatggtcaattgttagtttatagcaagtttaataatatcaacatttagccggtgtataactagctattatactaaggcggtctccagcagttatcctatctaatcctctatcagttatcctatctaatcctctatcttatcctccatttcaaacttaactctgaaaacaatgttatctacagtataaatcaactattttacacgatctgctaggtgttaagctttgttgcttggtgtggttgttcgatagagttgtgatcggatggtgtggcttttcaatgtcgtttcctatacccgctttcatatcgagtatcgtgtatctattgctatctctaggtatgatatagcattgtagcatgtcttggcgtgtagtggtgcaaccaaagttgtgcgcagcagagtaggtttgctccattgtgcattgcttttaggttcgaatccattaaaaatgctcccttgtgcattgattttaggttcgaatccattaaaaaactgattgtgacacatcattttttatttctttttctaaaaaccatggcaaaacatttatggtcatttcaaaaataatgaaatgtgccctttctttttcttatttccacctatgtaatcctttgctaccaatcacattatcactctgaatacatataaactaccgcgactctagcacgtaataatgaaggtcctgtttgtttccttccaggattacataattcggcctatggattatataagcacctaatgatctgcttatggattatcataatctagatatctcgattatgtaatacacctaataattatttgtttgtctcttaacttatttaagccggattatacttcctctgttcgcttaacttggtcattttagcctgattgatttgtccagtgaatttgatgctcccgcagcccaaatactgtgtcccatccgtgaacatggaagagccaccgaagacggagaggaacttgtcaagcaaggatacatacccgacttgggcattttggtcttcagttgcggtcgttgcacgagctgctagaggtgtttgtcatcgttgtaacatcagcgtggtccaacatcttccgtatgttcgcaaacattcctccaagccatgaagaggtgctttgttgatcaatctagatgaggaggacgaggtcaactttgtgaaggtacaaatggagaatgtaacacccctggtgttatgtgaactaaaacattggcatgccatcatatgtactggcattatattgctcgtgttacactt

SEQ ID NO: 148486 - DNA, 359 bp, Zea mays
  Clone ID: MRT4577_66946C.1
cgtgaatatactgctggtggaggtccaagccgcatttctttctacatagcgactgaagtgcactccagtcagcggctgtaataggtcccctactagccatccatccatacattcggggggaatgcggaggctctcctgcggctggagcgagcaaatccgttgaggcgcactgcgtaccactgttggagaccaactgctctgaccatgcaaccgtacggtacatataggagtgctgcgaaccttctcaggaggtatcgaacatgtgaagagtcgtagagcctatgagtgctataaaattgcatagctcactttgaaagatacacaatgagcacaaacggcagttcacggttcgggtgcca

SEQ ID NO: 148487 - DNA, 1345 bp, Zea mays
  Clone ID: MRT4577_66947C.1
ccctttcgtccgcccacgcgtccgcccacgcgtccgcggacgcgtgggattttccctttgaaatacagagaagggggtgttctgaaacgagctggacacaccgaggcatctgttgaccttgccatgcaggctggtttatctgttgcaggtataggaggaaaagagacaggactaattgaacgcgcttctgttgcacgcttgcctttgaaatggggcaatgtccatgcctattgctactcgttattgatggcattggaggataagagacatggtaatgtgaagtcactgttgcacgctttgcctttgaaatggggctttgtgacgattactattggtacatcacctgatctaactatcaatcacatgcccaatgatgggaggtgatattggtgacggccaagacattttggtgagggtgcactctgagtgcctcacaggagacatttttggatccgcaagatgtgattgtggtgatcagcttgcaatggcaatggagatgattgagaaggctggaaggggtgtattagtttatctccgtggacatgaaggaaggggtattggtctgggccacaagcttcgtgcttataacttacaggatgatgggcgtgatactgtggaagctaatgaggaacttggtcttcctgtggactcacgggaatacgggattggcgcacagatattgcgggatctaggagtccgttcaatgaagctgatgactaataaccctgcgaaatatagtggtctcaagggctatggattgagcattgcgggcagggtgcccttgattacgccaattaccagtgagaaccgtaggtacctggagactaaaagaacaaagatgggacatgtatatgggttggccaatgcgcaggccaacctagcaaatggcagccagagcacagaagagaatcattaggcccccaagcatgtttccattattattccagcaatccagcttggtgacacaaaagagtgatatgattcttcgtttggggagttcctgaaatcttctcccccgatatttccgtagattctttcgcaaaaaagccgatatttcggtagatcgatttgttcttcaattgtaactgtaggtttcaaggtggctaatgagtaatgagcctaataatgaacggtaggtttcaagatggccagtaatatatacacggagttagtcgtcatattctactgtgttgagttttatcgccttggtgtggttgtcctgatggagttgtgatcgaatggtgtggcttttcgctgccctttccttcacccactaaaaagcatagaatgtggagaattttaccttgagccattatcgctgtttataatactttatgtgccccga

SEQ ID NO: 148488 - DNA, 136 bp, Zea mays
  Clone ID: MRT4577_66948C.1
atgaaatatattaggaatcaatatatctacatctagtctagtaagaaatatgcaaatcagttaagaatatggggaaacatatttggaccattctttgtaagtacagcgttgagcagtggaaaacctggcaggcaca

SEQ ID NO: 148489 - DNA, 866 bp, Zea mays
  Clone ID: MRT4577_66949C.1
cattgggtacctcgaggccggccgggggcttccttctataaacctttcttccgctttcctcatttgcgaccttcttctttgctggcattttcctcttccatctttcatatctctctcgtttatttgcgcgactctttttcttggagacatttgtgatcttttccttcagaattcgatttgcattaagatcatcttcttgttgcgaagccgtcttggagatttcgtaaattaaagcggtttttacctttggtggtttatgcgcaccattggctgccgctctcttgcgtttgggttgtgcagtaccagcatctcgtcggcgcagaagccatcatgtcgacggccgggagcggcagccttcgcccggcggtggtggaggacacgggcagacactgggcgccgcacggacctgtgctgacggcctgcgtcgtggccatcaacgtgctcatgatcctcctcgtcttcgtcttcttctggcgctacttctccggtaaacggggaccatccgcgtcatccggcggcggcggcgacggcgacgacgacgacgcgtcgtcatccgcgtcgctgcccgtggcctctccatgggcatggtcgtcccgccggcggagcagcaaggaccacggcccgcagccggtggacgacgacgtggcgtcggcgctgcccgtgtacttgtactccagtagcgccggcggcgaaggcgggaaggccccggagtgcgcggtgtgcatcctggagctccgcgacggcgactcggcgcgcctcctcccgcgctgcgggcaccggttccacgccgactgcgtgggcgcgtggctgcggctccacaccacgtgcccgctttgccgcgccagcgtcgtggcgcccagagcggt

SEQ ID NO: 148490 - DNA, 261 bp, Zea mays
  Clone ID: MRT4577_6694C.1
tcgactcacattaaaagggttcttttttcacactagaccacaatggggcgatgattttccatcttatgccccttgcctctccatgctgtgtgcaacgcgacacttgtttctttattctacaagctccttagttttgtttctctcctatacttccataatgattgctcagtatctgaatcccagatcttaacctatggcccatcagcattttatcatgcaacatactttttcacccttggttatcaatttcagatctttttt

SEQ ID NO: 148491 - DNA, 1770 bp, Zea mays
  Clone ID: MRT4577_66950C.1
ctaaccaactggcgagacaatcacacctccagcactgccagtcgaacgacgagggtagtacttcaggtcgaggccatcagctaccccgctgaacaacgagcaatactgagaaagtgcatgtcgtgctgcatcttgcatggctgcctcgacagtatccctcttagtaatagaatagtgctctgagaaggcttctgcaccccagagatcatcgtccggacggcgcaccaagcaagtagcctcccactggtccgagtataacccgcgacgatgctggtagactacacaacagtactcgatggaccaagtgtgtcggtcgaaggcccgatgcagcagggtgtcgagagcgtcgtgaaagtgacacccgcgagcggtgtcactagtgatgggtctagcgatccatccctccggctcaggctcctttgagagctccatgccgttgctcgaactgccactggcatcgtcgtcgtctccgtctccgtcagggtctcctccagcagccgggatgccttgtggtggtgcagggggcatctctagctgagatgcagggtaaggcggcctcccagactccacctcctgctgaggcgtgggggaagagttctgctgctcctgctcctggtgtcggcgctcctggtgtcggcgctcctggtcctcgtgcaggcgacgatgcagtctctccaggtgactagactgacctggcaccatgagactgtgacagccctcccaagttatcgggcccacgtgcaccaatccttgccttaatggcctcgggtggctgtgcacgtgtaccaggtaacttaacaaggctatcgagttcaccaactggaactcatcatcccaaggatctcccacataacaggtatattacagtaatcacatttgatacacacacattggagatagagcggaagacttttacaaagtacactttacattccagaactcaagttttacaaggtagaaagagatgtatttattacaagtcctgatagtacccaaagtgcataacttattacaataattggaacggtgaagcctttccataagagatacacataaacattctaagcttcaaggcctccacatgaagtaactaaccaaaagataagggaataaaacttctcctttgttgcagagaagaggttctagatacttctaacacgatgatcagttagatggctccatccacttgatgaacaggcactggagtagactcctcttcagcaaccacttcatcttaaatcttcactctttattttgggagctcttctgtagaatgcttggcgagtgctatgctgatttcaccttcatcaccacaaaggatcttcaatcacgtatctagggcctcgaccagaacatagacatgccgagaacactaggtcaaaccacagatcgacacatcaattttgaactcatatcaactgattaagacgttctcacgttcaacaaaactggtgcttgcggccggtggcgatgaacagatcatcgacttcgaatggcatctcagcacaaacacatccagcgacggaagcgggaggaagcgcgcgcacgacacagtagtggagtcgagtggagggcgctgatttggaagggagcagggatgaccgaacctgagagagttcgacggcaggtgcagagcgttactagggagctggcgaggtgctgcagagtgagcagcaagggagctgatgccgagctcgactgctactgctgctccggcgtgctgcgtgggtgacaggaacggtgggaggaaaaggagacatagagtaggag

SEQ ID NO: 148492 - DNA, 2069 bp, Zea mays
  unsure (1)..(2069): unsure at all n locations
  Clone ID: MRT4577_66951C.1
gcagcggaaataaattctttattgcaaaatgattacatgttacaataagtttacattatacaattatcggagtgattacaaaagaaagtgattcaaaagaattacactttaaaatgtataaagcatttataagttttaaattacatgttagcttaagtgacaatcctcaataaaaagctaaagatgggatatacttatataagaaggccaagcccatcgacacttagcaccatctacaacagaacaaacttataacctgaaaaacaacagggaataaagccctgagtacgcaattactcagcaagacttacccgactaaagaaaagactctcaagggtatgctagttgattgggaatcaaggtaaggtttatcaatgatcgaagactccttttgcagaaaagcttgctaccagttgatccttaagccaagttttatttcactagttaggttattacctgaatttatatttacctagtctagttcaagcacttggcctatactagctgcattttattcattctcatatttcacttgctaactatgatgatggtcaccgggatgagtctccataaccgaggagcaacgacgattcgaaccgattatacccagctggggatctctaaccacacgacatatgtagcacttaacccttgcatatgtcaaccgttcccacggagtcctccactacatgaataggtccacgccacccgagagaacattaccctactaggcgtcctactatgccaggagggtacatgctagtcccgccatctctccactcccagtgcgcgattgtctcttcacatatggaatagccgggttcaagctttccctgtcccataccagggtatgtggctagttgcaaagtctcaaccacaacaggccagtcaacggtacgatccttaatcgacacagacgggtgactttgtctgctcagcgctggtctagatttattaaccatttccccatttttggtacccgacagggatactcttttcgagtgacgagtccactccggccgtagaggatccatcactttagtttgttttgattttcgaatcaaaaagcccataaccaatgttccacatcattctttttgaaaacaaaggatttttcagtttctaagcagggttaagcattatcagttctttttataaatcagggatcaaggtatagtatttaaattccaaggaatggtaatgcatcagttgttcatcacacaactcctatcacctaatgcatcatttaaggtgataaagcatttaaaacacaaggaaggggcaaatgcaccggggcttgcctttgttgcagagaagaggttctagatacttctaacacgatgatcagttagatggctccatccacttgatgaacaggcactggagtaaactcctcttcaacaaccacttcatcttaaatcttcactctttattttgggagctcttctgtagaatgcttggcgagtgctatgctgatttcaccttcatcaccacaaaggatcttcaatcacgtatctagggcctcgaccagaacatagacatgacgagaacactaggtcaagccacagatcgacacatcaattttcaactcatatcaacagattaagacgttctcacgttcaacaaaactggtgcttgcggccggtggcgacgaacagatcatcgattttgaatggcatctcagcccaaacacatctgaaaacatggtgaggacgaaccacggcgagatggggacgaccaaactgctcattctatcgaccaggtggcacgcgacggaagatgagcacgcacccagcgacggaagctggaggaagcgcgcgcacgacacagtagtagagtcgagtggaggggcgttgatttggaagggagcagggatgaccgaacctgagagagttcgacggcaggtgcagagtgttaccagggagctggcgaggtgctgcaaagtgagcagcaagggagctgatgccgagctcgactgctactgctgctccggcgtgctgcgtgggtgacaggaacggtgggaggaaaaggagacatgagagatncccggccggacatncnagggtacc

SEQ ID NO: 148493 - DNA, 346 bp, Zea mays
  Clone ID: MRT4577_66952C.1
gtatattgatattgacggggataaaccgggcgaagagagggtcacttaagtccttttctaccctggccattgggacattcaacaccacaacagggggcgaacatggccacggaacctttatggggaaaacaggatatggggccttctacaacaggctaagggcggtaacctcggcttttgttttgcaacgagttatgcgcttccacctgcaagaagttgctgctgctgccagagctgcccacttggaacaagaggccacgccccggcagtttaatgttccgtgagttgaccgaatccgggacctccatgccctcttggagggcggcatcatttgccaggatcaccc

SEQ ID NO: 148494 - DNA, 266 bp, Zea mays
  Clone ID: MRT4577_66953C.1
gcgcagtatgcagatctggacatctcttgttgccgccttccttggcttcgctgccattgtctccgccaaagaggacgataagtgccaccgtcgccgtcaccaccatcacaagtgcagctctagcagctcgagtgatgctgatgtccatgttcatttgaagcccgacgttggtttctatgccttcagatttggtgacagccagacacccgtctggaccaatttctacttcaagagccgaaacgttaccgccgtcaccattactgatg

SEQ ID NO: 148495 - DNA, 299 bp, Zea mays
  Clone ID: MRT4577_66954C.1
ccgccacaacctttctccctctcctctcctttcagccaacgtgcggctccagcagggagcctttctccccaagcgcatagaagcatctcctggcgtcttccccttcccagcgtaggagcaagggcttcccatggcggcctcccttgtgacatctccccctacaggttccaggtcggcgcccttctctagcctggacttgtagcgcctgatgcccatcttcgccctctgctgtcgaaggcacgggcaccattttcccccatggccgagctcaacacctgccaggacaagctgcgggcccc

SEQ ID NO: 148496 - DNA, 316 bp, Zea mays
  Clone ID: MRT4577_66955C.1
gtgggtcgttggcgagctcgggggggtcagggcccccgctgtcccctggggggggggggggggggccgccccctccacacaacaggcgccccgggggcaaaaagtggaaagcccggggggccaactaagggaccccactcccattaaaggggcggcccggacggcccgcgggaaaaccgggaaacccgctgcgccaacggaaagaccaaagcgcccttcgcggggggaaaagcggggggcgcctggggcgcccggggggccgcccttggccccggggaaacgggcaaccgctgctcgccctggacccgcgggccct

SEQ ID NO: 148497 - DNA, 464 bp, Zea mays
  unsure (1)..(464): unsure at all n locations
  Clone ID: MRT4577_66956C.1
tttttnggnacgagggaaagaaggcccgaaggtngaacaaatagaagntttggaggtgagaaacgttaggtgataggagagtagtggggttggaccaaggggtcgagaacgggagcgatagaatggcatagtggaggacggaaagcaccaaggtcgaggacgggtacgaggaggaggtggtcggcgtggacggcatcttgggtgtaggacttggccccagctcgccggagtgcggggagactgtgttgatcaccacccggagggtgattgggttcatggaagcggagaaggggaaggactacgcgggggactaaaaggacaactggattcacgctgtggggtgcgacctgaaggggaaccgggggtcgtgtatgtacggtgagagngaggtagacgggggtgcagaagaggagagtggtgaatgaagtgctggtgcggctgatgtaggggtatggagaggatgt

SEQ ID NO: 148498 - DNA, 390 bp, Zea mays
  Clone ID: MRT4577_66957C.1
ggaccgaaaaagggactgcattcacttgggcggggacaaagggggataacatcacatgaaccttaaactgttttgggacaggaccacgtgagacagggccctaatgcttagaagaagaagaagaaaatgaaacccatgtttgggattaaaaatttcggccaacggaatccaagttcaaccgttaaacaggcccgattagtccagtccagctgtctgtagacatcgaatcccaaggggccgaccaccaacaattgccacgccaccggcaccggtttttaacaggaacggggggagaatcccccaccggcgggggtccttgggcctcccatccttgccgtaaaacagttttttaaacgggtgtgcttgccagcgcccaattggtcatgatgc

SEQ ID NO: 148499 - DNA, 577 bp, Zea mays
  Clone ID: MRT4577_66958C.1
cagaatcaataagtgaaaatacttatcacatatacatgagaacaaatgtttaatttacacatgaacatgcattacacatatcaaaatattgctgcagggattaattcaaagttaagcgtagacgctagggggtagcaagaaagattttgtatcatcttcaacctctctctctgttcgctgcgcacagggatgttggggcacggctggcggcgtcgagccgagcaggggaggcttcggtcggcggtcagggaagtcgtcgggcggaggaggatcgacgggggcacgacgtcgacttcgggcggtcctccggcgtcgaacggcggctccggggcgcggcggcgacaagcttcgggctccggcgacggcaagcttcggtaggaagaggctaggggagtgggcgagctcgtgtggccgggaaccgctcgacgggggcatggccgagagctttatagagtgaggaagagggcagagggcgctggggagaggagaaggtcggccggcggcttcaaacgccatcaatggcgctgtccgccgagtgggagaagtgggggagagaggaagagggagaggctcggcg

SEQ ID NO: 148500 - DNA, 328 bp, Zea mays
  Clone ID: MRT4577_66959C.1
ctataagtacacaagttccagcacacaactatggatccttaccagcgcgggtcggggggtacattttaaggagttaaccagtgactcgatgttaccctggtacaactgcgtcagctggtagtgccctgttgctactgatatgttcacggttgtgctactttggccaccgggcgggcgatgacggctacgggtcgtggcagagcgcacactcaacgttgtacggtgtgcgcaacgcgtaacgcacgatgggccgcgcgtgcggctaagggaacatgttcagaacggggtacgggaccgacactgcaaatgctgagcacagcaccttgta

SEQ ID NO: 148501 - DNA, 536 bp, Zea mays
  Clone ID: MRT4577_6695C.1
agtcgtctgtctccaccgcgtctcctcctcctccacccccgacccggcgaccaaccccgcgatccggcgagcccgaagcgccagcgatggggttcgtggtgacctccgccatcttcttcctcgccggcttcatcgcctgcctcttctcgctcctctgctgcaaccgcggcgcctccaccaacatattccatttgactctggttattaccgctacagtttgttgttggatgatgtgggcaatcgtgtacctcgcccagatgaagcctttgatcaaccccatcctgagcggcgagtgagccctgccctgccctgccccggagacaacttaagatccactgttgatgtatcattattcggtcgagaacctccattcattttgttgccgccatgataactgaaataaagaacctgctgtgagattttgctactccgtccgtcctccggagaacacttccgaggaggcacgctgtgattagtgtatgcaaattgtattatatacacaacaataatgggatgattctgtttatccaccctac

SEQ ID NO: 148502 - DNA, 281 bp, Zea mays
  Clone ID: MRT4577_66960C.1
acaaaccatattgtttaaacttctgtttggtttaacaactgacttcaaagtggggcagggatattatttagagctgttggcacatcggaccaatatccactattccttaaagagatccctataccctcgttttggtagctataactttaatagttagggtaaatgctttcactaattctgaaccgatgctgtaacaacatatctctttagaattgttttggtttgagctaaaatctactattattcactatctggctgatataataatacttgccttgact

SEQ ID NO: 148503 - DNA, 907 bp, Zea mays
  Clone ID: MRT4577_66961C.1
aaaaaggcctcgcgggtcgcaaaccgctctctgttgatttgggatttgggaggcgctcgagttttcaggtaaaccatagtttagtgaccaatggctcgtactaagcaaactgctcgcaagtccactggagggaaggctcctaggaagcaacttgccaccaaggctgctcgtaagtctgcacccacaactgggggagtaaagaagcctcatcgttaccgccctggaactgttgctcttcggtgggtgacacatgattcttttgattgtttactgtttattacacttcaaataatatgacaattgttctccctgactttgcagtgaaatccgcaagtatcagaagagcactgacctgctcataaggaagcttccgttccagaggcttgtcagggagattgcccaggatttcaagactgatcttcgtttccagagccatgcggtgcttgcgctgcaggaggctgcggaggcgtacctggtgggtctattcgaggacactaatctgtgcgccatccatgccaagcgcgtgaccatcatgcccaaggacattcagctggctaggaggatccgtggtgaaagggcctagattctctgtttacggctactgggagtggctccgtagtgtatggtttgcatctgttcgatgcttgctttttgtggaagtttacgtttgtggggtgttcgaatttgtaatattcatccgtagtggattagttggtaggaagtgctgcgatcttactatgtttttagagtctataattgttgtcgattagtgttggtgctggttttgctcatcaacggattaactaaccttattggttatctgaacgacgaatttgatatgttaactcgtgaacttcgttatattgtgtcagcaacggttgcattttattgtgctgaagttttttgt

SEQ ID NO: 148504 - DNA, 3477 bp, Zea mays
  Clone ID: MRT4577_66962C.1
aattcggctcgagactggagttcacaactgttttcgctgtttctctctcccgtagcccagtttacctcgcctagggcgaccaccgccgccgccctacgccagctgcccaggtcttgggcggaccctttgccggcgacgagcacccaccacaccagatcaaactctagatattgccactctacgtcccagcatcctatgaccacatggtttagacagtgctgtccaggtggatgatgaattgtggtgcccaaacggaggcacgtggcacgcctcttgaagataggcactggttggaaacagattttgttggcgctccaagagttcatacttatgtactttcctttctcaaatcataacaaatcttaggcagttcaagcttagctgaatgtcaacttgcctccacgtgcaagatcccagaaacattgctatgtctcgtccgcttgattttgctgtgcttaaatacaaaaaccaaaagcttgcggaacaactggaagtccacaaatttgagttctgtgctcttgagagtagatttaatgatctaaaagagaaacaaaggacacataataagacacttgttctagtcaaaagttattgggagcgactcatagcagatctgggtatagtttctgtttgcaaaaatgaatcttcacgttcaagctgcagtacagggaacaacaatatacgaaaggactttttaaatggacttttggaggctggtgccacagaaagttcaggttctcccaattgccaactaggaaatgacgtctcttcagaacaatcaacaacaattgatattctgcagaagctattccttccatcaagtggtccatggcatgtgaataacgagtttgtttctgctgctctcatgaagttgccagaaaatgaacacagcaggcaattgcacaatgctaccagcgatgtgttatccaagcttcatgtggtgatgcgtacagtagataatcttcacttgaaacacaggcagttagcagcgaactatcaaaaacaaagagattcgagtgcctggaacagagctgaacagaaacgtctgaaagaggagttgactagtgttgttgccaagttggaaggaagcaaacaaaaactggcagtactgaaagcacagggagacaataaacaagcaacaccgatcctggttcctacgctgggaaacaaaaatatgactgcagaaaaggtgagagataaacaaacagaactgcaagatcttgaagctactcacaaggagttaatggaattgatttcaaagcgtctggaggaaattagaaggctgcatacagagagaattgaaattttgaacaagttagcaacttttcagaatatactaacggatttcaaaagcattcactcttccaaagcttttcaacttgtcaatgaccaacttcagaagtcacaagcagaactggatgatcaccaaacgttgttagagaaattacaggttgagatggatacctttgtttggcgagaaaggcaatttaatcaaaaagttgatttggctgaaatcccccagaaggtttctgcatactgtgtgtctagaattgctgaccttgaaaaggatgtccagaaactgtgtaatgaaaagaatatgcttgtgctgaaacttgaagaggcttcgagagaacctggtcggaaccaggttatctcagagtttaaagctctggtgtcatcactaccgagggaaatgggtgccgtgcaaagtgaactgtccaaacacaaggatgcttccttacagttgcattctttgcgagcagaagttcattcactttctagtatccaaaccagaaaggaacaagaaattgaagaaatgtcatttagatctgcccatgctggatctgatataagccaacttcaatctctggtccgtgagctgagggaaaatacacaggagcttaagctatttgtggagttgtataagcatgagtccactgattccagacagctgatggaatcgagagatagggaactcgctgaatgggctcgagttcacattctcaaatattctcttagtgaaagtaaattagagcaacgtgtaatttcagccaatgaagctgaagcaatctctcagcagaggttggcaactgctgaagctgagattgctgaattagggcagaagctagaaacttctaggagagatctagtgaaacaatctgatatactgaagtctaaacatgaagaatgtgaagcgtatgttgtggagatcgagagcattggccatgcctatgaagatataatgtcacaaaatcaacaattgctacagcagattattgaaagagatgatcataataccaagcttttcatggagggtgttaaatcaaaacagtcacacgatgctttgcatttggaggtgcgctcgttgcaaagaaatttgcagcatgcaagtactttgatggatttgtgcaaccagaaaactatccgcctagaggaccagctaagaggttggtcagagcggttgaggagactgtcagaggatggaatgcagcagtctatttcattgggcaattatcaaaaaaagctgtctggtatgcatggagaagctccaaagctcaggcagtcaatggatgttctacaagcgaaggctgggagcaatcggctggaaattgctgagctgcttatagaactagagaatgagaggtttggtaaaaagagactagaggatgatcttgatctaatgtcaagtaaagctaattctctaagagagaagacagataattcagcagttcttcagaaacttctccatgaggccaaggagtacaggggaatattgaagtgtggtatttgtcatgataggcagaaagaggttgtgattgccaaatgctaccatctcttctgcagtcagtgcatacagaagccacttgggagccgtcagaagaggtgtccatcttgtggactaagcttcggtgttaatgatgtgaaacctatctacatatgaaacagaaggttggcgcctgtgtcgcagcaccaaaacaaaactgcttggcgcttactaatttccggtatatggtaggcggccatggtaattcagtcggtgatgtagcataagattatgtagcatttaagttgctacatgtgattgctggtacccgctggcatatatgatgctggtgttacctcaagcgccttttgtaaagtctgcttgccttgcccaatctggtagaatagcctgacatcgtcaaccattagttccttttaggagaaaaaaatatccaacaaatgaggattgatgcttcctgcaatagtgagcaatgtacaatatatagctttagtcagtttcattgttgtagctgacagtaagaatgtagttttcttttctttttaatataccggttatccagtttgtatgtttctggagtttgccaattctgtttatcaaaaaaaggagatttagtcatttctaaccatttttttcttgtcacgatatccaaaattaccacattatatttaatatagaagatatagtttttcagt

SEQ ID NO: 148505 - DNA, 538 bp, Zea mays
  Clone ID: MRT4577_66963C.1
attggtacctcgaggcggcgggagtatcgttcactgctctcgcaccctcccttcggtctatctctggctattcgtgtcgcagtgttattgcctcctgcgtccaaagactgtcaaatcgacgtgaagatggaggtgcagggctatcctcatcacgttgggatcctcctgaggaacagcatctgactagttatgatgcgatcgtgcacatgtcaggcggtattgacgcctcgtttgggaatcatgtagctgcgtagattccacattcctgccataggacatatgtgacacagtaaaggctgcgtcttattccaccattgccactgaggggtactatacgactggggaggagatctgatgacacagtcgagtatcgataacagaatgaggaacttgaagcctatcacttcaaagtgcacccgtcatctgggaattaggctcccgacttttcatactatgttgaacaacatctctctagggatcgacagcggctaggatgttgttgtcagtgaccaatctgctatgaggataccgaagataa

SEQ ID NO: 148506 - DNA, 283 bp, Zea mays
  Clone ID: MRT4577_66964C.1
gttcttggcacagaagataatctcccagcgaaaaaatgggtatcccttgtcaggaggacactgaataagaatcctggttcatgctgttatggtggctatcgcacgccatctcctgtccctgatacagttgtagaacaagatgctgattttgagggatcgtcgagaaggctggacggtttatcctatttgtatcgtcggtcgttcacacttagccggagtttaagaagtgaagggaatcatatgctgtcacaccaaaggttggatcgtaggttcagtgtctgtg

SEQ ID NO: 148507 - DNA, 257 bp, Zea mays
  Clone ID: MRT4577_66965C.1
acccactcgtccgagccacctagcacccaatctgttttacctgatgccacatctctggtaggtacaagcctacaatctttgacagatgatgctataattactccgatacaaaatcgtctctgcttatatatctctgtgtcatactagcacttattatgttgcaactctatcgattaaatactatatttgatctaattgataattaccataatcacagatgcactcatataaagttgattttgtagacctaaatttta

SEQ ID NO: 148508 - DNA, 581 bp, Zea mays
  Clone ID: MRT4577_66966C.1
tttttttttttttttttaaactctaatacaataatttagaagtaccaatagttaatacatcatcgatgttttaaaataagtaaatcatagttttaatgcagcagaaatagctaatgaagataaccgagtagcatggcgaagcctaaccaagctactcatcctggtcctctcctgctgaggcagcatcccactcgaccgtccatcctggtggcagggtggttggccaagtcacaccataaatcatttcttgtaagagacctagaatccaacacaagttagtgtttgctagagggtactcgcttggtgagcatctccttttttggcgcttattcagttcatcctcaggcttgtccatcgaattcatcttgtggtcagctctacttcacgtctttcatttcgtatgatcaccatctcttggtccatgggaggagatggggaggggctgctgaattggaagaaggcaacaggggaaggcgtcggccatgggggcagatgctgctatgttggagaagaaaagggtacagggagagggagagtggcacggggagagagaatgaggagatggggctagtggcttctag

SEQ ID NO: 148509 - DNA, 479 bp, Zea mays
  Clone ID: MRT4577_66967C.1
tccgcccagcgttcgcccacccgtccggccagcgtacgcccccctttctctcttgcactgcttaatccggcgggacaaaaaaatggaacctttcttctgtatgttagctagacgcaagccctaacggatacagggaatatccttttggatgctataagttcatacaccgagcacatacagcatatgtcatatattatgaatatgactatctgcacccaaaaagcatcatatatgatgcaaagtcgccatctgactgctccgaaacaaatatgatcatatataatacccagtcgccatgtgaccgtgccaaaccttatgagacccgagccactcgccaatttggacgcaagaccatcaggccacacgttataagcggaaaatggccaatacggcagcagagctacatgcacagctctgtgagaaaaagagggcctagacagccgcacagcgataaaccacgctctgcaagccactggaac

SEQ ID NO: 148510 - DNA, 220 bp, Zea mays
  Clone ID: MRT4577_66968C.1
acctgggttttcttttttgtgttcgagattttaattatttttctttattagatacttgggcctcaaaaaggttgttaagaggttctaatctactgagatgggggacatagcttgaaatatgtgacgctttaatagagcagcaggtgatgtattttatgcggtgctgccatcatgacaggaattcttaggcgccgtatgtgtttgaccaccaactctagac

SEQ ID NO: 148511 - DNA, 659 bp, Zea mays
  Clone ID: MRT4577_66969C.1
tttgaattgagtgcaacaattcatggctttgttagtctgtgagatgcacttgcctcattgcctgggtgtaacgatgagatctgccatagtatatggaatggacattttacaatgtaactagtcttggcaacagcatccagcagactaatctctcttagtgtctgaagaacgatagccgaacgatgacagggtttgatttgttgttgcgtcgttttggttctcacccgagccagtttttgaagtgaaagcaataataatgttgttggtgcaccgctgaggtgtttaggttttactgctggtttggtgttgggtgatggttcctatcatctcactaaacaagattgttgactgtacatctgggagggaggtgatctgggatattgaggtgggtatcatcatgtgacggcgaggcacttggtgccaaatcgtactgaattttgttatctgggtctcagtctgctgcttttgtcccgcccgtattcgtttattcccgcaggggcaggggcaggaccctgttggctggccaggccacatatcctttttagtcccaagcaagttggagagccacacagtatatattatataaataatagtgagacatatttttttatgagattacttaaaggcaaaaaaaaaaaaaaaaaaaaaaaaaaaaaaaa

SEQ ID NO: 148512 - DNA, 206 bp, Zea mays
  Clone ID: MRT4577_6696C.1
attcagaggaaagacaagcacaaaagatggacagagaccaaaggccattggggacgacccaggatagggaggaagcactctatgtctatacaagtcgacagggacttgaacatgtggcggatcaggtaaacaacacggttgatgaaacctaactcgagggcataccacgaggcgagcttgaacaagtggatcttcagggcaatccg

SEQ ID NO: 148513 - DNA, 602 bp, Zea mays
  Clone ID: MRT4577_66970C.1
gttgttgccatggtgtccttctacacagggatgattagatcttctgttacagggaactttgatctacgagctttgttggatgtggttcggttcttgtaagtaaattcttcagattagtttgaaggacctgtgttgtagtatttcgatatggtattaaatatgcaagcatatgtatcaattctgccagcactgattgtgaccacacattctgatattggattattctgtgcaaggttgttactatgtactagtaagaaagtggcttttccacttgtttatgatgatacatgtataatcactaacacaccttttgcatttctgcatcagaagtgtatattaatacacttgacgtggtctggttcctgaatatcaacttgtctcacttcaacttttaatagatcagttttacctttttattggcattcagaaaaatataggtgataatttagagagaacattcatacatatgcagtttccctctcttgatttacagcattatttcagtgcagttttgttaaccccttttttcctttagcgtgtcttcatttagtttcttattatgctcatccttttatttttgactatgaagcaggctttctgga

SEQ ID NO: 148514 - DNA, 510 bp, Zea mays
  Clone ID: MRT4577_66971C.1
gggggacgggagaggccgtctgccaccagtccaactaccgagtgggggaggaccgggaaaccggaggaggggatttctcggggagcggagggtcggccaggacctgattgggctccagggcgcgatctttgagcgcagatttggtgcccgcgatctgccatggatttgatttaagattgcaagaacgggactgctaagcaagctaagatttcattttttttctggatcaatctcaaattaggatttaggaggaggaaataaagcaagaatagaaagttttttttttttgggtgaagccatgatgctggaagggaagtcctaccttgtgccgcgctccctgctgagctcctgcgagacagagacgtagtgggcgtacctcgcccacgaggtcctcggcggcgagcgcccgacgccagaagacgtcgaggtcgaagacctggacgaagctgacggcgacggcaagcgcagcaagccgacgtctccgtgtattagtgtattactattgtacat

SEQ ID NO: 148515 - DNA, 594 bp, Zea mays
  Clone ID: MRT4577_66972C.1
cgggtaaagccgcctgccagcaggccaactaccgagtgggggaggaccgggaaaccggaggaggggatttctcggggagcggagggtcggccaggacctgattgggctccagggcgcgatctttgagcgcagatttggtgcccgcgatctgccatggatttgatttaagatttagggagatcggtcgtgttcgcgtcgcgctgcgagattcgattttttatgcctgttttattcacgagattgcaagaacgggactgctaagcaagctaaggtttcatatttttctggatcaatttcaaattaggatttaggaggaggaaataaagcaagaatagaaagcttttttttggggtgaagccatgatgctggaagggaagtcctaccttgttccgcgctccctgctgagctcctgcgagacggagacgcagtgggcgtacctcgctcacgaggtcctcggcggcaagcgcccggcgccggaagacgtcgaggtcgaagacctggacgaagctgacggcggcggcaagcgcagcaagccgccgtctccgcagccgcacacgccggacatctccgagggtcgcggctccagccgccatg

SEQ ID NO: 148516 - DNA, 605 bp, Zea mays
  Clone ID: MRT4577_66973C.1
gtctgctccaggccactaccgagtgggggaggaccgggaaaccggaggaggggatttctcggggagcggagggtcggccaggacctgattgggctccagggcgcgatctttgagcgcagatttggtgcccgcgatctgccatggatttgatttaagatttagggagatcggtcgtgttcgcgtcgcgctgcgagattcgattttttatgtctgttttattcacgagattgcaagaacgggactgctaagcaagctaagatttcattttttttctggatcaatctcaaattaggatttaggaggaggaaataaagcaaggatagaaagtttttttttttgggtgaagccatgatgctggaagggaagtcctaccttgttccgcgctctctgctgagctcctgcgagacggagacgcagtgggcgtacctcgcccacgaggtcctcggcggcaagcgcccggcgccggaagacgtcgaggtcgaagacctggacgaagctgacggcgccggcaagcgcagcaagccgccgtctccgcagccgcacacgccggacatctcctagggtcgcggctccagccaccatgcctccagatgcgaatatcatca

SEQ ID NO: 148517 - DNA, 268 bp, Zea mays
  unsure (1)..(268): unsure at all n locations
  Clone ID: MRT4577_66974C.1
acgagccggccgnggacacacacacacacacacacacactcaacagcaacagctaagcctctcccacaagacagcaacatggctgaggaggaggccaagaaggtggaggtggaggtcaccaaggagcccgaggcggctcctccggcgcctctttccgatgactccggctccatcgcgaggacaccactttctgtgcttatgttgttggccaagaaaatgctccttgcaattttgttttttccattaatgttgtcgacttttctttttt

SEQ ID NO: 148518 - DNA, 800 bp, Zea mays
  unsure (1)..(800): unsure at all n locations
  Clone ID: MRT4577_66975C.1
cagacggacgcacacaatgcgaaagggagagagagagagagagagggagagagagagagagggaggaagggggcanaccagagcaggagagagaaattcgaggggaataaaaagggaaagaaataaagtgagggaggggagagtcccatttccccaagtacgagagagagagagagagagagcagaggagcacgctacgctacgtgaggggagagaagagagagggaggtcgagggagggaggcagcaggggttgcagcagaggccagaagcattagaagcggcagtcgtaaccaagtggcatcagtagatagagccagccatctatctatccatctatctagctctacaggtataaatcctcacgcatcggtaggagggcgagaggggggccgacgggggacgggagaggccgcctgccagcaggccaactaccgagtgggggaggaccgggaaaccggaggaggggatttctcggggagcggagggtcggccaggacctgattgggctccagggcgcgatctttgagcgcagatttggtgcccgcgatctgccatggatttgatttaagattgcaagaacgggactgctaagcaagctaaggtttcatatttttctggatcaatttcaaattaggatttaggaggaggaaataaagcaagaatagaaagctttttttggggtgaagccatgatgctggaagggaagtcctaccttgttccgcgctccctgctgagctcctgcgagacggagacgcagtgggcgtacctcgctcacgaggtcctcggcggcaagcgccc

SEQ ID NO: 148519 - DNA, 127 bp, Zea mays
  Clone ID: MRT4577_66976C.1
aacgtaatagggatcctatagggggacctaaattcaaatcactgggccgaaaattacaagggtcaagaccgggagaagccctggcgtttcccaacttaaggcggcgggcagcaacaggcccctttag

SEQ ID NO: 148520 - DNA, 362 bp, Zea mays
  unsure (1)..(362): unsure at all n locations
  Clone ID: MRT4577_66977C.1
gggtcgcccgggtttttccgggaatttccctccggggcccccgggggtcccctttgtccctcttgtgaggggggggggggcttaggggcataaaggtccacgggggggcctgggggaaagcgttctccccctcacatcttcccaaccttaagcgtcagaggcaaaaacggggaggcccaaggagcaaaataactgaaataaaaaacattaagcggacggcccccactgcccccgggaaacccgaaaaaacagcggcgccaacgaatttaacaaatcccgcaaagaggcgggggaggggtttggcgccatgggggcgcgggtggtntcctgtttgaccgggaaaaggggaaagacccgaaacc

SEQ ID NO: 148521 - DNA, 221 bp, Zea mays
  unsure (1)..(221): unsure at all n locations
  Clone ID: MRT4577_66978C.1
tcgaggggccggccgggcccgggatctacaaattacacaagcatcaatcagccttcagctcaaaattcattccatactccacactcgactgctagctaccaatctcncaggcatcacatagttcggacggatcaagcagttgtactgcctccaccaacgcagagaaagatcatggcgggtgcggcgaaggcgtcttggatggtggcgatgagcgtgggcgc

SEQ ID NO: 148522 - DNA, 2523 bp, Zea mays
  Clone ID: MRT4577_66979C.1
caggcgtccgggcaaatgtacctcagttgatcttagtgggaacctgttttcaggggaaggccgggtattgcgttcctgggatgggattgttgaggtcattgacttgagctcaaacaaactggtgggaagctacccaaatgatgtctcccagtttcagaacctagtgtccctcaaactacgaaacaattcattgtcaggatctctcccttcggtgttgggcacctatcagaagttatctgtccttgatctgagtcagaacgcaatcgagggatctgtgttacctaccttcttcatgtcaccaactttgactgtgttaaatctttctggaaataaattttctggaactattccatttcagagcacccattcaacggaatcgatacttctttcatctcaatcggctctcaggattgtggatctgtccagcaattcattggctggaccattgccaccagatatctctaatctgcaaaaacttgagttccttattcttatgatgaatgaattatctggggagattcccagtgagataagcaagcttcaagcactggagtatcttgacttatcacataaccacctcacaggcagaattccggatatgcctcaaaatggcctgaaggtgttcaatgtatcttacaataatctagaaggaactgttcctaaaagtgttgaaaagtttcctttatcttgcttccgacctggaaatgacatgttagttttcccagatggccttcctgctggaaatgatgattacaccggagttgatcagggccaaacatctcatggacataaggctggtgttcgagttgctcttattattggctgcattggagctgtcttgctagttatctccatagccctagcattctatttggtaaggtctcaagagctttgcggaagaaatggatttagaggtcaaattactatcagggatctaaaggggagaataagccctccaaatctgttcaaggtcccccaaagacaactgttataccaagtaaaacaagcttctcaaatgaccatctcttaagagccgcaactagatcgatgtctgcccagaaagagttattggctgaagcctctgttgaatatggctacactgatccaaaggaagttgccgagtccacaagtttaggtgtgaccgagacttcttctgcaatccaggctcaggagtcttctccacggtctgcattgccaacatcgccacattttgctgattctagattccttgaggaacctgttgcttttgaagtatactctccagaccggctggctggagaattgatcttcatggacagcactttggttttcacagctgaggatctgtcacgtgcaccggcggaagttcttggaaggagcagccatggaacaacgtataaagctgttctacaaagcgggcatgtcctaacagtgaaatggctgcgtgtcggtcttgtgaagcataaaaaggagttcacaaaggagataaagaggattggcactatcaggcatccaaatatagttccatggagagccttctattggggccctaaggagcaagagaggttaattatttctgactatgtcaatggtgatagcttggcactctacctttatgagtcgactccaagaagatactcccgcctgtctgtttcgcagcgtctcaggacgccaatcagatactccacctagctgcgctagttacaccagcagaggggcttgccacacggcaacctgaagcccactaacatattcctgactggtcctggtctctctccaaagctggtggattacggcctgcacaggttcatgactccaagcggcaccgccgagcagatactgaacctaggagcgctagggtaccgagccccagagctggcgaacgcgggcaagccggcacccacgttcaaggcggacgtgtacgcgttcggggtgatggtcatggagatgctgacgcggaggagcgccggggacatcatctcaggccagtccggcgcggtcgacctgaccgactgggtccagatgtgcagcagggaagggcggggcaccgactgcttcgaccgagacatcgccggcctggaagagtccccgaggatcatggacgagctgctggcggtctcgcttaggtgcatcctccctgtaaatgagaggcctagcatgaagacggtctgcgatgacctgtgctccataacagcgtgagtgagtttccccctcccccaatgtacatgtaaccgatcaattttccgcccgttggtcccgattttttctctatcccgtgggggttccagagccttgtagacagggcttgtttgatttgtaactgctagtgtaaagaggattcgatccacccattgattgattgatatcagccattgccgtcaaaaaaaaaaaaaaaaaaaaaaaaaaaaaaaaaactacgagggggagtcgactccacccagatactcccgcctgtcggtttcgcagcgtctcaggatcgccatcgacctagctcgctgcctccagttcctacaccacgagaagggcctgcctcacggcaacctg

SEQ ID NO: 148523 - DNA, 268 bp, Zea mays
  Clone ID: MRT4577_6697C.1
acacactgcaagtggtttatgcttattttaacttttacactttatcagacaacaggcggggggatcttgctgaaactcacccaaaaacaggccaggccaacggactggaccatcttgctggttacacacaaaaaatagggccggacaacaaacagatacgtacccccgggacccacacttgcatattgcatgaataaacacccaccgtactggcagacccccttggtgggtaatgtgtacctgaacacccccactagtgctcccccta

SEQ ID NO: 148524 - DNA, 629 bp, Zea mays
  Clone ID: MRT4577_66980C.1
gcctgcacaggttcatgactccaagtggcgccgccgagcagatactgaacttaggagcgctagggtaccgagcaccggagctggcgaacgcggggaaggcggcaccgacgttcaaggcggacgtgtacgcgttcggggtggtggtcatggagatgctgacgcggaggagcgcgggagacatcatctcggggcagtccggcgcggtcgacctgaccgactgggtccagatgtgcagcagtgaagggcggggagccgactgcttcgaccgcgacatcgccggcctggaagagcgccccggggtgatggaggagctgctggcggtctcgctcaggtgcatcctccctgtaaatgagaggcctaacatgaagacagtctgcgatgacctgtgctccatcataacagcgtgagtttagtttcccctcttccttgccttgccttgccccagtgtacatgtaaccgatcggttttcccgtccgttggttggtccctattttttctttctttctcccggtgggttttccggagcccgtgtagccagggtgggttcgtttgattggtaactgctagtgtaaagaggattcgattcgatccacccccattgattgattgatatcccaaccattgccgtc

SEQ ID NO: 148525 - DNA, 393 bp, Zea mays
  Clone ID: MRT4577_66981C.1
ggggcggaacttcccgggggcagagccagggcgctgtcaactgtagcaaggctgcgcccatctacaagtcgctagaaatctagcagcggtggccgttttgggcgacagcatgaagtaggcacttgcccaagttctgggctgacaaggagggacgtgtagtggatcgctatgctccaaccactggacccctgagcatggaggtgaactttcagcgctgcagatcacatttgctatgcgagcttaactagcgagctatcatgctttcattttaacatctgctctatcatccctgcagaaggatatcaagaagctgctcgggagctcttaatgagtgtgtggctgcacagcctgagaaaaacatgtatgaacaatgccctgagcgataaattatat

SEQ ID NO: 148526 - DNA, 181 bp, Zea mays
  Clone ID: MRT4577_66982C.1
aagacgacgaatgcacgcgcgcgcgaactcaaaattcggattcaggtcgaggcctatatcctatctcccctcgtcacggcacaaatggggggttcccaaactcgtttttttcccctctttatcaacggctttcccacttgcgcctttatataacccttccttctcacctccttattaaggc

SEQ ID NO: 148527 - DNA, 213 bp, Zea mays
  Clone ID: MRT4577_66983C.1
cggacgcgtggagccaaatggcacttcctggtagctgctgattttctatcgacaagatcagaggtaaactgtatggggttgtttgttggtttttagttgagactgcttatttctgagaatggtgtggttatattcctttaatgatggcaatttcttcttctatagcagctcagacctcaggcaagggaggtacaatgccaagagcaaatgaga

SEQ ID NO: 148528 - DNA, 339 bp, Zea mays
  Clone ID: MRT4577_66984C.1
tatagccacctcatgagactcacaggcgggttttcttaataccgaccagagcaatgcctactttaagccttttcacgttaatttcatatgacaacgctctcttccaagacttactacacggccacgataatgcttattaaccaagacaaaaactagtacaatacacccaaatacaaatttcttgtgccatttaccaacaacgacatcacaactcaaatcatctctactaatataacaagtcatattcttcttgcttctgcttactcgcattaatttccacgatattatctttaaacttgtcttaccaactatgcaacttactactacactggccttctc

SEQ ID NO: 148529 - DNA, 992 bp, Zea mays
  Clone ID: MRT4577_66985C.1
acctgtcatgctagtcatctgggaaagcattgcggaaggataaaccttcacaagatgtagaagggacctcggttaaagaatcaaaaccatcagctggtgaagatgattcgtcaaaaatatgttataaatgcaaaaaggctggacatctttctcgcgattgcccagaaagcacatctgaggtggaccgaaatgatggcagtattagtagaagcagagacgatacgggtaccaatactgctcctgctggtggcaacagtcctatggacgaagacgatgttcaagaaattggtgatgaagagaaagaaaagttgattgacttggactacttaactggaaacccactaccaaatgatattttgctatatgctgtacctgtgtgtgccccttacaacgcattgcagacatacaaatatcgtgtaaagattaccccaggcactgcaaagaaagggaaagctgcaaaaaccgcgatgagcttgttcctgcacacacctgatgctaccaaccgtgagaaggagctcatgaaggcatgcacagaccctgagctggtggctgcaatcgtcgggaatgccaagatcacagcgcctggcctcactcaactgaagcagaaacagaagcagaaggggaagaagtctgcaaaacagaactagtgtgaaactggtgggtccaaagaactgatccatccccgattcgcaggaagtgaagctttgcctttgcagaaagtctgtggatgttgtggtttgtcagttgtcgctcgaggcgcatttgggggtatatgcagcctgtcagggagtacacccctttggcgtcacactggtgaggccagagcgacaggcacgcagtaggggacccaagctgcacgtctatgatgcaattgcgatatacagctcataataaaagaagtattgatttcatatgcaaaaaaaaaaaaaaaaaacccccctgtgataccctggaaagaattccgacatacatttcatgtgcaattcccactt

SEQ ID NO: 148530 - DNA, 335 bp, Zea mays
  Clone ID: MRT4577_66986C.1
acattattctctctcatatatgatttaccattaactgcatggatcggtcgccaggggcgagcgtccgattcttcgtcaccgttgtctacatcataactttcactgtcaccactatcttcacgacagtccttccacaatctaattcttgatttttgtcgtcttcgtctaccacatccttataaaaaatactaagttcttctcttcatcaatactcaccttcatctcagcagcatacttcttagcagcttcacacatcttcgcaagctctaaaaaactgttttcaaatactaaccttcaaatctaaaagcttatcaaaacacagtgcacaatagcta

SEQ ID NO: 148531 - DNA, 374 bp, Zea mays
  Clone ID: MRT4577_66987C.1
tctcgatttcaccttcactttcaccagctcagagtgagccccagcagcagtagacctcttaggctccacagtaattaccaacattagctggattctttcaattattaggcatggggttcttttctactgagcaggtgcagcaatctcagcctgcccaacgacagtgattcaactgagtctatttgcacttatgggcttataggcagtaccttgcattaactttgtgctttaaacaatattcataactgagttttgtgcctaaaacgttgtctgttccttgaagcttaggtacttttaatgacatctgattataaagattgttaaattgcacgcacttagtagaactataccttctttttcgagtacttaaactt

SEQ ID NO: 148532 - DNA, 700 bp, Zea mays
  unsure (1)..(700): unsure at all n locations
  Clone ID: MRT4577_66988C.1
attcctcctcgacccgccacctccgactccatccttcatacccacgacaaccgataaacctctccatcctccacctcgtcaccttgggagctaccatcaaggcactggctgaccgccaccccattattgtacatggagctgctgattgggagcaccggccaccattcttggtaacgtgaaacttccagccgcctgtaaaattggaccctgatcccagtcgctcctacatgtgccgtcaagaagcacgccgtgatggacaaccctgccaagctgattgatgttaataacgcctaccgtgctaaatgaggaacacactcgtcatgacgagaccttgtatcacacttacttcatacgacactgctcgaactacaccatttgagagcggccatccaaagtctattgctcttcttttgtatcactagtaatgaccatgtacctcactaccgaatacttgctctctcctgtgtgctatgggttgtgcattgaacttagaagcctatgggtgattatgctcattctcagctgagggcgccatgcctgcaatactgctatatctctcatgatcgtatggacaaatctgtgatgagacgtggttggaattagtcacctctccttatgaactatctctgtactactattgtatcgagaatatcgattatctgatctgaatgcaactcttgttggtttgttntgagaaaaa

SEQ ID NO: 148533 - DNA, 168 bp, Zea mays
  Clone ID: MRT4577_66989C.1
cacaaaataatcatgtttttcatgttaaatgattctaatcaataaattagattggggattgacatcaaccctagggtaatactccagatgctatacttggcacttgcacaggcttttaatgtttacaacctaaattatgaattattttttaagaaaccgtttgaaaaa

SEQ ID NO: 148534 - DNA, 492 bp, Zea mays
  Clone ID: MRT4577_6698C.1
tcgcttacttttgtgtgttgttagaattaaatctgattaaattagaatgccatagctatagttttaatgtgatatcgacatttagtattttcgtactagatttgcgatgtcttgttataggtgtttaatattcttcaagtagccgtatctaaattgtaatatttatactggcactcataaatgtgcatcgtgcatcccatgaggtacgttaattgatcacgtgaggcggaatacgagccaagtcgaccccaagatgatgtaaagggtggactactccgcatggtgatgctgggggacaaacttgaggatgggcagacagagcaagtattagaataaaggctgatcgccaagtggacatcatctaacaaacactaacctagtgttattccaggcaagccccggtgcattatccctttccttgtgttttaaaatctttatcaccttatatgatgcattaggtgataggagttgtgtgctaaacagtgatgcatt

SEQ ID NO: 148535 - DNA, 192 bp, Zea mays
  Clone ID: MRT4577_66990C.1
gccgtgctggttgcctttcccgctctcggagggagatggatgctgcccccgctctcaccgccacatccgttttgaagcggtcccacctacccggtgtccactgcgctgggctgacgacgacaggggaggggggcgaactagacgcgagggggtgaagaaattaaagccatgaactcttagtggggaataaag

SEQ ID NO: 148536 - DNA, 1023 bp, Zea mays
  Clone ID: MRT4577_66991C.1
ttttttttttttttttttttcttttttttttttttttaaatttttttttaacaaaggttctctgccattgggagatccaacacttttgggaaaaatttagccctcgaaggtgaagctggcaccgagcttgtgggtagcctggtcgagcttttgggtgtcgaaagagccaccgagacccaaggtgacgccctttcggaggaggacgttgtaggcaagggcagcaataccacggtcgttgatcttgaccttggtgaaagaaacagggtcgatgcggtacttgctggcaacctcaaggccgacagcgttaccggtcttggagttccaggtagccttggcaccagcctcgacctgtgagttgaccttgtggtagtaagaggcagcgaaaacgctgaggttatcaaaggcggtgatggcagcgctgtactgaggagcagcgtagccaacagcagcactgtaggcggtcagagcagccttgttagcatcataaccagcggaggcaccagccaggaaaccctcgtggccaacaacagcgtcgacgttggcaacagggcccttcaggagatcgaaaaaggcacggccgtggaaaccgggttgcttaaagtggaggttgaacttggctcccttagcggcggtagcagggaggaagttgaagagaccctcaagcttgagtcccttggcgagggagtcggcgacctcgatcttggtgtcgagagcattggcggtgttccaggtctgggtaagggtcaggccggtaggcttgtcggtgtattttccctcaatagcagcagaggtggccttctcatggctggacttgccagtgaccttgaaggcaacgccattgggggcggtgtccttgaactcgaaggtggtggcagagaggtggtagaaatccttgttgaggagatcgttggccggcttggcaatgtcggagaaggcggggacagacatgattgcggtgtttggtatcttgaagattatgagtctttaaagaagggatgtgatgaagatgaagatcccggccgg

SEQ ID NO: 148537 - DNA, 727 bp, Zea mays
  Clone ID: MRT4577_66992C.1
cctcgagtttttttttttttttttttttttttttttttttttttttttttttttttttttttttttttttttttttttttttttttttttttttttttttgggaaaaaaacggagggccctggggggaacccaagggccgcacccaaagtttccccccaaaccccgttggggaaccctggccccccaaatccttttggaaaaacccaaaacccctccccagttaaaggggggggcccttgttttttttgttaaaaaccacaaacgggggccggggggaaaaaaaaagggagtttttttttatgggccccccacgggaacccaggggtgggggcaaaaaaatttggcccctgtttaaacccccctttttttaaaaaaaaaaccggccttaaaaatcccttttggaggtttgggaaaaaaaaaggaagccccagttaaaaaaaagccttttaaatttttcttggaaagggatttttttcgaacaaaaaaaaccccattttttttggaggaacaaaaccggtttttccccaaaggggcaccccttttccccctttgaaaaaagggggccccccccctgggaaaaacgccctctcaagggaacccggggaagggccccttccttggccaaaattccggaacagggccttaaaaaaatccccccttttatacctgggaaaacccgggcgggggtaaacaagggggggaaaccgccccttccccccaattttt

SEQ ID NO: 148538 - DNA, 247 bp, Zea mays
  Clone ID: MRT4577_66993C.1
gggggaaggcggtccctccctccccccgggcgttgggcttgtgcgttcccggtgttcaccccccgggttccgtcggggccttgcgggtggcctcttgctcttttcacctttgttcctcccgctgtcttgaggtcctgttccttgttttcccttgggggggtgggtcggcgcggaccatcagggctctcttgctgctgcctctcgagctggctgcccttgctgtggcctccttgggtcggctcgtttt

SEQ ID NO: 148539 - DNA, 185 bp, Zea mays
  unsure (1)..(185): unsure at all n locations
  Clone ID: MRT4577_66994C.1
gtaccgggccgacatacgcgtccgcccacgcgtccggtactgcacactgccatcgctctcgtcccttcgctgccgctctatctcggccggagccatgggcggcggtggcgcggcnctgatnttggtgatgtgggctggcttgttgtaacaaacatgataacatttattcatatcaagcctttgtt

SEQ ID NO: 148540 - DNA, 460 bp, Zea mays
  Clone ID: MRT4577_66995C.1
cctccacgcgttcgaaatgcttttccactcgtgcttgtgagtgaaatttttgggatgagattgggtgcacctgccgggggaaatggggggggggccccctaaaagggtttgggccctcccaaaaggatactttgggatgcccacggaaaacaattttgttttaggaacagtgtttagctgggtttgggctaaggatttccttatttttaaacccggctttcccgggggttttatttatttggttaaaaaaggcaatggttggtgattacccttcccagccttatgaccggggggaagggcccgtttttccggcctattccccaaattgggacaaacggaggctaaaagaacttggatgccctttcctccaaaaaaggacggggcttcaggcccaggggtgggtttttgtaatgggaaaccctttgatggggtttggggacgaaaatttaaaccccttggg

SEQ ID NO: 148541 - DNA, 417 bp, Zea mays
  Clone ID: MRT4577_66996C.1
tgtacttgtatgttgttagatgagaagattatgacacatctactgttggagtctttaagcaacaaaagtgccttatacgatgatgtcaaggttttctgcaatctcctcttttccagggagattcaatgggcagacagatgacggaagtggaaacaacaagtcagatcaccatgttagtggaaacaacaagtcagatcaccatgttatgtttggagggaatttattccagtcggtatcttgctctggttctggccatgaacagcctcgccacgccatctggttccatcagccctttccttattggatgagcaggctcgttcgctttcagaggtgacagcaggtttgctcctgtgaccctttccagaatatcatgactcgcggattgagatctcgtgatggttcatggttgcgagtact

SEQ ID NO: 148542 - DNA, 263 bp, Zea mays
  Clone ID: MRT4577_66997C.1
aaaatatcttgaatcaaaagtacatttaatatacctaacctgccaaacatcatagtttagtctcgactaccttaaatgtgctcggttgcattacattagactacaggtgggcaaaatcatctagcatcatagtgcactgtagagtattagttgtttacccttctgatcagtggctgactgggaactgaggctcactgatgctgcctagcagtgcaagagagtatcatactgcatatctctagcccaggaaaagatcaaagttc

SEQ ID NO: 148543 - DNA, 913 bp, Zea mays
  Clone ID: MRT4577_66998C.1
ggaccctcgaggccggccgggctctctctctctctctctcaacaagcttggattcctgacagtgcaagcaaagcaaagcaagcagagccgaagcttggagtatttctcttgcttcatcccctctcttatttacacaacacatctgagagccatacagcaagctctctccccattggccatatctagctcgtagtctacactgcctctaaaccttgacatttcctttgtattcccctttccaatttgcagtagtttgtaggtagaccgcaaggtggttttttcttgcagcaatggcggccaaggtttgacaaggcatgacgtcctgattaagccccctcgcggcagccacaagatttgttgcagcgtgagacaggagctgcggctgcggaggaagtgagcaaaagcatggatctttccggcacgcagggcgagctgccgatggcaacaatgcacgccggcgggtcgccgtacctggggctgcaccacgggcacccacagcagcacaaccatggcgcgaacggccggcacatgtcgccgccggatgtggtggcggaggaggccaagaaccggcagctggcggtggtgcccgtgggcacaggaggcggaggcggggcaggggtgaggtaccgcgagtgcctgaagaaccacgcggctgccatcggcgggagcgcgacggacgggtgcggcgagttcatgcccgcgggcgaggaggggtcgctggacgcgctccggtgctcggcgtgcgggtgccaccgcacttccaccgcaaggagccgccgggcggcgacgggcggcaactgtacgggcaccaccaccaccatccccacccgatgagcccgctggccgcggtgcacccccaccaccaccaccgggggctgctggtggcggcgctgcccccggcgccgacgcgcat

SEQ ID NO: 148544 - DNA, 486 bp, Zea mays
  Clone ID: MRT4577_66999C.1
attcggctcgagcgaggctccaacaatctatcatatgaagaaacatcctgatggaccatgggaccttgtgggcacagatattgtctgtagaaacatgggcctgcaggccctgtaccaagtgccagttgctctgagtgtcgattttgacggacaaaggattctgcatctgctacaacgaggagccgctctgatgctcagaacataacaaataccgtcatgtactacacatgtggatttggtcacatctgcaatgaggacaatgcacgaacgccctctgcacaagaaggtatgtaaaggggtgacaaagaatcacctgttcatgggaatcatcggtgtagcgacagcatttcacatactgataattcagcccctggggatgttcttcaaagtactgaggctaggctggagactatggttggttccaggtgctatcggccttgtgagtcgtcccctggctgatgtgggtaaatttattcctgtgcccgg

SEQ ID NO: 148545 - DNA, 436 bp, Zea mays
  Clone ID: MRT4577_6699C.1
ctgaccgggtccttttagcgttccccgtttccctagtggggggtgttttttaggttggggtaaccaacggcaaaaatggttcctgggggaaaatgggaacccctcacaaatccacccaacaaaccaaacggaaggaaaaaaaggaaaagcaggggggcccaaagaatgagcaaaatcaaaataaaaggggtgaactcacaggccccttaacaaaaaaaaaaacaggcgggccgaggaaaataaagaaaaagcccccgccccgggaaaggccggaaacaaaaaaaaaggcaaggggggtttgcccctcaccagctggaaaaaaaaaaactggatgccccttaccacccgggcccgaaacaggaggaaaaaagggggcaagctgggttgcccccgcaggagaaaaacctttctgatgggggggaaagggggtataaaa

SEQ ID NO: 148546 - DNA, 368 bp, Zea mays
  Clone ID: MRT4577_669C.1
atatgtataggtttaaaggatatgatagcggaccaattaatatatggttacagcagacgcaatcggatcaaccaacatgcatgtagacacacgtacatgagcacaaagactgactccaaacatgcagagagagatagcaaactgaagaactctgtttctttctttcttacacacacaccacacaatacctatgtttggcagccagctcggtctcggttattattgttcaaccaccaccacaagctagatagataataatcatatccatggtcggcgatcgatcgtgatcagcatttgcaggggttggacttgcagccgttaccggagctgcaggcgtgggcggtcttattgggacttcgtccgggtct

SEQ ID NO: 148547 - DNA, 647 bp, Zea mays
  Clone ID: MRT4577_67000C.1
tgcgaaatcatgtgaatctttagccacaaaatctgtggagatatgctcactagtatatccaagttttccagttgagcaatccacacccacacataaaagaatagtacggcatttgatggatacttataaactcagcccatcccaaactctccatttccaggcccccaatccaaccatttacgtacaatacatacaaaaacaacgtccccgtctccaaaatgagagaaagatccccaaaaatgcacagctcagtccacctggaccctacttggaaggaccgagcccatgaaccctggggtctcccggctcccgccgccgggccccaatccaagcactagcaccttccccttccccttccccttcccgccatttttgaccgttgctaccgccacagccggttcaagcacctccaccgtccacctctcaagctcctcctcaagaaactgtccagacgccgccgcgagcgcctgcaccgccgcctcctccacacgcgcccctccttggccgatggccctggcgagccttgcgcggatggaggccgtggcgtcgccgccgccttccctgtcgagggtgaccacgcgggccgccgtcagggcaccgaggatgccgctcgagccgccttcgtcggttatgtcgctggggacggc

SEQ ID NO: 148548 - DNA, 1117 bp, Zea mays
  Clone ID: MRT4577_67001C.1
attgttccggcttccagagggagccgggagattactgtgacctagctgcccctttcctcgcgcctctctcctctcacgcgcggtgaacacggcgacccgccgctgtgcatcgcgccccaaaccccggccaccaatcacccaccactacaacctgcgatcaatccgggaatcagccccgattcctaccactacgagtatacggtgatatctgctcctaataactttgttatttttaagacatggtgcctattttctgatttaagccaaattacttggcacacagccacacactgttcagtcaatgtgctagcataaagaccaaattctgtagttaattatgccactagttcacctttcaaacttacagttttagagttatttatcacctataattactgtgaggatttatctattggttgatttcttggattaagcaagatttgattttctcctgggtttcatcttcattggagtactgtgttttacattagggataaggagcccgctctactggtggctcatattgggtctcagcttaaacatactgtaacttggttcggagtaaaagacatggttgttttaaacttttaattaggaatgattttaatatattaagggtagatgtcaaaatttataggaaaattcaattgtgctttctgatgttggaaaaatgatttccccccactttgcagagagaggtctgccggctcgtgccttgttcaaatggtgatctgagagggttccgggatttcataagctatctggtacagaaagaatgcgctggcgtgattaggattcctgctgtgaaggcgatgtggacgagaatactgttcatccttcctcccacatctgatgcatgtggcatggtaggaatcccccctcttccagctgacaccatgattgttgtaactttgcccaaggaaacaaccgtcgaagcatcataacaattttgtgtgctacatgtatgtatgttagctttgtcggtgtaagctttttgtggagctttgtactccatagcagtcatgtaaaaactgtgcataattgttggctactatacggtgttagcattattatacagtaggtcagctcagttcttctgtcaaaacacacacacacc

SEQ ID NO: 148549 - DNA, 157 bp, Zea mays
  Clone ID: MRT4577_67002C.1
ccgtctcgtccgcacagtcctcgctcttctctgccttgccagaccgccttggtgccttgcgacaaaccgtcaggcgcgcggtgcaaaccgggtggtcggtgctgtgcctggtgctcgggcgttctgtggcggtttcgtcgacgacgaacaggctggg

SEQ ID NO: 148550 - DNA, 403 bp, Zea mays
  Clone ID: MRT4577_67003C.1
cccacgcgtccgcccacgcgtccgcccacgcgtccgggaccacctctcctaatattggagttcgtttaggggatacagtcctcttcgctggcgatttcttctctcacactacaaggaggggaactctacgagctcgcgctcgttgcctgccatcccacttcctctctccacctcgtctttggaagtctccaaagcgattgtgcagtctggcaggacaacctggaggattcttcgccgaacgagttttccgagcgcggagggtgcgcatcgatccacagcgtgacctctcctacccgatctggttctttggatctcaaactactcagtctccgccactgcgccacaccaccgcgtcgcagcaatgccgtcgccgcgacgaaagctgaaggcggcctcgtacgag

SEQ ID NO: 148551 - DNA, 1623 bp, Zea mays
  Clone ID: MRT4577_67004C.1
cgatgagcttggctgcttctccaaggttggctgcgcgctcaaaccgtcttcaacagttgcctcttggaccacctctcctaatattgtagttcgtttaggggatacagtcctcttcgctggcgatttcttctctcacactacaaggaggggaactctacgagctcgcgctcgttgcctgccatcccacttcctctctccacctcgtctttggaagtctccaaagcgattgtgcagtctggcaggacaacctggaggattcttcgccgaacgagttttccgagcgcggaggtcagtaccacgttcatcatcgtcaccgccgttcttcactttcctccggtgattcgttctcactcgtcgacggaagggtgcgcatcgatccacagcgtgacctctcctacccgatctggttctttggatctcaaactactcaggtacgaatgtacgattgggttgctttgtacttcgtgttcctttgtcccgggcaaatccgttgaagaactacaacgattttggcttgattcggttggaatctagttgatatgtgtgtagggattacagatcagtgtgttaggttcgcacgattcatcgattaggccacaatagttgacatagtgtatgtttattccatggcaacgatacaaatattagttagggttagggactgtgtgcaccttcagttcgtaaacatatgaagcaaagtatgtcaaactgttgtaaattggtttacaatgttttcgtacatttactgaacctcgaatgtaaatctagatagtcatatgtcacttaaccatgcattgagctaacaaacaactttatttatgcagtttgaaaccttagtagatgtcgtcttcaactaattgtggttctatattcttttgctcttatattctttgttgcgaattcatttcattattcttgtacccatggttcttgtttggtgacacatgtaacaattacatagtttatcgaaaacataatacaaactgggtgaatgcattaaacccttttgcctgtcaatttatctagtatgaaatgattcggaatcattgcactgcttttgggtgatgagcattaccttatcaatgctctacttgctatccaacaagaagtcgaggtgatggagcaggataggtctactagtgacgctgagatggaggggaccgaggaagaactgaaagctattggagcccgtcgacataaaatcttttagcaccccttcctcccatgaattgtaagagcctagtgacgctgactcatacgactcggttaggcctactaggtataacatttggaacctgtaactagtataacatttggaacctgtaaggaagcctgttgttgtctctatgtggaagtcttcgtccaaataaagaggagaagctgctgcttccgtggcgtgatccgagagaacggggcgagatagcgcaatgggagggaattagagctagagttatgtgagagcgagccagagcgatggaggtagagtagggatggggagacttggaccacagattgattacaaagaaatgtatatattaaaaaagtgttggcgaacgatgatggtgtaaaaggctaccaaattgccttataattactatttatgttgagtatagaatattaagc

SEQ ID NO: 148552 - DNA, 203 bp, Zea mays
  Clone ID: MRT4577_67005C.1
gttatttatgatataaggcacgcgaaatgaataaatgatgttagggatggcggacatattttagagcgtaacaaacatttaggtcagtaaaagttaagataagactatctaaatgtaaaatccaaaatgataacaagatcaatggccgaagtactaatgatgctataaagaatttactgtacaggggaaagataatacatcat

SEQ ID NO: 148553 - DNA, 654 bp, Zea mays
  unsure (1)..(654): unsure at all n locations
  Clone ID: MRT4577_67006C.1
attataaccgctggcaggcagtctcatgcgattagcgcggcggcagggcaggcatggagaaggaggcggcggcggagctggagatccccggtgagtgccagtacgcgggggatccagtgttggtgcgaccgagccagccgacgccgcgccacaccctgcacctctccaacctcgacgaccagcggttcctccgtttctccatcaagtacctgtacgtgttcggcgccgacgccgccgtgcccgccgacgcgctgcgggcggcgctcggcagggtgctcgccgactactacccgctcgccggccggctccggccgagcgccgaggaggatgggaagctcgtcgtggactgcaatgccgagggcgccctcttcgccgagggccgcctcccgggcctcgccgccgccgacttcctcagcggcagcgaccggccgcacaagtcctggaggaagctgcactacagggtggaggcgcagagcttcgtcgccgtgccacctctcgtcgtccaggtcacttggctcgcgtgcggcggcatggtcctctgcaccgccatcaaccactgcctctgcgacggcatcggcaccgcgcagttcctccacgcctgggcgcgcgccgcgcgcggcggcggncgcgacgcaccggacgccggcggcgacg

SEQ ID NO: 148554 - DNA, 394 bp, Zea mays
  Clone ID: MRT4577_67007C.1
ttctgcagcagatagggtgccggccccgacacgaaccaccgagggcactcgacccttccccactgcgatcaaatcgatggccccctccttccatcaagagtatgaggagccacaacagccccaatgacgaggagcccaaggaggcaacaggagctgcccagggagacgcagaccatccgccacatgatcaaggaagactgaggctacaacgtccatctgtcttcctaacgataactccaacatactatcacatgcaaccacgaactgcgaccaacccctacaagccgccgacagccgaagccgtcaccgctaaggacgactccgattatgagggtgccgaccttccgacaagagtacccgccgactccatcttctgcctcaataagtgtaacgc

SEQ ID NO: 148555 - DNA, 360 bp, Zea mays
  Clone ID: MRT4577_67008C.1
gttacatccatgggggatatccacggctgacacaaactttataaaacagttgacatgggttttcgctgtgggcacgtacatcagcacactgatgctctgacgctcatacacagactagaccccgatgcggaccttcaggttgggttgtgccccccggacgcgggattttaggtccctcacgaagcagtgtacggatggaaacaaactccggatggtgtgatctgataaaaccgtacagaagtggtggcctagtggaaagtgctaaactagtcggataccccattagacgcccgatcgggggctaacagtgaaacaacccggatagctgctactaatcagggggacgtcccgcatcagtaa

SEQ ID NO: 148556 - DNA, 428 bp, Zea mays
  Clone ID: MRT4577_67009C.1
gcgcgcttcgtcggatgaaacgcattgtcggtttcgacgtaacgatgccggtggataagaccttacaggtcaagaagaaactggacaacaagatgcgccggaaccgtcctatactgtactgaatccatgtgcgcacggacaacaccatcacgtacaacgccaagggcaggcactggcgccgaaccaagctcggattctgtgcgcgcggatcgggcggttcctgcgttgggagtctaggggctctaccttcgcttgggttatatagatgtctgttgcgtttctgtagagctagcagacggatccagaaagctgatgttaagattccgatgacagctgagacgattgatgctactatgctgtactcaggattgcatgctggatggcgatgctaaagttaaagaaacgtctgtatcttactttaaaagaaa

SEQ ID NO: 148557 - DNA, 392 bp, Zea mays
  Clone ID: MRT4577_6700C.1
tcgcgatctagaggccgcccttttttttttttgttttttttttttttttttttttttttttttttttttttttttttttttttttttttttttttttttttttttgggaaaatttcggggaatggaccgttggggttatgataaatcggaagtggcctgggaaaaattaagctcgggaaacccaaaaatttaaacgggaaatttaatccaaatttttccaatggttttcacaagctttacaagtttgaaactggaagggctacttaggcttgcccccaaaatacgggatgtagtccgccccgttgtccccgtaccagccttttgggatctcgacctcgttgtacgggggcgacctcgtttcgccgccggggccgtaaaaatctttggcgggg

SEQ ID NO: 148558 - DNA, 579 bp, Zea mays
  Clone ID: MRT4577_67010C.1
gggggatggcctgccgagcattgctcaagggggacaaggtggccaacgtgctccgggatgggggacggcaggtacacgcatcacgcacgtggacctggacatgatcaacaagcagcggatatctgcgccaacagcgttgcggcgaacacgaatgaccctcgagtcgctcacgttagcaacgccgcgccatcgtaaccggctccgacggcggagggacgctcaagtgccacggcggactacatacaatatgagcggatgggcgaacaaaatatgccacttaatcgctgccatggatgttcctggcaaagatggcacaagtccgctacccgactgctacgatgatcataccagctcaatccaacgaggacagcaacacgctgggctagaacatcccgcccaagcgcgcattgggagaactgcgcaggctgggggccgtgctgaccggtcagaacggctctgtcatgatggaccgctcctatgcatagagagcgccaacgcactaaatgacagcaagatgtggaacatgctaacacatgaatatccgatccggcggtaccatatgagacgggcatgacgttc

SEQ ID NO: 148559 - DNA, 2089 bp, Zea mays
  Clone ID: MRT4577_67011C.1
ccacgcgttcgcgtacgcgtgggcggacgcgtggggcaagcagaatcagagcacctgccggccgggagtttgttgccgtctctctctctcctcttgacgcaactcctctcctatcttctctctctccatcgctccctcctccgcgccgcgttggcaccgaaccctcctgtcatggcaaggccgccgaaggaggcgattgataccttcatcagcatcacgggggcggacgaggccgtcgccgtacgcaaactcgaggaacatggtggtgatcttaatcgagcaataaattcacatttcaatgatggagacagcatattgaacggaatcagtcaaaacgccatgcctgctagtcgtgatgatatgatggacctggatggaccacttgataatacatttcaaagatctttgttgccagagagtttccgtgccccttttgctctaatggatccaaatttccaggaccaattttttgacagagttggctccactgatggtgtcattcgtgaaccgctagtttcacatccaagagaggtgagggagatacctatcgaagttaaggatggtgatcctcaaacaggttcatctggccaggatgttactggaaatgagtcttcaaatggccctgaagtccctgaaactatcataattgatgatgtggacggtggattgttatctgcaccatctgttccacatcctattattcctagcaatacatctactgtgccaactgctcctccattggttcatgttaatgactatgatgaggacatagaagaggaaatgattcgggcagcaattgaagcttcaaagaaggattctgaaggactggcaaatatagtcgagcaaggaggccagcatcaagaggaagtgaatttgagggaccattcttctgataaagcaggcatggaaaccgcaaatggaatagttgagaggcaaggactagcttcagaaaaggctggaacatctaggcaaccaatagatgacgagagcttccaggaggaggctgaagatgtagaagaacagccgttagttaggcgtcgttctcggcgtgccccttctgaggacaatgaattaccaaaaatagtgcacccaggtgctagccctgttctgaacaatcaccagtatagtggagatgatttcccatctgagtggggtggcatttcttctgaggaacatgatgaagctgttatgcttgaggctgcaatgtttggcggagtttttggaggaccaatgcatcctttctctatgccttctcacagaacctctacttattatcccccaataactcattctccatcaccagcattagctgaacagcggttattacgagagcagcaggacgatgagtaccttgcgtcgctacaagctgatcaagaaaaggagttaaaggccttacaggatgctgagctccgtcgccttgaagaaacaactacgagagaagctgttcttgagaaacagaagcaagaggaggaggaaaggcgtaaaaaacaacttgaggaagaggagctagagtccagtctcacttcgaagcaagcatcattaccaccggaaccgtctccagacgcagagggtgctgtgacagttgtagtccgaatgcctgatggcagtcgacaggggcgtcgctttctcaaaactgataaacttcagttcctatttgatttcttagacattgggaggatttgcaagccagggacctacagattggtgaggacatacccgaggcgcacgtttacgagcagtgagggggacgtatcgttcagtgatcttggcttaacaagcaagcaggaagccctatttctagaacagatcacagagtagaggataagtgtttaggcagcatggttatagacaccacagctggagccggagaattttttttacattttatacttgcagcttttgctagtaaaaactcggtctgtgaaaatggttgggttggtcgaagaaaggcgtcacgttacctatacaatgtggacagctacgcatggccgttcattcgcacgagtctcagagtggctctgtacatactgtcggttctgtgaatcaaagcaatgttgcgtatatataaaaaaaaaaaaaaaaagcggcc

SEQ ID NO: 148560 - DNA, 674 bp, Zea mays
  Clone ID: MRT4577_67012C.1
gtgaaccgctagtttcacatccaagagaggtgagggagatacctatcgaagttaaggatggtgatcctcaaacaggttcatctggccaggatgttactggaaatgagtcttcaaatggccctgaagtccctgaaactatcataattgatgatgtggacggtggattgttatctgcaccatctgttccacatcctattattcctagcaatacatctactgtgccaactgctcctccattggttcatgttaatgactatgatgaggacatagaagaggaaatgattcgggcagcaattgaagcttcaaagaaggattctgaaggactggcaaatatagtcgagcaaggaggccagcatcaagaggaagtgaatttgagggaccattcttctgataaagcaggcatggaaaccgcaaatggaatagttgagaggtgaatgttaactttactacccacctcttcactcaggctaccctactacagtatcatttgattccttatacatgcaatttccttttggaggcaaggactagcttcagaaaaggctggaacatctaggcaaccaatagatgacgagagcttccaggaggaggctgaagatgtagaagaacagccgttagttaggcgtcgttctcggcgtgccccttctgaggacaatgaattaccaaaaatagtg

SEQ ID NO: 148561 - DNA, 610 bp, Zea mays
  Clone ID: MRT4577_67013C.1
gctcggggcatcgtggtgcaggtgagggacgggaatttggagcgggcgctgtcgatcatggagcgcaggatgcggtccagcggcatggagcgcctcatccgggcgcgcacccattaccacgtcaaggactcggagaagcgcgtgctcgcgcgtaaggggcttatgcaacgcgtccgttcccaggagctcggcaagaagctccgcgagatcctcatcaagaagatcaggggccagtgagggcatcaacgcattggccgtttaccggtagcatttgtgtgtgggtgcttcgttttgagcgcgtaacaatgctgggtactttcatcgatggttctgtggcgcagcctgagaataactcaacctaccttgagcaaaaaggcttttgctatattgcatggaggacagattgatggtaaaactattgtttttttattgtacaacttagtatatatatggatttaattactgtttgtgcttgacttgtgtgcatgcaaatgctgtctgagcaatgtgtggcaatgcttcaacggatgaaaacggaaaaacttgtttactgagacatgttttacacaagtgacgtttacaagagtttccaatcctggcctcttgtctc

SEQ ID NO: 148562 - DNA, 434 bp, Zea mays
  Clone ID: MRT4577_67014C.1
ttcagtttgttgccgtctctctctcctcttgacgcaactcctctcctatcttctctctctccatcgctccctcctccgcgccgcgttggcaccgaaccctcctgtcatggcaaggccgccgaaggaggcgattgataccttcatcagcatcacgggggcggacgaggccgtcgccgtacgcaaactcgagcggatggagttggggttttggtgtgatgcgacgagatgtcatcgggatcaggtgcaccagatttgcatgccagccttattaacccacatggctttttgaatcgtggagtcattagcaattgctggaattggtgtgcagttacggaatggattttggaacatggtggtgatcttaatcaagcaataaattcacatttcaatgatggagacagcatattgaacggaatcagtcaaaacgccatgcc

SEQ ID NO: 148563 - DNA, 326 bp, Zea mays
  Clone ID: MRT4577_67015C.1
gttatgtgattggtttgttaactggttgcaagaagcaggtggtctcgaaaaccgcaactgggtaaaaaagaaccaagggagtacaaagaaacaaagaagaaccgatatttctctacaaagcgtttgggcggaccccccttgagattgaagacatctgccgaaacgtccaccgctcagaccccgcctggaagaaatactggggaaggacttgaaccccggtggggcttatccaagcgggtacatccgcgaagacccctgccctgttccggacaacctggtgccctacgtgcaggaaggctctcatgggaggataccccacctgaagg

SEQ ID NO: 148564 - DNA, 720 bp, Zea mays
  Clone ID: MRT4577_67016C.1
gtaccttgcatcgctacaagctgatcaaaaaaagaagtaaaggccctacaggaggctgagctccgtcgccttgaagaaacagctgcgagagaagctgttcttgagaaacagaagcaagaggaggaggaaaggcgtaaaaaacaacttgaggaagaggagctagagtccagtctcacttcgaagcaagcatcattaccaccggaaccgtctccagacgcagagggtgctgtgacagttgtagtccgaatgcctgatggtagtcgacaggggcgccgctttctcaaaactgataaacttcagttcctatttgatttcttagacattgggaggacttgcaagccagggacctacagattggtgaggacatacccaaggcgcacgtttaccaacagcgagggtgacgtatcattcagtgatcttggcctaacaagcaagcaggaagccctgtttctagagcagatcacggggtagaggataatcgttaggcatggcatggttagagatacctaccacagctgggcaggagaattttacacactatacttgcaccatttcgccagtgaaaactcggtctgtcaaattggttggattggtcgaagaaaggttaaaaattcttttgtggcgccatgtgtcgtgacgcattgcgctttgcatgctttacgttattatatatatgcgtgatactttatacctaaaaaaaaaaaaaaggcccctagggcc

SEQ ID NO: 148565 - DNA, 278 bp, Zea mays
  unsure (1)..(278): unsure at all n locations
  Clone ID: MRT4577_67017C.1
gggtgaacacacagnanatactcccgtgaaacgctgantngnagctaatnataatatngggatcagtcaagcaaaggnagagctcgncctcccgtcatggnangcccatgcaagngcggctccgaatcgantggtcntaagttcttcctgcaggatctttgagatnncgccgggtnccaancagatggtctccttcctgcgggangacgggtanagccgcttncanaacaaccnaannccaagggccaggcgttagggtgtcgtngtggagggngggg

SEQ ID NO: 148566 - DNA, 365 bp, Zea mays
  unsure (1)..(365): unsure at all n locations
  Clone ID: MRT4577_67018C.1
cggcatggcatgcannaaacnaaagcgccacgggcgaactttttcttttttagttacacccaacacaccaacgcgccccgcctccccactctacgccacagaacggaacctacaagcggaacacgccggcaccgatcacggccacccgaccggacacacagggacggccgaacacacagcacaggacataaacgtaacccatctcaaaaggcaagcacgggaaacaatcgacgccgcaagatggaaagaagagaacgagggatgaccccatgaaccgaccgtccagaaagacaagcccacatgcttggaatggaataatatccgtcttaaaaaacaaaacaaaaaaaaaaaaaaataaccaaaaa

SEQ ID NO: 148567 - DNA, 516 bp, Zea mays
  Clone ID: MRT4577_67019C.1
cttggctgccgtttcggattgtggtcatgtaattcatctcagatcggtcggaagaagagcagttcaatctcggttcatcagaagtgaaactgcttagatcagatttcgtggattccttcacttcaaagtttgcatgtatgtaagttgtgtccggaattcaatttgagctgctgctgtctgtctcctttcagtaattcagttagacaatccagattttgtttccccagatctatgttaaaaagagacttcttcaagtgatttatttagtgctcacggatctgcaagccccagtatttggtttgcttaaggtcatatcggtttcttgttagtttcttggagttttttccacgttgcagtttggttggattaggattaaatcaaatcttctagtcaattgctacacatttttttatcaagattcgaacaagcaacttatttctctctttatttcttcttcctttgagttcctgttttgcctttccagtgtgatacatgattagatctatgttcattttt

SEQ ID NO: 148568 - DNA, 456 bp, Zea mays
  Clone ID: MRT4577_6701C.1
ggaaaaacatacacatcacttcagtttattcggcctacacacaggaaatgggccttcctgaccaggacttgccaaaaaattacatgcatgaacaggtactacaggctatcggggggctttgggaggaatatgaatcttttttttgggggggctatatgcttcttccgaataaagttaaagacccactttccacatttttttttggcctgaacaatacaaaaaataccctactccgggaaaaagggttaaattaaggggttggttcttgggcaaagacaatgggccggaaacgcttttttaaaaaatactccggagccttatttggacaccatgtacatataatatgcggaaagggccaaaaaaaacttgttgggcgggggggggccaatcgaaattaaggatggtttaaaacaaaaccggacggtaaatgcatgcttgccctgcttatttaaattt

SEQ ID NO: 148569 - DNA, 262 bp, Zea mays
  Clone ID: MRT4577_67020C.1
cccagccccaaccacaaacccggggaaaaggagaaaattcatattaatgttaatgttaaaggacattaaaacaaatggaccctactaaaaaggcatcaaaggaaactcccgaacccggcaaccaacgtcaaacgttgggaaaaggcccacaaacccaaacccggggggggagcccccacccaagaaggatgaccaccagcccccccccgacggcccccggccggtttttgaaggggccccttgccagcggaaaccccccccc

SEQ ID NO: 148570 - DNA, 580 bp, Zea mays
  Clone ID: MRT4577_67021C.1
ccggccgggccgggtagtcaggaattatctccaggtacccgactacctttataattcataattctatgactacgtctgattccaacaacagtggtgacccgctggaaggcatgggagccttttttgcgaaagacgtgcaacggcttaaccttgtgaccaacgagaatcgcgcacatgtgacacgtctgaacacctccggggactccttctggactcggaacaacggtcacctctactggcaaacgccggatagctgggacgtagggctctcgaccactacgagtgcactttatctgcgggccgtcacctatctattctgccatcaaaaagattcgtgtgccacaagcgaccttccccttccatgaccgacatgccatgtccctatacgagcagctgctaatggttacacatgtccatcaagaacatgcgctcgaagatggattcgcttgtgatcgaaacttacatacgtaaccactgcaagaagggctggatgatccgagccatctactgagtgacagcgagtccgagctgggcttattggagattgccatcgatctacggcacgaagacccttccgctg

SEQ ID NO: 148571 - DNA, 723 bp, Zea mays
  unsure (1)..(723): unsure at all n locations
  Clone ID: MRT4577_67022C.1
gggattccatccaaacaaacaaaagatatttcacggatatcacatatatacatcacagacatatatatccaacacaaacattaatatacaaacataagttcagaagttctcaacacaaacagtatcaacacaagttcagaagtatcaacacaagttcagaagtatgaacacataagtctaaagctctgacataagtattcaacataagttttgtagtctaaacactaaactcattgaggtgggcggttggactggtgctacattgggctgggcgaaccatgagggttgttggatgccgccctagattggccctgcatagagaagagattgcatgtgttataccagatgcattaccaacatctaactacaattttgatactcacaggagtatggaacacagcggggtcaactgcagggaacaatggaggtggcggagcgaaaccctgtgtggcgccaaggctctgcatgtactggaacatctctgtcatcctctaatgatctgcctcgtgagccacccgctccaccatcatcctcgcctccatctcttctagttgggtccgtaatattacaagccaacgttatagtaactcanagagaaggtatataactcaagtaaggacgagttacagaagcactaacctcgagttgntgtatgcgatgctgtaagctgtcgtgccgagatcgtatggctagactcgagcccgtgctccttgctcgcacctg

SEQ ID NO: 148572 - DNA, 668 bp, Zea mays
  unsure (1)..(668): unsure at all n locations
  Clone ID: MRT4577_67023C.1
cccgggtcgactgggtgctngaataggtgccgnccatgggtgccggctggtgcccaccgggcatgctcggcatcggcatcggcggcaccgcagagaaagccgcggtcatggccaaggaagtgttgatggagtccatcgacatccacgagctgaagaagcgtggcccgtccaaccgcatcgaagaaatgcgcctggagctgttcgagaaggtcaaccaactgggcatcggtgcccagggcctgggtggtttgaccaccgtgctcgacgtgaaaatcatggattacccgacgcacgcggcgtccctgccggtgtgcatgatccccaactgcgccgccacccgccacgcgcacttcgtgctcgacggctccggcccggcatcgctggaagcgccaccgttggacgcctacccggaaatcgtctgggaagccggtccgtcggcccgtcgcgtcaacctcgacaccctgaccccggaagacgtgcagagctggaagccgggcgaaaccgtcctgctcaacggcaagatgctcaccggccgcgacgccgcgcacaagcgcatggtggaaatgctcaacaagggtgaaaccttgccggtggacctcaaggtcgctttatctactacgtcggcccggttgatccggtgcgtgaagaagtggtcgggccggcccgtc

SEQ ID NO: 148573 - DNA, 697 bp, Zea mays
  unsure (1)..(697): unsure at all n locations
  Clone ID: MRT4577_67024C.1
ccggccgggccgggaagaccgtacgctacccactttatccatctcctctaattatagcctaggcgtcgagccgtgccgttccctagaggtgctccctcccccgccgctgcagatactactcgacgggccctacaataacacggaggctaaacgaaaggcgcgatgactgaactgctgaagctcctccacaagtcacagctgtgggcgatggggacgctgttgcggaacaccgcggagatcatgatgagacaagccattacgacggagacggagcgcattgagagcttcaatacggcgagatactgctacacgaggacgatgaaactcctcgacgattccatttatgacaccatcgcgttcaacgagcactcatgtaatgaggaccctctccacccgatacatggacgactacttctgctacgggctatcttcgtgcttggagaacgtgcgctcactgctgcttgcacctgtatgccatagacgatatgacatatctatacaactctctcagagaactcgaatgcgacacgtttgccttcgatcatgcatctcacactgaaagcgtgcggtgctcggtacaacgtgtggcagctctgtcacaaccagagagactgtctaccagcgagattactaacatactgactgacaggngtacattcttcacattgctcatgatgacgactcatcacaggctgag

SEQ ID NO: 148574 - DNA, 547 bp, Zea mays
  Clone ID: MRT4577_67025C.1
aagaacacataatttattattcacctcaatatctcacattatttgacgagaatagataagtcataaccatatacattgaaatctgatcattcaccatgtttgcagaagcatgtgaattaggctacatcagcaaacctaatttatactgacaacagtctatatgtataaacaacatagtcatctcaggttaattcatcgtcctagctacctagaaaaaatattcagcaacctagagtctttgcgccaatcaattgaacaggcatctaagcaaaaagctctcgagtctagaaaacttgctcaacaaagtgtgcctcagacaatcatgaacgggataaaaggtgatagaatggatgttgacccaatgtcagttgaagcatttgatgatcaaccatctgttccaaaacgcttgaagacgcatcatccatcacctagtggcctagagaatgatatgtctgtagtctccaattatcatgtaaactcaggctttgcattgcaggaaacacagcctgagcagcttgaccacaataacaagacatcatatctgaaa

SEQ ID NO: 148575 - DNA, 773 bp, Zea mays
  Clone ID: MRT4577_67026C.1
cggggacacgtacttccaccacccacttcagcaggatgccaggatcactcccactcggcggctccccctttgccccgtgaggccgaggccgtgactcggcgacggagaagacaaaccatgacgcctcccggccaactgctccccttgtcccggctgcctcccggcctctccagccgccgccgccgcagccgctgcccgcctcccgctcatgcccaagccagagtgtcgcttctgcatccatgggcccaccgcctccatggccgcttcatgccttctcctcatctgttccggtctccagcctgcccccctcgtgctccaacgcctccagggctttcggccgccgcaggaggcgaggctcaggcggctgcggtggcggagttcgtgacgtcggagagggtcaaggtggcggcgatgctggggctagccctcgcgctctgcaacgccgaccgcgtcgtcatgtccgtcgccatcgtccctctctcgcaggcgtacgggtggaccccgtcattcgccggcgtcgtgcagtcatcctttctttggggatatctgatgtcgccgataattggtggagcacttgttgattactacggtggaaaacgagtcatggcttacggtgtagcattatggtccttggctacgttcctgtctccatgggcagctggtcgatctatctggttgtttctctttaccagagtcctgctgggtattgcagaaggagtggcactcccaagcatgaacaacatggtgttgagggtggttcctcgcacagagag

SEQ ID NO: 148576 - DNA, 219 bp, Zea mays
  unsure (1)..(219): unsure at all n locations
  Clone ID: MRT4577_67027C.1
aaacgtcaagcatggattattttaactaaaacnggancacgnnnggggacatgnnccgaacaagttacatgncggatannacngcnaaaancaacccagggcactccaagagnaaaancngcaggacgcagaaaacaganncacaggacnngagcagacaaaaaagcacangcancccgcccggaaaggagggcaccacaggngcacggaaaanggcac

SEQ ID NO: 148577 - DNA, 749 bp, Zea mays
  unsure (1)..(749): unsure at all n locations
  Clone ID: MRT4577_67028C.1
cccacgcgtccgggcaaaatcccccaccagatcccggcgcccccaccacacagcgctcgcgcctccctgcttcccaattcccgtctgcccggccgcggagcggagctgctcctgccccccgtcgccacgccacgatggcggagtgccgcagcctcatcgagttcctccgcgcgttcgagcaccaccgcagggcggccgacagctccgcctccgcgggcgcgtgctcccgatccaggcgggcgtccgccgccggtggctccttctgcgacaacaccccgatggccgtgatcgacgcggtcatgctcctcgccgtcgtcatcgcgatcggcttcctcctgatcccgtacctcaagctgctcctcctcgagatgggcgcgatgctccaccccgccgcgtcctgcctcccggccgccgccttcttcggggccgcggtcgccgtcgctgcggtggtcgtcgcgtgggagctgctgggccaccacgctcgcaagtgcggcaagcccaggtgcagggggctcaagaaggccgtcgagttcgacatccagcttgagactgaggagtgcgtgcgcggtcgccccggccccacggcgcgatcggcgctgcttgcggcggcgggggcgcgtcctgtggagctaggcgacgagcagcgggagttggaggccgagctgcgaaagatggcgccgcccacgggcgtaccgtttttattttcccgaaccccttggggtgccccaagggccnnattggaggttggg

SEQ ID NO: 148578 - DNA, 367 bp, Zea mays
  Clone ID: MRT4577_67029C.1
atagtgagttgaattatagcttggcgaaatcagggtcataggggattcctgggggaaaatgggagggggggaaggggcacacaagagacgagcgggaagcataaaggggaaaggcggggggggcgaaagagggagagaagggacaggaaggggggggagcagacggaccggtaaacaggggggaaaccgggcgagccagggggaggaaggaaggggccaaggcgcggggagaggggggggggggggggggggccagggggggggagggggggaggagggagacgggggagaggggggggcgcgacagcgggcggggcggggagaggtgcagcgagcggaccacgctggggggccccagggggccaaa

SEQ ID NO: 148579 - DNA, 222 bp, Zea mays
  unsure (1)..(222): unsure at all n locations
  Clone ID: MRT4577_6702C.1
ctgactcgagtccaggcccctccaacttcagctcgtggtctctcggaccaacagggacgacggttagtcctctcctgttgaggcaactctaacggctgaggccgatggtgagcgacaggaagaccagtgcgatgctgacggatatgttatagatagtcagtctactcaacataatgatnttgatgaccttattgccaaaaacaaaaaagatgttgagaatat

SEQ ID NO: 148580 - DNA, 391 bp, Zea mays
  Clone ID: MRT4577_67030C.1
ccagcatcttcgcggcgtaaccgcttggccagtccagtgtccgcagcaaagcgctaaacccagacccaaaaccctccgccacgatggcgcgctccgccgcgtccaggctagcgcgcgcagcccgcgcggttgtggtcgccaccaaacgccgccagggccccggcgttagccgcgaggtactcccgcggtccctcgcgccgctcgcgggtgatgcctccgccttcggcgccaccacggggaggccggcgtggtttgccgcgcctttggggcggtttcccgtcggggccggcggagctgggctccaggtgccgccgcgccggctgttccactctactacgcccgctcagtacagcgccgccggcacctcgtcctcgtctcagaaaaaaaaaaa

SEQ ID NO: 148581 - DNA, 325 bp, Zea mays
  Clone ID: MRT4577_67031C.1
cactttgtgttttttttttttttttattttttttcttttttttttttatgagttttttgcgttgccgttcttcatgtttttcgattcatagaactacttgaatggcactaggatgtgccaatgataaccaagtccatatgaacacatgctgtttttttattttgagaaaacattgctaccatcagttggttgaatagtgctgcttacttcagctatgatccacttggcttgcaattcaagatgtttgcaacatggcggtcatagaatgtggtttaatcaaaaccaaatttgggggcggctctacggggatagaaggcaaaaacaa

SEQ ID NO: 148582 - DNA, 232 bp, Zea mays
  Clone ID: MRT4577_67032C.1
actactagcacgcagttccaggcgcagagcttcggggccaagagcaagctagctcttgccgtctatacctgctcaaagagcgaggaccgatcgccagcactcgctcccgatgccggacgcctattctcaagcccccacaaccgtaaactcgccttttgcataactgctccaactatagcccataaagaactggtacctgttgccggaccttcgctactcggtctacttcttg

SEQ ID NO: 148583 - DNA, 597 bp, Zea mays
  Clone ID: MRT4577_67033C.1
accccccctttttttaaacccaattttttttttgggggtaacccaaccaagggggcccaaaaaaaatttccttggtttccccccttggtaaaatcctcccggttaaaagggaaccccctttgccggggggcaaaaaacaaaaattttttaaacaaaaaaaatgggggaaaccaattaccggggggggaaagggggcattttattttgggaggttttttgggggggcccccctttatttttttttggaaaatatttggcccggggcccaaactttttggttgggggctttaaattttgcccctccccaaaaagggggggggccctttcgttgaattgggaaaacaaacaagggcttttctttttttggggcggccccccaaaaaaacggaaaaaaccggttcccggttgtttaaaaacaaaaaaaggttccccaattggaaaaaacccccccccggggcccttcttttggaaaaaatttcggctccaaaaaaattggcaaagtgggaaaaatggcaaacacttgggacctggaccgggcggcacaaatgggaaaattaacccgggggggggggggggaggaggggcccccctttaaaa

SEQ ID NO: 148584 - DNA, 619 bp, Zea mays
  Clone ID: MRT4577_67034C.1
ctcgagttttttttttttttttttttttttttttttttttttttttttttttttttttttttttttttttttttttttttttttaaaacgaaaacgaaactttgggtggaacggaggcgagagttttcaacagcccaagttaaaattcccccataaaaaggtaggagggggggcctatccttggacaactttgaaccacagggggcaaaaaggggttatagggtaaccccaaaaggcccgggggcctgaaaattcaggaaaaaaacgcagggggcatactcggtgggggcccagggaacatgcctaggcgattttcacaaaaaaaaaaaacaattttgggaaacaaaagcaggggtaaaaccccatcgccccggggggcccccaaaaagggaacggggcaaaaagcttgtacccaaagtacaggaggcccgacccccccttagggatcggcagcttagggaaaaaataaaacccggcatacaggaagagggaaattggtgatgaccctgaagtcaaaaaggacccccccccccccgggggggcctccctggccggggggaaatagcccacgccgatggggatccccccccagggggcggggggggtaatgaccccccgg

SEQ ID NO: 148585 - DNA, 370 bp, Zea mays
  Clone ID: MRT4577_67035C.1
cccacgacgtccgcccacgcgtccgcaaagttaataatttacctgagacagaaaagccgtcgctgggtctgaggaggcggcgttgctccctggacattaatgttcttaacgccatggtatccatatacgggaaaaataagatggttaagaaggtggaggaggtcctttcactcatgatggagaattctatcaaccacagtgctgcaacctataatagtttgatgcatatgtattctcgtttaggcgattgtgaaaagtgtgaatcaatcctcactgagatcaagtcaagtggcatgcgccctgatagatactcttataacactgtgatatatgcatatggaagaaaaggacagatgaaagaagcctcaag

SEQ ID NO: 148586 - DNA, 261 bp, Zea mays
  Clone ID: MRT4577_67036C.1
ggtgatcatcagggccatcccgttcaagagcaggtcttaagctgccgcgggtgtgctgagacatgtggggaatgtattgtctgcccacgcctagtttctctgctgaatcttccatctctcttcccttgcaacaaacacgatggaagaaaaaaaaacatacacacagctcggtacaggagtacacgaagttctgggttcagataacagagcagtgcccacgcgtcacgtccacggtcgcccacgcgtccgcggacgcgtgag

SEQ ID NO: 148587 - DNA, 308 bp, Zea mays
  Clone ID: MRT4577_67037C.1
cgcttacacaccagattgcgcgagcactggagtgggacactttcatagcaagccacgtttgtgcctgcagaaaaaacaatagcgtggcaagattgaggcgaggcacctgcatctggatggggactccagggaatcgattgactaggggaccaggctactaccactagtacgggggggggcttgaaccggtcgagggatgagagaggggagtaacaccacccaaggggccagcagcaccatccgcctgattacggccgcggaacactgcaaaagaccattatgggaaagggaattcagcagttacccag

SEQ ID NO: 148588 - DNA, 119 bp, Zea mays
  unsure (1)..(119): unsure at all n locations
  Clone ID: MRT4577_67038C.1
gggaggtattgctggcaaaacaagcaaaggaaatgtgaccaaggtccagatgagtacaatgacacatatgttgggaaatgccaatnctcctgacgctttttaatctgttccgcaacaag

SEQ ID NO: 148589 - DNA, 146 bp, Zea mays
  unsure (1)..(146): unsure at all n locations
  Clone ID: MRT4577_67039C.1
ccaatcccctttctagttcttattaatattattccacttgcccaaagtgatcgccccccctgcccatcacgtcctttgaaatgagctatcgtccataatncatacaccctcgtggccctntctccctcgcttttttcaattctttt

SEQ ID NO: 148590 - DNA, 289 bp, Zea mays
  Clone ID: MRT4577_6703C.1
tgaagaagagagcagttgacgatggctcgtatcattcataccgccctcaagtccacgggaggcaaggtcccccagcaagcaactcgcacattttgcagtcatgaactcggcgccgacgaccggcggcgtcaagaatcctcatatgtacatgtccattgccctggcgctgcgcgagatgtgtacggtatacaatatcacggagctgcttattggcatgctgcccttccatcgcctgtttcccgagatctctcacgacttcatcacagacctctggttccatagtcacgcc

SEQ ID NO: 148591 - DNA, 793 bp, Zea mays
  unsure (1)..(793): unsure at all n locations
  Clone ID: MRT4577_67040C.1
tgtgccctgcccctgtcccttttctctctccgcctccgccccacctcggatcgagtccaagccgccgagcccactccgctgacccagagcctggaaacccccaatcgagcccgaccggagcccgtcgattccgccggattcgagctcccgccgggtgaggcggtccgcccgaatcggccgattggactcgaattcgggtggtccggatgcgcgcagagcggaggctcgcggatctagggtttcggagggcctagggttagtgccggtgatctggtgatggtggtgcgacgcggcgccggagctcggcgaggaggagggttcggcggcgacgttggggaagatgcagcgagccggatatgcatgggtggcgcggcgctgaggggtgtgacgtcaggaggcggcgtctcgttcggctcatgtggccagcggcacgcgtagaggcagaagctccaccaccaccggcacaaggaccagctacttctccttctggttcatctgttcccccgtctcggacgacttctcttccgcccgaatcggcggcgcagcaggagtgcatcgatcttcctcgcccagtgtcacccggttcctttgtaaagcttctgcagtagtagataactagattgctcatgtggcggacgtgttgaggttttgggtcgagtaactgttgagtttgngtgtgctactaccgactgcaatcatgctaatatgtaaatattggcatgggagtccttttgcgtcattgtatcaaattctgtgaacaggctcactatcaaattggcatttttgttacgct

SEQ ID NO: 148592 - DNA, 240 bp, Zea mays
  Clone ID: MRT4577_67041C.1
cagcagcagtagcagcacctaccagcttgttagaaatgcagagtctcaagcccaacttcagacccactgaaagagaatcagcagtttaacaagatctccggaggctgtggggtcgactcacaggcagcttaaagtttcaggagctctgctttaagaaacattcctttcagagagggaacttaaactgagccaagatctaaaaccatgtgaatccaaattcagagaatcagggtcatggtc

SEQ ID NO: 148593 - DNA, 200 bp, Zea mays
  Clone ID: MRT4577_67042C.1
tctcagcgaacggcagcacctaagtctgcgaaggcccttggctggtaccaggccgcctctccaggtgaacccgcaagagcactagctaaggacgaaggcgctcaacgcccggcgggcccaggtgctgcggcagctgctcctgcggacgatgcccaagaggatcacgaccttgatcggattggtgaggaaactgatgagga

SEQ ID NO: 148594 - DNA, 602 bp, Zea mays
  unsure (1)..(602): unsure at all n locations
  Clone ID: MRT4577_67043C.1
tttgcatggnatgattttctttttccccgataggaactacgtatatatttatcttatatgaaaattctgcaggtaaaattgctaatttttccccctcgttccatccaaaagtgactgcccggaacacggcgtgtggaggattttggacgccgtgcaaccgcattccagtgttgcgacagttgaagcacaccgccgtcgtgtccacccacccttcctctaccggagagctggacgagagctccgacaagtgcagagcagcaccgcagtgggggaccgttggaagttggtggccctggccatggccatggccggctcgacctcactgtcactgaggtcactccattcaactcccccaactaaccggaattcaagttgctgccagtgacccaaatggcctcctgctttcatctagagtagaccattcccaagcgacttgcactttttatcactcgtacccctcgtacggcagcagcataatctaatggaataaatactcctgctatatatattttatatataataaggctatcatggattgcggtaagctttgctgtgttttctggaagaagaaaaaaagaaattacggttgctactatttttac

SEQ ID NO: 148595 - DNA, 270 bp, Zea mays
  Clone ID: MRT4577_67044C.1
acgatcgcggctccgctgccctgctctccaccttttccagacctgcaccatgtaccagccgcctgtacatccatccacgctcccccatgccctcaccaccgccgagtaacacctctctctccgactcccttgccttgactgattctaataattcgtcgaacgataatctcttattcccctgtcttcaaccgtactgcaatatcctgaatctatctttggacttttccccaacgtacatatcggcctaacctgcagtggctcctaccgtct

SEQ ID NO: 148596 - DNA, 446 bp, Zea mays
  Clone ID: MRT4577_67045C.1
ccacgactccccagtccccatccagacaagggaagggaatacaggcctgctccgccctgccccgctctcctcttcttgtgtgccggcgcccaacaccacgccggcctcgatccaggctgccgcagcccgcaggtgtcctggacgccgcccttcccgtccgccggcggttgattccttctctccttcctcaggttcctggcctgatcacaaagcaggcggcgacggcgcggatggagctcccggtggcggagcccggcacggagcgaggcgagggcccgctgatccagtgcccgtactgcgactcggaggcgatgcacaagctagcgcagatcctgctaccggggctcgccgccgtgtgcgtggacggcacgacgggggacccgttccacagccccgctgtggtggccgtggacctgcgcagggagatggtggactacatcacgcag

SEQ ID NO: 148597 - DNA, 1623 bp, Zea mays
  Clone ID: MRT4577_67046C.1
gctcttcttctctccccgcgcccaacaccacgccggcctcgatccaggctgccgcagcccgcaggtgtcctggacgccgcccttcccgtccgccggcggttgattccttctctccttcctcagttgcagagatcgagcggcagatgtatatttcatcggaaaaacttgagaacgccgctgagctgctcggcacggcgccttcccgtgtgcaggttcctggcctgatcacaaagcaggcggcgacggcgcggatggagctcccggtggcggagcccggcacggagcgaggcgagggcccgctgatccagtgcccgtactgcgactcggaggcgatgcacaagctagcgcagatcctgctaccggggctcgccgccgtgtgcgtggacggcacgacgggggacccgttccacagcccgtcggtggtggccgtggacctgcgcagggagatggtggactacatcacgcagcggagcgagagcttcatcgcggacgcgctgatcgagtcggaggccaatcaggaggggcccgacgcggcggtccccgacgacccgttcgaggccgtgtccgtgttcatggacgacttcggcagcacgaagcgcaacatcatcggccacgtctccgggtggctgctgagcgacagccgcgacgacaagatcgacgacttggtgcaggagatggaggcgacccggttctggccgctggagcggcgggaggccgtcgccgagacgctgctcaagaacgtggacctcaggacccggttccactgccccgagaagtacgagagcgaggcgcgcctggcggaccacaagcagcagtgcagcttccgccccgtcgcctgcccgtacaagccgctccagtgcgagcagggctgcgagaagcggctgctcaggcgcgacatggacaggcactgcgtcaccgtctgccccatgaggcccatgaagtgccccttcggatgcgactcctccttccccgaccgtgacctcgagaagcactgcgcccagttccttcggccgcatttgatcaaggtgctcaaggcgattcataagaaggcgcgttcggaagatgagctcaaggacctcgctctgaagctggaaaaggttcgccttttgactcacaccttcgtgaatgaactaaacatacattgcttctgaatcgatccgagtttgcttcccagatattttgtgatgaaactgagttcgcaggccaatctggtctggtcactttgccagtcttttcatctggttacagaataaaccatagttcttctcttttgtcaaaaaatgggttccatttttgtttgatgacaaaacatactacaagtttactgcaactagatgcacgcacaggctgatctggtatcccttgccacgttttgaactgatgatggctgcgccactctctaccttcctgcagtacgatggagatggtaaactggctaaagctctggatgcaaggcctctcactaacgctgtcaaggacctcgaggccaagatgaaagctgaacactcgagtcgaagggctgttttacactgacagactttacagaatggataatgccattgtttagtatgaagggatgacgcagcttgtatacagagaagaatataagttttgttttcgttt

SEQ ID NO: 148598 - DNA, 496 bp, Zea mays
  Clone ID: MRT4577_67047C.1
ggaaaacatcacatgaatcacctttcctgcggttggggaaaacatgccacgggggcttaaaacaccgccttcgaaacatttttaagagggacatgaaatttttttttttttacaagatctcatttcctggtgaaaacacttggtgttaaaggggaacaattggccattttctgctttgggttcgaaaatgattaatgcccctgttaaacaatctggtgttctaattcataaatcaggtttttttgggtcatttaatggggacctaccatggggcaccaattctcgccacagttaaccttaaaaaatgtttgtgcaagccaccccagtaagagcagttgtcaaaaacacaaagacttctttgaccccgttgttatccagtttgttcatccctgaaatccttgttaccgttggaccatttacacccaccacctttttgggaacactggaaaacccacttttctgaactgttgcgcccaaaaacgaattgatcaaactt

SEQ ID NO: 148599 - DNA, 462 bp, Zea mays
  Clone ID: MRT4577_67048C.1
atgggaagctccgcctcgctcgaccccagggctcggactcagcctcgaccccggaagacggactccgcctcgcccgaccccagggctcggactctgcctcggccccggaagatggactccgcctcgcccgaccccagggctcggactctgcctcggcctcggaagacgaactccgcctcgcccgaccctagggctcggactcagcctcggcctcggaagacgaactccgcctcgcccgaccccagggctcggactcagcctcgaccccggaagacggactccgcctcgcccgaccccagggctcggactcaacctcgacatcggaggagcctccgccttgcccgacctcgggctcggacccgccacatcacagggaaggccatcattatcctacccctagctagctcaggctacggggaacaagaccggcgtcccatctggctcgccccgataaacaagtaa

SEQ ID NO: 148600 - DNA, 259 bp, Zea mays
  Clone ID: MRT4577_67049C.1
acgtccacgcgtccggagacattcatgaatcagatgtacaaactacggtacatacgcataactcgagcttaccctcataaagtgcggcgctgatcttagtaaggcattatccaggaaccttgctctcttcgcagacgccaccatcatcactagaaccgctaaccctatgaacgaacttaacattgatcacagtatcaggtccatcatgagccatgaattggctactccttatggaagtttcaaatccttggatcacacc

SEQ ID NO: 148601 - DNA, 1209 bp, Zea mays
  Clone ID: MRT4577_6704C.1
ccaggcagtgcaaaacttgggtcgcttcgatttaaatgccaagaggagcatcgtgctcacatggactggcatgttacaaagaacaggaattcaaagaatcgtaagaaatcttcacgtaaatattttgtcaccgctgttgaatggttaagagcagcagaaacagtaggaaacgatggagttcctgcttttgtgctctcagacccagtcccagacagacaggaagagaaagaaattgctgttcctgcggatgaggagcaaacatcctgtgcattatgtcaagagccatttgaagatttctacagtgatgagactgacgagtggatgtacagaggtgcagtttatatgaatgcaccagatggtaatatcgatggtttggaatggtcacagttgggacctattgtccatgctaaatgtcgatctgggcccggcaatacttcttagggtgggcatagctgggatgatttgatagtttttttcccgttgcggctgtaggcatgacctgtaaactaatggagactcagattttggtatggttagcttcttttccatctggctcccttaacagccagtgcatagaatgttttttggaacaaaaaggcaggagccagtgcatagaatgtcaatgtgacaatagtgtataactgtaaaatttttgtgtaattcagttgcacagtgctgctttttcattacaactatagtgtgatctatactgaagcttcatgtttagggtttctgcagcacagttgttgacaacggtatatgtatatgtaaccatggtttcactggacatgggaaacaatatatttcaatagtcctgttttcttccgtaaaaaaaaaaaaaagaatacataacagttcggtacgttggttggtagctctggaagggatcgcccaagatgaccatgagtgctggtgactatttatgcctctctgaagtgaaagggctagatgctgtcattaccttattgccaaaactttttagtattttcctttgtaagtcgatagcgttgtttgtgacatattctcggtcgcttatatagtcccgtccctgatatgttcatgctccataatgtgatgagaatatcttattagactttatactttactctagttggtatatgctctgccgaactattcaatgaaacaatttcgccaaaaaaaaaaaaaaaaaaaaaaaaaaaataaaaaaaaaaaaaaaaaaaaggaagg

SEQ ID NO: 148602 - DNA, 667 bp, Zea mays
  unsure (1)..(667): unsure at all n locations
  Clone ID: MRT4577_67050C.1
gtttaaattccttttttttttggtgttttttaaattttaacgccgaacttaataaggcagggggggggggggggaataaagtgttacaacgggaggggtgaaccacacaacgacagatagataagaaccgacagaaacataacacgataggagccactcaggggagatcacaggagagcagtgggacacaagcccnacgaccccgcgccagtgggaggtgtantactcgtgaccctggggggggtgctcaccctcgtgaaactcaggaccgacctcctcgtagtccttctcgagcgcgggcagatcctcacgagcctcggagaactcgccctcctccataccctcaccgacgtaccagtgcacgaaggcgcgcttggggtacatgaggtgnaacttgtggggaatgcgggagaagacctccacaacactgggggaggtggagatcatgcgcacgggacgctgcaccttgggcagggcaccggcggggacaacgctgggaggcggggangtgattccgcacttgaagccaggcggggaccantccacaaactgggtggtgcgcttgggcttgattgtggccacagcagcgttcacgtgcttgggaaccacatcaccacgggacatgaggcagcatgccatgtacttgccatgggggggggtgcacttg

SEQ ID NO: 148603 - DNA, 474 bp, Zea mays
  Clone ID: MRT4577_67051C.1
atgggaagctccgcctcgcccgacccagggctcggacccagcctcaacatcggaagacggactccgcctcgcccgaccccagggctcggactcagcctcgaccccgaaagacggactccgcctcgcccgaccccagggctcggactcagcctcgacatcggaagacgaactccgcctcgcccgacccagggctcagactcagcctcggcctcggaagacggactccgcctcgcccgaccccagggctcggactcagcctcgacatcggaagacgaactccgcctcgcccggccccagggcccagactcgacctcgacctcggaggagcctctgcctcgcccgaccttagcgtgtttatctatctatggagttcagattcaaaagcgtgccatctctggaacctcccacccattctggagtctggacgcacgactaacggaattgcagaacgtgaagcttgccgctgagtgttga

SEQ ID NO: 148604 - DNA, 648 bp, Zea mays
  unsure (1)..(648): unsure at all n locations
  Clone ID: MRT4577_67052C.1
gttttaattctttttttttttaacgccgaacttatttacccactancaaagcgggggggggcggctcgtagaacctaanttgtaaaccacacaacgacagatagataagaaccgacagaaacataacacgataggagccactcaggggagatcacaggatagcagggggacacaagcccgacgacgccgcgccagtaaagcgtgtaatactggtgggggggtcnccgtcctcaccctcgtgaaactcancaccgacctcctcgtagtccttctcgagcgcgggcagatcctcacgagcctcggagaactcggcctcctccataccctcaccgacgtaccagtgcacgaaggcgcgcttggggtacatgaggtggaacttgtgggcaatgcgggagaagacctccacaacactggggggaggggagatcatgcgcacggcacgctgcaccttgggcaggtcaccggcggggacgacgctgggaggctggganttgattccggacttgaagccaggcgggcaccantccacaaactggatggggcgcttggtcttgattgtggccacagcagcgttcacgtgcttgggaaccacatcaccacggtacatgagggggcatgccatgtacttgccatggcggggggggcact

SEQ ID NO: 148605 - DNA, 175 bp, Zea mays
  Clone ID: MRT4577_67054C.1
catactcttgggctctactactatctgcattcttaagcctcaatagagccgggttccggggcattgtataggatgcttctcatctagatactactaaacgctttcctaggcatagtgaacctacacttctactccttgctcaccatcatccaacgtatcattaattcatccaaca

SEQ ID NO: 148606 - DNA, 394 bp, Zea mays
  Clone ID: MRT4577_67055C.1
cccacgcgtccggaaaaggagctagatagttgtgaagaacgaattctgctcgtggatagaacgacgcttcttctatatcaggcacatgaagctaagaggcacatttcaatgattcatggacagatgggtaggcagaatagaaagatcaagctgagaggggcatgaatcttggctacagtgacgcaagaggtagcgatgacagtgtgcaacgactactagtgatgatgagactcaagaccatcatgaggaagagctctatgaaccatgtatggcacgaggagctaactgtgaccgtgacagataccatcataactctgaagatggaggtgttatacaaggacacgttcataactgacgatacgacgatggactcagatatcgacatgacaccgct

SEQ ID NO: 148607 - DNA, 315 bp, Zea mays
  Clone ID: MRT4577_67056C.1
aggacacctgggggaatcatgggcataccccttaatgtctaaaacttttctccggtcacaaccccacacaacatataaggccggaagacataaagtgtgaagcctggggggcaaaatgagtgacctaactaaaattaattgccttgcactaactgccaaattttcaaacccgaaacctttaatggcaaaccccttaatcaataaagcaacgcccactcaaaggcattttgcttattaaaaaccacggttttccatctttaaaacagtgagacccacaacatttaaataaacttcaacacctgggcaaaagagagt

SEQ ID NO: 148608 - DNA, 372 bp, Zea mays
  Clone ID: MRT4577_67057C.1
ttcgagcgctttttttatcaccaaggcacaataacgggtgggctttgtactcttccacgcgatcacagtgaatgcttcaacaacattactctgggaactagtgattgccaccaccactatgcctccgacgctagatgtgtttacccatcgtgacgagaggatcttgtgcccacagagtgctgacctgccaggtatacaatatgtgctaatgatggaaaacaactcgtgtgtactgcttgttactgtagatgatacgcgtgatgcttgaaatacaacccttgtgttagcagggggtgcaaaactcactgggcttgttgctaagacctgtgataatgatacatccaagtatttcggacgcctggcatgccaatt

SEQ ID NO: 148609 - DNA, 287 bp, Zea mays
  Clone ID: MRT4577_67058C.1
cccacacattcgtccactcctcctactatttctagttcgccagcgcccgcccttatctctgtgctcgctcatactttctttcgtgaaaggttttctctacatttcctcctatacttatactttctcctttcattcttatatcaaccctctgctatccctcatcataaacacattctactccaacacagacatcttcctcagggaactcattacaaactactcctatgcctttccccagatcataccctctagcacaacaaacaccttcaaacctaatacccataaat

SEQ ID NO: 148610 - DNA, 831 bp, Zea mays
  Clone ID: MRT4577_67059C.1
gaccctcgaggctggccggggcgactctccggtctgcagaaccgaaacccccacgcgcgctcgctccccgcgcccaattcggagatccacccccccaccgaatccgctcgcctgcgcctgcgcctgctacctgcgatccatctctcatggcgaccaccagcgccaggaggccgagcggcccggtgctctcggccgcgcactaccgctccgcctcgccgacgcgcgtctcgctcgccgggcagcccgtcagcgtcagcgtgtcctcgtcgtcgcggggccggcggacctgcatgtgctcgccgaccaaccacccgggctcgttccgctgcagcctgcacaaggagcgcgtcaaatatctaacacataaatttagaacaaacaattagagcttatttagatatccatatatcttccttaattcatgcatattaaagtgtcaagcaatttaaagcatagattaggggaatacatgagcatctaaacaaaacatttagcatctatttggatcccataaacttaaaaccggcatgtagaaagtgatttctatttcattattagattatcttttttccatttccaaccaatacaaaaacaggatcttagagaaaaaaacagtgctcgcagaatattgtccacttccactatcagcaaccaaacaaatgctatatgaattcatgtacgaataaaaaaaaaaaaaaagcggcccatacctatattatattcactccgctagagttgattaccgaccggccgcggggccccacgggcacgggcacgggcacgggcacgggaagccgagctcgccggcgtcggccgtcagcccgctgtgcg

SEQ ID NO: 148611 - DNA, 356 bp, Zea mays
  Clone ID: MRT4577_6705C.1
ccaggtcagttcatacatctgcctcctgtgacatggtgaaggcgatctcaatgctcgacatacccaagtgcctatattatgctattgcacgctccgaaagggcggcggggaaaggaaaacctatcgccggtgctgttgagggccctgcacagcattggggaacctctgtatctggtcccaacaattttatcgggactctttgagaacggatgtttaggccatcactgcctaccattatctcttaaaattcaaaggtggtaataatctttctttatcaaatgaagggccctcctgggcattcatataaccttaggggccagttaaaacaacctaatgcctgagcctaattcccttaa

SEQ ID NO: 148612 - DNA, 735 bp, Zea mays
  Clone ID: MRT4577_67060C.1
ggataaaagacccgctcctgtcccgcaggcaactgagcgccggcccgcccgcccgcccaccagccgccgccgcaccgccaccgcgcgacctcccttcttcgccgcaaaccgctctgggcgcttgaagatggcggtgccgctgttgactcagaagatcgtgaagaagcgggtcaagcagttcaagaggccccacctcgaccgctacaagtgcctcaagccaagctggcgcaggcccaagggtatcgactcccgtgtcaggcggaagttcaagggatgcaccttgatgcctaacattggatatggctctgacaagaagaccaggcactacctccccaacaagtttaagaagtttgtcgtgcacaatgtttctgagctggagttgcttatgatgcacaacaggacatactgcgctgaaatcgcacacaacgtgtccactaagaagcgcaaggaaatcgtggagcgagctgctcagcttgacattgtggtcaccaataagcttgcccgtctccgcagccaggaagatgagtaaactgtttctactagcagtagttttggaatggtgcggctttagaggacttgctgtgtatgatgattcagttatcatttctgtttgcttcatgattctgagttctgtgaacccacttgctatcagtagcaacttaactgtggcactgttattatcttttaccatctcaaatacatcagttttgatataaaaaaatgtctgcattggtt

SEQ ID NO: 148613 - DNA, 339 bp, Zea mays
  unsure (1)..(339): unsure at all n locations
  Clone ID: MRT4577_67061C.1
aggacagcggggggggggacggggagcnacggcccccacgggcggcgggggggcccacnggagaagaaaggaaaccaccagccggcggacagcggcacaaaccccgccaacgaggacaacaccagcacagaagacaacgcgnncccaccanccncaaaggccgncaggggggggggggcagaccncgcccacancnggcagaagnaccgcgaaannggcagacaccgcacangaggaaaaaagaagcacggagggagcngcccgaagcgacggcccacagggcacaggcggacagcagggacgagccccaggcaagccggcccaacggcgccgaggacg

SEQ ID NO: 148614 - DNA, 325 bp, Zea mays
  unsure (1)..(325): unsure at all n locations
  Clone ID: MRT4577_67062C.1
ttttaatttatatttttttttccaaacccccacncacgcccgggaaaggaataatttaacaaaaaaaatttgaccctcatatttttaaaatgggatacccggccgaaaaatggttcccctatctgaccaggaacaaaaaattggccgaagaaccaaactttttggtcggtaattcaaaacatgcatgcatatcataggagggaccaaaattcgtgtgtgccgccactatttcatcactcatgcagtcaaaacagtgcttttccccgaggtcggcgcttgcgcttgtacacttgctccataaactggggcatcaggagacggggcc

SEQ ID NO: 148615 - DNA, 213 bp, Zea mays
  Clone ID: MRT4577_67063C.1
ccaaccccaaaggggtgccttttggttttaaaaatggatcctaaacctaaaaaatccaggggggggaacctccccattctgtttgaaaagctcaccaagggggtgggccgatttttttaacacccgggctcaaaaggttaatgggaaaacacatcccctgtccccccctggtgttggtttcgggccccttctgccccttttttttcctcccga

SEQ ID NO: 148616 - DNA, 363 bp, Zea mays
  Clone ID: MRT4577_67064C.1
cccacgcgtccgcccacgcgttttcttagcgtccgcggacgcgtgggaaaagaaagaataaaaaaaaaaaaaaaaaaaaaaaaaaaaaaaaaaaaaaaaaaaaaaaaaaaaaaaaaaaaaaaaaaaaaaaaaaaaaaaataaaaaaaaaaaaggccgcactttttaaaaattcaaagtttacttacccataattgcaactttataacttttttatagtttaaccaaatttaaattcattgaccatatttttaaaacgtcattattggaaaaaccttgtctttaccaaattaaatctcttttcaaaaaatcctcttttttcaattttacttattacccaaaatgcccaaactcattaccttttc

SEQ ID NO: 148617 - DNA, 564 bp, Zea mays
  Clone ID: MRT4577_67065C.1
acctgcggcacgacttcgtgcgcaagcacgccgacgtggacggcatcgccacctacgcctccgcgtggaccgcgcacgcgtccctgcccgccgacgtggagtgcgagttcgccttcctccaggtgcgccgcgccatgctggtgtgccgcgtcgtggcgggacgcgtcgcccggggccccgcgaacgacaaggcggcctacgactccatggtccccgtgcgaggcggtgtcggaggcggtaccggagacgacgtcgagctgttggtgtacaaccccaaagcagtgctcccgtgcttcgtcatcctctacagcatcagctagtcagtgacatgacacgaggcggtcagcctcgcacgcagcactagtgtatagcctttccactgttccttgtccccacctccatcccccgtatggtggctgagccagacccgcgtcccctgctgtggtcatcggccacgcgccgcgtcctcgctacaatcacctgtggcggctaattcgtcggatccgatctaaagcttgaacacgtgctgtcaatagtgaagatgcggagttgacctagagccta

SEQ ID NO: 148618 - DNA, 304 bp, Zea mays
  Clone ID: MRT4577_67066C.1
aacatataaagattttatagccgaaaaaaagcgactgattgtcaaccaccatctactagttagaaggagcaagagggctgctcccgctcacaagcgctatcttatgcagctatatgacgtcagggctcacgtaccgagatacagccatctagatcttctggtccgatgtatatggatatgagggcgtgaatgttgagactcagattgacaccaatgacaattctgctgcggctcaagtctactatgctgaaggtgtcaccccattgatgacggtgacagtcgctgacaaggaagatgtaccggg

SEQ ID NO: 148619 - DNA, 384 bp, Zea mays
  Clone ID: MRT4577_67067C.1
tcgcgggtcgacgcacgcgaccggacacactcgtggtagactattaggttgtgccgcagtgctcctgctaccgcagctccacttgttcgacttgtagacaggcgtcgctacgtgcgtggctgccgcgacgcggttctagtcgccagtccccagcacactcgaaaccttcgcctccgatgcgcgtctgcggcaaaggggatggctgcggaagcgacgcacggcgggtgaggcgtcagcaatctgaggcgaagcccttcgtcgtcctcttcgtgtgcctcgggaagatgtgcgcggatcctgcagctgaagctgtggttcggaccctcgtacgtaaacatgggcgtgactccggatttctcatagagtctgctggtaccatcgggt

SEQ ID NO: 148620 - DNA, 391 bp, Zea mays
  Clone ID: MRT4577_67068C.1
ggaggccgacggcgtggaggtgcgcgtgcgccaggtgtccaacagcttcccgctgggcgcgtgcatcatgcgcaccaacatggacaacgaggatttcgtggacttcttcaccaagaacttcaactgggcggtgttcggcaacgagctcaagtggtactggacggagccgcagcgcgggcagttcaactacagcgacgccgacgacctgctccgcctctgctccgaccacggcatgtgcgtgcgcgggcactgcatcttctgggaggtggacaacgccgtgcagcagtgggtgaagacgctgtccaccgacgacctgtccgccgccgtcagcaatcgcatcaacgggctgctcacccggtacaagggcaagtttaagcactacgacgtcaac

SEQ ID NO: 148621 - DNA, 117 bp, Zea mays
  unsure (1)..(117): unsure at all n locations
  Clone ID: MRT4577_67069C.1
ggaggcgctcgtggtgcggcactgnggcgataccaccactgccccctggcggtgaaagctccccgtttcgcgcggtctctcgggatcacccagtgccggagatctcatcggcgacgg

SEQ ID NO: 148622 - DNA, 595 bp, Zea mays
  Clone ID: MRT4577_6706C.1
aggggggaaggcaggtttattatagggcaggcaaccaatcttccctgacatgaaaatgtttagtaccctgctcaagcagcactttaggggatctcattaatgaattgcccatgagccttaagcaaaaacccaaaataacgtaaattaaagggaaatttttgggcctttactaacctatgaatttcatcagccagtcctgggaagggggaaaacaaaaaggctggacccacattcccttggacactaaggccattaccaaggggcctccttccataagtcatgtccactggccagtcaagcccaaaaacataaactcctgggttttttatgccctcaagaaaacctccttttccatttatttacaacacaagggggacattagggcccttttttttaaacctacccacaatctgggggaaaaaaaaaaaagctttttgaacaaaatcagtaaatcaaaactttgcaggaaaacttttaatccctactctattaaagcaccagttttgggcgttaagcgttttgggcaaagcgcgaagggctggaacttttccttacttttcaccaaacaatgagccgttacagaacaaatgggcct

SEQ ID NO: 148623 - DNA, 202 bp, Zea mays
  unsure (1)..(202): unsure at all n locations
  Clone ID: MRT4577_67070C.1
ggatgcatgacaaagtcgccttatccccccatangnttaccgtaagtggaagcctatggattttaagcaagtctactctggtacaatcttgtgccatttgcttttatcctgcgtgggctgtatatgttggactttgggaattgaggccatccagacagtattccttaaggttgatgcctttccacaagttttgcccggaaga

SEQ ID NO: 148624 - DNA, 402 bp, Zea mays
  Clone ID: MRT4577_67071C.1
cattgggaccctcgaggccggccgggacagctctacgcgtaatctgcaggagagaattgactactcgtccaggcctctcacgagatccgatggggcatagagacctcgatgccctcgcccttgccctacccctcgccctctgctgcgatagccgctcccacggacgcgcccaacgacgaggaaaacctgctctacgctgtgcgaggacgagctggagaaccccgacgccgacgatgcagagctgcgatctccactctacgatgcgcacctgcatttgtctacacatatcactgtcatcatcgtcggacgacgtcgtacgccatggactatgcatcaactccgaaccgactgcgtgtctcacatacggagcctgtagcataccgccagcctatcagtcaacct

SEQ ID NO: 148625 - DNA, 154 bp, Zea mays
  Clone ID: MRT4577_67072C.1
caaaaacactcgattcatgtggcttcttttatcaagagtgtattcaacgacaacatcaggagggttaattgcttgcttgaggcgatctcattttactctgccaacacctcatgataacataagagacgaccgggcgcatccttacaactgctct

SEQ ID NO: 148626 - DNA, 449 bp, Zea mays
  Clone ID: MRT4577_67073C.1
tttgggctgatttatgtgcttgtaatagtaatggtagtacccgttccgatacctccaaggaatagcggagcttcgtcccaatcgctctaaaggcctcttcgctaactcgtctatcgtctatggatttaaatttcgacgacttctccgctttcgagaccgtctatacgcataagattgatagggttaagcacgagcttattgtatgtcttcggatatagaagcacgttacgggtcagaagtaaggtcaaaagtcggttaaatcggcgaacgcgttggattttaaactgccactattcaaacaattagctaagctgtaagcacgaacggatccccgaggattaccgcgtttcgccgaatctacgcaccattccgcgaaaaaaaaaaaaaaaaaaaacacaaaaaaaaaaaaagggtggttgtctcagaggacttaagtccatgcatgtgcg

SEQ ID NO: 148627 - DNA, 294 bp, Zea mays
  Clone ID: MRT4577_67074C.1
gtggtcgaaaaattgacccattaattgattgaaaaaagccctatcaatagaaaacattaaatttttcccttgtccaccctacatttttactggaaaataaacaaaacaaccctttcctttctgccttgataaaatgatagttgatccggaaaatcttcacgagcccggggggcatttttaacccatcaaaatttgataccacttttggaaaatgggaatgccgtttcctgaccccgggcaaaaccaacttacaggggaccatttttgacggggccgggaaaaaaaaaaaaacaa

SEQ ID NO: 148628 - DNA, 612 bp, Zea mays
  Clone ID: MRT4577_67075C.1
gggtccccctgcccacccaccacgcgggcgtaacggtggaccttctcaaatcgacacggccactgcagcttctaacgatgataattacaacactctactaccacacgcagacccacgtaactctagtaattatcatctcggtcgcgcgctggtcacacgagcgacacatcacacgtgcaactactgcgccaccattcccgactactactcagccactgcacaatacttaatcagtattactaataacttaattctttattattgggtcggtcggcgctcgatttgattattcgtttcggtcccaatcctttccggtgtaaaacgtacttatttatctaaccaacctaactacctaggcaggaggtcttagtaatattcataatttaggtttaggttcttgttgttaagattactattattattattattattattattactactactactatttttattcttctgtacttggtcttctaggagaattagatccttttctaggttttgttatataagatgttgttcgagtacgttcaggtcgtgatttataattttgtattactctatttacataactaggatacgtaaataaaggaagtaaaactaattgaa

SEQ ID NO: 148629 - DNA, 190 bp, Zea mays
  Clone ID: MRT4577_67076C.1
gaggaatgggccggctgctttggcatcaaggagcaggacatcaacaaggatctggtgatctaagttcacgcctcctgctgcagtcctgaactctctccctctgatgtgtcacccctcccattcccccttgtttaaaatgtttggatggttggctgttccgcctggggataaggtgctaacatagatttaa

SEQ ID NO: 148630 - DNA, 429 bp, Zea mays
  Clone ID: MRT4577_67077C.1
ggctccccacttcattttgtctaagttttttctgatagggtggtagaccgagggcgaattgggggcgatgaatctggggtggacgaatataaccatggattcttgaaaggattcacggatgcacaccgtgaacatatcaagggggcacaggctggggcatgaaaacgaggacgcacggaggaaggttgtccctgatgcagtaaaatgtgaatcaaactactggaaagaactactgacggatggatatgacgtaccgaaaggtgaagagcatactgctatggcaaaagggagacgaacccgccctcatttggcggacgatgatgaagaagacgtttaggactcacagaaccgataggaggagtactaaaagccggaagacagttgggatcacgacacaggttcgccgggacagatttctcggaaaagggg

SEQ ID NO: 148631 - DNA, 1890 bp, Zea mays
  Clone ID: MRT4577_67078C.1
ctccctagatcgccgcctccggcagcggcgaggctgcatcgcgagggcggcggaggagccgggcgacggggtcgacgaaggcggggaagacgaggctagggttcggggtcgctgctggtgggctgcgtctgagggaggaggatgcatatgatgcggcggctcaagagcatcgcctccggccgctcgtcggtctccgatccgggtggtgactctggctccaaaagaccaaagtttgagcaggatggagcaggagatattgttatggagccacacttaaccaaggataaacctgtgcggatagaccaagaatcatcgtcatcatctaatagggatgctgaggcaagcacatctactagcatgaaacctgttaaaactgaagaagcaggagcagatcttcttcccaaagagatgaatattatgacaattagcgacgacaaagctgatggtcataatgataaggaaggtgagggtgttacacttgatgggactggaacagagacagggcagataattgtgacaacaataggaggtcacaatgggaagccaaagcagaaggtctcatacatggcagaattggttgttggtactggttcgtttggtattgttttccaggcgaaatgcttggaaactgacgagacggtggcgataaaaaaggtgttacaagataagcgctacaagaatagagagctccagactatgcagttacatgaccacccgaatgtagttcagctgaagcatcacttcttttcaacaactcaaaagggagaagtttacctcaaccttgtacttgaatttgtatccgagacagtttatcgtgttgccaaatactacaaccggatgaaccagcgtgtacccataatatatgttaagctgtatgcatatcagatgtgccgtgcgcttgcttacatccatcgtgttgtcggtgtgtgtcatcgtgatatcaaacctcaaaatctgctggtcaatcctcatacacatcaacttaagatttgtgattttgggagcgctaaaaaattggtccctggtgagcctaacatatcgtacatttgctcgcggtattatagggctcctgaactaatatttggagctacggagtataccactgcaatcgatatctggtctgttggctgtgtagtggctgagcttctgattggtcagcctttgtttcctggtgaaagtggtgttgaccaactggtggaaataataaagattttgggtactccaacaagagaggagatcaggtgcatgaatccaaattattccgaattcaagttccctcagataaaagcccatccatggcacaagctttttggtaagcgcatgccacccgaggctgtcgatctcgtgtcaaggctgctccagtactcaccgaacctgcgctgcactgctgtcgacgcctgtgcccatccgttcttcgatgagctgcgggaccccaaggcttgcctgccgaacggacggccaatgccaccgttgttcgacttcacagcagccgaactcgaagggctccccgccgagcttgtccaccggatcgttcctgaacacatgaggaaggaagtgaattaggtggacggacgtactggggcaaaaaaaaaaaaaaaaaaaaactccctgtttctctgttggttctgagagatgtgtgagggcacggatatggaggagcggtggtgtattgtaattgtaaagagggctgaaagaaaggtccctctggttgggcgtgtcaccaaagagtggccctagaggcaaaccttacgtttgctcgttgcccttggtgtgtacccagatgtgtatcgatgacataggctggctgctgtatcatcatcagggttgacgctgaacaagagaaattcaagcagggtgctgctagctcgcttcctcccgcccccccccccc

SEQ ID NO: 148632 - DNA, 182 bp, Zea mays
  Clone ID: MRT4577_67079C.1
gcgacctggagatcaagtgggtggcggtccccgagaggcagccgatgcggctctactcgagcctgtggaacgcggacgactgggcgacgcagggcgggggcgtcgagacggactggtcccacgggcgcttctgcgcctcgtaccggtgtttcaatgcctgggcgtgcgacgcggtcgcgggc

SEQ ID NO: 148633 - DNA, 365 bp, Zea mays
  Clone ID: MRT4577_6707C.1
cctcagtcatccatatggcttaggtttatcacatcatcaaagatctgatatcgctcatccatatggcttaggtttctcacatcatcaaagatctgataaactcaacacagcaagttacgtggagaggatccgaatgagacctgatgttggaaattcagtaaatttttttgatttatcttcctatgctcgcttgctgaactccccgttcttgtcctcacaatctgatacatataaatccattgatgaagtgatgggaagagtatgcatgctgtcaaaggatcaagatgcatgtcgctttctacaaaaattattatcagatggcactcaagaggacatttgttaaatctttggcgaaaaaattgaca

SEQ ID NO: 148634 - DNA, 740 bp, Zea mays
  Clone ID: MRT4577_67080C.1
gactacgatatcgtctactatatgcaaatgccacctcaccaaccatacggatgtatctcataccaagttgaaggtgacaatcactacatggtcactagtttctcattgaacaacaacaaggtaccaacaactgcttcaggtatggaagaaatcatggctagctgcaaacatgactttgcgttgaacattgtcaagaacggaactcaagtaagcgaaatcaaaacgtacaagaaggaaggtagccgatggactcactgggaagagttacgcaacattgaaggtttcgtagctatgggcgatagcgttgtttctggaaacccaatctttgggcaaggaatgagcatggccagtgaagcaagtctcgttcttgacgacttgcttcgtgagcaaggctacaacgcaacgttctgttccgagttccaacaacgtttgtcgcacgtacttactgcaccatggattcttgccaacacaagtgatcttcaattcaagggaactactggtgggtcatcagtacttcgtgcgtttattccaattttgaaacgtggtatggatcatcaattcttgatgggtgctaaggatcaagactatgcaatcgactttaatcatgttatgcacatgacaaagggttggttgaagagactactaatacctctacctattagaaacgctcttgggtacaaggtatcagaaacactgtaaataaatgtaactatgacaaaaaaaaaaaaaaaaagggccct

SEQ ID NO: 148635 - DNA, 969 bp, Zea mays
  Clone ID: MRT4577_67081C.1
gggacccatcgaacggctaatacgtggttgaatagtaggctagaggtgcaaatgaactataagcatccctccaccagctaatgaacagtgatgccgtaaaacaatgaaagctcatactttaataaaaaacagtactagcaatcatgctaattcacggtgttgaccagattgacagcaaatatttctacaagtccagatggccctcaaaatattgggcaatctgacataagtcttaacaatgcatcatacacttcgggataaacacatttggcttgcctaccactgaatccccacaaatatcagattctgatggcttcttgtgccattcctttttctgcagctcaaagcttctcgagaacaatgcaccagttggatttgtcatagaactggtcaataatagcagcattctttatgccagaaaccaatctctgaagttctccttcaacaaaaacatgataatagcgattgtagaccactgtacccttcttctcatctttctttgcaaatccattttccagagcagcagatgcaccgccaatttcagctcggtgaaatggtagatgccatggaacaaagtactcctgctggtttttctcattttcatcagtctttgaattactacagtcaatggtcttgtcctccacctcaccatgacagtttttcaatcggtcatctgtttgcttcgtgaaaccagcatcttcatcagtttctgcaatgctttccagaagagttccagatttactgcgtactggaggactgctctgttcaacccactcttcagtatatttctcgcagaggggagtccacttgttgagcaaagacttgtcttcctgctccctagcccagactgttataagcaccagaccacctcttcgaacaacacggattagctcttctatggccctcctccgcctatcaacagtactctgtcatagcaccagtcaacaatagcagcactgtttctccagc

SEQ ID NO: 148636 - DNA, 372 bp, Zea mays
  Clone ID: MRT4577_67082C.1
tttttagaagcaactgccgggatggttttttgttaatatccattcaagtcactgaacaacagacatacacgtgtcatctcctgtggggcaccatcgccggtttagttggaacaataacaattagctgcgaaaatgcacaatgcataggaattccaaatatcaaagggcccatatcatatggttatcgaacgcgtggccaggcgtcgactactgtacgcattgactggctcaaaccccactcttaagtccctgtgaacccggcgcatgcatacatgcatgcatgcctgcatggatcaacaattataaggggctaagctctaataaggaggaggggtgcaagacctcttgcagtacttgctgatgcacgggttc

SEQ ID NO: 148637 - DNA, 455 bp, Zea mays
  Clone ID: MRT4577_67083C.1
agcccggtcaacagcttaccctggggataaaggaaaacagggttttgggggactttggggggggaccacccaacaggggcccatcaaaaaaaatacatggggcaaaaaaaaaggggggggataaaacgaagaaattccaaaaggaatggggcccggcgaataaacttatttgggcacaggtttccccaaaaaaaaaaccgaccctaggataaactggagcagcccatcccggagcacaaagtaaaaacacccacaaatttctcaaaagttcgggaaacaggagggccccaaagcttccgagccctgaacctttatttaaaaaaaacaactttgggggggaaaagatctaaccagccctaaaggaaccctgcttgccccctgctcaggagtcaggagggacaacggggcccctcttaaaggtcaccatcccaaaaccccccatgggtcttgaaaac

SEQ ID NO: 148638 - DNA, 1500 bp, Zea mays
  Clone ID: MRT4577_67084C.1
ggtaccaggtaacgaattcccggctcgacccacgacgtacgcccacgcgtccgcccacgcgtccgactgagggcacttggtgctccaccgatcatagtggcacttgcagctcagggtgcatttcgtggatttctggatacgaggacaccattgtatgctgtgggtgctggcaacctattaaatgcattacttgatgtggtacttatttttccacttggtctaggagtaagtggtgctgcactggccaccgtgacctctgagtacttgacagcaatcatcctcctttggaagttgaatgatgaagtagatctattgtcatggaatataattgaggatggagtcatccgctacctgaaatctggtggtctactaattggcaggacaattgcagtattcttgacactgacactagctacatccctggctgcaagggaagggcctgttccaatggcgggctatgagatatgcttgcaagtgtggttaacaatttctctgctcaatgatgctctagcccttgctggccaggctctacttgccagcgaatatgcaaaagggaattacaagcaagcccgcacggttttatacagagtcctgcaggttggtggtgtgactggttttgtccttgctgcttccttatttgttggatttggatctttgtccttgctgtttacagatgatccagcagttttagatgttgcacggtctggagtgtggtttgtcaccatttctcagccggtgaatgctattgcattcgtggctgatgggctctactatggtgtttctgactttgcttatgctgcatattccacgttttttgcgggagcggtctcatcaatattcctactattagctgctcctaattatggtctcggtggcatatgggctggtcttactctatttatgagtttgcgtgcagttgctgggttctggaggtagttagggagcaaaggtggaccttggaatgttatcttatctggtcagatagtaagtaaaacaaagatatgaccagattcgattgttcaattgatctcccaccggtagcaggtcggtagcaagaaatgtgcatcctgctgcaggccatatatagctgacaagcaatatatagcaagaaatgtgcatcctgcgtgacagggagctgatgcatctctgtggaagatgtacgcttgtagttggtgttggatagctgggctatcttgtggctgttgtacgggctcacagctttcaactgtgttgtaccatatactgtacaagaaagctctgttcagttataacgaaagaaagaaaactgggttcaaatagaatacaaaaggctgtgtaacgaaagaaagaaagccgagttcaaatagaaaatcccttcatgtaaatttcgttctggaaatcctccttgtgaatgaagctttatccaacattctaggattggtaaatctggtaatcattatttgtgtcattatgtaactcaatgatggtcagaaatataataatctgagttggttcttcccc

SEQ ID NO: 148639 - DNA, 112 bp, Zea mays
  Clone ID: MRT4577_67085C.1
tgagcggcaggtagctccaggccatctatgacgagtggctggccgcgtcgcgctcaagaccttctccgagtgcgtcatgtacgccatcgcgggcctcggcttctcgagccag

SEQ ID NO: 148640 - DNA, 320 bp, Zea mays
  Clone ID: MRT4577_67086C.1
gattatatcattggcgacagccaccgagagcgcagccgcgggctggagaggcccggggcagaaggcctcgggcagcccccagcaagccgacggcggaggctgggccgcacttcggctcgaagccgagcgcagtgccatcatcccgagccgggatccgcaataaccgactccctacggagaccaggcggcaaagggcgtgtcccccgggccgcgtgcgaggactgaacagaaccgataaggtgcaacccccccgtgccggaacacaaggacgcggatctcagtgatcgaggccgccggggcaaaacaaagctgccaagaac

SEQ ID NO: 148641 - DNA, 573 bp, Zea mays
  Clone ID: MRT4577_67087C.1
ctctctctccttgcctcgatctttataaaccctacgtgcgagcacgaacgacggcgccgacgatatggtgccgtccgaacctctgaccatggcgaggcaataccctctctcggcgacccacgtactgaccgcaacaactcgacaccaacagtaccgtggactcggacaactgtatcagggaccaccatgctcaccttccagggtcctaagaccacacccccatccgccattgccagaaatatccgatctcttcccttccagacctgcaactaccacattccgaccgtccacaggcagacaacctcttccgagggacggatgctccccatcgtctccggttccatcccgagcgctcccgagtgcaccacatcaagtactctcaccgcataacatttacttgcgccaactggcaccttcttcgtgactacagacatgtgccgtctgaactatcgctagaagacagccgaaaactcttgtgatgaacacaataacgtcagggcttcatgtatatacaattactacccactggcgaccgtactctcatcgcactcctatcacatcggcttgctgact

SEQ ID NO: 148642 - DNA, 234 bp, Zea mays
  Clone ID: MRT4577_67088C.1
tgatagatcccaaaagggccaaagctttaaaagggaaagaacctcccaaaaaggtttttgtgggtggattgagcccggatacttctgaagaacaaattaaagaatattttggagcctttggagagattgaaaatattgaacttcccatggatacaaaaacaaatgaaagaagaggattttgttttatcacatatactgatgaagagccagtaaaaaaattgttagaaagcagat

SEQ ID NO: 148643 - DNA, 299 bp, Zea mays
  Clone ID: MRT4577_67089C.1
gtttttcccggtggctgcgattcttttcttttttcggcggagccaaggcctcaaaatttccatacaacaaattaaggcccggatttacatgtgttacggccagggtcgcagttcacagagccgtacaacacggaggcccatattcaagcaaaaaacactggatggccgcacctttctttcaacgcttatttacacagcagaccgcctaacagctcccatacatgtacggtacccccgactcgatggccgtatgccacttaacctcaaaagaagaggaaacatgttacgaccctgggcca

SEQ ID NO: 148644 - DNA, 347 bp, Zea mays
  unsure (1)..(347): unsure at all n locations
  Clone ID: MRT4577_6708C.1
gtcaaccgttcttgattgtcacggttcatactgaatcctgcaaacctgctgcgaaggatcagccccgctgttgctaatcctgtttctatggttactccgtgctcgcttcctcaagacgtcactgttcttgcgagctgtgaatgtgatagctccgaagatgctgctaccgatgccatgcgcgaaatcttgtctgaattgagtcttgaattcgtgatgccatagtttgtctcactacaatttcaggacatcctcgatctcaggcgcacccttacccaccgncaccagatgtgtacccgcctccccctcggggccatggacatccaccaccaccccatggcgtgtacccg

SEQ ID NO: 148645 - DNA, 1805 bp, Zea mays
  Clone ID: MRT4577_67090C.1
gaaaaaaaagaataatctctccactttccttcaggatccagcccgcaccaccgaacgttttttcctctctctacaccggccaccgtaacaggaataatccagctcgtgattgaagaatccgatgacgacgccatgcctgggcgccgcggccttaagcgccagctggacggcgcgctccctgacgggggcgtttctcgatctgacgctcgcctgggcctgcctctgcctcgccgcgctcgccgccgccgctgcgcgcctcctcacgctcctcggcctcccgctcccctgcacctgtgcgcgcccgcacctgccctgcctcctcgccttcctggcgcgctaccctccccgcgccgtcggatcccttcacgccgccctccgcgcccgcttccccttcgccggccccaccgacgacgaggcacgccttcagaaaggggtggaggaagagggggaggaggaggccatcgatgtgcggaaggaggaaggggattttcgtcgccgcgtggaggcgcgcgccgagctgcagatggagctcgagaaagagcgcagcgccgcggcgtcggcggccgaggaggccatgtccatgatcctgcgcctgcagaaggagaagtcggcgcttgagattgaggcgcgacagcagcgccgaaccgctgacgagcgctgcgccttctacgaggacgaggtcgaggagctccgggacatcgtgctcgtgcgggagcgtgaggtgcgcgcgctgcgcaaggaggttgacgcctaccgacgcctgctcggttttagcgctaccgaggaggacgaggaggaggatgacgagcaggagatggtcacgccgcatagtttccccatgtacgaaggagagcccagctcgtccaaatcggtcgatgcgaatcggatgcaacattttgggaatgattctgggttcagcttcaagacgccatcaccgcgtgaacaaccaacggtgccgcctcttactgcagggcaaatcaatgtgggaagcgatgattgtgttgctgttcagacgccggccaaagttcccgtggttcaatcaagactggagctagatagctctgaggatgaggacgaggatgaggatgatggagcagagacggtggaaatcctccccctatccgcccggagccaagatttggatcaaggtagccatttccatgctgatactgcacaaggtatggaatcgacttgtaccaaggaacagacagctcatgcatttcaggaagtcgagtgtccaggtatagacaagattgttaatgaccagataggaagcaagaatgatgccaatgtgtatgatgtgcatgtggtcgatgacatgcgcttctcaacagaagtcaagggcctgattggccgaagcttctcagaggcaacaatgcaagcagagagattacagtctcgagctgttgcagatgatctccttgagaaaagcctgaatgccatcaaaggtgcacaggacaagataagaaatgcagctaatgaaaggaggcagtcattacagttgcaactcttagaggacatagctgatcaacttcaaggaatcaaggatgctgcagaagcagggaggcaagtattctgtgctgctcctaaaagctccaagaggagctagggacttgtgttacgccactaatgcatggttggcgccgtacataagtgtttcgggtttgtagaccaggtctgttgatttgttgattcaacaagtttgcttcttctttaaataagtagtggctattgctttgtacatgtatatatataaacaacatgggattcatcccagtctttataaaacgaatatatgtgtaaag

SEQ ID NO: 148646 - DNA, 147 bp, Zea mays
  Clone ID: MRT4577_67091C.1
agggtagggattatgttgggtgttattgcctgcctccagactcctgccgagaggactaagtattgttcacaactagcacccacgtcacaacgctagtgtgctaaacaacccattcgtattacatggcccactatggcccaacatatt

SEQ ID NO: 148647 - DNA, 777 bp, Zea mays
  Clone ID: MRT4577_67092C.1
gggtacctcgaggccggccgggccgggcttctccatcgactcgttccgacaacgcccgcgtctagtctcgtctcgtctcaccattcgtcactcgcgcgcgccgtcgtccttctccgccgtcgtccccgccgccgacgatgcctcattcgcgcctcaaatggcgcaagcggaagctcaaccccgacgcgtccccgtcgaagccctccatttctaccgcggcggccgaccactcctccgaatccggctccgccgccttaaacgacgacgaggacccctccgccctcggcgcgacgggggacggggcaaccgacaacgacgcggacgccgcggcgtccgaggaccccgcggtcgacctccgcgaggcggaggttctgccctcggccgatgccatctctagcttccctgccgccaagcgccgcgtggtcaaccggccgcatgcgtccatcctcgcgctgctcgaggccgaacgatctgcttgttccggcgatgtccctaccgtggcactgccggcgctagagaacatctcgcacgggcagctgcaggtgctgtctggggtgcttccagaccacccatcccttgcgacagaccccgacaagccgtccttgtatgtgtgcacgccgcctcccctcatggagggtcacggggtgcccaagcagttccagggtcgcctccatgtggtgcccaagcactcagattggttctccccagggacagttcataggctggaaaggcaggtagtgccacacttcttttacagggaagtctccagggcatact

SEQ ID NO: 148648 - DNA, 554 bp, Zea mays
  Clone ID: MRT4577_67093C.1
cttgtcaacaggtcttttgacgatattaaattgaggcagttactcctacaagataagttggttatatttttgcatttactgggttgtgataccaatggccatgcacaccgaccctattcaagcatatacctgaacaatgtcaaggttgttgaccaaatagctgaaagtgtgtacaatcttatggagaactacttcaatgacaatcaaacagcatacgtgtttactgcagatcatggaatgagtgacaaaggaagccatggagacggacacccttcaaacacagatactcctcttgtggcatggggtgctggaattagaagcccaaagttcctggcttatacagagaaacctgatgacggctttcggtttgtagataaccacaaacatgatacacccactccaaaagactgggcccttgaaggatttgaaagagtagatgtcaaccaggctgacatagctcccctaatggctacacttggtgggtttgccatgcccgatgaattctgtggggagcttacctactccttatttgaaactaagaagctgatgaagtg

SEQ ID NO: 148649 - DNA, 348 bp, Zea mays
  Clone ID: MRT4577_67094C.1
ggcccccaaaaaaacatgcccattttatttttttgggggttcacaattccagattgaataacgggggcccaataaaaagaggtcacaaggggggtaacagagattttgaccccaacccttgggtacccattggcggttttgccctgtcaaacaatccacatgaaaaaaaaaaatctggttttgacttaactggggagggccgcctgggacaaccagatgttttaaggaggggggggggattcccttttgggcggggcaaaggcgggagccaccggggcataaaacgggtaaaatattccggggagccttcccaaggtctggggcagcaggcaaataaaaaactttttt

SEQ ID NO: 148650 - DNA, 343 bp, Zea mays
  Clone ID: MRT4577_67095C.1
acgcacacgcgctcaagaccgcattataaccaataattccaatctcacaatcgggcctagtacagggaaaacggtaaaccttctggtaccttacccctctcaacaagcttctagggaccgtgattacataacatgaaccaaaggctaatgacgtccatgaacgacaccggcgatgcacgatgaggacattaacattgcaactgatgcatgcatatgcaggaaatgatgccaacagccagaataccgaaatgctctttatatgaggtaggtcaagtgaagaagagcatgaggataacgacacagaaaacaagtccagagacaactaggcgatcaacccgacata

SEQ ID NO: 148651 - DNA, 285 bp, Zea mays
  Clone ID: MRT4577_67096C.1
atggatcctaagggcaaggggattgtgatcaatgataaggagaaggagtctttcgtcaacgagccaaaagatgacaagcctaccgactcgggcttaggccacaaacgaaaagatgggaagaagaagaagacaaggcgcatcaaggagatcgtctactacgacgacagcgacgagtcctcttcttcccaaaaggacaacgacgacaacgactatgagaaaaagaaaacaatcaattcgaacttttcttttgattactcttataaatcttacaagatagcgctataa

SEQ ID NO: 148652 - DNA, 165 bp, Zea mays
  Clone ID: MRT4577_67097C.1
ctcaactccatggcgctcgccaacaagggggggaacgtgctgatcgtgctcaacgagccgcagcacggcaccaagcgccgcagccagattcaaacgttgctggaccaccacggaggacccggcgtgcatccacatgcgcgctggccagctacgacgtgctcacga

SEQ ID NO: 148653 - DNA, 539 bp, Zea mays
  Clone ID: MRT4577_67098C.1
ctctgagagatgaagaacggtattccccccagtgtcagccgtgggcagacctgagcccctccctctctgggatgaacagcagagcggccgccgcttcacctgctgcctctcttacgaccaacgcccgctggtcttccgtcgttcctccggaggcggacaacggcgaagaatttcccctcgtcttgagggacctcgtgtctttcgtcctgcggcgagctatagctgtaggtccgatgtgctgacatcgtctacctgctgatgtcttgagaatgcggcaccaggatgcgtccgtgtggccacccgtcatcaaggaacatggataggatcactacgacgtgggtgatgattcatgctatcgactactatggcaagtaccttgtgaatgacgcctctgactataccgcgacgatcgtctgggttggcacggcgaatgccccatcccaggttctagcaaagctgtatcgtccattatggtcctgagtgacaggttgcttgggcccatccaaggcacggcgctatcctggcttcatgcgcacatg

SEQ ID NO: 148654 - DNA, 294 bp, Zea mays
  Clone ID: MRT4577_67099C.1
aaacgaaataaatctcaaccaattttttgtttttttttaggaaacccatgccggtttgggggcccctttttggagtcctttttttttgtaatttaaaaaatggcccctccaacgaggggttgctgccttaacaaaacaggtttttttaaaaaaaaccggttgtttggcaacaatttttgttgttgtaggaaggcacccaccaatgggttaccccctgccaagggattaaaaaactgttgcccctgttggaggcccccaacaaagttccacataattagttggttaaatggaaac

SEQ ID NO: 148655 - DNA, 107 bp, Zea mays
  Clone ID: MRT4577_6709C.1
tttttccttgttctttgacaccctcttcctgggagtgggagagttagagtgaggcagcttgcttcatacaagggtaaatgttgtaggtagcgcatggtagctaaact

SEQ ID NO: 148656 - DNA, 478 bp, Zea mays
  Clone ID: MRT4577_670C.1
caaatcatatcatcggggaccaatggatatggggttacaacatatgcaatcggatcaaccaacatgcaggttgacacacttacgtacatgagcacaaagactgactcccaacattgcagagagagatagcaaactgaagaactctgtttctgtctctctgacacacaccacacaatacctatgtatggcagccaggtcggcctcgcttattattgttcaaccaccaccacaagctagatagataataatcatatccatggtcgtcgatcgatgtgatcagcagttgcaggggtcgaacttgcagttgccacctgaggtgcagccgttggcggtctcgacggactccgccgtggcctcgacgaactcgggcgcggtcttcttgtccggggccacgccgaggacgactgtggccttcgcggcggtgctcgtctccttcaggttagggtacttattgccgcactttcagattgagccgcag

SEQ ID NO: 148657 - DNA, 519 bp, Zea mays
  Clone ID: MRT4577_67100C.1
ccggcccgggaaaaaaaaaaataaaaaaaaaaaaaaaaacatctcttcgtcctgcgcatcacatatctgatttggacttgcacggttgctcagatcaaaaatactcatctctaaacaaaaaacaatgcaatcgcgacctagggtacctcgccatcctatgtctggccatgcatcccatcgtcgcggtgcccggcccagacctcaactcaccactacattacaccggacccacacaacgcgcgccgcaccgacgtgcgcgtcggtgccctgtcatgacaccacaccctcgcacggtaagagctaagctacgcagcgcaaggccaactgcaatgtgatctaatccactccggcgtaccctaagaacataactctgttcttccgctccgcccgactggactggtctcggacccacgccgtgctgtcctgcctgtacgaaaaactacactaccaccaccaccccatgagctgaggggaaggtgagctgtcactacactacacggaggtggtgtgactccactc

SEQ ID NO: 148658 - DNA, 1014 bp, Zea mays
  Clone ID: MRT4577_67101C.1
aatatcttctttttttttttcaagaatcgaacgcttcattgaatagttatcagattcttcgcttcccttccctttgttgcaaataacattatccagagctttttttcttcctgtactcctactgtctactaatgatactgcttaattaagcccgaataacatggtgatggagcagaacattcgactgctccgcatggaaccgacgtgtgggctgctcttagagcgttcttggcttgcacacgatggtggaatgcttcaagatgtggagactgaactggcctcccttctcggtggtgtcgaccttgtcctgcccgggcggcggcagcagctcgaagttctggacgaggcgaccgatggtgatgccgaggatgggcagggcgaggatgatcccggggcagctcctgcggccgacgccgaagggcaggtacctgaagtcgttgccgttggcctcgacgtgcttctcctcctcgaggaatcgctcgggccggaactcctcgggccgcctccagctgtcggggttgttggcgaggtaccaggcgttgacgaggatcttgctctcggcggggatgtcgtagccgccgagcttggcgtcgtggaggttcatgtgcggcaccagcagcgggatggccatccgcagccgcagcgtctccttgatcaccgcctgcaggtaggggaggttgtgcgtgtccggctccgtgatctggtggcccggcccgagcaccgtgtccagctcctgccgcagcttctgctggatctccgggtggttcaccagctcagcgaccgcccactcgatcgaccacagcgtggtctcgatcgctgcaacgttaatgttctcgacgatgaagagcacgttgtcctcgttgatctcacccttctgctgtgcctccagtatgtgatcaatggcgcacttgaggccgttgctgtccgtggccttggtgctcgccagcttcttcctctcctcgaggaagaaatccttgaagagcttgaggcgggtctccttgacccggacggtgg

SEQ ID NO: 148659 - DNA, 292 bp, Zea mays
  Clone ID: MRT4577_67102C.1
gtcgtcctctttcgtacttcatatagaaaacatttataattatttactctttggacatagcttacaattcatttttttgtctttttaactttgaacattttttaccatgcatgacaaataagcatatttttattcatcaagccgttccagtgctcttgcgttttaatacctccaaacatgattttctgatagttgattcttatgtaactttgtgccccaatgcatgcaagctgtaatgtaattggcaggaagtttacgcagatatacgaaagattagttggtttcacatgag

SEQ ID NO: 148660 - DNA, 841 bp, Zea mays
  unsure (1)..(841): unsure at all n locations
  Clone ID: MRT4577_67103C.1
gttatgttgcagcttncttgatctgcaatctgacagtagtattgttttatgggattagtctcaagcgtctcatgcttttcactcaatgagaattttcagtcaaactattttttatacatgtttatgttttcctaattaaactgttctgtgtgattatgttcgacatattgtcctttaattttatagtgaggtcttattaatattatacttttttgtatcttcttgaaaatgcatgcgctgttcttttttccaacatgtactgttgtagttaccaaaaatggcctttgtttctgtagtcggttgatgtttatggagctgcagcagtatcagagaataatcttgttgggagagtggaattggactatttctcatttaccttaaagtggagcaaagttagcaaactccacaccattctagtgcaggtggttctgcttaactattttttcgattgttttttttttgcctttttcctattctgtatcctaggggcagggccttcaattgcatgtggcacaccccttgggcacaattcaatgttgagatcacttaggctctgtttgtttaccctctagattatataatccagcttaaataagttgagaggtaaacaaacaacacacagattattgggtggattatgtaatctagatacctagattataattatccataagcaggtcaataggtgcttatataatccataagctggattatataatcctggaaggaaacaaacagggccttactcatgcaagtgggtaagcataggaaattgcagatacaattaattttgtcagtccaatagattatagatattggagatcactaactaattgaaaca

SEQ ID NO: 148661 - DNA, 324 bp, Zea mays
  Clone ID: MRT4577_67104C.1
tttccaccactgctggaccggcatcccaggtggccattgccgcagctgtagatgggtcagattcaaaacatcatccactttctaatgccaatgcattcatacatgctgaccgacttctccttgaacccatcgccccactactacccgtacccaaacgcttgcgcgtggatgccgatgcttcctatggcagtaggtataggtggtgactgcagatgccctgcacctgaacggggctgcactgcttgtactgcgctggccccgccctaaccactaagctggtaccaccagatgggcaccgggactgcttgcgcttgcggcttcgat

SEQ ID NO: 148662 - DNA, 342 bp, Zea mays
  Clone ID: MRT4577_67105C.1
atggcgcaaccgacgaccagtgctatggtgccgcacgccttcgttgccttcccagatttcgatgtcgaggagaaggatttggatgaggtgccggttaacaatgacattttcaagaaggatgttatggttgtgagtcctaccttcgctattgagcttggtggacaggatggggcagcctttgtcagtgaggttgatggggaggctattaaatttattgggaaatattcagtgaagattgagctgacaaagagcatgtacatccgagggggcaacattcaattgaatagagcttttgaattgaatggactggagtatgggccgtaccccgaggatgtggagtag

SEQ ID NO: 148663 - DNA, 514 bp, Zea mays
  Clone ID: MRT4577_67106C.1
ccggccgggacacgagtgttattgtaagactctatccgaacagaaaaaaaaaaaaaaaaaaaaaaaaaaaaaaaaaaaaaaaaaaaaaaaaatttttcactcccacccctcacttttccctagccgccacaacacttctccctctcctccttccagtcaacacacgcatcctccctgccttcttcttcctcgctgctcacggcaccaacagcagccagcgcaggatctccaaggtcgccagcagcctcccatggctgcccagcagccgagcgcccagctcatcccctccccagcgagccctcttttccatgggcgcgggcctccacctccctgcttggatgttggtcgagctcccctggagcaggcgcttagaagccatggcgtggactccatttttcctggcgcagcagcaagctccctcccatggggcctccacctgcctgcgcgccctcttacccatggggctggccactctcccctgaccgagcccccgggaacctccatggacgcccct

SEQ ID NO: 148664 - DNA, 382 bp, Zea mays
  Clone ID: MRT4577_67107C.1
cggaagccctagttgctgcgggaaccgccctgccggcccgccactcctgggcccgaagtgtacctgttggcttggatgcacccactgctccaaaggatgcccatgcgcccgacgtggagatccgcgaagtctgggcgagcaacctgcatgaggagttcgaggtgatccgcgacatcgacgacgcgtacacgtacgtcggcatggacacggagttccccgtctacgtggagcagcccatcgcctagtaccggttcacctgcgaccgcatctacgccggcctccacggcaacgccaacgtgctcaagctcattcaacttggccttaccttctccaacgaggcatgcacactcccaccgtgtggcacgttgggacagtgctgtat

SEQ ID NO: 148665 - DNA, 427 bp, Zea mays
  Clone ID: MRT4577_67108C.1
aaaaaaagcctccgcctcctcctcctcctcctcctccgccgccttccgcctgttctcacttcccgcccctccctccggacctagacccctccaagcgccagcgccggtgaacaccgctttcccgtacctgcgccatgggccgcccaaagggcggcgccgcgtcctcctcgaagaagccgaaggcgaagcagaaacagcgaggtggcgtcgacttcaagaagtacaagcacaaggtcgggcgcaagcttccgccgccgaagaatgccaccaacacggaaatcaagtccaaaacgatcgtgctgccggagcagagcatggcgtcggagaggacgggcatggcagtgaacaagcgcgggctcacgctacgggagctcctgcagcagacggggcactacaatgccaatgtgcggcgggctgcactgaatgg

SEQ ID NO: 148666 - DNA, 339 bp, Zea mays
  unsure (1)..(339): unsure at all n locations
  Clone ID: MRT4577_67109C.1
aactcaaaccgaggtggagaanaaaaacaannggcgccagngcncaaaggagnccngagaaggagcanganagcagngagaggganggnagagaacncanancggagnccagaaggcncggnaangangagaccggngaagnnaaacnaaagnacacanngncngaanngccngcngannccagaccncngcgaaggggaagcaacaagaaaagnggggcncagcgcggagaacnncncaagcacaagcnacannnncnnnngaanccggngcaggnnnnngaannaagnncnncacaagggccagaaacaggaagaaaanngngcagaaaggnaccac

SEQ ID NO: 148667 - DNA, 195 bp, Zea mays
  Clone ID: MRT4577_6710C.1
tcgaccacgcgaaagattagacatgcagtttcgctttcttgactatggtcatccaacaagcgtcggcgtatatattatgaagagcttagaatccgatttatggtaggaccaacatcgggaatggagacatgtacaagttcctttaatacatatgactcatttagccaagcatgatacactactaccaactttaca

SEQ ID NO: 148668 - DNA, 382 bp, Zea mays
  Clone ID: MRT4577_67110C.1
ggcacatgaactttttgatttcagcataaggagcacacgattgtacgctcccaacaaaacaagaaatccaagcatcagtattcgattatttgggaatcgccggattgcgatatggttgtttaatcttatcagaggggcgctttttcgttacggttttggatcggtttgggcatgacggcaatatcaacatcgacacttatcatcacggctcgaagcttgcggtaatttttatcaacctttaattcatggctttaatgaggcgcctgatggaccaactccttgggcctaatacattcttcctactttcgttatcttacaactcccattgttaccttgccaccagccccgtcttcgcaatccaagggtctggtagtgcggtggc

SEQ ID NO: 148669 - DNA, 1261 bp, Zea mays
  Clone ID: MRT4577_67112C.1
ccacgcgtccgattttgaaaaggcttcaacaatttgtgccgagagtgaagtggaagctcttgggggtgttgaaggatcaaccctagaacaattaagtgctcgtattaagaaattaaaacagaaatttcagcaagaaagcagaagatatactgaaaccattgatgatctgagagcactgcatgacaagaagggacagaagatcctgagaaaacaacaaatgtattcaggttttagggacaaattaaatgcatgtcaaaaggcactggacttgagatggaagaagtttcagagaaatgcgggtcttttgaagcgtcagcttacgtggctgttcaacgagcacctgggaaagaaaggtatcagtgggcacatcaatgtagattataagaatgaagttctgtctgttgagctgacaatgcctcaagatgcgtctcgtgataccattagagacactagaggactttcaggtggagaacgatctttctcaaccctttgcttcaccttgtctcttcatggaatggccgaagcaccatttagggccatggatgagtttgatgtattcatggatgcggtgagccgcaaaataagcttagacaccctagtagattttgctgtcgcacaagggtctcaatggatatttataacccctcatgatatcagcatggtgaaggctggggataggatcaagaagcagcaaatggctgctcctcgcggttgacagtgttgagacccctgacccttgtaaatgaagcctgagagccttgggcatgggagtgaatctgcttggaactactacttttatattttgtttgtagtttgtacatagcacattttgaggcaatgggcgtgtccctggtcaagagtttgttcctgggcagcatcagcagttctgtagttgcattgctgtttggacagggtcccactgtgctatgttaaagagtggttgatgcatgtcttttgaaataattgggccttgaacatactgcggatgtaaatgaaagaattgcggctgcagatgtcgatgaaggtagccccgacttggactctgctgattgcaggaacctgagttgatgaaggttctgaagttatgctatttttttcatgaaaaaatatgtgggtcccactcaaaactttgacctaactaaatatatccaaacaattgattgggtctgtcttaattgctagtttcttttgtacgagatgcggcagattctatacatgcatggctgatatcatgttctacagtttgacttgtttcccaaat

SEQ ID NO: 148670 - DNA, 245 bp, Zea mays
  Clone ID: MRT4577_67113C.1
tttgtttatattcgtgattcaccacatgagagaagtgcacccttagaaacaggaccattaattaaaactgtttttgactattgcattcaccatgaatataccaacatcataccttctcaggaaaacaaatctatttattaaccagtagaggttagttgccaagctgtcagattaccatattactttctagaagttgtcataggaagactaataaaattcttaggcattattagacaattctcccc

SEQ ID NO: 148671 - DNA, 1166 bp, Zea mays
  Clone ID: MRT4577_67114C.1
gggtacctcgaggccggccgggccgggcgggagaaccactggatcggccactgccagcggcacagccgacgccttatccagcaaccgtcttcctcatccatggcataagccgcgcccgcctccgcacgccccgctccgatggcagccacggctgtgaccctgccctcctcgggcacgcccttcgccgtcgccacaaccgcctcttcctcatccgcccgccgctgcctgctcctgccctccgcggctccccgccgagctctccgcgtcgtggcctccgccgctaccgaggcgccgcccaagcccacgcagccgccgacctcgccctccggcatcgtgctcgtcgacccatccgaagcccagagggtgcaccggctcaaggccgtctacgaccagaaggtcgtcccgctcatcaccgaggagttcggctacaccaatgtccaccaggttcccaagctcgagaagattgtggtgaactgcggtctgggcgcggaggcagggaactccaaggggctggatgccgccatgaaggacctggccatgatcaccgggcagtggcccgtcaagaccaaggccaggaagtccgtggccagcttcaagatccgtgagggaaacaccatcggtatcgcagtcaccctccgcggcaggataatgtacaacttcctggataggctcatcaaccttgggctccctaggaccatggacttcctgggtgtcaaccccaacagcttcgacgggcacggcaactacagccttggcctccgtgaccagggcgtgttcccggagatcccgtacgaggtgggcgggaagaagaacggcatggacgtgtccatcgtcaccagcgccaagacggacaacgaggcgttcaggctgctggtcctcctcggcatgccattctcggagaacatcaagaccgacgtggtgatccggaagaagaggttgaagcgccaccacttcctgagcaagggcaaggggaagggaggacgacggtgaggagaggaaccagccagccagccagcccatggttgcacacgctctgttcagcttgttttaattccgatctttttgcagaatttggcttacaaattcgatgctgttgttgtctgtcaattatgtaacttgtgcacctatgaaaaaggtttgcaatgatcatgtccgttttgctgatt

SEQ ID NO: 148672 - DNA, 731 bp, Zea mays
  unsure (1)..(731): unsure at all n locations
  Clone ID: MRT4577_67115C.1
ccggccggggtcaaggctcttgtcgacattggtttcctcagcaccgatgagcaggacttcttcaagcagtccatcccctggaaggacgctctccagaagttcattggtgccaactcatcaagcgaggaagacctgaccaaggctatcctctccaagacctcattcaaggacgagtctgttaagaaccaagtgctggctggactcaagtggatcggcgtcttctccgatgttaagaccaccccccgcggaactgctctcgacaccctttgcgcttctcttgagcagaagatggcttacgagaagggtgagcgtgatattgtcttccttcaacacactttcgaggtcatcaacaaggacggcagccagaacacctggacttccactctcgttgagtacggtgcccctgagggctccggtggtttctccgccatgtccagactagtcggagttccttgcggtgttgccaccaagatggtcctcgacggtaccatcacagacaagggtgttgtcgcccctgtctaccccagccttgcccgaacattgatgaacgagctcaagaacaactacggtattgagtgcaaggagaagatcattgcttaagcgacttanaatacagcggacagacatcatacaaggctatgtacaatatcaagccatttgaggngtcccacacgcgagactaanagtaaagcanaacgaaatgaagaaagaaataaagcttaatgacactc

SEQ ID NO: 148673 - DNA, 354 bp, Zea mays
  Clone ID: MRT4577_67116C.1
attcggctcgagctggagccggcttgtttttctacgggcagatggacacgttggttttcagtcacgtccaaagactacgactcctattaagtggctagagcagaagctcgcacccaggtacctgtacaatatgagtcaagatcgtaagatcctgatgatgtctatgctacctaatattacagcacgcaagtgttacatgtgccccttggtatgctatcagatgaactaattcggatggatctcgtcgataatttgaaccttcttctgctatcagatgaaccgtgttctttctgaaactgcgtttattcagtttataatgcgaaactgtgttctgaaaaaaaaagaaataaaagg

SEQ ID NO: 148674 - DNA, 113 bp, Zea mays
  Clone ID: MRT4577_67117C.1
cttccttccgcggactacttttttctgaacattcggcgatggcggagacgatccaatccgtgaacgcgcgccacatattttacacatgccgcgaccctacatgcggggtcgac

SEQ ID NO: 148675 - DNA, 168 bp, Zea mays
  Clone ID: MRT4577_67118C.1
gtttttccaccagagaaagtaggataattccacacggcagggtctgttcatgagtcgattgttctttaggccggcactgtgaaatctatgttcatttgctccacattgacagcccaatgcaacatagaaactaacgcagcacagtgaacagctgatcacattcattcc

SEQ ID NO: 148676 - DNA, 265 bp, Zea mays
  Clone ID: MRT4577_67119C.1
gagcgaggcatccctgaattccacgcatctgctggaaacgagccgtgtcagatcgcacatccctgcgcccccatgcccccatgcccctctgagtcacacaggacagaggaggcagagcttctgcccactgttatcttcactttctttgtccagtcttttgtttttaataagcagtgaccctccctactcttctttttaatgatttttgtagttgatttgtctgaactgtggctactgtgcattccttgaataatcacttgtaaaa

SEQ ID NO: 148677 - DNA, 658 bp, Zea mays
  Clone ID: MRT4577_6711C.1
agatcgattctccgagatatagaagactatctactcgctctaccatccacgagtcagacctttcccccttctcacaattccctccgtgcgcacgccgcatccatcccgaacctagcacaccatgacaggagtgcattcccatccacatcattacaggccggtatccaccgcataaactcccggtgggagctgtactggcttgagcatgacattcagcgtggacggtcacatgacccgtgtgacaagaccatctgggcgaggtgatgatgctttcatcaccttcttcagagatactgaagctggaaaacacgtgccccgtgactgatctttgttgaccgtgaactcaatgtcctccatgaactgaggactgaaacctaccgacaactcttccaccctgatcacctcatcctagaaaaggacgatgactgcaaccaatttgcccgcggtcaatacaccattgtgaaggagattgtagacctatgacttgatcgcattcggaagcttgtcgagaactggactgtgctccagggcttcctcgccatcaacgctgtgggggtagaaacatcctctggcactatgactccctcctcctagagcgcctgtatgttgactacggcaagaagtcccagctttgagttcactgtgtacccttcccccc

SEQ ID NO: 148678 - DNA, 747 bp, Zea mays
  Clone ID: MRT4577_67120C.1
aagccgccgccgccgatcgccgaccgccatggcttctggtgagctgccgccgtccaagaagaaatccgctcccactaccataagctccctcggcgaggacctcctgtgcgaggttttcctccgccttccctccctccctaccctcgtccgcgccgccctcacctgccccgccttcctccgcgtcgtccgctcgtccccaaaattccgccgccgcttccgcgatcttcacccggccccgcttctaggtgtcttcctcgacatctacgaccccggtatgcccgccttcgtgcccatccgccgccggtccgatccggaccacgctgccgccgtccgcggcgccgatgtcttcctcacccgtgttcctgacctggaagccgaagaggaaggcggtgccgaagatgaaggggaaggggaagacgaagatgaaaacatcgggtggtcgatgacggagtgtcgcgacgggtacgtggttctcgtcaaccggactgtcggccggatcatcaagcgggtggccgtctacgaccccctcacgcggggcctgcacctcctccccgcgccgcccggagacccagaagagactgaagttgagttccacgtcgtcacgtccgatgaggaccgccggtcgctccgcgtcatctgcatctgcaaggaaaggaagaaagtgcgggtcgtcgtcttctcgccggacagcaaggagtggcagatctccccaaaagcaccgcgcctgaagctgcaggccgatgacag

SEQ ID NO: 148679 - DNA, 227 bp, Zea mays
  Clone ID: MRT4577_67121C.1
tctctcacagcccctgtcctctcctgtgtgatccggcgtcaccagggcctgcggcctgccgcggactagcttctgccgtccccggcggccgggctcgggtccgcgtcggccagcaagacggtggccgcgcttcagggcgcggcatctgggctggcccttactgggtatcccgccagaggcgcagagtgcggacacgacagcatccgttcagagaaaaagttaatcta

SEQ ID NO: 148680 - DNA, 616 bp, Zea mays
  unsure (1)..(616): unsure at all n locations
  Clone ID: MRT4577_67122C.1
tttttttttttttgttgtattccagcgcgggcgtgtcctccgggtcccctgcttaatccacagcgtgctctcgggccttcgctctcttcctccccgcgacgttaccgaacctttcggggtccctgcgttctcgtccttccgacgccgtgactgagcactggcctcgccggcactgtgtccttagcgccactggcctcccctgtactccttcctgttcgactttgcgctgcctcggctcccacgctctccccccccgcgctgtccctccgccccccccgctccctcccggccggtcccgcggcccccccgtcccgcctccccctcggccggtggcgcgtctgtcccgtcctccccacgctcaattgctcgatcattccactggagtcagaggagcaactgtgctatctgttcccccgtcataacctctgctgctattggaggctcttctgccattctgatgcacagccgagtcatccgccacaacagtgttagaagacgttgtagattgcatatccacttcctctatgttgtgttgatccctgatgctgtttagcggnggaattttgccggtgacaggagttttgtcggggggtcagggacgatcctggaatcatct

SEQ ID NO: 148681 - DNA, 717 bp, Zea mays
  unsure (1)..(717): unsure at all n locations
  Clone ID: MRT4577_67123C.1
accgagtactttaaaggggtcggccttctttttttacatatttagacaataattagtcaaaggtcggaccagatctgaccagtcggctagatgcctttatcgtattagttttccacgtacctatttctggtcgtcgtggttcctatgcattgtcggaccgtccactggaatggtctggactatccgacggtgtcccggaccatcagcgtctgtgcatcggatcgtccgcgatgcgcaaaataggtgcacgcgcctggttccttgcttgctcctgtcccccggcgttggaggtggtgatggtaactttcaaagtctcccctccattaggactcttttccgccaccactttcctgcaagagattttattattctcatcgacctttcgcgcatcgccaatgattacttccttggctttgcccttattggccatgtcgggctgaattaggacctttttgtcctcgaagtcgatgacattcactgggaagggctccgtatccacctgcatttcctgaaatttcaatcgtccctcgttaatggccgattggatttatcgtcgaaatacattaaaatcattagtggcatgagaaaacgagttgtgccacttgcagtatgcacgacgttttagttcgtcgccggatggaacagtatgatttttttttaatgttgacatttttgagtaattcgtcanatattttattacatttaccaacattaaat

SEQ ID NO: 148682 - DNA, 344 bp, Zea mays
  Clone ID: MRT4577_67124C.1
aatcttcttgggggcatagaggaaaggcctaaggggggagttttctacctacaaaaatgttcattctgcaccgaatggaccatggaatcacttatgtgcatagaagggatcaaacagaggtaacagcttgacaaactggattttgcgcccttgtgagaaggaccttaggcggggcagctaacggtgggagcacccaacggaggagtgtcgaaagcttatctgagtctgttttacagagggagggcccgttgctcagaaacttggatagggattagtctgcattacagggggttctgcgcttgaaaggggcgacagaccgttgagcgacaacacacaccggacac

SEQ ID NO: 148683 - DNA, 138 bp, Zea mays
  Clone ID: MRT4577_67125C.1
ggtttcctgatcgggaccagcgtcatacagtggcgtgtgtacccctcaagctccttgtgcaatcttcagtcagtcagcacacttggcatttgaaaggtacacacgggactgtatgtcgctggccccgatcaggattcc

SEQ ID NO: 148684 - DNA, 161 bp, Zea mays
  Clone ID: MRT4577_67126C.1
gcgccaggagtttgcggtggagccattctagacttgaatacatcttaattagttcgtcagacacaatcagaaaatggtcacggactttgagactcaccatcaagattacattgatgaatggtaccagcagggggatctgaactatgataatgaccaggcgc

SEQ ID NO: 148685 - DNA, 274 bp, Zea mays
  Clone ID: MRT4577_67127C.1
acatataaatggagaaatattatttatatatgtgcgtaatgcgtagcaacataggtgagagagagagagagacagagagaggaaaaaaaaagaaagaaaaaaaaaaaaaaaaaaaaaaaaaaaaaaagaaaaaaaaccaagagaaacaagaccggggaatgctgttccaaaaaaaaaccacccagccgaataaacccaggcttttgtttgtctccaaacgtaaatggttaaaatcaatagtggcggggaaaagaatgttgtccccggggggggg

SEQ ID NO: 148686 - DNA, 491 bp, Zea mays
  Clone ID: MRT4577_67128C.1
tttttttttttttttttttttttttttttttttttttttttttttttttctttttttttcataatttttttctatcttttttaacaactttttttaatttgctttaaccttttgttttaaacattcaatgtttaacaaaacaaaccacataaatttaacccaggaaaaaaaaaaaaacgggcttttgtctgcggacgaacaaacacaaaaaaaggggggggaaaatttgaatacaacaagagcccccgggggaacaaaataccggggggaaaaaatgttgccctttcaaaaaaaagttttaacacgggtttttaaacccccccgggggaaaacgaaaaacccaaacccccccttaaaaaaaacgaaaaaaaaaagcccccccccaactaaaagggggacttccaaaggaatccacaaacacaaaggggcgccttggactttgaatgggggccccccaaaaaaaaaaacttgaaatcccatgcaatcttttg

SEQ ID NO: 148687 - DNA, 132 bp, Zea mays
  unsure (1)..(132): unsure at all n locations
  Clone ID: MRT4577_67129C.1
ggnngaganngngangggccnngaggagcacggcgacannagcgnggaggagggcagcgcgcagacaanngccaccgnngaagacgccgcngaccncaaagacaagcnngnngcngngaaggcanaggccgc

SEQ ID NO: 148688 - DNA, 1002 bp, Zea mays
  Clone ID: MRT4577_6712C.1
attcggctcgaggtacattctcttcctcgttttttcattctcccctctcctagtctttggcgcgtagtggcgaactggagaggtgtacaatcgtccggcgatccggacttcgattggttctctgctgttggtctgatgggaagtaaagacggcatccggtgacatatcagaagcccaaggctatgctgccgacattgattccatcagggaggcgcaggcccgcattgcgccgtacgttcacaggacgcccgatatgtcgatcacgtccatcgatgccatggtggggaagaagcttttcttcaagtgcgagtgcttccagaaagcgggcgcattcaagatccgaggagctttgaattcgatattcgcacttgacgatgagcaggtatcaaagggcgtgcaatctcaatacaaatacagacattcttatttaactccactataatacataacaactccccgaccccccacacccaaacacacaatatgccataatgccaatgagcacaagcacaccttctaaaaggggaaatgaacacgatgagtcaaattaagcatcaaaactgctatgacattctatttcaaaaatccatgatgtgaacttatgtaagagtagatttgtatgtgctgagtcgtaaaatacggacatgttgtgatattccagagatggtcctcacttggatgggtgatggagtgaagcacgcccagcacgagcagcgaatccctcgcgcggagtatgtctcctcgctcgaccaaattcctgaacgccgttttgatctcgtcatcccggtggtcccgcgtggcgtccagcgccaccacgaccatctgtggcggtggcagcggcgacgccagaatcacggacggtgtcgctgtctcgccctggggagtggcgtaggccgcccccgacgacgcgggggtggcctggtcgcccggcgccgatgaggaggacacgacaaggcgagcccacggggtctgaaagggtgtccccgtcaccgcggcatgccc

SEQ ID NO: 148689 - DNA, 3759 bp, Zea mays
  Clone ID: MRT4577_67130C.1
atggcttcgaataaaacgacgcctaccgcctctgggattggagcagggtttcccctaagagctgaaagtgaagtcggtggagaagggagtgagacccacctccccgcacctctagagctacccttagatttagcccaagttctagccaaccaaacccgacccattgaggtcctcactagaagtctggagaatcaacgcccgaatggtggaagaccacaagacaggatgggagatttcctgaggctcaagcctcccacattcgctggatctagcaatcccctcgatgctaatgattggctgcgcacgattaaaaggaatctagaagccatcggatgcccggagaatcagcgtgttcaactggctgctcatcaactttccggaatggccttagcttggtgggataccttcaacgctgccatcagagatgctacctggacagagtttgaaactgctttccgagagcaccatgtgccccaagggatcgttcagctcaatgaagatgaatttcgggaactaactcaagatggaagatctgtcagtgaatacgtgcacaaattcaaggaattggcccgctacgcgccagatgacatcagcaccgaaaataccttagcactcacccccaaggcgccctcctccatcagccagcaaaacaagacccagtatcaaggaagggcacgagtgaatcacattgatgctcaggaggctcagcaagctccgggagtagtgctcagagcatcccattcttttatagccactagttttgtggaaaagcatggcatcctctctacccctctagagattcccttggtcacccgaaccccagggttagaccttctatgccagctcaaatgctcccaagtcagaattcttttaagtggggtagtgttctcggcagacttaaccgtcttgccatcccaagggattggtgtgatcttaggaatggattggttaaccaagcacaaaggtataataagttgcgcaaacaagacaatccttctcgcagaccaccaaggaaagtcagtctcttgtcaggctcagccacccgccaatgatccaatgatgtttaatctagcaacggaaagcatatcagtggtagaagaattcatggatgtattcccagaagagttgccaggaatgccgccagaaagagaagtggaattctacatagatctgatacctggtacggcgcccatcgcaaagagaccataccgcatggctcctaccgagttagcagaattaaagctccaaatcgcagatcttcaacaaaaagggtacatccgtcccaactcatccccttggggagcaccagtccttttcatcactaagaaggatagaagtttgaggatgtgtattgattaccgatctttaaatgaagttacaatcaaaaacaagtatccattccctcgaatcgacgacctcttcgaccagcttcaaggggccaaatacttctccaagatagacctgaggtctggttatcacaagctgagaatcaaggaagcagatattcaaaagactgcatttgtcacccggtacagacagtatgaattcacagtgatgcctttcggactgacaaacgcacccgcctttttcatgaacctcatgaataaggtatttatggaagagctggataagtttgttgtagtcttcattgacgacatccttatctactccaagaaccgcgaagaccacaagcgtcacctccggaccatcctcggaagactcagggcacaccaactttatgctaagctcagcaaatgtgaattctggttagaaaagatagccttccttgggcatatcttgactgcagaaggaatagaagtagacccgtccaaggtagaagcagtatcaaaatggaggcagccatccaacgtcagtgaagttcaaagctttctgggaatggcaggatattaccgccgctttatcaagggattctccagcatagcaagacctatgaccgagctcctcaagaaagacaataagtttgtgtggacctcgaagtgtgaagaaagtttccagatcataaaggacaagctcacgaccgcacccattttgacactaccggatatacatcaggatttcgtcgtcttctgtgatgcctcaaggcaaggcttaggccatagtgcatgccctgaaaatatggaggcactacctaattgggaacaaatgtcacatcttcaccgatcacaagggtctgtcttcaccgatcacaagagtctgaagtatatcttcactcagccagatctcaacctctgtcagaggagatggctggaactgatcaaagattatgaccttaagattcattatcacaacagaaaggccaacgtggtagcagacgccctcagccgaaaacctttcgggataaagggaaccaactttttagaagattggaagaaggaatcagctcagctgaatgcatgtttgggaaacaacggcagcctagaagtcaaaccaatgctagaagacctcatatgcaaagctcaacgcctggactcggagacagcaagacttatggaaaaagctcgcaaagaacaactttcggacctcaggacagatgaacaaggagtcctttggttcaagaaccgtctgtgtgtaccaaaaggggaggcacgagaagtcctgctcgatgaagctcacaactcagcctactccatccacccaggaaccaccaagatgtacctagacctcaaaaccatatactggtggagagggatgaagaaagagatagcacagtatgtggcccggtgtgacacttgccaacgaatgaaagccgagcaccagaaacctgtaggcctattgcaaccccttccagtacccgaatggaagtgggaggagataggcatggattttgtaaccggactaccccggacgcaaaaagggaacgactctatctgggtaataatagaccgtcttaccaaggtagcccacttcatcccagtgaaaactacctttggaggagccacccttgcccggatttatcttaaagagatagtcagactccatggcatcccaaggaagatagtgtcagacagaggaacccagttcacctccaagttttggacgagccttcagaaagctatgggcaccaagctagacttcagcaccgcctatcacccccagacagatggtcagacagaaagggtcaacaaggtcctcgaagatttattaagagcctatgtgttaacattcgatagaagctgggagtctagtttgccttatgcagagttctcgtataacaacagccatcaggccagtatcaagatgtcatcgtttgaagcattgtatggacgaaaatgccagacccctctcatgtggtccaacgtaggggagaagacactagaagggcctgcctttattaaagaggctgaagagaaagttgccctgatccacaaaagattacttgaagctcagagtcggcagaaaagttatgcggacaacaggcagagagagctcagatttgaggaaggagacttcgtctacctcaaggtctccccgatgcgtggtgtcagaaggttccaactccacaaatgcctgcaagtaccagaaagtctcatcgaagaagaggcaatccagattcagaaagatcttcagtatcgagaaaagccaataaagattcttgactcagcagtccggaagacccgcaactcagaagtgaggctctgtaaagttcagtggagcagagaaggagaagaggaagctacttgggaaagtgaggactctttgaggagggaatacccttatcttttctcaagcccagtctaa

SEQ ID NO: 148690 - DNA, 988 bp, Zea mays
  Clone ID: MRT4577_67131C.1
tgcttgtccaaaccaaacagcgtggatgcatgatactgggctggggtaaactgacaaaatcggtatgggctgggctccatgctagctgagctagtatcaggaggcccccatgcataataattaataggacggaatcttgacccccggcccaaacatatttgaactccatcgtttctgcaggcgacgttggcgccaccggcagcggggaagatgatgaaggcgctggtgctgtgctactccgtcatcgtcttcaccttcttcctctcgtcgatcacgggctactgggccttcggcagcaacgtgcagtccaacgtcctcaagagcctgatgccggactcgggccccgccctcgccccgacgtggctgctgggcgtcgcggtcctcttcgtcctcctccagctgctcgccatcggcctcgtctactcccaggtggcgtacgagatcatggagaagggatccgccgacgccgcccggggccgcttctcgcgccggaacctcgtcccgcgcctgctgctgcgcacgctctacctggccttctgcgcgctcatggccgccatgctccccttcttcggcgacatcgtgggcgtggtcggcgccgtcggcttcgtcccgctcgacttcgtgctccccgtcctcatgtacaacatggcgctcgcgccgccgcgccgctccccggtcttcatcgccaacgcggccgtcatggtcgtgttcgccggcgtaggggccatcggcgccttcgccaccatccgcaagctcgtgctggacgccgacaagtttaagctcttcagcaacaatgttgtcgactaaaattccaacgcatcttgctcttatattactcctcagggtgttgtatatcatcgagttgttgtagcggtaatgtgagtaatcagggcatactagctgtatgtgtacatacattccactattcgagagtataggcaaatcatcatctaagttattaaaaaaaaagagaaaaaaaaaaaaaaaa

SEQ ID NO: 148691 - DNA, 275 bp, Zea mays
  Clone ID: MRT4577_67132C.1
gtggccgcgccggagatcgacggtgcgggaagtgttgtagatgcagagctcagaaatgagaaatgtgagtaggcaacaggatgcgcgtgtagagtgtacgttacgtgtaggtttaggtgcatgcaagtgtaaatacacgggatctccgtgcggtgtgcccagtcacagtttggaactcagcttttattagtgctcgtgttcaggctcaaaaaaaaaaaaataaaaaataaaaaaaataaaaaaaaaatatttaaaaataatataaaatataattt

SEQ ID NO: 148692 - DNA, 2154 bp, Zea mays
  Clone ID: MRT4577_67133C.1
ttagacggggttcgagaaaaggtaagagtattccctcctcaaagagtcctcgctttcccaggtagcttcctcttctccttctctgctccactgaactctacagagtcttacttttgagttgcgggtctttcggactgctgagtcaagaatcttcattggcttttcccggtactggagatctttttgaatctggattgtctctacctcgatgtggttctctggtacttgcaggcacttacggagctgggacacatgaaacaccttatggatatctgacatggattctggtaattcaaggcggtatgcggcaggtcccactcttttgacaccatgcatcggggagaccttgaggtatacgaagtctccttcctcaaatctaagttctctccgcctgttgtgtgcataacttttctgtcgactctgagcttcaagtaattttttgcggatcagggcaactttctcttcagcctctttaacgaaggcaggtccttccaatgtcttttcccatgctcttagtagatcctcgaggaccttgttgaccctttccgtctgaccatctgactgggggtggtaggcggtgctgaaatctaacttggtgcccatagcttgctgaaggctcttccaaaattttgaagtaaactgtgtccctctgtctgacactatcttccgagggataccatggagtctgactatttctttaagatatatccgggcaagggtggctcctccaaaggtggttttcactgggatgaagtgggctaccttggtaagacggtgttggggacttgttctcaaatgcttcgcattctttgtacttcttgatattgtggttctgatacgagttcgaaggtactgtgctatttctttcttcatccctctccaccagtatctggttttgaggtctaggtacatcttggtggttcctgggtggatggagtaggctgagttgtgagcttcattgagcaggacttcccgtgcctctcctttcggtacacacagacggttcttgaaccaaaggactccttgttcatctgttctgaggtccggaagttgttctttgagagcttttgccataagtcttgctgtctccgtgtccaggcgttgagctttgcgtatgaggtcttctagcattggcttgacttctaggctgtcattgtttcccatgcatgcattcagctgagcggattccttcttccagtcttctagaaagttggttccctttatctcgaatggttttcggctgagggcgtctgctaccacgttggcctttccggggtggtaatggacctcaaggtcataatctttgatcagttccagacatcttctctgacggaggttgagatctggttgagtgaagatatactttagactcttgtggtcggtgaagatgtggcatttgttcccaattaggtagtgcctccatatttttagggcatacactatggactttggggtccacacaaacttattatctttcttgaggagttcaatcatgggtcttgctatgctagagaatcccttgataaagcggcggtaatatcctgccattcccagaaagcttcgaacttcactgacgttggatggttgcttccattttgatattgcttccaccttggacgggtctacctctattccttctgcagtcaagatatgcccaaggaaggctatcttttctaaccagaattcacatttgctgagcttagcatagagttgatgtgctctgagtcttccgaggacgatccagaggtgacgctcatggtctttgcgattcttggagtagataaggatgtcgtcgatgaagactacgacaaacttatccagttcttccatgaatacctcattcaaggatcggtaatcaatacacatcctcatacttccatccttttttgtgacgaaaaggatgggtgctccccaaggggacgagctgggacggatgtaccctttttgttgcaactctgtgatctggagttttaattctgctaactctgtgggagccatgcggtatggtctctttgcgatgggtgcagtgccaggaattagatctatgtagaactccactcctctttcaggcatcattcctggcaactcttctgggaatacatccatgaattcttctattacggatatactttctgctgctagattaaacatcat

SEQ ID NO: 148693 - DNA, 2493 bp, Zea mays
  Clone ID: MRT4577_67134C.1
atgatgtttaatctagcagcagaaagtatatccgtaatagaagaattcatggatgtattcccagaagagttgccaggaatgatgcctgaaagaggagtggagttctacatagatctaattcctggcactgcacccatcgcaaagagaccataccgcatggctcccacagagttagcagaattaaaactccagatcacagagttgcaacaaaaagggtacatccgtcccagctcgtccccttggggagcacccatccttttcgtcacaaaaaaggatggaagtatgaggatgtgtattgattaccgatccttgaatgaggtattcatggaagaactggataagtttgtcgtagtcttcatcgacgacatccttatctactccaagaatcgcaaagaccatgagcgtcacctctggatcgtcctcggaagactcagagcacatcaactctatgctaagctcagcaaatgtgaattctggttagaaaagatagccttccttgggcatatcttgactgcagaaggaatagaggtagacccgtccaaggtggaagcaatatcaaaatggaagcaaccatccaacgtcagtgaagttcgaagctttctgggaatggcaggatattaccgccgctttatcaagggattctctagcatagcaagacccatgattgaactcctcaagaaagataataagtttgtgtggaccccaaagtccatagtgtatgccctaaaaatatggaggcactacctaattgggaacaaatgccacatcttcaccgaccacaagagtctaaagtatatcttcactcaaccagatctcaacctccgtcagagaagatgtctggaactgatcaaagattatgaccttgaggtccattaccaccccggaaaggccaacgtggtagcagacgccctcagccgaaaaccattcgagataaagggaaccaactttctagaagactggaagaaggaatccgctcagctgaatgcatgcatgggaaacaatgacagcctagaagtcaagccaatgctagaagacctcatacgcaaagctcaacgcctggacacggagacagcaagacttatggcaaaagctctcaaagaacaacttccggacctcagaacagatgaacaaggagtcctttggttcaagaaccgtctgtgtgtaccgaaaggagaggcacgggaagtcctgctcaatgaagctcacaactcagcctactccatccacccaggaaccaccaagatgtacctagacctcaaaaccagatactggtggagagggatgaagaaagaaatagcacagtatgtggcccggtgtgacacttgccaacgaacaaaagccgagcaccagaaacctgcaggcctattgcaacccctcccagtgcccgaatggaagtgggaggaaataggcatggattttgtaaccggactaccccgaacgcaaaaagggaatgactctatctgggtaccttcggactcagatcagacccacaatatgaagaagtacaaagaatgcgaaggtaccttcgaactcgtatcagaaccacaatatcaagaagtacaaagaatgcgaaggttggcgcagagccgaagctatgagcaggggaccttcggcgtgatatcagaaaggggaaccgacttaaaagggaaaaggctattcagacctcgatggattactatagagtcattagcaaatcatttgagaacaagtccccaacaccgtcttaccaaggtagcccacttcatcccagtgaaaaccacctttggaggagccacccttgcccggatatatcttaaagaaatagtcagactccatggtatccctcggaagatagtgtcagacagagggacacagtttacttcaaaattttggaagagccttcagcaagctatgggcaccaagttagatttcagcaccgcctaccacccccagtcagatggtcagacggaaagggtcaacaaggtcctcgaggatctactaagagcatgggaaaagacattggaaggacctgccttcgttaaagaggctgaagagaaagttgccctgatccgcaaaaaattacttgaagctcagagtcgacagaaaagttatgcacacaacaggcggagagaacttagatttgaggaaggagacttcgtatacctcaaggtctccccgatgcatggtgtcaaaagagtgggacctgccgcataccgccttgaattaccagaatccatgtcagatatccataaggtgtttcatgtgtcccagctccgtaagtgcctgcaagtaccagagaaccacatcgaggtagagacaatccagattcaaaaagatctccagtaccgggaaaagccaatgaagattcttgactcagcagtccgaaagacccgcaactcaaaagtaagactctgtagagttcagtggagcagagaaggagaagaggaagctacctgggaaagcgaggactctttgaggagggaatactcttaccttttctcgaaccccgtctaa

SEQ ID NO: 148694 - DNA, 408 bp, Zea mays
  Clone ID: MRT4577_67135C.1
atccaccaaaggagaccgcgcgaggccggagtcatggtcaccgtcagcgcggccgtggggaccaccctcgctgaccgcgctgtgatcgccaggaccaatgttctatggctgcctgcgctgagggcgaggagcgagagggtgcgcggcaactacaccaaggatgccaataacgcggtcccactcacaaccaagggcgcaggcgcgacgctgctctcctcacctgccgcggggaccgcgtcagaatgggccgcgctggagctcttgggcgagcgcatgtgcactgagggcaccggtgctgacgaactccctcatcaacaacctgctgaggaggaacatcctgttggccttcggtctcatctggcccctctacatcatctaccgctctgacctcaacgaggaagatgagtc

SEQ ID NO: 148695 - DNA, 186 bp, Zea mays
  Clone ID: MRT4577_67136C.1
aaacgtccccagcctcctaaaatttcccctttccccaactaacacgacaccgggggtgcgtgggtgcgatccccccgcctcccccagagggcgacgcgtaatcgccgccatggccgccgccggcaagcttctactcctggccgccgcgatgctgtcggctaccttctacggtgacgcgccgcccgt

SEQ ID NO: 148696 - DNA, 871 bp, Zea mays
  Clone ID: MRT4577_67137C.1
tttttttttttttttttcattccgcagtaatgacttttattaacgatgtaatgtcatgcacaaatatctttggtccaaaggaagagcactagccaatggccaccgcgctccaccatccaagatggccaagagtagagcagagagggaaagaaagaaggaaaataaaaggtagcatgcagctaactaaaaggaggtggagtgaactgtgaagcatatacctgtgacgagcatatccatgccggccggggccggagcacgtgcaccccagctactccgatccccgtgtctatctctctgtcctgtcgtcctccccaagatctcaccagctataaatcgagtgagtgcgaacgccggcctcactcttgatcggagcgagtagctaggcagcatgacgcatgagatgaacgggtccctgaatctctgtcagcatatatacacatacacggaggtagccgccgccgaattcgtcgtgctcccatgtccatccgattggtcgtcatcaaggctgtctagagctcaagcagcagcaggaggaggttcagtgctccgcatccatatcgtcgccgtcgtcgacgacaatgcgtcggccatgtcgggcgggcagccggagggagatgctgtggcgtcgccgccggcgccacgcgtggcgttgtcttttcctgctctggttctcgattcttccctggaacaatcggaaccgaagccggcgagcgagggcggcgtctgatcgatcctccgtatgtgcagtgcagggcaagttgaatcctttggcatgtactcctatcctaacgatgaatgtacacgatcgatgatatccatttatctaactcttcaaaaaaaaaaaaaaaaagcggcccggggccgtttagag

SEQ ID NO: 148697 - DNA, 622 bp, Zea mays
  Clone ID: MRT4577_67138C.1
gccctcgaggcagcggcctggagcggcctggagagcagcggcctggagggaggacggcctggagagcagctgcctggagcggcggcggcctggagcagcggcacgcagaggcgggcctggcggcgccggacgggcggcggagggttggagcagcggcggcctggaggctggagcgcgccctagagtgcggcggctggtgagaacgcgagttactaattgggctggtgaaagtgcggcctgtagcggcggcctgggcgggagtttctaattgggctgggccaatttctagacacggcgtttcactctataccgcgtttaaacgtcaaaacgcgacgtttaaacgacgttttacgacgaatcgtaaaacgttttgtcgtttcacttcctgtcagcgttttatagtttaaacgacgtttaaacgtcgttttaacgtcgtttaaataagcatgaccagcggttttaggcgatttattggccggtttgagtggataatcgaccggctagctccggcttattggctaggacgcgtcgcgcggcttaccggccggttaggccggtttatcggtgatatgagccgattaatcggccagatgggctgattagccgagctgccgagtagggg

SEQ ID NO: 148698 - DNA, 247 bp, Zea mays
  unsure (1)..(247): unsure at all n locations
  Clone ID: MRT4577_67139C.1
nnnnnnntttttttttttttttttttttttttttgggttttggttttgctggccgatggttttttttcttctttacccctgaagttttattggataatggttccattcgttcggtcttgtaaatgggtatgccgtttctctggcctgttgggtcctgtcagaaaaaaagagacgcgcgccacccgatagggaattggggggggatttaccgagcctgtacgtggagggcgacggcgaccttctttag

SEQ ID NO: 148699 - DNA, 658 bp, Zea mays
  unsure (1)..(658): unsure at all n locations
  Clone ID: MRT4577_6713C.1
ctggtataaaggaaggttccatcagcagagatggaataaaatgcatgtgttgtaatgaattattcactgtggagaattttgaggttcatgctgggagcagtacaccattaccttcgtctcatatgtttttaaaggatggaaggtccctatcacagtgtttagttgaattcatgggtggaaacaagcccagagatccactgcatgtgcgcttgaaggggagtagttctgatctggaaagtgattcgatatgctctgtgtgccatgatggtggggatttattactttgtgacaattgcccatcatcttatcatcatgattgtgtcggcttggaggtagaggccattccagaaggaagctggtattgtccatcctgcagatgcggtatttgtaacttgagtgattatgatcctgataccagccaattcactgagaagaccatagtgtactgtgatcagtgtgaacgggaatatcatgtcggttgcactagaaatagtgaccatcagcttatctgccgaccagaaggttgttggttntgcagcaggggatgctcaaatgtatttcaacatttgcaagaagtcattgggaaacaagttccaactccaatcgaaggcttatcttgcactatcttgaaattttgtagagcgaacggcggtgacca

SEQ ID NO: 148700 - DNA, 325 bp, Zea mays
  Clone ID: MRT4577_67140C.1
ctcgagccgaatcggctcgagcggctcgaggactagttgtagatcgcgagcatcctctctctttttttcttttctggaataaaaatgaactgctttctcaaactcctaagaaagcacattgcttcttagcatgctgagggaccaatcgcacaacaaactactttggaacccaaaatcacggctaccaaatggccgtccctaacaacatctgaacaacatacaaacgtgtgccttatgcaaagaacgtgaggagttaaaaagccaaccaattcggaaggaatactaggatgtcaagaccgacgccagagggatcagaacaccgtga

SEQ ID NO: 148701 - DNA, 307 bp, Zea mays
  Clone ID: MRT4577_67141C.1
tccaccacgaccatgacgcggtggaagagtacgccgggtgcccttcgatcgccgagctcgcggccatcctcggcgtcgccgggtacgacgagaaggcggcggcggcgggcggggacgtcggttggtggtccacctgggaggagccccaggtggtgtgcttggaggacgtggtcgttcctaccacctcttttcatgcctcgtagccccgtccccaaccgtacggtgcaaagtccgcgagcaccggcgctcagctggctgacgtgctgacgtggtagcccgacaagcggaggagttcgccaagtcggag

SEQ ID NO: 148702 - DNA, 345 bp, Zea mays
  Clone ID: MRT4577_67142C.1
gggggcgccctttttttttttttgttttgctaactctgcttgcttttgatcatgctcagccgacacacctaactactgctactaggactcatcctgcttatccacagttgcattcacaacttaatccaccttatattacatataaacgaccactggactaccagtggcagtctaagtcatcttgacatcccaaaccccttgggacttagcatagccatgtgccttaggatacaaatcccatgtgacctctgcagaatccacctggtatgcaacaccatgataaccatcgccttgctctgtgaccatacaatgtgccatattgccactttcacctgacaggccctc

SEQ ID NO: 148703 - DNA, 333 bp, Zea mays
  Clone ID: MRT4577_67143C.1
cttctacaaatacggtccataagcaagccgggttaccggaagtagctccacactgccactcactgcgcgacaccgctccttccatcgtctgtagcagcagccaccaccaccacttcaagtgcaaggcctctcacaccctctctcagtcatcagctcctcatcactctgcttcttgcagtctcggcacctgcatcggcttcgccgctcattcccacatcccgatcgatccccaagcaaggaagatgaagattttcagctggatggcgaacaagatcagcgggaagcaggaagcgagccgcttcccggccagttcctcgggcccttctcgttcta

SEQ ID NO: 148704 - DNA, 311 bp, Zea mays
  Clone ID: MRT4577_67144C.1
cgcgcgcgctcgaggcgcgcgcggcgagatctccagcgacagacaaatcacacaatacaaggagcggagaggtctctgctgccctagctccgccgcccccgcaccagccatgggctgtcgccgctcgcctcgtatcccgctcccgccagttatattctgtccgagctgctttggccactggaggtctcactcgagcgcgctcatttgccaaggagggagcatcctgaacgacggagtggcggattagaatggatcgagtgatgcgcgcaaagaggacttgacgccgaccctgcctgacaatgactgccgaa

SEQ ID NO: 148705 - DNA, 941 bp, Zea mays
  Clone ID: MRT4577_67145C.1
cattggtacctcgagccggcaggttttgtgaatgacttgagaggtgtaggatagattgaaaaaaagacacaggtcgctcctgagtttgccgctccctgcattaccgccggcccgccacgctcaccggtggcctctcccgctcgcgccgccggcacccatcccaccgcacgctgcaccaccgtccgcctctccaatttgcctcgcaggtccccgtcaatgtcgattgccgtctgcctctctatccgtgcggcctgactccatctccattggttgctgctccccagtccaacaccgtgcgacctcctcctcggcacgtttgacaacccgaatttcgtctgctctctcatcatctcgcctagctgcagtgcagtcctgtacatgtatagttgtgctcctgctccagtcggttggcggcgatgcacgggcaggcactgggcgacatgctgatggacagttggtcggcggcgatgcgcaggcagcagcatgcaggtgagcagcatgcaagtggagcagccgagctagctaggcatctagctgcgttcctgcgtgtagcgtgttgcaggcagcagcatgcgggttgtcgagcgagctagcatgcgggcgccgagcgacaagctggaaggaaagcaccggcggccggcggctagctgtggcgtgctgcactgctgcgtgtggaaggcaggtgtcgaggacttcttatttctgaaataccctgaagtatatggatgttcgggtaattcgggtacttcggggtccggtttgtttaacccgaaatttcctaaataatttcgggtcccggaagttgctcccccaattgtagtagggatttcttgggttcggggttgttctagcgaggaagatgacgaaaggttcctctcgccaatacctacggtttcggccgcagatcgagccagtggccccaacttgtgcgcgagcgaacg

SEQ ID NO: 148706 - DNA, 590 bp, Zea mays
  Clone ID: MRT4577_67146C.1
ccggccggggcggaaggcatggcccagaacgcgcgggtggagagggtcggccaccgggcggccatgctatcaggcgcttaccacagacacacgaggacgcactgtcaccgggaagaggccgatgccatagcggagagactatctgggcgtacataaggagatcggtactctatgctgctcctgcccggtgcagaccggagggcatgatgtcatgaagaacaactcacaggacatcatggattgcatgcattacatccagtaacgtgatcgggagcgctaatgggtccatacggaggtttaggctctctactatatgactgcagagagattcacagactaccatgggctgacggcgactacctgactattaaaagttggacgagcgtgtctaggtaccctacgatctgaaaatcaacacgaaagactactctattgtgccatgtttaacagttgccaaatccacaatgccatatgggggaagcacacttactatatcgatagatggcatggtgcatggcattaaggcgttaacaagcctaactgtgtgaaagctagtgtcttactggacctgcatgatttagagaacctgc

SEQ ID NO: 148707 - DNA, 581 bp, Zea mays
  Clone ID: MRT4577_67147C.1
aaaaaaaaaaaaaaaaaaaaaaaaaaaaaaaaaaaaaaaaaaaaaaaaaaaaaaaaaaaaaaaaaaaaaaaaaaactaaaagaaaaaaatgaaaaaataacccctgggcggggccccccttaggggcggttttttggggttttccttcccctggggggccgtttggccttccttttggggggcccttttccccttttgggggggggtttaccatttcctggcccggctttttccacctgggggccggggaaaccctgggcgttccccattttattggcttggccgcacttcccctttttcccagttgggttaataccaaaagggcccgaccggtccccctttcccaacattttcccaccctgatggggaatgggcccccccctttacgggccctttaagcgcggggggggggggggttccccccaggggtccctttccttttgccaggcccttagcgcccgttttttccgtttttttcctttttttttgggcccctttggcgggttttccccgtaaagttttaaacggggggcccctttaagggttccaatttagggttttcgggccccttccccccaaaa

SEQ ID NO: 148708 - DNA, 1278 bp, Zea mays
  Clone ID: MRT4577_67148C.1
cctcgaggccggccgggagccactcttccatgaaactgtagttctttctagattgcaggttccaaatgagacaccagggaatactgcgattgacctggctgaacagggtgctctgttctacgactggcccgttcctttggcgtgtgtgcttagccttagccagagttgtcatatcaaaacaggatacttttcttttttctcctctggcgatttggattttgtgttcctagtttaacgcgtaacgatttgttcaacctccttccacagtcagcctcttgtctcttctttacaaaaagcaataaactaccagtcaaggttagcttcttggacaaatggccgccttcattctccttacaagagtagatttcaaggaggcaaccacatgttctcaccactgccccccctaagcaacagactcgctggatatcaccaaagagtaggttaagaagcagctcgagccgcccttccttcgagtcccatggccgcgcccgcttcttcggttacctccagaggcttggcactctgtagtgcctccgtgggttttcatcgcccccgcgggaataatccggtgatcagccccgcgtcttctcgtcgccgacgaagccttactggtggatcaacgatgaactcctcgggcatgaacggtgccttccctcctatcaaaggaagtacacgaatccccgcagttggtcctggccctgccaacagtccgtcaggaggaaacctgccgatacccaacatgcctccatgggccaagtggctggtcggcgccgccatagtcgtcgcgataccaatctacaggaggttcagaacactagaagataagatagagaagacggcggaggtggcgatcgaggtggtggacacggtggcggaggcggcggagaaggtggccggcgaggtcgccggcgcgttccccggcaacgagagcctcagggaggcggcgtcgaggatcaaggcggtcacggatgagatcgaggaggacgccgagagagccgaggccctgatcgagaaggttgacgagataaaggaacaagttgattcaatcgtcgatcccttaatcgacaaggttgtcaaggataaagaaacctagagagaaggaaccaaggaggaggcaatgacatgatgtagattattgaaggtataaagattggttaagcggtgccgcggtggtaaccggaagaaaatacctaccgcatgtaaacaaatcactaaatataaatctaagaagttttcgagaaaaaaaaaaaaaaaagcagttatataatacatgttctt

SEQ ID NO: 148709 - DNA, 1030 bp, Zea mays
  unsure (1)..(1030): unsure at all n locations
  Clone ID: MRT4577_67149C.1
ccaanagtgctacaaaacagcaggggggtgcggtggacgcactgccccccgaagcaacagacttgctggatatcaccaaagagtaggctaagaagcagctcgagccgcccttccttcgagtcccatggccgcgcccgcttcttcggttacctccagaggcttggcactccgtagtaggggggggggggttttcatcgccaccgcgggaataatccggtgatcagccccgcgtcttctcgtcgtcgccaacgaagccttactggtggattaacgatgaactcctcgggcatgaacggtgccatccctcctatcaaaggaagtacacggtattagatgcatctctctttctcagctcctcgatcctaagccggggtcgttcactagttctctccacacttgaccttcttctattcagtatccagctactagcttcaagctctttttttgccctgtgtcttcttggtcagaatccccgcagtgcgtcaccaacctaccaacagtccagaacacgagaaggcatatatatccaacatggggcgtttctgaaataatcgtctaccgatgatgcctgttttgacttttgataactttgttttttgcgggcgggtagcagataagatagagaagacggcggaggtggcgatcgaggtggtggacacggtggcggaggcggcggagaaggtggccggcgaggtcgccggcgcgttccccggcaacgagagcctcagggaggcggcgtcgaggatcaaggcggtcacggatgagatcgaggaggacgccgagagagccgaggccctgatcgagaaggttgacgagataaaggaacaagttgattcaatcgtcgatcccttaatcgacaaggttgtcaaggataaagaaacctagagagaaggaccccagcagcaggcaatgacatgatgtagattattgaaggtataaagattggttaggcggtgccgcggtggtaaccggaagaaaatacctaccgcatgtaaaaaaaatcactaaatataaatataagaagcttttc

SEQ ID NO: 148710 - DNA, 241 bp, Zea mays
  Clone ID: MRT4577_6714C.1
tttagattttctagtcccttatctaaatccgcaatggggaacttttaggtgttgcgccttacaaactaaattttctatctaaatgtttagtccaatgctgtttgttcaatcaatcttaccaaaaatgattttattatattctctatttctatttcttaaagactactatctttcatattttactattttcattcttccactgttattcttttattttttaaaatttttataatgtatttct

SEQ ID NO: 148711 - DNA, 208 bp, Zea mays
  Clone ID: MRT4577_67150C.1
atatgatgtttcggcgaccagaaataggatacacggaaaacaggatggagagttaacagtgcggaggggacccatgtagacgcacccaatcatggacattcatcaatgtcacagttcccacgaaagcctcaatgatgacaaccgtcatagttaaaaaatatactgcatgaggatacgcgcactgttactggaacaaatgcgagaggat

SEQ ID NO: 148712 - DNA, 447 bp, Zea mays
  Clone ID: MRT4577_67151C.1
ctggagctcgagggccgcttttttttttttttttcttttttttttttttctttttttttttttttttttttttttttttttttttttttttttttttttttttttttcttttttttttttttttttttttttttttttccccgggccccccttttataaaaaaaaattaaccccccagctaaaggttacaaccccttgttaccgtgcccttttccccaataaaagttaaaggggggggcccaccaggagggggggaaacaaatttaaaacccccggttcggtttccctggccccaaaacattgccaccggatttcggttccctaaaaaagcccccctgcccactaaaaacttctttttaaaaagggggagggcgaccccaaagataatttctctcccctatgaaatcgtttcccataccgggttttttgcccacaaaaaaatttcca

SEQ ID NO: 148713 - DNA, 261 bp, Zea mays
  Clone ID: MRT4577_67152C.1
gggaacccaaaaaccaaaccccccttatattggttttttccccaaatacacatagccggtgggaacatttgtaccttttttttttataaggaacatctattggctttggattgggctgatcccttactcttggggatcactgggccatgagaaaacaaagcccggtgccgccagaaaaacaggttcactttggggggggggccgaccaaccaggctgtcgcgagccattaggatagcaaaatcggggggcaccctgttgtt

SEQ ID NO: 148714 - DNA, 267 bp, Zea mays
  Clone ID: MRT4577_67153C.1
acttacggtttcttttttatgatgcggttttctttgcctttttttttttttttttttttttttttgggggggaaccggggattcccagcttgcaacggggttctacatggtttaaaagttttgaccaatggggccctttccattgcaaaaagggttacaactctgttcctttcaaagattcacaagaatgtttaggctaaaaagaaactgtggacacaccacctcccaatttttggtgctaaattacagggggggggttaataatcc

SEQ ID NO: 148715 - DNA, 675 bp, Zea mays
  Clone ID: MRT4577_67154C.1
agcacaaaagaagcaatctatgaagttccaggagcaggaagtttctctttcaggtcagttggcttcagcaacagtgactttgacttaactgagtgaagaatttaggaaggagaagaaattagctgaggaacttagggatgaaatacagagattagagagtagtatcacacaagctggcattgataatgatgtgcttgaaactaaattggaagaaaagcttggtgagattaattttttgcaggaaaagataagtttactcaaccaagaaattgatgataaggagaagcacatcagggaactcagtgcatcactttcctcgaaggaagtagactaccaaaagctgaccgctttcacaaatcaaactaaaaagagccttgagcttgcaaattctagagtacaacaactcgaggaagaactaagtacaactaagaacgctctcgtttctaagatatcttctattgattcactcaatgctaaacttgaaaccttgaactctgaaaaggaagaagctgacaaaaaaataaatgagttaatacaagagtatacagacctgaaggttgcttcagagacaagggcaagccatgatttcaaactactgtcagatagagatgatctgataaaacagcttgaggaaaaaactgtctgttgcattaactgattctagcaaagatcaag

SEQ ID NO: 148716 - DNA, 449 bp, Zea mays
  Clone ID: MRT4577_67155C.1
ctgagctgctactgaaagaagcacttagtaatctaatcgcaaaacactcagtaactgttatcatcattgctcatcgacaggaaatggtcctaatggctgacaggattatttcactagagcgtggtgaattgcgagagatgtcgaaacaggcatttttgtctcaagatggtcacttcagcttaccaatgatcaggagtccaaactagggtgagacttggcatgggtaatggtagtttctctcgtgaagatttgttcatatatttggccatggaagaaaacgatggatagaatcatatctcttgcctgagccctgctcagaactttggcttcttggaaccttgtttcatcccaacagcaaaaaatctgtcaacattatcgaaggtcgtctgccggagagaatagcaggctcgtcagcggcattgcctcctacctgctgcaagatcctcctc

SEQ ID NO: 148717 - DNA, 186 bp, Zea mays
  Clone ID: MRT4577_67156C.1
ttcatttcatcagggcgttctaacccagatagaggaggggtaacctcaggatagactggcactagggctctatattacctgatcaattgcgacaaattcgtagacaaagacggatacagcgatatcgctggacacaaaaagcaacgtgggtctgaacaaggttcttgaaacaccatcacaaggccg

SEQ ID NO: 148718 - DNA, 298 bp, Zea mays
  Clone ID: MRT4577_67157C.1
agccttccggcactcgcccttttgctcaatatggcacccttgtaccgtccaaacggaaggggtttgaaaaaaagtgtggaaggcttaaaggctccattgaaagtcaagttgtttggaactataactttaactcgccttcaataaccttacatgctggatagagggatgggccattttgtgtgaataagtacgcctactggaaaggttcctgttcctgataaggcaattaactttgcctcaaaacagcctgttaaaggtaacttggtttttttccaatcgaagttttttacaaaaggca

SEQ ID NO: 148719 - DNA, 450 bp, Zea mays
  Clone ID: MRT4577_67158C.1
tcaaaagagggcgggcgggaattctctttcccacaaagaggacgcaagcccttgcctctccctactccaaaccctcgatcgactcagatccacgcttcctcccaccgaccgatcgccatgacagaacactccaggcccctactctaggcgccagcaccctcgccgttgagccgatggcgtcgatctctgctgtgcatgtcgtctacgagagcataaaggtctcagtcctacatgcaacaaaacctaaaaaggagtacgtgcatgatcatgactaaggacgacaagcttgctacatgtgataaaaatggtagagaacccgattcaccatacgtgcacttacgctctatgagtagtggacctaggctgacacatacctgtgtgtcctgttatgtgcagtactaaattattataccgcgccatgaaataaggacgcggaggacccaatattaa

SEQ ID NO: 148720 - DNA, 2092 bp, Zea mays
  Clone ID: MRT4577_67159C.1
gcagcccaactctctcgcagccaatcccgccgctccgccgcccgcacccaatccgtttctctcacccccgccactcgccagcaacgcggacacgccctccgccgctcttcctctgcaccccagtcctctcccacaaccacttccggcggccacgccctcggcttctccgtacttgctgctcgcccgtcccaccaccataattttccaccagcgattgtaaatttgtgggaggcacattcgccgaggatggctgtaaccctacttcgagggatgagaacgccgataccattcagatcgaactccggcttcttctccactgtcctacggcctcggttgtcccgcttcacgactagggcggagagtgcgcaggccacagaacccaaagcggcgcccaggtcaattcagctggcgaccaaggaggcggctgagcagaaaacacaaggcttcgaagccatcatcgggattgagacccatgtccagctctcgaccgtcacgaaggcgttctgctcctgcccttacagctatggttcccagcccaacagcactatctgccccacctgcatgggccacccggggacgctgccggttctgaatgagaaggtggtcgagtgcgccgtgaagctggggctcgccctcaactgcgagatctcaatgacgtccaagtttgatcgcaagcagtatttctacccggacctccccaaggggtaccagatttcccagtttgacatccccattgccaagaagggttgtgtcgatttggaccttccagtggagtttggtggtgggcataggaaatttggggtcacaagggttcacatggaagaagatgctggcaagctgcttcattctgaatccagcagctactctcaggttgacctaaacagggctggcgtacctttgctcgaaattgtctcagagccagacatgagaacagggatagaagctgctgagtatggtgctgaactgcaaaggattgttaggtacctgggagtgagtaatggtaatatgcaagaaggttcccttcgttgtgatgtgaacgtttctgttcgaccagttggacaatcagaatttggtacaaaggtggaaataaagaatatgaactcattttctgcgataaatagggcaatcgattatgagatctcccggcagattctgctccataaagaaggccaggctgatcaaattgtacaagaaacccgcctgtgggatgaatcttctcagaaaacttttacaatgcgaaaaaaggagggacttgccgactatagatattttccagaacctgatcttcctgaagtagttatcactagtgactatattaatgaaatcagcaagtcaatgccggagcttccagaagcaaagcgtaggcgttatgagaatatgggactcagcatgcaagatgttctgttccttgctaatgatgataatattggtcatttctttgattctactcttgagcatggtgctgatgcaaagctggctgccaactggatcatgggtgacatcgctgcttatctcaaagatgaaaaagtatccattgatgaaattaaattaacacctctagagctttctgaactgatagcatcaattaagaatggaactataagtgggaagatcggcaaggagatactggccgagctcattgccaaaggcggaacagttaaggctgtgatagaagagaaagatttggttcagatagcagatccagcagcaattgaggcaatggtagataaagtaattgctgataatccaaagcaacttgagcagtaccgtgctggaaaaactaagctacaaggattttttgctggccaggtgatgaaagcatcgaaggggaaggccaacccagttttgttgaataaaattcttggagagaagctaaatgccaaataattatttttacccccatactgaatctcaggcgtccatgaagaatgggacttcaaattcatagaatgagattaatgtgaacgacgtagaagttttgtccacaatacagatatcattgtactaagctgatactttaaaagggcgtgttcattatattttatgcgatagcttgccctaaaaaaaaaaaaaaaaagcggcccctctatag

SEQ ID NO: 148721 - DNA, 764 bp, Zea mays
  Clone ID: MRT4577_6715C.1
cattgggtacctcgaggccggccgggagtgctctcccgcccgctccttgccagaaccttgtcttgggcaggtgcatgcaagccgggatgatgcccgattaccagcgcgagcagccggaaccggaacagcaggtagcgatcctcgctgggcgccgcgagcgcgacgacggagcccggcgcctcttcctggacgccggccgcgtgctcatgctgctggggtggagcgcgctcgcctccgccgccggccccaagaacgacgacaatcgtcccggcaattccggcgccgcgcacgcgcacgcgctcatcctcgccttggacctgtggcttctcggcgtgtccctcgttgcgctcctgcacgtggagcgccggttcccgcgcgccgcgggagtgggaggcgccgccgcctaacgctgtcgtcgactacttcttctttgcacccctgtagatcgaactagctctggctctggtaattcgcgcctctcgtgtctcgtggcctgctgtacgtgagcgaagtttggctatcgctgttcgctgctgcaggcacatccgtacatggacgaaaatgaccagaacggaccgatgttagcttaatttgacggtatgagtgacactgactcactgtcactgccgggaagcagctgatgatgttcgatcggccaccacctccttctcttcttgtggtgagaatactatcggcgcttgtatgcacgtcgactgtgcagtgcttatatggacataaagaaacacacggatcggcaatcgtat

SEQ ID NO: 148722 - DNA, 142 bp, Zea mays
  Clone ID: MRT4577_67160C.1
ttgtcgagggaaactccatgcggtaatttggccccctgctggacgcgacggagaacgccagcatacctcacatgcccaagggcctggacggatcgacccagaccttcgcaaacgccgtgcaagcatggatgtacgtgcacca

SEQ ID NO: 148723 - DNA, 264 bp, Zea mays
  unsure (1)..(264): unsure at all n locations
  Clone ID: MRT4577_67161C.1
tatttatgcaccaacaaaaggcaagcagagggctgatgccattgttaggaatctcgcttnnaccgaaccagcaccacgaaaagcacgcagcgagaatgaagaaaagcaagctgtctcgttagaaaatgatgtccggataagcacagacgcagatgaagagctttcggtttctgaagatgatccagaaacgctactgaagaagcttcaagagctagctgatgagaattattctactggcaacaactagtctgctttccctgaagt

SEQ ID NO: 148724 - DNA, 1010 bp, Zea mays
  Clone ID: MRT4577_67162C.1
cccaagcgtccgcccacgcgtccgcccacgcgtccgcccacgcgtccgggagaagaagaaaaggaacatttagacctcacgcgtgggcggacgcgtgggcggaggcgtgggtttatgatgatggcactgctaagggagagttgcctgaaacagtttattgctttgatggtgtcttctataattactttagcataggaatggatgctcaagtggcttatgggtttcaccaattacgtgatgaaaagccatttcttgcaagtggacctttatccactaggttgatttacgcaggatatacctgcaagcaaggatggttctttacgcaatgtattagtgatcctgagttaaggggattgaggaacattatctgtttatcaatcaagaggatggacagctctgagtgggagaacattcctgtcccatcgagtgtgagggcaatcgttgcattaaatcttcacaattatgcaagtggaagaaacccttggggaaatttgaagcctgaatatttggagaaaagaggatttgttgaagcccaatcagatgatggtcttcttgagatatttggactgaagcaagggtggcatgcatctctcgtgatggttgaacttatatctgccaagcacatagctcaggcagcggcaatacggatagagatcaaaggtgggtattggcacgacgcgttcatgcaaatggacggggagccatggaagcaaccacttagctccgagtattcaacatttgtggacatcaagaaggtgccttacccctcactaatcatcaatggtggagaccgttagctggaaaccatatttgtggcatgcatgacctaggcggttcggagcggccaagaaaatattttcagcttccagcttgatgaactgcaggcacagcacaacctttttatcgcggttgcatgcaggtctaactgtatattgagttgagcttgtgcgtggaacaacgtaatgcaatggtgtctccactgtccaaaaaaaaaaaaaaaaaggggcgcc

SEQ ID NO: 148725 - DNA, 743 bp, Zea mays
  Clone ID: MRT4577_67163C.1
cctcgaggcggcgggacggatccctacagcgtcctgtccagcgcgcgtgctcagcttgcttaactagccgccatgttctccctcgccgccgtcttcgtgaagcccgtggacatcacgggtctcgccggcatgtccatctccggaaagaagctcgacgacgccaaggcgtcgtgccgctccatccgaaagcaccgacgtcagccgacggggtggacaagaactgttactggagcgtctactttcgaccgtcgacgactttcggaaaacaacacgcgatacggtgggcgacctactacggattctggacactgccgtacgtcgctacacacccgctacatagcgagtactgcaagacagatcgcggctctctgtgtcaccaaaagatgtctgctgctctagatcctgctgatggacgacgggtcacttgtggcctacgtcagcgcggcggatgctgcggacactcctgcctatcgagaagggacctcatgagacggcgcatgcggtgccgctcgttaagatctaagctcagattctccatttgcatgggctagaaacttgctttgtactgctagaggcggtcgagtggcaatcggcatggagcatctctctatcttgtggtaacgctgcacataatatagcagatctgccattccgctatagagtactccttggcatacatacaataattaccatggcgatgcgtgtctctcgcaacaaaaaaaaaaagcggcctcgagctccag

SEQ ID NO: 148726 - DNA, 174 bp, Zea mays
  Clone ID: MRT4577_67164C.1
ctcacaaactatatttatccatccggaccaaacgaaccaagggagagctggagcgggcgccgtatgctccgccgatctgcccgcgcgccatcagtcgtcctgcgtggacgagctgtgacttgcgctaaggcctagcgcgttagcatttacagtccacgcggttggctcccgcgg

SEQ ID NO: 148727 - DNA, 207 bp, Zea mays
  Clone ID: MRT4577_67165C.1
gctcaaaagatactgcataaacgaccttttgaaaaaacatacataaaaatcgtcaaaatacaatcgatgactttccttcagaaatagatgacttcagcttaatatttctgataggtactagtctgtccaacattgccaatattgctgctaggaatatttccaccactaacaggctgtccgaattcaacaccacccgagctgatacca

SEQ ID NO: 148728 - DNA, 250 bp, Zea mays
  Clone ID: MRT4577_67167C.1
ggaaaaacaacaaattttttttacttttgcttaaagggggggttttctttgtcctgtttccgggggaatccaattttaaaccggcccaaacttttggggctttctaaaggggggttcttttcagggaataataacgggtttacaaacgggccctttcaataaccagtttttaccaaggggcccttttaataacccgttttaaccgtaaaagcttttttgttcccagttggccacgggaaaatcccccttt

SEQ ID NO: 148729 - DNA, 500 bp, Zea mays
  Clone ID: MRT4577_67168C.1
cctcgaggccggccgggcaaacgactctggcatctcactctctctctgcttgaacatctaggattggcggaatagaatggggatggggacgtccagcaacttgacgaactgctacgtcgagcccgagaccagcctgctggcccagtcgtcccgctccgcgcggctgtggcactactgcgccaacgccacacacctctggctacgtcaccatgtccccggagtgcatgcacgtgcagccatgccctggccacctcgacggatactctctctgggacttcggcttcgatcagttgggcctcgccaacgtggcggagaacttcgagcgcgacaaggagtactacgagcaccactgccactggtgcatgcttggcgaccccggcatcctgtagacggaagctctgtggctggactactgcgtcaaggcgtgtgaccgcgtcgtctgtccacaacaggccgggcacttcctgtgtgccctatgacccggcggacaatgtcgacca

SEQ ID NO: 148730 - DNA, 325 bp, Zea mays
  unsure (1)..(325): unsure at all n locations
  Clone ID: MRT4577_67169C.1
gttgggtggggttttttttttttttttttgaggggggccccttcagtttctcggtagctcaacattggcgtgccgtgcgtccttcgagtgtccctctaactctgaactggcctccctctgttttctcttttgtttggcctgcctttctctgcttggggagccggggggcttttgcgtcctccnttttcggcttctgttcgatggtgtcctgggcccccccctggggccctctgggcgtggcaaacggctccacgcggcacgtggccgggctcggggctggccttgcgcttaggcctgttgttggtggcgtcctgcccgcccgggg

SEQ ID NO: 148731 - DNA, 378 bp, Zea mays
  Clone ID: MRT4577_6716C.1
tgcccctatagcacatttctacctattttgatgattaagtgtccaatacatcatcatgaaataactagtttcatatgagtatgagcataggtccacatgaaggcaatttgaaggtttcaagtccaaaaaagttgaaataggagcctgaaaatgcaatttggagcaaaatggtaaaactatgaggtttgcactcttagacatgttgcataggtccattacaatgtttctagcacttgcacttgatttctaatctcttttgtagtaaagagtgcattttggacttggtttggaccaattcagaaccctggtgaaaatctatgaaagaagtgagtttctcacacttagacaattgtgttatgtattaactatgtttgtcta

SEQ ID NO: 148732 - DNA, 253 bp, Zea mays
  Clone ID: MRT4577_67170C.1
tctcctccgctccggacggcttcggctccgcgaggtcctcgagaacgtccggatagaggtcaaggactcgcggactcaccgcctcaagctggcctctgtgctgccccacggacccctcgacggacgcgtagactgaaaggagccaggcgggtactatgaccccaatctctacccggacggcgctgtatatgtctacgtatacacgcgtgaccccgacggttcatcgagtgctggtgggggctactacggctgc

SEQ ID NO: 148733 - DNA, 276 bp, Zea mays
  Clone ID: MRT4577_67171C.1
accttctacattcgttcaaacacgccggccgcagtcccggtcccgctgactgtgcgaagaacatctctcttgtcgcacgggctcatcaggtctacgctctacacgcctagacgccttgtccggcctgcaaagttgcagcccaactgcccagccgccggcctcaaagctctcatcagatcagtaccctctccctctatcttcgcgagccagctgataaggagggaagcaacaccgccgataggacggaggtaggcgagtgcacgagcatcgtctacg

SEQ ID NO: 148734 - DNA, 675 bp, Zea mays
  Clone ID: MRT4577_67172C.1
aaaaaactcctctctggacgagacgaatcgaagccgatccgagtttccaaatgccgcaggcgcaggctatgtcggtcctgccggtggtgctcctcggctgcggcggcgtcggccgccacctcctccgccacatcgtctcctgcaggcctctccacgccaaccagggcgtctccatccgggtggtgggcgttgccgacagctcctcgctgctcgtcgcagacgacgtccgcgccagcggcctcgatgacgcgctcctcaacgacctctgctccgccaagtccgccggctcgcctctgtcctcgctgctcgctcgcgggcactgtcaggtgttcaacaagccggaggcaatggggaaagtcatcgatgcagctaccatgcttggaagaacaaccggtctggtgatagttgattgttctgcaacttatgacactgttggtgtgctgaaggatgccgtgaatcatggatgctgcgttgttttggcaaacaaaaaacctcttacatgtgcttatgaggattttaaaaagttgacatcccacttccgtcagataagatttgaatctaccgttggagcaggtttgcctgtaatagcttctgtaacccgcattattgcatctggagatccagtttcccgaatcgttggcagtctgagtggtacacttggctatgtgatgagtg

SEQ ID NO: 148735 - DNA, 213 bp, Zea mays
  Clone ID: MRT4577_67173C.1
taggggccttttttttttttttttttcaattttcaagtagggaccgcgcggacgcgtatcccctctctcataaattatgatgtccactctcctacttgaggagatggtagactagcgctcctctccaagtgcaatggaggccactagcctaggccatggctgttcttgatgaaccatagaccccatccaggtaagtatcccggcccggccggc

SEQ ID NO: 148736 - DNA, 413 bp, Zea mays
  unsure (1)..(413): unsure at all n locations
  Clone ID: MRT4577_67174C.1
cggaattcctgggtcgacccatcgcgtccgccgttccgttccttccgtccatccatccgccatggcgaccgctacactactgagctcctccttcgccatgcccgccgacgcccgtagggcctactccccttcctccgcctcatagagcttcgccacgtcgcagatgggcggcctctccctctccggcggcgatgcaactccaaccgacggcgacctactccccaagaggcagcagctccagcccattgtcgcgcagcgtgtgtgcccgtgcacggacaagaagacgaaccgggcgaacaaggagtcgctgtccaaccacagagacgaagaagcagcacatncgagaacctgcagcacaagaagctgctgagggaggccggcaagcgctccgactagctgcgcctttccaccaa

SEQ ID NO: 148737 - DNA, 397 bp, Zea mays
  unsure (1)..(397): unsure at all n locations
  Clone ID: MRT4577_67175C.1
catttgactactacgagagggatgtagcgtcgtcgcgctcggggtgggcctggggaagactcctccgcgagaaggagcttcactctgtgtaccacatggatgggcacgcacacattaagacccttgctactttcgttactttatttcccaacaagaacaggcctgggctcggatttgacgatgtgcctgtgcttaactttgatgcaggccttgtactgtatgggcagcaattcatatacatctattggacaatcccttcgtatgccagcggtgtaaacaggcttgaagtagcttgattggacgacacggggaaagcaactattcttgatatcgnaactaccacaagccttagagagtcaggcgaaagcacatgcatgaacaggagttctatatactt

SEQ ID NO: 148738 - DNA, 425 bp, Zea mays
  Clone ID: MRT4577_67176C.1
attcggttcgagcttatatttatacgccgctgttatatctgcactttatacacaacacacctgaggtggactgtgctagggcaggtgaccggttaattgagaaggctgaggcctaaactccagacaacgctcctttaaattatttgccgcccaagaggctaatcttggcatgccagttgatccagctgcttttacctgctataccagcgaccattttgagaggacacgctgtgtctactcacgggagggccacatacactctatcaatgttcactctaagggatgcatgcggcatggtagcatcattcttatcatcatataactcttgctcacctggggaggatgacagtgacccatctgcacagtcaagggctacgaaaatggtagacacagcatcaaaggttgcggaagtcttcactggaaga

SEQ ID NO: 148739 - DNA, 159 bp, Zea mays
  Clone ID: MRT4577_67177C.1
tcctgtatcgtggccgagcttagacatcgccccatgtttactgcccgtgcctttactttagcgagagactccgaatctgcatacatctacagagaaggctacgcagcgactgactgaagcaagggacaaccactctagatatcagtatgccactgcaag

SEQ ID NO: 148740 - DNA, 219 bp, Zea mays
  unsure (1)..(219): unsure at all n locations
  Clone ID: MRT4577_67178C.1
gggggggaaaaggggttttaaggatngattgatgaaaatgatatttatgagggttagttgagggtattaagagggaataataagggatgagattgttggggagtggagagaaaagatgataatggtgtattagatgatggagtgggatgaatggtgtaagttattgagggagttaatagttttaatatggtttaagtagatggtgattgtaatttttgt

SEQ ID NO: 148741 - DNA, 659 bp, Zea mays
  unsure (1)..(659): unsure at all n locations
  Clone ID: MRT4577_67179C.1
gccggccgggtcgcgacaacctcagcacaccaaggagagtacgtggaggagcagccatggcttcatcggtggccgccgcggcgagcacattcctgggcacccgcctggcggacccggcgccacagaacgggcgcatcgtggcccggttcgggttcgggttgggcagctggcggagatcaagcacgcgcggctcgccatggtcgccttcctcggcttcgccgtgcaggccgccgccaccggcaaggggccgctcaacaactgggccacccacctgagcgacccgctccacaccaccatcttcgacacgttcggagggtcctcttaagcccgccattgctccgccccgtccatcgaccggccggaacgtgttcttggattaattaactacgatctctatgagcctggggatggatcaacccgtcgtgcgtggtctcgttttgtgatgagtgggagagagaggatggcaagatcgatcctttgttaatggagatctcgttaattaggagagctaccgctgggacttggtggtttgtaatatatgatccaaccagtgatgaatcaatgcattcacttgtgtacacatannnnnnnnnnnnnnnnnnnnnnnnnnnnnnnnnnnnnnnnnnnnnnngcnaaaaaaaaaaaaaaaaaggccccta

SEQ ID NO: 148742 - DNA, 231 bp, Zea mays
  Clone ID: MRT4577_6717C.1
tttttggggcaaatgacaaaccagctgaaatgccttcaggtgagcaaatgttcatgataccatgtcgtaacttccaattggcacacaattctagaggagatttggagcctcaccactcacaggtcccaatagagatccaaaaccaacccgactgatccatagcaaatcatggactttctctcttacaggaactcatgaatcgatgttcctagaatctatacagctgagaca

SEQ ID NO: 148743 - DNA, 830 bp, Zea mays
  unsure (1)..(830): unsure at all n locations
  Clone ID: MRT4577_67180C.1
ccgatgcatagagttcgactaggctcaataatctgtttttttcttgggattatcgtagttttgtctctgaccactaaacagttcgtttttttctttctatgcccgtggctaacttctagtgaggagttcgcggatggctttcgctagtcgaattggaaatgcgctcaggagaactttagcgcccacttgctccccactgcttcagccagtaagatgcatgtcctcttacacgctctttgttggcggtatgttgagatcgattttgctgtccgacctcgttggtttctgagtatttacatccagctgaaggagcctcagctgcaatgactttccattgatggcaaggtaggtcattcatgtccattgttntgttctataccatagctgaattgtctcacttccaaaggcaattcttctaaactgaccatctgaattccaatgctcacatcccttgttacacaggaaaaatttcagagtccaaactatttgttcaatttatctccacttcatgcagactgaaattcctagagaaataatctacgctataactcaaaggaataatcaactgctaacaattgtttttcagccaggcacaatattggagtatttattgttccttggttgaaagcactgattgatatggtgacatactgacatatatacaaataatggcttgggccaaaattttccagggttcctgtatcacagccacagagtcttttttttgctgccatttgggtatgaattgaaatgtgttattgtagtgaatgctaggttatttgtccttagtgtttgatgcaacaatccagttggtaatctgtcccggaaaa

SEQ ID NO: 148744 - DNA, 1483 bp, Zea mays
  Clone ID: MRT4577_67181C.1
ttgcagctgggggagatcaagcacgggcgcctccccatggtcgccttcctgggtttccccgtgcaggcccccccccccggcaaggggccgctcaacaattgggccccccccttgagggacccgttccccactaccttttttgacaggttgggggggtctttttaagcccgccattgttccgccccgtccatcgacgggaaggtgtttttggtttaattaactccgatctttatgagcctggggatggatcaccccgtcggggggggtctcgttttgtgatgagtgggaaaaagaggatgccaagatcgcccctttgttaatggggtggaggagcagccatggcttcatcggtggccgccgcggcgagcacattcctgggcacccgcctggcggacccggcgccacagaacgggcgcatcgtggcccggttcgggttcgggtcctcctacctgggccagccgctgccgttctccatctcgacgctcatctggatcgaggtgctcgtgatcggctacatcgagttccagcgcaacgccgagctcgacccggagaagaggctgtaccccggcggctcctacttcgacccgctcggcctggcggccgaccctgagaagaaggagcggctgcagctggcggagatcaagcacgcgcggctcgccatggtcgccttcctcggcttcgccgtgcaggccgccgccaccggcaaggggccgctcaacaactgggccacccacctgagcgacccgctccacaccaccatcttcgacacgttcggagggtcctcttaagcccgccattgctccgccccgtccatcgaccggaacgtgttcttggattaattaactacgatctctatgagcctggggatggatcaacccgtcgtgcgtggtctcgttttgtgatgagtgggagagagaggatggcaagatcgatcctttgttaatggagatctcgttaattaggagagctaccgctgggacttggtggtttgtaatatatgatccaaccagtgatgaatcaaattcaacgcgagaaaaaaaaaaaaaaagcggccctcgccatggtcgccttcctcggtttccccgtgcaggcccccccccccggcaaggggccactcaacaactgggccaccccccttagcgacccactccataccaccatcttcgacacgttcggaggatcctcttaagcccgccattgctccgccccgtccatcgatcgaaacgtggtcttgaattaactatgatctctatgagcctggagatggatcaacccgtcgtgcgttgtttcattttgtgatgaatgggagagagggtatgggacaagattgatcaacccgtcgtgcttacgtctcgttaattaggagagctaccgctcggatttggtgatttgtaatatatgaaccagtgatgaataaatgcattcacttgtacacatccatcttgaggtgaccgaggatataagacgcaccaaggtgaggacg

SEQ ID NO: 148745 - DNA, 567 bp, Zea mays
  Clone ID: MRT4577_67182C.1
gttccagcgcaacgccgagctcgacccgaaaaaaagcctgtacccggcgggctcctacttcgacccgctcggcctggcggccgaccctgagaagaaggagcggctgcagctggcggagatcaagcacgcgcggctcgccatggtcgccttcctcggcttcgccgtgcaggccgccgccaccggcaaggggccgctcaacaactgggccacccacctgagcgacccgctccacaccaccatcttcgacacgttcggagggtcctcttaagcccgccattgctccgccccgtccatcgaccggccggaacgtgttcttggattaactacgatctctatgagcctggggatggatcaacccgtcgtgcgtggtctcgttttgtgatgagtgggagagagagagagagaggatgacaagatcgatcctttgttaatggagatctcgttaattaggagagctaccgctgggacttggtggtttgtataatatatgatccaaccagtgatgaattaatgcattcacttgtgtacaaaaaaaaaaaaacagggcggccgccgacttatgagctc

SEQ ID NO: 148746 - DNA, 374 bp, Zea mays
  Clone ID: MRT4577_67183C.1
gacgcaggcctctacacatgacgtcatattaacgcgtgggcgatcgaaacgtggtcttgaattaactatgatctctatgagcctggagatggatcaacccgtcgtgcgttgtttcattttgtgatgaatgggagagagggtatgggacaagattgatcaacccgtcgtgcttacgtctcgttaattaggagagctaccgctcggatttggtgatttgtaatacaacaaccagtgatgaacaacttcattcacatgtacacatccatcttgaggtgaccgaagatattagacgcaccaaggtgaggacgaacaatagacggttgacacgtcagtgcccagcgccaagctacctccaaacaaaaaggggggccgcc

SEQ ID NO: 148747 - DNA, 431 bp, Zea mays
  Clone ID: MRT4577_67184C.1
ggggacacaagggaatgcattggttcatcactgggggggtcatatattacaaaccaccaagtcccagcgggggctctcctaattaacgagatctccattaacaaaggggcgatcttgggatccttttttttccactcattaaaaaacgagaccccccccgacggggtgatccatccccaggctcataaagatcggggttaattaatccaaaaacaccttcccgtcgatggacgggggggagcaatggggggcttaaaaggaccctcccaacctgtcaaaaaagggagtggggaacgggtccctcaaggggggggcccaattgttgaacggccccttgccgggggggggggcctgcaccgggaaccccaggaaggggaccattgggaggggcgcgtgcttgaactcccccaggtgcagccggttcttttttt

SEQ ID NO: 148748 - DNA, 1385 bp, Zea mays
  Clone ID: MRT4577_67185C.1
cgagttccacgcaacgccggctcattggcgtcgcggcattgggtacctcgaggccggccgggacgccacacaccaccaccggacgctagctcaccaccaacctcagcacatcgaggagaagaggagtggccatggcttcgtcggtggccgccgcggcgagcacattcctgggcacccgcctggcggacccggcgccgcagaacgggcgcatcgtggcccggttcgggttcggcggcggaaagcccaaggctgccgtcccgaagaaggtggcgaagacgtcgatctcctctgaccggccgctgtggttccccggcgccgtggcgcccgactacctcgacggctcgctggtcggcgactacgggttcgacccgttcgggctcgggaagcccgtggagtacctgcagttcgaactggactcgctggaccagaacctggccaagaacgaggccggcggcatcatcggcacccggttcgagtcctccgacgtcaagtccaccccgctccagccctacagcgaggtgttcggcctccagcggttccgcgagtgcgagctcatccacggccgctgggccatgctcgccaccctcggcgccctctccgtcgagtggctcaccggcgtcacctggcaggacgccggcaaggtggagctggtggacgggtcctcctacctgggccagccgctgccgttctccatctcgacgctcatctggatcgaggtgctcgtgatcggctacatcgagttccagcgcaacgccgagctcgacccggagaagaggctgtaccccggcggctcctacttcgacccgctcggcctggcggccgaccctgagaagaaggagcggctgcagctggcggagatcaagcacgcgcggctcgccatggtcgccttcctcggcttcgccgtgcaggccgccgccaccggcaaggggccgctcaacaactgggccacccacctgagcgacccgctccacaccaccatcttcgacacgttcggagggtcctcttaagcccgccattgctccgccccgtccatcgaccggccggaacgtgttcttggattaattaactacgatctctatgagcctggggatggatcaacccgtcgtgcgtggtctcgttttgtgatgagtgggagagagaggatggcaagatcgatcctttgttaatggagatctcgttaattaggagagctaccgctgggacttggtggtttgtaatatatgatccaaccagtgatgaatcaatgcattcacttgtgtacacatataaaaaaaaaaaaaaggcaaaaaaaaaaaaaaaaaggcccctaccggtggacggcattgtgaagaaagagcacatcaagattcatggtttctgagcaaccgccgggtccataacaaacc

SEQ ID NO: 148749 - DNA, 644 bp, Zea mays
  Clone ID: MRT4577_67186C.1
ccggccgggagaagcgagagagatccggagtagccgaagtcacatcgacatctccgtcggtcgacctccatctcctcgccgctgcctctcgcttctcttttcaataatcaagatgaatcgtggtggtagtgacgaaggagatcaaagttctctgcgatatctctttggacatgtcgatccccccaaatcatgagaggcaccagatagcaagtgctccacctagatagagaaatcatctagcatgcaaatagctgatcgggtcaacaaggctgctgctgatattaccagacaaatcaataactaccacaggcactgatgatcataacactgacaacttccttacttaccgtgcttcaaccaatgtacatcctgctcctgcgagggaatcttcattgctttacttgttcagtgcgcaactgatgacctgtgctggtgagatctactaaagttatcactcccctcgactgcatagcgtgctatgtctgaatgccgtacaaccgttgacatgtcatgagatgtacccactcgcgatgctttgtgaggatgacaagatttctctgcgatgaacttcacattctgcaagatcgtgtaatctgtgtctagaactactgacctgtcccgtgcctgaatcttcatcttaagat

SEQ ID NO: 148750 - DNA, 1698 bp, Zea mays
  Clone ID: MRT4577_67187C.1
cctcgaggccggccgggagcaactgaccacaccaaggagagtacgtggaggagcagccatggcttcatcggtggccgccgcggcgagcacattcctgggcacccgcctggcggacccggcgccacagaacgggcgcatcgtggcccggttcgggttcgggttgggcggcaaggcgaagcctgctccgaagaaggtggcgaagacatcgacctcctctgaccggccgctgtggttccccggcgccgtggcgcccgactacctggacggctcgctggtcggcgactacgggttcgacccgttcggtctcgggaagcccgtggagtacctgcagttcgagttggactcgctggaccagaacctggccaagaatgaggccggcggcatcatcggcacccggttcgagtcctccgaagtcaagtccaccccgttgcagccctacagcgaggtgttcggcctccagcggttccgcgagtgcgagctcatccacggccgctgggccatgctcgccaccctcggcgccctctccgtcgagtggctcaccggcgtcacctggcaggacgccggcaaggtggagctggtggacgggtcctcctaccctgggccagccgctgccgttctccatctcgacgctcatctggatcgaggtgctcgtgatcggctacatcgagttccagcgcaacgccgagctcgacccggagaagaggctgtaccccggcggctcctacttcgacccgcctcggcctggcggccgaccctgagaagaaggagcggctgcagctggcggagatcaagcacgcgcggctcgccatggtcgccttcctcggcttcgccgtgcaggccgccgccaccggcaaggggccgctcaacaactgggccacccacctgagcgacccgctccacaccaccattttcgacacgttcggagggtcctcttaagcccgccattgctccgccccgtccatcgaccggccggaacgtgttcttggattaactacgatctctatgagcctggggatggatcaacccgtcgtgcgtggtctcgttttgtgatgagtgggagagagagagagagaggatgacaagatcgatcctttgttaatggagatctcgttaattaggagagctaccgctgggacttggtggtttgtataatatatgatccaaccagtgatgaattaatgcaaaaaaaaaaaaaaaaaaaaaaaagaaaaggctgcaactggcggagatcaagcacgcgcgccggcccatggtcgccttaaaagggtttcccctgcaggcccccccccccggcaaggggcccctccataattgggcccccccccttagggaccccctccccccccccatttttggggcgtttggaggatccttttaaccccccccttgatccgcccccccccccgatttaaacctggttgtgaattaacttttaagcccccctatgagcctccccgtcggtcaacccgccggacggtgttttttttttttttgaaagggaaaaagggtatcgtggggaattgttcaacccgtcgggcttacgtcgctttaattagagtgggaacacgcgggatttgggtttttgtaatatataatggagtgatgaataaataggttccctccccttggggcttggtggtttgtaatatatgatccacccagtgatgaatcaatgcattcccttgtgtacccatatac

SEQ ID NO: 148751 - DNA, 1120 bp, Zea mays
  Clone ID: MRT4577_67188C.1
ttgctgccttaagagcttcagagatcaacgcagatgttgtccttaaaggtattgttggtgatgatgagtatggctgtcctcctaggagcaacagtaatgcttcatttgagcacatctcctttagggagttagcagcaagaggaatcaccaaaatggacatgacagcagtaacatgttgtgaggagaacaacattcctgggcagaggtattagggcagtcccaaccatgaaactaccatgcagtttctacccctgtcatgtcagcaagacactacccatcatttcctcatgtgggtccctattgaatttttggcaatagttttcttccttcacccttccggtatcatctccgtctctcctcccgtcttgtccccctgcaatcagcaggcatggctggtagctcctagcagggcatccaaagcagtggatgacagcgatgcgtactgcaagcgaccaagcaggccagacgctcctgctgtgagactggtgctgcagccggcgatgctcgcacgtgagacgtggaggagcagtttctgctcccggtcatccttagggtacatgctaggatgtgttgcggccaagaaagggacaaagaaactggaaacttatacaccagctaaacaatgaagaagcaagcacactcagtggcatcatcatcagccttgttggctggctgccttcgtggggatgtacagacggtgagaccgtcggtgcctgtgttcgcagggatgcggtcataagctggagagacagggcaacatttatggggatgccactattggggaggcaagctggacgtgcagcggctcttgtagagacacggccggtaccgcatgctcagactcggccgatggcgtcatggcgatgcaggcagacggcacatgccaaagaaatcacgcaggagcaccaacacatagaatcttgtttctcgcattgttggagcaggcgccgaaatcatttctactgagaaactgtttactctttccccttctctcttcaaacaaatctagtgccacatcagtttttttttatctgacagtattcggataccatctgtagtttcaggttgacaatgtccttaggtcgttttagaagttatatgcacgttttaccttttcttt

SEQ ID NO: 148752 - DNA, 1743 bp, Zea mays
  unsure (1)..(1743): unsure at all n locations
  Clone ID: MRT4577_67189C.1
tgggtacctcgaggccggccgggaaaaacgacccctgcctttctctttcttcctccctcccccccatgcgcttgcttcgactcctcctccattccttcccctctctctctctcccgcggtctcggctcgtcttcctcctcctcttttattggccgcatctctttctccggttgttgaacgcggcggttcttgctccaaatccaggcggcggggagggggtgaggcggcgccctgagccgtaaaggagccggctttcgtagctcttcctgggagtgaccttctccgacgaaacgaaatggcccatcaaggaccaggagtgcctaagtttggaagttgggaggatgagggcgatcacccctacacacagtacttcgaaaacgctcgtaagggcaaatctccaggcagatctgctactcagaacgagcacagaactggagatccggaagcgctcttcaaagaagacacgacgccatcagctaaagcttctcccctgcggactgggtcggaggatcctgtggcgccaaagcccaaggacgcggcctttgctcgaggcaagccgtatgctgagccagcaacccataaacacggtgctaataccagctatgaaagaaaaaccggcatggagagatcgcctctgcatcctcaccaccaagcaaggctcgtaaacagaggaggtgtttcgtctccttcatgggaacgcaggggttcgtccgaaggaaaccgtggagctgcgcccaccacacctgggaggtcgtccaagatgaggccaggcggccgtggagacgagacgcctgagagaggatctgccgtgcccaagtttggagaatgggacgagaaagatccctccacaggtgaaggcttcaccgacatatttaacaaggtgagggaggagaagcagtccggcgatgctcctgtcatcaccagcggcaacgcaggtggtggttatagccgctccaaccaaggccgcaaatacgaatcttcagcttgctcatgcttcagttggttcaggaactgatgcttccttgcatggttgctgatgcttcagctggttcagcagctgataggtgccgttgaagatttggatgaaccagtgccgatcgtatcattttcacatgagctgtagtcccatcgtgttctccctgttgtgatgctgtgtggtagcaggacgtgccagaacttgactttgagaagctgaggttcagtagtttgagctgtttttgcaaaaaaaggtatgtttctccatagaatagaatccttaaatcaacatcctccctcacaagaatcctgaaatcgctgggatttttattttattttattacgagctaaaaaaaagaaccacatttcctttaaggagttagcagggctaggaatcaccaaaatggacatgacatcattaacatgttgtgaggagaacaacattcttgttcttaggtattagggcagtcccaaccatgaaactaccatgcagtttctacccctgtcatgtcagcaagacactacccatcatttcctcatgtgggtccctattgaatttttggcaatagttttcttccttcacccttccggtatcatctccgtctctcctcccgtcttgtccccctgcaatcagcaggcatggctggtagctcctatctgggcatccaaagcattggatgacagcgatgcgtgctgcttgcgaccaagcaggccagactcttttgttgtgagactggggctgcngtcggttttgctcgctcgtgagac

SEQ ID NO: 148753 - DNA, 292 bp, Zea mays
  Clone ID: MRT4577_6718C.1
ttttgagaacaccaaacaatcgtaaggggggagggggaaaatccttcatcgtgaaccccaaaaaccaaaaagaaaggacgcaacagaccaagaatacgccaggagaacggacccaaactcatcatggcgaacaggtagcatcaaaggcgcccacagaaaaggggagaacggacccacgcctaaaccggaggaaaagaagagtttcaggtgacgggcagaggcactaatgggatacacgccgagcgtccgctgacctgagagggccatgcctagggacagcatggaaacaagg

SEQ ID NO: 148754 - DNA, 297 bp, Zea mays
  Clone ID: MRT4577_67190C.1
ccaggaaaaaaaaaaacatggtctttgtcccaaaaaaacccaaatgttttttttccggggccgattttggcccaaattccccccttgggaaaaccccttgggggaaaacaaacggttttttcctttgccccagggatgggggtaaaaccccccccaaaggggggggttcccaaaaccagacttgtgtctacctttggggggggaacttgttttaaaacggggggctttttttactggggccttattacctttacaaacctggggtagtttatccggcccttccccccccggggggtt

SEQ ID NO: 148755 - DNA, 270 bp, Zea mays
  Clone ID: MRT4577_67191C.1
aggaaggagacggatgactcaaaagcacgaaaagagcctaaacctaaccaaagtttcagtattgtagatgctgcttctgcttctgttcatggcaggagtgcagcagcagcaaaagcaacttctgctgaaaaaaccgctgctagaatcgatctgcatatggcaggggaacgagctcctgtaaatgctatactggtcaaaagtcgttacactactggagctgcgtcgcgttctttcacatcgacttcttatgatcctgttaccaaaaatgaa

SEQ ID NO: 148756 - DNA, 447 bp, Zea mays
  Clone ID: MRT4577_67192C.1
tgggtggatacggcgctcactacggtggtggcgccgccgtcgccattcagaagcacggctacaggaaggacgtgtacgggagcgagactgagagcgaggatgacgagagcgactgcgaggaggcgttctcgccgcgcggcggccgaatgcagggcggcgtgcaggtgcagcacggctatggaggcggcgtccaggtgcagcacggctacggagctgacaacctcggcggtgtgcgccgctacgagtcgtacgagagtcgcgaggagcacggcgacgggcgccgctatgaatcgtacaagagcaccgtccagtacaacggtggcgggaacgccacgtgctccccgatcaagaaccgccacctccttggctacggcgcgtaggcacgctggctgatccagtgcacctacgtactgtatattcgtatgctctgtcgtgtatagacagaga

SEQ ID NO: 148757 - DNA, 482 bp, Zea mays
  unsure (1)..(482): unsure at all n locations
  Clone ID: MRT4577_67193C.1
ggattcaaccactttttttttttcctgcaggggaataaaaggtaagggcccagggcacaccaaaacttttacaggcactaccacactaaaccctaccctggatggccccccaacaattcataaatcataagcgactttaacaaaccctttgggggggggggggggggggggggcctttcccggtttcccaaaaaaaggtttcacaagacccccgggaaaacaaaggtggggaccacatcatccctggggggtggcgnggggggaaaaaaaagggggggggaacgggaagtcccggtccctcccaacggggatgcccttaaaaaacggggggctcctggggacggggctttcctcgggggggaaaagcgtttggggcgggcccctgaaaggaggtttcttctcccgggtctggaaaaagctcctcgggggagccttgtcctcctcatgggaatgctgttggttttcggttttggggatcctaa

SEQ ID NO: 148758 - DNA, 439 bp, Zea mays
  unsure (1)..(439): unsure at all n locations
  Clone ID: MRT4577_67194C.1
cgcgactgcaagttctagattggagaggcctaaacgtgttgttccccgagcattttctgtttctaatcaaagaagtttgttcggaataaatggtggtgtgaccaatccattggccaataaggataaatctggtgataaaagtagcatctctccagcaagcatgacaaagaagagtacgcatgtggcacttaggaagactttgcagcctgagaaggcatttcatcctctggaagaggactcctttctacacaaaattagaggagaaacataaagctttggaagcagagaaggacgaggctgatgccaggaaaaaggaagagcaagacgttgctttaaaacaactaacgaagtcattggtgattagagcgaaacccatgccaagcttctatcatgaagggcccncaccaaaggctgaactgaagaaagtgcctcctacccg

SEQ ID NO: 148759 - DNA, 168 bp, Zea mays
  Clone ID: MRT4577_67195C.1
atgagaattcaccagcatttcttatcacatcctaacctcaatgaggctgacgtgcgtagataactgagcatctaaccagcgatggatcattactagttggcgtattgtctttagccgggttttcccggttggagacgcaatgtcgcactctgcatcctctgtggcaga

SEQ ID NO: 148760 - DNA, 239 bp, Zea mays
  Clone ID: MRT4577_67196C.1
aacaaaacattttgggactcatcaatcatgacacatatagaaaaaaaaaacagttaataaaaaaactccaaaaaaaatcgatgcactttagagcaacatcaacacgatgcttcctgcatcttgttcacggagagtatgctaaaaccttaaaaaaaaacccaccccaaaaaaacacgcccattcaaaaacatggcacctcaaagaggcggtgctgtccctactgactccagcatgaactg

SEQ ID NO: 148761 - DNA, 1878 bp, Zea mays
  unsure (1)..(1878): unsure at all n locations
  Clone ID: MRT4577_67197C.1
cattgggtacctcgaggccggccggggaaaaaaattcaaaaaaaaaaaaaaaaaaaaaaaaaaaaaaaaaaaaaaaaaaaaaaaaaaaaaaaaaaaaaaaaaaaaaaaaaaaaaaaaggtaagccccacctcgttgcggcgtcgaggagtgagccacgacacacagacagtcagacaccggcacacagcgagggagtcctctcctcccccagaaaaggaaaagacgcattccgcacacgccggcggctgggtgtcgaggccgggagacgcggtgaagctagctgctagcgtagccgcgcgcgtgcgtgcgggctcgcgctgcgctgtcgctccatgtcggccaccgccgagagcggtggggatctgtcggcggcgcggcgccggtgggatctcaccaacaagggggccgagagcaccccaattttgaaagatgctgtggaaatatctacagatgaagaatcagatggtgttgttacatgccatccgaatggtaacactgatggatgcgacgaaaccattagtggcagtcacgatgatgatagcccagaaggccaggaaactagttccattaaggaacctgatgtagaaggtgacacacaggaagacaagtgtgtaaatcaagattcactcaagttgattgatgaagagtctgctccccccaagtccccagcaaaatccgcgactgcaagttctagatcggagaggcctaaacgtgttgttccccgaccattttctctttctaatcaaagaagtttgtttggagtaaatggtggtgtgaccaatccattggccaataaggataaatctggtgataaaagtagcatctctccagcaagcatgacaaagaagagtacgccgttggcacctaggaagactttgcagcctgagcaagcatttcatcctctggaagaggactcttgttctgtgacttcctcgctacaacatcatcaagagctggcagaactaagacaactgttcctgttgccccatcatttgtgtgtgctaaccgtgctgacaagaggaaggagttctacacaaaattagaggagaaacataaagctttggaagcagagaaggacgaggctgaggccaggaaaaaggaagagcaagacgttgctataaagcaactaaggaagtcattggtgattagagcgaaacccatgccaagcttctatcaagaaggccccccaccaaaggctgaacttaagaaggtgcctcctactcgtgccaaatcaccaaagtttacaagctcaaggagaaagagctgcaatgacacaccacagacacccgagggaaaaaacaccaacgcaacatctaccacccggccacatcgtcacagcatcggggcttctaaagacgccagcagagtacagtgctcgccgaagagcggcgtggcgaccaaaactagatctgtcaagcctgagctgaaggccctctgaagcgcatgcgtagcagccaagtgctgcgattgtctctgtacaaacagaatcgcctgactcttagccgtttccatttccatgcatttttgttttgttttgttttgttctatacccagcatctccaccaaaaagaaggctgtagggccaatgacgttgttcgcgatgctggaccttgtctccattttcgtcttgtactcgttaagaactctgttgctgctgggaccatgtgacattcattccatgtaaattacctggggatccctgtagggagctcgactggtgttttggtcttgtgaagcccttgccttaactaatctgtgagctgaaaagactatcggaatggcactgttccgtttgatgctccgtttggagtcctttgctgttataatatctgtaaaactccataatatctgaatgggcccatgtgacattgttgtnt

SEQ ID NO: 148762 - DNA, 381 bp, Zea mays
  Clone ID: MRT4577_67198C.1
gaactagggtaaccatgcatgctccctttccttccaatccataccaggctccaagcctgaagtcctagaatcgctccttatgaatggagacctaaggccgataagagctccgcgctgaataagccggtggaggatgagctcgagtcctaaaaggcgccgaacgacaagaagccctacgctgataattgttttccatctggcacgtacagccgcaaggagggcggtgagggaaagaggggccaaagaaaggactggaacagcgtggatacttacaagatctacattctaaaggcgctgaagcaagcgcacctgtgcattgggattagctacaaggccatgtccatcatgaactccttcatgaacgacatgttcgagaagctc

SEQ ID NO: 148763 - DNA, 548 bp, Zea mays
  Clone ID: MRT4577_67199C.1
ggccgcttttttttttttttttttcttttttttcttttttttttttttttttttttttctttttctcttttgcattcttttttctcctttgttggactcgaacaaggactttcacaagcgcattgttcgtcaatcaccacgccgccgaacggtcagctcgggcaggaactacaaagaaagcgacgattaaggactaaacaaagaccaacagcgtgaacagtgacgttaggctcccgcctgtgaattaatcaggaaggaactccacactaaacaggtccacaagcgactgcccttggctgaacgtgaacatggccgacggacaaaccagaacatgacgtagatttccgagacttggtccgcgaactgttgggagaacagagagaggatcatcgacacgaacaagtactccttggagtcccgcgtgacgacccgagaaaagaacgcggacatccctggcgagatcctcagccgaattgtggacccagtatgtgctcgaagcacgcacggtcgcgcactgcaagtacaccccggacttgcgagacctaaaa

SEQ ID NO: 148764 - DNA, 752 bp, Zea mays
  Clone ID: MRT4577_6719C.1
cactcctatgggcgattggccgggtcgaggcgggccggcctttgatataaagaagacgctcccgaatccgtctccgcctcctgtcgctcgctctccctgtctcccgcacgccgacccgcagccgccgccgttcgccatgggtttcctcgacgcgctctaccgtgtggtgatgcgccgcaacgccgtctacgttaccttcgtcgtcgccggcgctttcgcgggcgagcgggcggtggactacggcgttcacaagatctgggagatgaacaacctcgggaaaaggtacgaagacatatcggttttggggcagaggccagctgaggaatgataaattttggtcaccagtttgcttcggtttgaccgtttcattttggcacagtaataaacgatgtaaacttacgctgctcctatgacctccttctcattcgtttactctgaaaatgcttttgtggggaaaaaaaaaaaaaaaaaaggcccctagggccatgacaaaggtttctacggactaatttttagcctttctgttttagcccttaaattattaaatccagtgcctaaaagagagattatctctattttagcccttatgtttggcaatttagagactaaggtgtcgtttgattcacatatttgtaatgtgatggaaaaccgataacgttatattattccccctagttatatgtccgtgtgttgctccggcttctatatgtcatacaggttacccttatttaaacaaaatagttttttcaccc

SEQ ID NO: 148765 - DNA, 599 bp, Zea mays
  Clone ID: MRT4577_671C.1
ccggccgggatgtggaatcatggtggaggaccgggtccggattggcgggcgacatggcaccgatgaggtccgacgactggccttcatggcttccagatgggatggacccaaaaacaagcttcaatttagaattcaggatattcgctacaaaatcacgtttcccatggtttttgcacactgagcttgtagattctgacattatgaattacaaagatctgcttgatgaaatcatgaggaagtacccttgttcttacggggaggtggtgaaaatgtattattactgtgctgagtccaagtccaacattgaggtttgttgtgatgaagacctagttaatatgtttcagaaaaatgcatccactaagacatgtcatatttccattgctcactatgaccctagtactgaaccaccagccataccactatgggatgtaacatatgctaaggcagtggaaatcccttgcacatcatcaatgccagctccaactcaatctttagatgaaccaagccaacaaccagaggatgatgacaagtacctgcaaaacccctgaccaagaaatgaatatgggggggtcgatgaaaggagcgtttacagtggggct

SEQ ID NO: 148766 - DNA, 244 bp, Zea mays
  Clone ID: MRT4577_67200C.1
gcatgtaaaagcttacatagtgttttctttctttcctattttgaacttaaattaattaaaattaaaaaacatggcgaactttaaacttggccccatggttggtttccaaagttttttttttagtttccaggcttaacctttgcccattgccacgggaatccatttagtctgaatttccctccaactacctaaattagtagcttcccatttgctggggaaatccattaaaattgtttccagggtt

SEQ ID NO: 148767 - DNA, 796 bp, Zea mays
  Clone ID: MRT4577_67201C.1
ccggccggcggccgggttttacgtgtgttttaaaggagacttttctttctcttgcctcgaccttcagtgaaacgaccagacccagagacacctcacgtacaaacacaaacgcacacacacacacaacacattaatcaactaaatctgtcaagatgcgtgagattgtccacgtccaggtcggccaatgtggcaaccaagtcggttccagcttctggtccaccgtctccaaggagcacggtattgatggcagcggcgcataccacggaacttcagaccagcagcgtgagcgcatcaacgtctactttgctgagggcggcaacgacaagtacgtcccccgtgctgttctggtcgatcttgagtccggcccccaggatgccatccgcgccggccctctaggccagctgttccgccccgacaacttcgtcgccggtgaggccagtgccggaaacaactgggccaagggtcattacaccgagggtgccgagctcgttgaggaggccatcgatgttgttcgtcgcgaggttgagaactgtgaccaccttcagggtttccagctgacgcactctctcggcggtggtaccggttccggtatgggaacgcttcttctgtccaagatccgcgaggagttccccgatcgcatgatggccaccttttccgttatgccctcgcccaaggtttccgacaccgttgttgaaccttacaacgccactttgtctctgaaccagctcgtcgagaactctgacgagaccttctgtattgataacgaggctctgtacgatatctacgagaggaccct

SEQ ID NO: 148768 - DNA, 497 bp, Zea mays
  Clone ID: MRT4577_67202C.1
taaaaaaaaaaaaaaaaaaaaaaaaaaaaaaaaaaaaaaaaaaaaaaaaaatagcttgtgcccacgccaaggccaacctatgggcctgttcttcaccatttccctcccactgggggcggctctagcgggcctcttcaggcccctaggggggggtttttgaatccacttacattgccctttccgccttttttctgcggtgaccctggcaataccctgctgtaaccccccttattagcctccctttacatccccttttttccacctggtgaggtaccgaccaggcccgctctccttgcctttcccaacatttgtgcaacctgaatggcccctgtacccccccttttactgcgctttatgtgcgggggttgtgtcggttacccgctacatttcccttccccttttcaccaccttatcacccgttcttttcttttttttccgtccctttctgggcatttttctcggcttttctcatttggatgttcatctggggttccctt

SEQ ID NO: 148769 - DNA, 637 bp, Zea mays
  Clone ID: MRT4577_67203C.1
ccgggctccctaactgtttctgggatctggggattaaacaatctccagatcagatgctctcagtccgtccaataaccaaacaagcaaaatcacaataaaacagtggcgcacctaatagcgtgttctttaatgcaaataagttctatatacgagttttatttgtattttagtactataacacgtcaataaatctaataacttgctaagttaactaccagcatgaaatctaatgttacgtttttttataactgtgctataaaactcaaaactgacttaggcataaccagaacaagcgaatatagggcaggtgctagctaggcgaagcatgcacaagcacatgtacgcgagactctacgtgtaggggacaggggcgcgccacacggccgtccaataatgtacgtacacgccggcgaacggagcggacgaaagcctcagcgccacatgctaatcaagtaatcatgcgaatcgcgcgcggccccgaggccgcgacgccggcgaacccgctcggatccttccttgccgtcccggccagttcgttcgacaccggggaggctttgtccggttgcactcagtgtttcaggcctcaggaccgatctcggtgcccgcgcacgcgccccggtccggtgggtgggtagcc

SEQ ID NO: 148770 - DNA, 174 bp, Zea mays
  Clone ID: MRT4577_67204C.1
atgaagcttgatggtggatccatcatggccatgatagattcaacatcggaaaagatgtacctctgccagaagagtctcggtgtagtgtctccgtctgagtcgattaaggaccttgtcgatgtaggcctgatgaccgaggacccgttaactggtcacgtgcctcgtcatgggtaa

SEQ ID NO: 148771 - DNA, 641 bp, Zea mays
  unsure (1)..(641): unsure at all n locations
  Clone ID: MRT4577_67205C.1
ngacatccctctctctctctctcggtgggggaccgcaccactctcgctcggtgtgtgggagagagaggaggggagggagctaggctggcatggccggccgcttgagctgcgcatgcctacaattcagtaccagtactagcaaagcaagctaggtaggagtaacacctccccaattgctgactggtactgagttagccatcccgtcgtcccggcagtcacttctacaagtacgcacgcagctacccagcagggcggctatactaatccctccctgcctctgccttccttccgaggaccgccgcggcgggccggggtgcgcgcacccgccatgcagcagcagcaccagggtggcggcggcggcggtggcggaggctcacagttcggggccccgccgccggacatgggccccttctcgccgacgccggctgctaccggtcccatgccgctgagcagcaggcctccgtcggcgcagccgcagcagcaaccgaggaccagctacgaagaattggcgcccatggtgcctggggccgccgctgccagtggcttcgacgacgagacgatgggtagtgggcggcggcggcggcgggtcgtcgggcgcgtccagcaaccggtggccgcgggaggagacgcaggcgctcatc

SEQ ID NO: 148772 - DNA, 249 bp, Zea mays
  Clone ID: MRT4577_67206C.1
gacgaaaacgcacgcgcgcgtaagctcgtaattcggctggtgcgggagggcaatttttccgccgtggagggcgactagcgacggggactttttataaagctgctgcgggtgttgggacctacgcggcaatctccagcggcggcaaaccgacccagctctaccggacccgggcttcgctgggcaagccactgcaggggcttgccctgagaatgtgccgcgagcgctcccaacgaagcagggcgtgccagg

SEQ ID NO: 148773 - DNA, 1909 bp, Zea mays
  Clone ID: MRT4577_67207C.1
aatccctaaccttcccccgcacgttcctctctctaccgtgttgcccgtcccgtgcccctgtcgcgatagatggctcgcggcccccaacgacgacgaccgcgccgccatgaccaccaccaccacgcccacggcggtggcggtcgtgaacgtggtcgcagttgcgcagctctacgtcgggcctccacctgcgcgcgtccctccacctcgcccgtggccacgaaatcctcttccatggaatcgtcgcgcatcctcctccacctcgaccgccgcggccgattcccaccgccaccacgccgcgcacgccccgtccctcggtcccccgtccgcctcttccctgcccctaccccccgcgtttaccgcgctcctcgcccctcctaacatcgtcgtctgcatctagcgcgacagccgatgcacggcttccagctcagtccgcgccacgcccggggggaggcggatgctgaccacggatctcctttcaaactggcaaagtctgaggcaacggcctgacaaggggcgaccttccatggtaggcggccccttccatggagaggcaagatctgcggccatggtcaaagggccgctggggctggatttcgccgtcgcagcactgaactactgggtgcacaagggcattgcattcatctgcgagatcaggtgttgttttcaagtgcttcctcataaggaggttagtgagttcaagaaggccatcactgactgctcgaagttcttgtagcatccgaactttgctaggtgaagctgcaaaaggaacttcgatagatcagcattacgaggcacaacaacaagaatgatcagatgctcgacaaaggcatggtggtgatgggagctcctcaaggccaacaaaatggtttcaaggaggcagccaactcggtggagttcctaggttctctactatgtgtaatctcatatcaagattaatgagtatcgtgatcgtataattttgaatcctatcaacccatatggcaaggcaaagaaaatgacagtggacatcatcctagattttacaaaatcaaaggagcaaccagacatggctgtcatgatctaggctgtcatgatctaagaagatagaaacaacagttaaccagttacagcgtgcatgccaggcttcggaggaaagaagattttatctgcaccacgaactgttattgttgttaattcgccgcgagtacttggttcgtctgcttggccatggaaatcgacgagagccatggaagcagcctttgctcaagaagggtgacatcatggtcgtggagatctccaacctctatcaggtggctatgctggtcaacgatctatgcaggtcgaagagcatgaacggcctatcctccccatcatgccaaacccacaaggacgacgacaacaacaacctagaggacgaggatgagtggcaggacgggaagaagttcgatgcagtggccaccttcaagatcctcggcgaggttgacattgctcaccttaattagactttagaaacccagtcagctgcttctgcgttggtggtgctgagttcgtgcattttagagtgtttgctgctactgttagtgatactgctcccctttttggttgttaccacgagctcagatttcataagctaatcgtcgttgttagtgaaactgctcattatgatcctcattgttctgtaaattttcaagtttaaacaaccatgcgtattttactgattgaacagatgcaacacgttattgtgtaccatactttgtgtaagtcgtcgacttggttgacttgtatctgtggtacgtagcatgctatctgtaatactttgtcaactgctgtgttctcatttatgtcggcgcttgttccgtgagtttcattcatggagtttttaaaaaaaaaaaaaaaaaaaaaaaaaaaaaaaaaaaaaaaaactcgaggg

SEQ ID NO: 148774 - DNA, 393 bp, Zea mays
  Clone ID: MRT4577_67208C.1
tcggtgtttgagagcgtctagcggttatggagcaaaccttgaagagggaggcggggaatgggcaaatctgacgcgactcctgcggatccaccgtcacccactccttctctggcctcacatatgataaacctattttcggtcctctctgtctctctctacacccgagaagggtacgatcgacttcggatatgctaccttccggctcgccacctccgcggacaccgccgtcggcgccggggcgatatctacacacgggcgagatctctcgtgcatttgcagtgcggtggctagctgcgtcactgctatatcacttgaacagagaagaaggcgactcggatcctgcagcaaaggcagttgaacaatgacggctcacccaatgaacagggctattgt

SEQ ID NO: 148775 - DNA, 306 bp, Zea mays
  Clone ID: MRT4577_67209C.1
gatccagatccttttctatctgtatattaacctccgcgtgatgaatatctatttccttggaactcccatttgtgtgttttgtctgttgtctgttaggcttataactgactatatgtaacaatccccaccaagatttttttggccactcctttggatagacttttttaggaatccatagcattttttagaacagtaaactatcaaattggtattaaataaatattcagatccagctgacagggttcatggaaaagaacacagtgaagttcatgaaggagctctggagccttctcctcagtgcgcaca

SEQ ID NO: 148776 - DNA, 789 bp, Zea mays
  unsure (1)..(789): unsure at all n locations
  Clone ID: MRT4577_6720C.1
tttgttttaaaataaatatggaaacacacccaacaggacgccaatggaccggaaagtcaaacgcaagcaagcaaacaagtttcaactgtgcccttttttcttgggaatttatgtgattctaaagtttgataaagcgacctttgtctntggctgggggggggccgccgtcttgtttgcttccgcgggcgatgtatctacatcgccgcgttcgccattgtcgaagccgacgccgcgtcttctggtggggaagatcatgaagacaaagctggagaggagcgccagccccagcggcgcattcctcagcagctccttgacgttaaccatatcaggcctgtccagattcgggacgaagcactgctggagcccgacgtcgcccatggcgatggagatgaagacgatggcggtgaagaaggcatggacccagtccagcgtcttgagcctacgctccctgaggtcgggcccgatctccttgagcagctggcgctcctccttcttggtgaggccgaacacgttgaggcgctccgggagcgccacgccgtagtagatcttgcctttgtggaggatgctgtcggtgaaggtgaggaagatgcaggcggcggtgaggaaggcgacgagcaagccgctgagccacctgttggcggtgttgcaggagccctggttggtgaagttcgccgacagcgtctggaacaccagcaccgcgcccgacggcagcaacttcgccaggttcgccgacaccgataggaccttctcggcggccacgttcgccttcctggatttcccatcgatgcc

SEQ ID NO: 148777 - DNA, 775 bp, Zea mays
  Clone ID: MRT4577_67210C.1
gggccggagctgagaccttctgttcctgctacaatggcacgtctcgccaccatcgccgtgctcctcctctccctccttgccgtcgccagctgccgcgtccttgagaccatctccgacgaccagggctcatccaactccgtcctcctcactcaagatgatcaggcggatgctgctgttgctgaggtgacccttccggctttgcccaccccggcagtcacggtggaagaggacgtgctccggctcccgtcccaccgccgcccctgccacctccaccgtcacctctggtgggcgcgccaccacggcctctctcaccaccgcggcgcgttctccggtccgggcgaggcccgcgtccatccctccgtcgtcgacgtcgtgcccaccgagcttgcccgcggggaagaccaagagaccgagctggaggcggtcgcggagcctgaccccgactcacgcccggacaccgacgccgccgagaagctgtttcatggcgaggaggaggaagacgcagccaaggggtggaaggtggagatgatcaggaggttccgccacggcatccgcttccaccaccgtcaccatcttcgccaccaccacgaggaggacggggaggagcacgacgaccacgagcaggacaaggatgaaggcgcgagcatgaacctgttcggacgcttccaccaccgccaccatcttcgtcaccatcacgaccaggacgtggaggaggaggacgaccaccagcaggacaaggatgaaggcccgaagatgaaactgttccgacgtttcc

SEQ ID NO: 148778 - DNA, 325 bp, Zea mays
  Clone ID: MRT4577_67211C.1
atgagaaaaggggaaagcccaaaccacctaattggacggccagggccggcacctgcacaaagacattgttcaagagcctagatggaaaaaaaggtgcctgaacatctaacgggttagcaaacaaaaggcttcccatgttccaatccggcaaacacctgaggttccccaaaaacatgcaaacataggggttccgggcaccaaacagggggtgggactccgtgcttggccaaacatgaaagtcataccccgtgacgaacactcttgacacctcaaatataatcagttgctcccagtccatgccaatataatctcctcctggaagttt

SEQ ID NO: 148779 - DNA, 328 bp, Zea mays
  Clone ID: MRT4577_67212C.1
caccaataaactactggtttctgttcagcatcatcctcggttagcataaaccaacattacattgttcaagcttgacatcctgaaaaatgccatgtttgcacacatctcggatcagcacgaacaaaaatatgcgcaacgaaccctgcatgccttctcgaaaacaaataacctgacttactgacccactaaccaaaactaacttcgtacactcctcacttgcttgacgccgagttttcaataaccgttccccatatttcctgttgcttaccctcgaaacattggcgaagtacggggttacatttactcagatccatgctcaatatcatga

SEQ ID NO: 148780 - DNA, 572 bp, Zea mays
  Clone ID: MRT4577_67213C.1
ctgagccctacgggcacctctccgttcaggagcaaagccaaaaacatcatccccctcgccaagaaagaaggcagacgaaggcaaaccctagccaacgcgtacgcctcgccccccgcgcctcctcccccagatccggccgatccgtcgttgccatggcgctgcgagctctcgccggcaagctgagggtcctcccttcacgagcggcggcctctcgctccttcgcctcccagatggagaagaaatgcagcaagtgtgctcttgaagagcaggctggatccttctctcaatggttggatgaaaggaagaggcgtgatatggaagagcttgcaaggttcagaaggaagagctacgtgcacaatgtgctagttcttgctggtagtgttggctttgtggcattcacgttgtcatgcgttgctgatgttatagcagatgaaatgaactagggagaaggggaggggagcacggcggcagcaaatgctccatggttggttcttttggcacctatcaattacacaatataaaccaccttccaatcaattacaagagacacagtaacaaagatgaggtgatat

SEQ ID NO: 148781 - DNA, 396 bp, Zea mays
  Clone ID: MRT4577_67214C.1
atgccactagccatctccaaggtacgcgcttgtggatcgcagtcgcagcaccatcgcccacagaccatagctagcaaccccgccctggcgcaccgcagcagtcgcacaagtcgcgacatagagcccgagcctgctgttgtcttcgccatcgccatacacggcctcgccttgtgcagagaggccaacaagcgtgtagcggagcaggacgcactaccgccactggacaccatgccactagccatctccaaggtacgcgcttgtggatcgcagtcacagcaccatcgcccacagaccatagctagcaaccccgccctggcgcaccgcagcagtcgcacaagtcgcgacatagagcccgagcctgctgttgtcttcgccatcgccgtgagtagaacatga

SEQ ID NO: 148782 - DNA, 308 bp, Zea mays
  unsure (1)..(308): unsure at all n locations
  Clone ID: MRT4577_67215C.1
gcggggggaaacgagacactaagagaggcgcgagaatcccaaannnnnnnnnnaatctgaacaatcggacgatgcacaaggggagaaaaacagccaaagaaacgcaggcgcgtacattagcttttccggtccttaaagggcgctaatgacacgcagcagaggcgccagatcctgtacgtactgatgacagcaaggagacacaaaacctttttcttgtgtcggtctcgcagtgcccgctgcccagtcatggacggatggagatcatagatggcacaagaaagctgctgctgctgtcgctgcgtcctcct

SEQ ID NO: 148783 - DNA, 438 bp, Zea mays
  Clone ID: MRT4577_67216C.1
tctccacacgtcccctcacgcttgcgtgcacttgcgcccaccctcattgcgcgcgatgatggtcctgctcgatcaggacaccttactcggactacttgggtcacggcaatgactatccacggggaggcaggctcacgcacatctcattgtgagaggtgtgaacttgcgcttgtacctgtggcactgtctttttattatgcacaacgactctggagatgtggagaccgcacacctgatgttgagacatgctctagagccatatagctagccgcccaatccatatcaccttacgtgcgctgctctgctcacttgctgtgggaccctaaaggaccaggatatgggaaagagcatttcatagacacaaaagttactcatgttgaaaatacacataatcctgtttgagactggaaactctagagaatatctagactaaaggga

SEQ ID NO: 148784 - DNA, 310 bp, Zea mays
  Clone ID: MRT4577_67217C.1
ggtgccgcctccgcccaaaatgaggctattgaccggcgggagcgcctccgccgcctggccctggaaaccatcgacctcgccaaggatccttatttaatgcccaaccacctcggcagttataagtgcaagctgggcctgactttgcccaacaacaaggggaactacctaccccccacccaggggaaaaggccccaaaccaacttttccaagccccccgcccaaaaggccaaggatgccccccgccagccccagccaaaaaagggcaagtttgccccccgaaagttttttaaaattggataacccgggttta

SEQ ID NO: 148785 - DNA, 852 bp, Zea mays
  Clone ID: MRT4577_67218C.1
ccggccgggtattctggtgtcctaggcgtagaggaaccacaccaatccatcccgaatttggtggttaaactctactgcggtgacgatactgtaggggaggtcctgcggcaaaatagctcgatgccagaataagcgccgccgcaaccccgccccgaccctcgtccaacgttcgtgccgcttgctgggccgccgacgcgccaggccgctggagcagctcgcttgccccccagcccccacgccgtgcccctcgctcagcctgcgctgcctcgcactcctcgcgccgctagcccggccggagccgctcttcttccaccgcgcttgccagctgccgccgctcctctaatggtgacgaggtggagccagaagagcccgggcctcaagatcctgtggatctggaccctgggcaccgccgcaattgtggtcggcggtatcgtccggatgcgggtaaacgatgtgcagaagatccttcgggaagaagaggaagccgccgctaccgccacggccacgtcgccccccagcgagcgagtcctgaaagacgaagagtagaacaggaagtggagagttttgcgccatttgagctggggggtgcatctgtatcgggcccataatgtagtatctccattttaaaaaggtttgagtttaggaaaagaattgtttactgtagtgattcaataacccttcaccctgtctgcattacaactttcatatatgatgtgaacgtttggtgacaaagagaaaaagatggcgggcaatatctgtagactggatggtcaggaacctgtgaggtgatctgtatccaggagttcaaaagggcctctatgctcaaaaaaaaaaaaaaaaaaggcccctagg

SEQ ID NO: 148786 - DNA, 258 bp, Zea mays
  Clone ID: MRT4577_67219C.1
cgcctttagttattcagtctatagccggaacttacccttgaataaattgccttatcttttccacaagatcttgtggttggagctgtatgctgatcttattgcgtaatctagttagtggagttcttttcaccaattgtagtacaacttgttttttttatgttggctcgggtacatatgctgtaaacctataattagttactaggtagtaaggaagcatgattttcaatagaaaaaacaaaagggtcacattaaaagttg

SEQ ID NO: 148787 - DNA, 436 bp, Zea mays
  unsure (1)..(436): unsure at all n locations
  Clone ID: MRT4577_6721C.1
ggaaacccccgggggaccggacccgaaaaaatcccgggtcggagaggcttttttgcaggcggcggcccnaaanaaaaaaggggggcaaccacggggggaaacggccccaaaaccccaaggaggggacccaaacgaggcacccaccggcaggaaaggacaacccagacaggcccggagaagaacaagcccgccacaggccccccccaggaaacacaaccggaacacccaaacgccaaagcaacccgcggcaaaaaacaaaaacgggcccgcaggcacaaggacggggacagaggccaggacaagccccagcgacgcagccacaggggaccggcgaaggggggacgcaggcacccccaggcacttggacgcccccaccccaaggatcgcagccagccccgggaagggtgccaccggtccaccagccaccggcgggccc

SEQ ID NO: 148788 - DNA, 291 bp, Zea mays
  unsure (1)..(291): unsure at all n locations
  Clone ID: MRT4577_67220C.1
ctcgcctggattacttctttaaatgtttggtggaaggttgtacatttttaaaaacagttttaaagaatatatttactcnagtgaactgagggaattgttacatttaggattaagagaagtttggaaaactgtggggtttccagattcattgttttatctccaagtgacaattcgcttctgctctcccgagtctttaccacaggactgaagattcagtttggcctctgtgatgtggcctggccgacagtctgttgctctctcatcctttaggcgntctggatgattagtaag

SEQ ID NO: 148789 - DNA, 249 bp, Zea mays
  Clone ID: MRT4577_67221C.1
ttgtttttaaaacaataatcccaggattggggggggggtccaccataaacacggtgcatacacataacacacaccagccctagtataatcctatggacatccacaaaataccagtcctcttatcgcaaatagagcgagatagaaaaaaaaatacatcaactgagggcgattacccagcataaaaatagaataccctgggccagatgcagctattaccgagatgactatataaataccaggcgtgtccca

SEQ ID NO: 148790 - DNA, 970 bp, Zea mays
  Clone ID: MRT4577_67222C.1
aagcagtggtaacaacgcagagtacgcgggatatttcatttttaatatcacttatttttaacgcaattaagtttactaatatagaatatatattttatatgttcacacctagaccatgttttcttagctacgaagcctgcatttctgttttacctgtatttggaagcgaaccgctttaaagttgaagtgtaactattttacagaaccaacttaaagcagaaaatatatcaggaagaaatcgtcctgtgctactataatcctgctttgttcgaagatttcattctcttttggattgaaaccaaacaaaaccaaggggtatagttagtgcgaaagtacctctagcgtaatggttaaggctttcgagtagcatctctaggtcccgggttcaatcccccttacgagcgaatttttcaggcttggttaaaaaattccctcattgtgcctcgcccgctgttgtgccccgcccgctctcggataacggaatcctggctgggccattgcagagtgggtagttgatcgacccattagtgatggggtcagggttttggaggttttctccgtcgggaccatgtttcagtctcttcttaatataatcctgggagggcggtctttcactccctgaccgagtttttttttgtatagttagtttctcttgataggaaagcattgggcaccctacttaaattgttattttttcttggcttcacaggtgttagattttctgttcatggtagtaggctctatttatccatgacttacactatacatgccagtagcttcaatatgccacatatcttttatttatcaagatttaggagcatggttgatgttgttgtgaaccttacttttctgatgcgcatatgtttggagcaacatgttttttagtcaaaaacaaaagtacactggacagggaagggcatcaattttacggaaaggatctggcctgtgctcatataattctactttttaa

SEQ ID NO: 148791 - DNA, 243 bp, Zea mays
  Clone ID: MRT4577_67223C.1
ggacaaatgatgcggactggtgatcattttccacgcaagggctctaaagtctctcaacaatatggggcaacgctaacagccacgcataagaattatgatgcgctgctcttgatatggatggctgagctgacagataaagctggtgcttgtaatgtcaagagaacgctccctcacagttaccttgcagctgcagtgggctacagcttgcggatgcatatagaagccgctgcaccacccttatat

SEQ ID NO: 148792 - DNA, 176 bp, Zea mays
  Clone ID: MRT4577_67224C.1
acaatgcctgacttttatttaaaatttgtacatgatgacagtctgttaatgaaccatgtcaacatttataccacccaaaaccatttgatactttattgacaatggatagtatcctactggagttagatccgagaagaggattatagtcagaagaagagttagcatcacaaattggt

SEQ ID NO: 148793 - DNA, 681 bp, Zea mays
  Clone ID: MRT4577_67225C.1
cccgcgctcgatccatcgatcggagagcttttgcactgcaccagctctgaagccatggctgctgcttcttcctccatggacaggatcgcccagtgggtgtcgtcccaggaggtcccgaccgacctcaccgtccgcatcgccgactccgtcttctctctccacaaggcggtgatggtgcccaagtgcggctacatccgccgggccgtggcggcgagccagacgcagggcccggggggcggcgccgtcgagctggacctctccgcgctgccgggcggcgctgacgccttccagaaggcggcgcgctgctgctacggcgacagcctcgagatcacggcgcgcgacgcggcggcactccgctgcgccgcggagttcctcgacgcgccggacctggcccgccgcgccgacgacttcctcgcgcaggccgcgctgcgcgcgctccccggcgccgccgccgtcctgcggtcctgcgaggcgctgctcccggccgccgacgagctcggcgtcgcgcgccgcgccgcggacgccgtcgcgctcggggtctgcaacgaggcgctgttcccgacgccgcgggcgccgcccgggtggtgggcggccgagctggcggcgctgtcgccggcgtcgttccggagggtggtcgcggcgctgcggtgccgccgggccgggcccgaggtggtggccgcc

SEQ ID NO: 148794 - DNA, 562 bp, Zea mays
  unsure (1)..(562): unsure at all n locations
  Clone ID: MRT4577_67226C.1
aggccgcccaacgacgaagaaaggaacnccacacgggacagnggcgacaagaacccaggcaaaccaanancnaggcagggcagcacagacacaagnggagacgaggaacacagncgngccagagaaaacgcccggaaagcaaanncagggcgcnggaaaacaaaggagcgcncggcaggncggcagcccaagaaaaggggngccggngacccaagccccagagacaaancnnccaccannnnacaacagaggggcaagggcgnccaaaagaaacaccccgancaanngncagaancancagaagaagagcnngcnggnggaagaacaaagcancaaacggagccaccggangaaagngcggggaaacagcgaagcccaacngngaggggaaaggacgaggccaacggaaagggggggggaaacagggggccgggcgcgggacgcgcgcggggngacgcgggcggggccgcgggggcgggggnncgcgggggggggggggcgggggccggggggggggcgggggggggggcgggggggggcgggggggggcgggaggcggggc

SEQ ID NO: 148795 - DNA, 1074 bp, Zea mays
  Clone ID: MRT4577_67227C.1
tcgagcggccgggcgggcgggttaaaaaaaaaaaaaaaaaaaaaagaaaaacaaagataaaagaaaccaaaaaaaaaaacattaaaaacaaggacaaaagaggttgttttttctccgaatgccacatatggggataactgtgtaggtttctaatatgaatttgcatggtggggggggggtggatgctgccctatgcctatttttttggcttggttgcctttccagtggaataggcactacaggctcggaatgtgccaacctcggtctgaatcacctttgtatttccattgcaatttgcaactggaaccctgcctgtcacagctgctttcttttgtaaacgaataattccgtatgaattgttgactcccgtcccccgtccggcgggccgcccttttttttttttaccttggccctagggttttttttttttaaaaaaaatagctcgtatcacagatgttttaagttgcacttgcacggtgaatattacagagttcatcaccaaccggtacgagaatagagattctttttcccactgggacacatcgttctgagggtgacatgagagcacggttctaaataatcgaccaactgcaagcttatgctccttccgcaagaaaagggttggcgatctcatcagttccatcagtcggtgagaccagcatgactgccgtgcctctgcacacaatgaggccaagctgtctggttttccctgatagcttcaatgggtcatcttgctctctttcatattcaactgcttcatctagcactaggttgagtagctggtcatatccctttaaagttcctgtcacttggcggccgccggtgagcttcacctggacgcccttgtcgacgaacttcgccaggtcgagtgcggtctccttgcgcccagccatgtcgacactacactaggacgcagccgaatccttcccgcggatcctcctgtctgttcccgagagcccaaaatcgccggagaacggattttcaccctagcaatcgatgcggccgccgcagctcgggaggacggccaagtgaaggtcgggaagagaaagactcgccgagcccggcccggccggc

SEQ ID NO: 148796 - DNA, 358 bp, Zea mays
  Clone ID: MRT4577_67228C.1
cccacccgtccgtccacacgttctcccacacgttcgcccactcttacgggaaatgtggactttattttttctcatgatcatccgagctcctcatatctttctgtagggcaactgttcacaaaccaaagactatcatattctacagagatgcgcgtcagtgatggacaattctaccaagttctgttgaatgaacttgatgccaatacaaaggcctgtgccttattgcagactcactaccatttctacatttactttatatcgcttgtccacataacgtcatcacactctgctgtttgcttataatttaaatcatcatcgtgctgtcaataaaagctttaacatacttcctttcaccttt

SEQ ID NO: 148797 - DNA, 2239 bp, Zea mays
  unsure (1)..(2239): unsure at all n locations
  Clone ID: MRT4577_67229C.1
cgggtccggccgggggcgaccccgccgccgcggcggccatggtggaccgcatgctccgcctgctcgcctggtacgacgtcgtccggtgccagatggaggaccgggacggtcggtacgagcgccgctactccgccgtgcctagtctgcaagtgggtgacccacaacgaggacgggggtgacaatggttgcaattgagatggttaccacgccgacaggattcatggtcagcgggaggccccccttttttttttttttaaaaaaaaagcgtattgttttaagagttgcccggtgaatattacagagttcatgaccaaccggtacgagaatagagttctttttcccactgggacacatcgttctgagggtgacatgagagcacggttctaaataatcgaccaactgcaagggcccctttatgccggctgttttttttttttttttagtaaaataaaatggtgcatttaaccagcccttgaaccgtacgcgcggagacggcctagaaagaaaggaaagaagcgctccggggaagcaccgtgacacccttgctcgcccgcatctctctaaccgccggcgccggcgccggcgccggccatcgttcacatggctgcgatgccaccggccttcacgggcaacctgaagaaagcacttgcaggtctgagaagaatcaatttagatgggcttcgatggcgcgtatttgatgctaagggtcaggtgctgggacgattggcttcccaaatagccgttgtgcttcaaggcaaggataaaccgacctatgcgccacatgtggaaaatggagacatgtgcattgtacttaatgcacaggatatcagtgttacaggaaggaaaatgacagataagatttactactggcatacagggtatgttggccatttgaaggaaaggaggctcaaggaccagatggagaaagacccaactgaagtgattcgcaaagctgtgctgcgcatgcttccccgcaacaaactgcgtgatgatagggatcgcaagctgcggatattttctggaattgagcatccattccatgaccgccctcttgaagcttttgtgatgccaccacggcaagtacgggagatgcgaccccgtgcaaggcgtgcaatgttaagggcccagaaaaaagagcattcaaacagggccaaggaggaagaagatgctaagaatgccacagctgaggtcactgcataggctcctcatgtgaatttgcatgatgcaaatttgctcgatgctgttttaggcctatcttttttgcttggtagccttttccagtggaataggcactagaggctcggaatgtgccaacctcgttctgaatcacctttttatttccattgcaatttgtaactggaaccctgcctgtcacagctgctttcttttgtaagcgaataagaccgtctgaattgttgaacttctgatctcatgagtgcacaagaatgtctccagggacatcttctatcctttctttacgtgtcactaggtgagtgtccgtacgttgcaacggaaacatatataatactaagataatttatgtgcgaaggtgtgttatattgttgattgttccgaaatgaggaaagaaaacggaagtactcagcagcagcacaatagtaaccgtagcaacatgtacaacaaatacacgagaaacgggttcttttcccacagggacatattgttccgaggggcgcaagctatgctccgtccgcgaggaaagggttggcgatctcatcagtcccatcagtcggtgagaccagcatgactgccgtgcctctgcacacaatgaggccaagttgtctagttttccctgatagcttcaatggatcatcttgctctctttcattctcaactgcttcatctagcactaagttgagtagttggtcatatccctttagagttcctgtcacttggcggccgccggtgagcttcacctggacgcccttgtcgacgaacttcgccaggtcgagtgcagtttccttgcgcccagccatctcgacacgaaacccttcccgcagatcctgctgcctccgcctgcgagccgaaaatcgccgagagactagaacggattttcgccctaacagtcgatgcggccgccgcagctcggcagggacggagaggtggaagtgggaaaaactcgccgagaaacagagccccgtcccggcccggccggtgaggccaagctgcttnnnntccctgatagcttcaatgggtctctttgctctcttcgnncgcgtgg

SEQ ID NO: 148798 - DNA, 2335 bp, Zea mays
  Clone ID: MRT4577_6722C.1
cggtgattaatcagtggcaaatcctattatcaactattttcttggctaatcattacagtatataatgaagaatactatgacttataagctttctttcagactcgattatgctgcttacatgatccatttagctgtctttggatttttggggtaactctccaatatctcacatgaggttctttgtgatagctgttacttaatctgtggtgatctatgtaaatgtggcaacacttgcagttcctcgagcccttgtgcatggatatatcgtttagttgtgtctaataatttgtaattagtggcaacatctttttgttattttggttttatctgatttttattgttataagatctcgattgcaaactggcagttagtacacctttaggttttcctttgtcgtatcaagctaataatgtgtgaagcagggttcccattctgatctttagttttttgtgattttaatagcaataaccttttttcgcaaaaaagtaacaaactttatgcagaatgcggtccgtatagttcccagtatccttttgtacttagatttagtttgatatatggttatgtttattgacagaatgctttttagctttgcagataaaatcttaagcaaaatgggagaaggtttgggttttctgcaatctgtcgtctcctcttctgctgggtatctccgttattattctaatgaagagggctatgagttggattttcgtaggtacatttgagcgtgttttggaatgctgggaccgtgaaacacatgaatatgttgccataaaagttgttcgcagtatccacaagtactctgatgctacaatgattgagatagatgtgctcaatcgccttgtagaaaatgaaaaatatagatctctgtgagtatctcagagacctaattgcttaaagtataaccctattctatttttgacttgacagttcctcttcaatttgtcagctgtgctcaaatttagagatggcttgactatcgtaatcatatatgcatggatgcgttactttatgtttgcttgtatttaatatagaaggctcccttgccttcgttcgatcatgtggtatttgaaagtgatgtctctataaatgaagtaaggtagggcaatgcttatgttactgttgtcagttattagctttttaaaccatgcatctgtcaatgtgtcctgtttcaatagggtcttattataggacgtgatggcactgaattaggatgtttgttcttttgctacctttgttaaacaacatcagatcattcgtattgtatccttcctcggattgcttcttttgttctactacaaatatgcccaacatggcagggagagattgctctgtgttttgctggtctcgaggtcaagcctggacccactgtcaagtgtgtgcttggacatgactttgtcctgcactttccactgctgcacttggggaatcaaagaaaagtgaaagtgccatgtcaaagttgatgaccagaagcttgctattggaaccctctctattgaaaaatacccctagatagaaattgatttggttttcaataaagagtgtgagctgtcacacacatcgaaaactacacgtgtatttttctttggttacaaggttgagcaaccaatcgaggaagatgaataatggatcttgattctgaagatgaagagaaggagctaaacattccagtaatcaaggaaaatggcaaaggtgatgggaaggaggaccagagaagtgaagagaaggcagttgctgcagcttcaaaatcaagtcttgggcttgaaaaaaagcaaggatgagtatgagtctgatgattctaatgagggagaaggtgaaaccggagaatgagcagatgcggctgttcatggacaacagcatcaagaaacctgcaacatgcaacctgattttaagaaatttgccacctgcaacatgactgggcagtggtatctctgagatataatgtggacaacggcaaagaatactatgcatacacaacagaagagtcctgcaacctgattttaagtccatttgtagcaaacaatcttggaagccattaactcgttgaatttgaagcggatgtgcagttttatttttatgtcagttttactaatgcagttagttcctaagcaaatccatggcaacttgtttcacgctgatgcttgagaagttgagagggatggaaatgacactcccaataaaaatttgatttgctttcttgtgatcgtcgatccccataaacacagtggcacaatataccgtgtaattgtcctttcctggtagaacatgaaatgttgaacttcctcttgtgatatataaagcctatgtatcctacataatatttaacttctacgg

SEQ ID NO: 148799 - DNA, 368 bp, Zea mays
  unsure (1)..(368): unsure at all n locations
  Clone ID: MRT4577_67230C.1
ccgcaacttctccctcggtgccctccgcgacaaggacgctcagcacggcggctccagggagcagtccatcaaggaggagaacgagcaagagggggatggtgaccatggggcgcgagtcggcggcgaggatccgggcttggtgggagggggatgcggcgagccggacctcgcctccttgtcggtggaggtggacgcgttcctcgcgggtcaggacgaggacgcggcgccggtgagcatcacggagacgacgctggagaggttcgcctncgncgtcgagctgctggtcgccaggtacgaaggagtcgaggacaggtgggcgtcggaggccggcagcgagccgactgcgctgctggccgcgataacgcgca

SEQ ID NO: 148800 - DNA, 1077 bp, Zea mays
  unsure (1)..(1077): unsure at all n locations
  Clone ID: MRT4577_67231C.1
ctaggaagagaaggaaaggggaaggctggtttctgtctttctgcagggtgttcacagttcactgctgtacatctgtagatattgcagaggcagaaggggcaagcagataaaacctcgcgggctttgctagtttgcttcaccccttcccttctccccaccgcccccgtccccgtcccccaccactggcactcaggtgaagggattcctgtgccgccgcctgccctcgccttctgcctcccggcgcccactcggccttgcggataatttgcggctcggtcccgggcgtgctcagtctcggttccagtggccgcttcgatgtacctgaccgccgtttccttcccccccgcagccgccttctcgtcctcatcccagaagctgctgcctaggtcggccggggtcggccggcgtctggtggtgcgggcagacgtcaaggtcatatcgacgggcgaggcctgccgccgcgggctcgccgccggcattgacaagctcgccgacgccgtcagcgtcaccctcggccccaaagggaggaatgttgttattgaccaagatgatgtacctaaagtaattaatgatggtgtcacaattgccaaggctatagagctcccaaatgcacttgagcatgcaggtgccacgctacttcaagaaatagcatccaagacaaatagcgctgttggtgatggaactacaacggcaattgttttggctcgggaaatcatcaatcttgggttgttggcagttgccactggtgctaacccagttgcattgagaaggggtattgacaaagccgttcatgagctaattaagatcttgaagagtaaatgtatccctgtgagtacaaaggaggacataaaagctgttgcatcaatatcatctggcaatgatgaataatgttggtaatctcattgctgatgcattggagaagataggtcctgatggtataatcaaaattgagtcatcatcttcaatatacactacagttgaggtgcaggaaggaatgaagataganaagggatatatttcccccatacttcatccccaatccaggncnaatcaattgttggaattccgaaaatacta

SEQ ID NO: 148801 - DNA, 356 bp, Zea mays
  Clone ID: MRT4577_67232C.1
ctttatactgtaataataaagttctcatactgatatgtgcaacttctcagtaataaaagattagagatctataaaaaaaaaaaaaaaaaaaaaaaaaaaaaaaaaaaaaaaaaaaaaaaaaaaaaaaaaaaaaaaaaaagcaaaaaaaaaaaaaaaacaaaaaacgtaaccaatacacaaaaacaaaaggggccctgcctttaaaaaaccaaaccatatctccgttcgtttggaacaaataaaccttctttagggccaccaaaaatgaaataaatgcgcgcggttttaaaacgccggggacgggaaaaaccggggcttaacaaaattaaaatgcatacaaacatatcccctttttc

SEQ ID NO: 148802 - DNA, 328 bp, Zea mays
  Clone ID: MRT4577_67233C.1
cccacgcgtccgggttcccatgtcagcttttttagagtgctgtccattacaagccatatcgcgcagcatgtcttaaatctgcgtcccttgttattactttccttagtaaaatttggtggcttccctttttatattcttcctgtcaaggcctctgtgtccctcctcttttgtgttttgtttctctttatctccttctttttggtttgttaatcccttttaacttttttctcttgcatttttcctttaaaaaaaaatattatttgttcgtccttttctattagttttcattctttctttctctttcttttctatcattttattttttttt

SEQ ID NO: 148803 - DNA, 259 bp, Zea mays
  Clone ID: MRT4577_67234C.1
gtgtatcaatatattttattaaaggggtttcttatcttaatggatcttagcaatacatggggggcccctttcaaccccccttcctccgcgggggggggggggtttaccccaaccctcaacaccccctttttccttacccccattggccccccctttgtcccaaagagggggtcccttaccccccttttttcaatcaaaaaagggggggcgtttccgtcttttatcttgcccgggttttttgggcctgtgcccggtgggg

SEQ ID NO: 148804 - DNA, 431 bp, Zea mays
  Clone ID: MRT4577_67235C.1
agcagcccaaaaggcttgggacattggctttcccgccagagttcaaaaacgggagaaacagggattaggggtacagaaaacaaaaccagaacgggggggtttaagtttaaaaacagggctggggggaccaagaattaaacattcattgaccccaatgcttgccggggtaaaaaaccaaccgaaaaaccggcccgaattctaaacatcaccaaatgctatatgggggaggaaccatcgatacaaacagggagcactttggaacaactgggggcacttgcacaacttggttcttttcctctccgcactgggctacccagggtttaccggaggcacaaaaacggggacaccaaagggggggccttcccgggccttttggactagggaaagggcccctaaaggctctaacccccacaccgggaatggaccgaact

SEQ ID NO: 148805 - DNA, 308 bp, Zea mays
  unsure (1)..(308): unsure at all n locations
  Clone ID: MRT4577_67236C.1
acaaaatccatccatcggatcatcagcntcttcatcacaacaaactccntctatccataccctgatacccatntacacaaacagctaantccantttctgnttcgagagctatgggcggctccngggttcgngttttnacagtantcntgctgtcgcagctgcgggcaccatngncgctaattaacggcgncgtcgtgcccgnnaacnaggtcaccgtctncggnaaggagcgggttgntaaanggnnaacgccanggtttantggaaggcngtgaatgcttngaaaaccatggggcggggcgtnccg

SEQ ID NO: 148806 - DNA, 302 bp, Zea mays
  Clone ID: MRT4577_67237C.1
agcttccttttaaccgttcacagtgatttatttccactctggttgtatgacagttgggacctagtttagagcttctcaactagtccctccggttcaaatatatcttgttgtaggattactgcaagtcaaagcttttttaacattgatcatcaatacgtaaagaatacacagacaaacaatgaaagatagttgtacctagattcatccttagaagtactctcagtatttaaatattgtaatttaataaaaaaaatggtagtccaagttgtacattgcaaactgtggtttttccaaatgtcatg

SEQ ID NO: 148807 - DNA, 561 bp, Zea mays
  Clone ID: MRT4577_67238C.1
gcgctgggttctttcaatgagatgggaggagcgcgtgagcgctagaattttatgtgggtttattcagacataatcagcggctgggtgatattttaggcctgaggaggtgcattatgacctatgtgtttatttgctctgactctgcgcattgggcagggttcgaacaagcaatccaatcctatgcggattcatggactttccttgacataccagaaaggtccaaggcgctattcttggagagggaagacgcaatccctggttaattataaatggtcgggattctctggttaattataaatttcagtattccctggttaattgggggtcaaggtcttcagtaagggctggtggcacatgggcttggttttgtatattcctatggatgggaatggaagaatcatactagacgatagctgggagtatgctttatatcaattgctccataatcactaggtcgggggcaaccagggttgggttagggttccatgggggatgctaaatggggagtttcttcttgatattaacacaccacttttctttacaggccatcaacctcgaagg

SEQ ID NO: 148808 - DNA, 678 bp, Zea mays
  Clone ID: MRT4577_67239C.1
cccggggcgatctggtcctaggcttcgtctgctccgcctggcacggcgaactcgcggtccgccccgggcgctggattcttacagacctattgctactacagctatctagaagaagagagaaagatgcgaggtagaagaaagagagacgggaaactgggggctgtggagagggaagcgctgaccaagttcttgacggacagggaggtggaagacgagctcgccggattcttgcactactacgtggcaaacaagcaaggagaagatggaactgctccggtggttgaagagtgaagatgaaaccatttcagtagaataagaagccacacagcaggtaatatgggtgattccaatacaaatgagttctaagttaaaggccatattgttgggtgggtcgatgatgatgagctagcagtgacgcctaagaaaaatgaaaagccaagtgcaagtacctttgttggttaagtttatacctacagttgcagctcctattctgtaaaattgaagcttgcttttgggttttaacctatctagtgtctgtagtttgatttctgaaagaaaaacggaatacatgtggtccaacaagactgtcaaatgaatagagcaatttgccgatggtctacctgtgtaatttcagtaggttacttctgttaacttttttttggaccgggatactgctgt

SEQ ID NO: 148809 - DNA, 348 bp, Zea mays
  Clone ID: MRT4577_6723C.1
ggtggtaaataaaagaaaacgggccctgtcccccccgggcggtgaacagaaaacttccaacggaaaaaaaaaagcaaccaaaggcaggggaagcaaggcaaggaccccgacccccccaggcgggcaataaaaccaaatggaacaggggcccccggggcccaaagagccctggcggggggggcggggggccccccccggaatggtatgcctccccccccacttggaaaccgcgggggcccgggaagggcacccctgggacccggcccgggggggcccggaccaaaagggatgaacccagggacccgacccgcggggcaaacccaaaaaatccggcccggaccccccccc

SEQ ID NO: 148810 - DNA, 481 bp, Zea mays
  Clone ID: MRT4577_67240C.1
ccggccgggtcatcaagccaactggactaaaattcctcagctgaaacttgcatgaggatgaccaagctacaactcattgtcatctacacttctacagtacatcagccatccattgtatatgttgcctgataacctaggtgcctcggccaattttctagatgaactcgcttttgagattatctagctggaagcgtgtccacttttgttggaaaatgttgatccatatgttgtaaagttatttgcactccttgtgcaattgaagattcactctctggctgtgggtagaatctggctgtagaaagagtctaagtatcatgtgaattacgtgctgaggaagataaagttcagacggtttaggatttagacagtcatgtatttctactatcgcgatgacttgaccgattctgtgtctatgtttattttggatgatttttactaaagtaattctcataggaaaaaaaaaaaaaaaaaatttgcggcc

SEQ ID NO: 148811 - DNA, 2455 bp, Zea mays
  Clone ID: MRT4577_67241C.1
tccgtcgtgaaaaagcgccggccgcggtcatcggagctcgtgcgggtctcctcgctcggtgtgcaggatcagatctacttccgcgacctcgtgcgccgggcgcgcatcactttcgagtgcccccgcgggctgctactcagggacgacgagcgtgctgagtccctcggcctcgcgggtgccgccgggttcggcgttgccagggaccggcgccgcgcccgcgcagacatgcgtgccgcagcgctcatggcagaccacgacctctggctcaatcgcgaccgccgcatcgtggggccgatgcctgggatctcggttggtgacgctttcttcttccgcatggagctctgcgtgcttggcctccatggccaggtacaggcaggaattgattatgtcagtgcagggaggtcggcctctggggagcctatagccacatctataattgtatctggtgggtatgaggatgatgacgatcatggcgacgtacattcggctcgagggcatggcggccgtgatcccaacctccacaagcattgcgtcgatcagaagctggagggcggcaatcttgccctcgagcgcagcatggcttatggtattgagattcgtgtaatccgtgctgtcaagtcaagacgaagccctgttggtaaggtttacttctacgatggcctctacaaggttgttgactactggctcgaccgtgggaaatctgggtttggtgtttataagtatagactgctgcggattgagggccaagaacccatgggtagtgtgaattatcgagtagctgaacagcttaaggtggatgtgtttgctataaggccaacagggtatttgagctttgatatctccatgggccgtgataccttgccagttgcactctataatgatgttgatgatgatcaggacccactcttatttgagtatctaacacggccaatatttcctacctctgctgtccaggggaaatttgctgagggtggtggtggtggtggttgtgattgtgctgagatttgctcaattggatgtaactgtgcaggaaggaatggtggcgagtttgcatataataagactggaaccctgctacgaggcaagccactagtatatgagtgtgggccatattgcaggtgcccacctagttgtcctaacagggttagtcagaaggggcttcaacataggcttgaggtattccggtcaagggagactgggtggggagttcggtctttggatctcattaaggctggcacattcatttgtgagttcagtgggattgtccttactcaccagcagtcagaggtcatggcagcgaatggtgattgcttggtgcgtccaaataggttccctccaaggtggttggattggggtgatatatctgatgtgtaccctgattatgtggcgccagaccatcctgttattcctgagttaaactttgcaattgacgtgtcaagggcaaggaatgtggcatgctatttcagccacagttgcagtccaaacgtgtttatccagtttgtgctgtttgatcattacaatgtgtcttacccccacctaatgatctttgccatggaaaacattccaccattgagggaactaagcatcgactatgggatggttgatgaatggactggacaattaaccatgtagctggagtaacctatttaaaaggcagtgttctctttctttcttttccctttatttttggaattctcataatgcttcccctggggatcatcaagccaactggactaaaattcctcagctgaaacttgcatgaggatgaccaagctacaactcattgtcatctacacttttacagtacatcagccatccattgtatatgttgcctgataacctaggtgcctcggccaattttctagatgaactcgcttttgaggtataacatgcaatgttgctgtaggaagcttgtttgatgtggctggttaattttaaccttcgtgttatgagttgtcactgctggaactcattttgtacatatatctgcagattatctagctggaagcgtgtccacttttgttggaaaatgttgatccatatgttgtaaagttatttgcactccttgtgcaattgaagattcactctctggctgtgggtagaatctagctgtagaaagagtctaagtatcatgtgaattacgtgctgaggaagataaagttcagacggtttaggatttagacagtcatgtatttatactatcgcgatgacttgaccgattctgtgtctatgtttattttggatgatttttactaaagtaattctcatagaaatgggatgagaagttaggcgtttagtagtttgcaccaccttttggtagctagaagatgaaaaaagttaaaacaaacaaaaaaaaaaaaaaaaaaaaaaaaaaaaaaaaaaaaaaaaaaaaaaaaaataaaatacaatattaagggctgtccacgtatatgagtctcgggctcccgagaattaa

SEQ ID NO: 148812 - DNA, 597 bp, Zea mays
  Clone ID: MRT4577_67242C.1
cggccgctcgagcgccggccggtactcgcacatgcgtcgtctcagccacttccccctcctcgccgccgtcctcctcgcggcggtcccgcgcccggcccaccccctcaccgagctcgagacctcccaaatccggcgcttccaggactacctccgcatctgcaccgcccaccccgccccggactacgccggcgccgccgcgttcctcctcccctacgccgcgtcactcggcctccgcaccgccacgctccacttcagcccctgcaagtcaaagcccctcctcctgctcacctggccgggcacggacccctcgctcccctccatcctcctcaactcccacctcgactccgtgcccgcggagcccgagcactggatccacccgccctacgccgcgcaccgcgaccccgccaccggccgcgtctacgcccgtggcgcgcaggacgacaagtgcctccccgtccagtacctcgaggacatccgcggactccaggtcgtcggattcgcgcccgcccgcaccgttcacgtctcgctcgtccccgacgaggagatcggcggagaggacggccacgaagaagttcgtttcagttggagggagttccg

SEQ ID NO: 148813 - DNA, 337 bp, Zea mays
  Clone ID: MRT4577_67243C.1
accgccgattccggcgacccacctcgcgtccatggctctggtcctgcgggtctctgctctcgcgccgcacgcgccccgctccggctgccgcagcgcgcccggcggcgttcggccgcgcgcggggggggacgtccgacggacggtgaccgaggcaggacgcgcggactggcctaggaagaccggcgggctgacccgagaagggactgaaagaccagggcgcaggaggggatcgaccgccaggcccagacaacacccgcagctacaggacacgcgcgccgctagggtggctttcacgcgagccagattgagacagctacggctgaaggggaaagctggg

SEQ ID NO: 148814 - DNA, 383 bp, Zea mays
  Clone ID: MRT4577_67244C.1
ctccgccatcttcaccaccgcacgcctcccactcggccgtcttcgccggcgggacgaggccgtcgtgcgcctggctcgcgccgctcttcgccagccgtggcagggcgacccgcatgggcgcgccgggcagcggccagagcagcaagatcgccaaccaggtcgcggtggccggcgcggtggtgggcctcggcgaggccgtgtccttcgcccgcgagttcgcgtccgggggcagcgtgcggtacatcgtcaaggacctcggcatggcgctggaggtcggagacggcggggaggaggaggtcaacgtgctgcctggagcggcgctgtaccggcagatgttctcggccatggtggccaatggcgacggggacctgagcttgcaggga

SEQ ID NO: 148815 - DNA, 158 bp, Zea mays
  Clone ID: MRT4577_67245C.1
ttacatatactgtctcacacgcagctataagagtaccttgtcattgtgacaacatatgccacactcacactgtgtgcaactgtgatcttagacatagttttcatcacactgtgatgacttgtgtattgacacatacatagcagtgtgtgctcccacat

SEQ ID NO: 148816 - DNA, 154 bp, Zea mays
  Clone ID: MRT4577_67246C.1
gcgccccatcggcgcgggggtaaccccctccgatctcgtcgactcgttcgccccccgaagtagtcccaggggttctccactggaaccatccacattcggggcagtagtttacacggtacaaaggttggtctacgaagaagaagatgaggacgat

SEQ ID NO: 148817 - DNA, 192 bp, Zea mays
  Clone ID: MRT4577_67247C.1
gccgtgtgcaggcgtacgtgcacacacgcggtgcgtgcatgcatgcttgcattgcgttttcatctcaagaatgaattttcggttgtaaaatctgtaaccgaggaagaaaaacacctcgattaaccatgcatagctgctatgattctgtgattcgacgagacgatgttaattaatctgcagctttcactatgt

SEQ ID NO: 148818 - DNA, 172 bp, Zea mays
  Clone ID: MRT4577_67248C.1
gttcatcttcctcgcttgcactctcgtagactcacaaaccttccctcgcattcatcccacgcatggctgccatgaactctagcgtatttgcctgtagctatgccatatcaggtgcagcgtgttcggagctcaatgggaaggtcacttccgtggcctatgttgcatgctctgg

SEQ ID NO: 148819 - DNA, 197 bp, Zea mays
  Clone ID: MRT4577_67249C.1
tgggttttttttttcgtgtactgggtcctcaacaacaccaggaaataagagcatccaaaagacctgccagcatgactcatgcaatccatccagatgaacaggaagatacaacgacagtatcattagaccgaccatcaggagacgcaaatgcatggggttcactcattactacacactgatgaattctgagtccatgc

SEQ ID NO: 148820 - DNA, 362 bp, Zea mays
  Clone ID: MRT4577_6724C.1
ggcccggtactatatgggccgaccgacgcgtccgtttttttttttacataccctacctacctctccgtctgcggatcatctgccatgggggcgtacaagtacgtctagttgttatggagaaggatgcaatcccacgtgatggggttcgtaagcacatgcgctgttgtatgtacaggcggcacacggccatcgtacgctttacaaggccgactcggccggactaggcccgccgtctcggtttaaaggccaagcaggggtgtgtcgattaccgcgtccgtgggacgcgtgttggcaggactaggactgggccctatcgttattgcctattgttaggcgaagtgcgatcgttcacccctctcaag

SEQ ID NO: 148821 - DNA, 352 bp, Zea mays
  Clone ID: MRT4577_67250C.1
gggcggctatacccctgcctccgcggatttggtcttcttcgctgccatggatccattcaccggctccattgatcatcgcttcccgttgaaagtgcgcgcccgctcgcatttctatttcatcctactggtccagcacaccgtggggggggggcccccttcttctccgctagactggatctgtacaccaactcctacatgctccttctgcccacaggcccatgagagcctggctggtgctcgctccggcgctgtggatctgacctgctggccgccattgccaggctctttccggaccatgagatccctgattccaatatctggctctcctccggcctctctcgccttcttttcc

SEQ ID NO: 148822 - DNA, 370 bp, Zea mays
  Clone ID: MRT4577_67251C.1
caagaagaaaagggggaaaaaaagagagaaggccctcttgctccttttggccaaatgcttacgtacccgttcccacaactgccaccatacacaaccaggagggtgagactgtgtacctctatgttcccaggaagtgctcgtccacaaacaggatcatcactgccaaggaccatgcctctgtccagatcaacattggccactttgatgccaatggcctatatgattgtcacttaacaacatttgctctctctgggtttgtccgtgctcagggcgatacatacagcttcttggacagtctgtttcagtagaataagtgcttatattaatcagtacattatacatctaatttaccaagaattgcacacttcct

SEQ ID NO: 148823 - DNA, 340 bp, Zea mays
  Clone ID: MRT4577_67252C.1
cctcttctcctacccgccgctcgacgttgcgagtttgctcaagatttggaacctgaataagtgctgtggtgtggtgggtgtgttcaactgccagggagccgtatggtgccgcgtgaccaatcgaacaagcgtgcacgactagtccccgggcacgctgaccggcaccgtgcgtgccgacgacctccaccccctagcgcgcgtccctggtgacggcggtgggtgggacggcgagaccgcggtgtatgcgtaccgaacacaagatctagtgtaacatgcctcggggcgtcgcgctgcctgtgaccttaggcccgctccagtatgagctgttccatgtgtgccc

SEQ ID NO: 148824 - DNA, 335 bp, Zea mays
  Clone ID: MRT4577_67253C.1
gtcgaggctgataaccagggggggggttcagtttgtgggtgcgggaagaaacccgcatctgttgagagtttgatgcgtgggaaggaaaccaaaaccgacgatgggcctgctcatgcagacacaactgaatatttgagaaggcgcccgccggcttgattggacgatcaagcgcactcagggtagtgggaaacaaaagcaaggcacaaggcatgtataggaagacgaaagccactactatgcatagaaacgggagacacggttcagaaatacagaccattggacctcaatttttaaggcaatatgctggattggcaggaccttgaatgtaagagcgg

SEQ ID NO: 148825 - DNA, 172 bp, Zea mays
  unsure (1)..(172): unsure at all n locations
  Clone ID: MRT4577_67254C.1
gttnctccgaggagagagacatatatggatgaaacagctaactacctcctaatttaatgctgtatttacaaggaatccaccaagcttggggtgtaaaatatgacaatggttgtttaaacaaactccattcctatatgccttgatctggagatgatcaatcctttaagtgggc

SEQ ID NO: 148826 - DNA, 247 bp, Zea mays
  Clone ID: MRT4577_67255C.1
tgtggcccaaattttgttactctaaactggagcatagtggtctttaggggaaaaaataacaatactgccaagggcctatattcttcttttgcataacctgttgaaatagtgatctcgctcctcctagctttgtctttcatttttattacttgttgcatgttcgatttatagttttaccacttatattctattattctgtcaagacagctcatttttttcctttactgcattcaaccattcatctggg

SEQ ID NO: 148827 - DNA, 316 bp, Zea mays
  Clone ID: MRT4577_67256C.1
aaaacccaaaaaataacaattctttttttttaaaaaaaatgggagttaaagggcgggacacgggacaaatttttaaccgcccgcccccttgaacgactgaatgaaaaaaaagggggccggggacgccgaccccaacaaccaccattttttttttattaaggggaggctggctaacctaatttaagcccggcgccctaacgggggggctcattccaccgggggcttccggcctatttgcttaggtgggggggggggcgaaaaaaatcttcggggggggccttttggacaggaaaagttttttcattttcgggggggg

SEQ ID NO: 148828 - DNA, 1556 bp, Zea mays
  Clone ID: MRT4577_67257C.1
ggccgcttttttttttttttttttgacataataattcacatttttatttaaccgcatggcccactcatcatatctctgtccctctctctctctctgcagtatttatactaattaacaacagcgtatgtattactttacatgtgtgttaaacacttcaaatgtactcatcacatgaacttttatccgctgctaatcaacacagcaacatgagaatagaaagggggaggggtaacaccagatgaaatgcccgtaagaatttgcatctgcagactatatatagacagtaattaattcacactgatggactgtttcttgttccgtggtttctttgcattgagtacgtgatggattactggactagcaccagttgcttagcccgccatggacactcgaagtgcaccggggacgtcatccttgccgccgtagacacactgccccggctgcagggcgccttgctggctctcggcggcctggaaggcactgtcgaagtactccgaccacctgagctcgtccagcgcgccggcgtagcagctgccgacgacgtggccgccggcgtcagccaccgcgtttgccccgagctccagccatgggaggttgccgccggcggcgacgttgttggtgctgcagtgttccgcttccgccatcgaggtcagcgtgctggagctggcgctggcggaggccgacgggacgaccggcgccggcgggatggggccgcagtgctgctgcagcgcgtccatgtcgaagcagcccccctgcaggtagcatggccttgacgttaccccgtcgccagcgacgggccagtccagctccaccgctagcttcacgctctccagcattgggccgccctcgaacgacggcggcggcacctggattgtagtagtagtagtagtcgggatgaggtcgacgtccccaaacaccgcgcggcgggagaccgtggtggtggtggtggcagtggctgcggcggcaggctcggcgagcggctggtgggtggcggggtcgatgccgcgctccctgagcctcttcttgatgtacgagttccagaagttcttgacctcgttgtccgtccggccaggcagctgggccgcaatctgagaccacttgtttcccagcaaggagtggaggtgtatgatgaggtcctcctcctcttgcgagaatgtgcccctcttgaggtctggcctcaggtagtttatccacctcagcctgcagctcttgccacacctgtcgaggcctgcaagcttgggtacggagctccagcagccgtggccgtacttggcaatgtggttcatgagcttctcgtcctcctcgggggaccagagccctctcctaagcttcttcttgtggcagcacgactgcttcgccatgccgggatagcctggcgccaggagctagcaagctaaaaccccagccggccgttggcctcgcgcgcgcgccgaccgatccttgacgatgatcgctcgttatatggaaggcgagatgtgatggcggcaggctactaggagccgaattgaagagaggccaggagaaagagaaagagagagagagataaaaggatgcca

SEQ ID NO: 148829 - DNA, 271 bp, Zea mays
  Clone ID: MRT4577_67258C.1
cgttgctgtcggctccttgctggacagaagaatcatttgttgcttgtggatagctataataatagttggcatattctacagggttatagacatgttgatctgaactagagtaaggcatgtgagaatgggctacatctgccatccccctactcgactgggcaacatgaggcacgctactttctacattttgattccctcctgaatccgatacatccctttgtggatcatagtaaactgtatcttggctaagtttgtccactcgacagcaacg

SEQ ID NO: 148830 - DNA, 193 bp, Zea mays
  Clone ID: MRT4577_67259C.1
aatttccaattcgaccgacgcgtgactcaacctactgagagcccagtcatttcactctgcaatccttctcagcacaatatccaaggggtcaggccaaaattcaaaccgaagaacgctgtacacatctctcaccgacaacatctttacggtgaccgcacaagatactatagccaactccaggaaattcaccaaa

SEQ ID NO: 148831 - DNA, 285 bp, Zea mays
  Clone ID: MRT4577_6725C.1
tcaagctacgttctttctggcaggttctttttgccatgatacacaacaaacccctgtgggatttattataaccaaactttctaatgcaccatgcatatattatgggaaataccccacatgaaaatgtgtgtagccttattggaggggggcagtaagaatacacacgagatcgtttgaggaaattaccacaaatttatgcatgagcataatggaggtaatggttagaatgaatccatagggcgtttgacgtctattatggtcctggtacctgcccgggaggccgct

SEQ ID NO: 148832 - DNA, 440 bp, Zea mays
  unsure (1)..(440): unsure at all n locations
  Clone ID: MRT4577_67260C.1
gagggcccccgtggcgacctgaagccatggtaggtgaactggaaaaaaatgccatggcaccggcagcgtgtctgctgttcttgtgtacgctgcacagcacaaccagatgggaggctgatcgacgaggagggcgatgggtactcccatgccaatgatgtaaatgtaaagcgtcttccagcccagcaggcactgtgccttttcaggcgacgtgtctggttcgcttgtgtgacagtgtctgttctgaactttactttagcgttagcctattaacgatcggagatcatgtaatgtatggctgttgtatcatagtattaatagggtgtttagttcgagtaatgagttagtctatcattgtcttaaaagagacnctgagaaaagaagacaaagctgcaaacagcaattattctgttggtgcaacttaaaacaaaaaaaaggggggc

SEQ ID NO: 148833 - DNA, 606 bp, Zea mays
  Clone ID: MRT4577_67261C.1
gacgtctataccgatggaggtgatcctccggaagcagaggctgctcgcgaatccgtccatgaagcaggccatgctgttcccgcagcccgcccaggctggggacgccttccaccagatcctgaacgggctggcgcggaagctgccgcacggcgaggacgtgttcctcaagcccgggcagaaggtgctcaactggaccgagggcccccgtggtgacctgaagccatggtaggtgcactggaaaaaaaatgccatggcaccgtcagcgtgtccgctgttcttgtgtacgctgcacagcacaaccagatggtaggctgatcgacgaggaggacgatgagtactcccatgccaatgaatgatgtaaatgtaaagcgtcttccagcccaccagtcactgtgcttctggcgacgtgtctggtttgcttgtgtgacagtgtctgttctgaactttactttagcgttagcctattaacgatcggagatcatgtaatgtaatgtatggctgttgtatcatagtattaatagggtgtttggttcgagtaatgagctagtgtatcatctttttactcctcatttttttgattatttttaaaaaaaaaaaccccccccc

SEQ ID NO: 148834 - DNA, 2086 bp, Zea mays
  Clone ID: MRT4577_67262C.1
agtgacagtactagtgacaatgtgacatgtcaaaatggcgccttgtactactaccggtcgtggagggcaacctggcagctgtcctctcccctccaccgacagctcgtcgctgacggcgacggcccgcaagccaccgccatcatcgccactcgcccactccaccgctcgctcccacacctgtgccagtgccatccctttttgactcctcggcctccctcaaatcagtcgtcactacctcactgtccggctgtccctgtccctgtccctgcgcaacaatcaatcccacgggcttcctgccgcttcctcggctgcccccatcctccgaatcctgcctcgcctcgatctccccgttcctcgtgtgccgacagagggtggcgggcgagtgggcgactaatggggacgggggcggggagcgcgcgggctctggccgtggcgttcgccgtctcgcttctcgcctgctctggcgccgtcgctgtcgccagggcgcaggacaccgagcggatcgaaggtattggacctcgcctggcctggaagtgctggtgatgtgctcgaagacgatcccgttgggaggctcaaggtgtatgtctacgagttgccgaccaagtacaacaagaagatggtggctaaagactctaggtgtctcagccacatgtttgccgcggagatcttcatgcaccgcttcctactgtctagcgcgatccggactttaaatccagaagaagccgattggttctatactccggtatacaccacgtgtgatctcacaccatgggggtcatcccttgcccttcaagtcaccacggataatgcggagcgcgattcagttcatttccaaccggtggccatactggaacaggacagagggagcagaccacttctttgtcgtgccacatgactttggcgcatgcttccactaccaggaagagaaggccatcgaacgaggcgtccttccgttgcttcgccgtgctacactggtccagacttttgggcagaaggatcatgtctgcctgaaggaaggctccatcaccatcccgccatatgctcctcctcagaagatgaaaactcaccttgttcccccagggacccctaggtcgatctttgtgtatttccgcggtttattctacgacactgcaaatgatcccgagggtggttactatgcaaggggcgcccgtgcatcagtctgggagaacttcaagaacaacccgctcttcgacatctcaacggaccacccacccacgtactacgaggacatgcagcgtgccgtcttctgcctgtgcccgctgggctgggccccgtggagcccccgtctggtggaggcggtggtgttcggctgcatcccggtgattatcgccgacgacatcgtccttcccttcgcggacgcgatcccgtgggaggagatcggtgtcttcgtggccgaggacgacgtcccgaggctggacaccatcctgacgtctataccgatggaggtgatcctccggaagcagaggctgctcgcgaatccgtccatgaagcaggccatgctgttcccgcagcccgcccaggctggggacgccttccaccagatcctgaacgggctggcgcggaagctgccgcacggcgaggacgtgttcctcaagcccgggcagaaggtgctcaactggaccgagggcccccgtggtgacctgaagccatggtaggtgcactggaaaaaaaaatgccatggcaccgtcagcgtgtccgctgttcttgtgtacgctacacagcacaaccagatgggaagctgatcgacgacgaggacgatgagtactcccatgccaatgaatgatgtaaatgtaaagcgtcttccagcccaccaggcactgtgcttcttcaggcgacgtgtctggtttgcttgtgtgacagtgtctgttctgaactttactttagcgttagcctattaacgatcggagaatcatgtaatttatggctgttgtattctccctatagtatcaaggacatgtttgattagtttagtctagggactaaaatttagttaggagactgaagtttaatagggtgtttagttcgagttaaaaaaaaaaaaaagggcggccgccaccgcggtgga

SEQ ID NO: 148835 - DNA, 636 bp, Zea mays
  Clone ID: MRT4577_67263C.1
ctggagctcgagggccgcttttttttttttttttttatttttttttttttttttttttttttttttttcttttttctggtgcctttttttttttttttttttttttttttttttttttttttcccttgacaaatattgggtttttttttttcccacagcgtttactggcctttgtcttgttgcccagtacaccaatatgggggcccgtttggggccattcccttgtcgttgtgacgccgcaacacctttcttggtggggggttcgttcgcccgctcttgtcattagccgcctggtctcgggcacgatgtcccctctttgtgccgggcggggtcaactcctaggccgcgtgggcccataccacttgggccccggggttggggccaaccatagcttgtgttccagcttccccttttaagcctctaagagggcctgcgggggggcccaagcggagggcgtcaagccgcacacggtgtcatgtctcacagctctgtgttgaaggtgtgggggccttcaaatggggacactcgatgcacgctgttgcggccggtattcaggagtgccaccttcgccttggggtcctaagtttgccatgggtgcatcaaggatctccccaatctcgggcacccttacaacga

SEQ ID NO: 148836 - DNA, 335 bp, Zea mays
  Clone ID: MRT4577_67264C.1
ccccggggttccactcatcccgagttttggaaaacaaagcttatccaaacacccaccacattacaccacattacaccacacaccaaattacaccacacaccacgttacacattacacattacacattacacatttacatatttcacttttcacattacacattacacattacacattaattacctcaagaacacacaatccctgcaatttttgatttaaaaccgctttttttgtttgaagggattgacagccaattcattaggggccctattcggggctctttttcgtttttacttttgatcgttttgcactcgggggggggcaaacatgctact

SEQ ID NO: 148837 - DNA, 262 bp, Zea mays
  Clone ID: MRT4577_67265C.1
ctcactccagtctttgagacccccagcaggccaggcaggtaaggagttggctgggaaggagtgtgaacacaagaggtcctcacctcactgtgagctgcacacctgccctgctcctaccgcaggcaatctcatgcttccacaccttccaccctggcccagcctggctctccctcaggaagaggggaggggctgcacttcgagccctgtgctcctaattggcttggccgttggtgggggagaggagcggacatacatggtggaa

SEQ ID NO: 148838 - DNA, 867 bp, Zea mays
  unsure (1)..(867): unsure at all n locations
  Clone ID: MRT4577_67266C.1
gtctccgccgcctcctcccagacggctcgagaatccgcctccccacacctccctcggcgccacttcgcagcccccagccgcagctccccgccggccgtcagattttgaaggttcacggcaggagagatggcaactctaaccagccttgcctcaaacccgaatccaaacaagtcattcgaggtcctgcctaatccgggtgactccctctcaagcctcagttttagcccgaaaagcaatcttctggtggcaacttcctgggataaccaggtgaggtgttgggagataggtaatggtaacagtcagccaaaggcatccatatcacatgatcagccagtgctctgctcagcctggaaagatgatgggactactgtcttctcaggagggtgtgataaacaggtcaaaatgtggcctctcctgtctggtgggcaggctcagacggttgcaatgcatgatgcacctgtcaaggaggtctcttggatttctcagatgaatcttcttgtctcaggaagctgggacaagacgctaaggtattgggacacaagacaaccaaatcctgcccatgttcagcaacttcctgatcgttgctacgcacttgctgtgaattatccccttatgattgtgggaacagctgatcgcaatattgtgatcttcaacttgcagaatcctcagactgagtttaagcgtattcaatcacctctgaaataccagacacggtgcgttgctgcctttccagatcaacaaggattcctggtgggttccatagaagggaagagttggtgtgcatcatattgatgatcacagcaaagcaaaacttcacattcaatgtcacagggaangaatgatattttctctgtcattcgctcactt

SEQ ID NO: 148839 - DNA, 525 bp, Zea mays
  Clone ID: MRT4577_67267C.1
gttccgtctcgtgccctttgctcttccatctctctctgggctggagactctcacgcgtttgcttcaagcattgacccgagcataaatcttccagccacttgttcctggcctcttcttgatttctttctatcccctgcctgtcagtgtagtgctcagatttggtcatcatgaagccatgaacagagctggcgcctctggtgcaggatcctgacgacctgcgtctctgaagggggagaagggcttcttttctcagtgcttgaatctgctaaacttccagatcttcttgaagacttgtgaaaaatgaagccgcctttggaaaggaacccatccaggaagcgccattcatggtggtgggatagtcacattagccccaagaactcaaaatggcttgcagaaaacctcgaagaaatggataagcaagtgaaggaaatggtgcagcttattgaggaagatggcgactcctttgcaaagaaagctcaaatgtattatcagaggcgcccagtcctcgttacccatgtcgagaac

SEQ ID NO: 148840 - DNA, 417 bp, Zea mays
  Clone ID: MRT4577_67268C.1
aattgttctttgatccaactgttttttttttacagtatctatccagatgtatgggggacgcccgccaaattttccaaaccaaaccgccttaaactccgcgggggagggagagaaaacccaaaccgaatgtgctcccaacccagggggagggctgaaaaaatgacccctaaggggctacccgggggggtctataaaaccctctgaaacttggggggggagaccgcgctcagggggggcctcaagtgaagaaactgaatcaagcggcttcagtgccatgcaagaacatacagagatgggcagagaaaaaaatgcgggataccctctctatcatccagatgttatatattgacatgccgcagggggctacacttgtaacgggggatcgcccccaaaagtctgggaccaaagaacccattt

SEQ ID NO: 148841 - DNA, 242 bp, Zea mays
  Clone ID: MRT4577_67269C.1
taccgagctagtgcctcctgttcatccttccttctcctgggtctccatcctgcgctggtccaccttgctacttggccctgcactgcccgtcgcctgccgatcgctcgtctggagccactgacccgagaatccgtccagcactccatgtaccatcacctgttctttcagagtaccatcagatctcttcaataggtctgaatgattactaatgtactgcatactcatattcattggattttata

SEQ ID NO: 148842 - DNA, 216 bp, Zea mays
  Clone ID: MRT4577_6726C.1
cccacgcgtccgtccactcatccgcccacgcttccataaggatctagcacgccgcccgatgggaagggtgcttcatggcggcccgtcacggctcttatggacattcatacagagccaatgtgccggtcccatgaggcacttaacgtccctttggatttttggggctactgttcactatgtcacatgatgctcttttggattgcgactaacaaatct

SEQ ID NO: 148843 - DNA, 252 bp, Zea mays
  Clone ID: MRT4577_67270C.1
cccccgagcaaagggacccaggaaccggccccaccaagggaagggccaaaaggccaaaagggcacaagccaaggcccccccaggggagaggacccaaggggaaggaacggagaccaaccagacacacgccccgacagaggccaaaaaaaatggggggaaaacctaccaaccaccacccccaaaaacaccacccgggggggcggcccaaggaacaacggccccctcaacccaagaaccgacaccacccccccc

SEQ ID NO: 148844 - DNA, 344 bp, Zea mays
  unsure (1)..(344): unsure at all n locations
  Clone ID: MRT4577_67271C.1
gttggaattgggtgattatgtgttgttattgttggnttgttttggttttgggagattgtgagagtgagatgagggaagtnataagttttatngagttgattgattattaaaggttattagtcttcgnttgttattgttctgtctgatgttttctcctgcggttctgtcctagattcatgagttctaactcgtagtccggcaaccggctgcacagctttctactactggaacggcggggctatcactccctttatattcaacgcggacttgaaggtagagaacttcaacgagacggccatagttggcgcgtccctaagttcctagaacccttcatgtaagcgttc

SEQ ID NO: 148845 - DNA, 253 bp, Zea mays
  Clone ID: MRT4577_67272C.1
gcacgccgcccgttgggaagggagcttcgaggcggcccgccgcggcgcgtcggccgggcagggtgaggcaatggcacgggcccttggggcccaaacaccctaacgtgactcagtgcgggcggcgagcagacgcgcctcctgctagcttggattatgacttacaggcattccatcataatccgtctcaacgaagatacccgccactggcttaagaaccaactccaaaaaccaattcggtacatcaacagctact

SEQ ID NO: 148846 - DNA, 164 bp, Zea mays
  Clone ID: MRT4577_67273C.1
agcgcctgttgatcatacgattcgatatgactcaagcctccggaggcttacacctgtacactatggcactcagtggtgcgcgtatagagggaaggaggtgaccactttattgtgactcccgaacacaggtatactacctacaagactaggaacacgcacgaatg

SEQ ID NO: 148847 - DNA, 380 bp, Zea mays
  unsure (1)..(380): unsure at all n locations
  Clone ID: MRT4577_67274C.1
acattcgggggnnncntttgcccacgcgttctgccactcttgcgtgcacacatatggacaggctttcactaactcttggggcgactcttgcgaccacgcgggcggaattaatgacgtcttcatctatcaacagccaccgccgcctcattctcgcgggcggcgttgttaaaggacccctccttactgccagtgccagcgacgggacctccttcgtatcggggtaccccattccaaacaaccggctcccgatctacacctcgtacatgaccaaaccgtcctgtgacataagttcaatcctttcgaggacatagctctttaggagatgctgccaatagctaacagacatccacgcatactgcttgcgcacagtgctgaacatt

SEQ ID NO: 148848 - DNA, 822 bp, Zea mays
  Clone ID: MRT4577_67275C.1
gtggcggccgctccgaggcccggccggttccccgggaaaatatcggaatgaccaaaaaagagtaagaattacagaaaagcccctccggtagtctctctcttttccgtttctcttctccggccttcgtcttcctgcttctccccgtccgccaattcccttccccacccaaaccctagagcaaagctcaatggccctcgtcacgagttcgcgagagactctgcaccgccgccgttgactgctgatccaaccgctcccgcggcgcccggggccctgtcacggaggcggcggcgacatggcgtcgaggcagcacaatgcgcagttccacaaatccaagacgcttgacaacaaatacatgcttggagatgaaatagggaagggggcgtacggccgcgtatacaaggggcttgacctggagaatggcgatttcgtggccatcaaacaggtctcgctggagaacattccgcaggaggatctcaacataataatggtgacgttttttcttacttatcatatcatgcacaggaaatgaaggggtgtgtaattgcgtgaaatgtgtttgttgggaggagctgtgtagctagcacacagcggctccagttcagctataatatgtagttttagctatgcacctcgcccttttgtagcacactttttgctgtgagattacattccagggctaggttctgctagcttacttatgggagtagtgagcaagatccctgtttggtaggttcaaacttggaattatagcagaagtcaaggacatgcgttacctgtgtgtttggcatgttaatcgatctgtagtgagtcggttactcggtt

SEQ ID NO: 148849 - DNA, 1854 bp, Zea mays
  Clone ID: MRT4577_67276C.1
ccgttggtttgactttaatgtttttgggcttggccatttgggttaagttgacccccatttttcgcattacggaatttgtttccgataccctggggtttttgaccaatcttttgcccaactatgtttctgggcccctgattttggccttgggactattttttgtcttttggggtcaaagtcgcaccgttggttctatttccgaggtgttgcaaccggataacgaccaggagttggtggacgtgctactggcccaccgtcgccttaataagggggctaaaattgtcgtagtggggggaggtacgggcttatcgactcttttacggggcttgaaacattacagcgctaacattactgccattgttaccgtggccgatgacggtggttcctccgggcgtttacgacgggaaatgggtatgttgcccccaggggatattcgcaattgcattggggccctggcggacgaagaaaagttattaacagagttgtttcaataccgttttaaagctggggatgggctgtcgggccacagttttggtaatttgttcctcactgccatggcggaaattaccggagatttggaaatggcggcgatcgcctgctcgaaggttttagcggtgcgggggaaggtgttgccagccaccctggacgatgtcaaattgtgggcagaaatggaggacgggcgctatgtggagggggaatccaatatccctgaagcccaaggacgcattcggcgcatcggttgtttaccagaatcccctaaggctttgccagcggtgctcaaggccattaaagcggccgactatatcatcattggcccgggcagtttatacaccagcattttgcctaatttgctcattcccgaaattcaaacggcgatcgccaaggccaaggtgccccgcatttatatctgcaatgtgatgacccaaccaggggaaacggataattacactgtctcagaccatttaacggcgatcgccaaattaccaatcaccaacaacaggtggggcaaatccaggcggaaattagccagagtcaacagcagtttttgcacattcaacaggaaaaatccttccataacacccaaaccctgccccagctagaagccgcagtgcagaccagtcagcaacagttggagcaactccggcaccaggcccaggcgatcgcctccgcttccgaagcatgggtacaggaacaaacccaactcagccgcactgtcaaccaattacaagacgagttaatcccccaacgcagtcagttggcccagctagaggaacgccaacaacaattgctaaccaatttggctgaattaacccctctgctcacaaaggtttctgttgagttggaagaaaaacagtttgcccaagggcagttcaacttccagggagaagcactaaccagtcagattcaaactctggccagcgatttggcccaactggaacaggaacggagtttgctacaggaaacccaaacccgcctgctcaaagaacaacaggaaaaacaacggcaattggacaaattagaagcggctagtcaagctcagcaggaagtgcagggcacctacgccaccaaagtgattttgcagtcggatttacccggggtctgcggtttagtggcccaattgggtcaggtggagccccaatatcaactggctctggaaattgcggccgggggccgtttgggttttcttgttgtggaagatgatggtgtggcggcggcgggcattgaaatcctcaaacaggccaaagcaggacgggccacttttttacccctgaataaaattcgtcctcccaagggtcaaaatcccaaccttagttatgcccatggttacattgacctggcagtgaatttaatcga

SEQ ID NO: 148850 - DNA, 894 bp, Zea mays
  Clone ID: MRT4577_67277C.1
atcggaatgaccaaaaaagagtaagaattacagaaaagcccctccggtagtctctctcttttccgtttctcttctccggccttcgtcttcctgcttctccccgtccgccaattcccttccccacccaaaccctagagcaaagctcaatggccctcgtcacgagttcgcgagagactctgcaccgccgccgttgactgctgatccaaccgctcccgcggcgcccggggccctgtcacggaggcggcggcgacatggcgtcgaggcagcacaatgcgcagttccacaaatccaagacgcttgacaacaaatacgtgaggatttatcgcgcctcccacctcagatccaggggaattcgtgtttttttgctgcgaattttggggttatcctactctcactcagtgcgcctgcacgggcccgtgtgcagatgcttggagatgaaatagggaagggggcgtacggccgcgtatacaaggggcttgacctggagaatggcgatttcgtggccatcaaacaggtctcgctggagaacattccgcaggaggatctcaacataataatggtgacgttttttcttacttatcatatcatgcacaggaaatgaaggggtgtgtaattgcgtgaaatgtgtttgttgggaggagctgtgtagctagcacacagcggctccagttcagctataatatgtagttttagctatgcacctcgcccttttgtagcacactttttgctgtgagattacattccagggctaggttctgctagcttacttatgggagtagtgagcaagatccctgtttggtaggttcaaacttggaattatagcagaagtcaaggacatgcgttacctgtgtgtttggcatgttaatcgatctgtagtgagtcggttactcggtt

SEQ ID NO: 148851 - DNA, 373 bp, Zea mays
  Clone ID: MRT4577_67278C.1
aaaaactcttatctaccactcgtcatcgaacgtcatcacgatttcgacaagcaattgactttatctcgaaccttgcgacttccaccacttgcaccgattctttgcgagcaatcctaaaacaactaccatgtctcaccaagttaatggcgacgtgagcgctgctcagtattctgccttcgtccagcatctcctcaactaccctgtcatcagcgacggcgtccacaccttcaagtccaacgaattcggccagcgctccatcaagctcaccgacgctgcttaccagaccttcgccgctcccgtcgtcccctacttcgccaagccctaccaatatgtctctccctatgtccagaaggtcgactccctatgcgacaag

SEQ ID NO: 148852 - DNA, 418 bp, Zea mays
  Clone ID: MRT4577_67279C.1
ggccgccctttttttttttttttgtttctttttaacaaaaggcggggaatttatactaggggggcatcacatcagtttttctttttattaattagctcgtatattcccgcggactccggacttaaactagctggccatagtagaccgcacccacacaagtttgctgccactctttccgcacatccgggtttggcgcgcagatggtgctttgctcggcaacacaccactctggagcttttttgggccctcatctaattgaacagccctagccctacctccgggcgccttccttgggggtggggatggcgcaggcggttttttggcatgagacccatgtcagctcatatcctttcttccggtgaccggtatctaggaaggacccattccgctgtgcatccggtcccaactggatttttcc

SEQ ID NO: 148853 - DNA, 297 bp, Zea mays
  Clone ID: MRT4577_6727C.1
gcgggacgggcccggaacggaccggccggaccgacccacgctacctcggacgcgcgggccgccgcgaggggggagggcaatgaggagacaagaccggggaccgaaccgcagggaaaaaccaagagcgcaacacgaggagagaagggaggaacacaaagacaaaccacaaagcacagaggggacacagaagaacggaaggaagcaacaaagagaaaggaaaggacagcaacacacggcgagggcgcgaccggaaagccaaacaagggaacgagagagaacgcaacgcggacggccaca

SEQ ID NO: 148854 - DNA, 547 bp, Zea mays
  Clone ID: MRT4577_67280C.1
tcgagcggccgcccgggcaggtgcttttttttttttttttttttttttttttttttttttttttttttttttttttttttttttttctccaatccaattaacttattacggaaaaactccaatccaattaacttattcccgacccagccccccaaagcccacaccaagtaacccaagatgggggccccggccccggccacgcgaagggccaatcccagcccacgggggggcgatacaaggggaccccagcccgggcccaagctgggggaaagcagggccatagcggggtccggggggaaattgcaatcccctcacaataccacacaaaaaacgaaccggaaacataaaggggaaagccgggggggcccaagggggaacccaacccaaatgaatggcggggcgctcacggcccgcttaccaggggggaaaccgggcgggccagctgaataaaagaaccggccaccgcccggggagaggcgggttgggaatggggcccccttccccttcccaggtaactgactcgctgggctgggccgttcgggtgagg

SEQ ID NO: 148855 - DNA, 684 bp, Zea mays
  Clone ID: MRT4577_67281C.1
ccggccggggcctccctattccccaattctccccacgagtccacaaccccagtatagtattcatccctaccctcgaccgcctcgacgaccacctgccacccggccaggcggccaccacgaccacggtcctgcgctcggcggtccttcactccccatgcgttccagcttgcatacgaccagtgcggcggtgccactaccgttccctgtaggtgatctggtcgtagctcagatctgtgcggtcgtgcaccgccgccgacttcatagttcgcacacaccactggcgatcgactgtcctcgtgcatctccattctccgccagctactcgcgacctctccacgtcaagcactgcgcatgaggatcggtcttctccacgtgaccatgttgagcactacgttagacattgccagctcgcccaacaggtatacgaaatcttgagtgagctgtacgtccatttggaagtagcaaagaagcaactcctgatgatgcaactgtaaggacaatctttcttatagctctaagttcgaatatattggttcctgattattgtgtctcgtcatggatttattgcgttcattgaaccagaaaattgcatcgcagtgtctacatttgtattctagtttaccaagatctttttgttggagggttcacagtttttagacatcttcctctttctaatcctttcac

SEQ ID NO: 148856 - DNA, 311 bp, Zea mays
  Clone ID: MRT4577_67282C.1
gttgttatagtggtctttaacagcatttaaagatgcttaatttgaaggtagggggggctggaaggtccaggggtcaattagggcgttgtgcacaacaccgcaggattgagcttgggtgtatcactggcgcggggggaagacaaacattgggcggggctattgatcacagaggggacaacatagaaagtggggggccagggcaagcctggcccctgaccatccaggggtaaaggcaggcaacgaggaaataatgtttgcatgggagagcaatcccaggaggggcatgatcacatcctgacaggcatactgga

SEQ ID NO: 148857 - DNA, 570 bp, Zea mays
  Clone ID: MRT4577_67283C.1
gggaacatgaatagggagacttgtccaagggcaacttgagtcagtcttttgcaaccataaccatctcatgcacagcccagcaaagctctgtaaaactggaaataccaagccctccaagctgcataggccggcacaccttcccccaagccacaagacaatgtccaacactccaactctagcttcttttcggcctctccataagaatccttttctaatttgtcaatagcatctagagcccatttagggatatcaattgccattgctagatacacagtcatgctagtaaggacatgctgaacttggactctccttcctgcccttgttaataggccagccttccaatttggtagctggtctgcaattttgtcaacaaaggacgggaactgctgtctaggctgtaaggataaaggaagccccaaatagcagcaggggaaggaagccatctcacaaggcagcaagttctgagcttccaacaagatctccccagagcaacggataggatatgcattagatttttgagaattattcttcaaaacggaagcatctgcaaagagctgaaggatgtctagg

SEQ ID NO: 148858 - DNA, 356 bp, Zea mays
  Clone ID: MRT4577_67284C.1
agcaaaagcaaaaaaatagactggggaagaaaggccgctagtttgaaaaaaaaagcccccgtttgccggtccaaaaaataaaaggaacaggggatccctaccctaccccttaaaggcccaaggcctgaaggaatcaaagggcaaaatcaacgagaccccgggaaacgaaggaatacagatcggggaccatgactgcaaaaacggcaggggccctctagggcggaaggatcaacaaccaaacccaaggccccgctttatcctttcaagctaaaacgagcagcaggcaaactttttgaccgcggacacgttgtccttgccgccgacgttgatgggatggcccccgggaggcgcggggg

SEQ ID NO: 148859 - DNA, 349 bp, Zea mays
  Clone ID: MRT4577_67285C.1
caaaggatggtttaaaagagggggtgtaacggtctgtgctgcttacctcgacctgccgatgcgaggactgcacataatttatgatctaaaaaaagcatcaacgccttgccgatcacctgaacaagcagcattatgggaaataaaaaagagctgagatcctggtctcccctctaccctgttcgacgttcaagaaccgaaccagcgatggatacctaccttgttgcatactggcaccaggtcctgaaagaccttcattctctggctgatcctcttccttctcacctgttacaatacacgagaccgttcaacgagacacctccaaagagtttgactggctgggtgggtagga

SEQ ID NO: 148860 - DNA, 542 bp, Zea mays
  unsure (1)..(542): unsure at all n locations
  Clone ID: MRT4577_67286C.1
aggttgctctcttgcctgatgatggaccaactggtgcgtattttgatctgaatggcgaggcgtcctttgtgtgatgatatttctcttttgagcttcagaataaaacgaagagctataaaatagttagtgccaattattattatagttgagacttgtgtactcaaactagcacgttgagcaaaccgtagagctcaactcctggattcctcgtcttctgtataatatccctggtgatgattatatatttgcagtgaaccatgcttcacagatttggtggcactaggtagtgtttggttggcaaacttgtaatgccctccggagtcgtcacctgcttgcacaaccaaacattaaagtgatggcactgttaattacaaggggaaaaggcgctgaaccaaacgtccttgagagggcattacttanaaaaaaaaaaaaaaaaaaaaaaaaaaaaaaagaaaaaaaaaaaaaaaaaaaaaaaaaaaaaaaaaannaaaaaanaaaaaanaaaaaaaaaaaaaaaaaaaaaaaaaaaaaaaggggggggc

SEQ ID NO: 148861 - DNA, 271 bp, Zea mays
  Clone ID: MRT4577_67287C.1
gaagtagttaggggataagcccaaggaggataggcctatgggatttccacaatgagtcctagtaccaggtaggttaaggcgtaataagtcaaagaggtcttagcggaactcgataaaaaggagggatgtgactcatcaaaggaagttgccgactcgggtaggtaagcaagaaagtagactccttcatcggccagggtactcctgaaatctatctcagtagggaaaagaggagttatggtatagagaattctgacctaaatggatgcattga

SEQ ID NO: 148862 - DNA, 1065 bp, Zea mays
  unsure (1)..(1065): unsure at all n locations
  Clone ID: MRT4577_67288C.1
attgggccgtcggggcggaagttcttcaatcccgcgcgcgtcggctgtgttagccggtagccctccccccgtccgaggtccgagtccgaccgaaggagagaggcagcagccatggctaagggcgggctgagcaaactccggtgcatggtcaagaggaggtggcactcgtcgagccgcatcgtctcccgcgccccgtcgccaccggctcacgccgacgccgtcgccgccacctccggcaacgcgcgcggcgcgtcgttccacggcgcggacgaggcgcccaagggcctgcacgcggtgtacgtcggcaggtcgcgccgccggtacctcgtcgcgcaggagctcgtgggccacccgctgttccagaccctcgtccaccgcgccggcggcgccgggggtcccgcgggtaccgtcatcgtcggctgcgaggtcgtcctcttcgagcacctcctctggatgctggagcacgccgacccgcagccggagtccctcgacgagctcgtcgactactacgcctgctgaactgcgattccgatggtagatagagtagacgaagcattgttgcagctcatgaacgctgtgttgctttggctcgttggtttgattttggttcgattggcattggtatagttttattttatttttttcgtcacttcacttaataataaggtctctgggatctggacgagtgcttctatgtacgctgaaacagagagaaagaaaaacaaattattctccctttacaactcttcaaaaattaagaatagggggtacagttgtaatagactcaggattgcgagggcagggagtaagacgtgtggagatagttccccttggggtgtttgtggtaattatctcgagatagcccgtgtaattcccgcgcccccaagagaatgctctcngggggcagtcccctactccccgatgtaatgtaatggcttgcatgttaatttcttctctctgtttcttctgaagggtaattgaataagattaggaatgggtgtacccatgcacattatatttccccattgtatatgaagcccgtcctctttttttgtcccccccccc

SEQ ID NO: 148863 - DNA, 195 bp, Zea mays
  unsure (1)..(195): unsure at all n locations
  Clone ID: MRT4577_67289C.1
gaattcccgttccgtcccacgcgattgaatcngcgcccgcagaganncgngggcagaggggggttgatttgaacacaccgagccgacaagaccacacagaaancanccnccacagcnggcccccagcngaagagcnggcaacancaaggaacggacagcccnggcaccggaaggcgcagcaggacgcacaggaaa

SEQ ID NO: 148864 - DNA, 582 bp, Zea mays
  Clone ID: MRT4577_6728C.1
ggggggtgtgggggtgttttttttttttttttttttttttttttttttttttttttttttttttttttttttttttttttttttttttttttttaaacaccaaggaacaaaattgaatttggggtgggggagggtttggcccacacccggggggggggggggggacaaatttcgccgggggccgattccaagccccagacctaaggaaggggacattggggggattccgggcccccccgtataagggggggacggggggggtataaaaaccctggtccccgacaaaaacttagggcacatagcccccaaaccaccggggagggggttcgggagacccccccccgagcccaatttcttcttttttttccccttaacgggggggtttttcaacgggggagccttcctggtacctgcccggactttccgagagggggcggggtggggcaccaccccagcccccgggggggggatcccacctggggcaaacatttggtccaaaagctttttgggggacccctggggcaacctaaacaggaggggggggcttgggagcttaacatgggcggggcgggggggcccccc

SEQ ID NO: 148865 - DNA, 748 bp, Zea mays
  unsure (1)..(748): unsure at all n locations
  Clone ID: MRT4577_67290C.1
cctcgaggccggccgggccggggatgactcctgctcagagcactacatatcctctcctctcgacgaagaatggccagagtgatagtcaccctcaaccatgagctgctgcgaggacaaggcgatctgtgcggtgacagactctactatgtgacattactgaagcgtcagtgcgcggctggactccacatcccgagcggcatccacaatatactccgtcctgacacgctggcggacctcgtggacgtgctgtccctgtaagtggtcaagctcccggtcctcggcagcgtgatgcggctgctgctcacgtacgtgggctgcgcgtcgtacgacgacgcgcagaaccggctgaacccgctgttctgggtgctgacgcagggcgagcagtcgcgacagcacacctaccacaaccactacgtgctgcacaccgactcccgccactacgtgaagggcatgatgtacctggacgactggcacatgaaccaccaggacgagcacctccacgtggcgtagcacgccgaggtcgtggaccacatgtcccattacctggacaagaccatcttgttgaactaccacctctataagaataccacagatcataagagccgagttgataaccactctcataacaccgacatacgtaagctcacgngacaagttgtgttctcgcacccataccgtgcttactaatttaatcggnggacctcgccttatctcgacaaacatgctgaggcacttcccgaggatgatg

SEQ ID NO: 148866 - DNA, 343 bp, Zea mays
  Clone ID: MRT4577_67291C.1
ggaacgcaaggagacaagcaaatacattgttcagctcagtgattcctggatctgtaactgatgctttggatccagctaatcatcatgttattcacaatgttgtcactgcagacatcaagagttgtctagcagtacacagtgttgaaaattcccaaaattcttccaaatttccctcgctgaagactgttatttacattgtaacacacaatggatacttccgagagtatctgatcggcacaaccaagtcaaatgaatcttcatggttgttggagcgtgaatttaatctcctggatgcttattcgggtagtcccaagcagaacgagctgcacatagactgacttgt

SEQ ID NO: 148867 - DNA, 297 bp, Zea mays
  Clone ID: MRT4577_67292C.1
atgggaagtgaggaggaagcgctcatcgtggttgcatggttggttgcgcatgcaaaagacatcatccaagagggatcaccgttgccaatcatcgactattgtcgaagggaagattatggttgttcagacattgtcacagaaggatcattattcatgaacattgattgtagtcgagatgtagattgtggaggttatggttgtgcagcgatgccgtcggcagacatgggacctgcagactcttgtcgaattgcatctatgacggtgcttaacgaggacttacgacgacccttcatctga

SEQ ID NO: 148868 - DNA, 418 bp, Zea mays
  Clone ID: MRT4577_67293C.1
tttttttttttttttttttttttttttctttttttttttttttttttttttttttttttttttttttttttttttttttttttttttttttttttttttttttttttttaaaaaaaaccccccccaaaaaaacggttatccccccttaaaacggggaaaaaaaaaattttatggttaaaaaaccccccgcaacccgccttttccggaacaccttcaaaaaagcccccaaccaagggcggcctgggaaaccccacccttaaaaacccctttgccaggggcggggccatctgacccccgcaagaggcacccgggcccctccaaaactttggccccggggcctgcagggtcaaaaagggggggcttaataaaaaacccatggggttggggggccccaaaaaaagaagcccacctttggggg

SEQ ID NO: 148869 - DNA, 260 bp, Zea mays
  Clone ID: MRT4577_67294C.1
tagaactcccttagttcccaaggttttgctttttaggcttttcttctgagattcttggctttatatctatgctcctgttgttgctagcatctctcctaacataggccgaatggatcacttggataggaattctcctgcaaagccatctcctatactgaatggtggggatacagcatcaaggagcatagatataaagccaagaatctgggagggggagcctgataaagcaaaaccttgggaactaatggaagttctaaatc

SEQ ID NO: 148870 - DNA, 302 bp, Zea mays
  Clone ID: MRT4577_67295C.1
cgggggcaagagcccccccacataataagatttcgttaaacctttgggggggttaattgcccatgctttttcagttaaaatactacaacttagtggggcgttttttaaatggaaaaatgacttccgggggccaattttttgttataacctgaaaaaaaacggggactgagcttggttccaatttacccctggattgagttcgttcttctaaaatctcctgagggttttttcctaaaaatgactggggtcacccgttccaaaagctttttaagccctttttggggccccttttcctgtttttt

SEQ ID NO: 148871 - DNA, 370 bp, Zea mays
  unsure (1)..(370): unsure at all n locations
  Clone ID: MRT4577_67296C.1
ctaccgcgcatcctggaatcaaaaaagacctcggcgacggcnantgcgttggggcttggcantgacacnggcgcgggcagtggcgccaatgtcgtcagcgctttccacggcagcacgaagtggacgggcttgcatttaacggggcagcgcatgcggttctcgcggagccagtcgtccatgttgctcctgcacttggcacccttgcggagattaaatacaggaacatgacccctgaagcagctttggatcatgtacgatccattaggcctcgagtgcttttggcgccctcgcagtggcatgctattagttcatttggagctctcaccggtggacaacttccagtatggagtacgaacttggcctgtttcct

SEQ ID NO: 148872 - DNA, 166 bp, Zea mays
  unsure (1)..(166): unsure at all n locations
  Clone ID: MRT4577_67297C.1
tagnnctcggaatttcaggcttcagaggatangnnttatgttagtttaatgtattaaaaatatgtgngaatgagaaagtcatgcccacttataatttagatggatataggtacccatgatgccccaccccttcaaattttggaattaaagtgattcaattannaaa

SEQ ID NO: 148873 - DNA, 623 bp, Zea mays
  Clone ID: MRT4577_67298C.1
ccggccggggcgctttctcacaggcgggtcggcttctcatacacctccgggtcagcttcgagaggctctcgggcgtcctggttcgtggcgggtcgcaccgagatgggggccgttcgatgctgagtaccgctggttcgccggggggctcgcgtggggcacggagcgaccactcccggggatcccttccttcttcgacggagaccgacgagtggtctgggactaggccgccgcacggcgccataggagtcctgcgggaaagggctgctcttgtgcggcgtcgatccgacggtcgccgcttcctcctgagcccccatgcccgccctggtcgactgcaacgacagcaacatcgactacagcggcgtagagttctgctactacgagggggacgactgccgcaccgacgtcgttgacgaggtcaccctcctcgtgggcgacgcgatcgcagcccccgccgtcgagctccccgccgaggctcctgcacggtcggcggagatcaactcgtcatgatcgctgagaggacctgcacgagacccttcacaaagaacacgtacttctcttcagcctcgacttcgagaagctgcagcgcgtctcggtcgacctgatcagcgatgcgtccggtacca

SEQ ID NO: 148874 - DNA, 696 bp, Zea mays
  Clone ID: MRT4577_67299C.1
aaaggaatactgttcactatttataggcacaggacacagcctgtgaggaattacaatcatgcccctcataaaaagtttacaacgttgactcagacccttatggactaaaagatcattctatctttaagtcggttcgacccttcaccttcgaatatgctgtaataccgaagcttcatgaatggtaccttcggcatcacgtacaagcagcttcagccgaagctgtttctttccgcaggaccttcggcgacgaagcatggtcccaacagttgccctgttttggtcccttataggaatcttacataggaatcttacgggtgaccaacattagcgtccacctcaagtgaattcacaacaaaatgttattggtcatgtctcaagaaaagcacagctactgactctgttcttgtccctatatatcagaatcaaattgaagaaacacatcttctcacaagacatggtctaaaaaagacaagaggaagactttgaaccctccataatatacctctaccaagaaatgcacatgttgggggatccattgagggtttaggtttctaaactagagaaacgactagttgtcgaagtgcatctgtatgttattccacaaagtgggtcggcggtagcttacgtaatcacacatggttgctcacgcaaaccatcagccctcctgtttgttcagtcttccatccatggccgtct

SEQ ID NO: 148875 - DNA, 332 bp, Zea mays
  Clone ID: MRT4577_6729C.1
ttgttttttttttttcggtgtggtttttttttggacagcgctgagttgagcgcgccgtttgcctcctagcagtagggggtatactagcgcatcgttgttcaacagccttgcaattacagtggtttattcaggcatgcatcggtgggcatttggggcttggattggcaaactgaaaaaagaggtaagttgcttgctctggagaccggggtcttgtttcacggcctgaaaaaggccgggtggggaccgcccgtgccctggaaggggggtttcttgggggggtcaggggcttggaccaaccaggggggcctcgccagccacaggatctttttggg

SEQ ID NO: 148876 - DNA, 706 bp, Zea mays
  Clone ID: MRT4577_672C.1
agctgctgctggtcgccggcctgggcggcggcttccagtgagcttctgcgtgtgcgtggctggtgtttgggcagcaggccacgcgaatccggtccgtggcaaggcgaaaaacgtcctcatgtcatgtgcggtgcggcacaccccgcccggtcggtcagacgcgtgaccgccgccatacctgctcgtccttcactcaacaactctgcagcagtcgtttgatcgtgtctccgtcggtgaaaagagaaaccaacggcagaggagggcgcgccctggtttttacagcggctgcggctcccaacttcccaacaagtgagaaaaaaagaagaagaggcgaaacatactaagaccagccctagaaaactagctagccaagtactatgttgatctgtaggccgctttggcgattccgtcttccaaacctgtggagttgtgaatccttttgcagattaaagtaaagttcgttagcaagaactctattagatcccgtgcggtctgcctcatcaatttgtgttgcgccatgcattccgcatcaatcagtcactcgaatccttatcccccgtctagtcgagcccgtacagctaacaaggtgctactgtcatgctcagcagtcaggacaaatcgaactcggtaatatctctatgatttccacccggtttaacaatcaaccgtagtttaagttgacaagctgaccggcgatctgcttaca

SEQ ID NO: 148877 - DNA, 227 bp, Zea mays
  Clone ID: MRT4577_67300C.1
cgtttccccccattcccctcctcgatctgagactcttgtcctccccaaatggccgcctcccgctccaactgaacccccccgccggcacacccttcgctcccccgctccttggcttcgcgctgtcgggggctcctcagggaccgtgcgccgtagtagtagtagtagtggccgaatgggtgctgcaaggggtggcgtcgcggcgctgctcgtggccgcgctcctgctcg

SEQ ID NO: 148878 - DNA, 334 bp, Zea mays
  Clone ID: MRT4577_67301C.1
gcgctgacgcatgggcaatgctcaagaggccaatggcgcactctgtgaaactcaaacctggtaccaggagatgctaaatctgagggcactattctaggtcttaacgcgcactcataggcactacgattggactggaactcggcccactgagtgctaaggagttgcaccagctagagaaacagctcgaatgtgctaagtcacacgcaagacacataaagacactacttatcatggaccaagtgaaatagctccgaataaaggagcgacacttgggagaaattaacacgcaacttacacacaatcttgaagctgcaggttgtagcaactacggaac

SEQ ID NO: 148879 - DNA, 666 bp, Zea mays
  Clone ID: MRT4577_67302C.1
ttgggaccctcgaggccggccggggtatgctttccattttctctcctctctcccacgacgactcgtggccatgcctatctgcgacacgtgcttgatccattgcatccatgatcaaaatacatgccctactttgctcgggattgcttctcccgaatagtgctcgtcgcctttaccttccgaacggtccctgatactgtggacctttttacttatctgatgaattgtgactctcgaaaggacttacgttatcctctgtcatcctatacttgctcacatccctctgccaaagatgcattctgtgcatgcttggctgtgccctgcactgtgaggatcatagattcatagcccttgcactaacaagaaatggttgtacgtccctcgtctgtatgatcatctacaagaagcttgttaaaacgcttcgctcaaaatccccatgctgtttctcttttcagagaccatcttgcacgctatgtccccgtctccttgatactggtctcctcgaggaggttggttccccatctctgttcctccccaatactccccggaatcctaggtggatgagactgaggctactgacgagttgcgcctgctcacattcctgtgcatgcgctcactgcccgctatcctgtctatggactgtagcgccatcctgcattacttcctcat

SEQ ID NO: 148880 - DNA, 194 bp, Zea mays
  unsure (1)..(194): unsure at all n locations
  Clone ID: MRT4577_67303C.1
cttgttantgctgcgtttgtgtgtgacatcgtttgggggtgcatttcacctcttatattccatnaaancgtgatnattncgnttnctcctgnggagaacgctgggggtcaattcctatgcgcctaaggggaccccggttctttnatccgatgggggnggatnatatgagtagggtttggggacattatcttccc

SEQ ID NO: 148881 - DNA, 277 bp, Zea mays
  Clone ID: MRT4577_67304C.1
tcgcccacgcgttccgccaacccttccgttgcggcggccggtcaacctgcaacggcggttcaatgtgccgccgccggttaatttgccgccgccaccatgccactaccttactaaaccgccccggcctaagcctaatcccaagccacacccatgcccgtgccaacagccgaatccaagcccgtgccagttgaagggaacctgcggggttggcagcaccccgatcctgggccagcgcgtcgagttcctgaggcataagtgcagcccgacggggacgcct

SEQ ID NO: 148882 - DNA, 298 bp, Zea mays
  Clone ID: MRT4577_67305C.1
gggccccggggttttccggccggttcctgtccgggtccctccttttccttaattgttttttattggggccgggtttaagcttggggaaagcgggggcctgggttttttctgtttgcggttgcaattcccccccaattccccaccgcgaacaagacgggcccaccccgggggggggaagggggggcctatctgcgatttaattcaaagcgcttgctggggggtttttggcggggtatcatgggggggaccttgccttaaacaatctttaaacacacgggcaacaggcgtttgggggtgg

SEQ ID NO: 148883 - DNA, 366 bp, Zea mays
  unsure (1)..(366): unsure at all n locations
  Clone ID: MRT4577_67306C.1
ggccgcttttttttttttttttttgtcaccatcagttccattggatcttcgtttaaactatacatacaagtcgcgagctgacacaancccaaggcactnngcctattatatagcacacccnncttggctttagcttgagctgctagtatattctcgtatagcaccgcgtagcnntagcttactccaagctctaccggagctctaacacnntgagatgtaaacacactctgctacacaatacnntacactagcgtggtgggacaagacactggcatggatcacgggncnntcagagcgtgccgccacgctcccttggagacnnccgncctgnnacnngnngcctcgcagaacctcgccgcccgaggt

SEQ ID NO: 148884 - DNA, 487 bp, Zea mays
  Clone ID: MRT4577_67307C.1
aaaagggattaaacccatccgggggcaaaaaagtttggggtccaacaaaggggacacaacgggcccataaaaccaacgaagccacacccacgattaaggacacaaaacccacagttgtttattaaacaacaacaacccaaatccccaggaccagaagcagttaaaaaaaaccagggtttactgaccaccacggggggggaccaccagggggaaagggctctcctttgggatgttgaaaccggttagggggcaaccatcctccaattgtttgccaaaaaaaaaaaaccctgttggttgggggggaagccctttttgcccggaatctttgccttaacgttgccaaggggggcggacctttaaacccccagggttatggttttgccagaaaaggtcttaaaaaaaatttgaaaaccacctcgaaaggggagcaccagggggggggggctctccttttggaagttgaaaccgggaagggtacggccatcct

SEQ ID NO: 148885 - DNA, 416 bp, Zea mays
  Clone ID: MRT4577_67308C.1
ccaaaaggaaacccaagggcaccccgccaactccgggacataccccggggtctttttaaagtaaaccaaaggggccccgggaaaattttgtacccgggcccggccccccccaagggggaatcccaacccccgggggggcgttaccagggggacccagccgggccccaacctgggcaaaaaaaaggccaaagggggtccccgggggaaaaggctggccggcccaaagtcccaccaaaaaaccacccgggggccaaaagggacagcccggggggccccaaggggggcccccccccaacctaattggggggccccccccgcccccgtcccagaggggaaacccgtttcgccccctcctaaaaaaaaccgcccaccccccggggggggggggcttccgattgggcccccttccccttccc

SEQ ID NO: 148886 - DNA, 402 bp, Zea mays
  Clone ID: MRT4577_67309C.1
ggaccccccatttttttaaaattttttattttttcaacccaaatcccccttttttaaccctaaccccccttttttttttggaagattaaattcaggtccctttccccccgcaattttttaaaaaaacttgctttttccaaacccagggccggggggggtttattttaacattggttccggggcgtttggggcaaacaaaaaccccaccgttgatttttgttttttgtccaaacgggtttgccctttttgaatttccttaaaaaattcctccgggatgtcacccctgccaaactttgttggttgcccagtatttttaaaccagtttacccaggggaccttcttgttagctaggctttggggagtttcaattgaaagcattgttgggatttagggctcatcaaa

SEQ ID NO: 148887 - DNA, 463 bp, Zea mays
  Clone ID: MRT4577_6730C.1
caatccccaattcgccccacgcgcccacttgtcaccattttgtaataaagaatttatttccgctaagcaagatacactaaaattaaaagcgggtacgtaaaataaattaacataaaatgaaaaatcttatactaatataaatatgcaactctttaaagactaatctatcatttgtatgcctgctgtctgctcgaccaagatctctttttttggacttggaattgatattgtccatcgatccaaaggaagggcaatggtcattctctctctctctgtgttattaacatttgaatgcaaaaaaagcatgttctttgttgattgccatcactgtcttaggctacacaagatcattttttgatattttgattggattcttctattggattttttttacgagggatgaaacttgggatggaaaggatggtttcctttagccaaatattgacaacgatcattcatttgt

SEQ ID NO: 148888 - DNA, 280 bp, Zea mays
  Clone ID: MRT4577_67310C.1
taaaattgcgccctggggaaaataagggccaaagttgttcccgggggaaaatggtaacccggtcaaatttccaaaaaaaaaaaaacccgaaaaaaaaaagggaaaagcggggggggccaatgggggggccaaaccccattaattgggggggggctaacggcccgttttcaagagagaaaatttggggggccaatggattaaaggaatcggcaaccccccgggaaaaggggttttgggaatggggggcttttccgattctcacttcataaaaaaggggcaa

SEQ ID NO: 148889 - DNA, 375 bp, Zea mays
  unsure (1)..(375): unsure at all n locations
  Clone ID: MRT4577_67311C.1
gtggaaataatatggtgattaaaggatgaaggtaatagaaggttattggaatatgaaaaaagaaggattgtttggatagtataagaaaaatggaagaaaatttttatgaaaataagggggggggggattattaaaaaattttattaaaaaaaaaatgattaaatactgaaaaaagaaaagaatgtagaattaggaaggggagaaaattggatttaagcaggaaaaaattggtagtgtgtcaaatagggattgggttttcanagnatgaggagaaagaccttacataggagggagttgtgaaaaattcatattgaaaagaacttggtgaggtagaaaaaaactctgtaaggtgtgacagaagaaaattctggaaat

SEQ ID NO: 148890 - DNA, 2330 bp, Zea mays
  Clone ID: MRT4577_67312C.1
agagagaggtgtgggaaagcaaacgctggcagcagagctcttgcatgacatgagggaagaacaagcagttcgacgtccgagtctggtacaacatgccgtcgggttccaccacggaaaacctcctcaagcaaatctacaaaaaagcaggaggaggaggacagcggcggcatcagccgtgcgagtgcgacgacgacggtatcgaagacgtgctccgtcgtcacctcctagccaacaagaagtacctgctgattctcgttggcatatcctccaagaccatgctcaactgtgtcagggcaagcctaccggacgacaacaatggaagcagggtagtgctcgtattggacatcgagaacgaagaggtagcgtggcatgctaatgccatgaacaagacgacgggcatcagccacggattaatccaccacttgaaccgtctggaccaagacaagagtgtggagttgttctgtatgagggccttgaggacaaatctgtcagatgaaaccacagtgaacagcatgatgagcaagtacagggaagttgtgtacaatataacttccggctaccctctggctatagtggttttggccggactcctacggttcaaggagaagccagggcaatggaacgcggtgctgcagcagctcaggacgacgtcgtctggaccagcagcagcagatcaagaagcgcatcagcaagacgaccaaggcggccataccgaggagaagacgatgagcgcccctacaagtacaacacaagcagccaacaaccagctgtccacaagaacgtcgattgagagggtcttctgggcaagctttgaagaccttcccaacgccctcaagtcatgcttcctctacttggctgctttccccaagggcaccttcctgtctaccggcagtatagtgcggttgtggatggccgagggattcattaggccacagaagggcaagaccatcgaggagctgggccacgactatttcaaggagctggccttgagatgcctcgttcaggtttcagggatgaacgaggttggcggcatcaccaatgtcattgttcacggaaggctccatgggttcctgcactcggaggctcgtgaggccggcttcatcgacgtccatgacatgaacgacgtctttgtcccaccatcggtgcgccgcctctctttcatgagcttccaagacggatataccacattcactaacaggttctgtaagttgcgctccttcatatgctgggccggaaagattcagacaatagtattggcagcagaggccgcgtgaacaatgaggaggaacgatggcatgatctcaacttcctgcatggttcagatttgcttcgtgtactctacatatcaggactaaggatcaaggagttgccgaatgaaattggcaacaagatccacttgcggtacttacgtgtaaacaccgagcacctcaaggagctcccggccagcattgcgaggctgcccaacctgcagacactggatataagggacaccgaagtcgaggagatccacccgtccttctgggagataaagacgctgcggcatgtgattgccaagaagctcacgctcccgccatctatcaaggaagaaatgggcgagctgcaaacgctgcgtggtgtaaagcccagcgaagaagaatgggatcaagataactgcccactgctcaagatgtccaaactccggtcgctggagctgcacggactcattggcgccagacacggcgctgcgctgatcactgccctcgggcaaatgcatctccttggccacttgaagctcaaaggcgacaagatctcttgctgcgtcttcaccggagaacgccttcgatatcttcagactgtagagctggatggaactgtgcaatggccgcctgtcgctgagtttaatgatcttcgcttcgtccgtccaaaccttgtccagctcagcctgacaaatacaaacgatgcgccggaaggcatccaacaggaactgagaaatgcaggctttgtccgctcctaccagcagctccaacctgtttatcggctttcatacagacaaggaggcgcgcttgcgacgaaaccggagcagcagggtgaagcagggtccaacaaaatggaacagcagcaccaaggcgaggaagctgaagagtgatatggtgtcctggtttctatatctctagttgaatgtttctgtttcatgagacaatctgtttgtattttgttgtaatgacttgtttgcttcggatctgtgtatgttttatgttctgttttgttgctgttgtaatcatgaactgttttgtaaaataaaataaagaatgcttttgcattcagaccctctaaagctaatagttagctgc

SEQ ID NO: 148891 - DNA, 458 bp, Zea mays
  unsure (1)..(458): unsure at all n locations
  Clone ID: MRT4577_67313C.1
atagaaacataactaacgaacacgtggcgttggtggttcatttgcttgttcaattaatttgtcagatctggcacctgggttgttctggaggcagcccaacgtcaacaaggctctgttataatatagacgtgggcgatggatagagtgcttctccatctgcacaagctgagtgaaccagcttcacgatgcccggtctgctactaccacagaacaaggcaggacgcgtaccccaactacatctatctgactgacggtgctatcactcgtaggaaacagcgatgtcctcatggtggcctgcttgctgaacgagcacagccgcgacatcttgagcccataggcgatctaggcgctcgcccncacacgcgtgctcgataacgtgtggtcgcggcagcgcacgtacattagccctatctagtcgaggtgctcttcgattgccgactatgcgcaacggcactgga

SEQ ID NO: 148892 - DNA, 250 bp, Zea mays
  Clone ID: MRT4577_67314C.1
ggaaagcgagcgaatattactttggttgaagtcactgctgatacagatggagtactaatatgagagctataccagaaggcctgaatcatgtgctcgctgtgtgaacttggtggtgagggtgcacatgcttctatctgagcctcaatgacctgggagggttatcctacagagctccatctcgaagattataaggtgctacagaggatctggaacctgcccatgcttcgatctctcattatgcctgactgat

SEQ ID NO: 148893 - DNA, 308 bp, Zea mays
  Clone ID: MRT4577_67315C.1
cggacgcgtgggtttcctaggggcgccacggataacaaagacatctctctagtcctgaactgcagcgcgtacagcatactacagcagccacaggtctgtctgtcactccactctgtctactctctactctgaagtctgaactcaatctcacacggatgatacacgaactagggagatgtctttgttttcctaggggcgccacggattagcctgttcgcagctgaattttttcttgtttttttttttctgttttcgctatctgtattgtagtcactgtgcaaaaaaaatcgttttgattgattggctgc

SEQ ID NO: 148894 - DNA, 434 bp, Zea mays
  Clone ID: MRT4577_67316C.1
tttggggtttttttttttctttttttttttttttttttttttttttttttttttttttttttttttttttaaatattatatactcttattttttgtttttggcttttacaggagttggttacaacaacacccatcaagcataacaaaaacatttttggtggcgggggggggggggcaaaacaaaaaaaaaaaacccacccaaaaaaaaaaaaaagaaagagagaggaccccgacaccacgacccgcggcagagagcaacgggggaaccaggggggagacccccgcaggcgcagagcgcacccagcgagcgcccccgcccccaaaaagagagcgaaaaacgaaaccaaccattacagaacccccgccccgaggaacggggccccgaacccaaacccccggggccccaaaggctccaaccggagaagggggcaacc

SEQ ID NO: 148895 - DNA, 437 bp, Zea mays
  Clone ID: MRT4577_67317C.1
gggggggagatacggcattactaggaaggaaccccaaggggggggggacaaactggacgtacaagccaagggggggcaaaatctaaaaatctactaaacaaagccccggaaaggctataaaccctaaaaggcttaggcccggggcgggggggccctgccaaaatcagttttaaatgggccgggaataaaataaaaagcggggaggagcccgcccggaaataaaacaactcctgggggggttttgggggggtaaaacccagtcactttccactttgcagggggccaaaaacaggttcctccacaggggggggggggaactaaatggagggccccaacatttaaaagggcccttggaaggaagggccctaaggtccccccaggaaacaacaaaggcggggggaaaggcctcgaaaaacctttttttaggccccccgggg

SEQ ID NO: 148896 - DNA, 395 bp, Zea mays
  Clone ID: MRT4577_67318C.1
cccacgtaagctcgtaattcggctcgagctgtagttttacaacatgggataataccccaacaggaagacatgctcgggggggacttttcccctggcctcccgcaactctttcatcaactacaccggttgatggaagagtgctgctgcggctaccaaggcccttgcgattgaaggctattctatggctcatgcctgagtgaaaaatacagagtcctgaactgactatgcttgagagcgcgaagcacgcgagcccaaacgggtgcgatccatcaccataggctagctgtattgaggattacgcaacccatcatactatctctgatacggacggtggcaaggacatagtatgcattaggcagcacttatagtaccactcgttcggcttcgagttcaaa

SEQ ID NO: 148897 - DNA, 674 bp, Zea mays
  Clone ID: MRT4577_67319C.1
cattgggtacctcgaggccggccggggccaccactccttcgcccgtttctgctcccgttagcactatcactagcaccggaccccttccctcccctttacctttctcacgagggcccgggaaaaccaccaccatggacccctcctccgcgccgcggcggtgctcctttctcctgcgcctgctcctcctcgccgtcgccgccctcgcgctccgcctcctctacggcgccttcctcgccgtctccgccggtcccgccggttggccgctctaccggcccgccgccaccgtcgcaaccaccacgaggacccacgtcgtccaggctgacgtcccgtcgccggaggtctggcgcacccgccgctggcgcagggccgtcgactaccacgccgccgtcctcgcgccgcacatcgcagccggcgctctcgcgccgggatcccgcgccgtctgcctcggcggcgcgcaggaggcgctcgcgatgcgggaactcggcgtcgccagagccgtcgccgtcgccaggaagcgcgcgcccccgctcgtcgtcgcggggcacgaccgccgactgccgttcgacgcgtcgtccgtcgacttcgtcttcgcggagcgcgccctcgacgccgccaagcgcccgggcgacctcgccgccgagggcccgcggatcctcaaacccgaggggcctcct

SEQ ID NO: 148898 - DNA, 400 bp, Zea mays
  Clone ID: MRT4577_6731C.1
ccggccgggagttgcccgttttctcctccggcaacgaactcagacgatggcctcacccacagccgcaatagcaccggcagacgtcacgcagatgtaagccgcgtgccagacactcatcgtgatctcacaatcgcccccgaagggcagggcgccggcagcattgacgaccagaggggcacgaggcatgacatagagaatggattacccagcgacaccagcgagagcggtagtactggctgaaaattatctccatgtccaacgaacagttggagactaggactaccacaaggacacgaaactacagcttggtctacagatcaggggatgcgtgtagatattccgccagatgctcactgaagagaatagcaccctcaagggggagcgtgctgacaccgtcgac

SEQ ID NO: 148899 - DNA, 391 bp, Zea mays
  Clone ID: MRT4577_67320C.1
gacgtctgtgcacgccacgtagcttggattctgagaggggcccctttttttttttttgcgtagaaaacagttaggatgtccagaaattaccacccatccggtcatacttgggcaaactaaaaacactggcctagagaacgaggatacgaaccagagccgtcttactgtgcggaggaaagaaattgcctgccctgcttgaatacaaaggtctgccagggttccgaggtcacaaaatatggtttaggtggacataacctttacaatcctgtccgtggaatttacagttccagataggccctcaaggccttacgattcgacctcaatggggaatcggaccaaaccaaaagcgcacacgtatgctcactaaccatcttagccatgttatctattc

SEQ ID NO: 148900 - DNA, 537 bp, Zea mays
  Clone ID: MRT4577_67321C.1
actcctatgggcgatccggaaaaaaaaaaaaaaaaaggatccaatccggtcgaaccccacccttttcccctctatctgacgcgtgcattcccatcgtccatcacctggccggagaccgccgccgcgggggaaagcaccgatcttgtgatgtcgggtcctctgggttggccgaggacttctctaagtcccatgggagatgattatgttctcatgggggaagtattgtggctggataatcaaggatttctcaccggcgctccatctctgcttcggatccgcaggctgtatttgctctagctgcgtctcaatcacatgtcaagaacaggtaccacgggatgaggtgcatggaggatgctgcaatgtgttcgtgagatgtctaggtcgtcgtctcccaatcaactttgggttgctagatcgttgtctccgttcgatgtaattatttatttattttgtacaaaactccttttatatggtaaagttgtgacattcgtttaagaaaaaaaaaaaaaaaaaaaaaaaaaaaaaaaaggggcggcc

SEQ ID NO: 148901 - DNA, 1179 bp, Zea mays
  Clone ID: MRT4577_67322C.1
cggttctagttcgtgagcggccttttttttttaatggcccctttttttttttttttaaaagcataataatcatttttttccgtccatttctatgaattccaacagatcgaagaacttcaacctgggagattaaaaaaaaaaccctcttcggtataacattactgatttactgtacacagcacgccatattcatggttcgctcacttcttggacacgtaggcgtagtactgcgccatgggcacgacgacggcgatgacgagcaggccgccgacgacgagcgtgaactgcccgcgcttctcctccgtctcctccttggtcttgaagttggactcccgcttgttctccttgaacgacgggccaccagtgtccggcagcccgtcgatcgccgccgccagccgcttcgccgtgctcaagatcgcctcgttgtacttctcgtcggtcgcgaggactgggaggttctcagacacggtggcgtcgagaatctggtcgccgacggcctggatgaaggcgggccccccggtgacggcgccctccttctggcttgtgacgagcaccacgatgcccttgttgttgccctcctcaatcgtggggtaccacttctccaggacttggtccgcgtactcgaacgcgtcagccttgctcgtgagcttgcggacggtgatgaagttgaggcggatgttcttgcgggcctcgaggtcgcgggcaagccgcttgacgtcggacttggtgacgcggctcagcacgccggcgtcgtccaccacgtaggagtccacgggggccccgtcgttcagcacgtcgaactccgacgccaccgccggcgcgggcgccggggtcaggccgatggccagcgacagcgcggccgccgccaggccgtggtgcaggaacgacatccagttcctgccgacgccgtctccatgggaggaggcagcgacggcgccggcctgtggcctcttgagcgcgctggagcaggacacggtgggcctggacgagacgctagcagccagagacggtctcctgctggagccacggagtggtagcgtgaacaatgtggagggggagaggagggtctccattgctgccgcggggagctcgagccgggatggaggggaggaatcacgctcgcattgtgagggcgctgatcaccggagcttctgctgcgaccgcctgctcctcgagccg

SEQ ID NO: 148902 - DNA, 425 bp, Zea mays
  Clone ID: MRT4577_67323C.1
attcggctcgagcgcactctcacgtacacctttctagtgaccacagacaacgggcgccatgcaagacccggtgctactccgcctggactccctgggcttctcgctcgcgctcgagtggcaaacggacacggaatctgactcatgcaggccgcaccagtacggggaggagagttttcaagcctggacgcgctcccggcacgtccggatcagggtgctggaacggatcacccacaaactgatggaagactccgactgcaactaccgcgacaccaagcatgaagccgatccaagcacgttcctgcagtgcagccaatacgacgccgacaaggtgatgtccgggaaggcaggccagggcaacatagcgctgctccgcggggggaagagggagtcgatcagcgacaaagagggcaaacgcaatggtcatc

SEQ ID NO: 148903 - DNA, 485 bp, Zea mays
  unsure (1)..(485): unsure at all n locations
  Clone ID: MRT4577_67324C.1
gttgcctctacctccctccagtctcctctgtggtggccgttggcaaactattcggtcgagcgctgaactacgttgtcaaccagttcctcgtcgagggcctcgccaacaagtaaacacacctcatctcagccagtcagcctccctttccaaccctatatccagatctatctacccacgcctcgcggtctgctccggtcgcggccttgacatcgtgtttgtttgattggatttgatgcgatttgttgcgcttcgtcatctggtcgttgggaggattggttctgccaatcggttcccaacggactcgttcccttgaagctacataattccgttgtatcctgggccggctctttatcgcgtgccttcaattattccccatgaacaggggcaccgcacggctcttacatacatgtctcttttagaatggtgntttgagctattgattattcttggcttacctgatggctgtttagaatttgaaattatgt

SEQ ID NO: 148904 - DNA, 1121 bp, Zea mays
  Clone ID: MRT4577_67325C.1
gtggaatttcatttgtcggtaaaccgattgtttagtttgttttgtccttaaacacaccttgtatcacaaagatgggcaagggggaccgttcttcgtggaaggccacttattttatgaaattggcccaatatttcactgattatccaaaatgttttttggtatgtgtggataatgtcggctctaagcaaatgcaggaagttcgtcgctctcttcgtggtgatgctcttattctgatgggtaaaaataccatgatgcgtaaagctatcaagggagctttggaaaataatcctgctttggaaaaaattttgccacatattcgcggcaatgttggattcgtttttactcgggaagatttggtagaaatccgcgatcgtattttggacaataaggttcaagctccagctcgtgcaggtgctattgctcctttggatgtaaaaattcaaccacaaaataccggtcttggtccagaaaaaacttctttcttccaagctttgcaaattccaaccaagatcgccaagggtaccattgaaattttgaacgaagtacatttgattaagaaagacgataaagttggtgcttctgaagctaccttgttgaacatgttgaacgtttcaccatttacttatggcttgaaaattttgcaagtttacgattccggtactattttcagtccacaaattttggatatcactccagaagatttgcgcgccaaattcttggctggtgttcgcaacatcagctcagtttgtttggctattggctatccaactgtggcctctgtaccacatagcattgtcaacggagtgaagaatttgattgctattgcagttgaaactgaaattacctttaaagaagccgaaatggccaaggaatacttgaaggatccatctaaatttgctgctgcagcccctgttgcttcagctactccagctgcatcttcagctgctgctccagctgttgaagaagaagaggaagaagatgatgatatgggattcggtctttttgactaatttcatttctaaatttatacattcagttaacgatgcttaatgttttcttctattttaacattaatttaataaaaactagttatgatttatcatatctaaacatttatttct

SEQ ID NO: 148905 - DNA, 285 bp, Zea mays
  Clone ID: MRT4577_67326C.1
ggcggggatgtgcggcatgccgccctgctcgttgttctcagatgcagcatgcgtgcactacgtgcggttggctggcatttgcatcgctgcgcacttgcctctgggaacttgcattaccggggcgtacattgaggcgctgggcatctttcggatgcgtgcctatcggtacaaactctgatgttcactccggacgattcgttcgacgcagttgagttcctgcgtcgcgactctcgctctctacgctaatcacgtggctgacatgggaagacacatcgacgcctccac

SEQ ID NO: 148906 - DNA, 250 bp, Zea mays
  Clone ID: MRT4577_67327C.1
gtttcttggggacaacaaacaaaacaaaaattatgttttctgaaggtggcttgaacatcacacaagatactaggtcaatatttaaaggttaaaacggtctgaccacgacccaacaaacctaagacctgttttaaccagatgccgatttcatgcatgttttgccttttttggaaaggatgttgagcccgaactatatggttaagaaaaaagcaatcaattcccaagccagccacaaagatagttaatttac

SEQ ID NO: 148907 - DNA, 267 bp, Zea mays
  Clone ID: MRT4577_67328C.1
gacgatctttggcgagtgtataatccttaaatttaagctagatcggtgctgctacctggagagagctgtgatgagaaaggctatctctgcagagagcctgatatttgaagactcatttgacggctaacatgtggtactagtttagacatatgtctggactgctatctctgaaaggttcgtcacggtctgctaagctcataatttttgaatatctgatagtcgaaataaggaaggatcatttatgtgtagcaatagctaaatgttatt

SEQ ID NO: 148908 - DNA, 465 bp, Zea mays
  Clone ID: MRT4577_67329C.1
cattgggtacctcgaggccggccgccatcccctacctcccgatcccgtgcctccacggatcccgcgcgcgcccggccgcccaccccaccctgcctcgattcccaccgcgaatccagccgccatgccgctcccgatcccctgccgtcgtcatcccctacctcctgatcccctactcccgcggatcccgcgtgcgcccgtccgcgaaacacccgccgcgcctccacccgcggaacatttcagccgcgggccgcaaggtggctgacgccgacgccctgctagcgcggctcgagtcctcgctcttggtcgacgcattgccgcccgccgctgcggggcctgcggctgggacgcccaccctgctcgagctcgtcggcgccgaccgcccgggcctcctctctgaggtcttcgccgtgctgcacgacctcctctgcgacatcgccgacgccagggcctggacgcacggcggcc

SEQ ID NO: 148909 - DNA, 419 bp, Zea mays
  unsure (1)..(419): unsure at all n locations
  Clone ID: MRT4577_6732C.1
cccaggcaggcaggtcggcgaggagggcaggaagaccgaagaccgagccgtgcgggggctcgggacgggaacgggacaggaccccaaaatctcagatccttcctgcccgcccgcccgtgcccgtcgacgcgttgtttttgncggncgngcncnaccttcgnccttttgtggtgcagggggatnggatacgccacaggctgngngatggtgttgtgggttttnggttacggtttttttatttggaannntggtttnngattnngagacaaaatttttggtttnattaagggttanaagngnanttttaattttgtttgnattgancanagaggnanannggagnatttggngaggacttgtttgtttgaaattgangacgaggtcatatggtggggaattgtttattgtgttttgggtgg

SEQ ID NO: 148910 - DNA, 442 bp, Zea mays
  Clone ID: MRT4577_67330C.1
actacaaaacaggaaaagctttagaaaattagttgccctaaagctgtataaaattgttaaaattatcgcccctggtgatgatttaaaaagaatgcgcatcactgatttttttgctttaaaggggaaaagcgaccaccactgtttggagctgtatagggggactcagaacaggggcggggtttttccacccaccgatagaaaaaaacagagcattttaattgtgccacaaaaaggaaagagggctcccaagttaacatttgaggcaggtatccaagcgtctaaccaaataatttggtaacctggcaactcgtggaaacacactgagcaatgggacggtgcgcacccttgtggagctgagcctctttatacctgttatcaacgaacttgtgaaaaaaggtatgagtatccctgttaaaaagatgaacccgtgactccttttcat

SEQ ID NO: 148911 - DNA, 112 bp, Zea mays
  Clone ID: MRT4577_67331C.1
gcggaaatgggagaaggcgctgaagacgagggatccgagcactgagtcaaggcgagatgggcgcgactcgcacggaatgcgtgcccactcctcgttcaagtagcagatggat

SEQ ID NO: 148912 - DNA, 279 bp, Zea mays
  unsure (1)..(279): unsure at all n locations
  Clone ID: MRT4577_67332C.1
gaaggcccagagacaacaggccccaggacggaaagccaggagggaggacgaagcgaacgcagaagccgcgccggcagagggaaagaacaggcggcggaaggggaagcacgacaaggggggggggggggacaaggaccccaacaccgaccgccggaagaacgaaaagaaagacccggccaggaacgagggcgcaangcgcgaagggaggaaggaagggaaccagaagggccaggaccgagagaaggaccgacaggaggcggggacgaaggagaagggggc

SEQ ID NO: 148913 - DNA, 567 bp, Zea mays
  Clone ID: MRT4577_67333C.1
gatgagtgcttaccagtatatatacatctcggccctaatatgataaaaagaaatatcagtcaggatcgtgaaatgtagaacaagcaggggaagtgaagatctatagaacttgagactctctgttacacgtttcagccgtcccacgacgcacagggctcatcccaagagaagcccatgtcactgacggacatgcggccggcgtccaaggagaatcgtgggtctgtgtcgcacgagcaccgaccgcatacccccattcaaataacaccagcatcgacacgcaacgataaatcatcatttgaagaaaaaaatccctctctatctctttacccccattcagataccaccagcaacgacacacaacgatattggtcctgaagcatcaaacttgaccacggatatccctcatccgtacctgccatataagtttcctcctgatttgcccttgcagatgtgggaagcccctgtgagctacttgggcttgcaatagatacttgagtagctagtcttgtcgattccatatgtttctgaaactccctttcctccattgagggcgagtgagcactaaca

SEQ ID NO: 148914 - DNA, 379 bp, Zea mays
  Clone ID: MRT4577_67334C.1
tgacgtacatgcactgctcccttacctaaggcttggagagttcggggcgagcagaggaaccgaactttttgtcttgaggggagctgagtccacagcgccaagtgaacctcattaagggctcagtgcactattctcacgggctagtcggatgtgtacaacggcactaggcggcctcatgcgtacgtttagagagggtgaatcatgggttgcactatcctgagcagcatgccgatatgccgttgtggaaagcacttccctgaaaactaacgtgaaaacataccgacaaagcgatcgatgaattattatggacggtgaaagaatataccaggaactgttgcactccttcgggcgtaccatccgagcttaatggacagaatgg

SEQ ID NO: 148915 - DNA, 467 bp, Zea mays
  Clone ID: MRT4577_67335C.1
acatttctagattcttaaaaaaaaaaaaaaaaaaaaaaaaaaaaaaaaaaaaaaaaaaaaaaaaaaaaaaaaaaaaaaaaaaaaaaaaaaaaaaaaaaaaaaaaaaaaaaaaaaaaaaaaaaaaaaaaaaaaaaaaaaaaaaaaaagggtgggccttgggccaaaacaacctaaagggaaaatttttaaattttccacaaaactggggggggtttgggattactttaaagggcccaaattgcccctaatggggggggaataaaaataaacgggccggcttttaaaaacattttaattgaaaaaacctgggggttaccaaataaaaaccctttgaaaaaaacccccttttcccaaaattggaaaaataaaaaaaaggcccccccgaggcccctttcaaaaaatttggaaaccttaaagggaaaagggcccccccttattcgggccattaaagcgcgggggtggggggg

SEQ ID NO: 148916 - DNA, 250 bp, Zea mays
  Clone ID: MRT4577_67336C.1
tcagtccctcacacactcactatacgctgctctgctgcagcaagaaggaagaagctagcgcctccctagctctcgttgtcagcaatggccaccaccgccgcgtccagcctcctcaagtcgtccttcgcgggctcgcggctcccttcgggcacgcgcaccaccaccccgtcgtccgtggccgtgggcaccccgcgcgccggcgtcgggcccatccgggcgtcgatctgctgctctcccaccccgccctacg

SEQ ID NO: 148917 - DNA, 226 bp, Zea mays
  Clone ID: MRT4577_67337C.1
cctaaatatcaccgccgggcggcgtagggcgaatccacacacggcggcgcccaaggggaccagcgggcccaagcgggcaaacaggcaagcgggccgggaaagggaccccccaatcccacactcgaccgaactaaaggaagccggggccaagaggacaataaaaaggggggcccacagccgttcagcgggaaaccgcggccacgaaaagaacggccacccgggagag

SEQ ID NO: 148918 - DNA, 419 bp, Zea mays
  Clone ID: MRT4577_67338C.1
tgcgatccatcaacaatcgccgatagcgatcgagagattaatatatattaacaaagtggcatcatcgtcaggggatctggtggagctatccctgacgctagtttgtgcccccctgatagcaaaggcaaagaaaaagagagtcgccgcccgcctccgttgaagagaataaggtgcaggacaacttctgctccacgctgtgcgagggcaggaaggggattgacctggtggtgtgcaaggagtcctgcgacctctcacagcgctccaacctggtgctgtacagccggatccagtgcaagggcaagtgcaccgagcagaaaggcatcaccgcgcctcagatgaaggtgtcccaagaagcctgcgacaaggactacgtcgccaaagccgctgatgtcaccaaggcctgcaacaccacctgctcc

SEQ ID NO: 148919 - DNA, 589 bp, Zea mays
  Clone ID: MRT4577_67339C.1
ctccgacgaaacctacaacgactcatcgtacctccagatctgcctatcaccgatacgctcatcgtcactcagtctaaccgcacgcaaacaccgagacgccttacgcgttcaccgaacccacacgacgcatcccatggcctgcgaatctgcgacgacaactcgatccttgcgagggcagcggaagcgccggcgaccgggcgatggccccgaggacgagagggggacggagcccgagggcgggtccgctgtcacgggggccgcggtggcggaggcgccggaggagagagaggtcgcggagctctttttgtagttttccccccccgccccccggcacggagcggggccagcgggagccctagcgagtcgcgggaccaaagagactggagctcatcacgcagcatcgtagacgcgcaaaccccaccgaccggactcctacggaggacgcttacgcttccgccaacggccaagtgatatccttcccgtacaccatcaattttccccaaactaattccctactattgggagtattggtaaacctgcactcatcctggatgaaaggtggagagaaaatattaccaaacccatctga

SEQ ID NO: 148920 - DNA, 590 bp, Zea mays
  Clone ID: MRT4577_6733C.1
acgcggacgcgtgggttttgaagcttgctgaaccggccattcatcgctagtcttttatttcataattctgcagcaagcagggttgctggcattacacggccagccttgggacgagcaggagcttctccttgcgacggcttgtgagtccgtacctgacagacatgtccacgtcctgtggcgtcatcccaggcgggagctcccagcgaaagcagtagagaaggttcgccagcatgagctcgacgacggccatcccgaagttgatcccggggcacatcctcctcccagccccgaacggcacgaacttgaaatccctgcccctgaagtcggcatccgcgctgctgccgccgtccaggaacctctccggcgcgaactcgtccggcttctcccacgcgctggcgtccctgccgagcgcccacgcgttgacgataactcgcgtccccgccgcgatcgtgtacccgcccacctcgcagtcctccatgcagaagtgcggtagcagcagcggcgtcggcgggtacagacggagcgtctccttgatcacggccctcaggtagggccatgttcgctaggtcctcttccttcaccattccttg

SEQ ID NO: 148921 - DNA, 257 bp, Zea mays
  Clone ID: MRT4577_67340C.1
ccctgatgcagcagttgcctatggtgctgcagtgcaaggaagcatttcgcatggagagggtggtgaagaaaccaaagatatccttatcttggacacagatcccctcaccctttgaattgaaacttatggtggtgtgatgacgaagttgattcccagaaacactgttatccctaccaagaaatctcaggtgttcaccacctaccaggatcagcagactaccgtctccattcaggtttttgaaggtgagaggagtctca

SEQ ID NO: 148922 - DNA, 242 bp, Zea mays
  unsure (1)..(242): unsure at all n locations
  Clone ID: MRT4577_67341C.1
nntttnttttttttttttttttttttttttttttttttttttttttttttttttttttttttaccccacggggcggttccattcatgggaacaaatcagggggtgatttggtgagtttcacaccgcgtaaaacctcatttttggggggttactcatacttattccggtttttaaacttttcttttcccagttcaattttcataaaaaacgggttttttgggaacccttttgatgaactcccc

SEQ ID NO: 148923 - DNA, 401 bp, Zea mays
  Clone ID: MRT4577_67342C.1
ggggcacaaaaaataaaaaaggtttgggggaccagtttaaaccggcccaaaaccggggcaaaggcataaaaggttttgggaagggttgggaaccaaccccgggggaaccaaaaaaaaaaaaggggggccaggttttaaaaaggttccccccaaaaaaccattttttaaaaaaaatttttaacccgttcaaaaggacgcccttaaaagcccccctttttaaaacttttatttttgggggaccccagggcccaggcaaaccggggggggcccccatttggcccaattctttttttccttaaggcccagggcccaacgggatctttggggggggaataagccctttaattttaataatcccccccttgaaaaaaattttaaccattttgttgggggggggtttg

SEQ ID NO: 148924 - DNA, 1122 bp, Zea mays
  Clone ID: MRT4577_67343C.1
agctggcccgaggcggcgccggcgggcaacgcgggggccgaccgccccgacggcaacggggcccccgcggaggagcccgaggaccacgacatgccgcagctggtggaggcggacgtggagaaggcgctctgggcccagatcggcatcttgcatggcggcggcggcctgttcggggacagcaggtacggggcgcaggaggaacttgacgaggaagaggtcaaggagatcgacagcgcccgcgcgcggcgccggaaggcggcctacgagatggccatcgcctcaggcggcgccagctcgctcatcctgtccaactacgcgcagctcctgtacgagttcgacaaggacatcgagagggcggagatgtacttcaagcaggcggtggccgccgagccggcggacggcgaagcgatgcggaggtacggcatgttcctgtggcacgcccgcggcgacacgggcggcgcggaggacatgttcaccggcgccattgacgcggagcccgagagcagccaccaccggagcagctacgcgtggttcctatggatgaccggcggcgtcgagacctgcctcatggacaccggcaggcagagcgacggcaacgacgcggattgaaccgcgcagctagcgcccttgggatcggagacacaatccaaaagcagacaagaaaaagacgacgacgcgacgaccttacctttaccaccggcaagtgccccggccggccggcgggccggccatttagatggcgcgtctaggtatcgccgtacgtcgtgccgcatgcatgcatgcccggcggcgcaagatggctatgcagcaagcgtagtatatatcatccatgagcagcgccggccgttgtagataggtgcaagttttccagtgtgctagatgcatgtgcgcgtcaaggaggcagccagcccagccctgcagggccaggaagcgaacaataataatgttggcaaagctgctagcgcatgttagagcgtgtgatgcatagtactatagtagtatgtggaataaagcatgcatcgtgagatagtagcaatgctgttatatataactgcgtttgtgaacaacaacaataatatatatatctgtgtttttatataaaaaaaaaaaaaaaaagcggcc

SEQ ID NO: 148925 - DNA, 214 bp, Zea mays
  Clone ID: MRT4577_67344C.1
ggccaggcgaatttttacaacacatgttccaggtgcagcaggaacgttgcttttgattggctacattgaagttacagtagagcgagtcgttgccgattgtatatgttatcgcttctagtgaactaggcacgctaaaacaatggagatttgttttcatttatcaagcgaggccagccacagagccacttttgcatctatccggagaggcgaacca

SEQ ID NO: 148926 - DNA, 679 bp, Zea mays
  unsure (1)..(679): unsure at all n locations
  Clone ID: MRT4577_67345C.1
ggaccctcgaggccggccngggaattgtcattccagttcgcataggtatgtgactacaccgtccagctagctcatgagacgcttctccaaagctcttgatatcttctgacagcgaaacctctcactctctttctctatcgtctgcctctctctctcatacacacgcacactcacagagcagacgacactaagcccctcccaaatcaatagacagcttaggacggagttataccagtcctagagactgcttcttcatggctcgatctgaggctatgatgccatctcggtataccacatctccaattgcggatccgaggcgcctcctgtcacatccaccctgaatgacgccctaaaggtcctcctgccctgatctctgtatgctgcgtgtggtccacatactgctcaacgacgccactatcaagacaacactgtgccccaatgcacggccaacgattgcttctgcccgacgactaggtccattcactctccttaggcacttccggcgctctagactgtaggttgccggaagctgaaggcttttgtatatatataaccgacgtcacgaggctatcaccaactctgagctagactttacctatgtaacgtccctgaaagtgnttctggttctgcttctggaccgcttggaaatagaatgcacatatgctttgtatatcatatg

SEQ ID NO: 148927 - DNA, 227 bp, Zea mays
  Clone ID: MRT4577_67346C.1
gggatttgtcacgacaattaatccctcatttcatgaagtgatgacataaccgaaggggatatggcggggggatctgactactaaggaatcaacgctgcatctcacaccgtgacaaagtaaactgagaggggtactctcctttgtggacggagacaatgcaatactccaaagtaccgctcccaattgccttgatgaatttactactaacacccattaaagggtttgtt

SEQ ID NO: 148928 - DNA, 523 bp, Zea mays
  Clone ID: MRT4577_67347C.1
gcagggagcacacctcaaatttaatttaaacactgtttggaaatttgcgatgttatctccaaacctaacataggcacgacgcgtcctccatgcgaatgcaacaactcaagcgaactgcgcgcacatgcattccattccaccacctcacgaggggccgccggcgccgaggatggcagcagcctgtcccccgaacccctgcaggccgacgccagcgatgccaaacgcgccgacgtcgaaggccacaccaccaccgccaagctgggccgctggctgctgctgctgccggcccctgcgcccgacgagcagcgcgtcacgcagcagctgatcggcgctggcggccacggcggcctgcacgccggccagcgcggcccagaacgcgaccaggtcgtcgtggcccatggcgcccaggtccgcgtcgatccacgccatggcggggctcccggcctcgcgctccttccggatggcctcgtccgcgcgctcctgcctcgccttctccgcgtccagctgcgcgcgcaggtcgccg

SEQ ID NO: 148929 - DNA, 619 bp, Zea mays
  unsure (1)..(619): unsure at all n locations
  Clone ID: MRT4577_67348C.1
ggccgggnatcttctctcccagcgcccatctctctctcccgctgaactcccaggcgttcggcgtccccagccatggccgcggctccctggagctcgcctgtctgctcgcgacgcacgcccagcgcctcgttaagctcctccatgccggcgtccctgtttccgtactagccggcgagtggtctcgagctcccatggcgctcggacttctgctcgggttcaggatctttgcgcgcgagcctctgcgcgccctgtctctcccttcgcgcgcgctgctccctgttggcccgcgcagtttcccggttgccgcgcccggatttcttcctcggtgcccagcttggatttttgcttagtcgcctgctatttcctagtgccgtggtctcgctcggacgcgtcctgtcaaggttattcctacacgtgtgtcctggtacccctgctcgctgttgggccgaccgtcagcagcttcccggcctctgtcgcactcggtagcaagtaattcatgtcagagcagctactgcgacgccttcccttgcatcgtgctcgtcagatcgccttcccttgcatcgtgcccgtcagatcgagtctcgcgtcgtcgatctgtgcagtttctgttcggctatcg

SEQ ID NO: 148930 - DNA, 904 bp, Zea mays
  Clone ID: MRT4577_67349C.1
ccgggggacggtctctggaaatgatcatgtggttcattctcagcttgaaaagattgtgttcccagacctaaatgtggagaaggaagacgagggtatggtgtcaaagtatctcgagatggagtctttggactctgaaaaccctatagaagttgagaacggtatgttgctgcattctggaaataatgatgatgttccttctagactgggaaaggtcgagttcacagattctgaaaaccctgcaaaggctgaagatggcaagttgacgcgatttggtgtagctgtgcctgatactgcaggtaaggctgagggacaccacaatgaaagccctctaagttgtgtctcaaccacaggctccttcactaccctttatgcaacaacacaatcattttctgagccaaattctgagccttcggagaccaacgttgaggcatccccaagacaatgtcatagggagaaaagccaagatgttacagatggtgaggccgattcttctgaaacaccacccaaggatgaagttatcaagcctgtgatcagcgttaaccttcagccggagcagtcagttgtccaacaggacatagttgacatgtacatgaagagcatgcagcagttcacggaatctctcgcaaaaatgaaacttccactggacgctgagaaccgtagtccctcagacgaaggttcctactccagcacaattgagaaggcatccccatccccgccttcctccgcatcgaagggttctagggtcttttacggaagcagggccttcttctaagtttctgatgcaatgtagtgcactagctcgtaatcccctatatatacatatacatggtccaggtctgtcagatgtcggctggcacgtaatcacatactttctgtctccgtagtatgcttctaggactcactc

SEQ ID NO: 148931 - DNA, 256 bp, Zea mays
  Clone ID: MRT4577_6734C.1
gagggattctcaatttctcattcctctcaactatgttggcaagtttttttgtcacaaatttgtacttttcaccctagtacaacagctttaaacttgggaaactacccaaaatgtgaagccttttttgcaaaccccataactggaaaaggatgggcctttgtattgaacacatacttatttagggggagggttttgttttcatcaaacagtaaatacaaatacttcaatgtttctccaaaaaaaaaagtttccattt

SEQ ID NO: 148932 - DNA, 413 bp, Zea mays
  Clone ID: MRT4577_67350C.1
attcctcggcggaacggggaagggccccaaatctcaaaaagctcaaaatttctgaggaacgggtgctgccttcggaaaaaacttggctttcccggcccggttccccgttgtgggtttccggaaccgccttgggcttaagaaccaaggtattcttgtggaagacatatccttcgtcgtcgcagacaatttcctggcaattccccagtgggggctaatgtctggtggaactacactcctgctcatgtacatgagcaacatcgtctattttcacaagctcaccctcttcttttatggtgtgcgtcgtcggtaataactaaccaaccgggtggaggtattcttcgcgccgtggatcgcctgcctcttcctcgccatcggcgtgccgccgtccgttgccactgagcccctgccgcagt

SEQ ID NO: 148933 - DNA, 324 bp, Zea mays
  Clone ID: MRT4577_67351C.1
ggggggggggggggggggggggggggggggggggggggggggggggggggggggggggcgggaggggacgtcggggcgcgcggcagcgcgtcgccgagatgttcccgtggtggggcgcgtgcaccgaccaccctgtccgacctagcgctgcccggttgcagcggggccggcgcgccgcccgagaccgtcgccgccaccgcactccgcgcaggcagctccccagaacatctcccacatctctccgctgctccgggagaagaacgtccgcgcagaaagccgagctggcgggccgcggctccggtctcggcgcgcccctaccacctc

SEQ ID NO: 148934 - DNA, 309 bp, Zea mays
  unsure (1)..(309): unsure at all n locations
  Clone ID: MRT4577_67352C.1
cccaacaacggctaaaatgggggtttcaaattaaaaacactagatgcttggtaacacctgcccatgggggattcaaatcgatggataaatacatggtaacacctggcccttaagggcctaccattaataacagggttaaacgcctaatgaactgcagnaatatatatatatatatatatgggctataaacgccctttaaaaacctacaacatgatcacagttacacacctcattgggggtgcatttccgaaggcagggggatcgacgagcaccaatagtggtccccacttttgtaaaacttgaaccttt

SEQ ID NO: 148935 - DNA, 305 bp, Zea mays
  Clone ID: MRT4577_67353C.1
atacctcccgccccttctaaaaaacacacaataattatactaaacactaaatcttagacactgtaaaatttaataacagatcaacccaccaacccaaactacaacctaacaaatcttccatcctcatcattccccccaaacccaaccttttagccaaaaacacattcatcgcacagcttactatccaccacataaccaaaatatccataaaaatatagctattacacttacaccctcaaactcccacttatcctacacctctaaagtcatttcacaaaatcgtactataatcaaactcaacacct

SEQ ID NO: 148936 - DNA, 186 bp, Zea mays
  Clone ID: MRT4577_67354C.1
atgggtgggcgcacgcgtacgaacaccgctcgctcactattggttatgtaccataatactacagtagaaatgcatcacgttttgtgctacacatcgcagattactgcagaactggagatagcactaatgttatttttggtctagctcgtggaacactgaccatgctggaggtatcgctgagaactg

SEQ ID NO: 148937 - DNA, 168 bp, Zea mays
  unsure (1)..(168): unsure at all n locations
  Clone ID: MRT4577_67355C.1
atttctcgtncagctgcacagacgacnanctaagttntntattgtgttgacngtgcattggatgcntgggtctgtgcagcatctacaacaagnnagnccgcggntgcanaacncgcggcgtggangacaccaggactanaagttgtgttcgnaaanccgantcagnng

SEQ ID NO: 148938 - DNA, 3797 bp, Zea mays
  unsure (1)..(3797): unsure at all n locations
  Clone ID: MRT4577_67356C.1
gaagatgatagaaaatccattgataagtatcaggcatagacagagttgatgagaagggaaatacaagatctcaagacgaacgcgaaggttttccaactgagcaagtgtagcgcgtgcactttcacccttgatctacctgctgaatgatatacactattggtcatcttgaatcgtatgttatacagaagttccttgatgcaaagcgcatctacaacttgacaaattatttagagaagttacatgatcgagggttgcatctaaagaccactacccttctgttgaactgctataccaaattgaaagatgtggagaaacttaaccattttatcaaggatgaagatggggttggtgagatcaagtttgatgtggaaactgccataagagtatgccgcgcagctggatatcatgaacatgctatgtttgtggcaagaaagggtgacaacgcagagtacgcggggaagattttgcttgaggatcttggtagatatgacggggcactgcaatatatatctggcctcgaggcaaaccaggcaggtcttactgtaaaagaatatgggaaaattcttgtggaacataggcctgctgaaacagttgaaatactgttaaggctctgtacagatgttggagatcctacgtcgagaagaggttcaaacagcatgcacttgcttatgataccatccccaatggactttgtgaatatatttgtgcacagcccgcaatatctgatgggatttctggaaaattatatcaaaacagtaacggactcacctgcgcaaacagaaattcataacacccttctggagctctatatttcaaatgatttgagcttcccgtctatctctcaagaaaatgaatatgagaatcactatatcaaagaaacaaaaggtaaagaaactgctaatgtctataggtcaggaataaaggaaaaaactggtcttggaaaagaagatcctaaagtagcaaagaatattgttgataggagaaggaaagggcttgcgttactcaaatctgcttggacatctgagatggaagatcctttgtatgatgttgatcttgctctcattctttgtaacactaatgcattcaaagatggtttgctctttctatatgagaaactaaaactttacaaagaggttattagttgttacaagcaagcacatgatcatcaaggtttaattgcatgttgcaagaagttgggggactcatctcaaggaggggatccttctctctggggggatctattgaagtattttggggagcttggggaagattgctctaaagaagttaaagaggtcttgacctacattgagaaagaggatgttgtacctcccatcgtcgtgctacagacactatcaaaaaacccatgcttgacactctcagtcgtcaaagattacattgctcgcaagcttgaacaagaatcaaagctaattgaagatgatagaaaatccattgataagtatcaggcagagacagagttgatgaaaagggagatacaagatctcgatacgttgactgaacttcatggccatttcaatgtcgtaatgtctgcctgcatttggagctgctgtggaggagatgtacacgctaaatgagaagaaggtgcagattgttgatacgacatgcccttgggtttcaaaggtctggaatatggtcgaaaaacacaagaagagtgaatatacttcaattattcatggaaagtattcccatgaagaaactgttgccactgcttcttttgcaggaaagtacatcattgtgaagaatatggcagaggcaacctatgtgtgtgattatatacttggtggccaacttgatgggtctagctcaacaaaggaggagttccttgagaaattcaagaaagctgtttctccagggtttgatcctgatgttcatcttgatatggtgggaattgcaaatcaaacaacaatgcttaaaggagaaactgaagaaattgggaagcttattgaaaagacgatgatgcaaaaatatggagttgaaaatgtaaacgatcacttcatggccttcaatactatttgtgatgccactcaggaaagacaagatgctatgtatcagctggtgaaagagaaagttgaccttattcttgttgttggaggatggaattcaagtaacacctctcatctgcaagaaattggagaactcagtggaattccatcatactggattgacagtgaacaaaggattggaccaggaaacaggatcagctacaagctaaatcatggtgaactggttgagaaaaataactggttacccgaggggcctattaccattggtgttacttcaggtgcctcaactccagataaggttgttgaggatgctcttcagaaggtatttgagatcaagcgtcaggaaattttgcaggttgcataaattttaagcagagatttggtgaagagctgaatagttttggcttggcaaaggttactagaaacgttgcacaggcaaatgtttgtacagtagctaaggatgtaacgagttgggcacgaatactaccacgagtcactatccttgtgctggaatttacagtacggtggaaactaaaatggtgtaagtttctagtacacgagtcactatccttgtacacgagtcagcctttctaaggcctaacattttgccacttaaattgatggggaagacactcagatgtgtaagttaagaatgcacagttcctacgtgtaaaaagcttagttccagtacttgaactctcatcagttgggacaaaatcgcaataaaacctcgaattgctctgagaacacaaagaaattacatcatactggatagacagtgaacaaaggattggccaggaaacaggatccgcgacaagttaaatcatggtgaactggttgagaaaaataactggttacccgaggggcctattaccattggtgttacttcaggtgcctcaactccagataaggttgttgaggatgctcttcagaaggtatttgagatcaagcgtcaggaaattttgcaggttgcataaattttaagcagagatttggtgaagagctgaatagttttggcttggcaaaggttactagaaacgttgcacaggcaaatgtttgtacagtagctaaggatgtaacgagttgggcacgaatactaccacgagtcactatccttgtgctggaatttacagtacggtggaaactaaaatggtgttatcattggcccgaataacacagcatcaacctatctaacgtccatttcctgtgcatgcactcgttccaccttcgctgccttggtgacaacgaaaaagaatgcccagaatgcgcgcctgaatacagatccgtcatggaggcaaagcagaagctagagcaaaacgccagggaccatgatctctttttcaggcagttgaggggttccaaggacggtttctctgtcattgcagactattttagcaagggcatagtgagcaagacaaccttacctcctgagaatggacggtagtgaaggaccactggtactccgttgccttgtacgacattatatggtgttatttccctttcatgcaccgggttatgcaatctggcctgtttcatccatgcagtgagggttttttctttttctttttggtttgacattgtagatactcattttccggcagtttctttctgaacccaactgcatttgcttagacattgctgtgcagttttccagcattgggtttcgatgtttgcctcgtgctctcctacgtttgaaagaagtactatatgaatcatgttttttgtataataaaaaaaaaaagannnnnnnnnnnnnnnnnnnnnnnnnnnnnnnnn

SEQ ID NO: 148939 - DNA, 1051 bp, Zea mays
  Clone ID: MRT4577_67357C.1
gaattccatcatactggattgccagtgaccaaaggattggaccaggaaacaggatcagcttcaagttaaatcatggtgaactggttaagaaaaataactggttacccgaggggcctattaccagtggtgttagttcaggggcctcaacttcgaaaaaggttgttcaggatgctcttcaaaaggtttttaagatcaagcgtcaggaaattttgcaggtggcataaattttaaccagagatttggtgaaaagctgaatagttttggcttggcaaaggttattataaacgttgcccaggcaaatgtttgtacagtagctaaggatgtatcgagttgggccctaatactgccccgagtccctatccttgtgttggaattttcagtacggtggaaactaaaatggtgttatcattggcccgaataacatttgcatcaaccttttgaaagattatagaaaatccattgataagtatcaggcagagacagagttgatgaaaagggaaatacaagatctcaagacgaacgcgaaggttttccaactgagcaagtgtagcgcgtgcactttcacccttgatctacctgctgtccatttcctgtgcatgcactcgttccaccttcgctgccttggtgacaacgaaaaagaatgcccagaatgcgcgcctgaatacagatccgtcatggaggcaaagcagaagctagagcaaaacgccagggaccatgatctctttttcaggcagttgaggggttccaaggacggtttctctgtcattgcagactattttagcaagggcatagtgagcaagacaaccttacctcctgagaatggacggtagtgaaggaccactggtactccgttgccttgtacgacattatatggtgttatttccctttcatgcaccgggttatgcaatctggcctgtttcatccatgcagtgagggttttttctttttctttttggtttgacattgtagatactcattttccggcagtttctttctgaacccaactgcatttgcttagacattgctgtgcagttttccagcattgggtttc

SEQ ID NO: 148940 - DNA, 286 bp, Zea mays
  unsure (1)..(286): unsure at all n locations
  Clone ID: MRT4577_67358C.1
ggtgcggcataaaaacacgtgtggtgggggggccgtnngntcaatggagggagtggggtccctgntgagcgtcttggcgctgctcttcttcccccggccttggtcgctcctgcttcgttgcttgctctcnttgctggcgtcgttgtttttttttttgtcgcgccgctcgtggggggcgggtgttttttttttttccngccncgnctgnccggggggggggcctgctggcggctggtgccgccccccctgcctggtgacctggtgtgcgctccggtttgcggcctcg

SEQ ID NO: 148941 - DNA, 1473 bp, Zea mays
  Clone ID: MRT4577_67359C.1
atggcgactatcacgacgccgctccgctccgctctgttctctccggccgcctcgtccgcgggccgccaccgcgggggccggcgccgcgcgccctcctccgtgcgctgcgacgcctccccgccctcgcacgccgcggccgcctcgctcgacccggacttcgacaagaaggcgttccgccacaacctcacgcgcagcgacaactacaaccgcaaggggttcgggcacaagaaggagacgctcgagctcatgagccaggagtacaccagcaacgtcatcaagacgctcaaggagaacggcaaccagtacacctggggccccgtcaccgtgaagctcgcggaggcctacgggttctgctggggcgtcgagcgcgccgtgcagatcgcgtacgaggcgcgcaagcagttccccgaggagcgcatctggctcaccaacgaaatcatccacaaccccaccgtcaacaagaggttggatgagatgggtgtagaaatcattcctgttgacgcgggtatcaaggatttcaatgtcgtcgagcaaggaaagtacatcattgtgaagaatatggcagagggagatcggcaacccaaaccactcaaccatgcttacaggagaaactgaagaaattgggaggctcaacgcgaccgcgatgatgcaaaaatatggagttgaaaatgtaaacgatcacttcatggccttcaatactatttgtgatgccactcaggaaagacaagatgctatgtatcagctggtgaaagagaaagttgaccttattcttgttgttggaggatggaattcaagtaacacctctcatctgcaagaaattggagaactcagtggaattccatcatactggattgacagtgaacaaaggattggaccaggaaacaggatcagctacaagttaaatcatggtgaactggttgagaaaaataactggttacccgaggggcctattaccattggtgttacttcaggtgcctcaactccagataaggttgttgaggatgctcttcagaaggtatttgagatcaagcgtcaggaaattttgcaggttgcataaattttaagcagagatttgtgaagagctgaatagttttggcttggcaaaggttactagaaacgttgcacaggcaaatgtttgtacagtagctaaggatgtaacgagttgggcacgaatactaccacgagtcactatccttgtgctggaatttacagtacggtgaaactaaaatggtgttatcattggtccgaataacatttgcatcagcctttctaacttctaactttttgccacttgatgtcagggaagacactcagatgtgtaagttaagaatgcacagttcctacgtgtaaaaagcttagttccagtacttgaactctcatcagttgggacaaaatcgcaataaaacctcgaattgctctaaaaacctcgaatgctctaatcaaatttctccgtttcctaagtgcaattgcgca

SEQ ID NO: 148942 - DNA, 285 bp, Zea mays
  Clone ID: MRT4577_6735C.1
cccacgcccacgcgtgcgccctcgcatccgcggatgcaatcccaaacccagaagaccatcacagggggagtgtaaaacacaaacaggccagacaaagcaaaggccacgacccatcacaaggaccccatccaacccgcaccagcagccgcccatctaccccggcaagcagctcgcggacagtcacaccctcgccgactacaacacacagaaggagcccacccaacacctgctgcaccgactccacgcgggcgccaagaaacccacgaagaacacagacaccaagcc

SEQ ID NO: 148943 - DNA, 374 bp, Zea mays
  Clone ID: MRT4577_67360C.1
gcgtaggctcgggctcgtttgctccacgttttgtaggagttggacgcatgtcccggtgagctgatcactgactcagggcggacatggctgcgtcgcccgacgaggtgcaactgatgcacctactgaacgagattcttggcgccaagaactccatgcaggttggcgtcttaacagcatactcgctgctctgcacacggcctcctcctccccgacgacggccatattgtggccatccacgttacccgcgagagctacgaccagattgggtcaacgataatccagaaagccggcgtggcgcacaacatccactaccgcgtagggctcgcactgcccgttctggaccagatggattccaacgagtggaacaaaggcaa

SEQ ID NO: 148944 - DNA, 821 bp, Zea mays
  Clone ID: MRT4577_67361C.1
cggccgctcgagccggcgggcaatctcctcacaacagggctggcatagctagtagtttagctatagcagccacacacacacgcacacgtacacttactcggctacctccgtttgcggctttgtagcgcaatggcgagggcattgaccatgggcgtagtcgccgcggcggccgtgctggtgttcctgtgcgccaccgccgtgccggccgctgcccagggaaagaaggggctgcccaagaactcccacgtgatccacccgaagcagttcgggaggagggagcaggtgctctcctgcgacgacaccgccgacggcaacaccccctgcgtcgccacctgcgacaagcgctgccctaacgagtgcgtcgtcctctgcccaggctgcaagacctactgcatctgtgacttctaccccggcgtgtcatgcggggacccacgcttcacgggcgcggacggcaacaacttctacttccacggcaagaaggatcaggatttctgcgtcgtctctgacaccgacctccacatcaacgcccacttcatcggcaagcgcaaccccaccatgagccgagacttcacctggatccaagccctcggcatccgcttcgccgaccatcgcctctacatgggcgcccagaagaccgtcaagtgggacagcaacgtcgaccacctcgagctggccttcgacgacatgcccatcgaaatccctaccgcaatcgacgcccagtggcaatccaccaccgtgcccgcattgaccatcacaaggagcgccacaactaacggcatcagggtccaaactcaaggggagtgttcgacatcttggccaat

SEQ ID NO: 148945 - DNA, 328 bp, Zea mays
  Clone ID: MRT4577_67362C.1
ctcgtcgtcataatcttccgttcgacaacttctcgctcctcactgcaaaaatggccctgaggcgagtttgtaggtcaccgttgccctccaataaaaactcggataaattgacgaaccctacgttcgagaaatggccgaagcacatctgcataattggctcgtcgcctctctagaaggacctgcacctgagtcttcaagagccacaacgtcttgctcatttagttctagcatctcatactcaagcgaaagcctatcgacccttagacgctcatgcaggacagccgctccattcacatgcacaacgttaccaaccggttggagatgcttt

SEQ ID NO: 148946 - DNA, 126 bp, Zea mays
  Clone ID: MRT4577_67363C.1
ctgaaatttatctcattataatacgcatatgccagtctacagcaactgagacatcatagcctgggttggtgtaaactgacatatgcgtattataatgagctgaaatttatctcagaagaaaaacta

SEQ ID NO: 148947 - DNA, 703 bp, Zea mays
  unsure (1)..(703): unsure at all n locations
  Clone ID: MRT4577_67364C.1
tcgaggccggccgggccgggaactctcgttactcatcttcccntctccagctcngacccgcaggccgcccccgcccagcctgccccgccgtccgacggctccacccggcgcgcccagccctgcactccggccagcgcgccccgccccgccctgtagtccggccagcgtgccccgccactccctgcagtccggccttccccgccccgcccttggcaaagtctgtgagacacaatttcagtcgtggaatcgagtcatatcacatgtatggaggtgatgatcactttcgtttggtaaaacgaatgtgatgttcaaatatatcttaggggcacagaggatcagatcctgcaaatccagatgtgttgtgcagccaaaaggcaacagatcatctcgttacatatggcgaggagatgtctagtcagcatggaccagactatgactggaggacctcacctattgatcctcaggctgtgtatgcaagtggtgaaaaagctcatggaaggtacacaatgtttactaacgtcattgactcgagctaggtgagggttcaacatggagattgtcgaggtctgctgctcgtagctcccgttgctccactcaagaatctagcacaagtggagcaatcgcgagaagaacttatgggacatcaggattacttgagggaaacagctgtccaaaatgaataatatgctacaaagtttaaaca

SEQ ID NO: 148948 - DNA, 106 bp, Zea mays
  Clone ID: MRT4577_67365C.1
gtcggacccaatggcctgtggcctcatactatgtttgctgcttgtatatgctgtaaattaacgtgaacagtgtcactcgaatctgtatcaatgctggttttggaca

SEQ ID NO: 148949 - DNA, 373 bp, Zea mays
  Clone ID: MRT4577_67366C.1
gcgcgccttctctagcagcaagccgcaacgctgtatgacgcgctgagcaacacccaaacccatgctcggtcacctgctccccaagtctgcctcaggcgctacctcagctgcttggccgccccgaagaacgcctacagcactgacatcagggtcaagactggatccccgtgtcgctaagttccaatgccgccgtccacgcaacaggcggcatgtcaagcaagtgcaactacggctgcagctgctcctatactacctccatggttcgctgccactggactttagattatacccgacggaccttggtgtcccagggggcaaccgagcacttgtttgtctgcattggctgctccactgctgggtggtcatcccccgc

SEQ ID NO: 148950 - DNA, 242 bp, Zea mays
  Clone ID: MRT4577_67367C.1
ggattctcctccgcctccggttcggggtctggtacgtgatgtactccgaggctcgggttcgagagtgagggaatagatatagcggcgtcggatgttgagtacagcagcttcgacggcgggatcgcctggggcacggacgagcactccctgcagaacgcgttcagcatgctacggcgagttcctcgagtgcaggattatcctcagatcgttcagcgcagaggactcgcagcatcgaggtcgtc

SEQ ID NO: 148951 - DNA, 340 bp, Zea mays
  Clone ID: MRT4577_67368C.1
gagtcgcccccgcgggcgggcacgtcgaggccggcgtcggcgagacccgccccgtcgcgaggggcaccggcacggcgcggcccagcgccgcgcacaacccgctcgtcggcagcgacttctcgcaggcgcgcggcaccggcggacagtaccagtgagctgccgcctccgcgacgtgcccgtacgtgtgacctatcatgtgtgtgagtctgtgagataggcatgtacacgaatggtccttgtgtgataatctatgctaaataatatgtctctaatagtgtattagataaaaaaaataccaataacataaaaaaaaagctgatgcatactagtttcgacggtc

SEQ ID NO: 148952 - DNA, 625 bp, Zea mays
  Clone ID: MRT4577_67369C.1
ggccagcgagcggtggacggcggcgcagctgctggagcacccgttcttggcgtccgccggcgaagcagaggatgatgcaaagcccaggtgggtgtctcccaagagcacgttggatgccgcattttgggagttagatgaggaggaggaggaggaggagatgtcagagagcgcaacagacaggatcagggcactggcaggcccttgctcggcgttgccggactgggaatccgacgacgatggctggatcgaagtgtccagcggctactccgaacttcctaacgccgccgccgccgccgttgctggccaagaagtgagatttccatcgacgcagtgtgaaattcccagcacggcggtggcgacatcgtcggagcaggcgcccgtggctgcgccggcatctgagacgacgagctacggaattttcgggggaggagacgaatcggagtctgagctttttgacgctgactcggacgttggcgacgaccctgtgcacaatgtaggagctgcggatgcttattatgcgcatcggcaacagctagatgtttacgcgaatttcaccggtgatccgattgtactccatctcgatatttatgctgaagaaatagtaaaaaagtactttttcacggcc

SEQ ID NO: 148953 - DNA, 428 bp, Zea mays
  unsure (1)..(428): unsure at all n locations
  Clone ID: MRT4577_6736C.1
gccggccgggcttcgnatagccccccattgctcaatcaacaagatctcctcatcgtaacgaacggaataccagagggcacaagagaagggaaaggacttgtcgcctatggggagcatgcggttatatcggtacggtcgcggaccaccccaacatccccactgcgaagccggagtgtggctaccggttggaggcagggcgcgaggactaccccgaccaacacaactgcctcgatgacgatcaaaatcatgtcatgtcctcgctacagaacggtgctcctgagaaatgcacactagagaacgctcatggaacagatgaggagctcccatcggatgatgagatgggggacagggacagtggccacaatgcacttggcgctgtccggaattctcgcgccaagacgctaagatggtctatcaagctcctgcct

SEQ ID NO: 148954 - DNA, 380 bp, Zea mays
  Clone ID: MRT4577_67370C.1
gggggccgggcgggtaaaattttaaaatgaagctcaaaagatgcatcaaacattacatttgacgaaatcgggaccctatacaaaaaagggttgaaaggggggagcccccccgcaacgcaacgcaaggcaaaaccaggggtgaggggtaggaacttaaccggttcaattctcgaaggaggcccgggacccgcccttgaatcccatctggcccaaggggagcacaaaaaaaaagcccaggtgccacgttactagccaaaaacaaaaatgggaggttaccggcgggggcctgggaaaatgggccaatttctggccaattctggaaaaaaaaaaccccccaagggtttttcccttgatggcccggaccctggaccgccccatcc

SEQ ID NO: 148955 - DNA, 1587 bp, Zea mays
  Clone ID: MRT4577_67371C.1
tctgattggtgccattgttaaaaaaactataattatgatagtggcggactaagttcaggatggccatgaataaagctgataatgcttctagtacggtggcagttgactctcttctcaattatgagactgtgaaatacttcaacaatgaacaatttgaagttgagaagtacgacaaatatttaaggaattatgaggatgctgcattgaagacccaaagtagtcttgcctacctgaactttggccaaaatgttatctttagctcggctttatctacagcaatggttttgagctcatatggaataatgagtggtgctctgactgtgggtgatttggtcatggttaatggacttttattccagctttcattacctctgaacttccttgggagtgtgtatcgagaatctagacaaagcctcattgacatgaagtcgatgtttcagttgcttgaggaaaaacctgcaataaaggatgagcctcacgcacaacctttgcagttcaagggagggtgcattgaattcgagaatgttcattttgggtatgtaccagaaaggaagattcttgatggtgccactttcaccgtacctgcaggaaagagtgtggccattgttggaactagcggaagcgggaaatcaactattcttagacttcttttcagattctttgattcgacttcaggatctatacgaattgacgggcaagatatccgaggagtgacactggagagccttcgaaaatgtctaggtgtggtacctcaggacacagtactttttaatgacacgattaagcataatatacagtatgggcggttatcagcaaaagatgaggaggtctttgatgctgcccgacgtgctgctattcatgatacaattacgaacttcccagacaagtatgacaccatagtaggagaacgaggattgaagttaagcggcggggagaaacaacgagtgtcaatagcccgtgtattcttgaaggagccttccattctgttatgtgatgaagcaactagtgctcttgacagaactactgaagcatcaattttgaattctctgaaatccttatcttccgatcgaacatcaatctttattgctcatcgactcacaactgcaatgcagtgtgatcagataattgttttggaggatgggaaggtagtagaacaaggaccacatgattttcttctgtcacagggtgggcgatacgcagaattgtggtatcagcagaacagcactgacgccatggattctgctgcagctagcgtagaggtttgattgaccatgtttaccttttccttctgcaaggggaaaagaagggaaaacacaatcataaccgtgagagagagggatggagccaacttgtctgccttgtaattagaggtaggttttttggttcgggggggcataaacgtacagttccattttcaagatagccgggaggattttccccccttttgagattgtatagagtatagacgatccctgcatgttatgataaccgtaacgtttctgtagcataagggataaagcccagtaagggcctgtttgtttcgcatggaataaagggtagaataaatctggcttggatttctttaat

SEQ ID NO: 148956 - DNA, 1452 bp, Zea mays
  Clone ID: MRT4577_67372C.1
atggtgtttaatgtcgtgcccacgatactagagattggtatggtgtcaagcatacttgcctacaaatttggttcaacttttgcttggatcacttcagtttcagttgctacttatattgctttcactttggctgtcacacagactgtgaaatacttcaacaatgaacaatttgaagttgagaagtacgacaaatatttaaggaattatgaggatgctgcattgaagacccaaagtagtcttgcctacctgaactttggccaaaatgttatctttagctcagctttatctacagcaatggttttgagctcatatggaataatgagtggtgctctgactgtgggtgatttgcctgaggccctttttctcgaaaagcgcaggagaactgcgtcccgttatattaagaagaaggaaaaggtcatggttaatggacttttattccagctttcattacctctgaacttccttgggagtgtgtatcgagaatctagacaaagcctcattgacatgaagtcaatgtttcagttgcttgaggaaaaacctgcaataaaggatgagcctcatgcacaacctttgcagttcaagggagggtgcattgaattcgagaatgttcattttgggtatgtaccagaaaggaagattcttgatggtgccactttcaccgtacctgcaggaaagagtgtggccattgttggaactagcggaagcgggaaatcaactattcttagacttcttttcagattctttgattcgacttcaggatctatacgaattgacgggcaagatatccgaggagtgacactggggagccttcgaaaatgtctaggtgtggtacctcaggacacagtactttttaatgacacgattaagcataatatacagtatgggcggttatcagcaaaagatgaggaggtctttgatgctgcccgacgtgctgctattcatgatacaattatgaacttcccagacaagtatgacaccgtagtaggagaacgaggattgaagttaagcggcggggagaaacaacgagtgtcaatagcccgtgtattcttgaaggagccttccattctgttatgtgatgaagcaactagtgctcttgacagcactactgaagcatcaattttgaattctctgaaatccttatcttccgatcgaacatcaatctttattgctcatcgactcacaactgcaatgcagtgtgatcagataattgttttggaggatgggaaggtagtagaacaaggaccacatgattttcttctgtcacagggtgggcgatacgcagaattgtggtatcagcagaacagcactgacgccatggattctgctgcagctagcgtagagaagctctaccggtgccaaaaaaaaacatcagacttccccagatcgcttcagggcctattagcagtgcctggttcttggtctacactcaccatagtggatcgtgtaaagtag

SEQ ID NO: 148957 - DNA, 323 bp, Zea mays
  unsure (1)..(323): unsure at all n locations
  Clone ID: MRT4577_67373C.1
gcctccgacgctggggctcccccgcggtggcggccgctctcgtcctcgtcgsgtcgccccggsgctgcagcgtcttcggcncgcggcccgyagatgccsgcaggcgncgccctcccggygtstctgctgcctgtctcggcgtcggtgccgctgctggcgacctcggnctgcggcgtctccttcagggcgcgcggggtkgctcgcgccygcytcgatgtccccgttygccgtkgyttttggcctcgttggtcccscyyttgtsttsctgcggcgcgctgttgtcgcatctcggtgggtccggcgcagcagtctttccttttcgt

SEQ ID NO: 148958 - DNA, 717 bp, Zea mays
  Clone ID: MRT4577_67374C.1
gccggccgttccgggaactggcttgacctcttcggaatgggaaaacgccaccacacgcggatcgaattaggctctccgagtctccggttccctcctctcggcggcggctcaggtccctctccatctccggcgtgatgcatttctgctccttaagctggagaccagggtgcatctaacctatcacaagtttgtcaagcgcttggcgtctgacctcaacaagcaagaaagcaaatggcaggcggcagggttgcgcatgccaccctcaagggcccgagtgtggtgaaggagatcttcattggactgaccctgggtctgatcgcgggaggcatgtggaagatgcaccactggaacgagcagaggaagactaggtccttctatgacatgcttgacaagggccagatcagcgttgtcgtcgaggagtaaagagttcttcccagttattttcaaagaactctctcgagagcatgacaaagtgattgcttgctgtggagatttgtcctggaaataagcacaaccatttgggaacaccagattttgtcgaattttcctttccttttgatgaatatttgagcacgtccatgtcaataccaaacatctggccttttctagaaaaaaaaaaaaaaaaaaggcccctaagctgggctcgttgcaaaatatgccagcctctcatcttcaaacagaaggggcggcgactcagaaggatcaacacttattttc

SEQ ID NO: 148959 - DNA, 273 bp, Zea mays
  Clone ID: MRT4577_67375C.1
gtgtattttaatgacctactaattggagggttaattgagttgaggaaaatggaagattctggcatacttgatgagaatatcgatgttctgttcaatgaggaatccccatattctgctccattaccccccttacttggagaagatgatgaatcaggaagtgggaagattgatgagctggcaaccattgtcaaaaaaatgagagagtcgatcactcctaaggatagattctataagatgagaagatttagcaactgctttcttggtagtgaagct

SEQ ID NO: 148960 - DNA, 375 bp, Zea mays
  Clone ID: MRT4577_67376C.1
tacgcgggtgatttactgtggatgatgctatttcagtaaaaaaaatggtcgaatgacagctgttttttgccatggaaaaggcaaattatataaaaaaaaaaaacattcaacaactgatcatcacctggttccatgtgcgatctgcacatcagtgtgggggacatcatcggttctatttaggcgtcctccaaggcgtttcttcttcctttttgctcttgtgtgtccttcccgctccccggtagaatgttgttgcgcccctgccacttacacgcgggttcctcctcttcggcctccattgtgcgctccctcgcgcctgctgttgatcccctaattaccctactgtgctgctttggccgaacccgtggagaccatgct

SEQ ID NO: 148961 - DNA, 447 bp, Zea mays
  unsure (1)..(447): unsure at all n locations
  Clone ID: MRT4577_67377C.1
agcagtggtaacaacgcagagtactttttttttttttttttttttttttttttgttttttttttttttttttttttttttttttttttttttttttttttttttttttttttttttttttttttttttttttttttttttttttttttttttttttttttttttttttttgttgggttttttttttttttttttttgagagggggggagatttttcagttaaatgaggaagaaggntaaaaattgtgttttggggagggagtaaattttgataaataaatgatgagacatttnaccagagaaaaatgctacccatgaagaagaagaaatctataccttacgctagagattttagagaaagaccacttacttcaaataatgcaaaccaccccttggctgaagcaaaaagaagccaaaccttacaatgattgctcttgcacaaaatacc

SEQ ID NO: 148962 - DNA, 293 bp, Zea mays
  unsure (1)..(293): unsure at all n locations
  Clone ID: MRT4577_67378C.1
ggnaggctttagcgaggtcctgttctggctggcgccgcgctgctcgccggggctgccggcgccggcgcgcagcaggcgtgtggagcatcatcacccggcccatgttccagagcatgtctgagccaccgcggtgacagcgggtgccagggcgccttctacacctacgacgccttcatcgtagccgccagcgaaggtccccgtcttctgctccaccggcgatgagcagacccgcaagcggtagctcgccgacttcttacgacctacgttcctcaatacgaccggtgggtgctcca

SEQ ID NO: 148963 - DNA, 148 bp, Zea mays
  Clone ID: MRT4577_67379C.1
atctggtctatatctcttatctgcacaggttctcaatattagatctcatacttggatagatgatcatatttcttctttgccgaataacaggaactctaaatgtagccgactcttcaaaaatggcgtgaacgaaggatgggtctgtaca

SEQ ID NO: 148964 - DNA, 564 bp, Zea mays
  Clone ID: MRT4577_6737C.1
cagaacaatctatttacaattttgtgttattgtgtcaggaacagcgaccaagactaccggcagacaatcgcagacttgtactgcgatgcgctaaatgttctgatatgaaggctaacagtgacgtcaataacaaattatacacttttatacaaacacaagatctgcgctatagttaataagaaaaccgccaaaactgaatctacagcagcttctttctacagaggccttaagagcgggtaatcttcaaggagctctcgctctgacaaagtgtcattctcattttgtggagtccataggacctcgactgccagtattttgcgcgatggtatggcacccatcttttgtagagctgtctttaagtcattgctgctatttataaccggcaccttatgtactccctcagcagcaaccaatatggttatcacaatgtactcgttgctaaaaccacttgatctttggctgcctcctttattcctcttgatgctgttcacattcacaagtgtctcttcatcaaacttgcccctctcctcaattgaaagctgattgaaacgtttctcaccatta

SEQ ID NO: 148965 - DNA, 2025 bp, Zea mays
  Clone ID: MRT4577_67380C.1
ccggccggggaccgcagacaaagactacaggggggagcgaggtctctccccacctcgcttcgcacctctccagccgccgcctcctccttcgccggcgtcgacgatgggtgactatggccacggcggggggcagatgcggggcaacccggactcccgccccaggggccagggccagcgccctaacgtccagcagctcaagctcatggggcagatccacccgacggggctcacgcccaacctgcttaagctcttcgaaccgcgtccaccgctcgagtacaagcccccgctggagaagcgcaaattgccggcctacaccgggatggcacaatttgtgtcgcactttgctgagcccgaggatccagagtatgctccgccagtacccaagtgtgagaccagggcagagaagaaggctagaattcgcaataataagctcgagcaaggcgcagctaaggttgctgaagagcttcagaagtatgacccacaaagtgaccccaatgctactggagatccatacaaaacactctttgttgctagacttaactatgagacatctgagcagaggatcaaacgcgagtttgaaggttatggtcctattaaaagggttcgtcttgtaactgagaaagatacaagtaaacctagaggatatgcattcattgagtatgtgcacacacgagacatgaaaaatgcctacaagcaagcagatgggagaaaagtggacaacaggagggtattagttgatgttgagcgaggcagaactgttccaaattggcgtcctaggagattgggtggtgggttgggatcaagcaggatgggtggtactgatactgacaaaaaggattccactagggagcaacaacaaggtggacgccctagatcagaagagcctcggagggatgatcgtcgtgccgatagggatcgtgaaaaatctcgtgaaagggtacgggaaagagaccgtgaggagaggacccgtgaacgttcgcatgaccggactcgtgatagagatctacgagatgagaagcatcaccatagagaccgtgagaggactcgggatagggagagaggaaaggaccgtgaaagagaccacggccgtgaccgggagcgtgatcgtcgtgacagggacaaggatcgtggtcgggactatgatagagaaagggaccgtggtcgctctcatgatcgccatcgtgagagaggcagggaccgtggtgaaagagattatgagcgcaccagccatgaacgtgaccgtggtcacatgcatgagagggatgcagactatggcaatggtgggacaaagcatgacaaaaatctgtctagttatgggcaggattatggctatggtcagtatgagcaacacaaaggtcatgatgcatatggttacagtcaagatgtacgtggacatgaaactgaacactcaaagcggcatgagcacgaatattatcgtgttgactcgtatggtaaaatggaagctaactatcagatgccgccaaacaatgctgagccagaaggccctgaggaaggtgaggcatatgaggaaggcgactaccagtatcaccggtctggtgaacacatgaaggaagcttgattgcagcgatgagatttgcctgcagctttatactgatacacaacgatggtttcaatgttggttctttgtatgaattagtttcagctgcatagtgcctgtcagttgtgttcttccatgttggggaattctcaaaaggaagcaaaatcttgcccaactgcgtggatttttgaatttgaagcctatggctgccaatatcttgtggaataagatatttgtgtaatctggttgtggagatccatatgatctgccgttatccatctactcttctgttaagaagttttgtatgacagttccttcaaattatttgttccaacattttgcagaacttcagaattgttgttctatttggccttctaacaaaaagttgcttggtaacaactgcaacctttgtcctctacatccaagcacataggtctcatcaataaaatgtaatcatttttttttgt

SEQ ID NO: 148966 - DNA, 304 bp, Zea mays
  Clone ID: MRT4577_67381C.1
aattcggcacgaggaggactctcctctcaccgagatggtgagagcattacatcgactccctagatgacgcagttagtccatgtaacttgagtatgtataggaccatcagggcgcatcgacgtgcatcaagtgcaggcacagcatcttgaaaaagcgctatgaaggcagatatgaagggtccgccatcacaaggaataatgaggaccctgaacggccaggcgagagctgtgcctacatggaaaagttctactgcgtgcaggaccacctagggatgaggatcgaggtggaacccagcctgaggctg

SEQ ID NO: 148967 - DNA, 1598 bp, Zea mays
  Clone ID: MRT4577_67382C.1
ccacgcgtccgatcacctttctgttaacttcgttatcattctgtttgtttggaaaacgaaggctgaacaaatttcaccgatggagggcaacttggtatagtatttagttctatcgtacaccctttcctttagtataaaattccctggtaaggggatatccaatttatttcccaacgtatgccaatcggccagacagcgcttttcctccaactgtgttgatctgtgctggatttcactcctcgtgtggaagctctacatgtgcaaggttcgtcttgtaactgagaaagatacaagtaaacctagaggatatgcattcattgagtatgtgcacacacgagacatgaaaaatgcctacaagcaagcagatgggagaaaagtggacaacaggagggtattagttgatgttgagcgaggcagaactgttccaaattggcgtcctaggagattgggtggtgggttgggatcaagcaggatgggtggtactgatactgacaaaaaggattccactagggagcaacaacaaggtggacgccctagatcagaagagcctcggagggatgatcgtcgtgccgatagggatcgtgaaaaatctcgtgaaagggtacgggaaagagaccgtgaggagaggacccgtgaacgttcgcatgaccggactcgtgatagagatctacgagatgagaagcatcaccatagagaccgtgagaggactcgggatagggagagaggaaaggaccgtgaaagagaccacggccgtgaccgggagcgtgatcgtcgtgacagggacaaggatcgtggtcgggactatgatagagaaagggaccgtggtcgctctcatgatcgccatcgtgagagaggcagggaccgtggtgaaagagattatgagcgcaccagccatgaacgtgaccgtggtcacatgcatgagagggatgcagactatggcaatggtgggacaaagcatgacaaaaatctgtctagttatgggcaggattatggctatggtcagtatgagcaacacaaaggtcatgatgcatatggttacagtcaagatgtacgtggacatgaaactgaacactcaaagcggcatgagcacgaatattatcgtgttgactcgtatggtaaaatggaagctaactatcagatgccgccaaacaatgctgagccagaaggccctgaggaaggtgaggcatatgaggaaggcgactaccagtatcaccggtctggtgaacacatgaaggaagcttgattgcagcgatgagatttgcctgcagctttatactgatacacaacgatggtttcaatgttggttctttgtatgaattagtttcagctgcatagtgcctgtcagttgtgttcttccatgttggggaattctcaaaaggaagcaaaatcttgcccaactgcgtggatttttgaatttgaagcctatggctgccaatatcttgtggaataagatatttgtgtaatctggttgtggagatccatatgatctgccgttatccatctactcttctgttaagaagttttgtatgacagttccttcaaattatttgttccaacattttgcagaacttcagaattgttgttcaaaaaaaaaaaaa

SEQ ID NO: 148968 - DNA, 130 bp, Zea mays
  Clone ID: MRT4577_67383C.1
accttggacgaccggggcgtgcggcccacccctatctctaggcttggaggacgcccctcttactcctccacccatttgcaggcgccaccccacctcccgcatgaatccctagccgcccaatgctcaagcc

SEQ ID NO: 148969 - DNA, 3638 bp, Zea mays
  Clone ID: MRT4577_67384C.1
ccagccgccgcctcctccttcgccggcgtcgacgatgggtgactatggccacggcggggggcagatgcggggcaacccggactcccgccccaggggccagggccagcgccctaacgtccagcagctcaagctcatggggcagatccacccgacggggctcacgcccaacctgcttaagctcttcgaaccgcgtccaccgctcgagtacaagcccccgctggagaagcgcaaattgccggcctacaccgggatggcacaatttgtgtcgcactttgctgagcccgaggatccagagtatgctccgccagtacccaagtgtgagaccagggcagagaagaaggctagaattcgcaataataagctcgagcaaggcgcagctaaggttgctgaagagcttcagaagtatgacccacaaagtgaccccaatgctactggagatccatacaaaacactctttgttgctagacttaactatgagacatctgagcagaggatcaaacgcgagtttgaaggttatggtcctattaaaagggtaagtaatgtggtaattcctgtgcaggtgaagttattgcactttggtaaggtttatggatttttcaatcattctaaaatgtaaacaatcattggacaaaactgtggaaaagttgcctcattagtttatggcttccttttaagctcctccgacaagtgtttgcaacaccaggggtccttataaccgctttcttgctccatttcatatctagaatcaaaatctgcagcatcttcatttcctttctggtttctgaaaacttctctggaaatgctttcaaagaaactgggaactctcagtttcatagtcatttttggtaaacttagcatcaatgttttaattgaatttttgtttttggagccaacaacttgtttgctctgtttcacgcacatgtatagtgtttgctcttgcatgtattccatgacaactttttttttatggttgacagctgtgaatttgaacctgtctagttatgggcaggattatggctatggtcagtatgagcaacacaaaggtcatgatgcatatggttacagtcaagatgtacgtggacatgaaactgaacactcaaagcggcatgagcacgaatattatcgtgttgactcgtatggtaaaatggaagctaactatcagatgccgccaaacaatgctgagccagaaggccctgatgaaggtgaggcatatgagtacaactactaccagtatctcctgtttggtgatcacataaaggaagcttgattgcagcaataaaattcacatggaaatttatatagagttcaggcatatgtatgctcgctggtaattctgttaattcttttggactttcagttggaaagccattttactatgtgcatggttggtacaaccaattaatgacaaggcatctctgggaacacaaatatgcgtaaacaggtaattatggctgcacctgtatgtggcccaggttctctatttcctagtacttttttgtcgtcagcaagaaatttcttgagaagagcaaattgcttctaacgaaggtagtaaatggttgagctgttctctcattccacagatttgcatctaccataatggtcaactgggggtaaacaagcttgaaaaatgctgacagtggcacaaattagcatagatcactttgtatttttcaaaaagcagcttgtctgtagacagggattttctactgtatgtaggcttaattgggtaggcttgctggtgagtatagtatttatagttccttcagattagctatgaaagctatcactgctaccaaattttggttgtggagcaatcagcaaccttacacaatactaattgcatctctcaactcctagagtcgaagatccatcgattttgtgcataaggggtatacatcactcacttggtatttatcacctttctgttaacttcgttatcattctgtttgtttggaaaacgaaggctgaacaaatttcaccgatggagggcaacttggtatagtatttagttctatcgtacaccctttcctttagtataaaattccctggtaaggggatatccaatttatttcccaacgtatgccaatcggccagacagcgcttttcctccaactgtgttgatctgtgctggatttcactcctcgtgtggaagctctacatgtgcaaggttagcacggctgttttaggctttatgcctgtctgtcgtgcagcataaaatatgctaaaaattaaaagaacaaacacaattacaactaaaaaaaaaaaatattcttaacttcaggggaactttcttattgaatattgtttcattactaaatttgatctttccaggttcgtcttgtaactgagaaagatacaagtaaacctagaggatatgcattcattgagtatgtgcacacacgagacatgaaaaatgcctacaagcaagcagatgggagaaaagtggacaacaggagggtattagttgatgttgagcgaggcagaactgttccaaattggcgtcctaggagattgggtggtgggttgggatcaagcaggatgggtggtactgatactgacaaaaaggattccactagggagcaacaacaaggtggacgccctagatcagaagagcctcggagggatgatcgtcgtgccgatagggatcgtgaaaaatctcgtgaaagggtacgggaaagagaccgtgaggagaggacccgtgaacgttcgcatgaccggactcgtgatagagatctacgagatgagaagcatcaccatagagaccgtgagaggactcgggatagggagagaggaaaggaccgtgaaagagaccacggccgtgaccgggagcgtgatcgtcgtgacagggacaaggatcgtggtcgggactatgatagagaaagggaccgtggtcgctctcatgatcgccatcgtgagagaggcagggaccgtggtgaaagagattatgagcgcaccagccatgaacgtgaccgtggtcacatgcatgagagggatgcagactatggcaatggtgggacaaagcatgacaaaaatctgtctagttatgggcaggattatggctatggtcagtatgagcaacacaaaggtcatgatgcatatggttacagtcaagatgtacgtggacatgaaactgaacactcaaagcggcatgagcacgaatattatcgtgttgactcgtatggtaaaatggaagctaactatcagatgccgccaaacaatgctgagccagaaggccctgaggaaggtgaggcatatgaggaaggcgactaccagtatcaccggtctggtgaacacatgaaggaagcttgattgcagcgatgagatttgcctgcagctttatactgatacacaacgatggtttcaatgttggttctttgtatgaattagtttcagctgcatagtgcctgtcagttgtgttcttccatgttggggaattctcaaaaggaagcaaaatcttgcccaactgcgtggatttttgaatttgaagcctatggctgccaatatcttgtggaataagatatttgtgtaatctggttgtggagatccatatgatctgccgttatccatctactcttctgttaagaagttttgtatgacagttccttcaaattatttgttccaacattttgcagaacttc

SEQ ID NO: 148970 - DNA, 421 bp, Zea mays
  Clone ID: MRT4577_67385C.1
tttttttttttttttttaatgataaaagatttgaccgtgtgcgtttcattaattgctgtgtatcctgccgtattgtacaaaaaccattttacatgttgacgaagagagcggcaccacccatgagagcgcccatggcgactgcagcggtgggcatggcaccggcgttgtcatcagtagcgctgctggcagcggctccatcactgctagagatagcaccagccttggaagtgagagaggcgatctggtcctcaatagcctggctggcggtaccagtggcggtctcggcggcagagctgagggagtcgagcttgtcctggacagactcggaggcctcggcaagggccgaggtaacgctggcgagagcgctggtgtcgacggtctcggatccagcctcgctctcggtctcagcagaagcggttcc

SEQ ID NO: 148971 - DNA, 787 bp, Zea mays
  unsure (1)..(787): unsure at all n locations
  Clone ID: MRT4577_67386C.1
gccggccggaatcggaanaagaggatgttgctcacaacaagctagttctcaagaaggcctttggtgcacttatgcgtattcccaggaaaccgttacacatcttttgtctaagttgattgctcgtctaaatgaaaccaaggccagtgatcccatctccaaattagtcattcgtttagatcaacagtaccctggtggcgatgttggtgtattctcttgtttaatgttgaactatatcgtcatggaacctggacaagccattttcctgggcgctaatgagccccatgcttacttatctggagattgcgtagagtgcatggccactagtgataatgttgttcgcgctggattgactccaaagttcaaggatgtggatgtgttggtcaatatgctcacttaccgctatggatctgcagaatcacaaaaaatgacacccatcaagtttggtgagcattctcttctttatgatcctccaattgatgaattctctgttgtttggaccaagttgggagccgaggaaactgaaaaccaaaaaccaattgaaggacctagtgttctcattgtcacctctggcagtggtaaattgacaggtgaggctcttaagactgaatccgattatgaactcaaggaaggttatgtctattttgttggcgctaatacccctattgttactcaatctggaaactctggactgcaattctacagagcatttggtgttgttgccaatcattanatcatatcaatcatactaccatataatctacaataaactaatgatatcatatcttgg

SEQ ID NO: 148972 - DNA, 268 bp, Zea mays
  unsure (1)..(268): unsure at all n locations
  Clone ID: MRT4577_67387C.1
aaaaaaactaccaaaattgtgtttaagggatttttttgcgtttctctatatnaccacacaatttccgagctgcataaatagttccgccaaaataacccatcaacaaaatcccagtgacctcaagcacaccacctattacacactcatgatcacacacgccctcccgtcgcctacgcgatcagcgacagcatcacgttgcctgtgccgcccacagcctgctcaacatcgccgaggaacagcatcttgtgcacgcaccacgcgccctgcg

SEQ ID NO: 148973 - DNA, 290 bp, Zea mays
  Clone ID: MRT4577_67388C.1
gcgtacggaacacgatcgatcacatatcacgatgatttttttacgagaaaccacataccacgggggggtgaaagcatcatggagtacggtcagcaggtgcagcacggccacggcgccacgagacatgtccaccagtacggcaacccattcggcggcgtggagctcggcaccggtggaatgagtcacggcacgggaaccggcggcatgggccaactgggtgagcacggcggcgctggcatgggaggcggtcagttccaacctgagagtgaggaacacaataccgtcggcat

SEQ ID NO: 148974 - DNA, 348 bp, Zea mays
  Clone ID: MRT4577_67389C.1
tcgcgctgtggtacgatcgcgtgggggcgcctgcatctgcatgccgatggcggtcatcctccacttcgccggctcctgcgccctccttgtagcatcggtgctgtcgcttccgccggcggtgtttaaggtcggcgacgagcggggatggacggtgccggccaatggcaccgagacgtacaaccactgggcaaagaggaaccgcttccaaggcggcgacgtcctgaatttcaagtatgccaacgacgactcggtgctgctggtggcccacgatgactacaagcagtgcggcacggcgatcccgctgagccgggttacggggcgggacaccaatttcacgccggaccgcta

SEQ ID NO: 148975 - DNA, 263 bp, Zea mays
  Clone ID: MRT4577_6738C.1
gaagacaaacaaaagtgataccactgtttatctagatgcaattttagcccggcatgcacatacatacactacacacgaatcgtgaatgactcacatgctaacatcaggcatatatacataccagatcgacacggctacacacacataatagacatgcgcgaccacatggttcatgcatgcacagacgacgactactagaacattataattagtacgaacactctcactttatatttgtgcggagccttgatgtgagagagaaa

SEQ ID NO: 148976 - DNA, 292 bp, Zea mays
  Clone ID: MRT4577_67390C.1
acattgtcagcttgatagcacaagaccgacaagtgatcatatgctcttgtggtgtccatcgctagagcagaagatccagaatcactggaagcaagcggtcctgaatctggctgtgaatgtcaagaaaatatgttctgagatggatggtggaccatttctcgtcgtgcctagccaggtacaaggaggtagacgacagacttctgtcgctagaaacgaacgtataacttacccgggagaagcttgagtcagctgcagccttcaaaccagtgactgggcaagcagccgtcctagt

SEQ ID NO: 148977 - DNA, 183 bp, Zea mays
  Clone ID: MRT4577_67391C.1
gtggcgtgattgtcgttgagcatggacgatgtctcggacgtatgctcggaatgcagcctcgaggcgataagctcagtacctcactggatctgggagtaaaggactggtgcaattttggcgtgagcaattggatgaaacgggagcttttatgcttagcacttatgattgctacttattaatgaa

SEQ ID NO: 148978 - DNA, 1774 bp, Zea mays
  Clone ID: MRT4577_67393C.1
aaaaaaaaaaaaaaaaaaaaaaaaaaaaaaaaaaaaaaaaataaaaaaaaaaaatctcaagggcagcgcacaactcggcccctccatctctctttgctcgcccctgccgtatcctccctctcccataaggtacagggacctcaaggggtatggaagtggagaagtatactagggagcccaaggggagggaggagcaaccgcagcaggtcaggtctgcctatgacccaacaaagctcggtacaaaccactaggaaggaggaggtcgccagaaaccactagctaggaaggagtgagggaggactcaggagtctagctagtttgttcgtccctccctcccgcgtcagaagtcagaactagcctagcctaagccgaaagccgaaaggactcggtgcttgcgtgcggcggatggcgacttcgtcgtcgttctctggccccggcgggtccccggcccacgcgtctccgggaggcggaggcggcggcggcggcggcggtggcgtggggtcgtaccaccaccaccggtcgcggttcggcgacacgacgctgaccaaggtgttcgttggcgggctggcgtgggagacgccgtccgaggggctgcgccagcacttcgacgtctacggagagatactcgaggcggtcgtcatcaccgatcgcgagaccggccgctccaagggctacggtttcgtgattttccgggacccggacgcggcggcgcgggcggtgcagaacccgaacccggtgatcgccggccggcgcgccaactgcaacattgcggcgttcggcccgccgtcggccgcgcagccgagagagagaggaggaggaggaggaggccgcgggccgcacgtgcccgatcagccgccccaggggtcgccgtcgccctacagggtgccatcgcagatgaccccgcctcatcaggccgccacgttgttctacaacccccagttcgggtactggtacccacctgattatccataccaacaggcattgtacaattctcaagtgctacaacattactaccctcagatgtatggtccagcctctccttcaggaccagcctaccaatacatgggctatatgcctggtggcccaagtccaaggactggattctcgccgatgcagcaaccaatgcgacaacccttctttcagcagccaacgacacagatggatggttctttcccatcagtcccttcgcttccacctaatttcagactccagctgccccctcgtgcagtctcaagggaatctgatgatgcatctggctcccagtcagcccagccagtttcttcaactccagctacagtcacaaacaacgaggaagattcgaggcctgtagtgtctgattcagatccaaacacaccaaattgacttagtgagaatcctggcaacacgatgtgacttcaatctggtgcaggctattggtagtctgtaacagagtcttcatgatactctcacatcttgactgaaaaagttcccaaagatttgttctttcattatttctgattctttttttttcgaattcttgcattgcatttcttcaccgaatccattgtacggacgactgaatttcaagttcaaacttcaggaattcgctagcatataagttccgtggcatgttagtgttcaaagtactgcagtgctgttagttcgtatctcaaatatgcagtacagtttttcattgaggaaccacccagttttattgcaaccagaacaaatttttcccttcgaaaaaaaaaaaaaaaaaaactcgaggggggggcacccccctccggcggcgcag

SEQ ID NO: 148979 - DNA, 362 bp, Zea mays
  unsure (1)..(362): unsure at all n locations
  Clone ID: MRT4577_67394C.1
aaaaccgaccgaccgacgcgtccgaagcgaacattncngctaatctcaagngtgcncctgtnctagccctcctcgncgncggcgctgtcattgatggcaccaccagccccggcaacatcgcagtgtactggggccagaacggcaactaatgcagcctggcggacgcctgcaactccgggctctacgcctacgtcaacatcgcgttcctcacaaccttcggcaaccgacagaccccattttttaacctcgacggacactattactccaactacggcatgtacaacgaacaaaacatcgacatacaaacgttgctcgtgctgngcatcaaggtgctcctctccataggaagaaccagctgtatc

SEQ ID NO: 148980 - DNA, 203 bp, Zea mays
  Clone ID: MRT4577_67395C.1
acgctcgcgacccatcgtgcatacacacgccagcctttttgttctccccgcgtgcgctccttttctgtatctactggcgactactccgtcaccgccgccgatctacatcgtgacgcccacgtcttcgacaaccacgagtcatcgttttcgtgaggatgaaatagcaaccgaaacaatggcagtagattcccgctctcgcagac

SEQ ID NO: 148981 - DNA, 489 bp, Zea mays
  unsure (1)..(489): unsure at all n locations
  Clone ID: MRT4577_67396C.1
ggccggggctattcgtgtcctggcatccgcagagagcttgttccgtccaggcaaccaaaaagcatgttgccccgccgcgcagaggaagatgagagcagaggaggatggctcgtacgaagcagaccgcccgcaagtccacgggaggcaaggccccccgcaagcagctcgccaccaaggcggcgaggaagtcggcgccgacgaccggcggcgtgaagaagccccacaggtacaggcccggaaccgtggcgctgcgcgagatccgcaagtaccagaagagcacggagctgctgatccgcaagctgcccttccagcgcctggtgcgcgagatcgcgcaggacttcaagacagacctccggttccagagccacgccgtgctggcgctccaggaggccgccgaggcctacctcgtcggtctcttcgngggccccnccctctgcgccctgctcgcttngcgcgtcgccttcttgcccctgggcctcctgctcgccc

SEQ ID NO: 148982 - DNA, 391 bp, Zea mays
  Clone ID: MRT4577_67397C.1
aacacaccaagcggtagcgtactaccaactagctatcaccaacggataccaagatattagccctccttgcgcttattagcctctgactgagctcaacaaacgacgcaattataacacagcgctctatcgataactagcgccagctgttcacatctactccgatcactgacttcaatgcgcttacatcattcagacatgcatggctacaggctacagctagagcttgaagtgagctccttacaacaaacactggtgcatacgttgacacaattgcttgcatatataaccttactaacgcattgactctgatcagcacctacaacagtgactgccattactgatccatctagccgtggctaaccctgtgacctacttgttactacagctgctt

SEQ ID NO: 148983 - DNA, 754 bp, Zea mays
  unsure (1)..(754): unsure at all n locations
  Clone ID: MRT4577_67398C.1
ccggccggggctattcgtgtcctggcatccgcagagagcttgttccgtccaggcaaccaaaaagcaagttgccccgccgcgcagaggaagaagagagcagaggaggatggctcgtacgaagcagaccgcccgcaagtccacgggaggcaaggccccccgcaagcagctcgccaccaaggcggcgaggaagtcggcgccgacgaccggcggcgtgaagaagccccacaggtacaggcccggaaccgtggcgctgcgcgagatccgcaagtaccagaagagcactgagttgctgattaggaagctgccgctccagaggcttgtcagggagattgctcaggatttcaagacggatctgcgcttccagagccatgccgtgcttgctctgcaggaggcagcagaggcctacctggttggtctcttcgaagataccaatctgtgcgcgatccatgcgaagcgcgtgaccatcatgcccaaggacattcagctggcaagaaggatccgtggcgagagggcgtaagtctgtcgacgggaggaagaactctgcgctcgttttgtgtgttcgcctctctcaccctgtaagttttgtgaaaagataatctagtaaactgtacttggnctgtttgactgtagccgcagtagcgtctgcgcataccgttggctgttggcgtgtctggagtcttttatccatccattctagtactacttaataatcgtgatatatcaccgggttgctaaacgtgatccagacttaact

SEQ ID NO: 148984 - DNA, 390 bp, Zea mays
  Clone ID: MRT4577_67399C.1
tgtcctggaatccgagagagcttgttccgttcaggcaccaaaagcatgttgccccgccgcgcagaggaagaagagagcacaggcggatggctcgtacgaagcagaccgcccgcatgtccacgggaggcaaggccccccgcaagcagctcgccaccaaggcggtgaggaagtcggcgccgacgaccgttggcgtgaagaagcctcacaggtacaggcccgtaaccgtggcgctgcgcgagatccgcaagtaccagaagagcacggagctgctgatgcgtaagctgccctttcagcgcctggtgcgcgagatcgcgcatgacttgaagacagaccttcggttgcagagtcacgcttgtgctgatactgcatgaggccgtctaggtctacctc

SEQ ID NO: 148985 - DNA, 1583 bp, Zea mays
  Clone ID: MRT4577_6739C.1
cattgggacctcgagccggccgggactggaattctcggaaaaaatccctcccgctcccaccaccgccgtccacggccgccgccctctcctcctccgcctccgcatcacattccacttccattcccgcggcccgcgccgccatcatggccaccgcctccctcctcgaggccactcgcctcctttccaccccgcgcccgccccgccgcagcctccacacccacctcctcaggaccccgcgcctctccgctctccgcgctcacctccaccgtcccgcaactctcgacgcgcaggagccgacggcgaggcctggcgcgctcctggtcctcgacgcgctcaggaggtccgtggtcgactccctcgcggcgctcaagcggcccgcgctcgcgctcctgctggccggcgcgctgctcgccgcggcgtcaatgggcgggccgcacgccgcggcgctggccgcttcgggcgggcgcgtcggcgggtccgccttctcctcccgctcctcctcacctccgtcctacggctacagcgcgccggcgcccaggggcgggtacacggccgcgccctactactcgccttcgcccttcgtgtccttcggcccggccgtcggcatcggcttcgggggatcggggttcctcgtgaccctcattggcttcgcggcattcctctatctcgccgggttcctgtccgactcgtcaggcggtaccagtgtgcttacagagacggataagaccaccgtcctcaagctacaggttggcttgctgggcatggcacgatcatttcagaaggagcttgaccaaatagctgagaaagcagatacatctactccggctggcttgagctatgtgttgacagagacaacattagcattacttcggcatccggattgttgtatctcagcttactcttcggtggatgtgaaacgtagcgtggatgatggtgagaaacgtttcaatcagctttcaattgaggagaggggcaagtttgatgaagagacacttgtcaacgtgaacagcatcaagaggaataaaggaggcagccaaagatcaagtggttttagcaacgagtacattgtgataaccatattggttgctgctgagggagtacataagctgccggttataaatagcagcaatgacttaaagacagctctacaaaagatgggtgccataccatcaagcaaaatactggcagtcgaggtcctgtggactccgcaaaatgagaatgacacattgtccgagcgagagctccttgaagattacccgctcttaaggcctctgtagaaagataaaagttacagattgcccgtgcaaaggaagaacacgccgtagattcagttttggcggttttcttattagttatagcacagatcctgcgtttgtataataagtgtataataatttgtaattggcgtctctgatagccttcatttcagaacatggaacgtgcaaatctgcaattgtctgtcagtagtcttgttcaatcttcctgacacaataacacaaaattgtaaatagattgttcagagaaaaaataaaacaggacatgctgcaaaaaagcgtgaaaaaaaaaaaaaaaaaaaaccgatt

SEQ ID NO: 148986 - DNA, 1386 bp, Zea mays
  unsure (1)..(1386): unsure at all n locations
  Clone ID: MRT4577_673C.1
ctcgatatgtgttggatcctggctagtcatcgcgcaggttatgtttccatttggaactacaacacacagggaagggtgactgcattgaaggtcaccaaggaagcaggggacggctatgggtatatctgcatctatgcatacacaatggacaaagtgaagaaatttgaagcttatcatggcaaacctgtcagcttgttggctgttcactcaacctacccgttcttgctttcgtcgtcgtcttgtgaccgctcaatcaagctttgggcctgggaccagcaatgggcgtgcactcgaacattcgacgctcacacgagcggagtgcagcatgtcaggttcaacccagctgatgtcaacacttttgttagtgtttcctgtggtggcgcctgtgtaaaggtctgggagattcattcttccacccctatcaccacattgtttggtccgaacaacgttgattatttcactgatgctgatcgccagttccttctcaacatttggtcccagaaggcaacaatattggatctacagacacaaaaaactgtccacaggctccttgttcaccagcgggagatgcgtgatgttgcttgccacccgacacttccaatattggctaccagattagatgatgggactgtttgtttgtgggacgccactacctacaggcttgagagaatcattcgccttgagtcctccattcaacatacggcgttcaaagacacagcggactcaatatggctcgttgttgcgtgtgaagacgggatggaaattcttaaaattaacatgccaacatcaacgaagtaagcaatcagcctgcaccagagatcaggccaaagagcaatattagagttaaaaatatttgcaccgcatggctctagagcctgactgaactatgaccttgtttgtttcggcttctgacagcctctagccattaaaagctgttgcggactgccaaacgctcaacttttcagccagcttctataaaattcgttgggggcaaaaaccatccagggtcggcataaacacataatcggttgagtcgttgtaatagtaggaatccgtcactttctagatcctgagccctatgaacaaatttattttcctccacacgtaatcgtaatgatactcagatttttcccacagccagattctccgcatagccagatcttcagaaaaactggtcagaaaaaagctgaaccaaacaggcccagggtttacttcttcactggcatgttcgtaactaataagagcaaagctgcaaagaaataagtagcagctaataagagcaggaagagcacatacggtaattaaggatgactcgatcggtgctggctgctgggtgtgtgggtaattttatccgcggcccggccgnngcctcgagccggccgccac

SEQ ID NO: 148987 - DNA, 380 bp, Zea mays
  Clone ID: MRT4577_67400C.1
aaaagggggaccaaaaattttttggccctgacaaaaacaagaccccttatttaaaaaaggggaactttcaaaacctgttctgggggggaaaaaaaaaaaaactggggggtttttaaaactaaaaaggccggaccgtttattcgaggaaaggctttttggatgcttgtttaaaaccgcccccctttttccgtttaaaaaccttttaagggggcttgaaggtttttttgatgtcctggggggggggccccaagtttgggaacccccccttaaattgggagggggggaaataaaccccctcttccacgatggcgggggtgaacctccccaacttttggggggatttttttttggggcccccaaaattgtggccgggccccccg

SEQ ID NO: 148988 - DNA, 287 bp, Zea mays
  Clone ID: MRT4577_67401C.1
tgaagaggtgaatatgtttacaaaccaaggaacagtgatccactttaacaaccctaaagttcaggcatctctggcagcgaacactttcaccattacaggccatgctgagacaaagcagctgacagaaatgctacccagcatcttaaaccagcttggtgcagatagtctgactagtttaaggagactggccgaagctctgcccaaacaatctgtggatggaaaagcaccacttgctactggagaggatgatgatgatgaagttccagatcttgtggagaatttgatga

SEQ ID NO: 148989 - DNA, 354 bp, Zea mays
  Clone ID: MRT4577_67402C.1
aaccaaacaacataaattattcttttattacccattgccacaaatggataggatttttttttagggagggctaggtgaatttaatcaatatttacatcaaacataaatctccctttttaacatcgacactaaaactttttaaggatgcaaaacttgagcttgggcctaataaaaaaaccctaagggccttattcccccgttacttttattttgccatggaaagcacaacaaaacccttttttataaattgaacaacctcgcggtgtcctgaaaagcctttcatcacacaatgatagaggcggcccaccacacatttttttttttgctcccaaatttccttttttgggttttaaa

SEQ ID NO: 148990 - DNA, 287 bp, Zea mays
  Clone ID: MRT4577_67403C.1
aaacccggggccgtttgtctgccccaaagtttgccaccccaaatccctttttttgcttaggaaagatagccttcaaactggtaaaagcccaaagagaccattggcaccggtttaaatggggccttttaaggccagtcaaagggggtttctcaaagctttgggggggtggaccccccggcttgcaaaaagaaatttttgaatgggttggccctttcccttttcaaaacttttgaacccaatttggcccttgctggcccgtttttttttgtcggccacttcaatttggg

SEQ ID NO: 148991 - DNA, 611 bp, Zea mays
  Clone ID: MRT4577_67404C.1
ggcccgtttttttttttttttttttttgctacattgttgacttaatagatagagagattacttattattttattgttttatgacatacttgtttccgaaaccattggcgggctgataaaaagcatagataggatacatcaatagatcatgcccgctaatgaaacatgaccagtttacatcgcataaatgacgcagacatgcatgatatttacagctatataggctcaaaagttacaacaccatcaaatcacacgacaacatgctgagatgcaagacgggacaacaaatgacgcgggcaatatgcgcccatggcccttcgatagcattgaatcgacaccacttactgttccaagatcattccgagctcaacaggtgcaggcggaggatactcatccagaaggcatgcatatactcatgcctttactctgaagcccgaaacgataaccagggggccacctacactccttccaatagcaggatagagaggccgggacaatgccattctacccgggaggagctccagcagaacgatgccatagctaaacacgggcctctatgtcgggatctgcaagcaggatggtggactaacagcgactgaaacccgaaggaac

SEQ ID NO: 148992 - DNA, 186 bp, Zea mays
  Clone ID: MRT4577_67405C.1
cttcacagacagagagcggagtttttaattttttgacggacgaacaagggtaccacacttgggtcgccaccaaatgaaaaggggggcacctcgaagtattccagggggaaaggcggccgccacaagaccagggaggcataaaggacactaaagatgaaggagcacgcctaccacgagccgaaggga

SEQ ID NO: 148993 - DNA, 348 bp, Zea mays
  Clone ID: MRT4577_67406C.1
ggaaagcaaaacatcccaattccaattcgcagggcaaaatttttgaaacaaactttttccggcccccacccaaatggccgtggcccaaaattttgtttttttaagcctccctttttcgcagccccctttgggttaaaaaaagctagaacatggccgtttccccaagcccaaatttgtttttaaaccatttccccccgggaaaaaatcccggttttttttggcccccccccccgcggggttttttcgcattattttccaaaaaaaaagacttagggcccccccccaaatttggtgggacccatttgcaaactttatccattttctttggaacaggggtgggcccaaaac

SEQ ID NO: 148994 - DNA, 278 bp, Zea mays
  Clone ID: MRT4577_67407C.1
tttattcgcgggctcaatgctctcacccgttcgagcgatgcaactggcaactgctcacacgctcgtccttgtcttgcacgaaacccctgaccagcaactaggcctgagacggttcgggtgggacacctacgtgctcgagcacctgcagtgtgagatccgggggcatcgccatgttacatgagccgccatcgccggccacgacggcaacgaatggggccagtgcaccgcattcccgccggtcaggacctcaggaaactgacaacatcacgcaggacttt

SEQ ID NO: 148995 - DNA, 283 bp, Zea mays
  Clone ID: MRT4577_67408C.1
ggccataaagaagggacccgtgccttaacctttttttttccttgtaaacaccaaactcaattaattgtttttcacccaaaataattttaccggttcataattacttggaattttttttcccaaacattaatttaatctccatgcggggggggaacccttttgttttatattgttccaaaataatacaaacatttggttaaattagtattcccctattctttaatctatttatccttaaaaaaggttgtttattcttcccttcttttaatatattatattatat

SEQ ID NO: 148996 - DNA, 2057 bp, Zea mays
  Clone ID: MRT4577_67409C.1
cgccacgcgcggccggaaggctatcgttctcgtcagtcgtcacgagagccgcgacggcgcgcatggcggcgacggcagcggcgctccggtgctgcttccccggatcctccggtgtcggtagtggcttcgtcaagcccaactcctccaggcgaggctggtgcgcacggccgtggcggcgccgtcgcgggaggcggaaccggtttcgtcgctggggcaccgcacccgcgtcgacttccccatccttcaccaggaatttgatgatgccaaattagtttacttcgacaatggtgcaacatcgcagaaaccatggagccaagccaagggaagggaaaaggctatcgttctcgtcaggcgtcacgagagccgcgacggcgcgcatggcggcgacggcagcggcgctccggtgctgcttccccggatcctccggtgtcagtagtggcttcgtcaagcccaactcctccaggcgaggctggtgcgcagcggccgtggcggcgccgtcgcgggaggcggagccggtttcgtcgctggggcaccgcacccgcgtcgacttccccatccttcaccaggaatttgatgatgccaaattagtttacttcgacaatggtgcaacatcgcagaaaccatgtagtgtgatgaaaacattagatgagtactatcgatcgtacaattcgaatgttcatcgtggtatccatgcactcagtgcgaaggctactcatgcatatgaggatgcaagaagaaaagttgcaaattttatcaacgcagctgatagcagagagattgttttcactcgtaatgctactgaagctattaatctggtagcctattcatggggactatctaacttgaaagaaggagatgaaattgttcttacagttgcagagcatcatagtgctattgttccatggcaattggtttcccagaagactggtgccaccttaaaatatgttggattgactaaagaaaatgtcccagacattgagcagttaaaagggtttctgtcgaacaagacaaagatagttgttgttcatcatgtctcaaatgttctaggttccatgcttcctatcgaggagattgtaacatggtcaaacagagttggagctaaagtccttgtagatgcttgccaaagtgttccccatatgccagttgatgttcagaaacttggcgcggactttcttgtcgcatcctctcataagatgtgtggccctacaggcgtcggatttttgcatggtaaatttgagattttggtcgtctatgggagcctttcttaggtggtggtgaaatgattggcggatgtattccgaagacaaatccacatatgctgaacctccctctagatttgaggctggaactcctgcaattggagaagctataggactgggagcagccatcgactatttatcatgcattggcatggagcagatccacgaatatgagaaagagctggggacatacctctacgaaagccttctctctgttccaaatgtccagatatatggcccggcgccttcccagactgtccaccgtgctccgttgtgctccttcaatatcgagaacgtccatcctacagatatcgcagagattcttgatctgcagcatagcgtagcgattcggtcggggcatcactgcgcgcagatcttgcataggacccttggcatcaacgcaagtgctcgtgcgagtcttcacttctacaacacaaaagacgaggtggataccttcgtcgacgcgcttaaagccaccgttgatttcctcacggatcgatactagtgcggttcagttcagttccctttttttttgccagtttcatcgttctctcgtttgaactgttgtatgcacacacaaaaaagtatgcatatatatttggtataaagaaaacatacaaagtgtacggcttggcaaagtgagctcccttatttggagttttggactgtaaaaacttatttggcggttgttgttgaattaaacgtagttcaggatgcagagagtacaaacgactcgaccatggtcactgttatgcagtaaaacattaaaaaacgagaagatgagccggcagttaactc

SEQ ID NO: 148997 - DNA, 360 bp, Zea mays
  Clone ID: MRT4577_6740C.1
tgaccattacatcaaggttttaatggtgacatgggttttttgacgagttacatggctcagggggcatttgggcaaagccgtttagagccgccttaacgggggctttttttaaaggacggcctatacacgacacgaccctggcaaaaaaagttcaaacttgaaaacccgttaatcaccgttatttgccgggcctgatagctcctgggcgacgtttctcgacaattgtactcctcccaaaggaagttgataagatttccaatatttacccaacccgggatattggtgaaattccgggttccctggctggggtatctcaaagccttgcccccagtcttgtttccctggttggggccctttgcc

SEQ ID NO: 148998 - DNA, 169 bp, Zea mays
  Clone ID: MRT4577_67410C.1
tactcggttccggatacccggctggactccacgcgtccgcggacgcgtgcgtttacgcgttcgtggttgcgtgataattgccaggcaggcaggtcgtgcaggagggcaagaagaccgaagaccgatccgtgcgggggctcgggactggaactgtacatgaccccaaaat

SEQ ID NO: 148999 - DNA, 603 bp, Zea mays
  unsure (1)..(603): unsure at all n locations
  Clone ID: MRT4577_67411C.1
ggtggaccctcgcgttcggatccgctctttgacacaagtaactggatccgatctttttttcctcactctccatctctcctcgctcctctctcccgactttctctttcttccatggctctggatccagtgatggcatggaggcgcatactctggagcctgggtgaaggaggttggccgcgcgctaaatccagcgtggaggaggtcggatgtgcctggatcgaggcatccagcggtggtggcggtctacgtccttgttcctgtgtgtggcacggtggagccggaggttccgatgtgcggcatggcgaggccagatccagctcggaacgggctcaccgattggctcgtggatttttttttgttttttattgattaaccaatgtggatattctaagaagcccgcctccattaatagattaatagaggtgggtaaaataacccccgcgattatgttatgattaaccaaggttattgattggaagcagttggcaanaaaaaaaaaanaaaaaaaaacaccaaaaaaaaaaaannaaaaaaacacaaaaaaaacacagggcggccgnnntnctagaggatnnccaagacttacggtacgcggtgacatgc

SEQ ID NO: 149000 - DNA, 594 bp, Zea mays
  unsure (1)..(594): unsure at all n locations
  Clone ID: MRT4577_67412C.1
aagcatcataaaccaacacatgccagactccttacaaccaaagggaccaccagttcacaactnnnnngtttgcaaataggcatgttccagttcgcaaaaaaaagtcggtcatttcatttcaatcttccttctgtgacaaccactcaaccaagcagcacagattatgtactgaacaaccaagcaacacgatccgtagggtcagcaggtcaggccgccaccactttctgaaattctgtcacctactacggttgctcctgcgtggagatggtaaggccttcttttcctcgacgtattcggtgaatctaacccttggtttagggattctgcagtgggaatttagatccacgaacatctgctggcaactgtttctggccacctcctccacccgagaagcatgtctgcaagctgcttgcgttgattcttggccagcaggcttctccagcagtggcaactcttactggccacctccttcagtaagttagctattatatcatctgcttctttcatctgcttcctagagaactcaaagctggcagcagagcggatggcagagctagccagcgaacctacccctgatcctggatctctgagagt

SEQ ID NO: 149001 - DNA, 282 bp, Zea mays
  unsure (1)..(282): unsure at all n locations
  Clone ID: MRT4577_67413C.1
ccgntctcgtcttcctctttcttctagnttcgnntagtnttcaaggaagaccggaaccgaggcgncctggccgagaactggagncancggacgnacggntggtgncgaaatncacgggagaatgacgatggncgaggncgagggtggnagggcggcgatccggcgcgncctgcggncgntgaaacgggcatntcgccgaggaaggggcgnanagncggnnatcgaggcgntaacccgnnncttcgccgnnnacgntttggagtggaaggagaagggtgagaa

SEQ ID NO: 149002 - DNA, 226 bp, Zea mays
  Clone ID: MRT4577_67414C.1
gggccacaagggttttaaatttctgcaggaaaatattcttttaaacactggaaattacacccggtgggaacaatattttgtcaaatccgggaaaacaaactggacatgcttctaaagggcaaaactccgggcctatatgcaaatttgggaaaaccaattctgttttcgccgaagaaaaaaacagggtgggggggccccataaaaacactacccagtttcccggggg

SEQ ID NO: 149003 - DNA, 274 bp, Zea mays
  Clone ID: MRT4577_67415C.1
gcgtccggacgtatatttgaagcattaatgtcagacgaccttaacacttatgtcacgactggctgcaatgcagaagaatgtcgctggggcacatactgaccatgaatggaaccaccgtctccttgtgagtgcatttgctgcctaggcgatagatgtagcggctcctgaagggaagacacatgagactaactatctgaggcaggcaacaagccaccggccatatgaaggggtgacacatcgtccttgagactaacatgactgtcgcgcaggatat

SEQ ID NO: 149004 - DNA, 216 bp, Zea mays
  unsure (1)..(216): unsure at all n locations
  Clone ID: MRT4577_67416C.1
gcgacgaacacgatcgctcaggaaggacaacaggcccaccgacaccgggagcacgcgattttgttttcccncgcacacacggcagcaactcaagcaaaaaaacaaaatcaaaaaaaccccgagaacagtggtcagcaccaacaagcacttctagctacatccctctgacgacaagacaaatttttttccctgagctccaaactgaaagtatgacct

SEQ ID NO: 149005 - DNA, 400 bp, Zea mays
  Clone ID: MRT4577_67417C.1
gagtatctagtcggcggccgccctttcacaggcgacggcgtggtcaccgccggaagatgctggctctgctgggcgcggtgcatcggcgacgacgcccccgcgtgacgccgcggagtcctgtacgagatgggtctcaacgtgtacatctccagggtatataccggctcgcggagctgttaacagggacgcgcgcccggacgccgacaacgaggacccgcgttcgctgctgcggcctggagtgtacaacccgcgcgaggccaagcaccgctccgtccagcggggctggcacctcacgtccaggtgcaccttcatgtcctccgacggtgccactgggttgctccgaatgttgggtgtgtttgcaaccatacacgaaccatgggtgatgaactgatgatgacga

SEQ ID NO: 149006 - DNA, 310 bp, Zea mays
  Clone ID: MRT4577_67418C.1
gatcttggttttcacattttttgaacataatttcaagcaaggaataaccaataggtggaataaaaacggcgcccatgtttgtcccgggggcaaacactcacacaaaaggggatttcgagggttttaaacacaaagaaaaatttttatttgggacgaaaagaaaaaggcggaaccgcagcacctgaaggaggctgacaaagccatggaatgcgcgcgctttaaaaaagatttcatacggaaagcacgccatggaacacctcgggcgcgagtcccttgtggcccggggggcggaccccccaaaggccgtttt

SEQ ID NO: 149007 - DNA, 771 bp, Zea mays
  unsure (1)..(771): unsure at all n locations
  Clone ID: MRT4577_67419C.1
gaggctggccgggatcnagccattcgtccctgtggaagtttcacactcccttcccttcccttgtacccactccaatggcgccctccctcctggccgccgtctccgcctcgcccttcctcctacccggcagcagcggcatcagccgcaggccactgggcgctgccccaacccgccgggccggactgcgcgtggccgcgcttaagtacgaccctgctaaggtggcaccgcagaacgaccgggtgctcgtccgtcttcagcagatccctgaggtctctccgctatccacagcgtttctttgttgcacatttgttctcctattttgttttatttagatttgttcgctgataattgttggtttgctgctctcgcttcaacatttcaagtggactccgtgtaaacattcagtgtatgagccactgtatatcagaaaaaatacaggaagtcttcgattaaagaaggccaggattggtgatttaaactttaggaatttccattaggagttggagttgacagagaagagaaggggcgattcgttcatttctctctcaagttcacatgtattgggatgaaatgggtctgttcaaacaagcctaagcacggcanagttaataccctaatcgtggtagttactctgccttgagagcaactccgtcacttcggttntgaaacgtctntgggaagtctgagtttattcaagagtggtatgattgatttactgaagatacacacatgtattttcccccaacctacattgcactaatttggtttact

SEQ ID NO: 149008 - DNA, 165 bp, Zea mays
  Clone ID: MRT4577_6741C.1
aaaccggctcaacttcaaccctctttttttaccatatatctttcaaatcctacggccgttaccatttatcggcagcaatttacgccatacataccagccatcgaggtcctatgacaactcaatcgaccgagcaacgcgtccgcaacagaggtcaaaccctcttct

SEQ ID NO: 149009 - DNA, 559 bp, Zea mays
  Clone ID: MRT4577_67420C.1
gatagtccgctggtgtgggcatccgtgtcttggcagctcgcttctctcggagttgtgggcttggtttttgaggtatcggcgttgttctcgaatgtggtcagcacttttgctctaccaattgtccctctttttggtgtgatggcctttcatgacaagatgaatggagtcaaggtcatagctatgctgatatcgatatggggttttggctcgtatctctgtcaaaactatctcgatgctaagaaagctggaagtgcatagggggattcctagtgtctacaattttcttgtgatagattgctctttatcggtttagttgtttcttgcgagatgataagtgtttattacttatgttaatttaagtatgtttgtgaaagtgctttcagctgtggttgttaggtggtgtgagtcgtaccattcaggtcctaagtttgactagtaattataggtcttggtttttttactgcatatgcggcatatttgtaatggtgtgggacatggaataaacataatctacgtgattggttggttggccggctgcctccaggcccgcggcgttcaa

SEQ ID NO: 149010 - DNA, 189 bp, Zea mays
  Clone ID: MRT4577_67421C.1
ctcaagatgatcaggttgtagatggatgaagtgcttgagagagtgtgttgaataggaaaaaggggtaggcacgagaaagatcatatattaagagaaactgtaagcaactaagctgtagcagaaaatttcatgaaaaggaattcagaaagcggaaagcaaaatactttttttgtgtggggacaattgatt

SEQ ID NO: 149011 - DNA, 167 bp, Zea mays
  Clone ID: MRT4577_67422C.1
tactggtgctagaagacgacagaacggtctctttgatactgggttacatacacagtcgtgctgagaaaccagctcttgtatggggtgtccaaaatttcacgcgctgcgcgatgatctacatcatgttcctccggcaataacactgggcgttgtccgaactataataa

SEQ ID NO: 149012 - DNA, 193 bp, Zea mays
  Clone ID: MRT4577_67423C.1
acgtaagctcggaattcggctcgaggcaaagctacacgcaggatcatatgcgcgacgcgctgctatacgacgacctgcaagttgtcctgtcgcgtgtgcagggcgagatgcacaaattcaacctctggctacttcagcatatctatacgggcacgccggagtgcatggtcaaactcaagctcctactcaacaa

SEQ ID NO: 149013 - DNA, 162 bp, Zea mays
  Clone ID: MRT4577_67424C.1
agcaagcaagctcaatctactactactactatctggtacacattctatccagcctgtcaggctattgtgggggcactgaccgtgattatctcctctacagtgacagcctaattcccattacaggggtttaagtaaaacgctagccattaataaaaccttcgc

SEQ ID NO: 149014 - DNA, 283 bp, Zea mays
  unsure (1)..(283): unsure at all n locations
  Clone ID: MRT4577_67425C.1
cacacgcaaacccacaacccagcccgactgtgccctatccaacgncacgcgcaggtggcancaggccgagggtgcgggcacaaaccgcaccgcaaggcaagagctactgcaggcgatggggaacacactggagcgcaaactgacctacatacctcacttcaagatccaccgccgtgtcgccgggctctacaactaccgcccgcccgggcgcacacttaaagccaacgtgctttccatcatgcaccagcactactgatcggaagaaaacacttatgacagtgac

SEQ ID NO: 149015 - DNA, 278 bp, Zea mays
  Clone ID: MRT4577_67426C.1
aatcactatgcctactcctgagggaaatgcgctgtgcacaactacgcagtagcaattcagcgctacccaggactatgggaactacatggcatgtactccttacaccatgacgacagctagtgctgtcaacgtcagagacacgatccaccgacttagtgaccatactgaaccacgacatagccggatatacaataggcgtctccgtgaccgccactagtcagcaacgtagtcagagcctgatctaatggatatgtggaatcactgtactgcccggtttg

SEQ ID NO: 149016 - DNA, 281 bp, Zea mays
  Clone ID: MRT4577_67427C.1
gttacacctttcccatcatcaacatactttgctagtcatgggagggtgtggttagatggcaaccacttgccctgccatgactagcaaagtatgttacacctttcccatcatcaacatacatgtgggaatctatactataggtggtacatggcacttgcctgaagccaatggctgtagaccatggagttttatcctttgtttttttcaatcttagatttgggatttaaaatttattcaatgacatttgatttacttgggcaatctgcgatatttgctatcat

SEQ ID NO: 149017 - DNA, 705 bp, Zea mays
  Clone ID: MRT4577_67428C.1
ccggccgggacctctatgctgttcgggccccggatcatccgagagaagttcacccagctctgctcgcccgagggttcctccctccgattgttttggcgcagatatactcgatgctgcggaaaatggcgtgcgctactcgtgtgctgaaggaggtttgtttctccctccgatatttttttggcgcggatatactagatattgctggcgtccgctactgtcctggagaattggttatcgctccgttttttttgctgcagataggctaacatctactatatctatatccatatctatttaactacgaggaggaggtcttttacaattctgtgcaggtctgttcgtcttcaattttccatgtttttttccaaaaatgggtcgttgttctgttttttcttttaaaaagatggatgcaatgttctatcgattccttatctgtgttaagcttacagtctggactcatgatgttgcctgttgcaatttactgtagtgatctattgacttccagctgatcagtcgttatcgcttgtagaacttctactttgcggtattctttaagttcgacaatgtcatcttattcatcaatcaaatggtggtcatacagattatagatatttatgatgtcatttatatgatgcactacagggcagcttatcaaaacctctgggcacagattataggagattatgctcaggtgcttgcttttga

SEQ ID NO: 149018 - DNA, 799 bp, Zea mays
  unsure (1)..(799): unsure at all n locations
  Clone ID: MRT4577_67429C.1
gacaaggtagtagcaaggaaaagatgtcaagaaaatgagagaacaaccttcttagcttctcctccaatctctctccaccactgctatctcctcggtaggaagaagagcaagcaagagagaagcaagctagctagcggtagcggtacaagggagagtgagcggcgaaggggacggacgaattgaagaacacctgccagtccgatcgagctggtggtgccgccaggataaatcgggaggtatatgatggcgtcgaattcaccggcggcggcgttctttggtgttagggatggggaccagcaagaccaccagattaagccgctgatatcaccgcagcagcagcagcagctggcagcggcactgcccagcgtggcgtccggccagggcgcgccgacggcggcggcggcgcagccaccgcccaagaagaagaggactatgcccgacccagacgctgaggtgatcgccctgtcgcccaagacgctgatggcgaccaacaggttcgtgtgcgaggtgtgcagcaaggggttccagcgcgagcagaacctgcagctgcaccggcgcgggcacaacctgccgtggaagctgaagcagaaggacccgctgcaggcgcagccggcggcgcgtgtacctgtgcccgggagccgacgtgcgcgcaccacgacccagcgcgcgccctcgncgaacttgaacggggatcaagaagcacttcagccgcagcacggcagaaagaagtggaagtgcgacaagtgctccaagcgctacgccgtgcagnccggactggaagggcgcactccagatctgc

SEQ ID NO: 149019 - DNA, 1075 bp, Zea mays
  Clone ID: MRT4577_6742C.1
atttcggcacgaggcttttttcgagggaaggcacgaacaggcacaggcaggcgcgcggcacggggtaggaacccgtcgcgattggcccgtccgacgacgaaccggtcgcgggcctcgtgcccgtggtggatctgactccacctgcgcgcggtcgcggtcgcgggcgccttgcttccccctcccccgctcatcgccgcggcgtccacggggcaatttccatccgcggggcgccgccgtgtcgactccatcttcctcggcggtcaatgcgggcgcggagatgagagccggcggcggggaggaggaagaggaggaggaggtgttctacgagtcgcgagaccgcgtgctctcctcctcctgctcctccacctccgcctcggacgatgacgacaacgaccacccgcgacggcgacgggacggggccgcctctgcggcggcggcggcgctcgacgtgtggacgtcggagccggcgcccgtgcaggagcggcgccggaagctgctccagatgatggggctcgccggggaccccgccctagcgcgcctcgagatgggccgatcggtctcctacgacgggcccgtccgcccggcgccggcctcgcccatcccccgatccagatcagacggcgccgtgccggtctcgtcgaccaagcccccgctgggcgggcggtcgcgccaggcgtcgtcgggctcctccgaggccacgcccgaaggggaggacgctggcccgaggtgcctaatccggaacctcgacgacggcaccgagttcgtggtcaaggaggagttccagctccgcgaggtcggcacgggccgccacttcaccatggaggagtttgttgacctctgcgtaggctgctcgcctatcgtccaggagctcatgcgacgcgataacgtggggagctccggctcgaacaacggcgcgtccacccccatccagaggtccaactccgactccagcaacggggctacgcgccaccggcggcacagcagctggcttcggagccttcgaaacgttgccggctccatggcggtcacctcccgcgaccgccgcagcagcgacgagaaggacacgtcctcggag

SEQ ID NO: 149020 - DNA, 495 bp, Zea mays
  Clone ID: MRT4577_67430C.1
ggtaccgaaccggagttcccggctacgacgtacgctcatatatgactctgcgggtgtgggtgtttgcgagcttttgttgttttgcttttttacttggtttgagtgcaactgtttgcttggatttccctgttctctttgttcttttgttaatctcggaagagtcctaagcggccgatgccttagcttggagtttttctcggctccttgtggatttgtttcttgtttcagatcagttccaagcacatacatatgagaagcgaagaaggggaaggacgaagaacactgccgaccctattcctagcaacgggccaaagcgaccagctgcaggaaggagaagcagtgttggcgcgttcgagctggtggtgccaggataaatcgggaggaagtgatggcatcgaattcatcggcggcgttctttggtgttagggatggggaccagcaagaccagattaagccgctgatatcaccgcagcaacagctggcagcggcgctgcc

SEQ ID NO: 149021 - DNA, 270 bp, Zea mays
  Clone ID: MRT4577_67431C.1
gtggggtgagtggtacccaacgggccggtggcgccgcgtccgcaggatagaggcgcggggtgcaggcttgtaaacatataacatacaaatggcttccagaagagctctggtcatcctggctaaaggagcagaggaaatggagacggtcatccctgtagatgtcatgaggcgagctgggattaaggtcaccgttgcaggcctggctggaaaagacccagtacagtgtagccgtgatgtggtcatttgtcctgatgccagccttgaagatgc

SEQ ID NO: 149022 - DNA, 937 bp, Zea mays
  Clone ID: MRT4577_67432C.1
ggaccctcgaggccggccgagatataggctttggaagggggcgcaggggtggaatttcgggaatcgatttgtagtggggcatgtaagcttgtgggagaggaaagcagcaggagacgaaggtagacaaggaaaagtatgccaaagaaaatgagagaacaaccttcttagcttctcctccagtctctctccaccaccgctctatctcctcggtaggaagaagagcaagcaagagaggagcaagctagctagcggtacaagggagagtgagcggcgaaggggacggacgaattgaagaacacctgccagtccgatcgagctggtggtgccgccaggataaatcgggaggtatatgatggcgtcgaattcaccggcggcggcgttctttggtgttagggatggggaccagcaagaccaccagattaagccgctgatatcaccgcagcagcagcagcagctggcagcggcactgcccagcgtggcgtccggccaaggcgcgccgacggcggcggcgcagccaccgcccaagaagaagaggactatgcccgacccagacgctgaggtgatcgccctgtcgcccaagacgctgatggcgaccaacaggttcgtgtgcgaggtgtgcagcaaggggttccagcgcgagcagaacctgcagctgcaccggcgcgggcacaacctgccgtggaagctgaagcagaaggacccgctgcaggcgcagcggcggcgcgtgtacctgtgcccggagccgacgtgcgcgcaccacgacccggcgcgcgccctgggcgacctgacggggatcaagaagcacttcagccgcaagcacggcgagaagaagtggaagtgcgacaagtgctccaagcgctacgccgtgcagtcggactggaaggcgcactcccagatctgcggcacccgcgagtaccggtgcgactgcggcacgctc

SEQ ID NO: 149023 - DNA, 304 bp, Zea mays
  Clone ID: MRT4577_67433C.1
ttttacaagaacaaaaaactctatcatcccatcccgcccgtctcaacgccaccctagccctgggatatacaatggcggcccacagcacgaggatggtggcgctggccctggtgtgcctcctggtggtggcgacggtcgttgagcccacggccaccgggtacggttgctacgaccactgctacgagcggggcgccaacggcatgaaggacgaccccccctgcaccaagatgtgcatccaggcgtgcggcagcaccgacaatggcgccgtcgcctgcgcgcccgcttgatcgaccccggctttatt

SEQ ID NO: 149024 - DNA, 1139 bp, Zea mays
  unsure (1)..(1139): unsure at all n locations
  Clone ID: MRT4577_67434C.1
cattgggtacctcgaggccggcccggggtgtgcataggcgcaggggggaaaattccagaaattgatttatagtggggcatattagatgtgggagaggaaagcagcaggagagaagagagagaaggaaaagtatgacaaggaaatgagagaaatgggagaacagccttcttagcctctccctccatgcatcctctctccaccactgctatctctcagtagcaagagcaaagcaagaggagagcgagctagcggtaccagggagagtgagatcagttccaagcacatacatatgagaagcgaagaaggggaaggacgaagaacactgccgaccctattcctagcaacgggccaaagcgaccagctgcaggaaggagaagcagtgttggcgtgttcgagctggtggtgccaggataaatcgggaggaagtgatggcatcgaattcatcggcggcgttctttggtgttagggatggggaccagcaagaccagattaagccgctgatatcaccgcagcaacagctggcagcggcgctgcccggtctggcaggcggtgttcctgcggcgtccggccaaggcgcgccgccggcgcagccaccgcccaagaagaagaggactatgcctgaccccgacgctgaggtgatcgcgctgtcgcccaagacgcttatggcgaccaacaggttcgtgtgcgaggtgtgcaacaaggggttccagcgcgagcagaacctgcagctgcaccggcgcgggcacaacctgccgtggaagctgaagcagaagaacccgctacaggcgcagcggcggcgcgtgtacctgtgcccggagccgacgtgcgtgcaccacgacccggcccgcgccctcggcgacctgacggggatcaagaagcacttctgccgcaagcacggcgagaagaagtggaagtgcgacaagtgctccaagcgctacgccgtgcagtcggactggaaggcgcactccaagatctgcggcacccgtgagtaccgatgcgactgcggcacactcttctccaggagggacagcttcatcacacaccgggcgttctgcgatgcgctcgcgcaggaaagcgcgcggctgccgccgacgagcctcagcagcctcaccagccacctntacggcgcgaccagcacg

SEQ ID NO: 149025 - DNA, 461 bp, Zea mays
  Clone ID: MRT4577_67435C.1
ctgtaagccttttttcaaaagaatttttgggaaaggacatttccatctaaaccccaaaaaaaaaacacgtaaagggctctgggctagaaatttcctacatggcttcctgcctgatgctcaattaagctcccccattgaatccaaaaatggattccaactatttaaagccgccccaaaaggccctacctaaaacaaattgggggaagcaatgttttgtaacccttcaacacccacccaaaagccatatggttcccattccaccttgtggtccaaacctttcaaaaaattccatgcaatgggtgcttttaacttgcccccgacacaatggccaccaagtgaaaccaaattcttggcccccaattccccaaaataattttacccgtttaatctgccgccatttacagacccaatgtaggtcacttttggcctgttaaccctgacggcccccttaagccagctgg

SEQ ID NO: 149026 - DNA, 465 bp, Zea mays
  Clone ID: MRT4577_67436C.1
atggctctcatcattaagagctttcgacaaatcctcaaacaaaggaagaggaaggactacaagccccatttccaaaagggtgtgctacaggtgtgtgatagggacagggacggcaacaagaaatggaagaagaataagattgaaaagaggagatactacaagaagaagggtggcgatgcgcacatggggcgaaaatgggactccgacaagagctccatcgattcctcctccgacgaggacgccgccaacatcgccatcaaaaaaggccttctcttccccaacgtcaaccacaaatcactaatggcgaaggacaacaaaaagaagaaggtagaaaaatgtgaaaatttatctaaagagcttaatatgtgcaatgattcaatttcttgtcttagaattgagaatgataatttgactactaagattgaagaattgaatgtttgcaaaaacatctacatctactattga

SEQ ID NO: 149027 - DNA, 563 bp, Zea mays
  unsure (1)..(563): unsure at all n locations
  Clone ID: MRT4577_67437C.1
tgggtaccctnccaggccggccgggaacccctctcccttgcactcctccgacgtacccctttgcttcttccgccctccgacgagcctggctttctcccttaccgagtaggccacgctccatccccgcccgcgctgcctcccctggctaacggcggcgaccgcgcaccaacgaaagcgtcagggaccgccgctgtgacagctcattgcaaacgctgctcgaacggagaacatacgccaatggcgagcgaagaggtggctctacacaccatgccgggggcgtgcaccaaccactccccgtgatgcattctgaaccttcggccagacgatacgagaataaacagccgtaccaattcggggccaaacgccaggacactgcgaggcgtcctaaggaaccggaagctgaggtctcgcaggcggcatgtgccaccgaaccgatgaccggggtacagagaggaacggtgcattgtgtcaaggataccacaaaaaacgctagacaggttcttggcaacaacatcgtgcttgctaagcacaaagcgcacaaggcggtcgaaatgggagtgctg

SEQ ID NO: 149028 - DNA, 130 bp, Zea mays
  unsure (1)..(130): unsure at all n locations
  Clone ID: MRT4577_67438C.1
ccggccgggccgggnagtacttcagcgcccagccatcggaggatttgccgcacgaccatgggctcgccgctgctcaagccgcactctcagttcgtcgcttttgccgccctgaactgcgtgaggagagccg

SEQ ID NO: 149029 - DNA, 320 bp, Zea mays
  Clone ID: MRT4577_67439C.1
caaatattgattggaaggttcacacaaaatgagaactttttgaatctgaattggcaggcaattgttgcgccgtggagaccaggtgagtaatgttcaaataacacattgcggtacgaatattctgggggcgcataaacacaaagaggatggcaaggccacatagatgtacaggatgctacccttatagacacagcagactatataacacgagggggacgaaggcattggcccggtgtgcagtggatgcctgcaatatgccggtcaatgtgacagatattaagaaagataaccaattctgtgaaagaatgtacccactggaa

SEQ ID NO: 149030 - DNA, 373 bp, Zea mays
  unsure (1)..(373): unsure at all n locations
  Clone ID: MRT4577_6743C.1
acccacgcgttcgtnaacataaaaagcacatttatgtacctttttcgtcacccaaaatattttgcttggggatggggcttgttctttatttacgtgctactaccacaaccattttcccacaatgcttacaagcttctatagcttcctttttccccccatacctatgaacacctgcatcctaaatctgataaaaccccattcttcaaccatacatgatccaacatgcatatctcatactgcatcttacctttatcaccacctgttcctacaacaaccatgaatcctatcacatcaattaccctctatgcatttgtaggcacaaaacatcaaggcacaacaactacaacaacttgtgctaagaaaccttgctgcc

SEQ ID NO: 149031 - DNA, 267 bp, Zea mays
  Clone ID: MRT4577_67440C.1
gggggggtaattaacatatatatgaggttttgggtcacgattattttggtccaaactcgaatttggttcttacaaccatcaattattagcacaaccaagcagattacttacaccaaacgagacattttccacacatgccatggttccgggcatgttcttagttggtcattcatacacacacattagttaccaacttctggtttttaccggattttcaaaccatgcatgcattatattttacaaaaagcaatgcagatattgattttt

SEQ ID NO: 149032 - DNA, 605 bp, Zea mays
  Clone ID: MRT4577_67441C.1
accctcgggtctccgggaaaaaaactactgcacgttccttttccacagactgaccgacctccccccttttgactcaccacggttccgcctctccccccttctccctctcgcattcttcctcccccgtttcggggagacgccacgagaaaagagggagcagggaaagaaatcgcctccacgtccacggtgacgccggatcgcgcgtcaaatttctttgccgcggatttggtgctgcaaattttctagaattttttcgttttgtagggggcattattggcacggtatcttagtcctgggcttatattatctgcattttcgtttcccccgattttttcgactcaatttcttaacggatttgggaatcgcggctagggggctctgcattgccggatttgctcgatttcgtgggcgcattgcagctttgcattgcataacgatctttgccttggtcgcccacgttcgcgattctgtctgagcttcctcacccgggctcgtgcatttctccgaacatctccaggtgtctgttgcacaagctctcgcttgttgctccaatttcacgcgttctgcatgcatgtattccccgaaggtggtgccattctggggct

SEQ ID NO: 149033 - DNA, 406 bp, Zea mays
  unsure (1)..(406): unsure at all n locations
  Clone ID: MRT4577_67442C.1
aagctttcatagagaaagatatgggttgctccattgatgctgtgtacacagaatttacggaacggggggggggggtcccantcttacccaggcacacccaacaacgctccacaacggagaaagaacctcatctaacgtttagacgacttgcgctcaaaaactttttgatattgacctagagaacttaaagctagcacctgagtctctcaaaaacaacgaaacatttggaggcctttcaagggactggattgttctttatgaggaatgtaccacaattgtatatgaaaaaattgattacatcaatgaagaagacgatgcgacaagtctccgcgggatctcagaatataaagagggtacccgggccactgatcatgtaggactacacaactgaaaagtgctaaccctc

SEQ ID NO: 149034 - DNA, 576 bp, Zea mays
  Clone ID: MRT4577_67443C.1
atgaacagtacttgtttagaaacaggttctgagatccattccctgttagtaacagagcatggaattttaacagctaggggctcatcatgttcaatgattcggagagggtcaaagcctctattagccatattagctagtggtgtcaatttggaactgttcttacaagctcattgctccatagtaaatattgtctaagttctaactctaaaaaagtaaaaaggcctagcataacatagtaggaaaccatgctcccataatcacatctgagaggccttgacatgctgagcgaatcttgagtgtctgtgattcataagggcttctgggtttccttcttcaaccagttttccttgatcaagaactagaatattgtccatcttcatcactgttgaaatacgatgcgctatggtgagaacagtcatgcctttgcattcagcagaaatagtattttgcaacagggaggctgtttggttgtcaacattggctgtgcattcatctagacaaagcaccttggatgattttaggatggctcgggcaaggcataggagtgccgctgccctactgaaaaagatctcgtgc

SEQ ID NO: 149035 - DNA, 2094 bp, Zea mays
  Clone ID: MRT4577_67444C.1
gaggggggcgagccccatatccatcccgccgtccctccaagccgccccgacccccgcacgcgccgccccccgccgtcgccgccggcgagccgtcggcgatgggctccgaccagggcttgcctccccatggcgccccctggccgcagagatcgatacggttacgcccaccaaatgccacagcgccatcagatgcacaactggtggacgcctcctaccagccgcccccaccgggaacggagcatgctgctcccgtggccgcctcctcgtcgtggtcgtccgcagcgggatcatccgacaacgcacagtagggcgggccaggggcggagcctttggccgtccccgcgctgtcgcagcccaccggcatcgccacctcgatcgggtggtccgggggcgacgtgggacacctgccgtactacgacccgcagtaccagacgccgcagcatcccgcggcggttgggggtggtgtaggtccactcaacggtgtcaacagaggtcgtgggccttcgcaaggtggagagccactgtattttggctttaagagtatgggagcttctttggttgagcaggaggcatatctggctggcgcgatgcagcacgtgttgcccgttcttccacaagctggtccaaccatcatggctgctgattatcctgcacaaccggtggctagcaatctgtgctgctagcaatggaagacctgtaactgcatcactgtgcacagccgttggggaagctgaagtgagaatgtgacaggcatgcctgtatgtgccccgcatgatgtctactgcctcacaggtttcattgcttttcggtgggggcgactggagagcaaccgaattcgtagtagaacggtctgtgaacaatctgaatattatggctcgcctgcaaggtacgactcctgctatagctgacatgggtgctccatcatcttctcagttagctgaagtagaaggcccctctagttcagtacatatggtcccacctcttggttcaaccagccttagtggggagcacaaagacttggctccagaaaatgtcggagcttcagtttatggggtgcaaattactgaggtgccaggcagttcttccaagcaaaacaaaacacatcatacatcaacagttggtcacagtgttgaagcacaggtagagctgcatgtcgctgttcaagcttgtcagccttcaaatgagatgaaagatggcggtgaagccccaccaaatgcaacaggtccatcaaatgcacaactggtggaagcaaggatgggtgtcaacggcaacaacaatggctcaaagaggaaaccgacaggagctggccgtgggggaaagaagctgagagtgtctgaagccccacggcaaaggcctgagcgagtaagggagcaaccgctagtctgcaccatttgcaacgcgatttgtgatacaagagctgtatttgacatccatctggttggtaaaaagcatcaatcacgactcaagcgttctcaaggcccagacgtgttgttcggtcctttggttgggcatattcctccaaaccagtccgcagctcacatgacaggagcccctgagccactgtattttggctttaagagtatgggagcttctttggttgagcaggaggcatatctggctggcgcgatgcagcacgtgttgcccgttcttccacaagctggtccaaccatcatggctgctgattatcctgcacaaccggtggctagcaatcggtgctgctagcaatggaagacctgtaactgcatcactgtgcacagccgttggggaagctgaagtgagaatgtgacaggcatgcctgtatgtgccccgcatgatgtctactgcctcacaggtttcattgcttttcggtgggggcgactggagagcaaccgaattcgtagtagaagtagtactgaacaatctgaatatcagatgaaaccatagaactcgtctcccagtctgcaaaatgcacaaggcttccgtcgaattgctagtagtactatgatggaacaatttggttgacataggcctgggtgtatgtctgcaaaacgcttttttaaagtcggtctcaacagcgactttttatgatacattgtgttaataactgtgacaacc

SEQ ID NO: 149036 - DNA, 807 bp, Zea mays
  unsure (1)..(807): unsure at all n locations
  Clone ID: MRT4577_67445C.1
ctcaaagaggaaaccgacaggagctgcccgtggtcgaaagaagctgagagtgtctcaagcnccacagcaaaggcggcctgagcgagtaagggagcaaccgctagtctgcaccatttgcaacgcgatttgtgatacaagagctgtatttgacatccatctggttggtaaaaagcatcaatcacgactcaagcgttctcaaggcccagacatgttgttcggtcctttggttgggcatattcctccaaaccagtccgcagctcacatgacaggagcccctgagccactgtattttggctttaagagtatgggagcttctttggttgagcaggaggcatatctggctggcgcgatgcggcacgtgttgcccgttcttccacaagctggtccaaccatcatggctgctgattatcctgcacaaccggtggctagcaaccggtgctgctagcaatggaagacctgtaactgcatcactgtgcacagccgttggggaagctgaagtgagaatgtgacaggcatgcctgcatgtgccccgcatgatgtctactgcctcacaggtttcattgcttttcggtgggggggactggagagcaaccgaatttgtagtagtagtagtactgaacaatctgaatctcagatgaaaccatagaacgcgtctcccagtctgcaaaatgcacaaggcttccgtctttacagacatgcgttcaacttccaccgaatggctggtagtactatgatcatatgatggaacaatttggttgacatagacctgggtgtatgtctgcaaaacgcttttttaaagtcggtcgc

SEQ ID NO: 149037 - DNA, 564 bp, Zea mays
  Clone ID: MRT4577_67446C.1
gggcaagggggaaaaaaaatttccccccacaaaagggaaccccggggaaactttgaaaaaaaactaaacaggccccccgtttttggatactggccccaagggcccaagaaaagtttccccaaaggttataaaaactaaagccgggggcctttaattccccctttttttgggggggggggggggcccccccctcgacggccaaaaaaagcgccgggggaccgggccccccctcggcgggggggaaaagggaaacgaacagttgggggggggggggaacccccgggagagacagccccaggggcgggctttccaacggggaaaaaccgggggccttgaaaaagggccggaaaaaaaaacccccccccatatccctttcagggagcccgttcccaaaaagtcccagagatttggaccccgggggcccgggggaaagggcccccccccccttgggccggtccagcccgggctttggggggaccccatgccctctagggccctacccgggggggggccaggggaaactgggtgccaaattttgcgggggggccccgggggggggccccc

SEQ ID NO: 149038 - DNA, 274 bp, Zea mays
  Clone ID: MRT4577_67447C.1
ccacattattcctttctgggcagttttcttttatcttttttggtctccaaaacaatctttattttaattctatataggccgaaaaccaaatcttgcctcaaaccccatatgaatccccacaatttcatcaaacacaacgtccctcacagggaggccaaaacaccactcccccatcagtattttaagccccccactcacccattttgacccccaaacattaacccccaacgggcaaccccgggcaacctttcaacaatgctacaaaaccccactc

SEQ ID NO: 149039 - DNA, 273 bp, Zea mays
  Clone ID: MRT4577_67448C.1
aaaaaaaaaaaaaaaaaaaaaaaaaaaaaaaaaaaaaaaaaaaaaaaaaaaaaaaaaaaagagaccattagaaaaatatgcaaacttacctcctccttcttactccctcattcctcttttttaatctcacctaatttcaattcactttccttaattttacaacttccctactttaaaaaccctatctttacccaacttaatcacctttcaaaactttcccttttcaccattaccctttatagataatactctctttacttatctcccttccca

SEQ ID NO: 149040 - DNA, 536 bp, Zea mays
  unsure (1)..(536): unsure at all n locations
  Clone ID: MRT4577_67449C.1
gtaccctcgggcttgccgcgtgctgtggtgcttaccgtttgatgatctctgagtcgattaggacattcggtggctcctgattatgtattcatttacagctaccatctctttgttatgcaagagcttgctctagggcgggagagcagcaaaatgatggttttttggggtgtcgtggatctgtttatggagtgcggtactcacgacgggagaacgatttggggatcgggaatttgggggcgtcgcctaagtatgactggatttcaaatgtctcgtgaaacattccagagaatggaaagtgaatttagcatggtctgtttgtcgaactctgtgagtcagcttatcagcatggttgtgtaatctacaattctacatatctagtgccaatagatgtattagggaatgtattgatggtagagctagataggcgatagctgagtccgtttgattttgaaataagggtgtggattcaacagttgagctatgccttgaaattaagttgntaatcttgttgcctactagtaggagtatgttaagca

SEQ ID NO: 149041 - DNA, 291 bp, Zea mays
  Clone ID: MRT4577_6744C.1
aaggggaaacacccggaggcaccggaccggaacaaccgggacgacccacgcgcccggccagtttgacgaccagccccacccggccaaccgggggggcacgggcgaacgggccgaggaccacaccgagcgcagcaacgcgcacggggccggaggcgacaacaccaccggaaacaccgaaccgccaagcgaagagccggcccagaacgagcgccgacacgccaaagaaaaagagcacacagagggaaacaagacggaccggaaagccgagccgagcggaaacacgcaggacac

SEQ ID NO: 149042 - DNA, 275 bp, Zea mays
  Clone ID: MRT4577_67450C.1
aatattcgtctagcgctacgtctattcctcatctcgcggatggcgggggcgtcctatctgtgttgctgctgctgaatcgcacgacgaacgcgagcagtgtcgaaccctaccaaatcacagataatgggttcttgggaggggaatgttaggcaatttttgttggaggaggaggaagatgatgatgaactattctttgttattctccctgctataatcccatacctctcggaagagaaaagaccgattcacacatttcttccttaccggtgcttaaa

SEQ ID NO: 149043 - DNA, 173 bp, Zea mays
  Clone ID: MRT4577_67451C.1
ggtatcatgttcaaccaacatcattatgaaattaattagattcccatggccatacaatggccttgaagaatatatatatatttttaaagtagcttgagcagcaaattggcaggtcatatttcatacctagattacgactctgacttggattgtgcattataatgatatgcccc

SEQ ID NO: 149044 - DNA, 1681 bp, Zea mays
  Clone ID: MRT4577_67452C.1
cgtccggtaaaacaagctgagactctaacttcaaaggaagatacacacacaaaggacagtgagaaggaggccaagaagcttgctcgcaaggcgctagggaggaagaagacaaccacgcactattgctgttgcttgtgcttagtgtgtgctcgcggctagaagcagacaagcagctgcgggagcataagggcggcatggcttcttgcggtagcttctactttgttcccttgctcctgctgatgctcctgctcgcttctcccgccactgctgcactggtgacatcctcccagcctggcggcaatgccactgctgcaaggccgaggccggggatggagcagctcaagcgcaagaggatcagggctctgctcaccaagcttaacaagcctgctctcaagactatccagagctcggatggcgacatcatagactgtgttccctctcacctccagcccgcatttgaccacccaaagctcaggggcgaaaagattctggatccgccggagaggcccaagaaccgcaacttcacctttggcggcagcggcagaagcagggtcggcgaggtggtggtgcaggcgtggcacgccaccggcgaggcgtgtccagaggggaccgtgccgatacggcggacgacggagaaggatctgctcagggctagctccctcaggaggtacggcaggaagccagcgcgccggggtgttcgccgtgattccacaagcagcggccatgagcatgcagttgggtatgtaaactcagaacagtactatggggccaaggccagtgttaatgtgtggtcgccaaggataggtgacccatctgagttcagcctgtctcagatctgggtcctctctggctccttcggcaatgatctcaacaccatcgaagctggatggcaggtaagcccagagctatacggagacagtaacccaagattcttcacctactggacaactgacgcgtaccaagaaaccgggtgctacaaccacaattgccgcggattcgtgcagacgacgaacaagattgcaattggggcggctatcaccccggagtcggtgtacaatggcaggcagttcgacatcactctcatgctatggaaggacccaaagcacgggcactggtggctggagctgggcccgggcctcgtagtcgggtactggccgtcgcacctcttcagccacctggctcgccacgccaacatggtgcagttcggcggcgaggtcgtcaacacccggccgtcggggtcgcataccgcgacgcagatgggcagcggccacttccccagagagggcttcgaccgcgccgcctacttccggaacctgcaggtggtggactgggacaacaacctcatcccggcggccaacctgaaactcctcgccgaccatcctggatgctacgatatccagggaggcactaacagctactggggaagctacttctactacggaggacccgggaggaacgccaaatgtccctgagatcaattcggaccggatgtctctttcttgttcgatgttcttttttcgttgccctttctaggatttggtaggtcttatacgtctttaacgaaagaatgcatccacggttgagacttgggaggaatttgtaaatttggcaagtacctgttatatttaatatccctatggctcatattttattttatttatttaaataacccctgggtaca

SEQ ID NO: 149045 - DNA, 672 bp, Zea mays
  Clone ID: MRT4577_67453C.1
acaagttatactatattacaatatatcattggagtgattacaagagaatttgattcaaaaatattacaatttgaatgtataaaacatttataagttttaaaatacatgctagcttaagtgacagtcctcaataaagaagctaaagatgggatatacttatataagaaggctgagcccaccggcacttagcaccatccacaacagaacaaaaatataacctgggataacactacgttagtgttgttaattgacgaccacttggtgaccatattcatctcggcacttgataggtccatctctcattaggtcgattcgtcaacattgtttgtcggagtagttcatcatttcatcatcttgagatcaactcggctcttgaactccgcctcacgtgatcagctagcgtacgtcgagcacatagcgagcgtcgcactggcctcgcttcttctccatccaaaaacctgagatctttctctcatgactaaacacggcgacgacgtcggggctgcggacggtggggaggagcaaagggtatggccgaccaacaaggatgcagggagcaccgtggtgaaggatatggggggcagggcgagctcgtccatgggagaggcaaagagcagtgccgtaagatggagtagggacggcggccatcattaaaaagggctgggcgtggga

SEQ ID NO: 149046 - DNA, 321 bp, Zea mays
  Clone ID: MRT4577_67454C.1
cgtatccactcctatagggcgattgccttcatacaggccggccgggtagcagcttttccccaggatcggatcataagaaaagaatagctaggtcccggtggtcgatcgaacgaatctgctgctgctaccggccgaccgggcatgacgctgacacggacgatgcgcctaggactgctgcttgtactactggacgacccctctaccgcgacggtgccattccatcgccatcgatgcgcatgaggacctcgtgaagagtgacagaggagagcacacctcgggaacaacagtgccgcggtgatggatgaccccatctcccttgaa

SEQ ID NO: 149047 - DNA, 232 bp, Zea mays
  Clone ID: MRT4577_67455C.1
cggacgcgtgggcggacgcgtgggccagtccctccccacgccaacatccctttcctacggacgctgcccctctctggtttctggtggccggccacctctgctgctcccatggttcgttaattgatcacgtgatgcggacgacaagagccgagttgatcccaaaatgatgctggtgaacgaacctgaagcttggatgatctggtcaagtaccaggacgagagatgctccccaa

SEQ ID NO: 149048 - DNA, 372 bp, Zea mays
  Clone ID: MRT4577_67456C.1
ccgccttttttttttttttttttttttttttttttttttttttttttttattttttttattttttttttggggggtttttattaactgtagagggacttattttattttcttttttatttttttcaccacaatataacttttgttaattattttcaccataccatcaccaacgtaatttatgaactttaactccataacaagcgcccgaaaaaaccccataaaaacttagtatttgctcaccaaactcaatgaccatgtgagaggtgtgactgtacatcactgccccataatcaaaaacaatctgacaaaggcggggggtgatgatgacataagcccccaaccaaaacaccatcagggtaattcttcccccg

SEQ ID NO: 149049 - DNA, 613 bp, Zea mays
  Clone ID: MRT4577_67457C.1
aaggaagtagcttcttacgtcgcctcctccctaggcgccgatcctacagagcctcgctggtcatccctgctctctcgacgtctctcccatggcgccctccccttcctgccatggccgtccctccctgctgcagctcgacgctcctccctggagctcgcccctgccctctgtccagcgccctccctgctgcccatggtatggacgccagctccctctcttgttgccatggatagcccctcttccatctccttccccaagcacaagtcccatggtcgcccaacctagctcgcccagccacctctgctactcccatggtacgctagataattatgcgaattggagggcatggatcaggatggatcacaaggtggctttgatggacccatctcgatatggacgacttgaagaagtgttataattttgttctgttatggatggtgctaagtgccggtgggctcggccttcttatataagtatatcccatctttagcttccttattgaggattgtcacttaagctagcatgtattttaaaacttataaatgttttatgcattcaaattgtaattcttttgaatcacttgcttttgtaatcaactccgatgatatacatt

SEQ ID NO: 149050 - DNA, 460 bp, Zea mays
  Clone ID: MRT4577_67458C.1
gcagcggaaataaattctttattgcaaaatgattacatgttacaataagtttacattatacaattatcggagtgattacaaaagaaaatgattcaaaagaattacaatttaaaatgtataaaatatttataggttttaaaatacatgctagcttaagtgacaatcctcaataaagaagctaaagatgggatacacctatataagaaggccgagcccaccggcacttagcagcatccacaacagaacaaaattataaccatagtcaatccccacttgacaccatgagattgacgatgatttttggttggggcctccaatcggatgcctagcaagcgtcacctggacctcgcttggctttcacccaacatccgggattctctccccgccaccacaaatacataaagacacttaattaaacatccaggtatatgcaccaacgcgaacgaaccccacgcgtccg

SEQ ID NO: 149051 - DNA, 748 bp, Zea mays
  unsure (1)..(748): unsure at all n locations
  Clone ID: MRT4577_67459C.1
ttgggtacctcgaggccggccgggctcggttgtcggggacccgttctggtcttgagaaacccgtgggcaagttgacatatgcaagggttaagtgctacatatgtcgtgtggttggagatccccagctgggtattcatggattcggatcgccgaacttgttggatatgaagactggatcttcgaccttcagcgtagataataagtgaaactaaagatgctaaaatgaagctaatataggacaagtgaatgctctagatcaggcgaatctagattcaggaaaaataattaacttgtgaagtaaaagtttggcttaaggatccactactagtaagcttttctgcaaaatgagtctttgaaatttgatgagccttaccttgaatccttttaaaaccagcatacccttgagagtcttttctttagtcgggtaagtcttgctgagtaattgcgtacccagggttttattccctgttgtttttcaggtcataattttgttctgttgtggatgctgctaagtgccggtgggctcgaccttcttatataggtgtatcccatctttagcttctttattgaggattgtcactttagctagcatgtattttaaaacctataaatattttatacattttanattgtaattcttttgaatcactttcttttgtaatcactccgataattgtagaatgtaaactttatgtaacatgtaatcattttgcaatanaagatttaaaaaaaaaaaaaaaaagcggcc

SEQ ID NO: 149052 - DNA, 394 bp, Zea mays
  Clone ID: MRT4577_67460C.1
gcagcgaaaataaatgctttattacaaaatgattacatgttacaataagtttacattatacaattatcggagtgattacaaaagaaaatgattaaaaagaattacaatttgaatgtataaaacatttataagttttaaaatacatgctagcttaagtgacagtcctcaataaagaagctaaagatgtgatatacttatataagaaggccgagcccaccggcacttagcaccatccacaacagaacaaacttataatcctgaaaaacaacagggaataaaaccctaagtatgcaattactcagcaagacttacccgactaaagaaaagactctcaagggtatgctggtttgttgggaatcaaggtaaagctcatcaaatttcaaagactcgtttt

SEQ ID NO: 149053 - DNA, 610 bp, Zea mays
  Clone ID: MRT4577_67461C.1
ggattgcaaaatgattacatgttacataaagtttacattctacaattatcggagtgattacaaaagaaagggattcaaaagaattacaatttaaaatgtataaaatatttataggttttaaaatacatgctagctaaagtgacaatcctcaataaagaagctaaagatgggatacacctatataagaaggtcgagcccaccggcacttagcagcatccacaacagaacaaaattatgacctgggatacactaggttagtgtggttagatgacgtccgcttggtgagcatcaacaatcctgacacttgatcaagtcgtccatatcgagatgggtccatcaaagcaaccttgtgatccatcctgatccttgccctccaattcacataatcatctagcatacctattggagatgcatagtgcatatgagcatgagcaagaacacaaaatagataatctatactaaagaggataaatacttaaaataagtcatcacaattcgtattagcacactatgtgaagatattactaagtaccacaagcgcatcttttacacttaagtatatctaactcaagcatcgagcaatcataagattacacacaagtcttaagct

SEQ ID NO: 149054 - DNA, 783 bp, Zea mays
  Clone ID: MRT4577_67462C.1
gcagcggaaataaattctttattgcaaaatgattacatgttacaataagtttacattatacaattatcggagtgattacaaaagaaagtgattcaaaataattataatttaaaatgtataaaatatttataggttttaaaatacatgctagcttaagtgacaatcctcaataaagaagctaaagatgggatatacttatataaggaggccgagcccaccggcacttagcaccatccacaacagaacaaacttataacctgaaaaacaacagggaataaaaccctgagtacgcaattactcagcaagacttacccgactaaagaaaagactctcaaggatatgctagtttgttgggaatcaaggtaaagctcatcaaatttcaaagactcgtttttgcagaaaagcttactagtagttgatccttatgccaagcttttacttcacaaattaagtacttttcctgaatctagattttcctaatctagatcattcacttgtcctacactagattcattttagcagctttagtttcacttgttatctacgatgcagggcagtgatccagtcttcatatccgagaagtaacggcgatccgaatcgattaatacccagctggggatctccaaccacacgacatatgtagcacttaacccttgcatatgtcaactcgccaccgggtttctcaagaccagaacgggttcacgcgacccgagagcacagtactccaccgtccagccattggcctggttggtacacgttaccggacgctgggcggacgctggg

SEQ ID NO: 149055 - DNA, 1495 bp, Zea mays
  Clone ID: MRT4577_67463C.1
atgagattggacacttagaaaggtcaaacagtacaaaacaataatgctgtccagatttggacagaattcaattatccacttcaaaactccataactagagatttaggcatccaaaacaggtgatcttagactttctagaaagcttataaaattatctacaaatcctttataaacatttcaggttgattcaatgtggatcaaagtcagctaatacaaacaaacttctctgtccagatttggacaggtttggacatcacaattcaaacagctgtaactcaacttttccatcaccaaaaaaggtgatccaaaacttgtctcgaaagcttaagacaagtactacaattctcctataattactaagagctgattctcagtttaacttggacaaacaaggtcattttcgaaatcagtacagaatctggacagattctgaaactggactttgaaaaatcataactcctaaactactaaacctatggtcataaaatttttacacaaccaggataaagaagttagctacaacttatatgcatatcatctcttcagaaaacaaagtttacttcacttagctacctgcatattaaaactgtgcacagtccaaacagcaagtccaaacaacaaaaattcaatttagttcctattttggttaaccacagcttaccaacgcatcaatcaaagcattccttgcctaaacagaaccatcctctgtgttttataacattcatttaattatacttgacatatgtactctctaaagcactcctcgtaaaacctgcacctaatacctaaacttcccctcaaacaacacttctactatccaatcatgacgtcaaaaaaattcatggcacacaaccaaattatttcatcatacatcaaataccattacagcaataattatataaccaaatcattcattaattaagtagtcggagaaatgacttggctcacgacatcatgctccgactcgatttcagcaagaacgaagacggccaccagttcgagcatatcatcgaacacctaaggagcgttgaacttaaccttcttctccacctatttctccaaggattttactcatgggagcagtagaggtggctgggcgagctaggttgggcgaccatgggacttgtgcttggggaaggagatggaagaggggctatccatggcaacaagagagggggctggcgtccataccatgggcagcagggagggcgctggacagagggcaggggcgagctccagggaggagcgtcgagctgcagcagggaggggcggccatggcaggaaggggagggcgccatgggagaaacgccgagggagcagggatgaccggcgaggctctataggatcgccgcctagggaggaggcgacgtgaaggagctggcttcctatgcgcaggggatgagggagagagcacgggtgaagaaactagaagcctctttcttgcatacacggataagaaggaacgatagtggccaagtgagaaaaaaaacccggg

SEQ ID NO: 149056 - DNA, 369 bp, Zea mays
  Clone ID: MRT4577_67464C.1
cccatatccgctcccctacctacacagcagcggccgactacgttgtttggtagttgcaactcacctcaacgccaggcatgggcaagatcaagatcggaatcaacggattcggaaggagcggcaggctcgtggccagggtcgacctgcacagcgaggatgtcgagctcctcgccgtcaacgaccccttcatcaccacggataacatgacctacatgtgcaagtacgacaccgtgcacggtcaatggaagcacagggacatgaccctcaaggactccaagacgactttcttgggtaagaagccggtcaccgactttggcatcaagaaccaccatgagatcccccggggagaggcaggcgctgactatgtcc

SEQ ID NO: 149057 - DNA, 213 bp, Zea mays
  Clone ID: MRT4577_67465C.1
cttttagctgcagaacaggctacatactcttcgaaaaccgtgcagtccattcatatatattcctcagaagagtcgccgtattacatgatgattggaaaacgaatcctgattacatatgtgtccaggctgacttgtcagactgctgccctatatcgaagtgaacatagtgcatgcatatccatattgcatagtccatgcagagtctcaagagac

SEQ ID NO: 149058 - DNA, 364 bp, Zea mays
  Clone ID: MRT4577_67466C.1
ccccgcttaattttctctgggggtggggtttttttaaggaggatggggccccgcccatggctctatttttaaatacacaccggacttgcatgtctggaagcatccatttgctcttttccaaaaacaaaaaaagccctgcccacgttttgggttaaagaattctgggcccccgattaattggcagcgtccggtaaacccacccctaatacaaaggggatctttatgcatgaagagcaaagggccttccccactctggcaaatttccgggaagccaaccctgtgctggccgaagacaacccccggggggtaagcccccaggaagacctccccaataatccagaggggcccactcggggggggcccg

SEQ ID NO: 149059 - DNA, 2034 bp, Zea mays
  Clone ID: MRT4577_67467C.1
ggaaagaaggtctacatacaaagagacgcaggaaccacagggtgagaaagtagaagaggaggtggaggaggggtgcgaggacggcgaggaaaatgaaattggtgtcgatagcgaggtggaagaagaggcggtgaaggagaaaaaagaaaaggaggagacggtgaaggagaaaaaggaaaagaaggacatgaagcaagagggaaagaaggcgaagaagcaagaggaaaagaaggcgaagaaggacaagaaggaagaggaaaaaaaggtgatggaggacaagaaagaagaggaaaagaaggcgaagaagaagagcgaggggagtggaatcctgtctaacaagctcttctcggagctccccctctctgagctcactgccaaggccatgagagagatgaactacacccacctcacccagattcaagctagatcaataccacatctgttggaggggaatgatgtgatgggcgcagccaagactggctctgggaagactcttgcattccttataccagcgattgagatgctatatcacacacacttctcaccgaggaatgggactggagctattgtggtttgcccgacacgggaacttgctatccagacacacaatgttgccaaggagttaatgaaatatcactcacaaactctcggatatgtcattggtggtaataatcgaagaagtgaggctgatcagcttgcaaaggggatcaatttattagttgctaccccaggcaggcttttggaccatctacaaaataccaagagtttcatatacagaaggctaaagtgccttgtcattgatgaagccgatcgcatacttgagcaaaactttgaggaagacatgaaacaaatatttaaacgccttccccagaataggcagactgttcttttttctgctacacaaactccagaggttgaaaaatttgctaaactgtcatttgagaaaaatgaagaaagtaaaaaaaaacctgtttatgttggagttgatgatgataagtcaaaggctactgttgaaggcctgcagcagggttattgtgtcatttctagcgataaaaggttcttggttctgtatgctttcctaagaaagaagcggaataagaagataatggtgttcttctcatcatgtaattcagtaaagttccacgctgaacttctgaatttccttgggatagagtgttctgatatccatggaaaacagaagcaacagaagcgaactactacattctttagcttttgcaaggcagaaaagggcatcttattgtgcactaatgtggctgcccgtggacttgatattcctgacgtggattatatcttgcaatatgaccctccagatgaaccaaaggattacattcacagagttggtcgtaccgcacgtggtgagaaaggcaaaggaagtgcattgctgttcttactaccagaagaactgaagtttctaatttacctgaaggcggccaaggttaccctgacggaatatgagttcaatcagaagaatgtgccaaatttgcaatcgcagcttgagaatattgttggtgagaattactttctgaaccagtctgccaaagaagcctacagatcctacgttttggcatatgactctcactctatgaaagacatttttaatgtccatcaacttgatctgcagaaagtagctgcgtcattcggtttcaagaatcccccgaaagtgaacctggacctggatagcagtgcggcgaagcatcggaagaagatgaggagagtagacggtgggaagaggcatggcatcagcgcttcgaacccgtacgggaggaaggacaaaggcggtgccggcgataaacgacagttggcgagattctagaaaggaaggaagcaggagcgtttcactattgttgtgttcgtaccagggctttgattgatgttacctggcttgggaaaaatcttgacaggccactaagattggctataaattttgggttgtcttgatatatttggtgtgtaacgcaatcagcctgctcgatgcgaaaattggattattgctttatagtacttgtggtttcc

SEQ ID NO: 149060 - DNA, 325 bp, Zea mays
  Clone ID: MRT4577_67468C.1
aacgttattgattacccgttacattacaattatgtaaaccaaacaacgcacgtaatgagcggggcacaacgcgctagacagggagcaaaactaacaagagtgtgactgcaccccagatggatggccgcacgggaaaggcttattcagctcaagatcaaaatataattgctcgggctgcgcgtgtatttgagaggagtaaacccccacaaagcaaaacagctgggttatatcaaagaccatacgggcatcgtaaaggtaagaaacagcaacacaccgaagctggtgtgtccaatgcgacagcgtggaacagcatggatccgcccat

SEQ ID NO: 149061 - DNA, 252 bp, Zea mays
  Clone ID: MRT4577_67469C.1
cgtagggttccctagtcgagcctgaacagtatggcattcctcccacttggggactagattgaccttagcccacaagcacagttgctacctggaaacccaggaaccaaggaccattcagtccctaggggtagatttcgcactttatagttgcatcctttggcaatccaagtcccctaccccatagacattaacatattgttgcctgaatctggaaatcttcctcatctccctagccccggagtccagggcatg

SEQ ID NO: 149062 - DNA, 280 bp, Zea mays
  Clone ID: MRT4577_6746C.1
ttttccagcaaaaaaaagcttttttttttccaaacccgtaattttttttcaccgcccaacagaaatttacatgccgggtccagttaagttagcaaactggaagttgtacaaaaggttttgccggtaccaaaatattttttcctttttcagatttgttttgccccacagttgactttgaaaattgttaaccaaggccctcacaactaaggaactgtttggggggggttttgaatttttggataccaaagtcaggaccagattggttccaacggtaaaacaa

SEQ ID NO: 149063 - DNA, 317 bp, Zea mays
  unsure (1)..(317): unsure at all n locations
  Clone ID: MRT4577_67470C.1
gggacccagaaggncgagnngcanngnnanccgggggcaacncgacgacactgggggcaanncacnncncgncgaagccaccancnnnagangcacaccnccnaccagnngaacccccagaaannnccncccnganggggagccgaggcanagagaaannagcgngggacacnncaggggaacgncnggcacngncgnncagaganggaaacgaaangnaccgnggccngancgcgananangacgngcggagancnccacncgncncacnancacnaggcgggnncaaccggggaccnggagaaggagcaaagccg

SEQ ID NO: 149064 - DNA, 260 bp, Zea mays
  Clone ID: MRT4577_67471C.1
atattacacatgccacaggcaaaagatgtgtgcagagaataaaatgcagaggtcgatgccaatcttttgcttgcttattgacatggtcaagactgatcagaaatggaaggggatattcctagcacacatactcactaattggtctaagggtttcatacactactcttggcgcaagctccatatgcttgcgcaatgcattattaccttaagcaccattgccacaaccttgctgacgttcttaatatccaaacctgctccaa

SEQ ID NO: 149065 - DNA, 624 bp, Zea mays
  Clone ID: MRT4577_67472C.1
atggctgacaaggtgactatcattccgccgcgtgacccgtggcctttctccaccgtcactgtggaggatctggagaccctcattgccgatggtctgctccgtcccctctttgttgtgctgcagccggagtggatggccccctcaagcgaggctgacccgactccgccgccggggtatgtgcttagtctcatccccttccatgagcgggggttcggagtgccagcgagtcgcttcatgcgggcactcctgcaccactacggagtggagctgcataacctcaaccccaactctatcgcggtttttttggggattgaccctcactgggacctgtggacccatctcttttccgtggagttcttcgccgcgacgacggaggtgaagaaggtccgtatggcggtgtgggccgatggctgcaccctccagctgaggccagggcgcgcgcagcagtacatccctgccacccttgcatcttcgaacaaggggtggcagaaccagtggttttatctccgaaacgacggcgggatgcttccgccgttctctcaacgagtggtgaccgccgccggcactaactggcgctggggggccacgcgcgagaagcaggagaagctccagcctatcctatag

SEQ ID NO: 149066 - DNA, 3054 bp, Zea mays
  Clone ID: MRT4577_67473C.1
atggctgacaaggtgaccgtcattccgccgcgcgacccgtggcctttctccaccgtcgctatggaggatctggagaccctcattgctgatggtctgctccgtcccctctccggtgagccgcagccggagtggatggctcccgcgagcgaggctgaccggactccaccgtcggggtatgtggtcagtttcatccccttccatgagcgggggtttggagtgccagcgagccacttcatgcgggcgctcctgcaccactacggggtggagctgcataacttcaaccccaactctatcgcgcaagcggccatcttcgcggcggtttgcgagggttttttggggattgaccctcactgggacctgtggacccatcttttttccgcggagttcttcgccgcgacgacggaggcgaagaaggtctgtatggcggtgcgggccggtggctgcaccctccagctgaggccggggcgcgcgcagcagtacatccctgccacccttgcatcttcgaacaaggggtggcagaaccggtggttttatctccagaacgacggcgggatgcttccaccgttttctcaacgagtggagaccgccgccggcactaactggcgctggggggccacgcgcgagaagcaggagaagctccagcatatcctgcaggccttgcagaagttacgagatgcgagccttaccgctgcgggggtcgtcgccgctatccatcgtcggagggtgctccctttggtcgagcggcggttgctgctcgcggagatgaggccgggggtcgattcggaggactcgcggatgtcctcgacctccctttccgccgaggacctcctcaagcgggtaacaaatacggtagggaggctgcatgccggcgcccttagccagctcgcgatgcgtcccgaccgtgggtatgtgtctctggggttgaggatttatagacccgtccggccaccggtcctggaggacgcgacggaccgagccatgcggaggcttgccacagagaaggagaaggagaagaaggacacgaaaaaggcccaagctcgcaagaggatgctagctcgggaagccttggagaagtgtcgtcggaggcaggcaagggatgggctcccgagggagtcgtcgccggagacgcctgacgatgacgatgatgatgatgacgatgacgaagatgacgacatggcggcccgacttggcctcagtccggacccgaggctgggccaggggtcgccgagccagcctccaagtgggctggcaccatcagtgcctggggccgggacaccaaggtcccaatctgaggagcggaggcaggctgagggggtacttgaccccttggccgaggtaattgttgtgactccggggggtcaagccgatctgcccgtcccccaagagcaggtgcccgcgctggccgcacaggaggccggtccctcggccgtcgtgacgacgcctgggcaggccgctccctcggtgcctcgggcgtccgaggcggaaacggtgtcgaagccggcggtagggcaaccttcggcagcgcgtgcgggggtaggggcccgaggggcctccccacaggcacgattggccgtggtccggagcaggcgcccccagcggggggcccaggcggcacgagttgccatggggcaagcctccctggctgacctccctgttggggcggccatcgtgccgggggaggtcgctgacgcggccgcggcctcgagccctcctgacttgttgtcggcgccggcatcgacccctgccggggccatcactgattcgcccgcggagccgcccgtcgccgccgacgtcgggatggttgaggcaccgccgcccgtggtcattcccgacctccccgttctcggccacgaggagggggcggtcgtcgttgccgaggttggcgatcggaggctcgccaccttagccgaggagaggcccagcacatcgacggcggtgagtcgcgctacctcggacccggaacccctcctctccctcaacgatgagctggagaagaggtctcgggatagtttccgtgagtataccgaggcggcgatgaggtcgcttcggtcgaccatggagatcctttccagggacgttcccagggtcttccaggaacttgcggacgtgagcaccgccaagtcgctgttcctccgccgcgagagggacgtctgggattcgctgcggtcccagcgagccatgcttaccgaggccaatgagcgcctcgcccaacagagcaccgaggtggcagaccttcgggtgctctgcgatgagctgaagtcggaggcggcattggcacgagcggaggctttatcggcccaggagcaggtggcttcccagaccgaggagatgcggcggcggcagttggagcttggccaggttatcggcgagcgggaccaatctcggagccaagctgccgaggccgtgagccgggctgaggcccttaggggtcagctggctgaggctacggagcggttagccgaggcgtccgctcgggccgggacccttgcagagagcctggctgaggccgtcgggtctgtcgaatccgcccaagccgaggcctcgcagcagcgtgcccgggccgaagggtccgagacggctcttagcgaggccgtcaagaactgcaagacgcttgccgaggcggctgagcagaaggaggccgaccgtgtggccatgtccgaggctatctcggccttttgccaggccttcggccttgacaacgtttcctcgggtagctccccccagagtcatctgcgggccttgggcggccatgtgcgcgacagactccgcggggcgctgcaccatggcgttaggcgggccttcaccgtgctcgcttcccacttcgatgtggatctggaaagggttagcgaggggtacttcttacctgacgaagaggaggctaccttagccgaggtccagaggcttgacgaggctgtcgagggcccgagtgcggcgctggcttcctcctttgaggtggagatccttccgctcgtgtcgccgtccgaggccaggccagtttctgccgagggtggaaatgacgccgagcgtgctgctcctccccctgccgatgtctga

SEQ ID NO: 149067 - DNA, 356 bp, Zea mays
  Clone ID: MRT4577_67474C.1
gaggctactagaagtggacatcaagcctacatctcgacacatgacctgattgaagtcttgcacgcacagtacataaacagggttacgccacctatctgagctaggatatggtggtgcataggcacacacacacaggtagccatggcatcttgtaagcttcttgtgggcctgacaagcaggaagcagatacaattccatacccagcaactattctgggccaccaatctgccttaaactaccacttcatcgaccttaatggtggccgctgaaatggcgcggatattggacaggtgtccagctccttttatcttatgctgaaaggccatctccattacgcagcctgtgatgcaatctac

SEQ ID NO: 149068 - DNA, 422 bp, Zea mays
  Clone ID: MRT4577_67475C.1
cctaatcctaaatcctatcgcgccgcacacccgctcctcggctcctctccgctgctctctgctctctcggtctcggggtacctccgcttggcggctcgccggctccctcctcctggcgcggtgcacggcgaactccgacggctccctgctctctcggtctcggggtccttccttttggcgcggtgcacggcgaactcaggtgctccctcctcccggcgcggcgtacgtcgatctccggtagctccctcctccctgctgctcaaggtatcatataattctggagtcaaacattttatattttggcaggtatcttctataatttcaattgttgggcatgtctgaactgaaaaaacatagacattttccgtgttgtcgattattgcacatttaagggatcaccacatggacagattcttagtctt

SEQ ID NO: 149069 - DNA, 347 bp, Zea mays
  Clone ID: MRT4577_67476C.1
gggtcgcagcgcacgcgtccgcccacacgtccgagaagaatcagatcaccttctttacctctgcgtacgatggttcttgtaaagatgctgcagattcctgaaagacggtacttgaactgcccggagcatgttgtattttcttaagatgctggaactaagacggcttagttgaattttcactatcaagtgagtctcggtcttgccccaaaaagaatgttttgtacctcctctgtcccaatttatacgacaatttataattcgtaaaaaaaaaagtgaccgaaacaaaaagcaaaaatcaaagaaccataacagaaagaagaagaaagagggggatccgccaggagttc

SEQ ID NO: 149070 - DNA, 402 bp, Zea mays
  Clone ID: MRT4577_67477C.1
atggaggtccggctaggctttagccccgaggccgtgctttggtccgaaccggccttggcgggcctgtccggcgacgctgacgttccggcggaagggccgacagcgcccctgttcaaggcgcaggtgtcggccgagccgagacctatttcccacggttgccgaggtggcggtctccttgtgaccttcattttgccgtgttttagcgctaagcgccgggcccgcaagccggcatttactgccaccaaggcggtgaagcgcggtgttgggacgtcggccagggccatgcccctaccccctcgtgtggctcgacgccacctaggaggtcatccaacggggcgccgaggtagcctggtgcccccggtttattattgggtagacttgctaattgcttattatgagtag

SEQ ID NO: 149071 - DNA, 493 bp, Zea mays
  Clone ID: MRT4577_67478C.1
cctcgaggccggccgggaagcagaactcccggcgttatgcctccggtgcggcctcccgcttaagctctacgaaacggagtaccgatatctgcactggatcaccttcaatttatgataatggaaccccatcttgtcgaagccgacgttgtggctggcggttatgacaagaggacgatcctcttgtacagcgtaccgggcgtgtctactagatgcacttctcgacgtgggcaaggacgaactccggcacatctttcccgatcgtagcaggagaaggtgtgagactcgtctgaaaaaaaaaggcgtgctactcattcctacagagctcaaggtccgacaagaagatgctgatgatgaaatcccacatgcagtgaagacacgtctgccgataattgaccattgccacatgatatgattgacagcattgctgggcgctacaacgtacagactttcatacaaggtgacattacgcctgaaatgatcggtcactaccttg

SEQ ID NO: 149072 - DNA, 1237 bp, Zea mays
  unsure (1)..(1237): unsure at all n locations
  Clone ID: MRT4577_67479C.1
aatggggtacctcgaggccggccgggggaacaatttggtaaaagctcgccgtaaccctaaccctaaatcctatcgcgccgcacacccgctcctcggctcctctccgctgctctctgctctctcggtctcggggtacctccgcttggcggctcgccggctccctcctcctggcacggtgcacggcgaactccggcggctccctgctctctcggtctcggggtccttccttttggcgcggtgcacggcgaactcaggtgctccctcctccctcctcccggcgcggcgtacgtcgatctccggtagctccctcctccctgctgctcaaggtctcgggtcctccctccatccctggcttttactgatattttgtattagctgctccaagtctgtattattaattagatctttttcatcactttacttatattttgtctctgcttatattttggcaggtatcatataattctggagtcaaacattttatattttggcaggtatcttctataatttcaattgttgtgcatgtctgaactgaaaaaacatagacatcttccgttttttgtattattgaacatttaagggatcaccacatggacagatttttagtctctttgtcctagtgcagctctgcggtagcaacggaaataatgaatactacattggaactggagtggatggctgtgtttgagttcgatttttactgcatacatatttttgttgctacttttagctactactaattgagtgataaaattgatgcagcttgcaggttttcagatggaagttgttaaaactactcatgcactgtttgtattatagtttagacggttcatattatatttcgttaggaataattatgttatttgctagctcactatttatagctctacaggtgctcaaatgctcaatggtcttctcattaggagtgatagagcagaagttgtatcaattccagttggaataattcctgcatggtctgccaactcccttgtctgggctgttttgggagttagagatcctatttctgcatcattattaattgttaagggtggtttcacagctctagatgtcttggttgtcgagtggcccaagcccttgaagaagcatttgaaggcctttatcttaatgacccttagagcttaggccctacactttgtaatctcctactattcttcttgttcctactctattctagtgatctggacatctggtgatgtanctgtctctctgtatttaa

SEQ ID NO: 149073 - DNA, 216 bp, Zea mays
  Clone ID: MRT4577_6747C.1
caaggagaggttctagcaccaaggaccttctcggcccgtgcacggtcctgatctttcggaaccattacttggtcgacctattgccaacatagaccacctacaatgttatgagagaatgcttgacactggcaccaatcaagcattcatgtctgaacttggccttcagatcccaactggctgcaatccataagctgaagacagcgtttgagactctgg

SEQ ID NO: 149074 - DNA, 1348 bp, Zea mays
  Clone ID: MRT4577_67480C.1
ccgggcttccttctcacgaaaaggcaggcaagggaaaggcaaaggccaacccatcccctgcctcctccgttgctctgctgctccccctccttatctaatcctctggttcctggacaccggcctgcaagctccagcagcagcggcgccggcgacgaaaggaggaggattgctaccatcctatatcatatcatacatatacacaaggaggaggagaaggtgtgtagcgaggttgaggtccggaggatgccttccagtgccatgagttccgggctggagccggtgctctgcgcgcctcggccgcgcagggtccagcagctgcacccctgcagcgccgacctcatccttggcgcaccgcccttcccgcgcaacgccaacagcaaggccagcggcagcagcagcagggaaggaggcaggaagacgaccaggccggcggcggaggacgaggactgccgctgggcggcgttcggcgggtcgccgccggcgcgcgcggacaacccgctggtgcacgacccccggttcctgcggaaccagcgccacccggcgccgctggagctcgggtcgccgaaccaccggcggccgacctacagcagcggtggcgacggcagcgggtttgcctcgtcgtcgttcgcgccggccgtgaggatccagggcttcgacgtcgccgcgtgccgcgcgtgagagcgagctccggccgggcggggctttggcttttcgatctattaaattaaattaacagcaggtgaggtcaggtcagatcagatcatagtagggaggaaggcgaggagggcgggagggatgggatgagatctcctcttcctcctcctcgcgagggaggcgatccagtcgtatgagtgaagtaaagaagagtactccagtcgtactataggttgatgttcgccgataccacaccacacagcagccggtcaaagggagtgaaaactgattttttgtttacggggttttgtcagcaaggttattaggttttgtgtttgtgctgtagcctgtaagatgtaagctactactagcacgggtctcttgttcgttgctgctgctctgctctggcctctgggtgcccctgtattgtagatataaatcagcacccagttcgggcggtcggccagcgttcgtttttcttctagttgacgaggaggaagaagatgtccgctcctcgccatgtaatgtaaccatggctgtactcctacatacatgcaatcatgtataaagatgaaaacgtgtacatacacaagatgaaagtggcatgcagtgatgatctatcagaaaatgagaatcctcgtcgtcctcccgtgttttggttccaaaaaaaaaaaaaaaaaaggcccctagggcc

SEQ ID NO: 149075 - DNA, 670 bp, Zea mays
  Clone ID: MRT4577_67481C.1
tctccacaaaaccctagagccgcccggcgctccctctctgtagatctcccttcccagccgtcgaggaaccccttcacaaatggcaaaatggatcgcatcgagatggccccacttcctgcctcgccgcaccaaccccaggtcttggctacctgatggacttgatgactgctctgcatctcgagatgaagaagccctgcgctcatgacttactcgcgaacggcctccgcgaggctgacaaggccatcgagaagaacgcctctcttctttgcgtgcttgctgaggactgtgaccaatcggattcactgcaagctgcggaatgaactactgcgctgtacactatgttcacctgagtcatcgtcgtatcctgtcgacaatactctatgctagagtgttacaccctttgcaggattgactctgaggtcttggcaaggaaggaatgtaagctgctcctgtgtccccctcgatgactactgtgaacaatctgaggggcttaacatagtgcatgagtatgtcacagtcgcactagatgtgtgacgtgtgtcagtgatactcttgatttggacctgcgcttaacattatgcttttgcatctggggcttgcctaggagactagaacattttactacaagagccgaatacgatatgtatgaacaatctgtacatctgaattt

SEQ ID NO: 149076 - DNA, 332 bp, Zea mays
  Clone ID: MRT4577_67482C.1
gcgtctagaagactatcagaaggggacatcaaataaaaaagaaaaaaaagtcttaattgctttctttttatctctgtcgtgtcattcccttaatcttagatctctgacttacaagttataacaaaagaaataaacaacacatataaatatttgtaagaaaatatatatatgatcatgggttttcttcacaaactatttgacgaaacgtttgccgttccagcaccggaaactattcttacgaagctctcaaagtacaactcgtgcttctgcagaagcttcgtccggtcaacattatcataacatgttcctataattctcagcatcaccattgt

SEQ ID NO: 149077 - DNA, 475 bp, Zea mays
  unsure (1)..(475): unsure at all n locations
  Clone ID: MRT4577_67483C.1
cggccgggccgggggngcttggtcggtctcccctagtccgttatgcacctagaccagtgggcgaacagcggttgcctgcgctgtaagccgatatagaacctagcgctgccgattgaccaagctgtgtgcgggcgctactgagtgctacgggagtacacggggacgcaaggtgagccaaacactatacacgtgcacaaaggaatagccagtcgaacagattacgtgaaagggaaccttgtgagagggacgccaactgtgcaaactatcgggcataccgaacgtatcaccgcaggagggtgcagggcccttcgccatgggagattcagcgcacggtctgccttggaagccgcagtcttgcgtcactggggctgctatagaggcgcagccgatcagcataacatgcaggcgtgcaccaccaagtacttggcattaccagcaacaggacgaattgaaaggttaaataatatgtcatggg

SEQ ID NO: 149078 - DNA, 584 bp, Zea mays
  Clone ID: MRT4577_67484C.1
ggcggcggcggcgcaggcgcggctgctccggccgccgtcgtttcgccagccggggccggcgggtaagatgaccttcgaccacttccctcgcgcctggattaaccccgcgctcgcgtttgcctctgccttcttcgactccatccaatacaaggaaagttgcaagtgtggcgtgccggctggaactgagcagattggatttcccggcatgctgaatcctgctgcacttggacctgcaactttgccaggatttgtgtaaccaaggcttgtagtacctcttagtgttccatgcaaatttcttgctggcagcaaaccttcagccttgcctgctagtgctaactggatgtcttcttttgttccccaattccaaactcctgtgcttccgttgcagtttcgaggggtagcttaaaagttaaaactatgattctcctgcccctgcaggattcgtgtcctgtaggagttacgctataaggagcaaactggtgagggcgatgcctccgatcgttgctagcttccagcctgcatctcctcggtacccaagctttcaagacgcaaatggcaaaagacgaaatgttccttgttatcag

SEQ ID NO: 149079 - DNA, 435 bp, Zea mays
  Clone ID: MRT4577_67485C.1
acgaattcactgtggacatgaaagactaccttactatggctctgctagatacctgcgagcattgcgtgatgctggaaaagtgggttagaatcagagaatggctgctgctccaataaaagatgaacggagagaaaagatgatgaaaaagggctctgtcaatacgccgctgcaactgcaacccatgccatgccagcttagagattgggtataatttgcctagacagcagccagcattattatgtgctcatcttttatctttacaaaaccggtcgttcgatatcttaatttctttctcacaaaaaccccttttttcgactctgtactgaaactgctgggacattcccaatatcgttgcataacattcgcatgctactgttactcaagggcacaccccttgaagcggccatttaaccccgctagttttggggtttcccc

SEQ ID NO: 149080 - DNA, 642 bp, Zea mays
  Clone ID: MRT4577_67486C.1
aaaaaaaaaaaaaaaaaaaaaaaaaaaaaaaaaaaattaaaaaaaaaaaaaaaaaaaaaaaaaaaaaaaaaaaaaaaaaaaaaaaaaaaaaaaaaaagggccttttaaatattttggtggggaatttttccccgaaagccactgagcctcctttgttggcatttttttttggaacctttacttgctaaaagcctagggttttggggacccaaaaaacaggacaacccaaagggttgggttttgtttttttcagaacccaccaggatgctcaaagggcaaaaaaggacttaaagggaaaggggtttggaacccgcaaaattctttgcaatgggccaacaaaggggcctaatgctggtaaaaaaaaacaaattttggacactaaggttgacctgccaaagggttcatcaaaatctggaaaagaaaacccaaatgatgagggccctaaaaaaacccctcagttaactacggttaatgtggccaattttcctcacgaggctcccataaaggagggccccctgtttttccattcactgggggctggttcaattgaggaagcccgggaaactcggaaaaaaggctttggttttgggaggtccaccccccatgagggggctgctttggcaattcaaaggggaaaggccc

SEQ ID NO: 149081 - DNA, 516 bp, Zea mays
  Clone ID: MRT4577_67487C.1
ggcaacagaaacctctcacgacactagacgtatcacgctctggagatacaacgatactcgacagcgccatgatatttatacctttggcagcccgttggggaaggtccgagtggcatacagatcgatcgagagaggaactgcgactcaagtaatctctgcgcacacatggcttatcctgcttatagcatcagtacaatcgcaccggttccatcgactttgacaactccccacctgacgccattataccttttccccctcatcgtcggatcctctctatccacgccctctcaactatctgcaaggtgacgtaatgatcactctggacgaaggcaacgcttccaatgtctctcagcacgatcccttgctcacttttaactacctagatgcctaacgctgagaccgcgagcgcccgtacatttgcttgctgaacaacctgatgttatcgatgaacacttatacgagccttagggagcacagattattagaagctgtggaaaatctcattactactacgct

SEQ ID NO: 149082 - DNA, 228 bp, Zea mays
  unsure (1)..(228): unsure at all n locations
  Clone ID: MRT4577_67488C.1
gggagctacattatgtgtggcggctgcagcaggattgttggaaaacaacaatagattattaccagctgcgtcgtcccccccttttttttttttctagatacccctacgccagagagaaaaaattttgtcacgtcgagaaaaaaacccctctctcaactctttttttttttttgtgcgccccagaaaaaaaaaaaggaaagaggggggggncccnaaatatttctctgt

SEQ ID NO: 149083 - DNA, 281 bp, Zea mays
  Clone ID: MRT4577_67489C.1
tcgactacgccccataaccagtggttttttactttttgtcgcagccaaactcgagcgggttttgcacgtatttcgtgcggcttacgcaactcccgtactccatgcaacatgcacagccgcacccacatgtcatgatcttctactgtgttcacacgacaccgccggtgtactactccaggcaggagctgaatccgcatcatccatcttaatcaatgctcgccgtctgtaccttttcatgcgataccctcacgctcatgctgctccggatctttactactatt

SEQ ID NO: 149084 - DNA, 1109 bp, Zea mays
  unsure (1)..(1109): unsure at all n locations
  Clone ID: MRT4577_6748C.1
agccggccgggacatggaaaaggccgcggtaaccgcatctgccatttgcctgtttgctttgctctcttccaggccaatccgtaagttagggatccaaatcagtagcaacttgcaaaatgcgtgccggtgccaggttgatcgagacggaggagcaggagcatcatgcccgtcccgccggcagcgcgacactgcagcgcgcaccggtggagaagccgccgttcaccttgggtcagatcaagaaggccatcccgccacactgcttcgagcgctcggtgctcaaatccttctcctacgtgctccgtgacctcatcaccgccgcggcgctcctgtacttggcgctggtcaccattccggcgctcccgagcccgctccagtacgccgcctggccgctctactggatcgcacaaggctgcgtgtgcaccggcctgtgggtcatcgggcacgagtgtggccacaacgccttctcggagtacccgctcctcgacgacatcgttggcctggtgctgcactcgtcgctgatggtcccgtacttctcgtggaagtacagccaccggcgccaccactccaacattggctccctggagcgcgacgaggtgtttgtgcccaagaagaaggaagcgctgccgtggtacacgccgtacgtgtgcaacagccccgtgggccgtctgctgcagatcgtcgtgcagctanaccctcgggtggccactgtacctggccaccaacgcgtcgggtcgcccgtacccgcgcttcgcctgccactacgacccctacggcccgatctacagcgaccgggagcgcgcccaggtcttcgtctcggacgccggcgtcgtggccgcgtggttcgggctgtacaagctggcggcgacgttcgggttcttggtgggtggtgcgcgtctacgccgtgccgctggtgattgtgaacgcgtggctggtgatcgtcaccttcctccagcacacccacccggctctcccccgctacgactccagncgagtggggacttggctttgcgcggcgcgctagccaccatggggaccgcgactacggcgcccctcaaccgcgtgttccacaacatcaccgacacacacgtcgtgcaccatctcttgcccac

SEQ ID NO: 149085 - DNA, 488 bp, Zea mays
  Clone ID: MRT4577_67490C.1
cggaattcccgggtcgacccacgcgtacgccagggctgaaccactggacaggcggtggaaactaccaagctggagccacggatagcaaaggcggcacactcagctatccagcgaaagagatcgagacgcaggagtcatggtcaccgttagcgccgccgaggtgaccaccatcgttggccgcgccgcgaacgccaggtccaatgctctagggctgcctgcgttgcgggcgaggagcgagagggtgcggagcatcttcgccctggatgccaagaacgcggtcctagtcagcaccaagggcgcaggccgcgtcgctgcttgtcgcagagggcgcggtgaccggtttggtggggcccgagctggcgctcgtggactagcgcatgtacacggagggcaccgggctgagcctctggctcagcaacaacctgctggggtggattcttctgagggattttggcctcatgtggtgctctacaccatctactcctgtg

SEQ ID NO: 149086 - DNA, 165 bp, Zea mays
  Clone ID: MRT4577_67491C.1
tttttcaaacatgtccggatgttgttacctgggggagcaatgaagttcaagaggctgtgcctctaagagctgctatcgcgcagtttcacgccctctgctctccttcaccaaattggacaaaatgatcagctggttgtcagtaaacttgtcactagcatgaccagg

SEQ ID NO: 149087 - DNA, 236 bp, Zea mays
  Clone ID: MRT4577_67492C.1
gtcgccgccgtcgtgagcggaaaattccttttcccggctggcccggcggcgcagtccgggcatttgcccaaggcacggttccctgtccccgccgacggctgcgacgctactgcggctggtcactcggaggatagggtctcaggcctgactcaagtctgcggagtactggggccaaagcgttgctagtgcaggaagggcgagctaggttcccggctagaccaccgtggccacatatc

SEQ ID NO: 149088 - DNA, 1126 bp, Zea mays
  Clone ID: MRT4577_67493C.1
cgctaatcgctacccttcgcctttgctgtgctgctgcgtgactgcgtctcgtgtcaggctgtcagctagctttgggggcggggcagtggggccctacggccggccatggccgccgcggcgaacacacctcagcgtcaccggccgtggcagctggtggtcccagcgagagcgagcgcgagcgcgagcgcgagccgccgcactagccggccagccgcagcagcaggagtgggggctggcggtgcgccgaacgcatggacgtggatgccaccgccacctgcagctcggcggacagtgagggccaaggccggtgcggccgaggcgcggccgtcgtcgccgccggacgccgtgacctacagcgcgagcatctccacggacacgcccctccacgaaccccccggggtctccttcgacgagtacatccaggaccgcgcgcgcgtgttccgcgccatgttccccgacgagagcaggagccagcgggtcggcgacggggaatggcaggtccacatgctgccgctgcagttcctcctcctcaccgtgcgccccgtcgtcgtcatgcagctgcggcaccgcgccggcgggctcgacctccgagtcacggagtgggagctgagggggctggacgtcagctacgcgccatccagcttcgacctcggcgtgagcgggtcgctgtacgccgaccggagcaggagccgcgggtgccggatgaggggccacctggagatcgccatcacctgcgtcctgccgccgcccctgcgcctcgtgccagagaccgtcctgcgcggcgtcgccgaatcggtacctagctctcgccaggcatccaaaatacgtagtcctcgtccggttccttgaaaactggagcccagtaacgcagtgcaggtcctgtcgacgctggcggagaagatgaagcgggacgtggacgtcggcctcgtcgccgacttcaggaggtttcgccgggagaaggcagcagcgtccagggccacgccgacgctgggcgcgacggcatcggacagagacgaagcctctgagtctgaatcctagcgtggtgtgtgtggacagtggactgcagcttcccttggcttgtacacagagagtagtgaacatgattcatttacatctagtttctgcc

SEQ ID NO: 149089 - DNA, 1099 bp, Zea mays
  Clone ID: MRT4577_67494C.1
gcttgttcctaatggagccgggaaaacatctttcattaatatgatgattggactcattaaacctacatctggtactgcttatgtccacggaatggatataaatatggacatgggtgacatatatacaaatatgggagtgtgcccacaacagaacttgctttgggaaacactgactggaaaagaacatcttttcttttatggtaggttgaagaatcttaaaggttctgcattaatgaaggctgttgaccactctctgaagagtgtaaatctatctcatggtaatgttggtgataagcaagtgaagaaatacagcggaggcatgaaaagaaggctcagcgtggcaatctcattgattggggaccctaaagttgtcttcatggatgagccaagcacaggaatggacccagcatcaagaaataacctatggaatgttgtgaaggaggccaagaaaaaccgtgcaattattcttactactcactcaatggaagaggcagaggtattgtgtgaccggcttggcatctttgttgatggcgatttccaatgccttggaaaccctaaagagctaaaggctagatatggggggacatacatattcacagtgacaacacccccagaccaagagatggaggttgaacatctagtgcgtcagttctcgcccagcgcaaacaagatctaccatctatctggaactcagaaattcgagctgccgaagcaagaggtgaaaatagcccatgtttttgacatggtcgagaaggcgaagcgccggctctcaatacatgcctggggactggtcgacacgaccttagaggacgtcttcatcaaggtcgccagaggagcacaagtgttcaacgagtttgcgtagataacacctttaggactgccttcgtagcaagcacgggaccccagttattagatgggcggactgcatagagaatcttgtggttttgtaggtattttcattagtgagagtcattttgtgtggaaaataggctccatatgcttggtttacgtggttgtacataaagaaatacatttttgagactgcagttgcagaatagaataattgtccagttgtgtccatatatattttttctttttc

SEQ ID NO: 149090 - DNA, 115 bp, Zea mays
  Clone ID: MRT4577_67495C.1
gattacatattgcgtgtttgtagagaatttttttatgacccacgaaagagggctcttgatttaaccctttacccttaacgccccagtgtccatctacttaaagcccagtttttac

SEQ ID NO: 149091 - DNA, 655 bp, Zea mays
  Clone ID: MRT4577_67496C.1
tgcaaagagtctaagccaaccggcggaaaggatggaagcaaactggacgttaatacgaaacaacaacccaatgttagaccttcgggcggtgattacgattacttgttcaagctccttttgattggagacagtggagtgggcaaatcttccctcttgcttcgctttgcggacaacacttttactgaatcctttatcagtaccattggtgttgattttaagatccgtactatcaacattggcggtgcgaacgtgaagcttcaaatttgggatacagccggtcaagaacgcttccgtactattacctcttcttactatcgtggtgcccatggtattatcattgtttatgacgtgaccaactctgattctttcaccaacgttcaaaaatgggtacaagaaatcgaacgctatgctaccgactctgtgcaaaagctacttgtgggcaacaaatccgatttagtctccgagagaaaggttgatgcagcagaagccagagacttcgcacagcagttgggcttggaatttttggaagcatctgccaagaattccaccggtgtagaagaggcttttgtgaagctagccaatgctatcaagaggaaggaggatgactagtgctctttctgacttgtggtggtcacaataaaaccctttatatatt

SEQ ID NO: 149092 - DNA, 135 bp, Zea mays
  Clone ID: MRT4577_67497C.1
atcccagcatgtccttgagaatatttttccttagtcgggtaagacttgcgaaagtatacttcatactgaaagggaaatgtgcccttgggctatttctaagtattttggtgattgagtgccaacgcaagtgctttt

SEQ ID NO: 149093 - DNA, 291 bp, Zea mays
  Clone ID: MRT4577_67498C.1
atgggccaaggttgcggtgacttggtcttgacacttttagtaaggaagctgcagaatgctcttacttctcttgacaattttccagttataatgagccaccacttcaagctaaggagcagtattgccgatatctacaaggcactcaacaattactccatgtatccgattagacctcgtgttgctattataatgggatctcagtctaatcttcctatgatgaaagttgctgagagggtttcaaaagagttcaacatacattgtgaggatgtagtcttcgaagaaaatttgtga

SEQ ID NO: 149094 - DNA, 578 bp, Zea mays
  Clone ID: MRT4577_67499C.1
ccggccgggttacactgcccacccctgttgatgatcgaagcggagagcccctccctcccgtcatgactcctgatgagtcgtggtccagtcctctcggccgccgccgccggccgagaccccagacggtggtaaggcaacttcgttttgctgccgccgtaccatcaagagtgcgacaccgacatagatcctctcctacgtgcgcctgaggctcgccgcgccgcagtccgcagccgtcctcttgcagatacagagcctacggcgtcgagaaccaccggagcccatgtttgctcgttcatgtgattctggtgtgatcagtttggtgtatgtatgtgaaggctcgtttaattccagagctcatgggctaagaaatctctcttccgtaaacaaatacaatacaaccaggcaagtgactaccaacctcaaatagttccatatgtttcttttgatcatacaaagtacagtgccttttttcctctgatgcctgaactttcatactgcggttgggtttgtacactttatgtcatcaagtaggagtatactgcaccatcagcaatatcttcagccgtgaggtctaagat

SEQ ID NO: 149095 - DNA, 262 bp, Zea mays
  Clone ID: MRT4577_6749C.1
caacaggctaggttagtatctttttatttggaaagaaacgggttattttttacgagaaaatcaactaaaagtcttaagaaaaaagaaaaaggcttaagagaacatggatttttatctttggcggaagcgtggatttattccacaaccccacccaacaattgtgcaggggataatgggtgttgataacgcgcggtcaatccaacggggggtcaaaaacaactttcacataaaataggcggcggggcttataccccccttttat

SEQ ID NO: 149096 - DNA, 549 bp, Zea mays
  unsure (1)..(549): unsure at all n locations
  Clone ID: MRT4577_674C.1
aattcggcacgaggctctcgagtgttcttgtcgcctacggagacctccacgcgacgcttcgtctctcctcacctgcactcgcgatttcaagaaccgactgtattttctatcctcgcactttctggaaccggatgggcagctacttttcgatggccggctagggttccacacaccaaccatgatgttcccctcaacctctgtcaacatttgagactggttcaactcgcttgtgtgccgaagttcccctgcggcggccgtcatcaccatggtctcccctcgtgtggctctggtcttatcgtggtgaccatcatgggtcgagaggagtgcgacgacctgnggttcactgtctcacccttagctntagtgcaaagttccctcccagctcatcgcagaccaaggtacgatagtgtggaggcctacatcgtgcaacctgggcttcaccctctgcaccgcctgcaacaatatctaatttcgtcttagatcaagcttttggatccccacgctcccccacccattcttctgtaatgcggtgttctccaagctcgggct

SEQ ID NO: 149097 - DNA, 289 bp, Zea mays
  Clone ID: MRT4577_67500C.1
ggggggggaataattttaagaaacatgggcaaaaaaggatcggaataacgggggggagtaaaaaatgaagggttattttttttcctaaatttggaaatggggctaacactagtttagcatttaagggactagggatggacctcccaatttttttgatcaggatgctttttaagaggatcaagggtcatttttattggacactccctaaaacaatgtagggttttggggagacttttgggacacttaaaaatcctagtgggggatcccttggattaaccaatttgtgaac

SEQ ID NO: 149098 - DNA, 168 bp, Zea mays
  unsure (1)..(168): unsure at all n locations
  Clone ID: MRT4577_67501C.1
caacccggaagaggcaacgaggggacaccgcgccncggtattggcgcgacagccaaaacnccnncncgctnaccacnnncagcccgncgggaaagcnggggcagaaagagcacgcgcncacggccggcgganccgggcagaccccccnagggancaaagcggccaacg

SEQ ID NO: 149099 - DNA, 174 bp, Zea mays
  Clone ID: MRT4577_67502C.1
ccacccttaaacgttcttaccagttgccaccgcctgttacccgggatgtttcccgcctttgccgttggcgtggagcccatggccgtcgacaattccgcctccaaaaaggccaagcgcaagcagttaaaggccgccgccgccgccgcggaggcagaggcggaggccgtttcggtc

SEQ ID NO: 149100 - DNA, 182 bp, Zea mays
  Clone ID: MRT4577_67503C.1
ttctatcataattactcattggtttggtttttttttagcaaacgagagggccgttcacaaaacccacgaatgtttaacctcccatgtcggatgatttgctactcatattattgacatcataggcattcaatgcccgaatacatgtgtcaattacactacttgtgcatggttcatagccccct

SEQ ID NO: 149101 - DNA, 1074 bp, Zea mays
  Clone ID: MRT4577_67504C.1
cgctcacattgttacacagccttgttttttgaggatgcctaccgatggcaaacaatcattatggatttgtttgatgacttcctatcaattgcagtttgtgcttccttggcatcgtgccatcgtgcagactgagttttaatgtctagtgtgctacctttttgggatcaaattagatatgcactatttttaagtggaagtatgtttagaatacttctacagactcttaggattttgcagattttgtttgagcaggtaactaaaggctcctaagtgatgaaggaaacatagccgagcagcaaatgaaacacaacttttcttttttggaccggaataccaattcttcaaatgagtttgccttggttttttagctggacgttgatgagtttctgggctaaataaaacctacaaagatggttcttctctggtctacgattctggggactgaaatgcaggcatgtgtgatctgtttgatgtctgccaaggaaaagcaaaaatataaaacctcaccgcatccgcattctcttcggacaatagattctgcattctgtaccaccctggtcttcaatttacaatgtgcagattttgttttcctcttcccccccgcctgttcttcttccctcagtctcgctacattccatatacagatgcatatatgcatgtgcgtacgcgagccccatacatatgtacatgtacatgcagactatcccaattgtgctaggtagcaccacccctgatggtgttcgatccttgaaatgtacatgatgtgataagagtaagcgtgactagagaatgggattccaaggcacaacaaatgatggtcctctctgtcatgtcaacatgatcatatctgatgaaccggtgatctatatccactcaaatacatttatggtagcagcatgttgtacctaatatgcttttttatcacctgttaatattgatgtagctgtacaaatggttccgattacttatatcctctgatgtacttctactaagcaccatgttctaacttacacattgcttagtcacctctccaaaaaaaaaaaaaaaaaaaaaaaaaaactcgagggggggccc

SEQ ID NO: 149102 - DNA, 772 bp, Zea mays
  Clone ID: MRT4577_67505C.1
cccacgcgtccgacgattctggggactgaaatgcagctgtgtgatctgttgatgtctgccaaggaaaacaaaaatataaaacctcaccgcatccgcattctcttcggacaatagattctgcattctgtaccaccctggtcttcaatttacaatgtgcagattttgttttcctcttcccccccgcctgttcttcttccctcagtctcgctacattccatatacagatgcatatatgcatgtgcgtacgcgagccccatacatatgtacatgtacatgcagactatcacaattgtgctaggtatatccctcaacctgtagaccatcagcctcattgttcctttttgtctagtgcaattttgtattgttcactgtagcttaaaaacaatatgataaatgattgtatttctctatatgcaggtagcaccaccactgatggtgttcgatccttgaaatgtacatgatgtgataagagtaagcgtgactagagaatgggattccaaggcacaacaaatgatggtcctctctgtcatgtcaacatgatcatatctgatgaaccggtgatctatatccactcaaatacatttatggtagcagcatgttgtacctaatatgcttttttatcacctgttaatattgatgtagctgtacaaatggttccgattacttatatcctctgatgtacttctactaagcaccatgttctaacttacacattgcttagtcacctctccatattgtacctttactcttttaaactaatatgtttattact

SEQ ID NO: 149103 - DNA, 222 bp, Zea mays
  Clone ID: MRT4577_67506C.1
cacaaatcatgacttgatgatttgggctattacgtttttagtggctaatcaggatttttttgaaaatataaaattatatcacagataattaactgccagaaagattaactctacactataggagaacatgtaaatcatattgaatcgtgacaaacagcttcccagtgacctttatctgactcattaaatgcgttaggctagtacaagaagccaccattgaga

SEQ ID NO: 149104 - DNA, 420 bp, Zea mays
  Clone ID: MRT4577_67507C.1
tctataataggcaccaccaatgatgggtggtgggtataacactgctgagcccgtcaatagcaagcccgcatgaatgcaaacacttgtcgcactggcatcagacctccatgaccctcgcacctccctcgtcatacggcctatccggcgattacctttgaatgcatttattgtcacacaacataactgcacaacagctacaacatcttgctcttgcaaaccttgctgacaactctaagctgccagatggttgaatgtaaaaaactgctgggggtaggcagcagctagctggttgaatggcagctgctgctgctataaatccaaatcactgctgactacccctagcaggttgtttgatacaaactactgtcactaataaactctgctgcgtttgacagcacaagcagctactaccattgtagc

SEQ ID NO: 149105 - DNA, 1717 bp, Zea mays
  Clone ID: MRT4577_67508C.1
cattgggtacctcgaggccggccggggctctggtcacctggaacacgtgttcctcgtcccgagaagagtcgaggaaaaatctcgcattcgcaaaccaagcaaatggaggcatgagctccgccgcctccccgtctctcgccgatctcccccaaaccctagcctcgacctgaccgccagcgggcccgcaggccggagaaggagtcggagtcgcccccacccacccaccctctgccgcgggcggggagcgggcggcggacgagatgccgtcgcacggggatctggaccggcagatcgcgcagctgcgcgactgcaagtacctgcccgaggcggaggtcaaggtgctctgcgagcaggccaaggccatcctcatggaggaatggaacgtgcagcccgtgcgctgccccgtcaccgtctgcggcgacatccacggccagttctatgacctcatcgagctcttccgcatcggcggcgactctcccgacaccaactacctcttcatgggcgactacgtcgatcgtggctattattcagttgaaacggtttctctgttagtggctttgaaagtccgttacagagatagaattacaatacttcgaggaaatcatgagagcagacaaatcactcaagtgtacggcttctatgatgaatgcttaagaaaatatggaaatgcaaatgtatggaagtattttacagacttgtttgattatttgcctctcacagctcttatagaaaatcaggtcttctgtcttcatggaggcctctctccgtcattggacacattggataacattcgttctcttgatcgcatacaggaggtacctcatgaaggacccatgtgtgatcttttgtgagctgacccgcatgaccgatggggttcaggaattgggggggggggtgggaggcgaaggaccgtgacgtttgaaagggagatggacgagatttaaaagatcgtaacttctaagaggtgaattatgaaagttagaactctttctaagttttggtagactgtttgttgttttggttattaatgcatacataagattattttaactagtgtatacattgaccagatcatttaactcagggacctaacacctacgataattgagccagacacaactcggaaaaccccagactactttttgtaattgtggtggtgacattaacttactggtgttgatgctcctcttttccgcagcatcagggtctgtagatcatctgtccttagatatgggttccatgagcccgacctgtacgtctcccaattcttttgtttggagattttgttgccgcttaacgatctttatacaatatgttaaaaagttaaatgccattggacttttcgtcccggcacctcggcaaattgagccagacacaactcggaaaaccccagactactttttgtaattgtggtggtgaccttaacttactggtgttgatgctcctcttttccgcagcatcagggtctgtagatcatctgtccttagatatgggttccatgagcccgacctgtacgtctcccaattcttttgtttggagattttgttgccgcttaacgatctttatacaatatgttaaaaagttaaatgccattggatttttcttcgttctgttgtacgtcgactttgtattatttgtagacggtgaatggaagtcgcagcaggaaagccaagctcctgctatggttttgttttggcttaaaaaaaaaaccaaaacc

SEQ ID NO: 149106 - DNA, 374 bp, Zea mays
  Clone ID: MRT4577_67509C.1
acccacgcgtccgagcggttgcaggatcgaccctccatcatctgcgtgttcttgcacctaatctgccacatgcacgtgtatgtgagcgagttgagggtgggcaagcacagcctgccactgtacgagctgcccacccacgccacccgttgctactacctgggcatgttcctcagaggcgcctaccacgatgccctcagccggctgcacaacctattcggactgcccagcatggtgcgcgtttcccagtgcgactgaccccactgcttttccgtgacgctcgccgacaaaatcccgtcctgcgccaacatgctccaagcgattcagtacgagcccctggtcatgtactacgttctaaaacactatacctactgaaa

SEQ ID NO: 149107 - DNA, 452 bp, Zea mays
  Clone ID: MRT4577_6750C.1
acccaaactgccatgcgggggaatagattgaccgaaagaaacagggactcaaccaacacaaggacacaacaaggtggagcccggggaggcatggggcaccgggcgcactgacaccgggccccaccaccattaccacccgacgcacactttatttagcccacgttacttgcagcccggaccggacacgttcacgcgaaaggcactggtagctacgtaccgggcttcgttcgaaacacacacccaccccccccggggggcccccgtaaccgtagcgtactgaacaaaaaaaacccgggtaatactgccatgtacccccccgaaaaaataccccggcacgggcgcacgccgatcccctggggcctgggccctggccccccccccttggtgcgcacgggcttacttggtgggctttttgggctcctaaagaacaaaaacctcccccttggggggcg

SEQ ID NO: 149108 - DNA, 505 bp, Zea mays
  Clone ID: MRT4577_67510C.1
ttttttttttttttttttttttttttttttttttttttttttttttttttttttagttatagatttgcattatgggcctcgtccaaccaaacccaagtaacgggatctctctgttcctgatttgattaccttacaaaacgcggggccggaggcgaaatacatttggtctaacaataacccacatttgggaaaacggggctaatacacaattataaaggggggacaataagctgccttcaagcaaacatcatgcgttcattgggggcagtacccagcttcaaagggcaacaacttcccgggggcctcataactggtgactcattgcctcaagatcctcgccaggaacttcagcaaagcaaacagggcataccttgtttatgccaagccattttgtcacccagctggcatggtatacatgcttgcatggaaaggtcatttgaaaaattcctttcctgtactccatttggcaaaacacacacctcttacgggggggtttctttccttg

SEQ ID NO: 149109 - DNA, 1600 bp, Zea mays
  Clone ID: MRT4577_67511C.1
cgggaaaaaatatcgcattcgcaaactaagcaaatggaggcatgagctccgccgcctccccgtctctcgccgatctcccccaaaccctagcctcgacctgaccgccagcgggcccgcaggccggagaaggagtcggagtcgcccccacccacccacccttctgccgcgggcggggagcgggcggcggacgagatgccgtcgcacggggatctggaccggcagatcgcgcagctgcgcgactgcaagtacctgcccgaggcggaggtcaaggcgctctgcgagcaggccaaggccatcctcatggaggaatggaacgtgcagcccgtgcgctgccccgtcaccgtctgcggcgacatccacggccagttctatgacctcatcgagctcttccgcatcggcggcgactctcccgacaccaactacctcttcatgggcgactacgttgatcgttgctactattcaagcggaacagtttctatgttagtgctcctcgtccccacctccgtcctcgtcgttaccatccttccccagcgctcctcctcgccggcgggcttgctgggtctcgcgatcgtcctcctcctcggctgtgccttctggggcggcggcggcaggaattaggtaagtggaggcaagggaaggggaggtttgaggtagagcggagccgcagcggcaatgccgtcgcacgcggatctggaccaccagatctcgcagctgcgggattgcaagttcctgccggaggtggaggtcaagacgctatgcgagaaggcaaaggcgatcctcatggaggagtggaacgtacagcccgtgcgctgccccgtcactgtgtgcggcgacatccacggccagttctacgacctcatcgagctcttccgcatcggcggggatgcgccagacaccaactacctctttatgggggattcgtttgaccgagcccactactctgtggagacattgtcgacccatgtgtgatcttttgtggtctgacccagatgacgaccccgatggggaatttcatcctgaggagcaggttacacatttgggcaagacattgcgcagcagttcaaccatacaaatggtctttctctcatttcaagggcccatcaacttgtaatggaaggatttaattggtgccaggataagaatgtagtcacagtcttcagtgcgcctaattattgttaccgctgtggtaacatggccgctattcttgaaatcggggaaaacatggaccagaacttccttcaattcgacccggcacctcggcaaattgagccagacacaactcggaaaaccccagactactttttgtaattgtggtggtgaccttaacttactggtgttgatgctcctcttttccgcagcatcagggtctgtagatcatctgtccttagatatgggttccatgagcccgacctgtacgtctcccaattcttttgtttggagattttgttgccgcttaacgatctttatacaatatgttaaaaagttaaatgccattggatttttcttcgttctgttgtacgtcgactttgtattatttgtagacggtgaatggaagtcgcagcaggaaagccaagctcctgctatggttttgttttggctt

SEQ ID NO: 149110 - DNA, 1734 bp, Zea mays
  Clone ID: MRT4577_67512C.1
ccggccgggggaaagtggtgttccctcgtctgaagccgaggaaaaatctcgcattcgcaaagcagacaaaacagcgtcccccctccctctactaaaaaaaaatggaggcatgagctccacctcctcctctctcgccgatctcccccaaaccctagccccgacctgaccgccggcgggcccgccggccggagaaggagtcgctcccacccacccaacttctgcggcggaaggggagcgggcggcggacgagatgccgtcgcacggggatctggaccggcagatcgcgcagctgcgcgactgcaagtacctgcccgaggcggaggtcaaggcgctctgcgagcaggccaaggccatccttatggaggagtggaacgtgcagcccgtgcgctgtcctgttaccgtctgtggcgacatccacggccagttctatgacctcatcgagctcttccgcatcggcggcgacgctcccgacaccaactacctcttcatgggcgactacgtcgatcgtgggtactattcagttgaaacagtttctctgttagtggctttgaaagtccgttacagagatagaattacaatacttagaggaaatcatgagagcagacaaatcactcaagtatatggcttctatgatgaatgcttaagaaaatatggaaatgcaaatgtctggaagtattttacagacttgtttgattttttgcctctcacagctcttatagaaaatcaggtcttctgtcttcatggtggcctctctccgtcattggacacgttggataatattcgttctcttgatcgcgtacaggaggtcttcatcagagcaatgagtgggaattgcagaatcctgccaaattagttctcagatccaagacatgttcaatcctattcagaagcttgataacattgagataattgcaagacagccatacaaaaatgacagcgttgtcagcgtagaaagatacccagtgcttctagtgtttttctctcattcctcttttcttttggggtggggggtggggagcttgaggcttgacatttcaccattagtgaagtgaccaaccagtagtcatttgcaatgaggttcctcatgaaggacccatgtgtgatcttttgtggtctgacccagatgaccgatgtggatggggaatttcaccaagaggagcaggttacacatttgggcaagacattgcgcagcagttcaaccatacaaatggtctttctctcatttcaagggcccatcaacttgtaatggaaggatttaattggtgccaggataagaatgtagtcacagtcttcagcgcgcctaattattgttaccgctgtggtaacatggctgctattcttgaaatcggggaaaacatggaccagaacttccttcaattcgacccggcacctcggcaaattgagccagacacaactcggaaaaccccagactactttttgtaattgtggtggtgacattaacttactggtgttgatgctcctcttttccgcagcatcagggtctgtagatcatctgtccttagatatgggttccatgagcccgacctgtacgtctcccaattcttttgtttggagattttgttgccgcttaacgatctttatacaatatgttaaaaagttaaatgccattggatttttcttcgttctgttgtacgtcgactttgtattatttgtagacggtgaatggaagtcgcagcaggaaagccaaagctctgcttggttttggtttggctt

SEQ ID NO: 149111 - DNA, 246 bp, Zea mays
  Clone ID: MRT4577_67513C.1
aggcaccacacctcttcctcctcttcctcctcctagcacagctagcgcctgctccccttcgtctgtgatcatgtggggcggcagcggcaagtgcaactgcggctccagctgctcctgcggcaactcatgcaactgcatgtcccctgacgtggagaccgccgccgccagcatcatcaagaccatggtcctcgctgcgccgaccaccatagccagctccggcagattctatgcggccacccagggcag

SEQ ID NO: 149112 - DNA, 470 bp, Zea mays
  unsure (1)..(470): unsure at all n locations
  Clone ID: MRT4577_67514C.1
ctgggaggcattcttatgaatctgtctctagcatccctcaaaagtcgctctacctcaatgagcaatacttgaatgtgaaaaaggctatggtcgatgctttctttggtcctcctgaacggagtgtatatagtgcatctgttcaaagcactcttttgcagatggcaaaggctgtacttggcaggttcagtgacatatcatcagttaaactaaaaatgccgaatatccatttcttacctgttaatatatcaagcaaggatcacggcagcattggaaagttcgatgatgatgtatatcttccgacagaatgggatacctaagggatcgattgaaagtagtttgagttggtttaggacaaagagnnngtacaagacaaacgtagtgtatggtggaagaagggtataatanatttctgcttcatgctttgttcattatctaataacgataatcagaaggtttacttatggtaaaga

SEQ ID NO: 149113 - DNA, 1879 bp, Zea mays
  Clone ID: MRT4577_67515C.1
gcacgagaaacagcgtccccctccctctactaaaaaaaaaatggaggcatgagctccgcctcctcctcgtctctcgccgatctccccaaaccctagccccgacctgaccgccggcgggcccgccggccggagaaggagtcgctcccacccacccaacttctgcggcggaaggggagcgggcggcggacgagatgccgtcgcacggggatctggaccggcagatcgcgcagctgcgcgactgcaagtacctgcccgaggcggaggtcaaggcgctctgcgagcaggccaaggccatccttatggaggagtggaacgtgcagcccgtgcgctgccccgtcaccgtctgcggcgacatccacggccagttctatgacctcatcgagctcttccgcatcggcggcgactctcccgacaccaactacctcttcatgggcgactacgtcgatcgtggctattattcagttgaaacagtttctctgttagtggctttgaaagtccgttacagagatagaattacaatacttagaggaaatcatgagagcagacaaatcactcaagtatatggcttctatgatgaatgcttaagaaaatatggaaatgcaaatgtctggaagtattttacagacttgtttgattttttgcctctcacagctcttatagaaaatcaggtcttctgtcttcatggtggcctctctccgtcattggacacattggataatattcgttctcttgatcgcgtacaggaggttcctccatgaaggacccatgtgtgatcttttgtggtctgacccagatgaccgatgtggatggggaatttcaccaagaggagcaggttacacatttgggcaagacattgcgcagcagttcaaccatacaaatggtctttctctcatttcaagggcccatcaacttgtaatggaaggatttaattggtgccaggataagaatgtagtcacagtcttcagtgcgcctaattactgttaccgctgtggtaacatggctgctattcttgaaatcggggaaaacatggaccagaacttccttcaattcaaccccgcacctcgggcaaattgagccagacacaactcgcaaaaccccagactactttctgtaattgtggtggtgaccttaactttctggtgtttgatgctcctctcttccgcagcatcagggtatgtagatcttgtccttagatatgggtcccatgtgcccggccttaacgtctccctattcttttgtttggagattttgtttctgcttctcgatcttgatacaagatgttagaagttgaatgccagtgtatttttttcttcctgctgtacgtcgactttgtattatttgtagacagggaatggaggacgcagtaggaacgcccctgctatgccttttgctcatcacatcatccgcgtggctgaataaattgcgtccagatgcgaaggttttggtttgcagcttccagtagggatgcgcctgctatgcttttgctcatcacatcatccgcgtggctgaataaattgcgtccagatgcgaaggttttggtttgcagcttccccatctgatgtgcctagtgctgtgtaatgttggttggcgccttgcagtttctacatgtgaatatgtgatggccaaaatggtttcatggtgattcttatatcacttatggcaaatcaagattattcaatatgtacagatgacgcataatcggcagttcaacagatcagctctattcatgcttacatgattttgctgttgtattgagacgcgtgatggaacatcttggcatgtgatgggatctagctggctagagggagtaaataatctatattttaaatgctgtaaagtaataaagcaagtgatgcaaaagaaatacttatactagctc

SEQ ID NO: 149114 - DNA, 472 bp, Zea mays
  Clone ID: MRT4577_67516C.1
aaacacacagctaaccgaacgggatctgaaacaaatagaacagttttggagacccctaatccggagctttattacccgggggttcaaagaacaagagcccagcaggtctacatcgagccccgaagggttagtcgggggggggggttactaaaagtgggagggcttggcaacggcctttgtaaccccccaggggcaattaatgcccttgggaaaaacaaaaaggtctcccgcgccgatctccaaaaactcctccccggggccttgggggaacaccttcaccttcccctgaaaaaggaaacacgtttccttgggggagtaggcccacggaaacttgtttttctcgcacccccacttgggccattgggggaccccaagctcgaagagggggaactcgggcgggttgcgctccaccttgaggcccagtttttccggcgccattgtctccggggacgccctcaccggcggaaatcgc

SEQ ID NO: 149115 - DNA, 582 bp, Zea mays
  Clone ID: MRT4577_67517C.1
ctcgataagcattctactcggttttgcagcgtttcggacagggttctcttcatctttagctagaccccttgatcttctcaagtcttctagtaatgtgtttctgctagctcttcgagggcttgccacagcaactagcattgctgttgtggaagaaatggttttcagatcatggctttcagaggaaattgcagttgatcttggttactacaatgccattctgatatctggacttgagttttctctaattcatcggtcactaccctgagtaccaggtttcttgctactttctctgatactttttgggcttaggcagaggacacaaggaaagcttgctgcacccattggcctacgttctggaatcatgactgccagttatttaatacaaagcagtggtgttttaacatccaaacctgaaacaccgctttggatgattagcacttaccatctgcatccttgtgatggtgttatcggcttaagtatctgctccttgcttgctatctttttcttccctcaaaagcctgttcagaaggatacatctgtgtgatgaggctcagaagagtaaaacataatgctggagtgagc

SEQ ID NO: 149116 - DNA, 1339 bp, Zea mays
  unsure (1)..(1339): unsure at all n locations
  Clone ID: MRT4577_67518C.1
ccggccggggtacaggtcaggcaaaaggccaaactggcagccagcacagcagagcgccactcgtcgactcatcctttcggttcccctcccccctccgcgttccacaaccctcgagaagcttccaccctcccctcctgcgacgccgccagagccgcggaaaccctacccaccccggccgctcacgcaccgggcgcccgcagccgccggtcgcgtgcctgccgccgacaccgcccaaagcgattggatctcgagatcgtcaggagccacgatggaggactgggattctgaagaattccagccagttgtgcctgttgtgaaagccgagccacttaaaaatcagtgggctgatgaagatgttgaagaagatgatgtaaaagaatcatgggaagaagaggaggaggaggagaaacctaagccagcgccagtggaaaaggtcgctgcaaaacctagcactaaggctcctgctaaaaagggaaaacagcaagcattgacaagtgctgaagaaccagatgagcctcctcttagtcccacttcacagaaaattcgccaacaaagacttgtggaagaagctgacttcaagtcgaccaccgagctttttgcaaagaagggcagtgagcaaaagtcactagatacttttattccaaagtccgagagtgactttgcggaatacgcggagcttattgcaaacaaactacgcccctatgagaaaagctttcactacatggctctgcttaagaatgtcatgagactttccatgacatcgttgaaaggtgcggacgccaaagatatatcttcttccgtgacggcaattgctaacgagaagatcaaggctgagaaggaggctgcagcaggcaaaaagaaacaaggagcgaaaaagaagcaactccacatcgagaaaggagacgacgacttcatccccggccggggtggtggctacgatgaccccgatgagtacgacttcatgtgatctggctgggagggatagtaggtttctgttatgtatacctttggcgggcagagaatatatcactagagtttgcggcatactattgcatggaacatgcgttatctattcgagaatgatttttgactctgcaggataagaagagcacttgtgatctggatgcatgggtgttttcttatttatccttgaatctttgtgttattttttttttcaacattgcattttttgccaaatgtactatagtaccttgtactatctggttactccgtgagtcatgaaagcaattaaatccctggagggtgtctcgcttgtgtttgcagctgtaaaaaaaaaaaaaaanaaaaaaanannnaaaaaaaaaaaaanntttcttag

SEQ ID NO: 149117 - DNA, 296 bp, Zea mays
  Clone ID: MRT4577_67519C.1
aattccttggtcgatgggcttactggtctgtggccgcccttcgtccttttttttttttttttttactccggatggttccatattgaacccaggcacatcctttttgaaccaactgctactgagtttaggcggcctccatattcaccgaggtgcactttcgacgtacatatcgatatctactaaaaaaaaaatgggggcagactatccaacagacggttaaaggatctgggtgtacacctggagataccaggccttatcctgcgtacccatccggtccgagccatcaaagaatacat

SEQ ID NO: 149118 - DNA, 484 bp, Zea mays
  Clone ID: MRT4577_6751C.1
ggggggggtttttttttttttttttttttttttttttttttttttttttttttttttttttttttttttttttttttttttttttttttctggaaatggggcggctttgtggttggccatgtcaaaaatgagtttggggaagcattaaaggggggggggaaaacttaaatcgatacaaaacctaaaaacccagtttattaaaggcaaacagacttgaactggtacattggacaggggcccacggggggactgaaaaaacagcctccttcctttttaaccaccctttttgggggggctgtctggggggactggagaaaaaacctaaaaacgggctatttttatgccaaatcgagcaaaagctttaaaagcaaactgagccccagggccaggggttttgggcttgtttccaccaggaccacggggcttaatgggcaatgcaaaaattccaagctccttggttttttgggcgacatcctggggggga

SEQ ID NO: 149119 - DNA, 587 bp, Zea mays
  Clone ID: MRT4577_67520C.1
gtacctatccagaagagcggcggcgcgctagagacaatgagcaggcggaggaggagctgtgccaagccacaatgggtatctcgcgtgactcgatgcacaagcgccgtgccacccttggaaagcagaatttctggaggcagaagcgaaagtatgagtttgatcgacagccatccaacagcaagttgtgaagcaataaaacagcgaggagggtccgtgtccgtggacgtaatgtgaaatggagtgatcttcgcctcgatactggtaactactagcggggaagagaatctgttacccgcaagagccgaatcctcgacgtggtctactatgcatcaaacaatgagcttgtgaggacacaaacccttgagaagagagccgttgcgcaggttgatgctgccccattcaagcagcgctacctcactcattatggagttgacattggtagcgaagaaaaaaacccctgctgccaagaatgataatgatgaggcacatagaggatgaagtagcagctgaggaaaccattcagaatcatcatgtcgcgatcatgtttgacaagtgagaagagggaagtacccttgaacccaaccctg

SEQ ID NO: 149120 - DNA, 375 bp, Zea mays
  Clone ID: MRT4577_67521C.1
tggctctggaacctttgggctgatttatgtgcttgtggatgtgcgggtcccggagagtcaggtaccccgtcgggcgtcgcttacggcacggcggaggtctcgcccaggaggcatatagaataaggaacggacgaagagctggttcataaaaatatcgctgagggtacaatcgggactactctgaaaattactctaaagaaagggacgtccgaagcgcataatctcccgagtgaggaaggtaaaaaggagcctaataaggtccacagtgtactgccccatttacgtacggacacatctcatgaacgtcacgaagacgcggttctcggaagcgaaacttggagtgcggcgccggtcgggtggatgccccacgagaaa

SEQ ID NO: 149121 - DNA, 306 bp, Zea mays
  unsure (1)..(306): unsure at all n locations
  Clone ID: MRT4577_67522C.1
atccctctgaatataccccccaggacaacgcaagcgcacgggggggtttttgaaggacanaccctcgttttttacccggggggagctgggcaaaaaaaaaaaaaccgggggggccaaaccccccaaacgcaaagacttggaccaaaagaccggtacctggccccgggtaacccaaggtttatcaggccaaaacaaggggggagacttacccaagggggcccaccggggggggcactgaaccccttggccacccgcggggaaaaaaaaaacccgggagaaggccccccggggccgctgttgcccccc

SEQ ID NO: 149122 - DNA, 748 bp, Zea mays
  unsure (1)..(748): unsure at all n locations
  Clone ID: MRT4577_67523C.1
gcaataagatataagagataattattcctgtactcaactatgataatgtcgtgtttacattttagctgttggtacatacacacaaaactctgtttcaccataacaccactgttagcaaaaaaactgagttcaaaaaggctcttccagctttcctaatgtggagaaaaccaccgaggtccatatctatagcacagatgtcatgtgattctgactattttaggaccaacaaaccatttggaagccaaacaaatccctgcctgagccaagataagcaggaagctggatctggcgctcctccagaacttgagactgagagtgccaagtagcagagtggctagccctggtgtaatgcccaagacaagacttatggtgcttctggagaagatgtatcctagaagccccatagagaataaaagaccacctgagtagaagtctgcacgccagctgcttctctcctccctctcttcggtccaacaagaggaggcaacacagcagcagccacaaccaagcttgatcttcttgtaactctggacgtggagatcttttcttttctgatgagcttgcacccttctactggaccaaaacgcaggaagcaggagcatacatagacagtatagtataagaacaaattgtataggcaaacaatctgagctgaataactggacattcggctaatggatcaaagtcaggcacacccaattcaatcacgtctagaccacacgcancaaggatcctgcgtgcttttgct

SEQ ID NO: 149123 - DNA, 1035 bp, Zea mays
  Clone ID: MRT4577_67524C.1
acaggagaactgtttcagattttgcaataagatataagagataattattcctgtactcaactatgataatgtcgtgtttacattttagttgttggtacatacacacaaaactctgtttcacaataacaccactgttagcaaaaaaatgagttcaaaacggctcttccggctttcctaatgtggagaaaaccaccgaggtccatatctataacacagatgtcatgtgattctgactattttaggaccaacaaaccatttggaagccaaacaaatccctgttcaatttgcctcaaatggagcaggatgggaaaataaacttgattcattctggcaaggcagaactcaaagtgaagatgcttgcacatcaacatcacctctgcctgagccaagataagcaggaagctggatctgccgctcctccagaacttcagactgagagtgccaagtagcagagtggctagccctggtgtaatgcccaagacaagacttatggtgcttctggagaagatgtatcctagaagccccatagagaataaaagaccacagttcaaaaggctggtgaggttgccgaacagcgccgggtggagcacgccggagagcatgttctccccgaggtcgagcacctggaggatgccgccgagcgcggcgaggccgacgggcacccggccctcgaagccgttggacgcgaggctcagcgcgaccaggccccgcacgcggtagagggaggaggcggcgagctcgcccgagaggccgagaccccttgtcgcggtggtgggaggatcgcttcctagggaggaagccgagagaaccgtgcctcgagtgcttgaacttgtagtgcgacatcctcgcctcctcctatgggggtggcggcgcgacagtgaggaaccggatgcttggacactggcgcttcgtccgggctgctaccggcatcgggcgtcgtgttgaagccatctacgacacctaggtccttgaatcgtaggtttggggagaggacgaatccgccatggatctcggcggcgcaggtgaaggggagtt

SEQ ID NO: 149124 - DNA, 1139 bp, Zea mays
  Clone ID: MRT4577_67525C.1
aagagataattattcctgtactcaactatgataatgtcgtgtttacattttagctgttggtacatacacacaaaactctgtttcaccataacaccactgttagcaaaaaaattgagttcaaaacggctcttccagctttcctaatgtggagaaaaccactgaggtccatatctatagcacagatgtcatgtgattctgactattttaggaccaacaaaccatttggaagccaaacaaatccctgcctgagccaagataagcaggaagctggatctgtcgctcctccagaacttcagactgagagtgccaagtagcagagtggctagccctggtgtaatgcccaagacaagacttatggtgcttctggagaagatgtatcctagaagccccatagagaataaaagaccacctgagtagaagtctgcacgccagctgcttctcccctccctctcttcggtccaacaagaggaggcaacacagctgcagccacagccaagcttgatcttcttgtaactctggacgtggggatttgtctccagaatataccaagacagagacatgggtcaatgaattaacgaagtagaaacaatgagaataaaatatgaggtgctggcgcgctgctttatgcatatttagttagaattgtatgtgttgcagcataggcacacatataaatcagcgtaaaaacccatttttttgacataaaaaccgaagagcgtaaaatacatggtgattgatcataaatacacataaaagtagcattaaggtcgtgcattaaaaaattagcatagatgctagtatgaatcaacaaaagcaaccataaatgtttacaggtgcgaaagccataaatggtaactagacttgagacatacggggaaagcaaagccaaaaatcagatgcaaagagcaatctgaaaaggcagccacaattttacaggtgagtgggcgagtgggtgctggggacaggtggggtatggatttatctgttacaagctatctatagacattttttaattaaaataaagaaagatccaccttttcttttctgatgagcttgcacccttctactggaccaaaacgcaggaagcaggagcatacatagacagtatagtataagaacaaattgtataggcaaacaat

SEQ ID NO: 149125 - DNA, 307 bp, Zea mays
  Clone ID: MRT4577_67526C.1
ggggaacaaaatcccgcacaacccaattttttgggaacaaactttggggcataaccgaactcccccggggggaggaaacacaacttcagatttttttgttttataaggggacggccccccccagggtggggggttggggccctactgggccagtacaatagccaagcaggggaattccatgtgcacacagggtcgggctaaaaaaaaaataatttgggtctgccttcatgaagcttggaggtttggtaattacccccttggtttgggtttttttatcccaagggtttttgggaaaggggacccttaa

SEQ ID NO: 149126 - DNA, 382 bp, Zea mays
  Clone ID: MRT4577_67527C.1
catccaacgctcgaactgttctgcatggttcacaggattactatgagccggaacgatgtaatcatggccgatccacgatgcgtgttggttcagactgcctatcgaacacttagcaagggttggggtcaaaggcggctttcagaggaagaactcgacaggggcttgagagctcatacacaagtggcacacacctggcagatagagcgtctggatcgaccgacacattttgacacggggtgggtcagcgacaaagaataaaggggctactggcttagacttcagcaccaaatctgcttccaaaattataatcggctggaacttcacacgaacaatgatgagaccctggctcacgatctacgtcgagtactcagcaggcgtaaca

SEQ ID NO: 149127 - DNA, 186 bp, Zea mays
  Clone ID: MRT4577_67528C.1
caaaaaaatcggaccgaggcgcggacactccaacgtcaaaaaccgctccagccaagagaggaagccttttaccttctgcccaactcaagaattttatatcccccacccaagacaagcaccgggaagatcaacaaggactaacacacggccagagccaaacaccaaagccctgacaagaagagcatt

SEQ ID NO: 149128 - DNA, 1033 bp, Zea mays
  Clone ID: MRT4577_67529C.1
cccacgcgtccggttgaaacaaacagatatgcacttctatattgattattgaatgaagaacttgtatgtttgtttcaaccggacgcgtgggttctggttttgccaatagctccaatgggcggcaaataggttcttacttcaatagtagttcaaacagattaggcagtccaattggttatgttggccttaatgatgaaattagttggggaaaccttacttctgttcatgggatgggcaacatttcaagccttggaccgggaaaccttggccgtggagccggagataacaactttggattgccttctggaacctacggaaggagcaactcaactggtacaattggcgagcctttttctgcagcaggcaatacatatgatgtaaacaatccagatacatatgggggcagctctatttatggtggcacagcctggaggttcacatcatctgaggttgacatgccttttggtcatgatattggaaattttgatccgacaatcaaatgagacatgtcggcaagtcacatgtgcaactatcctgttaacaacaatcagccaagcagaggtaccacttcctagggtgagtattactatatccacatatgacttggtgtagatgaaacacccattcagtcaggcatcccggtgcgcggccgtgaatcggtgattgtcagattaatatacaggttagtttgtctagctaacccaggggtgtggtttgcgaacaccaacatgctagagatggagctgctagaggagaagcggatacagaaacactttgtggagggtttgtttttttggggtcatgttttagttttgattcttacgcgtgcgtgggtgaggccttttggtttttgaatgagatgtaattattgcggcacatatttagaagccatgttccaaccggggattacattttcgttttgtaatcccaaaaactgttttgttgaccaaagtttgactttatatttttaaattctaaactaaaaaaaaaaaaaaaaatccggaccggaccgaaaacggtaaattttaccgcc

SEQ ID NO: 149129 - DNA, 419 bp, Zea mays
  Clone ID: MRT4577_6752C.1
atcatacatcgtataaatatatataggcagaattacgcaccacaaatccacaaataagtttcaactctcaaccacacgatacataagtcttaagtcttataagtcttaaccatacaatactacaccaccacatatctgccataatttttggatcatagatatgaacctcatattggctcggtatttacgcttataaccgaggggttttatgctcaaaacttaagatttttacgctcgaacctggagatgcgtccaccagtgaaccacttgccagatgtttaacacagtgtacagcattgcataaatactggaagaggcatcagatgtagctttcattgttgcggagggaatgcccgatggtacaggtgcaccacactctttgcactgagtacgagatgaatagttatgagatccacagc

SEQ ID NO: 149130 - DNA, 420 bp, Zea mays
  Clone ID: MRT4577_67530C.1
ctaatagtcatgttttacttgacactagcgatgcatagatgttgcttttgacatcgtttatgctggagacaccagtgttatccaccaaagtttgacggagcggcatcaaattctgcagaaggttgtgaaacagttaaagggtcatcttgagattttgatcccaagaggtggtttaaatgtccctcgtccttcagatgaaccatgctggtcgattattgcacataatgctgaagacgttgataaattcttcaaagagactatcgagaacagagatgagggcattgtactgaaggaccttgattccaaatgggaacctggtgatcgaaatggaaagtggcttaaactaaagcctgattatatacacgcgggtgccgatctggatgttattattatagggggatactatggatcaggacgtca

SEQ ID NO: 149131 - DNA, 226 bp, Zea mays
  Clone ID: MRT4577_67531C.1
gcccaatacacaccatgctcaccaacgggcggccgcggcggaggagcggagcagagagcaaccatggcgtggaagcagatggaagagatacaacggaagctatacctgctggagtacccacgggcaaacgcccccgtgcaatccctactgttcgccggcgtatagcgctaccggctactcgagtggctcttcttacggctactaggcgacagatcagcactcacgc

SEQ ID NO: 149132 - DNA, 366 bp, Zea mays
  Clone ID: MRT4577_67532C.1
tcgagcgatcttgctcgacagacatccctcctcggtacctgcgtcccgaaccatctaaactacatggccacaatcaagatcgggatgaacgggttgctaacgatcggaacggtggtggactgggagcccctgccgagtgacgatatcaagctcgccggcttgaacgaccgattgatcagcaccgactacatgacctacatgctcaagatcaacactgggcacatactatggaagcaccatgaagtcaaggtgatggactccaacacgtttatgtatcgggcgaaggacgttgatatgtttctctgctagaaccctcaaaagaccccgatgggttcagcaggggctcaatataccgctgagtgcact

SEQ ID NO: 149133 - DNA, 157 bp, Zea mays
  Clone ID: MRT4577_67533C.1
tgacttgtcagaaaaaaaaatccctccgtccggagtgtgtaccaaaggggggaatgcaagtccatgtggtgaagcaatgctggtcaactcgtgctggctccgagtgttgtatagcatcagactgccctgatgaacagcctattaaaagactgcactg

SEQ ID NO: 149134 - DNA, 809 bp, Zea mays
  Clone ID: MRT4577_67534C.1
tggctctctccttggcaagatgtgttactgccattcacatatctgttgttcatagtaaattgtcttgaggagatagctacggtgaaatattctctattttgttccagctccgtaaagaaggacgaagttgttatcactgttcagtttcaacaatgcatcaagatcctagcgaacaaagtttatttactaacacaacagagtgttgagctgctagaacgttattcagctatgcaggcagtacatggaggtatcacaaaagagttggatttgaagaaagtgcttattagtaatctctacaataaactttaacaagaaaaatagaccagcaaggagaagatatcatttggtcggttcgaagtctatgagctcgctgtctttttctaaaactctgctgggcactatgtggcgatcaaccgaaactgctcaaactactacttgtctgaggaatccatcgccatgttcaccgagcaccaccggcagcaccctatcagggggttgtgagtactttgggtgactgttgccatgctgcctaatgcttcctgttgaaacaaacaccttcatgatcctgatgacaattgtctgctgaaaagaagggagaaaactatcaactatatatatatacacactgaaatttgttactatacgctcaattctcagttgctttttcaagttatgtttgtatatatgatcaccttcacggtgtaaatagactcgactactgacgctaggcatctcttcattcaagcagactgaatattcttttagctagcatcaaaaaaaaaaaaaaaaaaaaaaaaaaaaaccgaaaa

SEQ ID NO: 149135 - DNA, 1424 bp, Zea mays
  Clone ID: MRT4577_67535C.1
attcgcactgcatgcctctccctctccctctccctagcggtctccacatgtgagaaacgcctctctagtaattaagcagcatggcagagaagatgtcgacgctaatcatcgtggttgaccttgattgccgcaagtgctaccacaagatccgcaagattctctgccaactgcaagaccatgagaggatccgcaccatctccttcgacgacaagagcaagacggtcaccatggtgggcccgttcgacccgcagcggctcgcgtgcaagctccgctgcaagggcggcaaggtggtgcgggacgtctacatcgtcgacgccaacggcggcggcggcggcggcggcaagcctcctcctccacagaacgtgccggacgacgggccacccgcgccggcgccggcgccagtgaggagcggcgggaagagcaagaacaagaacaagaacaaggacaagcagcagcagccgccgccgaccgagcggcctccgtcgcctccgccgccgccgccgccggagacagcgccgggacctccgccgcccgaggcgatgatgccgccgtccccggtccacgtccaccaccacccgcctcctccgcctgaccgcgggatggcggcggtggtgccccagccgcagtacgtggaggagaggccgcccagagcggagctggagcctcagccacccatgtcgcccccgcccaaggagatgaggccccccatggacctgcctcccgcgccgccgtcgccgcagccacagcaccacccgccgatgcctgggaacgagaggccgccgccaccgccgatgccgatgcctatgccggcggagtgcgtgatcccgacggtggagatcccttcgtggccggcggcgccgcccgtggggccgtgcgggtgcccgtgctgcgcgccgtgctaccagggctactacgaaggctgcaggtgctactgctgcggcaggctgtacggcacgaccgtccgcccgttgccagcgccgtgcggggcctacaggggctgccggacgttcagcgacgacgacccgtcggcggcgtgtagcgtcatgtgaagaatggtggtgttgctttggatttgacaggaacatgcatggtgaactaatagctggtgatgcgtcgaataaataaatgtgttcattaggcagggggttgcgttttgctgtccatttgttcgtgtctctccatgactgctctgcacggatcggagcatatgttcttgctgtcaacgtgtgattggccatagctagttactatatgagtgttcagtgctgttcaagacaaatgggatcggattcttcagctaataaagtctgtaatttatataagattattgagggctctgtgtagcatggaatttgaaacgaacaagaacagaggaaccgtgtgctgtcctgtgaggctcagcgcgcccagcaggggagatctaa

SEQ ID NO: 149136 - DNA, 424 bp, Zea mays
  Clone ID: MRT4577_67536C.1
gggaaatgctcgtggaactattgctctactccatgctgttggaaatgcatcttccaaagtgaatttagtgttctagaattagttgatattgttgtgtatccttcatttctagaaccagtcaaggaaactattttgagggttcacaggggggaagggttgataaaatggccgaattggaccaatggtgcaccatttgcattatggtctttctgcttttgggaggcaacttcatgcaatgggactgacagatgcttcagaaatccaccctgatagacatttgggcagtcatccacaagcatatttggccacaactcgtttggagcttcgtaggaatttgtagcagcgcacgagttgttcgaaggctaaataattgtgtcactgcaccaggcatgactgactttgcagagtcattggccttctttgc

SEQ ID NO: 149137 - DNA, 640 bp, Zea mays
  Clone ID: MRT4577_67537C.1
aatctccgctgtcctgttcccctaatccgccccatccccgccgccacccgccgtcgtgccgctgtgttccacccgccgcccccagctcctcctcctcctccctctaatctgcttcctcttcgtctaccttgatcgaaaggatatctgccgctgatctaccgacgactaggattttgaagctagttcggagttgtcaatcatgagcctccgccgccacgtgaatctgttgttggagaaccacaaaaagtgcgcctattcgcttcacctcctcaagcgcgaccatttattctacccaacggaagaagcagcaaaggtgcgagatttgcccagactaagaaaagtgccaccatactcaccttttgggaccaaggtgaatggccaaaagaagaagaaccaggcggctctctcagataagctggagagtattaagctgtcgccggcagacttcactgtgcggccatcgatggcttgcaacggcgaagaccgattgagttgtttctctctctctggaagcaagatcttcttcactgatagtgtggcacgcaccaccctctatgacactgaggagcgctgcatgataacatccccaagcctccattcgcccaaatgctaccccatcggcgtctctgtccccatccct

SEQ ID NO: 149138 - DNA, 563 bp, Zea mays
  Clone ID: MRT4577_67538C.1
ctccgcctgaccgcgggatgtcggcggtggtgccccagccgcagtacgtggaggagaggccgcccagagcggagctggagcctcagccacccatgtcgcccccgccgcccaaggagatgaggccccccatggacctgccgccgtcgccgcagcaccagcaccacccgccgccgccaatgccaatgccgatgcctgggaacgagagaccgccgccgccgccgatgcgatgctgatgccggcggagtgcgtgatcccgacggtggagatcccgtcgtggccggcggcgccgcccgtggggccgtgcgggtgcccgtgctgcgcgccgtgctaccagggctactacgaaggctgcaggtgctactgctgcggcaggctgtacggcacgaccgtccgcccgttgccagcgccgtgcggggcctacaggggctgccggacgttcagcgacgacgacccgtcggcggcgtgtagcgtcatgtgaagaatggtggtggtgttgctttggatttgacaggaacatgcatggtgaactatactcttggaacgaataaataaatgtgttcatt

SEQ ID NO: 149139 - DNA, 529 bp, Zea mays
  Clone ID: MRT4577_67539C.1
gggaaaaaaaaaaaacaaaaaaaaaaaaaaaaaaaaaaaaattttaaaaaaaaaaaaaaaaaaaaaaaaaaaaaaaggaattttcccactgcaaactccggttggctggttttaagggattggttttctatacttccacaaatatttttgccgatgggtagctttctgtacccctatggctgaaatattcatctatccaattaagtccacatgatgattcacccttgtagatggcatgatgttacttatggggatgattctgcctctttcacttgcagggttctaaaattagttgatgttgtggggtatccttcatttctagaaccagtcaaggaaactattttgagggttcacagggggaagcattggggcagtcatccacaagcatatttggccacaactcgttgggagcttcgtagggttagtattattgaaaatttttcgagcatgttgggacaactatcccattcaaagggtttacctatgggatatataaaatttgtagcagcgcacgagttgttcgaaggac

SEQ ID NO: 149140 - DNA, 1351 bp, Zea mays
  Clone ID: MRT4577_6753C.1
gggaatatacccggttgctcccccttggatccttgtttgcttcctgctgcctggccttctctcctccccaaaatcaatccctcgccgacaaaggagagccagccaaatcttccacctcctccatttccagccccgtccccacaccagctcgcgtaacctcctccccatggctggaggcggcggcgcaggcgcaggctcgtcgtccggcggcggcggaggggcggcagggagggcgactgggactgcggcagctgcggcaaccgcaactacgccttccgctcgctttgcaaccgctgcaagcatccgcgcctcctcgtcgaccccaacaccccgcgcgactccaagtggctaccccgcgccggggactggatctgcaccgcagcaactacttgcaaatgcaaactggccctatgggatggctggtagatatgggatgcaatcttctggttggccatttggcaacggcaacccaaatcagtttttaggtgttccaaaggattggcgtaatggagattggttctgcagctgtggatctcataactattcatctcgtactcagtgcaaagagtgtggtgcacctgtaccatcgggcattccctccacaacaatgaaagctacatctgatgcctcttccacattaggaactaagcggttggcttcagaggacctggccaatgactgggataataaaaggctaaatccaggaaatgacaattatccactttcaacaggagctgcaaataatttatttttgggtattgagcaaggagctggaagcagcaatggtcagtctgcctttcccaagtttgacaatgggagctcagtggcattaccatctgggcagggaatgtctggtcttatgggaaaaggggcaaaatggcgtgacggggactggttgtgcaacaactgcaacaatcacaactatgcatctcgtgcgttttgcaacaggtgcaaaactcagaaagaatctgcagttcaccctggtgtgttatagcttgctgttggattatattgttccaggatatgttgctgcctgttctagctccttcctcaaggctgcggtttgagttttttcgattctgcagtgtttttgctgctctaaaatgtttgtctcgatatttcattagtgcttgttgaagttccccatttgtttatggtataagcgcttgaataaaatgtttctggaaagtaccggcctacaatctggattttggcaaaataattgaattagttgttgtacaatgaggcaaattgtcttacgttgtacttgatgaactctggagtattatcactcgtcgggttgaaaaggggaactatacaatgtaatttcagtacagattattattttttc

SEQ ID NO: 149141 - DNA, 3943 bp, Zea mays
  Clone ID: MRT4577_67540C.1
ctcgaggccggccgggccgggcctccggcgccgcgctctgctcgggctcggacgcctccgccggcacgctgccgcgggacctcttcggctacggcctcgccgtcggcgactcccacgcgtgcgcgctccgccggcccgaccacaccgcggtttgctggatcctcgggggacccaccaccaccctgtacgagccggccctggggatctccttcggcttcctcgtcgccggcggcaacttcacctgcggcgtcgcgtccagcgacttcagcgtgtattgctggtccgcgggcgccgtggccgcgccggtgtcgctcccgaggattcgcccgggcgtctgcgtcagcgacgacagctccttcctgttgcaacggagcttctcctcagtcatcgacggcaccgcctacgtcggcttctcgtcggccaccggcatcctcttctgccgccactacgtgctgggctggagcttcaggatgaacggcgccgccccgccgctcaacgtctcctccctgcccaccctcccggtcacgggccccaggccgaggtccagggcgctggagattgtgctgtcgatagcgtccgcggcgctcgtcttcgcggcggctgccgccgtcttcgcgttcctgcgcaggcggcgcatgtacgcggaggtcagggaggattgggaggcctcgttcgggccgcacaggttctcgtacaaggacctgttccacgccaccgacgggttcagcgacaagcggctgctgggcatcggcggcttcggcagggtgtaccggggcgcgctggcgtccaagacggaggcgcggtgaagaaggtggcgcacgggtccaggcaggggatgagggagttcgtggccgaggtcgtcagcatcggccgcctctggcactgcaacctcgtgcagctgctcggctactgccggcgcaagggcgagctgctgctggtctatgactacatgcccaacggcagcctcgacaggtgcctctacgactggagcaggaccgcgctgggctgggggcagaggtttcgcatcatcaagggcgtcgcgtccggcctgctgtacctccacgaggactgggagcaggtggtggtgcaccgggacatcaaggccagcaacgtgctgctcgacaaggagatgaacgcgcggctgggtgacttcgggctggcgcggctgtacgacatgggggtggaagttaccgttcagaacaacgtttaagatgtgggtaaggcggtagacatgaacgggttaacttagtcaaccaggtcgctgcatgattaggtggtgagggcgcaaaagggcgactccgtgctggcggcgctgcaccttccagactcaattcaggtgacctgaaacgattatatgaagcacacagacttctataagatggttgcaatcattcttattctctccttgtttctgaatttgattaacctatctggtctgcagggtgatacacttaccctgatgatactcattgttgttgttttctacatgaactgtcagttgagttagtgtctcttccatatttgataattgttatgcttagtgtctgatatcccactgcaaactactgtttgcttgtattaagtgatttgttttctatacttccacaaatattattgtcgatgtgtagctttctgtagccctatggctgaaatattcatctatacaatttagtacacatgatgattcacctttgtagattgcatgatgttacttatggtgatgattctgcctctttcacttgcagtgttctagaattagttgatgttgttgtgtatccttcatttctagaaccagtcaaggaaactattttgagggttcacagtgtgaaggtagaatttcagttattccctaaaatttagtttcttctcagtcagttctatatattttaaatgcacagttctgtgaatcttcctaggtcaatcttcttagagatgctttgaaaggacaattttgttttttatgtatccataactaagagatcaaacctcagacttaatataagttataaatggagtacacatattattttatcatttttattgtgcttcttggtgttttttctttcattcatttgacaagttataaattggttaactgatatgatagttgtgctactgctacactagcaataatgtagctactataaagagatagcatataacttggttataatcattttcttttttgtacaaagggaaagcaaaatatagtttaaagaccagaaattaagtttgttccaccatagctacagaacttcgttggtgcaaatattttactgcacagttaaactgtagaagtagaatcttttctattttatctgtaaacataatgaataacatggccaattatgtgaataattaatgatgcacttgatagatacatgtttctttgatttttttagtgctgcatagattgcccgaatcgcacaaatgttgcacaatatgcatatggtctttctgcttttgggaggcaacttcatgcaatgggactgacagatgcttcagaaatccaccctgatagagtatatattttttctgtttctttttttgcaattttgattatcttctcaccttctatctcaattgcagcatttgggcagtcatccacaagcatatttggccacaactcgtttggagcttcgtagggttagtattattgtaaatttttcgagcatgtttggacaactatcccattcaaatggtttacctatgtgatatatagaatttgtagcagcgcacgagttgttcgaaggctaaataattgtgtcactgcaccaggcatgactgactttgcagagtcattgtcttctttggctctctccttggcaagatgtgttactgccattcacatatctgttgttcatagtaaattgtcttgaggagatagctacggtgaaatattctctattttgttccagctccgtaaagaaggacgaagttgttatcactgttcagtttcaacaatgcatcaagatcctagcgaacaaagtttatttactaacacaacagagtgttgagctgctagaacgttattcagctatgcaggcagtacatggaggtatcacaaaagagttggatttgaagaaagtgcttattagtaatctctacaataaactttaacaagaaaaataggtttgtcttggagttttgttactccaatttctgcatttggcaatgaattcccatggtttatggatataaccatttacatttttgctatttatgctaacgagcaaatttgctatgggtgtcccatggaaatcattttaacagaccagcaaggagaagatatcatttggtcggttcgaagtctatgagctcgctgtctttttctaaaactctgctgggcactatgtggcgatcaaccgaaactgctcaaactactacttgtctgaggaatccatcgccatgttcaccgagcaccaccggcagcaccctatcagggggttgtgagtactttgggtgactgttgccatgctgcctaatgcttcctgttgaaacaaacaccttcatgatcctgatgacaattgtctgctgaaaagaagggagaaaactatcaactatatatatatacacactgaaatttgttactatacgctcaattctcagttgctttttcaagttatgtttgtatatatgatcaccttcacggtgtaaatagactcgactactgacgctaggcatctcttcattcaagcagactgaatattcttttagctagcatcacattattgttccttcaattggacctatcttttttgaaaaaatcttcattagtagttctggcttatagtagttcagttaggcctcctttgccaatgctcctagagtaggcgattctctattggagacctctgccgaatagaagtgatactctgctaattctgtgaactgaaaattctgtgaagtgaatatctgaaataaattatgaggttgggagttg

SEQ ID NO: 149142 - DNA, 375 bp, Zea mays
  Clone ID: MRT4577_67541C.1
ggagaaaggtcctaagtctgtacacacacaacctttggagcgagtaacagatgcagtaactagcctccctaccttgtaactagggcgccaaaatagatttttacaccgacgtttacacgacagatgaacgttttggggagggtacaaggcagggaggcaaattacacgctggtacaaaaaagacaacacgtggttgttgggattgtcaagaggtctctatcaactgtctgtccctctttcttttttttatcaaagctagtttggatatgacttcaattttgaccctgaatttgatcggggtccccgcgcaaatccattcaccttcggatatgatgcaatgttacattcactgtaggtttaattaggcttggaaat

SEQ ID NO: 149143 - DNA, 188 bp, Zea mays
  Clone ID: MRT4577_67542C.1
aacccggaaagggcattgttttttttttcattaaaggggtaacaagttcgggacccaccccctgaccttacggggaaaaaagcccacgagttttagttcagggacaaaatttttatttatccaagttaccccagagggaccacaacggaaaagctgtatagggggaaggacccaaatttcccagccta

SEQ ID NO: 149144 - DNA, 273 bp, Zea mays
  Clone ID: MRT4577_67543C.1
gagccttgaccggcctcctcgctcggcaaattctccgccgacgacagggagagggagctcactgacgttggagtccacacgacgttttacacagcacaacctacttaccagatgcaggaggagggcgataaccattctgggaatcaaggaaaatatcattccaaggccaaattgaacgggcccgcatcttgaatacgcaagcagaggactgggaatcaagattaccgcccaaatcactgaggggaacagaagccagagccatctattcaagct

SEQ ID NO: 149145 - DNA, 2137 bp, Zea mays
  Clone ID: MRT4577_67544C.1
caaatgatgaagctgcaatgattggtgatgcaattgcggcacaaactacatatgatcgggagaatccaaaaatagtagtgggatcgacatttgttgataaggatgcctttatgctacttatcaaacaatatgctataataaatgaattcgaaacatttgtggtgcacagtgatagaagtcgatatagggcaaaatgtgcagatacatcgtgtgattggaaaattcatgccaagaaacttcttggttgtcctacgttcatggttaagtctatttcggagcaccacacatgtgccagcacaagcaaggtgttagggaaagaggctacaaaaggttggatagccaataaggcatctgagatattgaagtccaaccctaccattggagcaaagaagctgcaggttcagcttgagcaacaatatccgatcaacatgtcttacagcaaggtatgggaaggaatgcaatgtgcaaagaaagaactccatggcacttgggacaacagttttaaaatgttgtggagttttaaagctcaactagaagaaacatgcccaggaagcatagttgagattgattgcaagaagataaaaggacgtatgcatttcaataggatgtttgtggcaattagagcatgtgtgaatggctttcttgtgggttgtaggccttatcttggtgttgactctactcacctcacaggtaagtacagtggacagctagcagcagcaactgcaattgatgggcataattggatgtatcccgtagcttatgggatttttgacaaggagaacgactctaattggatttggtttatgatgcaattgaagatagctattggtacaccacatggattgacaatccacaccgatgcttgcaaaggtttggcaaatgcagtcctcagggtcttccaaggtgcagctgagcatagagagtgttttagacacctcatgaagaatttcagaaaaaagtaccagggtgatgtgttaaagtacatgtggccttgtgcttgggcatgcacacctcgtaggcaccaggtcttatgggaaaaaattagagaaagtagtcctgaagctattgtgtacttagaaacgaaccataaacagatatggtcatgagctaagttcagtgcagattgcatggttgattatgtgaataacaacatatcggagtgctttaacaactggattaaggactacaaaagctttctggtggatattctcatggatgctataaggggcaagatcatggaaaagatagcaacaaggcaaaaggtagctgcaaggctaaccggacgagtacttcctagtgttatcaatgagctgaacattaagagcagatccttgaaatatacaatcacaggaagtggtggtcttaaggccgaagtatctggattaactagggacaacacaccttggagacatggagtggatcttgacaagaaaacatgctcatgtggccaatggaagatttcaggcaagccttgcacccatgttatagctttcataacttcacgaagacaagttagaattgaagactatgtccatgagtactactcagttgaacgtttcaaagctacttattagtttgatattaacccgatggttgataaggctcagtggcccgtggttgatcctgggtttgtgatggttcctccgaagttagagaggcctgcgggtaggccgagagtacgtcgaatcagaagtagtggtgaggctgggaaaagaggcccttaccaatgcaagagatgctttcagtttggtcatattgaaaagacttgtcgtgagccccctgctgaattgggggatgagctcccatcaccgcctaaaacacaaaagagaaacggtgatgctgtcccgcacacaccaaaaaggtccaacacggcaaaaacaactgcatcaactcctccttcgacaggtccaataacaagaagcatggcagcttcaccttctacttctacaggtgaaggtcctgtcactagaggaatgacaaacatatcacctgggggcattgcaagaagagttatcattagttagtagctgtaatggagatggctgacttgatgttatgctgaaatggagaaggctgacttgatgctaaaaacctactcttatgtttagtgctaaaaaccttctgttgtgttcatgac

SEQ ID NO: 149146 - DNA, 316 bp, Zea mays
  Clone ID: MRT4577_67545C.1
cctaccacaccctatcgcattaatacactgcactgtcagctaaactaaacgcagggcttcatctaacgatgcataccgccaataccacatctttcttacatctaacactgaccaccactacctcaacaacgactaacaaacctacggctatttctcgagtcaaagatcattctcaatctctaaacacctacgtcccttacatccctcaaaatcaccctcaccacaaagcacgcgattctcatcgacatccaattcatcatcagcaatgtactcaaccaactcaacatcacacgcaaccaatcccaatccatcacaa

SEQ ID NO: 149147 - DNA, 300 bp, Zea mays
  Clone ID: MRT4577_67546C.1
tagatcggatcggaaagccacggcgccgagggcgttggcgacgccgcagcgcatgcagaccaatcccgatgatggccacagccaggtgccagccgacaagcgccgtcgaccggagcaccctgagacctccgacacggactcagactatcgcgacaatgatgataacggacgtcgagagcggaggttggccgactagaaggtgcgcgcatatgacattctgatcaagcacgagggctaacgccgtacggccatatggcgggagccagaacgcgttgacagctcagacacgacacgtgacga

SEQ ID NO: 149148 - DNA, 397 bp, Zea mays
  Clone ID: MRT4577_67547C.1
gggggcgaagaaaaacggaccaaagcttccaaagattttaacgggtttccacacaagacgggcattgtacacgtttacgggggggaaacgtaacaggggggacccctacggggtacaggtgacaacatccaatacaggttggggcccttattaccacccccccacataaagcatgggggctaccatttatgacggtttatttttcctttacagtttacgggccatttaaagccgggggatgctggggggaccaaccaggagtttaataccagcctgacgactacattttttttacagttttgacaggggacggcttattaagggggcttaaatcgccccggggggttcatccgggggggggtacccataagtgggaaactttaccgggggggctttt

SEQ ID NO: 149149 - DNA, 481 bp, Zea mays
  Clone ID: MRT4577_67548C.1
aaaaaaaaaaaaaaaaaaaaaaaaaaaaaaaaaataaaacataactctaaaccacgctaaaggacaaatttttgtgttttgtttgtcactgcgctgcgggtcgtgtttgctttatataggtcccactggggcctgtcttgacgttgctttgcagtggacctggtcggccctttactgcgtcgtttttgggtaaactgtgcggtttcccaccttattcggcttggggaaaatctgcctttccccagctggcttacttgggaagaggtccgcctttatcccccttgccaactggtgaacaggctgaatgggaaatggcttcgccctgtttcggcacattaattgcggaaggggcggtggttgcccccaccctttccgctccacttgtgagggggttaccgccagctcgttcggtttatttcccttcctttttggccacgttcgttgggttttcttgcttagctttaattcgggggctgccttt

SEQ ID NO: 149150 - DNA, 283 bp, Zea mays
  unsure (1)..(283): unsure at all n locations
  Clone ID: MRT4577_67549C.1
atggaaagagacttggtgggaccatcatggttctgtcctcccattcttgcccagctgcagggntacccattctcgccagtatcttctccactctccctataccaagtgcttccatcttcatttattccagactccttgacggcttcgtccagctagttgattccccattccttctcactagcaataccagtgtctctcttgggtggggaatcacaggattgaggagccgggcccctcggcttgcaccgtgggtagaagtcctgctgcttgaactgtcttctag

SEQ ID NO: 149151 - DNA, 340 bp, Zea mays
  unsure (1)..(340): unsure at all n locations
  Clone ID: MRT4577_6754C.1
atacntttttttttttttttttttttgcgccaagggggacatcatatataataacagagtgtatagagataaatgtcacaataatcagagtacttattacatagcggaagacttacaaaaaataaaagataaatataacaggatctagaatccatccttggcgccagaaagtcaactgggagacgccacctatatcaaatcgaactcctcgatgtggctcctcttgaaccatctgttcttctcctggcacttgagattacaggttccactttctcttcaagtgactcgtaaccttgctactagtcatagcaatataacccacgcgtccgcggacgcgtgg

SEQ ID NO: 149152 - DNA, 1299 bp, Zea mays
  Clone ID: MRT4577_67550C.1
cattgggtacctcgaggccggccgggaaaaggagggaggtcacgtaaacttaatccaatccaccaaaccccaaatctctgtctcgcgctggcgcagcgcagggcaccgccacgcgcgcctcatccggtaccggcatgacgagcgcctccgagctcttcaccgcgcgccgtgccgcccgtggggcccgcctctccgacctcgacctggatccgcacgccgacgcgctccgggaccagcacggacttggcgcccggcaccggcgccgcgggtgccgcccgcgacgccagctcgacgccgccggggacgtgcggcagcacctgcacaccggggccccgccaccgcgtcgccgcgggtcgtacaccgatcagatcttatcgtacatagacaacaacaaccttggggttggggattctgcagctcggaggaacagacttgataggctgatgttcaggacaaatgagcggcttcctggtgctgtactgcaagcacaagcgcgtgtcctggagagactcagaggcatttctcttggttcatctgcgtccaggccatccatctcattagatgaattttcagctagcgatgtattcagaatcatcgacttcagaaacagggaagcacggcatgaagcaaatcggcaccactcatcgtcgttccacccaagcagtgaatcagatgaagaaagaccaaccgtcagttccactcactccaaccggtcaaccggacttaccaaggcggctttcctgcgtctgcaggtcgagatttttgaggctagcaaagatgatagcagagaggcatcgcctgaatgttctatttgccttgatggattttacgatggagatgagctgataaggttgcgctgtgggcacaggttccactcgacatgcttggagccatgggcgcggaaatgtgcagactgcccatactgtcgaacgaacatacggtcacgatcctgacgacaaacccttagttcagaataagcttataaccaccatggagtttcactgttgtaaaattcgctgttgtgggcatgccagttaatccggtgctcctatggcgacatgtaatttctaatatcctgaatattttgtgttgtgtcgctcagagaggtttatggtgttgtgtgcgagtggaggctgatagcagtatagcttagaaagcacccttttgtgtgtatgtagcgagggatcacgcaaatgatcctgtactactcatgataatgttctgatgtctgaatttcagttgttactgcatgcttcttgttatggagggtgaggaacatgactttgctatgatgcggtt

SEQ ID NO: 149153 - DNA, 676 bp, Zea mays
  Clone ID: MRT4577_67551C.1
tcgaagccggccgggccgggcttttgagcatcgcatgatataggtgtcttcgtactcgcctacctccgcggttcaaacctttcccccttctcccaattccttccgccggtcgccgctccacccgtacgacgacaccatgagggagggcattttccatccacatcggccaggccggccatccatgtcgaaaacgcgtgctggaagctgtactgccttgtatatggcattcatgtctgacagacgcaggatgcccagccgacaagaccattggtggagatgcgaggacggttgccccgccgtcctccaggacattggcgctgtgaacctcttgcaccaggctgtctatcataacctctgaacccactgtgcacctatgacgatggaactgaggacctaccgccagctcttccaccctgagcagctcatcagtgccaatgaggatgcagccaacaactttgcccgagctcactacaccattgacaacgagattgttgacctgcgccttgatcgcatcacgaagcttgccgacaactgcactgggctccagggcttcctcgtcttcaacactgttgatggattaacgttgtctggacttgtatccctcctcctagatcgcctgtctgctgactacggaaagaaatccaaccttgtgttcactgtgtacccttccccccaa

SEQ ID NO: 149154 - DNA, 185 bp, Zea mays
  Clone ID: MRT4577_67552C.1
ccggaccgagaaacccggggcgacccacgcgaccgcggacgcgagggagcgcgaagccggcagcccccgcggccccggacagtccaggggcaagcacggggcccaacgggcagcaggcagaacaggaacaggcagccaggccaggaccggaaggaaaggaaggggggaacaaggagcgccgaggc

SEQ ID NO: 149155 - DNA, 165 bp, Zea mays
  unsure (1)..(165): unsure at all n locations
  Clone ID: MRT4577_67553C.1
ggaacaaccgaacaaggcnncgacaaccccagacccacagcagngaccacggcaacgacccaccgagacaaacagggacaccnnaggcaacccacacagggcaaccaaaggaaaacccagaagcaaggaaccgaccacaaaaagaagggcaccagaaacgaacca

SEQ ID NO: 149156 - DNA, 993 bp, Zea mays
  Clone ID: MRT4577_67554C.1
cggacgcgtgggcggacgcgtgggtttacccctccgcctctcctctctctccaagcccagctgccgtcctgagcctccgtttgcggtgcgacagctcctccaggaccggcccccgcgcgcgtgccgtacgtgccagggacgacgccgggcggccgatggagttcacgtcgtcctacttccacgccttcggcaaccccgacctcgcggcggtggtctccggcgacggcggcagcgcgcaggcccaccggccgcgccgctccaccgacggcgcgaaggcggaggacggcaggagccccaccaccacaacggcgaggcgcgcgccgtccatgttctgcgtccccgacacggaggcggaggagcccaacggcttcctggacgagtgcaccctctgccgcaaggcgctctgcggcgacatcttcatgtacagaggggacacgccattctgcagcgacgattgcaggagggagcagatcgacatggaccgcataaggcaccggaggaagaagcagcaggccctcatagcgcagcagcagcagcagcagcaggcggcggcagcggcggcgatggcgcagagggaccgacgtacccagcggcagcttcagccacagcactagacggagctcacggaagcttcatatacaccggttccgggctcgtcccaagtcccaacgtacccagcagggatggcggatggattcttgcacgttcctagtactaggcaaggattctcctcgcaaggaccaagtagccacgacctttctttgcgtttgtatcgtccgacgcgaaacaacgtagtgagcggaggttttccgaggctattgcaatgactaaatgagcaatgcaagccttactcgttttttgttttgattattcctgattaaaactggggccgtcggagacgctatgggccagtttggcaacccagtttctctaagtgatttttatttttcaaaaaaataatagctcattttttcttgagaaaatggaaaccgt

SEQ ID NO: 149157 - DNA, 589 bp, Zea mays
  Clone ID: MRT4577_67555C.1
ccggccccactggctttttttaaggccccacccaaactggcgaaccccctttgggttttgcttttttattattggtttgttctgggaaataaaactttaaattgggttggggcaaatcggccaaaaaccccttttggtcccaaaggacaattacttggtttttccgggcttttttttttcccctggtggccgaccgggccttacctgggggcccgggtgggccttggccttgggagggttgagccccttgggcgggtttccggtgaaaaagggcccattggggaccgggaccaacccttggaaccccaaccccccggggttaaccaaccacatgggctggaagtccccgccccccttacccacccggaacccccgccccggagaccccccccggaggacctggattaagattttcgggcccttttggcccaaccaatccataatcctttgggggggcccggaacccggggagggccccaaaatgggggccttaagcctggggcccccgggggcaccccatccttccccacaaaaaaaaaaaaaccccagccaatgcttgtttcttgggccgaatttctggcggccgggg

SEQ ID NO: 149158 - DNA, 710 bp, Zea mays
  Clone ID: MRT4577_67556C.1
aaaaaaaaaaaataccaaaaaaaatcccctgcaggctgcagctcctcaaacaaggaattccaaaccgaaaccacacagctccccagcttccagcaagacagagggagaaagaaaccattatgatcagcaccaagaggatctctcagatggtcaagaagtggcagagaatggcagtgttggggagaaagcggctctcctggagggtggaaagggaagtcgaggatcgatcctgcgcctctgtggcgagcaaggaccactgcatgatgtacagtttagacgggaggaggttcgaggtgccgctggcgtaccttggcacgctggtgttttgcggaactcctgtggatgtcctacgaggagtttggcttcgtgagccatgggcggatcacgctcccttgtgatgctgcagccgtagagtatgccatgtgtctcctcaggaaaggctcctcggcagatgtagagaaggcattcctgagcaccatggcagtctcatgccactatgcaagctgtattgctattgcaccatttgttggagttagccatcaagctgttatttgcagctcctggctgactgtaaagtagtttagtatatagtttgtaggaaaagaaaattctccatggagccttttgatgcttcaagcaatcaaggaaaatgcaaactagcatgttaattagagctattattctcgttctttcgtggattgaacacgatg

SEQ ID NO: 149159 - DNA, 180 bp, Zea mays
  Clone ID: MRT4577_67557C.1
aaaccaatataaacaaaggccggcttggggttatttacaagatacagaaaaattgtttattcaaattcaaagttttaacccaaacctgtccacttttttcgtgagatggcctggaaaaattgcacacaagggaaacgggagaaatgttgtgccaaggagaaatatttttggtacgcttga

SEQ ID NO: 149160 - DNA, 743 bp, Zea mays
  Clone ID: MRT4577_67558C.1
gggaacactcccatgacctaaaactaaacctattgaacagactcgactgaaactaatcaattaattaagaacctataacgattaacagtcactgctaataaagcacccgcatgtttaacgaccgatggatgtcactgctaataaacctatagaaagtttttgatggactcctcgagctcattcacgacggccttccagccggcatgcgtcgggttgatttcgtcccagtagaagtacttgtccggcgcggagcacaggctgtacgcggcggcgccgtcgtccatccggccgcagtagtcagtccggtcgaagacctcgcagcacggctccagcctgtgcttgttgaacctcttcgacgactgggacgagccggaaccggaggtgaggcgcctgaacatcgtgttgaggtcgaggttgaggacggccgcgtccttgaacaccttctcttcgaggtacgcgttgtggacgctcgcgaccatctggccgtcgcaggagctgtagtcgctggacctcgacagccacggcgtgcagccgatcgggggcagcgtggtcaccagcaccttctccacgcccaggcccgtcaggtgctccacggcgtcggcgatcgcgtccgtcacgtcttgcgccatggcgttgatcatctcggcgctggtcatgtcgtcgttgacgcgcgcgtagtcgcgtcggccggagaaggcgacgagcgcgacggagctcgtgccgaattcctacagcccggggat

SEQ ID NO: 149161 - DNA, 483 bp, Zea mays
  unsure (1)..(483): unsure at all n locations
  Clone ID: MRT4577_67559C.1
cgcctcggnagacatcatcgggcgcgggggggggggtgtgggtctgtaccattgactgtggtgtccatttaccgaaacacctggcttcatctgggagtatcacattctgttgggagagaatgggccttcaagagcacagtggaatcgggactcactttactgttanngttcgtgaggtannaagccattggggggagaagtctctgtcatcagctntcccgtggaacanaatggagctatacctatggatgcgattgaagagctataccaccagaaatggtgtgaagtgtcttcattgacagtggtgaggggagatccagcattccttcgattggggaggtgcaaagagcgagcttccagaacatttaaaatctgagatagcgtgatgcgtgctgcttaatcctcaagggtgctacttctgggaggcgcctnntcattcggtgtgggatattnnnccggggcacttgggcaanannacctttg

SEQ ID NO: 149162 - DNA, 2651 bp, Zea mays
  Clone ID: MRT4577_6755C.1
tcccggccccaattccgcacggacgcgtagtggaatatacccggttgctcccccttggatccttgtttgcttcctgctgcctggccttctctcctccccaaaatcaatcgcccacaaaggagagccaggcagccagccaaatcttccacctcctccatttccagccccgtccccacaccagctcgcgtaacctcctccccatggctggaggcggcggcgcaggcgcgggctcgtcgtccggcggcggcggagggggcggcagggagggcgactgggactgcggcagctgcggcaaccgcaactacgccttccgctcgctctgcaaccgctgcaagcagccgcgcctcctcgtcgaccccaacaccccgcgcgactccaagtggctaccccgcgccggggactggatctgcaccggttgcagtaacaataattatgcatccagaaagaactgcaaaaagtgtggcttgcccaaggaggaagcagcaatgccagcattgcaaatggcagggatgactatgccagcttatgcaacttatattgcaagactacaaagccttgctgcttctgcttctgcctataagatgaactttgggatggctgccaattcacctttgcagcagcaactacttgcaaatgcaaactggccctatgggatggctggtagatatgggatgcaatcttctggttggccatttggcaacagcaacccaaatcagtttttaggtgttccaaaggattggcgtaatggagattggctctgcagctgtggatttcataactattcatctcgtactcagtgcaaagagtgtggtgcacctgtaccatcgggcattccctccacaacaatgaaagctacatctgatgcctcttccacattaggaactaagcggttggcttcagaggacctggccaatgactgggataataaaaggctaaatccaggaaatgacaattatccactttcaacaggagctgcaaataatttatttttgggtattgagcaaggagctggaagcagcaatggccagtctgcctttcccaagtttgacaatgggagctcaatggcattaccatctgggcagggaatgtctggtcttatgggaaaaggggcaaaatggcgtgacggggactggttgtgcaacaactgcaacaatcacaactatgcatctcgtgcgttttgcaacaggtgcaaaactcagaaagaatctgcagttcaccctggtgtgttatagcttgctgttggattattttgttccaggatatgttgctgcctgttctagctccttcctcaagactgcggtttgagttttttcgattctgcagtgtttttgctgctctcaaatgtttgtctcgatatttcattagtgcttgttgaagttcccccatttgtttatggtataagcgcttgaataaaatgtttctggaaagtaccggcctacaatctggattttggcaaaataattgaattagttgttgtacaatgaagcaaattgtcttacgttgtactttatgaactctggagtattatcactcgtcgggttgaaaaggggaactatacaatgtaatttcagtacagattattatttttcctgagactccagttgttatgcgagttttgcccgcgtcgctgcggaagcggcagggagggcgaagctgcggcaaccgcaactaccgctcgctttgagctcatccccaacagcaagtggttcaccggggactggacgcatctccaggttcgagcgtaaaaatcttaagttttgagcataaaacccctcggttataagcgtaaataccgagccaatatgaggttcatatctatggtgggttgtattcacgatcctatttttatgttaattccgaaaaatatgggagtcacatccatggggtttatatttttatgcagatccaaaaattatggcagatttgtggtggtgtagtattgtatggttaagacttataagacttaagacttatgtatcgtgtggttgagagttgaaacttatttgtggatttgtggtgcgtaattctgcctatatatatttatacgatgtatgattaaccctggtcatatttgggaatgaaatttattcttcctgcaaaagaaatctgtctcactgcaattattcactaataggatattgtcgtgtggcagtgactaacattgtttctctatttacactgcttactgtttgctacctattttccaaatgaatcaaattgttcactggtgctgactgcaattacctgtgtttcaggtgcaaaactcagaaagaatctgcagttcaccctggtgtgttatagcttgctgttggattattttgttccaggatatgttgctgcctgttctagctccttcctcaaggctgcggtttgagttttttcgattctgcagtgtttttgctgctctcaaatgtttgtctcgatatttcattagtgcttgttgaagttccccatttgtttatggtataagcgcttgaataaaatgtttctggaaagtaccggcctacaatctggattttggcaaaataattgaattagttgtacaatgaagcaaattgtcttacgttgtactttatgaactctggagtattatcactcgtcgggttgaaagggggaactatacaatgtaatttcagtacagattattattt

SEQ ID NO: 149163 - DNA, 572 bp, Zea mays
  Clone ID: MRT4577_67560C.1
gtctcttcctttttcttatcaaagttgatctatccgttccttgccaaaacggtggaccacatcacattagtccgtgcagtggcgttattgactctaccggttcttgctagctacccattctttccttcgttgtccgggttcgggctcatggtggtagtaaattgtgcgtcttttctgaagaatacattctcggtgagtgcacctctttctgtttagagacacggcagggtttcactccgtgatgcctaagcaagccaggcttccagtacagaacatgttgttcaaacaatttttccaagctgtgcgcctgtgcccaagaacttcacagggaagcttggagccaatggcagatgcttcatgcatgggcactatttgtgtcaatgattgttgagcatgccatggacatatttcaacttactactgcaggcattgttagttcgaaatctaagctgtgttcttctaaactgttttcaggtaactaccattaccgtgttcaacattttgatgaatgaagctgtgactcaggatgtaagagccgcagccaatgggatagctgtaacactaatgtccat

SEQ ID NO: 149164 - DNA, 283 bp, Zea mays
  unsure (1)..(283): unsure at all n locations
  Clone ID: MRT4577_67561C.1
gcctctgatgctgctcgagtttttttttttttttttttttttnnnnncgnncccacccacagacgagttttaattggcgggggaaaaatttcgtataccacgtttgccggcccccggcattatcccatctggcctgggagggaacacccaaccaaacttgcaaaacaccgccaggacctaccttatggttttttccctgctggcaacaggccggccggccggaggaccctgaaaggacccatcggttgccccgttgggaatgactctagggcctctgacaacc

SEQ ID NO: 149165 - DNA, 475 bp, Zea mays
  Clone ID: MRT4577_67562C.1
acaaaaaatttcccactggtggggggggaaaaaaaacccggatccatgatattgcatctttactgggactcgcccaaagcccccccccccccccctgggcatacacatacataccccccccctccattaccattttttctcccacgggggaggagggaaaccccccaaaaatgtatagttgccctacagggccgatcaaacccttacaagctgcccgccccccgggggccctattgtaaacagggcaccccccaccgggggagctagcccccgatgtagttttcaccctctttgcccccccccccggtaaaacccaggggggagccctgggctacatggcaacaacatcaggccaatgttgggggccggggtaaaaactaaaaagggccgggaccccctggtgacctgaaggggtaccaactttccctatagggaggcgaattaaagcttggcgaaaccaggggcaaagctgttt

SEQ ID NO: 149166 - DNA, 444 bp, Zea mays
  Clone ID: MRT4577_67563C.1
ccgaattcccgttcgaaccactcgatcccccactcttcacgaattccgcacgatactatgcgtttttgctacgtgggcttactaacaaaagtttgttttcctttaaaggtaaaacggcaaaatattcatatatctttttttcaactaatactgatcgagaacaatattatcatacaagtaacattctcaaatacacgaagttttttattaaacaaatccaatgatatctcagatttatgcgatgctcatgttgctttaattgttttctctaacaaaggaaaactctatgagttctcttctgatcccatcatggacaggatcctagaacgataccaacgacaaatatatgccccaactggttctgaatcacacgcaaatttgtctttggaatcttccaaactcatgtcaactattgaagtctttcaaaagaactttaagaacttt

SEQ ID NO: 149167 - DNA, 509 bp, Zea mays
  Clone ID: MRT4577_67564C.1
tgaattcggcacgaggcgcgagctacgctattctgtcgccgtaggatctcgtcgccctcctgcgcctatctcctcgcagccccaggacgcgctatcgagcaccatgcggcctgatggaactgccaaaagaatgagcatgtgctccccaatcgtaatctcttacgtaaccttgcagagcccaggctcaacagacttcgtattatcaaaagcggacgcgatcacacccccactgacaggagctagccattcagtgccctcaatctcagcatgctcaattgcgaggatgccggcgtaaacgaagacgccttcagggaagatatagattaactgcctgtggacgaaatagtggatcccatgcgctataatgttgtgaaccgtctctctcgttttgagagacacagcaggtggagtatctagtgactttaaacgttgaatccgccaatacacatgccccagagccataaatgtgcgtacatatgactgccacggatccaaaattttggcattct

SEQ ID NO: 149168 - DNA, 301 bp, Zea mays
  Clone ID: MRT4577_67565C.1
attatttttaaattttatttattttttattgggtacttttttaatattaaaaagactgggagccccggaaaaaaatataaaaatttggctggttgccaaataaaaatacctggaatggcaacagaaactaaaataaatgaatacacgggggcacttgacattcttaaaatttctggtgccgagactaaaattaaatcataaaacctaccagcatttttctgcataaataaaaaaatgtgataaaaggaaattggggcacaaactccttctttaataagagacggtttgataggtttctatg

SEQ ID NO: 149169 - DNA, 201 bp, Zea mays
  Clone ID: MRT4577_67566C.1
gacccacgcgaccggcccacccccatgttttgaatattttattgcacacacgggtatacctacccttggggctaggggggcaccatcaaaaaaaaacactgggtgccactgccaatgacaaacagtctgctcactggatgacctgaggaaacatggcacataatatgacatcactcgataacactgaggcatatacagtaa

SEQ ID NO: 149170 - DNA, 269 bp, Zea mays
  Clone ID: MRT4577_67567C.1
gcagctcttgcgattttccctcaagcgtttcgaaccggaacggatcctacgaatcggaggtgtgtgctgatatgcgaccacggggaacaactacccaaccgtcagcaccaaatacatctaggccttcaaaaaggccacgtgcaagctactatcccttatcacaaataagagctgttcacccctcatgctccttctcgccagatactccgtcttgacgaccgacacgaagtccatgaccagtgccgcgttatcaaccattacattcccag

SEQ ID NO: 149171 - DNA, 234 bp, Zea mays
  Clone ID: MRT4577_67568C.1
aggcgggcggggccgccagtccacacgcaaacgggaagcagaagttggggatggtctctccctcctcttccccgtcggggatcagatctgtgcgtgcggagatggcgtcgctgctgagagggtccccccgtgaccccggtggccgtacgagaagatctttatgaccaagtgcgcagagcgccgcacgctcgacaaggacgacagccagaagccaggcccaaacttgaacagtct

SEQ ID NO: 149172 - DNA, 279 bp, Zea mays
  Clone ID: MRT4577_67569C.1
ccctcgagtccggccggtaccgtccccgccgtccgacccgtcacccccactgtgccgcgccccgccccgccccgccccgcccacgccgccgtggcaacgccatggggaagcgatccggcggccggaagctgccgttcctcaccagatcctgctcgtcctggtccaagcggaatcgctccgcccgccgtctgccttgcctgccgaagcaggacaacgcgacaaggactcttgtcgccataccgctatgctgactcgccgaccgtaaccccagaatcgggg

SEQ ID NO: 149173 - DNA, 376 bp, Zea mays
  Clone ID: MRT4577_6756C.1
gagctgcaagggagccaggagtaccgtcggatggagctgtggtttgggcctgcgagatggtcacaggggatttgaatccgaccttgaagtatacatcctctccgtttgtaataccaccttgcacaccaccgttctagttggtactggtagtcatcccaccgttctccttgagaacgaaggggtcgttgtgtcgcgagccaggtatttcggtttcagcatatccagaaccaatttcaaaggccttggtggcggagatgctgagcatatcgtgggcgagtttcgcatggaatttatcaaagacgggttcaccaacgtcggctgggagaccgcggatgacacaggtgactgtaccaccgatagagtcagtggcttcctt

SEQ ID NO: 149174 - DNA, 374 bp, Zea mays
  unsure (1)..(374): unsure at all n locations
  Clone ID: MRT4577_67570C.1
gcccacacgaacncgagaccncgcccgcccaaaacaaaggccggaggggggggggaccaacgccgccgcggcgggcgngncgaggagagaagaagaggaaaggcggcgagcgagggcgngccccnggggaagggcaacccccnccncgacaacnccgccgnngncgaagacgccnnccnggcaaagnangacaggggggggaacaangccanncncgcngaggagaagcacnngcccangnacgaagagnnggccagcaacagcaacgcggaacaaaacgccggaggagccacccagaacccaagcagggcngcccaacggacgcnncaaacncccggngcaacaagcgacacgggacgcaacgggaaggacaa

SEQ ID NO: 149175 - DNA, 402 bp, Zea mays
  Clone ID: MRT4577_67571C.1
agccctctaaatagagttaggtaaattatcgggtttcaacgtttgaaatcaagttgttttttttataaaaattgtcttgaaaagggtgaaaaaccttttttttttttttcccccccttgttggggagaacattcaaaaataacccccctaaaacttcaaaggttgttgatggtaaaaggcacccttcatttttgggaaaatttcttgggagttttttctcggatcctcatgggtcctttttgaacctgttagggaattatggaaaaaatagggggtgggaaaattttttttcatttatggcctgattgggttttgcgtttttttttcacaaatggaactttttgtagggatcccagaccttttagcaagatcctaggggccggtttggccccccctttttca

SEQ ID NO: 149176 - DNA, 355 bp, Zea mays
  Clone ID: MRT4577_67572C.1
gtggtttttttttttttttttttttttttttgttttttttttttttttttttttttcacttcagcggcctcacagcatattcgaaattcgaaatcgtggagagggaatgcaaaatctacaactccttgggggggtaaaagagccgtttcaagggggagagggggggcatccaccgcccggaagtcccgaattcgaattcaccgcccggcaggggggcctgacctcccccggggaccccgggggcgggccgttgttgccgggcctgcccttggccccggcgatttccgccgggaaggcgccggcgttggtgccgtgggggcccccgggcgggtcgggcgccccgctcctgaagggc

SEQ ID NO: 149177 - DNA, 295 bp, Zea mays
  unsure (1)..(295): unsure at all n locations
  Clone ID: MRT4577_67573C.1
ttttnntgatattttttttttgcaaaccacctccatcgtcttcttgcctgcttctattccaactaaaaaaattacaattaatccgatttccctcccctaacttgaggggccagcgaaccaccaaccagcccccgacccccggtcccgaaacaacctctatgccaaaatggccgggtggcagaaagcccctctgacccagccgtaggcgatcttactatacgccgcctccgttaagtggatgccgacccaactgagcgacaacaccgggtcagaacacgcttacacgccggtcatg

SEQ ID NO: 149178 - DNA, 498 bp, Zea mays
  Clone ID: MRT4577_67574C.1
ggtcgtcgccgtgatgcgcgttcgcggaaagcgcgctgccctggcccgtctcgaagtacatcaggttgttgccgacggtgccgcgcttcagcgacaacgcggcctcgcgcgcctcgccgagcagcgcgagcgagatgcaagctcgcgttcgccttctcggtgcccgcgatcgactggaacaccagatcgaccggcgcgcccttctcgaccgccgcgatcgtgttggtcacgtgcgtgagcacacacgactgcgtcggcacgccgtagcgctcgcggaagccgtcgatcatcgcgagcagcttcacgatcgcagccaggctgtcggtcgccgggttgatgccgatcatcgcgtcgccgcagccgtacatcagcccgtcgagcatcgatgcggcgatgcccttcacgtcatcggtcggatggttcggctgcagccgcaccgacatccggccggccagcccgaccgtgttgcgaaagcgcgtgaccacgcggcgcttgcgc

SEQ ID NO: 149179 - DNA, 312 bp, Zea mays
  Clone ID: MRT4577_67575C.1
caacaatggcttccaagacattatccctccttgcgcttcttgccctttttgcgagtgcaacacatgcgtgcatgattccacaatgctcacttgctccgagtgccattattccacagttcctacctcgagcaacttcactgggctctgaacacctagctgtgcaagcctatatgctacatccttcgctcgctgaagcgtcctgattgcgccatctcggcacttacaccatccatgcttgacccagctatctttacaagccatttacctgcatcacccgcgtgctctgatcaactctatgcctttgatccgttg

SEQ ID NO: 149180 - DNA, 471 bp, Zea mays
  unsure (1)..(471): unsure at all n locations
  Clone ID: MRT4577_67576C.1
gggaagccgccctttttttttttttgtaaccaatggaaataaatagcttacgaatgatctgattttttgacactatatttatgttcaacatgtaatttatggatgaatttcttctccatttgatgtttgcgtttaacaaacaggagaaggctcaggctgaacaagcctcgccggcggcacagaagtgattccctacctcgagagtacaagccgtcgcggcgccgcctcggcgcctcaacatcctctgcaccgtcagctattctctctctaccaacaaccagtggtgttgccgtgccgcccctgccggaggagtgcagcaaccgttgtgtgtgttggcgagagacgttctgcatttcttcagagcttgctgctcgtgcttgtgctgacctttgttgtcgagagaggtgccatccactgcctgcagatcgccaccagctcgccggactctttcttccgcacctccnnaccgtc

SEQ ID NO: 149181 - DNA, 701 bp, Zea mays
  Clone ID: MRT4577_67577C.1
ctaaacgactcctatacggctcgagcggcccaccccacagcacactgattgccttgcacgccatagatacgaggctggcttgcacattactaccaccatcagcacatgtaatagaagtacctaatacgagaagcgcccttcaaagacgtaacacgatctgccgccatgatcctcccatgaccaattcttttcttataaatagctgcacgaagcacctccaccattaccacgcctatgtagaatgctggatatatgcacacacactggctgtcactcgaacgcgcattcttagatcccatttagccctatacagaagcagattacaaagggcctgctcaaccatctgcattcataaactgtgcgaaatgcctgcagtctccgcacatagactactaggatgacatccccgttgcggcaaatggaatcataaaaccctacctccatcgattcatcctcccagacagcgcgcagcctgaaacaatacggacgctctgccgaagcgctcttaaatcctttgcctgagagaggatcgactcattgcgacacattgccttcaatggtcctgaagactcataaaggttcgcgactgctgtcattgaacttaagcgtattgctatgtcaagcccttatggtacatcaacttcatcctacccaccaaatactgagccatttgctgaaactcaatcgccacggcactggct

SEQ ID NO: 149182 - DNA, 988 bp, Zea mays
  Clone ID: MRT4577_67578C.1
ctcacctccggccacctctcctcccgtgcctccgccaactccctcctccgcgtcgccccctgctcctccgcctgcgcgctcatcctccgcctcctgctgctccaccgcctccgacccgaccacatctccctctccttctccctgcacgcctgcgcccgcgtcgtccccaccaccagccgctacccgctcacggtcacgggcctcctccactcgctcgccctaaggcttggccacgcccgcgacgtctacgtcgccaacgccgccgtatcctcctacttcgccgcctccgacgtcgcctccgccgaccgtctcttcgcggaggtctccaccgacgtcgccgacgtcgtcacctggaccacaatggtcaccggccacgccagtgccggcggcctgggccgggcgaggcacttcttcgacgccatgtccgagcggaacgtcgtatcctggaacgcgatgctgagcgcgtacgcccgcgccgggatgctcaccgaggcgcgggacctgttcgacgcgatgcctaccaggaacgccgccacctggagctgcatgatcagtggcctcgtgctgtcgggacgctgctgggaggcgctgcatgatcaggggctcttcggtgacatggtccacagcagcggcatcgtgccgaacgagcccgcgctggtgagcgtggtctcggcgtgcgcccagatgcggtcactggaacacggcgcgtgggtgcacgcgtacgccgaacaggagctgcagggggcgatgagtgttgtcctcgcctccgctatcatcgacatgtacgggaaatgtgggggtatccacagtgccatcagggtgtttgctgccatgcccatgaggaacatctactcctggaacgcgatgatcactgggctcgcgatgaatggtggcgaacgacaggccctgtcgctcttatggaagatgcagatggttggcgttcaaccaaatgacataactttcatcgggttgctgagcgcttgcaccc

SEQ ID NO: 149183 - DNA, 743 bp, Zea mays
  Clone ID: MRT4577_67579C.1
cattgggtacctcgaggccggccgggaaggaccaatcgcccacgtatggggtgtcatggacggcgtcgttcgaaccgattttcctgatatcaagatgaagtgcactatccactccgatgctggatccatcatggtcatcccgagagagaacaatatggtccgtctctatatacagatcgcctcatctactgtcccagacttcaatccgcgtaagactgcaacgacagaagaagtccaaaagcacgcacaagagatactgaggccttatatgatcacttgggaccgtgtggagtggttttctgtctatcccattggtcaaggtattgctgagcggtacaccctggatgagcgagtcttcatgggcggcgatgtctgccatacacactcgcccaaagccggccaaggcatgaacaccgcatttcttgacgccgtcaacctagcctggaagatccaccacgtcgagtctgggttcgcggatcgtgacatcctaaccacatatgaatccgaaaggaagaaggttgccgagaaccttctagacttcgacgctagatatgcaaagctctttagcacacgcataccctcagcaggagaagtcgccggcgcacacgactcctctgaccaacaagaagagaatgagttcgtaaagacattcaaggcgtcttgcgagttcacgtccggctacggcgtagcttacaatcccaaatctcataatgggagtaatgaacatccagcgaaacacccgc

SEQ ID NO: 149184 - DNA, 257 bp, Zea mays
  Clone ID: MRT4577_6757C.1
ttattcgtcccaaatcttcttctacttttattcattgccttattcatcctcatacctattcgcatcgctctctttctatctatgtctcttttgcatactaccggcatatttatattcctctctaaccgatctctgaccatttatttccccctgtccatcctctttgttcttctctttctttcctgttttctaatgatatcatttctactctaacttttgcgtacgatctgatctttcctttctactctactcattct

SEQ ID NO: 149185 - DNA, 279 bp, Zea mays
  Clone ID: MRT4577_67580C.1
caaaatcccatgtgtttgggtggagaagaagaaaggaactccagtgcagcaaacaccccgtgttcgatgaaatgtttaaatcagaatcattagcatatccgcagttggtttagctatggtacgttaattaatcacgtgatgcggaagacgagccaagtcgaccccaagatgacgtaacgggtgggctactcctcatggtgatgctggtgggtgaacttgaagatttcgtgatcggatcaagcgccaggatgtgagatgctcgccaaatggacgtcgtct

SEQ ID NO: 149186 - DNA, 253 bp, Zea mays
  unsure (1)..(253): unsure at all n locations
  Clone ID: MRT4577_67581C.1
cattagtttctggcttctcctccccctcagaccaagtcctactggtgttgagggtgccttnacattttntngacaggccatggctgcttcttatgttgattaccgttgcttcttcggcaggcttgccttttccaccatcaactagtcgcttaataatgccttcaccttctacatctagatcctcgactccaaagtcatcacctacccatatacagttaagtccttccctctttcatctttttttcctttttct

SEQ ID NO: 149187 - DNA, 240 bp, Zea mays
  Clone ID: MRT4577_67582C.1
gggggcggtctagactagggggttcccccgggctgcatttttttggcacgaggggccagaggatctactaggataccttgcaaaccaaagccgcgcctatcctattgtataagcacctataatgttcgactcggctactcttactccttagtttgatcgagtataactacactctgtaatgctgtgcggattatagaacgcgcaaatgatgtgttatcatctataccggaggaacaatat

SEQ ID NO: 149188 - DNA, 879 bp, Zea mays
  Clone ID: MRT4577_67583C.1
gccgggtggaacggggcgtacaacgccatggatgctgtgttctacaaaagtgcatatctactgcacgtggtcgataccaggccaatctaattgtgaaaatatgtgctcatggctttgagcttgctcaagatatattcgggaactatgtggtccaacatgttttgaaacagaaaattccttatgcaaatgcacgcttggcatctctgtttgaaggaaagtatatatatctctcaaagcagaaggtgagcagcaatgtggtgcagagatgcattgagttcttcccagacgatgccaaagctgtcatagtgcatgaattcctcttgctcagagggtctcatttcgaacaactggtgacagatccttacgcaaactatgtcattaacaccgcccttaacaacaccaggggccatctgctcaatgcccttgttgaagcgatccgccctcatgaggatgccatccgaacccacccctgctgtaagaggatctgcaggttcctgtccaggtggtgaaagttgtaccatctgcgtgcctttggtaccaggagtaaggtcgctggcctgtattctcgattgttgtcaatttattatgttcactagttatcacccataatgtactcctccacgccgctctacatgagcccggccagagttcagaaaggcaggtttttgttgcaaggtgtaaaagaagtctaccgccccccgtcgtgtcttcggtggtgtagtttttttgccgcacgtttgtcctgatggtgttgtagagttgtaaaaggaacccgtgtgctttcacccccttaggtttgttttgtatctgctgtactgctttccacgttggattctatgaattgttactgccaaaaaaaaaaaaaaaaaatttgcggcc

SEQ ID NO: 149189 - DNA, 580 bp, Zea mays
  Clone ID: MRT4577_67584C.1
ggcggccccagcgcggcctcccctagcgctccgtcaacatcctccgctcatggctcttcgagcacttcctccacccgtacccgagcgacgccgataagcacctgttggcgaggcagaccgggctgtccaggaaccaggtctccaactggttcatcaacgcccgtgtccggctatggaagcccatgatcgaagagatgtatcagcaggagtgcagagagctcgacggctcctcggccggcggagggggccccgagtccgtcaacgacccctccggcgccgacgactcgcactccccgaccaccaccggcgcagcgcagctcccgcaacagcaacatcacctcggcacggtgcctggggtgatgccccacaagcccgacccgggcgccgccggtccctcggctgcggacgcggcgttcgtcgggatcgaccctgtggagctccttggcggtggcgcggacgacttgtacgggcggttcgagcccggggtgagggtgcgctacgggcccgctgcggcaggcgctgcagccggcgacgtgtcgctgacgctgggcctgcagcacgccggcgccggcaacgccgc

SEQ ID NO: 149190 - DNA, 867 bp, Zea mays
  Clone ID: MRT4577_67585C.1
ctgcgaatggaagcccagctaccgcagctggacggcgacgatatctaaggtgcccatatccccccagttctgcgccggcgcggcacccgctgccgctgcctcttcttcctccagctcgatctgcgccgaaccttcgtcgatcggccgcgcgcatgggttgccctcgagagcgagctgctgtcgccaatgtgttcatcgcctcgctcttcctcctagctggtcaagctgctgtttcctgtcatcgtccgtctcccaccgtagcggtgatgcatcaggcagcacacgtccgcaagctgctcaacaacaccagcaccggcggcggtcactctcgcggggctgctgctgtggcgtccgcggatgacgacgacccctgctcggaggaagtggtggaggtgttccagggcagcgccgggagcctgcccaacggcatcccgtcctacagcgtgaccatcaccaacacgtgcctggactgcaccgtgtgcgacgtccatgtctcctgcggcgagttcgcctccacggaggtcgtcgaccccagcgatttccggcgcctgtcgtacggcgattgcttagtcaggaacggtgcaccgatcggccccggcgagaccatctccttccagtactccaactctttcgtttacaaaatggacgtcgctgcggtctcatgcgtcgacgtataggttggtgttgtcatgtcccgtcaggccgtccgtcacccgtgtgtgtcttgtcagcgccgtcgtcctccccagcctgcgctttgcctttgttgagaatttgcgatggtgaagcacgtgagatttctttgtttaatcgcctattgaatgtaaacgaacacgttctctaatgcatttattcgcgttcgcctat

SEQ ID NO: 149191 - DNA, 580 bp, Zea mays
  unsure (1)..(580): unsure at all n locations
  Clone ID: MRT4577_67586C.1
ccagnatcaacatcgcagcgatctccgccgccgccgccaccagggcggctaccgcggcttctatgtcccactcgcagggattccaccagggcagcgccggcgtctacggctactcctcggatggcttcgaccgcccggacgactccggccaccaggaccatcatcagcagcaacagcagcacgtggcgcagcagagccgccgcgacaagctgagggtgcaggggttcgacccggccgccgccggcggccacggcctgctccccatcgagggcgacgagctgctggccagccagatgggcggcaactaccgcttcggggggctacggcagcagcagcaggggcccggaggggtggtggccggcttgtccggcgacggcggttggttcgtcggggccggcgcggcgggtcgtgctgctggcttggtcctcggtggtggggccaacatggggtcgttaggtgaaacgtcgtcacccaagcagcagggcagcatggctggcctggccaccgacccggccgccgcgatgcagctcttcctgatgaacccgcagcagcagtccagatcgtcgccgccgtcgccgtc

SEQ ID NO: 149192 - DNA, 3214 bp, Zea mays
  Clone ID: MRT4577_67587C.1
aattcggcacgaggcagcagcgccgggagctagctcctcctcactatcctgcatgcttcgttccttcgttcagctttggttgcccggtcgatcgatcggttcttttttgtttcttcgtatacatgcaaagctagctagttggagagttccttaatttttcgatttgtttggtttgggagggtgcaattcggttcatcgtcttcttaatttggattctattacatatattcgttttccccgcctggccggtgcttattacgatggtgctgctgctgctgctcatgagcttcgcaggaaggaggtcgtggccgggatcccgccgacgatatacacggtgggcgccgccggcatgggcgtagcggcgccaccgtacgagaccaccacgtacgtgagccaacgcaccaagatcaacatcgcagcgatctccgccgccgccgccaccagggcggctaccgcggcttctatgtcccactcgcagggattccaccagggcagcgccggcgtctacggctactcctcggatggcttcgaccgcccggacgactccggccaccaggaccatcatcagcagcagcagcacgtggcgcagcagagccgccgcgacaagctgagggtgcaggggttcgacccggccgccggcggcggccacggcctgctccccatcgagggcgacgagcatggcgggcccgggtccatgtacgagcacgcggcggccgcagctggggcctccaacatgctctccgagatgttcaacttccccgcgccgccgtcggggccctccgccaccgagctgctggccagccagatgggcggcaactaccgcttcggggggctacggcagcagcagcaggggcccggaggggtggtggccggcttgtccggcgacggcggttggttcgtcggggccggcgcggcgggtcgtgctgctggcttggtcctcggtggtggggccaacatggggtcgttaggtgaaacgtcgtcacccaagcagcagggcagcatggctggcctggccaccgacccggccgccgcgatgcagctcttcctgatgaacccgcagcagcagcagcagtccagatcgtcgccgccgtcgccgtcggacgtccaggtccagcaccacgaggcggcgttccaggcgttcggaaacgccggggccccgtttggcggcggcgccgggaccggcgtcgtggaaggccaggggctgtccctgtcgctgtcgccgtcgctgcagcagctggagatggcgaagcaggccgaggagctgagggtccgggacggcgtgctctacttcaaccgccagcagcagcagcagcagcagcagctgccgatggcattgcacggccaggtcggcgcgctggggcagcagctgcacgtcggctacggccccgccggcgtcgcgggcgtgctgcgcaactccaagtacacccgcgcggcgcaggagctcctcgaggagttctgcagcgtcgggcgcgggcagatcaagggcggcgggcgaggggcctcggcgtctaaccctaacaacaacccgggcaacaagggcggcgcctccagctccggcgccgccgcgcagtccccgtcgtccgcgcccaacaaggagcccccgcagctgtcccccgccgaccggttcgagcagcagcgcaagaaggccaagctcatctccatgctcgacgaggtggaccggcggtacaaccactactgcgaccagatgcagatggtggtgaacttcttcgactcggtgatggggttcggcgcggcgacgccgtacacggcgctggcgcagaaggcaatgtcgcggcacttccggtgcctcaaggacgccatcgcggcgcagctgcgggccacgtgcgagctgctgggcgagaaggacgccggcaccagctcggggctcaccaagggcgagacgccgcggctgcgcgccatcgaccagagcctccgccagcagcgcgccttccaccacatggggatgatggagcaggaggcatggcggccccagcgcggcctccccgagcgctccgtcaacatcctccgctcatggctcttcgagcacttcctccacccgtacccgagcgacgccgataaacacctgttggcgaggcagaccgggctgtccaggaaccaggcatatattataatgctacaactaagaacatatatagtggtctccaactggttcatcaacgcccgtgtccggctatggaagcccatgatcgaagagatgtatcagcaggagtgcagggagctcgacggctcctcggccggcggcgggggccccgagtccgtcaacgacccctccggcgccgacgactcgcactccccgaccaccaccggcgcagcgcagctcccgcaacagcaacatcacctcggcacggtgcctggggtgatgccccacaagcccgacccgggcgccgccggtccctcggctgcggacgcggcgttcgtcgggatcgaccctgtggagctccttggcggtggcgcggacgacttgtacgggcggttcgagcccggggtgagggtgcgctacgggcccgctgcggcaggcgctgcagccggcgacgtgtcgctgacgctgggcctgcagcacgccggcgccggcaacgccgccgggcccgacagcaccgggcggttctccttgagagactacagcggttgttgatgcttacacatcgcttacatcacctttattcatggctcatgcatgcgcccatcatgcatttggaagagagcaaggatcgatgaaagaaagagagagagaaaagagtaaccagagaagagatagagggtgctagacagagagagatgagcatctagaaagagaaaaattgcatggtgcctggaggtgatgaatgggatggggatatatgaatatgagattatcacaaccaccttcgtcgtcttcttcccagatgattcttaatttacttagctagaagattaattccttttgctaggcattgttgttggggggttaaggataattaatttgtatacagcaaaggaagataggaagtgtataattgtttagtcacacttttttggttctttgttttgcatttgcccgtttttgttctggtgtaccaattttccttgtactcatttttcttccctctgtaaactaaacataagagacacatacatgcatacgtaaatacatatattggtaaatatggtcatacgcccagcatatatatgtaaggcctaaaaattgaacgtacgt

SEQ ID NO: 149193 - DNA, 358 bp, Zea mays
  Clone ID: MRT4577_67588C.1
cgggcaacttctttgcagaataatgaacagatgctttctgcccagcgttttgttcctggagtgactattctgatgataagctgctccagacgagagtcttctcctatgctgatccccagaggcaccgccttggtccaaactatctgatgcttcctgtgaatgcaccacctgtgcccgccaccctagccaccctgatgggttcatgaacttcatgctcggggccgaccaggtgaactgcttcccttcgcggtttgttcccgcccgtcccgctggccggcgtccccttcccccccgtggctctcccggccgtcgggtggcgcgcctccttccgccggcgttcgtctcctcccaggctggc

SEQ ID NO: 149194 - DNA, 296 bp, Zea mays
  Clone ID: MRT4577_67589C.1
gtttcactcgcaggcgaacttttcggcgcgacattaacgacgcggacccttcggggatgacagcgagcgcgtctctactgaaggtggaccggaattcttctttcctaacagctcaggcggcggcgctaggtcccaagaaggctttggaggctgctcaacctcccagggagattttgttggaagtgcacaatgcccagacgattgtggcggctgcccatggtcctgaggcggcaccgacggctgcccatgctcccgaggcgatgctcgcagcggactcgactctgatggcgggattc

SEQ ID NO: 149195 - DNA, 453 bp, Zea mays
  Clone ID: MRT4577_6758C.1
gcgcgccgcccggttccgcgccggccgcgccgtgctgcccaagtggctcatggaggacgtggcggcggaagggttccaggcggtgcgcgcggcggggagcagggccgtctgcgtcactgccatgcccagggtcatggtggacggcttcctccgggagtacctcggcgtgcacgccgtggttgccagggagatgaaggtggtctgggggttctacaccgggatcatggaggacgcgcggccggccgagggtgcagagatggtgaagaaggcggcggaagaacagacggtcgtcgtcgggtactctgcgtcaatggagtttcttaaccatcctctctcacgttgctgcaaggagctcatctcccccatcggccgcaccgtgccgcctgacgcggaccgggacagcgacggcgccgtcatggcgcgccttctggaccgggcaacctcgtcgtcgtc

SEQ ID NO: 149196 - DNA, 912 bp, Zea mays
  Clone ID: MRT4577_67590C.1
atgagaccgaggtgcgacctctggctgtcgaccctaggttgtttgatcttcagcgtgctacagcggcccggcttgtgctacggcacctctgatcctcctcgtcgccctcacggcggagttgctcctgatgggtcgcgacgttctccggcagacttcactacaacggtcaagtttttatatcagctcatgagacggacgcttctaccgtggatgggttacagggaggctgctactcatatccagctctggctacttggtgccctggtctctcactcagagtttgatgttgttgacttcctcatttgtgagatagaggacaccgtattggatggtctatgtgcccggcgacagctgccatatgctcactatctctgccacatcttcgctcagctgattcggccaccactgttccagggcactcttgaggcctctcgcctcctctttggctcctaccgtccagtccctgaggaccctgtgtcggcacctgctctagtgattgacactcaagccaaggataccgcttttcaccagttcgagactcagggcgtagtagttcctgatgatgatgatgatgatgactttggggttccgcctccgcctccacctcctatgcctccacactctcatgatcatgaggctaggagttccagtgctgcccctcctgccattgaccctgctcttgctacgatcctccagacccttactcagcagcaggctcacttggcagcggtccagcagcagatgtccgagagaatgctaccgatgtttcagactattcaggaccgacaggatactctgcagcagcaacttctggcagaccgggctgagaacagggccttcatgactctcatgcttcagcataccggtgttccgattcccctagttcagtcagcaccgcctccacctctttag

SEQ ID NO: 149197 - DNA, 549 bp, Zea mays
  unsure (1)..(549): unsure at all n locations
  Clone ID: MRT4577_67591C.1
gcgcgccgcccccncggagcccggcgccgcagggcagacagaggccggcgggcacacgggcagccgcgggacggacggggagcaaagccncagcggcgagggcgggcgaggaggcgcccggaggcgncgccgcgggccgggcaggagcacgcgcagcacgccgccagcgccgcgggcggggccncgcccacgccgccggcccgcgccaccccgaccgcaaccgcgccggnngccagacggcgcagcaaccgacgaaggagagcgccaagcgccacggacgggcccccggccacaccacgcccgaagaggacgagagggcgggcggcggcancaaccgcgacagcgaggacggggagggcgaccccaacgggcggcccggaccagagcaagcaggcgcggaacgagcccggcagccagccccggcgccggcccgagcgcggcacccccggcgagcaccncagcccccagaagggcgaccgccacgagggcccgcccggcacaggcaagaccaggcacgccaaggacaggaacagggcaggccgacagccg

SEQ ID NO: 149198 - DNA, 364 bp, Zea mays
  Clone ID: MRT4577_67592C.1
attgggacctcgagccggcgggaacgggtcgacgccggaggactggcggagcccgtacgcaggaggctatacctcctcctcacggtccgacgaagactccgcgggcccagccccgcaccatggtaccacttccgcacccacttcatctcctccaggccgccgccctccaccactctcacgcacggcagcgacgaacagctcacctgtcccccgagaggtcggccttcaggccgcctaacagaaagaccggcggggacgtcaagcgggctagaggcgaggggcggcttgagccaaatgaagctattgaaatctccatgggaaactcccgccagaatatccggaagtgggataaggacgggttttt

SEQ ID NO: 149199 - DNA, 711 bp, Zea mays
  Clone ID: MRT4577_67593C.1
cctcgaggccggccgccggccgggacaccgcgcccgctagctcttggtctagctgtagtagttgcaccagcagcgcgcaaacggcggatcgatcagcttcgtctttcaattcttctccacatcatcatttgcgccacgtacgtaaatcggctgctgcgggagagacgaccggccgccggcgacgccgccatgaccaagcaaaaggcagtgatcaggctgggcgtaacgaacgacaagaaccggtctaaggccatgcagctggcgtcccgatttcacggcaaggaccagctggaggtggtaggagaaggcatcgacatcccctgcctcgtcaattcgctgcgcaagaaggtctgccgctccgccagcatcgtcgtggtggaggaagtcaaggacaaggcgaaggtggaggaggagaagaagaagaaggaagaggaggagaagaagaagaaggccaaggagttgcaagaagcgatccagaagcactgcccgccgccgccgttctacggcggcccgccgtttctctgcgaggaacagccaacaggctgccacatcacgtgaagctgatggattctggcccgccgtttaaatatatacgtatactagtgcgttgcaacgggaacatataataccatgataacttatatacaaaatgtgtcttatattgttataagaaatatttcataatccgaaaaaaaaaaaaaaaaagcggcc

SEQ ID NO: 149200 - DNA, 211 bp, Zea mays
  Clone ID: MRT4577_67594C.1
gtattgttactttgtctcaagctagtagggaagaggttgatggggagtaaagcatacagaacggtatcattgaatacatgattcatcttgcaacgatagcagggggatattgattacatgactatacttctttaacctttagctagaaacaagtgacattggtgacttgacgctctcatttgtcatccattaacaaagatgggagccccgt

SEQ ID NO: 149201 - DNA, 370 bp, Zea mays
  Clone ID: MRT4577_67595C.1
ggatccttcacaactcgctggggatggacttcgtgaataatcgggatgtgtctcgggtcacgctgcgtaactccaagttcttccagattaacatgtaccggttcaaggatatgctgatcaaggaagtaactgtgacagcgcccggcgataaccccaacactgatggcatccacatgggcgattcatccgggatcaccagcattaacaacgtcattgtcgtcagcgacgactgtatctccatcagacccgggatctccaacgtgaacatcaccggcgtgacctgcaggcctgaccattgtatcagcatcggaagcctacggaggtacaatgacgaggaacgacatcacggacatcaacatcaacgattgca

SEQ ID NO: 149202 - DNA, 1015 bp, Zea mays
  Clone ID: MRT4577_67596C.1
cattgggaccctcgggccggggcgggattcttacaaccgcgcccgctagctcttggtctagctgtagtagttgcaccagcagcgcgcaaacggcggatcgatcagcttcgtctttcaattcttctccacatcatcatttgcgccacgtacgtaaatcggctgctgcgggagagacgaccggccgccggcgacgccgccatgaccaagcaaaaggcagtgatcaggctgggcgtaacgaacgacaagaaccggtctaaggccatgcagctggcgtcccgatttcacgaagtgaccttggtgtcgatcaccggcgcaggcaaggaccagctggaggtggtaggagaaggcatcgacatcccctgcctcgtcaattcgctgcgcaagaaggtctgccgctccgccagcatcgtcgtggtggaggaagtcaaggacaaggcgaaggtggaggaggagaagaagaagaaggaagaggaggagaagaagaagaaggccaaggagttgcaagaagcgatccagaagcactgcccgccgccgccgttctacggcggcccgccgtttctctgcgaggaacagccaacaggctgccacatcatgtgaagctgatggattctggcccgccgtttaaatatatacgtatactagtgcgttgcaacgggaacatataataccatgataacttatatacaaaatgtgtcttatattgttataagaaaatatttcaaaaaaaaaaaaaaaaaaaacggcccaaaaaaaccccgaaagcgacttgaagcacttccagtggtacatgtgctcgtcgtccaccgccatcgccatcgctgccgccgcgaagagcgcggcgacagccaggacgacgccgagcgccccgccctgcgctttgtagcccgccatcactggctagctagctactactaccttagctgctcggtcgtcctcctaggtacggtgagctgatgagcttgttggctgcagcgcaggccgcctgcagctctatggatggggacgaacgcaaggg

SEQ ID NO: 149203 - DNA, 1080 bp, Zea mays
  Clone ID: MRT4577_67597C.1
gggtaccctcgggctcggccgggtccctggtcaccaaatcagcccttattcttacaactgcggcttagtacacgtaggccgcgcgcgctagctcttggtctagctttaggtgcaccagcagcgcgcgaacggcggatcgatcagcttcgtctttcaattcttctccacatcatcatttgcgccacgtacgtaaatcggctgctgcgggagagacgaccggccgccggcgacgccgccatgaccaagcaaaaggcagtgatcaggcttggcgtaacgaacgaccagaaccggtctaaggccatgcagctggcgtcccgatttcacggagtgaccttggtgtcgatcaccggcgcaggcaaggaccagctggaggtggtaggagaagacatcgacatcccctgcctcgtcaattcgctgcgcaagaaggtctgccgctccgccggcatcgtcgtggtggaggaagtcaaggacaaggcgaaggtggaggaggagaagaagaagaaggaagaggaggagaagaagaagaaggccaaggagttgcaagaagcgatccagaagcactgcccgccgccgccgttctacggcgggccccgccgtttctctgcgaggaacagaccacaggctgccacatcatgtgaagctgaacgattcttcttggacgtttaaatatatgcgtatacaggtcagttcttgtccgcctttgcttgctcaagtaataccatgatttcttgtagtgggtccacagggtactgctcctcaagtttatgatcttcaatgcacttaatgacagatttcagtgcacacaactcacgctcattcatctcattctgaaaacacaagtgaccattaacagtttaacattaaatactaagtattatatgtcaaacatgcatatgcacactaccacacagaaaaaagaacaagaaagtgccaccaagcgatggagcagtggtagaggctaactgaagctctgcgacagcaaggttcaataccaaatcactccagaatgaattgatcccctcataattaaagacatagaattggagaaagcagttgaaatgatcaaatgcatgaatcaaa

SEQ ID NO: 149204 - DNA, 2959 bp, Zea mays
  Clone ID: MRT4577_67598C.1
cattgggaccctcgaggccggccgggattcctccaactgcggcttattagtaggccgcgcgcgctagctctcttggtctagctgtagttgcaccatcagcgcgcgaacggcggatcgatcagcttcgtctttcaattcttctccacatcatcatttgcgccacgtacgtaaatcggctgctgcgggagagacgaccggccgccggcgacgccgccatgaccaagcaaaaggcagtgatcaggcttggcgtaacgaacgaccagaaccggtctaaggccatgcagctggcgtcccgatttcacggagtgaccttggtgtcgatcaccggcgcaggcaaggaccagctggaggtggtaggagaagacatcgacatcccctgcctcgtcaattcgctgcgcaagaaggtctgccgctccgccggcatcgtcgtggtggaggaagtcaaggacaaggcgaaggtggaggaggagaagaagaagaaggaagaggaagagaagaagaagaaggccaaggagttgcaagaagcgctccagaagctctgcgcgtcgtcgccgtgcccgccgccgccgttctacggcggcccgacgtttatctgcgatttgttattttcagtttgttgtatcatgtctagctgacaaccaccagtatcatgcagacttcgatatatatctgcatttgcatggtctcatcattggagagcacatgccacacctgtcggtacaagttacgtacattgttagtcatcaggcacgtatcaccatacacgtttgcttaaacaaaaaggcaagtgtgtgtttgcgaagagaattaaaggcagaccggtacaaaagctaccccgacggtggtgagtggtcattgttgtcagtcctcctctgcgtcacctccggcgccgatatgacgccacaatcgttgatatagtagtcgtcgaacacacgcgacatggtgagtaccgatgactcttggctgggctaccaaatgaagtgcaccctgggctcatcagcgaggtagtacatctggtcgttgcaccaccggatgtgctactcctctacatacatcttgttcgaggacactcacacaacagcaacaatggtcgtcatccaagcgtacaagaattcttggccggtcagtagcgacttacgtggcaggttgggcttcaggtggatgatgagctggacagcgtgatggcgccgccgtcggttgcgatgcctagaacaatccgagagtcgtcggcattggcgacgatcatgaggtccccctgtttgacgatggacagcgtggtgcagtcgctctggaccgcgtccaagcggcggctgtgccggagcttgccgtacacagaggtgcatgggccacgtaggattgctttcagaggttgaaccgacagtcgtcaagcttcttctcgtcgtcgatgagcgacgccaacgcgagcgccttgtgctagtggtgtttgttcggggttttcaagtaagaaacatggatttatctttggcattggtttatgaaaatgactcataagtcagatccatagaaaaatattacagagaataaatgtcacacatgtaaaaaaaagaatttaagttgaaaacattatttaaacaaaaaattgcatgcaaggctcttctttaaatactactccctcaatccaaaaatataatttaataatcttggtgatacttatctactactacacattgtgcaagggtagtaggtgggtttagggagagatgtagtatatgtttttactataatagatgtagacataaacacacatgtggtgtagtggtagccgtgaacacatttgcttgagaggttgtgggttcgaatccccttaaggcttgttttttttaatttaattttagctaggcttgagatgtacgtgggaatgggaatgagctttgtggggggaggagagaatgagaatgggaatgagctttataagggaggagataatgagaaaggaaacggtgaagggggaatcgaaaaggcagaacagggaatgagaatggcagaacacggaatgacagcctaccccttactgccttaataagtagtatagatttatatatgtgccaaattttctataaatgctattgttatttaatgacactgaaattaaatttgaaaacatgtaactgagttcaagtttaaaatcaaacaagttttgaaaaaagaaaaaagaaaaacaattattcgtgttggtttcacctatgtcccaataagctcatacaataccctagtaggtggagaacgcatccactcggttcctctcctcctccaccgctctgtctgagccacgcagtcgctcgttgctaccgaagtcaccattccacgtgcgctaagccgactagtcggcgactacggttaaaaagacatccagatcgtccgctgctctaccgcgccggtaagccacccctctacttggtaaatcgcacgctccgttcgataaatcgtccgttatcctggctagtcgttcgatgtcgttgttggatctcatcgagcctagccaccggtttgagctagttaatcaagtgtttgcaccgattagccagcccctagagacaattaatcacctcgtgttgctgataaccgaccagtgcggtagctaggttttggggattttccgttttcatcctcaagtcttctaaattagcataggtgcttactgttattcgcaataatggctaacaatacttgcaaaaatcactcatactactagtgtttttaggaatgtcagatcagatcgattcggtttggcagcacggggagaacgtatatcctagattcaagtgcatgtattgtaaaacacagtggaagagaggcagtgctacacattttaaacaacgcttgcatcccgtggaggaaatgttggatgaggatgacaccgtgagtgacaccccattaccatgtggcttaaaggcacttgaagagaaaacttggttgagtagacgtggaagaatgtgag

SEQ ID NO: 149205 - DNA, 439 bp, Zea mays
  unsure (1)..(439): unsure at all n locations
  Clone ID: MRT4577_67599C.1
gntcttnntttttttcccttttttttttttnnnnttntttttttccnccccccccgnntaaaaaatttnccattctataaaattttgtttttgacaagggggnnaaaaaaaaaaaaaaaaatggaaaaaaaaagggacaacccgctcccactcaaatccccctttaccccctggcccggtttttttttaccacccacggtcccccccaacaaaaaaaattttggcagactaacaacgactaccatctatcaatcggttttggggacgaccccaatacttttgaactctcttcgttggaaaacccttttttaaactcttccatccccggaaacactttgggcttctttttttttacggcccccgggaattggcccccggagcttgcaatggtccccttttttatcctggcaaccttcttgcaaacctggtccaccccccc

SEQ ID NO: 149206 - DNA, 679 bp, Zea mays
  Clone ID: MRT4577_6759C.1
attgccgctccaccgactcctcgaccctccgcccacactcccagccgtcacgccgtcaccgccgcgagaccttcattcaccatgatcatctccaagaagaaccgccgcgagatctggcaagtacatcttccatgaggaggttctatatgccaagaacgactacaacctcatccaagcaccccaagctctgacgtgcaccaacctgaaggagattaatatcatgcatagcttcatacgtccaaggtagtatgtcagggagaccttcgcctgtcaggactacatactggcacctctccaacgatggcattgagcacctccgcagattcctcaacctgccgccagaggttgtgcccaacaccctcaagaagtcctccgaggcaccgtgcacgtccctttcgctgtctggtgcagcgggtgatcgccctcacgaggtccccctcgtgtttggccaaaacagtacctatgttcgagcatagggatgcttacggacgatgaccaccaggagtgacggctaagtttgggggagacaacgatattgcacctgcttattgccaaacatctgtaaattgtaacagaactggaatacctcaatattgtgaatatttgctgctgagtgtcatcgaataattccgagtatctgatccatctgcttaagcgggaaaaattgattcgcgcctag

SEQ ID NO: 149207 - DNA, 736 bp, Zea mays
  Clone ID: MRT4577_675C.1
gggtacctcgaggccggccgtccttctcccgcttccgcttccgcgatggtatcctaccatccctcccttctccgtccatccgtcctcatcgcccaggccagcggcatcggccggtgcccaacactcaacgccttcctttccacccccgtcgtctccgcggtgccacttcgcctgcggcctctgcgcgccgccgccggtggagcagcctcgccggtcagtggcgatggaggcaaacgcgctgttccgccgcctgccgcgctgcttgtcttcgcgcgtagcaatttcctcccgcttgctctcgttagtggggtgatatttggtctcctagatcctactcttggatgccttgctcacaaatactctctgtcgaagttcagcacttttgggatattcattatgtcaggactgaccctgcgaacgaaggagcttggtacagcattagaagcttggcctgctggattatatggattaggatctgttttgctctttacgcccttcctctctcaatttatcatgcaagttcagttctcccctcgtgaatttatcactggattagctatattttgctgtatgccaacaacattatcaagtggagtcatactaacacagcttgttggtggtaattctgcacttgctcttgcgatgacagttgcatccaatttacttggcattataatcgtacctctttctcttgcaagatacatcggcactggagctgggggtgtctttgcctact

SEQ ID NO: 149208 - DNA, 1107 bp, Zea mays
  unsure (1)..(1107): unsure at all n locations
  Clone ID: MRT4577_67600C.1
tgttaattttccagtgtggtgatatggacctagtcattgtctagaagaactgcttgatcttagatctggagttcttgtgctcaaattaagaatcctaagacactttttgtctatgatagaaggaaaactgctcaaacaaacaactcagcagatttttggacctggagctctgccaaacccttactccattttcaagattcttgcccttaatggccttacaggttagcacttaacaaccattcttgtgatgtaacagagacatagatatcctcgcggccgggaatattctcgcctaccgcgcccgctagctcttggtctagctgtagtagttgcaccagcagcgcgcaaacggcggatcgatcagcttcgtctttcaattcttctccacatcatcatttgcgccacgtacgtaaatcggctgctgcgggagagacgaccggccgccggcgacgccgccatgaccaagcaaaaggcagtgatcaggctgggcgtaacgaacgacaagaaccggtctaaggccatgcagctggcgtcccgatttcacgaagtgaccttggtgtcgatcaccggcgcaggcagggaccagctggaggtggtaggagaagacatcgacatcccctgcctcgtcaattcgctgcgcaagaaggtctgccgctccgccggcatcgtcgtggtggaggaagtcaaggacaaggcgaaggtggaggaggagaagaagaagaaggaagaggaggagaagaagaagaaggccaaggagttgcaagaagcgttccagaagctctgcgcgtcgtcgccgtgcccgccgccgccgttctacggcggcccgacgtttctctgcgaggaacagccaacaggctgccacatcatgtgaagctgatggattctggcccggcgtatatatatatatatatatatatatatatatatatatgcgtgtgattttggttctgaacttttgccacaccgccggcccagctagtctcccgtgaagcgtgtgcggnagcgnggcgtggcaattctgaaacatatattggtgnctgtttcgaaattgctttgaccccatctggcagctttttctataagaaccttttttttttgtgttttctt

SEQ ID NO: 149209 - DNA, 258 bp, Zea mays
  Clone ID: MRT4577_67601C.1
gcggggaacattctagccttaatgattgttatcttagtaaggaactgagcagcgtaggatgtgcttatacacaataacagcatatgactttagaactcagcttctcgacaatatgaaatgcacgtttagtagaaggcatgtaggttatacacacgcagaaggagcagtgctacgtactcacagacacatacggagcgatgatttcggccagaaaactacctgtatccagcgatcggcttatacagcgatctggacata

SEQ ID NO: 149210 - DNA, 376 bp, Zea mays
  Clone ID: MRT4577_67602C.1
gcgaccccagttagagaaattagaattcatgaatgttatacaatgaatcattggcgtataatggaggaggggtgggggcacaatcaatcacaaaccattctagttcaagagagagggagtttttaccacataaaaatacttacttggtggatgaggaggaggaagaggttaatctcgatgagtgggatgctacaacacgcattcgtcacgaaggtgtgagagatagatttgattatgatcgaggacctagttgaaggtcacagacaatgaagcaacatttgatattcctataatggaggaaagggcaagttacaaattttactaattttttatacccttgctctggtatgtgtgtctatgcaatgcgtatactgtt

SEQ ID NO: 149211 - DNA, 691 bp, Zea mays
  Clone ID: MRT4577_67603C.1
aattcggcacgaggagccagctagtcagtctccgccaagcagggaccgcgtcgcatcaaagccgctgcccgcaacagggacaggcaggccagcgcgcgctcgaaaggggagccgtcgttctacacgaagacgaggaggaggagccctgcagggcgtagctagctatggagttcgcgagctcttcgagtaggttttccagggaggaggacgaggaggaagagcaggaggaagaggaggaggaggaggaggcgtctccgcgcgagatccccttcatgacagcggcagcgacagccgacaccggagccgccgcctcctcgtcctcgccttccgcggcggcctcatcgggtcctgctgctgccccccgctcgagcgacggcgccggggcgtccgggagcggcggcggcgggagcgacgacgtgcaggtgatcgagaaggagcacatgttcgacaaggtggtgacgcccagcgacgtggggaagctcaaccggctggtgatcccgaagcagcacgcggagaagtacttcccgctggacgcggcggccaacgagaagggccagctgctcagcttcgaggaccgcgccggtaagctctggcgcttccgctactcctactggaacagcagccagagctacgtcatgaccaagggctggagccgcttcgtcaaggagaagcgcctcgacgccggcgacac

SEQ ID NO: 149212 - DNA, 305 bp, Zea mays
  Clone ID: MRT4577_67604C.1
aaagggggaagggaaatttctattctgaggccatatatcgggaaacaataaaggaagcatcctttccattacaatatcggctaacggatcatggcttgacaaaaaacaggtcctgattttgcaattcaacataaaccacacattctattgcggacaagtgagtgttggtttcctcttttattggttttttttttagcaaggtccttattaaataaaatgtacacgcaactggaagctttaggggaaaaaaccttttgacccacccgttctccataaggaatggtacctttttaaaatctacatat

SEQ ID NO: 149213 - DNA, 231 bp, Zea mays
  Clone ID: MRT4577_67605C.1
acagacacgcaccttacagacacacgcgtacaccttccgcagccatggcatcagtaacgttccgggcgttcgcgccgagcgagggataatcacctgacggcaggacaactattcctcgtacgaccgtaccgagctcaccaagcctatgtacgtcttcgtccggggcaaggtctacgacgtcaccttcggccgtggcttctacggccccggcggcgcctacgccgtcttcgc

SEQ ID NO: 149214 - DNA, 443 bp, Zea mays
  Clone ID: MRT4577_67606C.1
tacacgcgtgcggccacgcgtgcgtgcacgcgtccgctcacgcgttctgctacgcgtgcgtgcactcgtccgtgcacgcgtcctcgcacgcgtacgagcatacctgcagtcatttactccaccaggaccagcgagttcaacagcagacagatcgggactattatgacgagccgcaggatggcatcatcggccgcactgtcggtgctagccctagcgctagtggcggccaccgccccacacgtagcggcggcaacgacgacgagagcggcggagagcggcgaggcggcctatgccaagacgatccaggacgacttctgctcaacgctgtgcgacggcaagatggggaccgacctggtcgcgtgctaggagtcctgcgctctctgccagcagtccaacctggtgctgtacggcaggatccagtgcaagggcaagtgcaccgagca

SEQ ID NO: 149215 - DNA, 201 bp, Zea mays
  Clone ID: MRT4577_67607C.1
cgctgttcctttttcctttacaaaaaaaacctcccttttgggggcgcttcctgaacccaactcctgagtttcctcctcacagggaggggccctcggctcaaatttatcaactttttttttgttccgagctggtccagcgggaggagcattttgggagttgctgtattcttgatctgcatcatagctggcaaatggaccccc

SEQ ID NO: 149216 - DNA, 354 bp, Zea mays
  unsure (1)..(354): unsure at all n locations
  Clone ID: MRT4577_67608C.1
ccgggnccgacccacgccgtccgcaagccgtttaacctttatcntcatcacatgtacgaaaggtgtttggaaccttggatggagaggatgttgtcaggcactgtgagggtatctgtccaagccgtgctcgggggcctttgtcaacttctttggcttcgggnngccagagctgtagtaatgatacctcgtaaggttctctctttgcattggacgaaggggatgccaggagttcatactttttatctaagagaagacccttatttcgacatcgttgtacaactcttatttgtattttaagtggagaacctagaacacttttgttgatagatatanctgttaaatacttctgtcgat

SEQ ID NO: 149217 - DNA, 383 bp, Zea mays
  Clone ID: MRT4577_67609C.1
tctgggtgaccgcctgtgaaacactccttgcatgcgagggcgggatcacctgcaagatgcgcctcaatccgagagggcttgtggagaatgtgaaagagcatgctcaagtgcgggtgccgtcgccggatcatgatctgctcgagtggcggcaccgcctgcggacaaggtgccgcgagctgcgaccgtgaggtccgtgatgtgcctgagtgcaggataaaagcgaggatagggctcatcaggtgatgctggcacgcgcagggacatgggcatgtgcacaggctgtggctataggaacttgtgagataaatacgggcttgtgaatgggttgtatgagaacaagggtctgctgattagagtatcaatgcaccttgtataaatggtgc

SEQ ID NO: 149218 - DNA, 454 bp, Zea mays
  Clone ID: MRT4577_6760C.1
ttgttgtcgctgctctgcacatccagcgtggtactctttatactcttgaggggccgtttcataacatcaccacatagcattaaccatatcatgtcttaaagcctgatgcaagagcaagatcaatatcttcaacttgtatcataggatttcatttcatatattaagcattttcactacaattttttaattctatacgtaaccatttactcatttaattttacaatcatttttataattctttcttaaacttcttgaatatttatactttttttcttaatttttttttacttcaatataatttacatcatatttaaattttcatttttttttattactcttttttacattacccattctaatattttaatattttttttatattttaaattacttacttcttaaccttatttatctttatttatattttatattcttttatttttttttcatatat

SEQ ID NO: 149219 - DNA, 453 bp, Zea mays
  Clone ID: MRT4577_67610C.1
gggccaacaaaactcaagtttttgcagaatttgagctaaaacagttgtttaaaccaagggttggggtgccccgtcctccaagggccaaacctaaaattccctgccaaaaattaacgacggggttttaacaaaatgggggccctttttttttggggaaagggaaaacaacatgcttttaaaaaaaaaaatgtcctatacctgggggcaaaaggggaaacaacaggtttttaccaaaaaaaatgtccccccctcaccggacgggctgttaaaaccacaaattttacagctttttcacaggaggggcatactcgggcaaaaactacaacgggggttttaaaccaactggggccctaaataaggaacgttacaacagaccaaccagtccacatttaaccctgccacccatgctcaggaggggttctgcaggtggaaacccctcctggcatcaccctt

SEQ ID NO: 149220 - DNA, 368 bp, Zea mays
  unsure (1)..(368): unsure at all n locations
  Clone ID: MRT4577_67611C.1
cctcgagggtggtcgatcgggcggcagggcgtcnaaacccggaagtccggcctcgagggtggtcgatcgggcggcagggcgtcnaaacccggaagtccggggtgtaagtttgggggtctcgtctcgagccgttggatgtgatttacacggctccgattagatcgaggtaataccccttcgcgggttgcactctgggccgcacgatgggaatctggtggtgcanaacacatctagtgctcataaaaccgtacccgtcgatctctgatcctgcgatcctcgctacataccggttcagtagtaggcggtctaatccgtgccgttcatttgagatctaacggctccgattcaccgatacccccttcgcgggt

SEQ ID NO: 149221 - DNA, 257 bp, Zea mays
  Clone ID: MRT4577_67612C.1
tcccatctgttttttccagtcgtccgcccggcgctcagtgtcatcccacacttcttggtctctctccccggaccggtaccggcagtcaggacagccgcaagcaagtaaaagcaagcgcgcttctggaagttgtgaatccatgagcatccacctacgtagcttacctccaccagcgccacccgcccgtcgtggcacgcgaccgtcgccgcgtcctcgaccgccccgccgccgcagcagagcaacctgatcgtcctgca

SEQ ID NO: 149222 - DNA, 408 bp, Zea mays
  Clone ID: MRT4577_67613C.1
attcggctcgagagctgcccatgaagtggcgtttcccgtggccgttgcgcttgacgccgtggtgtatttcccagggcttgtggcgacctgctccgggcgcccggctgtggagacggatccatccagcagcatggtgcccttcaagttccagcgcatgtggtacgagtccgacgagctccgtttcctgcacggtcttctagggtgaggtacgcagggccttgtctggcaacgcgacctaaacgttgtatacgaccgtttataggagtacatgccccattcctacaccagcgcacaggtctgggagaagctccgacgcctcacgaacaagttccggagaatgtcctcgcgcgtcgtgggaggcatagaccgggcccgcctagcgccgcacgacacatgacgtgctctcac

SEQ ID NO: 149223 - DNA, 386 bp, Zea mays
  Clone ID: MRT4577_67614C.1
ttttgggggctgtgctattgtgtatgcaccctttgacagctatggacgatgggctggtgatcttagctgacgtgatcagggacccttggttgctgttgaagatcgtggctctacttgttacgctctcctgactgcacatgaaagaggtgtggtgattgtgcaacctgggctggatggggacacagggcactttgtttggcttcataataaacccgacgagttacctgtttaggggcgcgagaaaaatgttgctacatgtgtgcggtccaacaatgaaactacagtggtggttgacgaaccttgagagctacaattaggatgactgcatagtgggtatccaagacgatgagatagagtgggatactcctgcaagcatgcgtatgtgc

SEQ ID NO: 149224 - DNA, 1295 bp, Zea mays
  Clone ID: MRT4577_67615C.1
cggccgggtcgggcccacgcgtccgttcacactgatgcaagcgctcatcaaggctgatttctggcttctatttttctcccttctgctgggctctggatctggtctcactgtgattgataatcttgggcaaatgagccagtcattgggttacgaggaaacccatatatttgtgtcaatgataagcatctggaactttcttggacgtattggtggactatttttctccatgatcgtcacctctggatctggtctcactgtgattgataatcttgggcaaatgagccagtcattgggttacaaggaaacccacatatttgtgtcaatgattagcatctggaactttcttggacgtattggtggcgggtgtttctcagagcttattgtcaaagattacgcatatccaagggcgatcgcattagcgatagctcaagtcctgatggcgatcgggcacttcaacttcgcgatggcttggcccgggacaatgtacatcggcacgctgctcgtcggagtaggctacggcgcgcactgggccatcgtgccagccgcagcctcggagctgttcggggtgaagaacttcggagcgctgtacaacttcctcacggtcgcgaacccagcaggctccctggtcttctcgggggtcatcgcgagtggcatctacgacagtgaagcagcgaagcaggctcagcagcgccacaactccacgtcgctggcgatgagtggcagagtggctggcatggtctctggagccgctccgtcgttgaagtgcgagggcgccgtctgcttcttcctctcatcgctgatcatgtccgggttctgcatcatcgcttttggcttgagcttgatcctggtctaccgcacaaagatcgtgtacacaagtctatacgggaaaccgcgtacttgaaggatcaaccctaaagggacacagggttatcaaagcatacttcaatttttaatttattagtctggtaccccatgcctgtacaggtacagtgtcggtcttcccgttgttgtgcacaggttctcaagcagcatttcaacttttcaagtatgtggctgcaaatgggagcttcagtatagcgaagcatgtgagagtagaaagtccgtctgtggctggactgggacgctgtccttggctcaagttttgctgtatttggttgtgaaaaatttgtgtacacatgtaataagctagagacgtttcgacgcatgtcagagtggagaacatattcttttatgatttgttgaaacttgcgtatttgtatctatcacaaagaaaacagtccaacttgtcaaccggc

SEQ ID NO: 149225 - DNA, 323 bp, Zea mays
  Clone ID: MRT4577_67616C.1
cggacgcgtgggtgcggttcctgatggtcggatctagacgccgccggttaaaccaccatcctgtacaagctcaagctcggcgagatcgtcaccaccatccccaccattgttttgaatgctgaaactgctgagttcaagaacattagcttcactgtctgggatgtcgggggtcttgacaagatcagacctctgtggaggcattacttacagaacaccgagggtcttatctttggtgtggacagcactgaccgtgaccgtgttgttgtagccagagatgagctccacaggatgctgaacgaggatgatctactggaatgctgtgc

SEQ ID NO: 149226 - DNA, 199 bp, Zea mays
  Clone ID: MRT4577_67617C.1
acccgtccgggcaaacaccaccgcggggtccttttcacagcatctctcctatatttccacaagccaggcaggtatagagtcttctgttccttctcatagtgaggtacgacggagagagactgttacctcgcaagggatgggacgaggacggggcgttcatgaagagcctacagaagagagtgcaccccgtccactgcac

SEQ ID NO: 149227 - DNA, 460 bp, Zea mays
  Clone ID: MRT4577_67618C.1
agtatatatatatatatataggatcaaaacatatcatcgggggaccaattaatatatgggtacaggagacgcaatcggatcaaccaacatgcgtggggacacacgtacatgagcacaaaaactggcgccaaacatgccgagggggggatagcaaactgaagaactctggttctttttttttctcacacaccacacaatacctatgtatgggagccagctcggcctcgcttattattggtcaacccccaccacaagctagatagataataatcatatccatgggcgtcgatcgatgtgatcaacagttgcaggggtcgcacttgcagttgctaccgcaaccgcaggcgtgggcgggctcgccggactccgccgggggctggacaaactcgggcgcggcctttttttccggggccacgcccaggaccacgggggcctgcccgggggtgctcgtctcctccag

SEQ ID NO: 149228 - DNA, 485 bp, Zea mays
  Clone ID: MRT4577_67619C.1
ttcgttcggtcacctactgtgtcgaatccgggactgtgatctcgggctcaccgcagtgcacagagcacccccgactcccgtcccgatgcgcgctctcctctacgacgctttattcatggtaggaatggcacccgagggttctcagtttgatgctacggactatcattctaagatgcaggaactgatgcgcactggggggactggggagggcttcactctatatgatagcgcttgctggaggttctagacgacatgggccttcacgagaggctcctgagaggcatggatgcatatggcatgagaggaaccatctgcaattcagcagagcggcaatgcctcctacctggagcggcctgatggcagtcagaacgcacacaacggcacaggaaagaccagggcctggtgtacagtgatcgtgcagaaacgggactatgggctgactcgaggcgaatgcctggattttgcttctgcccttgggcttgtac

SEQ ID NO: 149229 - DNA, 1038 bp, Zea mays
  Clone ID: MRT4577_6761C.1
attaacctataatgaggccaaagaaaggcaaggtgttaggtgcatattattagatgcatttttatatgctttaaatattttgtatctttcagtcagtatgtcgtacatgtttccacttgatataatgtgcacagaatggttcaaaattccactctattgattgctttgcctgctaatgttactgttttatgatttgggagcaactttgccatattatcagacccatggatagtagcaagggggtttgcaaagccatgaaatttactaacttacccaagtaaataaacctgctttcctatgagtaccaacaatgggtttgtctggtttttttctttagttgtttggtctattatttttgttcacgcttcaggttagcttcactgttcatgctgactgattgtccaatataggttttatctatcctcacattagctgggtttgcctcatataaaaagaacttggttcttgaagatgcattcaatgaaaatatgcttggctccttccttctggcaaatatccttactggtctggttaatctctcagttaacacgctctctgcctcttccttcactgccttcatgattctgtcagtatacgcctttactttatgcatggttactggccttacccatttttgtggtgttaggatgaaattctggtgaattgtaagctaccatttgatatgatgtattcattcattaacttgtcaacaaactggtagctagcttgcttgaaatataatactacgtctgttcttgaataaaaaaaaaaaaaaaaaaaaaaaaaaaaaaaaaaaaaaaaaaaaaaaaaaaaaaaaaaaaaaaaaaaaaaaaaaaaaaaaaaaaaaaaaaaaaaaaaaaaaaaaaaaaaaaaaaaaaaaaaattttaaaaaaaaaaaaaggggccgccctttaaaaggggtcccacttggaaatgggaaaacccttgggttccccaatttaaatcgtttgggagaaattccctttttccccggttggtttattaccaaaaggccccatacctttccccttccaaaaa

SEQ ID NO: 149230 - DNA, 182 bp, Zea mays
  Clone ID: MRT4577_67620C.1
gtttctgtacgaggtctttcgtgtccgctgcttctcgcacggagaggtagcaccatcatggtgtctatactagctcgcaggcagatctttgcctgggctctccttgaggtacaaaggctgtcgtccacgtgcacgtaagggatgggaagagactgcctgctcgcagatcgacgggcatcatt

SEQ ID NO: 149231 - DNA, 829 bp, Zea mays
  Clone ID: MRT4577_67621C.1
agttcgagagttaatggcgttaaggattagtgtactataataatttgtataaatatctgccccagtagtacttgtctactactaccagtagcacagttcctcaagtctccaaactccaaatcttctcttgggtcttggcctctccagcttctcctaaccttgggctcccagcaacaatggcttcttgatctgctgccctccctttcccggcctatccagcagcaagcttaagtagagaccagttaatcacttccacgtactgtgttgcttttaggtagcttcgagcatggccaccgtgaacaactggttgggcttctccctctccccgcaggagctccctccctccgccgccgcctcaggtgacgtctccggcgccgacgtctgctacaacatcccgcaagattggaacatgaggggatcggagctatcagcgctggtggcggagccgaagctggaggacttcctcggcggcatatcctattccgaccatcaccaccaccagcacaagcagcccggcggcaacaatatggtcgtccctgcaggcagcgccagcggcggtgccgcttgctacgcgagctctggcggcagtagcgtgggctacctgtaccaccccagctcggcctccctccagtttgccgactccgtcatggtggcttcctccggcggtggcgtccaccacgacggcgctggcatcatggcgaacaccacagccaacggtgaccttaatggcggcggcgggggtggcatcgggctgtccatgatcaagagctggctgcggagccagccatccccggcacaagcacaaccaccggagcaacagagggcagag

SEQ ID NO: 149232 - DNA, 347 bp, Zea mays
  Clone ID: MRT4577_67622C.1
ggtcgacgggctatcaagaaggcccgtggcctaagtcaatggcccacattgcacttggtgggtgcgttggcttaccatctccccaagtgggagagtggacgtcataatttgtggtagagggggtactcgttcgcgcggcccctgccaattctaagtaattttgaagttttttcttgatctatatcagggtttctgatccataaattcgaaacttcggtacaaatttcatgtaattctgaaatttttttttacatatctgggttccttatctgagaaaagaaatttcatgacggtaattttgtttcgatgtttctcattgggcgggctgtttttaggattcaatctta

SEQ ID NO: 149233 - DNA, 520 bp, Zea mays
  Clone ID: MRT4577_67623C.1
tcgagcggccgcccgggcaggtgctttttttttttttttttgttttttttctttttttttttgttttatttttttttttctttttattttctttggttaccaagataaagcccgtccttacgcaccttaggaaaagtacagtggaaccccctgggagaccaatccctcattgctaacagggaactgataacctttccattcttgcgggggccccatacataatccaaaaaactttattgtggaatcccagctattaatccatctaagagagggcacccccacggaggggtcgcaggccggaggctgccgggttggtcaaacaaagaccgacaaagggcaacaatggtggaattggtaaaagggttgcggggctagccccaaactgcttgtaaaaaggcagcaactgttgctgggtcaagaaggaagcacgacttgctgcagctagctcgctaaatggcagtaatatttgctgctgcaaataagcagcggggttcagtgcggccaattggttaaatggaaa

SEQ ID NO: 149234 - DNA, 1004 bp, Zea mays
  Clone ID: MRT4577_67624C.1
cattgggaccctcgaggccggccgggttaggcactgctgcctaacactaaacaagatctctctctcaggcccccgaccccgatggtttcctcgcacacccatcacatggccgcctcctccccttccacctcctcccctaatggcagatgctaggcggcggcgcccctcttgagaagtgaaagggaaagatttgttttgccgcccgcgccctgctcaggcgctccgcctcggtcgggccacacaaggtagcgccttccgcctcgttgcctgacccattcctgtttcgttcgaagcactgaagcagccccagaccgacgccaggcgcccaggccagtggtcgacgcctgtggtgagctgataggcgatgtcgtcaccgtctccggtgctggcaagggctgcgcgtctcacgtgtaggttgtgatctttctgcccagagatgtgcgatttgtcttcgcttgatctgagtgacagtaaaacggagaccggctagtgttgttcctgaaacctgttgatttatggggagccagacaatcgcatcacaggctgggggaggtggaagaggcatgggtagtagtggtggtgccggtgcagcgcaacgcgggcagatgcagagtctggcaagacaagggtctctgtataaccttacccttgatgaggtgcagagccatttgggagaacccctacacagcatgaaccttgaggagctgctgaagagtgtctttcctgatgacctggaccctgatggtggcactaccagccaatatgagcagagttcgggcctcttgcgacagggaagtatcacaatgccgcctgagctcagcaggagaactgtggacgaggtgtggaaggacatccaggatgcaccaaacagaaatgttggggagagtggtcggcggaagcgggagcggcagccaacgcttggagagatgacgcttgaggatttcttggtgaaagctggggttgtcgccgaaggatatctgaagggcttgaatggcataggcagt

SEQ ID NO: 149235 - DNA, 427 bp, Zea mays
  unsure (1)..(427): unsure at all n locations
  Clone ID: MRT4577_67625C.1
ggntgctgcacggtggtagcctggaccgtatattataaaccatactccttatacatagacaagatctgtgcataaggttttatttagaaaaacaactttaaaagtattcttgttttgtggcagcgcctgcacgcacggagatgccttttggctgcgtacccgtggagcctggccgtgtctctcgttttccgtccatacagcctgtaggtgacggaaagccaatcaaataacacctgcttcgatgatccgcagaacacaggtgcgggccgtgcgcgtgcgggtgcacgcctgcgcactcccaaccaaacagacggatattgcgcgaaaacaacagtctggcacaaccgcacaatactggactatgaatgaaacagatagctaattgatagatgtttggccaattctgaactccaggtctggatgacat

SEQ ID NO: 149236 - DNA, 378 bp, Zea mays
  Clone ID: MRT4577_67626C.1
tttttggttttttttttttttttttttttttttttttttttttttcttttaagagtactaacccggggggccaccaaccattacatgatggacccccgccagaaggtaaaagggaattataaaaattattacatggtgcaaccagaaccatcgttattttggtttgggaaccagcccaacaaaaaaaaaaggggactgacccgggcgacacaaaaagggggggcacatttccaggttttgggggggaacacctaaatttggttttcaattaaaccaaacaaggattaagccaccagggcccccccgctttttttacaacaaaaccgggttggggttgttgagcccaaattcgaggttacttacccgtgcatgcgaagg

SEQ ID NO: 149237 - DNA, 463 bp, Zea mays
  Clone ID: MRT4577_67627C.1
ctttttcttttttaacatggtgactgtcttgttgccctctgtataagcgtgcttggcgagctccccgggtaggactaggcccacggatggtctggtatcttacgggaaggcgatggcaggtttattgttatagcgcgcaagcttgcagtcctgcagcagggagcttgtttaacatctctacaatgaaggagttcatgatgggacatggtcttggatgagatcccaatgattcggatgcacactggttcaggacctggacgatgtacctcttgcatgtttccacgcttttcttgcccttattattgcccctcttgccctaacgatcttagcttgtgatggacttgccagctgggacccatttttatgccttcagttacttccaacagggctccttctctgccgaagatttctactccaaaatctttttcaacaggggttacttcttagccttagacagccatca

SEQ ID NO: 149238 - DNA, 152 bp, Zea mays
  unsure (1)..(152): unsure at all n locations
  Clone ID: MRT4577_67628C.1
ctttgtttgaggcttttccacccaagnagcctctcccgtaccatgaataaggtatagaaattttaggcaataattacctcaagaaattgaaggaaaaaaacacaggactatggtcccgaactgaaagccagcagctcaaaaaacacggtttt

SEQ ID NO: 149239 - DNA, 291 bp, Zea mays
  Clone ID: MRT4577_67629C.1
ccattttaatcctttgtttcctacaatttcaaacacatgagacgggacagggccaccacttatgtgaccctcacgcgggcaggggctcacatcacatgcatgcgatgcgagggataatacactggagagggagggttctgagcgaagcaaacggttaattaacaacaacctaacgacaatgggggttggacacacaacggggacgggtacatgaaaaaaagcccaacacagggcgggagatggcgcgaccaccccatgtccgcattgaattacacctgcgggttggagaaa

SEQ ID NO: 149240 - DNA, 136 bp, Zea mays
  Clone ID: MRT4577_6762C.1
cggactcttgggtcaaaacccttttcccttctcccttctcccctctctgatctagtgcgggaactcctaccaaagctcgcgtcatctacaattccaatccctaatagctgatcatgctatgactactccttctatt

SEQ ID NO: 149241 - DNA, 188 bp, Zea mays
  unsure (1)..(188): unsure at all n locations
  Clone ID: MRT4577_67630C.1
ggtgcacttanagtcttgacgtcgctgccgcgtcgtagcttgtctctggcgccgcctttnttcntttttccgtgaaannngatnaatnagnnaaaaanaaagggatcangaacacacccagaagatngacatacaaaacgaaacaatcagaagtacgctatatatttgcataagacagaaacagtgct

SEQ ID NO: 149242 - DNA, 221 bp, Zea mays
  Clone ID: MRT4577_67631C.1
gtacattgctccctatgatgaactacttattggggaggggcttggctataaaagatctctgctcaatgatctttagatttttcccacttctaggttacattattgaacttgttattaaaccaaagcttgagtttctgcttagaaccctgaagaaaccacttaaagcggtttttgaataccccaaggactttagagattcacaccaggggaagaacaaaccc

SEQ ID NO: 149243 - DNA, 666 bp, Zea mays
  Clone ID: MRT4577_67632C.1
gggacgtgackatcctaagccctttagctcaaactttctggtcaagactccgcctcatgtcattggacgcttcgttctcatcaagcactttcttctcagagagtctttctggacgccgtatatacaggctctaccgcagccaaatgatgttgactcttggtctcttccaccattttggcctkatgaggatgcagagttgtttgaggggacgaatatcgaggttggtgtcgccaacataaaagccaatgtcatgcgcsarttcagagctggttgcgatcttttggacagagacgattgggagcctcaactcctgaagcagttcaccctgccattgtatcagtkggcgtacagcatcttctccagcagaagtttccgacctagtctcgttcttggcccagaagaccaacaacgtctccccgaagcgtcaaactggacgacttttctgttctaatgccactctttgacgtgggaamcatgacatgaccactcaagtacgatgggaacgtgacgaaaagagcagcgactgcagtytcaaggtcggaaaggcgtatcagccaggagaacagatattcaacaactacagcatgaagacaaacgctgagctactactcggctacggattcatgctccccgagacagaagagttgcacaatgactatktcacgt

SEQ ID NO: 149244 - DNA, 226 bp, Zea mays
  Clone ID: MRT4577_67633C.1
tactttttactagatttgtatctaaccgacgcaccttttctttcttaatcttaggcaggcaacaatcagcttgatcaggtcccattctattgcaaaccagggaaccggggaaaccgctattctgaccggctctgttgtatataacgcgagcgcgtctgcatcaggtacgctttatgcgatgaccatagccataagaattggcggcggggaaaagaaaagagaaaag

SEQ ID NO: 149245 - DNA, 376 bp, Zea mays
  Clone ID: MRT4577_67634C.1
gtggggccccaaaaaaaactttgggacgctttggagaaaaaatatacccccttttttgccaaaaataaaaaggtctggattttcaaaaaatatggggttctatatgtttccaaagacaaggcatatttaaagggcaccccaaagttttttgtggtaaaaagttaaaaagcctaatacctggaagggggggtggttcgacaaaaaaagcgcgccccgggttgttccctccaaaaaatttttttatttcctgggtagctatgtccaaaacctccaatgggggttttacttggagtggccgggcatgcacgccagggttctgaccctcccgagggggaagaatcaaagccccgctgcttttaaaggagcttttcccccc

SEQ ID NO: 149246 - DNA, 143 bp, Zea mays
  Clone ID: MRT4577_67635C.1
tttgaaaaagaggaattggagtatgccgaggaattgagcacgcatactctttggcacccggatacgcctaataagaaaacaaagacctccaaaacatatacgaacacataagcccacatactcaatgaaaatgaggaaaaaga

SEQ ID NO: 149247 - DNA, 198 bp, Zea mays
  Clone ID: MRT4577_67636C.1
atgcatccctgaggcagacggagtctgatccagatgctgatagaaccactttaaatcatgcagatcattcatcaaaaatagtccagcatcgattgttatctagacaagaagaacttaaggaaagagcaagagttctgcttgagcaagcaagaaggatgcagccttaaaggcggggaataagcacaataccaacacagc

SEQ ID NO: 149248 - DNA, 274 bp, Zea mays
  Clone ID: MRT4577_67637C.1
ggctacgccacctacaggctgaccaatcgacctatccgtggggccatacctatggggagtgtctccccgcacccttccactcccggtcaggagggcagcgcgccgtacggccttcctctggcgctgcagttgctccccggacgcgtccccggtggccacccagcggttgttcaactacatgctcgccaccggagcaaccacggaggttggcgtgaacggatgctacacgtaagccgcctcgatgcagcaccagcaacatggcgctcagggcgtc

SEQ ID NO: 149249 - DNA, 612 bp, Zea mays
  Clone ID: MRT4577_67638C.1
cccagcgtacgtcgatggagaccgatgagggggctgcttgttgtgcttgttgttctgggtgtcgctgcgagcgccacctgcaggcatacgaagcggcgggtgagggtggcagccacagccgccggctcatgtaccgccgccggcgcatgtgccacctccggctcacctgccacctccggcgcatgtccaaccgccggcccaggtgccgccgccggcgcacctgccagcgccggcccatgtgcctccgccggctcatctgtggccgtcaccatgccaataccctactcaaccgccccggcctcagcctcatccatagccacacccatgcccgtgccaacagccgcgtccaatgccgggccacctgcagggaacctgcggcgttggcatgacccagagcctggggcagtgcgtgcagtttctgaggcatgagggcaggccgtcagggacgccctactgctagcctcagtgccagtcgtggcggcagcagtgtaggcagcaggtgacgcaggtggagccgcagcaccggtaccaggcgatcttcgggttgatcctgcagtacatgctgcagcacgagccgcaaagcgggcatgtcgcggcgctgatggcggagca

SEQ ID NO: 149250 - DNA, 173 bp, Zea mays
  Clone ID: MRT4577_67639C.1
ggactgcccggcgcgcatcgcaaggaggtccctgctgataagagctggaagggatgctgtacacagactggcctcatgcgccggggaagcccaagacgcctgaccgcaggaagttcaatctcccagatggcaggagccatcgtaaaggggactaaggtggagggcatgtgaat

SEQ ID NO: 149251 - DNA, 311 bp, Zea mays
  unsure (1)..(311): unsure at all n locations
  Clone ID: MRT4577_6763C.1
ataaatctctgtgatggtgtagagcagccgtccacccactgtgatagtgacagttccaagaaggatgaaactgcagctgttgatcatgacctaataattgcttcgttgataaacaccgccgaaatgctgaagaaagaaaagtcaagtaattggctttgtgaatttaaggagtggatggatgacaatacagagaaaacagaaggcgacaacctatctgttggcttaactaatggcaatgggaagtatatcaaacaacnaganaggcagaaagcacacaaggagacttccaataacatgtcggatttggtaca

SEQ ID NO: 149252 - DNA, 479 bp, Zea mays
  unsure (1)..(479): unsure at all n locations
  Clone ID: MRT4577_67640C.1
atgagccacctcaagaggagggcgatgatcaagggggagatgacaatgatcaagacaaggaaaactgagccctcgcgtttaggcggggaattatgtgacccgtttgggggattttttttggttgtttgacttagctggaactcaacttagggaactgtttagtgccttatgaagtcaaccaacttgaaaggagactgctatatcataatctcggtatatctatcaacgcagtttgacctgtgattcagtttgtttgtgctaaaaaaaaaaaaaaaacaaaaaaaaaaatataaataaaaaaaataaaaaaaaaaaaaaaaaaaaataaaaatttanaaaaaataaaaaaaataaanaataaattttttataaataaaaaaaataaaaaaagggggggccctttttaaagtaccaatttttcgtgccctgtgttcggaaacaaatttttttttttagggcccccaaaaactaattcaagg

SEQ ID NO: 149253 - DNA, 197 bp, Zea mays
  Clone ID: MRT4577_67641C.1
cggacgcgtgggcggacgcgtgggcggacgcgtgggctaaatagaaacaatactgatggcgcgaaacatgatcattgcggtggctctactccatgccacctttcttgcggtggctagatctgattgggttccaaaataaccatcaaattcagatgacatacgaggtgcttgcatcacggagtgcaccatatataata

SEQ ID NO: 149254 - DNA, 293 bp, Zea mays
  Clone ID: MRT4577_67642C.1
gtcactgaacgtgaagaaaattactggatggaactgattgaacattatgtctattctgcatgaacatttgggggccttattaacaaaaccaaagcttttactgcaaatgaagctttggctaaccacttggcaaactagcacttacccctttacccccaaccatggaccaataccatttttgggctaaaattccaggccgccagtttttggccaagaaaccaaacattgcttgttccggggacttctggtttaacaggggttccctcccctaaaccaccaaatccccccccttt

SEQ ID NO: 149255 - DNA, 276 bp, Zea mays
  Clone ID: MRT4577_67643C.1
aaatcatatcattcggggctttttttttttttttttttttttttttcttggggaaccaccaaataggttgggagaaaaagggggccccctaacaacccataatcctaggtaagcctttgtatacccaaagacccagggctgggccaaaaggtccaaaccccgggaaaatttgggcttaaacaaatcctacgggggcatttttgcagggtaccctcccaatcaaaagaaccccggtttttgggggggggttcccatgactcccccgccttaacggcc

SEQ ID NO: 149256 - DNA, 1001 bp, Zea mays
  Clone ID: MRT4577_67644C.1
acagcggaatttctttattacaaaaagttataagttacaacaaattttacattatatttatcggagtgattaaaaatgattcaaagaaataaactttgaaatgttataatttatttataagtttgaaatatatgctaactcaatgacaatcctcaataagaagtatagaagagctactgtaacctataagaaggccgtgcccaccggcgcttaacaccatccacagtagcacaaatctagtacctgcaataacatgggttcgaaaaccctgagtacagagtgtactttcacaagtcttacccgtctaaggaaaaagactcaaaaatatactctgcgcgctcgcatagaggaaggccgagcaggggcggctgtggcccagcggcgcgcagcctggcaaactcgttggcagggagacgtgctgacgacgacgacgaccatgtgaatgagagtacgacttgttgcggcacacacgagcggccgaggaagaacacccgacggtggtgaagggcggaccggcgaggcaaggacataggtgctgctctgacgtcctgctgatgcaccaaggcgatgcgatgtccgagacgacggcgaggttgacgcaggagcaagctcgtgcgtctggctggggaggcaatcttgagggcatggtggacatggacggtgaggttcgagcggcgcgcaggatgaggccaagcatcatggcgtgacggggaaaacaccggcgaggtgctggcgctggcgagctccaaggacaggggaggcacgaccatggttgggacgccgggagcagggagtagggcacagtccgagctgggtggcggcgggcgacctaggcgagctcgaatcttccaaggaatgacgcatggtctgcgagaggtggggaagaagaagctcggcaccagggagatgggacgagcagctttgtcaccggtggctggactgggcgagctcgaagccgagccccggccagggagcaggcgcggtggggaagaagaggccgg

SEQ ID NO: 149257 - DNA, 385 bp, Zea mays
  Clone ID: MRT4577_67645C.1
aatcggtattccatctattttttcaccaataaacaaacctaccccaaaaaaaccaaaaagataaaaacaaaatcttcgaccagccaaaacaaacaaagaaaaagcgcaatccatacaagggaaaaaccctttcccaaacaacaacccacctttacccaatctaaatcccaccttgaaaaattcaaccccggctttaatcacaatctctaaaacgttttcaaaaaattacccacaaacttaccccccatcgaaaaaaaactttacaaatcttcatcaagcgcaaaacaaaaacatttactctgaaaaaaaacttgcgcacttcatcattcctctcaaccaaaaaaaatacctcatccacagaaaaattgacaaaatttccaaaatc

SEQ ID NO: 149258 - DNA, 2505 bp, Zea mays
  Clone ID: MRT4577_67646C.1
tcgggcggagctcgtgaatgttgggctcgatgctgaacactcatatgcatatgtaaggagtctggctcgttttgctggttcgcttggtactcaaggctggagaattgcttctgaccgcattcggcaagcattacctgctgatgtaaactatggtcgtggttgggttggagaatatgagcctccattaccgtctattcttgttgtgaatgatcaacctagatacccgaagagctctgagacaaatagacgaaggaatgctcctctgcctagggataatgaaaggttcagatcaacagaaactaataatccaaaggatatgagacgggtagccacttgcaataatgtagttggagtggctggaccactagagagtccagaaattaagccaagattatttggtgttaccactgagcctcaacacaggagcacagacgcgttatcactgcacgagaaccacagagtgtctggtaatgtcgcaaagaccaaaagaacaacgaatgagcaaacaagaaaaggcaattcatcttctagtgcccgacctcttgaaatgcagctacagaaaggagcttcttctggcgcgcttgatatccctgccccaaataaaatggctggccagcctagaccgtttttgcaaccaccagaatcaactagagctcagcaaatgaaaaagattgactcatcaaaaagcaaaattccaattgaaatggcaccacagcaagttgagtgtgcaaaagatgctgattctagtgtgcatgatactccttcctcaaatgggcagcctaaacacttcttccagtcacaagcagcagcttcctctggtgtgcatgatatgcattcctctaacgggcagtctaaacactaccaatcacaagcagcagcttcctctggtatgcatgctatgtcttcctctaatgggcatcctaaacactacttcaagtcacaagcagcaccttcgtcgggtgtgcatgatatgtcttcctccaatgggcagcctaaacattttttccaatcacaagcagtagcttctggtgtgcatgatatggcctcaaacgggcagtctaaacccttgttccagtcccaagaagcaactgtactacagcccaaaaatgaagcaacatgggtgtaccatggacgacctggtgatggaaaggttggaacatcaaaaaaaagcagaccatcgacaagtattgggttcatcactaaaaatcaatcaataaatgctgcaaaatttgccatgaatttgaatggccaaagtattgtcagtgaccatacaaaatcagcaggcgcaaccgctatgcctgcccaagcaaatataccaaacagaggtcttgatgctcctcggaacatagtctcagcatttccagctaatgttagggagaaccagagcattccatcagctccagtggctcaatcttggatctcgtttggtgctgctacagagaacaaaccaaccattgtcagcccagctttcgttgacaataattgtggctggaaaatgccatttgctaatgtccaaccttgtgatgataccaaattaagcgttgttcctcagttctttagacatcctgttcaggtagttagagagaactcggttcaaaacaaggggctggtaatatttccccagttggtgcagccagatttcgcaagatcacaagggcaaccacagtggcaggggctgtttccccacatgcaacagaagccaggcaaggatgtactccgcccggacttgaacatcgggttcccatctccaggttcaccaccagctcgacaatcgtccggcatcaatttggaagcacagcagccagacctcgctttgcagttatgatctgggaaaagacaatgaaaacttcatacggccaggccaggatttatgctataatctctaagcatgtgaaggcatgaggagctcaggtgcgaaacaaggcgagaacagcattgggacatccgggacatggatcggtgatgattgattgtgatgttgactttacatgccatatggcgtcatcgcaactcatcaactcatcgcgtcgatgtacgacgatatcagaaaatggatggatgaacactgcttgaaatgagatcatgtctacttgggggcattctgacaggagttaagaatccagcatttggggaaatgctttggtggcatgcatgtaggtagcacactagcatgcccatgatctgaaaacttggggcgcgcctctctgaccacgatacagctttcttcggtggaaattttggcaccagaatttagaatttagaatttagaatataagccgttcattcggtagtgtaggtcctgtggtcacccctatgtaatgtaatgcccataccaaaatgaatgttggctgtaaattgttctgtgttgaatagattgttagggtagggcagtggccagtggccttcacacctcttctgaatgaaattgcttcttttgttcatgatgtatgtagcaggaaaccaggaactgtggtctccgttcagttcaaatggcatgctgaatct

SEQ ID NO: 149259 - DNA, 312 bp, Zea mays
  Clone ID: MRT4577_67647C.1
aagcagtggtaacaacgcagagtacttttttttttttttttttttttttttttactttttttttttttttttttttttttttttttttttttttttggcagcaaaaaaaatcacgttacattcgaagcccccagcatcccaactggatttcaaaaatgtaccagagggaattcacgggggccaaatcgaattatctttagccggagcgttcccagtgtccgacccccggggcatcgccccaaagtttaacggcacagcccggctaaacttaaaacaaggggcttcccacccttttcttcaggggggagggcc

SEQ ID NO: 149260 - DNA, 625 bp, Zea mays
  unsure (1)..(625): unsure at all n locations
  Clone ID: MRT4577_67648C.1
atggcttcgcaagctcctatgaggggggggggggggggcccccaacctaatcaccannnnttttttcttcggtatgttgaaaacccaatctcttcacaccctacagggatccaacagggcaatcacagtttggcatgcttacactttatcatcccttggttctcttcaacaatcatcacctcctattacattgggggggggggggggcgacatttattttcacaaaaacatctatttcactaacaactacagacaagcttgtggctagtcaaacctctgctggcctatctctcagtcatacagcatgtttctttctcattctaaccaactaggctgcatgtgaactctgcgttcttatttgcaacaaacaacaactacgcattctagccaggctaccgtgctgtcctacccctcagcaattgtcttccatttcaaccaacgtggctgcagttgaacttctgctgcttatttacagcatcaacatctactaccaaccagccagctagctggtgtgagccctgctaccttcttgatacaaccacagttggtgtcgttctaccagcacgctgcgcctaacgctggcacccttttacaactgcaacatttgctgcctttcaaccaactt

SEQ ID NO: 149261 - DNA, 2129 bp, Zea mays
  Clone ID: MRT4577_67649C.1
attcattggaaacctcgaggccggccggggttcctattctgctgttactttgtctccgcaggccccacattctccgtctcgccacggtcgcggtcgtggtctcgctccggcaaacccaatggccgccgccgtccccaacggccacaccgccgccgccggagacgacgacgcaccacccgccgcttcgtcgtcgttggtgttcctgggcacggggtgctcgagcgcggtcccgaacgcgcggtgcctgatccagccccccgacccaccctgccccgtctgctcccagtccctttccgtcccgcccgagttaaaccctaactacaggtgcaacacttctcttttgattgactattgccaagatgaacgtgcacataagtatattataatagatgttgggaagacattcagagaacaagttctgagatggtttgttcgccacaaaatcccttgcgttgattctattcttctgactcatgagcatgcagatgcgatcttgggccttgatgatgttcgggtcgtacagccatttagtcccacaaatgatattgatccaaccccaatttatctctctcaattcgctatggacagcatctgccaaaagttcccctatttggtcaaaaagaaattaaaggaaggggaggaggttagacgagttgctcaacttgaatggaagataattgagagtgatattcagaaaccattcacaacttcagggctagagtttgttcccttgccggtgatccatggtgaagactacatttgtttgggtttccttttcggaaggaaatcaaaagttgcttacatatcagatgtttcacggtttcccccaagcacagaatatgcaatttcaaaatctggaggagggcaacttgatttgctcatcttggattgcctatacaggacgggttctcacaatgtgcacttgtgttgggaccagacactagatgctgttaggaggatttgccccaaaagagcactgcttattgggatgacccacgagatggatcatcacaaggacaaccaaacattggaagaatggtccaggagggaggggattgacgtgcagttagctcgtgatggcttgcgtgtctacattgatctgtagccgtgaaaggaaaatatgccatactcagcgaaccgcgccaggctttctggctgatgtaacatccattcccacttgtgaagaaagtgcaaactgactaaaaaggcgagcctatttggtgcatcattttacgtttcgctagtttatacgtgaatctctgaataaaaaagagaaaaagaaaagaaaagagagagagtagccacttgctagtagctggttcagtgccccggcaaattaatggccatctccctggtaaaggtagtcgaatgttcttgtaatcttgtcaattggaagctacactgcactggatgcatgcccaccagtcgaactgagcatgcgattttttttccctcggtcgcgcccgggtcatgtattgtagtactcctcagtgtctttttatttattgctgaatagtgcaaaattatgctatccagcgacagcaatgtccgtgctgccaatgagcccatccgaactctcaaggagttctccaagatcaagtaggaggcattgttatattagcatcggatgtccccggctccccgccttcgctccctgcggtgatcgaaccccggatcgcggtagtcactgttgtttccctatgattttactgctttggtatgctctaagcttgtggttgtgttttgataaactttttgtggattgttcagtacatacatcaggatgctttagagctttggttggtgatttgatgaatttgcttagatctaagtagtcgatctgtacaaaggcttggaatgttttggtgttgttacctaccaccagcattcatgtgataggtttttggcgtggatcaggttacctcagggagggagggtcttgtttgagtagatttagttttgaggcttacaagcttaactaccagaccatatttctatgattccttatagtttaaggaatgatgaagagcagaattattgatgtctggatgcattcagaagttttcatatattcttttggatgtttgttaagctatattgttgccagtttaactattatctattgttgt

SEQ ID NO: 149262 - DNA, 292 bp, Zea mays
  Clone ID: MRT4577_6764C.1
aagcaaggaggagaatgatcgcaaccacgagcagcacctgggggaggccggcagccatcgtcgccggcgccttaggactgtactgagaagcacgatgctaataaggacaccggagcacgcgcaccgccacaagatctacgaggagggcacgacatgggcatccgtggtgtccggcggattggccttccacgaacaccctgagaagaaaaaggaccacctggacgacgaggatgccgggggtgatgataaacatcacttcttcggctgattgatccttacgaagcgacgttcc

SEQ ID NO: 149263 - DNA, 688 bp, Zea mays
  Clone ID: MRT4577_67650C.1
gccggccgggttgcgatagctcgctgagccacctgcctatctatactattcggacacgagagtgaacgatagtctagctagcatggagatggtgagtatgcaagatactcctatgcgtgtgacgacgttgcggcttctccatttcgccgacaactacgacgacgaacgacggccctgctcctgcaggagggaacctgcaccgccgctagtcctgtacgttcgtcgacaagggagcctgtccatccagccgagagggatcgcatctagggaagaaacctgggccctcccaccgtgcgtagtactgataaccgatggacacgtcaatgcatagggcaaatccgcctgatgagatatcagcactagcgtcatacgtaattagatgctgcgagaatctcactgactgtgacgggaggcggacaaattattggatgtgtatgaggatgtaatagggtgcagacaatattctccttaatgaggtgatgtgaccttcaattttttgttggtgagaccctgagggctgatgcgctcgagaaatactgctattaccaggatggaggcactaaacctacattccactatttctctcatgctcttagggagatccagtgctacgcttgccctaagatgagttacacatggtgcgcactatgtatgtactattgctatatccacgactataaatgccctg

SEQ ID NO: 149264 - DNA, 346 bp, Zea mays
  Clone ID: MRT4577_67651C.1
ccgggcccgggcacaccaccactgggtccaacagcccataagctatattactccagagcgcagaagaacccgaccgacaccatgagggtgcggctcggtgccctcgctctcctggcttttgctgcgagcgccacctccacgcatacaagcggcggttgcggttgccagccaccgacggcgggtaatctaccgtcgccggcgcatatgccacctatcgggggacctgccacctccggtgcatctgccaccgccgggccacctgccgtcgccggtgcacctgacaccggcggaacatgtgccgacgatcgcagatttgccgtcggcaccatgccactaccctactcaa

SEQ ID NO: 149265 - DNA, 560 bp, Zea mays
  Clone ID: MRT4577_67652C.1
ttcaagcacccccccgagaaaagaaactctatgagacttccttctctcgtcgttgtcttcttcctagcgtctccccgttcttctctccgtagtagctaacagtatagtgtgggcgtgtggcccagcatggagactttccctcctcgctggccccgcatctggcccggattaaccgccttcggctccctccctagattgccccacccaccgtcagcctcgtcagggtcctcccaggacaaagcatgctccggagacagaggcggcagagctggggcaggagcagagccatcacagaaattcttgtctccagccaatgtgcaggtaacaggaacctgaacaaaatggccttgcagtcttttgactgctgtacttctggggagctctgcattaaaaacgaatgcataagcagcccctacgtggagtcgacggcgaggcaggtcgcgcgggacatcctggagctccgcgaggacaaccgcgcattcaactgctacgccgtctccgtcaagtacaaggtgctgctggtcgctggctcatctcatcagtccctctgcaacgcgaat

SEQ ID NO: 149266 - DNA, 702 bp, Zea mays
  Clone ID: MRT4577_67653C.1
ttcggggaacatcacagtctaccatgtgctcgacgactttaacgatgctcctgttcatgatctgagcgccgcgctgatcgccgggcgccgcctggcgccgctccatgaatctcctcgtgagcatcttcatcagccgcctcatgttctgcagcatgttgagccaccgcgctcatacttcgtgccaggctgccttctaaacataatacaccttcatcaaggccaccagatagttccccggcttcccgaccaccgccaaccaacagacacacaggcgaaagctcaccgccttcttcggccagacgacccacaaaaccaccgcggcatgggctactgctccgtatggaccgtttgcctggggatactgccgggtgaatgtacagaaacagacgcacccacccttactatggacgaggacccatacagctaactcataagtacaactacacgttctccgctaaagcgctgaacctgaatctggctgagggaaccggacctgtgggctacataccccgcggcatgcttcaagacggccatctggtattggatgacctcgcagtctgctcagccctcgtgccacgccgtgatgaccggtgactgtaggtcctccgccaccgagcgatccgcgaagaggctccccggatacggcctgaccacgaacatcattctagaagtatctagattcgccgcgatgaccgctccacc

SEQ ID NO: 149267 - DNA, 621 bp, Zea mays
  unsure (1)..(621): unsure at all n locations
  Clone ID: MRT4577_67654C.1
cttaaaantaaggttgcatcttttgttcaaggaaacaaanaggatttatccagtatgctgatgctgaggttactagactctctaatgccggtatgtgttcatgacaaccattccttcacctccccaaaatattaatgatagccctataatcctagtctgtatatccatgcaacaactcgtgggttctgtatgtattttctgctttgatccctgcttggtagctctaaatcttttgtttttttctcgaaccacgcaggagaactgcgcgtcatttcattaagaaagaaaaagagatagcccctaggagattaggctcccccaggccccccaggggtgtacagaaacagaacactttacagacttaaaccatacacgaccatgacctctagggggcaacactcacgactaaatcctgtagagctctcgcccccgcgagacaccataaatgcccatctgcagccacagattgcaccacaacatgtgcatccggcctaaccctatcaaagaaacatgcattcctatgtttccaaagctcccaagagacaagcaccaccacggagttaaatcccttccgcaactccttaggttgtctccagcaacgtccactaaatttcatcctct

SEQ ID NO: 149268 - DNA, 789 bp, Zea mays
  unsure (1)..(789): unsure at all n locations
  Clone ID: MRT4577_67655C.1
gacgcctgcaggtaccggtccggaattcccgggtcgacccacgcgtccggtccgcctgctccattggcctgcgagatggctctaagcaaatcaatgcatgcaagaaatagatacaaggacaaaccacctgacttcgcatatctggcatctaaatatccagattttaagcagcatattcagataaatctgaatgggagagtaagtcttaattttaaagaccccgaagcagtcagagctctgacttgtactctcctgagagaggactttggactttctattgatattcctttggagagactaattcccacagtccccttgagacttaactatattcactgggtagaagatttgattggtcaccaggattcggacaaaactactctccgaagaggaattgacataggtactggggcatcctgcatctatcccttacttggagcaaccttaaatggctggtatttcctggcaacagaagtggatgatatgtgtttcaattatgccaagaaaaatgtagagcagaataacctatctgatctcattaaagtggtgaaagtgccgcagaagacactcctgatggatgcgcttaaggaagagtctgagatagtctatgacttctgtatgtgcaaccctcccttttttgccaaccaattggaagccaagggtgtaaattcccggaattctcgaagaccctcacctagnntctgntaacaccgnnggcatcacagagattatggcagaaggaggtgagctagaatttgtcanagggatcatccatgacagtttacagct

SEQ ID NO: 149269 - DNA, 309 bp, Zea mays
  Clone ID: MRT4577_67656C.1
aactgaccctgacttgcaaacggtcagcttattagcagttgcatgagcgatgattacacatgcatgcatgggaaagcaaagcccttatcaggtgtaaatcaattacgttgcatcactcacgtctcgcccgtaggatgggacgagctaatcttggcccaaccgtgtaagtatggcatagagacaacagaaaggggtattctgaaactatgatcagcagacaagatggtatggtgcatatgtacaggttgtaagcaaaagacaagcggaccgcctccagtttctttacagcacacctatgaacattagcca

SEQ ID NO: 149270 - DNA, 462 bp, Zea mays
  Clone ID: MRT4577_67657C.1
aaacaaaaaaaaaatatattgggatggaaattcggttttcatactttataacaacacaattggaaacttttcccccaaagccacattttttgtaaaaaagactaaagagttcaaataactcacaaatctcatgggaaaagggtgcagtacaggggtagtacaattttactttagggggctaaaaaaacatccctagtcaaccaacttgttcagggggggaattgttctcctggcaagcctatttggaggatcaattttaaaaaccaaacgcaggtcctggggaccaagcctatttttttgtgggctttaataaaggaaagcacgctggcctagcactgaaacattttccttattttgatccaacaccttcgaacagacagggatggcctttttgtcctcaccaaccttcttatatgaagaagcttttgaagaccacccctcaacaatgtcaaaatttttccc

SEQ ID NO: 149271 - DNA, 858 bp, Zea mays
  Clone ID: MRT4577_67658C.1
ttgtgcatcatcgagggctgcgggacctggcgaggctgcgggtgctcaacctcagctacaaccggatctcacggatcgggcacggcctgtccagctgcacggcgatcagggagctgtacctggccgggaacaagatcggcgacgtggaggggctgcaccgcctgctcaagctggccgtcctggacgtgagcttcaacaagatcggcacggccaagtccctgggccagctcgtggccaactacggctcgctgcgggcgatcaacctgctgggcaacccggtgcaggccaacgccggcgacgacacgctgcgcagggccgtgtcgggcctgctcccgcggatcgagtacctcaacaagcaggccgtcaagccgcagcgcgcgcgggaggtggccaaggacagcgtcgcgcaggcggcgctcgggaacgccgccggcgccaactcgcgcaggcggccggcgcggcgcctcggccagagccccgccgggtcgtcggccgccaagggccgcaggggcagcaggggcaggtctgtcaccaggccccagagctccagcttgccattgccaaggagatgatgaggcgagcgaaacgtgacgtttcggcctgaagaagaaaaaccccatgcgcttacattgcatgaaaggaaagccctcacgatgcccagcccagcccagctaatacccacgattggtcatgtcatttgtagttgtagattgcagcctagtggaggcctgcagtccgcagctatgggtaataataataatacggaggtgacaagatccactgcaagcagagaagtttgagtggcgagcgattgtctgaatccaatgaaaaataacttataatattaccttcgttgac

SEQ ID NO: 149272 - DNA, 262 bp, Zea mays
  Clone ID: MRT4577_67659C.1
ccaactccatccacgcctcacgcgtcccgagccatataaagcacaattttctactttacaatcgcagtcaaaatattatccttcctgatgctccttgctctttctgtaaatgctgctaccctaaccattcttccacaatgctcacaaactcctatagcatcctttcttcctccatacctctcaacaacggtgactccactatgttcaaaaccaattctttaaccctacagcatccaacactcaataccagcaagcattttaa

SEQ ID NO: 149273 - DNA, 133 bp, Zea mays
  Clone ID: MRT4577_6765C.1
ggttccccataataattatgtcccatccctttagctaattttgctcttaatacaggatcatttaagtcaggtttctttgttactcccataatccgccttatttcctttcgtaaaattcacttcaactatttgt

SEQ ID NO: 149274 - DNA, 412 bp, Zea mays
  Clone ID: MRT4577_67660C.1
agcgggcgcgctcgctctctctttctccctcccctcctcgtggcgacgattgggggcagtcgctgccgccgtacgccaggtgcccagatcttcttcatgcccttctccagcgacgagtatcagaaggcttcataagtattattgctttattgctgtaatattatcatatgattgagtgcacaatgccatctgtggctgcgctttgttgaggatttagcgtcttcccagtgtgatagtgtgagtattccaccattgctgaactgatcggtgacgtcctaagttttattttattttcaaaagggttgttatttacgctttccttttggatcctttgtagcattgagggcatgactcaatgttggattgccaatgagatatatactatattgaccatgaacagtgttccagagcg

SEQ ID NO: 149275 - DNA, 265 bp, Zea mays
  Clone ID: MRT4577_67661C.1
ttgtattttttatagagctattggagagggactaacctctctaggagagcgagcccgaaagaacagccctgcgtttggttaatataccgtggacgtatctcggctggacacaacatgcaccaaattaagtttacagggatgggagggtataaatgaggcttcaagacccggagttgggtaaatacacagcatccatacacctcttatctcacacttactgagcgcatatatggggaaggaacctacctgctggcaagcttaatga

SEQ ID NO: 149276 - DNA, 693 bp, Zea mays
  unsure (1)..(693): unsure at all n locations
  Clone ID: MRT4577_67662C.1
attattcccagcgggcgcgctcgctctctctttctccctcccctcctcgtggcgacgattgggggcagtcgctgccgccgtacgccaggtgcccagatcttcttcatgcccttctccagcgacgagtatcagaaggcttcataagtattattgctttattgctgtaatattatcatatgattgagtgcacaatgccatcaaccttacttgatgatctccctaacgaagttgctctccagtgccttgcacgggtaccattcttgttccatccgacgcttcagttggtttgccgctcttggcgagcatcagtttgcagtggcgaacttctcaaaattcgtaaccagattgattaggaacatagcccgctttggcgtggcctcagttgctggcaagctctatgtaattggtggtggcagtgatcgagttgatccgcttactggagatcacgacaggatctttgcaagcaatgaggtttggtcttatgatccgctgcaccgtgtgtggtcccagagggctcctatgcttgtggctcgagcgatgtttgcttgttgtgcactggatgggaaaataatcgttgcaggaggcctcactaactgccgcaaatcgatatcaaaagctgagatctatgaccctgnaagctggcatatgggagcctcttcctgaccttcgtctggctcatagctctgcatgtac

SEQ ID NO: 149277 - DNA, 402 bp, Zea mays
  Clone ID: MRT4577_67663C.1
gggccagtactgcggcgcctgcgtctggaagggcgactacgtcatctcggctaagcgcgtcctgaaccacatctacgagtgctctccctcgggcggctgctgcgactatggcaagtccagcgactgcaataccggccacggccgctgcggaccttactaaaggttcttcgcttgcgaaacctaagcgggacgtgggctgtggagcttggcatggatgagcaagaaccaacttggaggtatgagatgggacgccttcgttacaaccattgttgggaaagagcagattttgtatccttcatcacacattcccttacctgggagctagcgctagcctcaactccaggcacaaaggccattaaacacaatgccgaatctggtgatccagaaaaaaaatggaatatt

SEQ ID NO: 149278 - DNA, 791 bp, Zea mays
  unsure (1)..(791): unsure at all n locations
  Clone ID: MRT4577_67664C.1
attcccatgcgggcgcgctcgctctctctttctccctcccctcctcgtggcgacgattgggggcagtcgctgccgccgtacgccaggtgcccagatcttcttcatgcccttctccagcgacgagtatcagaagggtgggcgacaacatcccatatgacattgtagcttaccttcatctatttgttagctgtttgtgcttttaaggatgcataagcgtatggcggttttgatggtatccattgtttgaacgatgggaggatagaagaccattctctgcataaatagtgccttgcacgggtaccattcttgttccatccgacgcttcagttggtttgccgctcttggcgagcatcagtttgcagtggcgaacttctcaaaattcgtaaccagattggtacgacagaagagctcttgtgtgtgttggcgtttgaaccagaaaacatgtggcaactttatgatcccctacgagacaagtggataactcttcctgtcatgccatctcagattaggaacatagcnccgctttggcgtggcctcagttgctggcaagctctatgtaattggtggtggcagtgatcgagttgatccgcttactggagatcacgacaggatctttgcaagcaatgaggtttggtcttatgatccgctgcaccgtgtgtggtcccagagggctcctatgcttgtggctcgagcgatgttttgcttgttgtgcactggatgggaaaataatcgttgcaggaagcttcactaactgccgcaaatcgatatcaaaggctgagatctatgaccct

SEQ ID NO: 149279 - DNA, 499 bp, Zea mays
  Clone ID: MRT4577_67665C.1
gttactacatctttatacctcaatcattcgcttcttctgaacctcctgccatgtacacgataacgaggaggtacaccgaggaccactctggcgaagacgtgcggcactacccatatgatctattggaaatccgaagcaacattgtgacgaccggctctgaagtgaaacagatgcccaccctttcttctaattcaccataaatacattctgaaaccaccttgttcctgggcggtaccataccactcaatattttgtgcataaccgccataaattcttatttgatttgtcaccatatgtacttctggaattaacatcacaatagagcctgtcaagcaataatgtaaatcttgacgacatatttctttgctgtattgtaccctgggagcgcattgaaaatggtctgtaacagctgtctactgaatctgacaatttatttaccctgtaatgcatgtgaaaattatttactgataaaaaaaaaataaatgcgctttcgttcttt

SEQ ID NO: 149280 - DNA, 239 bp, Zea mays
  Clone ID: MRT4577_67666C.1
aaccattttgcttacgaggggcacctagctcgctctggtaacgtaccatggctgatcaccaccggcctgcgaccggaggtggcggaggctactgagacctccagcgccggggcggcatgcactgagaggcgcaacagcagcagaaacacggcgccatgatgacggcgctcaaggccgcgacagccgcgaccttccgccggtcgatgctgcagctgtacgggctgatcctggcctgcacc

SEQ ID NO: 149281 - DNA, 141 bp, Zea mays
  Clone ID: MRT4577_67668C.1
gagtcgtattagagatgctacgacctctatactcgtgagataatcagttctctccagagtttcctgttcctttattgcaaacattgacacagctcttctaacgaacttggttctgaaccgggatgatagatgtctaatctt

SEQ ID NO: 149282 - DNA, 588 bp, Zea mays
  Clone ID: MRT4577_67669C.1
ccgattttcgtcacgttgaatcatttaagtgaaggaacttattctgacttcacatggaggttgctccaatctggtgcatctggagttgttacatccttagctggcatggaactcctcaatgacgatcttataaaaaaagacttcacaaaggtgggctcagctgaggaactcccacaagcgagttactcttctgctgggatgctggaagatgttaataatgtaatggtcctaactcgtgattgcgagaagactaaagttgctggatttacaaaattggatgaagaagtgataaagttgatagaaatagaaaagcctattctgaacgaagctatcactattatccgcaaggcagcaccaatgatggacaaggttgagcttacagtggatgctgcttctcgcctgagtgagccatttttgttggttattgtgggtgaatttaactcaggaaagtcaacttttataaatgctttacttggcaaggcagtatcttcaggagggagttgtgcctacgacaaatgagatcacactactatcatattctgaggttgaatctgaaaactttgaacgatgctgagaggcatccagatg

SEQ ID NO: 149283 - DNA, 1357 bp, Zea mays
  Clone ID: MRT4577_6766C.1
ggccgcaaatttttttttttttttttggataaagattgatttatttttcttcgtcttctgattttcacaatagcccaggttcaactgacggcttgaaccgtggtcgcattgcattgcagatagtacagcctgccgctgccaagtacagttatgcattccaagtccccagagaagcaatcacttctggacgagggatcgaggagaaacccagcaaataatgggagtacggaggatgaaaagggagacggcgggatcccatggctgacatttctggggttcgtgttcctgaccttcaactcgggcatggcgatctaccgctcggaccgcgaccccgggtcaatagcgttcgtgtcgggctcgtacgtcgacctgctgctgctcttcctctgccttcgcctgttcgagcggacgccgcctgactcgccgcgccgggggtggatcaaggcctgcgtctgggggctgaccacgctgctcaccgtcatgttctcgcagaaggtggccgccatcatgccgccgctgctggcgctcgtcgtgtgggcgatggcgttcgccaccatcggcggtggcttctacgcgttcttcatccacaaggacaaggccgcccttgtggaggcggagaacccgtagatgtctctgccgctgccatgcgctcgtggttgtttcagactatctccagccccggcgctatgatttcgagggggccccaggttaaatgaccgtggtagtaggccctctagactatataaaaaaatctatattatacaacggaacatattaatacttcgtaaataaatgatgatgtgtattgaaattggttttttaaaaatctaagaagctagataatatacatcggtacaaattagcacttcgcaggttgaaaaataagaacgacgatagctgaataacctaaattctgattgctcgaccatgcgtgtctggaggctagcgcagtggtgctagctccgtggaatcctagagggttggatcgacgagatggcgaacgacgatcacgtggagggtgtggtctcatagacgctcggggacatgagcgtgacgactagtcagtggggcaatacgtgccacattgcctcgtgtgcgcggggtgttagatatgccgggcctaccgacctattgactccctctgctattttactactaacatataacttctgctaacactatcttcctgttaaatataagagaaaacctaacataataatgtgtgcgcctggtaaaatatgtgagggctattgtactgagctatgctcaatactaaacaataatcattgatattctttgatagatttgagtgagcaaaatagatgatgttatttaatgatctgaactattaattttg

SEQ ID NO: 149284 - DNA, 934 bp, Zea mays
  unsure (1)..(934): unsure at all n locations
  Clone ID: MRT4577_67671C.1
tctggtctcgcttccagcctccaggcccatgtgaaacggtggatggcccgccctacgcgacccgggttctgcaccctgccgtttcttctccattattcccagcgggcgcgctcgctctctctttctccctcccctcctcgtggcgacgattgggggcagtcgctgccgccgtacgccaggtgcccagatcttcttcatgcccttctccagcgacgagtatcagaaggcttcataagtattattgctttattgctttaatattatcatatgattgagtgcacaatgccatcaaccttacttgatgatctccctaacgaagttgctctccagtgccttgcacgggtaccattcttgttccatccgacgcttcagttggtttgccgctcttggcgagcatcagtttgcagtggcgaacttctcaaaattcgtaaccagattggtacgacagaagagctcttgtgtgtgttggcgtttgaaccagaaaacatgtggcaactttatgatcccctacgagacaagtggataactcttcctgtcatgccatctcagattaggaacatagcccgctttggcgtggcctcagttgctggcaagctctatgtaattggtggtggcagtgatcgagttgatccgcttactggagatcacgacaggatctttgcaagcaatgaggtttggtcttatgatccgctgcaccgtgtgtggtcccagagggctcctatgcttgtggctcgagcgatgtttgcttgttgtgcactggatgggaaaataatcgttgcaggaggcttcactaactgccgcaaatcgatatcaaaggctgagatctatgaccctgaagctggcatatgggagcctcttcctgaccttcgtctggctcatagctctgcatgtactggacttgtcatcagggntaagatgcatgtattgcataaag

SEQ ID NO: 149285 - DNA, 272 bp, Zea mays
  Clone ID: MRT4577_67672C.1
cctcctgcccacaaagcaccgcagcgcagcaatgaagggtggctcatgaatcacaaacgcccgactggccacagcatctgagccgactgacgcgacctaccacagcacaagaccccccgtggccgaactgtggttccggctaaccactagccgagatcgctctctgccagcatgggcccccacacgcatataacgatcgcaggttttaaaacccaagacaccaacatcccagccaaccgagggggtagaacaattgcacgctcaaaaggacc

SEQ ID NO: 149286 - DNA, 270 bp, Zea mays
  Clone ID: MRT4577_67673C.1
aaaaacagtccagccactaaaaaggatacctacctgttcatcttctaaaaaaagatcccattcatcacctaaaaatgactccctcacttggtttgcataaaggcacaatagtgtgcaatccattttcctaaaaaacaaaacaggttaaaaacatattccccactttttaggaaaaatccccctgtctgaaactctgcccgtttgtacaacgtgaagtaaaatcttcaaagcacccctttttcaccaaaggtattcaataattattccctt

SEQ ID NO: 149287 - DNA, 219 bp, Zea mays
  Clone ID: MRT4577_67674C.1
agatctcatttacgatgtcatctgtaccacctcagccgtctagagtcagttgaataacgctcggggcattcaggacacagactggaaccgcttgttgcaggatcaccgctgggtgctcagcgcagaccttggtaggcaagccagaccagctgatcaaacgtcgtggaaaacttgatcttgacggagcaaccttactctggatgcgtcaagttctggctg

SEQ ID NO: 149288 - DNA, 392 bp, Zea mays
  Clone ID: MRT4577_67675C.1
cggcaagctcatggccgagcggcatatcaccgtggaggcggtcttccaagccaccatgatcctggtcaccaccgggcgcgtgatagcggatgcgtgtagcatgacgacggacatcgccaaaggcgctgaggccgtctcgtcggtgttcgcaatcctcgaccgccagacgaagatcgacccggacagccctgaggggtacaagccggagaagctcatcggagaggtggaagctgtaggggttgatttcgcgtacccatccaggccagacgtgatcatcttcagaggattctccttgagcatggtggcaggcaagtcaaccgccctcgtcgggcagagcggctccggcaagtcgaccatcatcgcgcttatagagcggttctacgatccactca

SEQ ID NO: 149289 - DNA, 185 bp, Zea mays
  unsure (1)..(185): unsure at all n locations
  Clone ID: MRT4577_67677C.1
gacccacgctccggccggtttgatcgggcgctcaacgacgagggaaggacacaacggggcagaccngctccaccttcgacgctgacacggcaggggtgttcaagtgccgggcgctgggaatggcgctccccgacgacgccgaggtccgggtgcgggtcgccaccagcacgcggaacctcctacac

SEQ ID NO: 149290 - DNA, 1305 bp, Zea mays
  Clone ID: MRT4577_67678C.1
gatttaactacattacattaaatatgccttgatctgatcacatatacttcatgacgatacttagaatcattctgttactttgatataccggtatgaattttattgaagttaatgctagattcatcacttggatgattcttggtatcatatatcatacataggtcacagaacatagccacattttcagttcagaacatagccacactttcagttccttgtaaaattattctggaacttatgctgtttgtgactttcagattaagaccctaaaaaccactgcaacaatgaaccagaagctgattgaggaactgcaaattacaaactcaaaactgaaggaggtgtgtgcaaagagtgaggttgagaaggcacttctctcagaaaaactccaagaggtggagaagctatctgaaaaatgttcactcttggagaactcactttcagatgcaaatgctgaaatggatgcattgagggataaaataaaggcacttgaggctttagaaagctctctcaaggatataatttcctgtcatgtttctgagaaggctgttcttgtatcagagctagagatccttggtaaaagattatctgatgcttcagagaagaattctatcatggatagctcattgtttgatatgaaaatggacctagaagacttgagaacgaagttgaaagattctgaagaatcctgtcaggctctccttgcaaataattcagctctttctggtgaagtggatgcattaagagagaagataaaagcactacaggactcagaaaactctctgaaggatgtaatttcctgtcatgtttctgaaaaggctgttcttgcatcagagctagagatccttggtaaaagtttatctgaggtttcagagaagaactctattttggatatctcattatgtgatatgaaaactgagctagatgaattgagaacaatgctgaaagattctgaagaatcctgccaggctcacctaacaaataattcagctctttctgctgaaaagaacaatctgttctctcagttggagagcattacattggctatgaaagccctagaaggtatgcatgccaatctggaacagaagcactcctctgtatcaagagagaaggattttgcatatgatcaagtaagggaactgcaggatcaattgagaattaagaacgaggaatttgaagtgtcagcaaagtcacatcaacttcaagcaaacagctatgagaaacaaattttttctctacaagagaaaaaccattatatggaggaggtgcttcaacaggaacagcagaaaaacataaatgcttctatta

SEQ ID NO: 149291 - DNA, 414 bp, Zea mays
  Clone ID: MRT4577_67679C.1
taaaatagaccacagattacagcaatgactccttacggaggccagtaacgcacataaacgaaagaatccatggaaaccggactcaaaaacactactagagatgaaggagaccagggggggtcagccatccggcaaaggggctgccaaaaaggagagacccttggccccagctaattcccaaagtcttctctcgtcgtccgcctgccgaaggatagatgggagactgggagtttgaccatcaaacacacatctattacggtgattccagatcatccaggcccccaaagagatcagagagctcaatccgttcttgatcattccatgaactgtttcagaagctgtctcccaccattccaaaaaggatgttaggcccggttggggagcaaggttatccaacccaaattttctaagcag

SEQ ID NO: 149292 - DNA, 782 bp, Zea mays
  Clone ID: MRT4577_6767C.1
cagtggccaccgaggccggccggggtgccgcagaacggaccaccaggttggcgttgctggaagagaaggagctgtcggcggtgcttaaaacctgtgctctacctactggcgtagccaggaagatagtacagcctgccgctgccaagtacagttatgcattccaagtccccagagaagcaatcacttctgggatcgaggagaaacccagcaaataatgggagtacggaggatgaaaagggagacggcgggatcccatggctgacatttctggggttcgtgttcctgaccttcaactcgggcatggcgatctaccgctcggaccgcgaccccgggtcaatagcgttcgtgtcgggctcgtacgtcgacctgctgctgctcttcctctgccttcgcctgttcgagcggacgccgcctgactcgccgcgccgggggtggatcaaggcctgcgtctgggggctgaccacgctgctcaccgtcatgttctcgcagaaggtggccgccatcatgccgccgctgctggcgctcgtcgtgtgggcgatggcgttcgccaccatcggcggtggcttctacgcgttcttcatccacaaggacaaggccgcccttgtggaggcggagaacccgtagatgtctctgccgctgccatgcgctcgtggctgtttcagactatctccagccccggtcctatgattttgaggcctctagtcgaactgatcatggtggaccctctagactataaaaaaaattctatattatacaaaaaaaaaaaaaaaaaagcggccgcc

SEQ ID NO: 149293 - DNA, 468 bp, Zea mays
  Clone ID: MRT4577_67680C.1
tttgggctgatttatgtgcgtgtataggtaagggtgtcaattaacaacagtaagcgcgactactctgccgacttactccgtcaacgatttcgtgcgtttcctgtctctgctctgactttgatgatgtctttcctggtcttggtaaattatactaagctgtgacggagacgaagaaggctgttcgtgttgcttctgttgctgctgttcatggtattgcggcttctgttgatgaggttttggtgtttgtgtttattagtgttcgtctggtcgtgcctttggatgctggtgttgcgtcgagtgttcctgcgtctcttcctcctgatcatcattcgtagcataaccaatggaggactggagggagaggtcgtcggtcgttaccgttcgcacctggccggactttgcccacacacacacacacacacccaagcatcccaacccgtgctctgatacgctgatcgacttacctac

SEQ ID NO: 149294 - DNA, 294 bp, Zea mays
  Clone ID: MRT4577_67681C.1
ggacggacgcacaacacgctgaccaaggacctttatcactcgaattatgcaaacaaccgcctgaaggagaccattggggagcacaagtccatcaccccccgccttggcgaaaccgcttataatactaaccaactatcatacccgttcgtactacccacacaaagacatgactgaaccgacatgtccttcccaccaagtcggacctatgccaagaaccgaatgcttccccattatgactgaaccgcccactgcacatgaacacttcccggtggaaaccacaaatcccatctaaca

SEQ ID NO: 149295 - DNA, 313 bp, Zea mays
  Clone ID: MRT4577_67682C.1
cttccgaaggtccgcgaaggcgtgttgtttaaaggccgcgccccaatctttttggaaggccggcttgaactacctgggaaacccaaacttgttgcacccacaaagattcttggcattttggccgtgcaaggggtggctaatggccttctccaagggctaccgcttcggcgggggccggttcggggaaggcttcgacaaggtgtaccccggcggcgctttcgacccgctgggcctggccacgacccgacacccgcgcgactcaagggaagagctcagaacggcgcttgcatgtctcatgtcgctttcggcagca

SEQ ID NO: 149296 - DNA, 198 bp, Zea mays
  Clone ID: MRT4577_67683C.1
cggacgcgtgggcggacgcgtgggcaagcttgaacccaatcaatgggacgaatattagcagattgaaaaaagtgagaacctaaccatagatatctttaagttcaactcttgctttggcagatttaagtaaaaattccattctacacaaagccatatgggaaaattcgaattcaattctgcagaatgtcattctaatac

SEQ ID NO: 149297 - DNA, 360 bp, Zea mays
  unsure (1)..(360): unsure at all n locations
  Clone ID: MRT4577_67684C.1
gggggggaaaaaaacaaaaaacccccccttaaaattttgcccccccccccccgacccattttggtttcctttccttttcccaaaacaaatttgaaaaccccgggaaaagggtttggggttttaacccccccaattttgaaaaactgggggctgcccccccccaccccttattacaaaatgggcgggggggggggggggcttttacttaatgggngttcccccccaacccaactttttaaacaccggggggcaaaagggccacctccccttcttttgggacccccccgggttgggggggcccaaatttttttttatccccccctttctggggaacaaaaacaccggggggtccctttcccc

SEQ ID NO: 149298 - DNA, 235 bp, Zea mays
  Clone ID: MRT4577_67685C.1
cggacgaggacttgacgccagtgtcacgaacgatacacaactctgcggtgatataccttgtaggcataactgaggcgcctgcattcaacaccatgtacgagctttacgacccttccaccggacatgtctgcttcaggaactagcacatcatgattgatctcggaaccggaacatcaacaagatcaactggacttcaaggacaagcaggattcatcgacatggtgagaccgctatc

SEQ ID NO: 149299 - DNA, 205 bp, Zea mays
  Clone ID: MRT4577_67686C.1
cggactcgtgggctgacacctgctgattgactttatagtaaagctcgcgctcgcacggagagagtctcggagacgcttagtgagatggcacacaccatggcgtccatgaccagcctgctgcaggtcgccctgcccattctgctcgccgtcctcaagaacaggaacgtcttacacttgtttaatctcgtctaagaacatttctttc

SEQ ID NO: 149300 - DNA, 280 bp, Zea mays
  Clone ID: MRT4577_67687C.1
gcccggcttttttcttatgccggcgcgctcgatgcgcgaggcgatcacgcccggtcggcccaccaggatcggccgggccatgccttcggccagcaccgcctgcaccgcacgcagcacccgctcagactcgacctcggcgtagacgacacgcgccgggttgcgcttggccgcggcgaagaccgggcgcatgaacatgccggtctggtagacatagcgggtcagcgagtcgcggtaggcgtccagatcggcgatcgggcgctcggcgacacccgactcgacc

SEQ ID NO: 149301 - DNA, 366 bp, Zea mays
  Clone ID: MRT4577_67688C.1
ggcttcgcttgtgtcaactgtatttttagggctcctgcgccgaaacgaacacttaggcttttggtgttctggcgcgggaaggtccgatctttccggtcggaggaagaaatttcaggggaagaagcctgaagaagaatggccagctccagttctcaacacacggtctgtgggttagtgacatttagggatgtggctgttgacttctctcaggaggagtgggcctgcctggatgctactcagaaggtcctctacagggacacgatgttggagacctacagccacctcgtcacagtggtggggagttgcctttccaagccacacctgatcaccttactagagcaggagaaagagccctggatggctgtg

SEQ ID NO: 149302 - DNA, 1177 bp, Zea mays
  Clone ID: MRT4577_67689C.1
ccgcgcccaattcggaagccacctgctcggcgagccatggccggccgccgcgaaggcgagcaccaggcgagcccgtggcgatccgggacgcccgcggcggaggaggactcgggcgccttcccctccgccatcatcttcttcgctcttgtcggcgctaccgccaccaccgccgccgtcggacaactgcgccggacggtcagctggttctacactcaacttagtaggtcggaaccatatgttttctgggaagacatacctcgtcgaccaaatcgtcatcggtgcggtgaagcctgggaacgatatcaccagaggatgcgtgacaggaccgaggatcaaagggaaagagtggaacgcatacggcacatgcaagatgtatttaaaaaggagagaagtaaatgtcgggattatcgaaattgggatagccataatcccaactattatcagcatcatcaaagagatgactggtactggaacgcagaagcattttatgccaatcaaaggacaaatttcagggcaatgaccagggaagccatgacttacactatgtcacaccactattctgttttgggccttgacaggtcaaggtcagagccattttcagatgctgaaatcaagaatgctttcaggagaaaagcaatggagtatcatccagaccaaaaccaaaataataaagaggttgctgaggcaaaattcaaagaggttatggattcttacgaagcaataaaacgagaacgacgagacagaagttgctgaatgtgaaatgtgctcatggttctcaggcggagtgaggaactgttgtatataaattgtttgatgtgggacaaactaaatctagggctagtttggcatccccatttttccatgggatttctaattcccaagggaaaatgaactaatttcccttgggaaaatgaaaaacccttgggaaaatgaggtttccaaactagcccctaaggtataaaactaccgctctgatccaaaagagcgtgtagcttagtggttacaagggccacaatgccacattagtattttatgttctggcttcgactctctgtagaagggaaaaaaatacgggagataatgaattcagatgggggacgatggcaggtcaaaaaaaaaaaaaaaaaaaaaaaaaaaaaaaaaaaaaaattcggacagccacctgctcggcgagcca

SEQ ID NO: 149303 - DNA, 432 bp, Zea mays
  Clone ID: MRT4577_6768C.1
agcaggtggtaggatctacctaattggtggttatggaacaccacatgggaagagtaatgtatggggcggtaatcatcatgactttttgtttggttttggtatggagcatgtagagccatgagtaaatacagaggatctcttatgggtactaaagagaacagatatggtctctgctgggcataaaaagatagggaagtaaactcacgtttggaagaatcgtgagcaggaggagaagtgtcttttatcccccattgcataacacctgttttgcccttttgactagcatacatgggaatgaggacacttaagctttgtgatgaggtgaggtgagaaatgggagttgagagacagacttgagagggagagatgcaaagagcagaacaaaatgggcagcaatattggctatggaactgaagcacgagcacatggtag

SEQ ID NO: 149304 - DNA, 1411 bp, Zea mays
  Clone ID: MRT4577_67690C.1
gccacctgctcggcgagccatggccggtcgtcgcgaaggcgagcaccaggcgagcccgtggcgtttccgttacgcccgcggcggaggaggactcgggcgccttcccctccgccatcatcttcttcgctctcgttggcgctaccgccaccaccgccgccgtcggacaactgcgccggacggtcagctggttctacactcaacttagtaggtcggaaccatatgttttctgggaagacatacctcgtcgaccaaatcgtcatcggtgcggtgaagcctgggaacgatatcaccagaggatgcgtgacaggaccgaggatcaaagggaaagagtggtagcaatcgcgttggagtcgagccagtcgacaccgaccactgtattggacgaacttgtcaatatcgacccgaacacggaacgcatacggcacatgcaagatgtatttaaaaaggagagaagtaaatgtcgggattatcgaaattgggatagccataatcccaactattatcagcatcatcaaagagatgactggtactggaacgcagaagcattttatgccaatcaaaggacaaatttcagggcaatgaccagggaagccatgacttacactatgtcacaccactattctgttttgggccttgacaggtcaaggtcagagccattttcagatgctgaaatcaagaatgctttcaggagaaaagcaatggagtatcatccagaccaaaaccaaaataataaagaggttgctgaggcaaaattcaaagaggttatggattcttacgaagcaataaaacgagaacgacgagacagaagttgctgaatgtgaaatgtgctcatggttctcaggcggagtgaggaactgttgtatataaattgtttgatgtgggacaaactaaatctagggctagtttggcatccccatttttccatgggatttctaatttcccaagggaaaatgaactaatttcccttgggaaaatgaaaaacccttgggaaaatgaggtttccaaactagcccctaaggtataaaactaccgctctgatccaaaagagcgtgtagcttagtggttacaagggccacaatgccacattagtattttatgttctggcttcgactctctgtagaagggaaaaaaatacgggagataatgaattcagatgggggacgatggcaggtcaattcagccattcttgtttctatttttctcttggggctgggggccggggcagatatagatgtactcagacgaatgaaggctattgaaagaatgcacggatgagctggacgtgtgttttagagaacaaatcagatccttcactcatgattgttaaattatgcaggacagatcagtttgaaaaaaaaaaaaaaaaaagaaaaaaaaaaaaaaaaaagcggacgctgacctccagctccag

SEQ ID NO: 149305 - DNA, 171 bp, Zea mays
  Clone ID: MRT4577_67691C.1
tcttccacgcgtccgaggacgcgtgggttcgcgggcatttttacgtctgtccgtgcggctagaaagactgggcccagttgaagactccctgtgttcaagacaaccagttagtggttcctgatcgttctgtagctcacattgagggttaacccgtcggggatgtagatgcat

SEQ ID NO: 149306 - DNA, 750 bp, Zea mays
  Clone ID: MRT4577_67692C.1
taggggccttttttttttttttttttgccacaaatacaatctcatccatagaaaattctaatcagtcggacagcaaacctaattattcgcatgaacatcatgcaacagaacagcagagtactacaagcaaggagagagagagagggagagagaaaaaaaaagcgcgcacaaatacaatgagctaacagtaacagagtagtgtgggtatcaagtggagactggagaacgaacatgtacaacgaagaccacccgctctgctacttgggcgagagccctggaggaggtgccggcggcgcgaactgctgcggcgccgcggccgcctcggcgcggccccttttcctgccgagcaggtagcacccgagcgccaggaggaccagcaggaggatctctgggatggatatcacaatctcgaacatggccgaacctgctcccgctaccgccccttcctcagctagctcctattctctgtctgactgcaaggctgacaacgacgtcaacagcttaaacctaacgctccgcgtgccgtgcgggctgcggcgcgtgcgatgctagaagaaacgatgagcacccggccatacaaggagacgtataggcgggcccaatccagagtgacgatcgcgacgacaagcaccgcggattgcttgcttcggcaatcggcaccagcggcgattgcttgacgcttgggaacgaagtgacgtacatgcctgggctctggattgtctaccggtggtcaagcgaggacgacgccgc

SEQ ID NO: 149307 - DNA, 736 bp, Zea mays
  Clone ID: MRT4577_67693C.1
aattcggcacgagggttgggctttctgaattcttgattgagttttccaagaaatttcccgctaacctcagtggagaatctttgatcttgggctgttttctgccaaataattaatactaaaattagttcccctttctacatacaacaagtacattatataacagaatatcattttatataaaactgtaaacacctggaaaatattgttaagtacagtttgttcgtcgtctttgttttcctctataatattttttagcacagttgtgctcaccctcaggagttgtgaaattttggttgtacagattgtaaatggctggggaacactgcagagagccccaatttcaccaaatatttcgccagcgtacattactccctggacctgcattttttagtgatgcatttcagattctgaaatatcatttttttatcaatatgcatgagcatattactcactttttcaaccccatcaatcacgaatcgttcttcctgcggaaatacatttcagaaggatagcatatatgcttggatgttagaatctgtagaaaaattatgaatactaaaattatagatgcactaaccactgctccggaaactaatatgtaaacatctgtcggtgcttcattttgtagtatcacaagttctctcggtggaaagtactctgcttccattgcagagacctacgaagataggtcacttcattagcattgagttgtttttggtatttattgtatacattc

SEQ ID NO: 149308 - DNA, 229 bp, Zea mays
  Clone ID: MRT4577_67694C.1
ccaagttcccaacgcagaggatcgacccgaatcctccgcaactcgccgacgcgggaccgaccgagccggtcctatcgatcgaggatgtcgtacgcctagtctcttcaagtacatcatcatcggcgacacatgcgtggggaagtcgtgcctgctgctgcagttcacggaccagcgcttccagcccgtgcacgacctcatcatctgcgtcgaattcggcgacgcatgatca

SEQ ID NO: 149309 - DNA, 831 bp, Zea mays
  unsure (1)..(831): unsure at all n locations
  Clone ID: MRT4577_67695C.1
ccnggccgggaaaaaaatcagcaacaacctcacactcgctcaataactacaaaaatgggcacaatctctataagaaagttcatccgctggctccccgacgaacccagcgaaccaacaacaaccctcgtaatcacaagcccacgacttaaacgcttcgtcgatctacggattctattgccagacaatggctctactgaccaaaatgacatcctacccttttcccgtctagactgggctatagcaggtacaacagtgtcaacccagaaaccagacccttcaggtgctttgacttctcattcaacctttatccaatggatatcctcacgtgaactgggaaacgacgcgggcttcatgtatccgcaacccggcgaggacctcactcttgaaaaaggcagcatggtaaatccggacacgggcattgacacagcgtatgaagaactctggcacgatgctacgccaactgctgtgccaggagaaccagacgtcagagcgttggttctgcagactgaggatgaagagaagggtgtgagagggtgcgttgtaaggctgggaaggtatgcgcagggactgatcagggttggtgaggagattgcgttggagaggtgggagtggacggaaggtggatggaagagaaccgttaggatgggcgacgaggaattacctattgagaagatcttgngtgaggagacgttggatgaggatgatagtgttgatgttagtggaagaacatggaaggttattgaagcgagtggcaagaccacttcanagtaatactcanaacagacnatctagcacattgaatcacgcaaaaaaaaaaaaaaaccccgcggc

SEQ ID NO: 149310 - DNA, 608 bp, Zea mays
  unsure (1)..(608): unsure at all n locations
  Clone ID: MRT4577_67696C.1
ccggccgggaattcagtccagaaactattcgacttccgataaactctaggcgcaatgcgattctctaccgtcaccgcctgcctgactgcctgcttggcgccagcagcggctctgagcgttctcaatggcaaggctcccgaactcaccatcagcgacgacctcaagattcctggcgattctcctcacgagttttgccccggagatcacgcagccgatcttatcaagatcgaccgcgttgatttggctcccaaccctcccaaggctggccaggaactcttgatcaaggccaagggatcagttaagcagaagattgaagagggcgcttacgttctcttgactgtcaagtatggtctcatccgcctcatcagcaccaaggccgatctctgcgagcagattggtaacgttgacctcaagtgtcccgtcgaaaagggcgaggncgaggttgttaagaccgtagaccttcctgctgagattccttctggnaaatacactgtgnctggncgatgttttcactggcgacgatgtacaaatcacatggttgacggnnactggcgncttctctcgtagnagnaagggnttctttggnagcgatctgtgattggnattat

SEQ ID NO: 149311 - DNA, 521 bp, Zea mays
  Clone ID: MRT4577_67697C.1
ctatattgtgacaagcttcgcatggcagcaggttgactctagagtgttctctccccctcattttaaatgctttaaatacgaattaaacataaaattaatatgtatgtgccattttagactatgacaaatacatatgtgacaattttaatttaaaatatattaagtagggtggattagagagaaccgttatgtgagctgacacagggataaacccttttagagtgtggtgaaaagtgagatttagggggaatgactagtaaagtgttcgtatatttttatggttttcatttatgtatatagacatgtatgttacgttagatagatgggtgtaaatacacgtgtgctgtggtgaatagaatgggaagggtgagagaaaaccactctcgtacacttcctctaaggctggttagagagcaaaagaattgggagcgaatttaagggactaaaattttgaataacaaggatattttaaccccataagagctggtttgttaaaacttgtttagtgaccagagaattag

SEQ ID NO: 149312 - DNA, 405 bp, Zea mays
  Clone ID: MRT4577_67698C.1
taactatacataaaaaacagtgcttttcttttctattattttagcattttctatactataaaactcgatggggatcggggcgcattaagtccattcttccgcgattaactgtcggcaccatgtctacattctgtctctgctgaccgagaagaatggctgctccgccggaagaggattgcaccatataagcacggaagcaaacctctttccaatatataaatcttggcgacctagttgggctttcatgttgatccgaatgaatcatcctttttgcggagtgaaatctttgactgctatgcacgacgatccgatagcacgttacacattctcttttcccaggacatgtctttctattactacgaaattcataaataaaccttttgagcgtgggagtaccattctctc

SEQ ID NO: 149313 - DNA, 334 bp, Zea mays
  Clone ID: MRT4577_67699C.1
aaaaagacatgattcagttcacgagggcaatagttgtattaagaccacaaagctgactatcaatacacaaagtatcggaacgggctacattagtggttattaaaccatctactgagagaatcggtgacccccttttgcttcctcaagactaggaaggacggcaaacggacttaccattctagtgtggtcctgggaatgatgatctgggcagaaccttattggcttaaaaagacatagctcgacggccaccatgcgcggattcacaggcattgatttagaccgtaaaactgttttatccgctaacaaaaagagactttttttttcgagatgatct

SEQ ID NO: 149314 - DNA, 400 bp, Zea mays
  Clone ID: MRT4577_6769C.1
cccttccctggccactggttgcaggggctattgcaaccccgccgggggcccggccagggggggccacggccagaaccagggccggggtaaaaaggggacccggggacaaccccggaaaaaaacaagcccggaacaataaagccaaaagagggggggggctaacaaggggggaaacccacgggaacccaagggggcacacaaacaacataacaggggggaaaccaaaaggccccggcccaaaaaaaaaacgggccaccccccgggagaggaggaatgcgaaaaccccggggaaaagggggctagacaaagggcccccttcccccggaaaagccccagggcccaggggggccggctcaccgaaaggcgggaatgcgggtatccacccaaaagggggaaaacc

SEQ ID NO: 149315 - DNA, 299 bp, Zea mays
  Clone ID: MRT4577_676C.1
catcgcgtccgcggacgcgtgggcggacccgtggccgacgcgttggccagagcattgggccgtcaacaatggacgaggccgaggatgccatgaagcagctcgaggaggtcggcgccaaggtgtccagcgtttgacactaggtatactgacccctttttttttcctccttttttttttaaatttcgttctttgatctttgccccccaacctttggtgtatccccattgccctttataaggaattgcggtttgccgagaaagaatgacccgctaacgaggcgtcacaagatacgtgtaaac

SEQ ID NO: 149316 - DNA, 484 bp, Zea mays
  Clone ID: MRT4577_67700C.1
ccttctctctggtggtcttttcttgtggttcctaccccccccccgggcccggcggaaggggggacatccccccccccggggggcaattgtgaggcgcccccacccccaccccacctcggagccgaaagggtaaaagggaaagcccggggggccaaaggagcgagccaacccaccacaaaagcgacgcgcccacggcccaattgccaaacccggggcccgccaagccgggggccaaaacaaattaaccaccgcgcgggcagaggccgtttgccaaaggggaacccttccgcccccccgctaaaaaaaaaaccgcccccccccggggggggggggggagcggtttcagccccctccccggccccaataccgttacccccagaaccaggggataacggcgggaaggacggggtaacaaaagccaaaggggggccaagggccttccaaaggcccggggggtaaccctttaaaaaaagttccgcccccc

SEQ ID NO: 149317 - DNA, 353 bp, Zea mays
  Clone ID: MRT4577_67701C.1
gggggaaaaaaatgggttctttttgggaaagccccattccccaacccggggaaaagaaaaacgcccaaacccccttggggaacccccgttttgggtttgcttcccccaccaacgcctcatttggtagataaaaccctttgggggggccttgggcccccgggcccgccctaagggccttggcgcccaaaaaaacccccccccccttgttgcccccccccccaatggggaccttggcccggggtgtttttctttgccccccccggtttgttgcaacccccttgaccccttccgggggggggggggggtttttttttaccagttttccgggcccgtgggtctccccgggaatttcg

SEQ ID NO: 149318 - DNA, 405 bp, Zea mays
  Clone ID: MRT4577_67702C.1
gtcagtaacctcggaattcggctcgaggacacaacaatccactatgtcgatgtgtttttacgagctcacaaacactctacgtggccgggggctaattcaaagactgtcaccatctctgttttaaacatgcctgataacaaatatatgctataaaattgaccaaatcggaccttttgtcctagcttctaatccatctaatctgtcttactgatataccacacctatggaccatacggcacctctacatcttgcccataatcgtgtgaccgccaagaaaaatcagttaactaaaaatgcatatttacaacaactctagaccacattagcttaaccttgctttcctggagcaagaactgcaaaactctccacaacaacgaatcttcaatatgcacatctgcatatcaa

SEQ ID NO: 149319 - DNA, 378 bp, Zea mays
  unsure (1)..(378): unsure at all n locations
  Clone ID: MRT4577_67703C.1
gggtaccctcggtgttcggccggggcttaccacaaccggaacacgagagcctatgacatagccactatgcctatgaaccggcgctgcacacagactcgccaggtgcacctaccacacgttccactactaagaggcggactactgcttgacatatgccagggcctcagcccacagtcgagacatgcactcctggcagagacgcgcagctgagtctaacgaacccgaggcaaatatcagaggacgaataccttaggttaccagctttacccggccgctaccaacatacacacnccgattggtttcctttcccaggggacccggtttccccaggggggggggggggctcctttttttttttgtaaataagaggggggggcg

SEQ ID NO: 149320 - DNA, 459 bp, Zea mays
  Clone ID: MRT4577_67704C.1
agaaatgtgctttcttatttctgggaaggcacacacatcttccacaaaactttttttttgaggtttacctcttatgcgctctataagagggcgcccccactgatgggttgttggtagaacactgctgtgtttgtcaaaacaagtggggtgaatggcaccacttgttgcatttgtaagagagggccagcgttatgcccagcgtgcgggtataacagggacaactgtggttgtgtcaagaaagcgacacggctcacattagctatctgtctgtatgggggtagctgatgctgttgtaaataaacaccagagttcattgctgccacttgggtgaatgggagaaattgctgggggtatgcaacaactcactgactgactggctgatggtgttgcaaataagctgcagatttcaatgcagccacatggttgactggaagaaactggtgatactgagagtatgct

SEQ ID NO: 149321 - DNA, 419 bp, Zea mays
  Clone ID: MRT4577_67705C.1
aattcggcacgaggcgtgagccagcgtcgccgccccctgcgaagatgtggcggtgaaccgctcgcaacagccacggcctttgcatttgcatgccatgcgcacacaaacacatgacatgacatgacatgacacaccagacttgacgctctcctgtctttatatgccggcgcggcgcgcgggcgtgcgtgcgcccgcaaatggcggaggaggagcaaatggcggagctggtgatggcgcaatgcggggtgcccagcggcggcgaggggggcgcgtggccgccgggattcgcgtgggacggcggcgccgcggacgcgtcgcgtgggatgtaccgcgaagcggtgccgcccgcgctcaacctgtttgacgccgccggcagcgtcgcgggggacccgttccatgcggtgcagcaggcgcccggc

SEQ ID NO: 149322 - DNA, 980 bp, Zea mays
  unsure (1)..(980): unsure at all n locations
  Clone ID: MRT4577_67706C.1
aattgcttatacggagtatgtatatataacacaaataaaaattgaacggccttattctcctatataccacgacgacgacaacttccctctttgttgaacgaaatctaaccgccaatttacacacgctngaaaatggtcaacaagcttacacgcgctcgacgatctccggccgtcacgcacgtttctgaatgccaccggacatcacacgcacacgacgtttgcaccgaaaccacactttttttggtctctatgcggagtgcgactgctgctcgcctgctggccgcgacgccgccgcctccccgtcgctcaagaacgacgaggcggtgctgctgtcgtcagcgccagtgtcgcgctcccggagctcctcgatgcgcgcgagcgcttcctcgaggccccagcgccggtgcacgtcgggctcgcagcacccgagcccgacctggagcagcttcaccatctccccctcgccgctccgcgtcccacgcatgtccttgtcgaacacctcgccggtccactcctcccgcaccaccgagttgacccagccggcgaggtcggtgtccgcgtggccccgccggagatagttggcggggaacttgcccgtcagcacctccaggatgaggatgcccaggctccacacgtcgctcttccgccccggccgcccgccctgcgccgcgcactcgggggacttgtacgccaccatcacctgcgccgcgtgctgcggcgtcaccacgggggccagcgcgtagtcgctcagcagcggctcgcatgtcgcgtccagcaggacgttggaggacttgaggtgcccgtgcggcaccatcagcatcggcagctcctcgtacaggtgcgccagcccgcgcgccacgcccttgatgatcttcagacgcttcggccagtccagcggcggtaggctcgacctcgtcccgccgtggagcgcgtgagccaggctgccgttcgccatgtagtccgtgacgagcagcttctct

SEQ ID NO: 149323 - DNA, 880 bp, Zea mays
  unsure (1)..(880): unsure at all n locations
  Clone ID: MRT4577_67707C.1
ccggccggggtctcgcttcgccccttcctctccccgacgggctccgtcacttgtcatcttctactcaaatcatcggctcgtccgacagcagctctcgacaagacctcgtacactagttctcttctctccacgatcgtcaaatcacacccaataccgcaatcatgtccgcgacaaaggaattcaccatgcaggatgttgctgagcacaacacctccaaggacatctacatggttgtccacgataaggtctacgactgctccaagttcctcgacgagcaccccggtggtgaggaggttatgcttgatgttgccggccaggacgccaccgaggctttcgaggatgttggccacagtgacgaggcccgagaggttctcgagggtctcctcgttggtgagctcaagcgtctgcctggtgatgagggccccaagcgcaggatcgccaactcgaaccagggcagcggccaggatcctaccggctccagcttgatctcttacgctcttgttgtcgctgttggcttcgccgcctacatgggctacaactacctccagaagcagaacgaggctcagggctccgcataagcgtctaacctcaatcgcactacatgaggaaggagagttataaaaagggagcctttgtgatttctttatggcatcaatgcaggtctatggatgattgaccgacaattgcattggggagttttcttttggcctagagagaagaggccagtcggcgatagacggttggcgcgcaactattacatcgacaaaaagggcagtttagcttaccccggcttggacattagggtggatggatgagaacagtgngtggactattgtcctggaccgaaccccatgcctcggntttcagtttctcacttttt

SEQ ID NO: 149324 - DNA, 439 bp, Zea mays
  Clone ID: MRT4577_67709C.1
tttttttttttttttttttttttttttttttttttttttttttttttttttttttttttttgggggaattatgtccaaaaaaaaacgagtattggttatgcaaaacataaagagggggggaagaagagccccaatttgggaacaaacaaggcatacattttggggcaacgggcaggggtacatgggtgtggccgcgccaaaggaacgagaaaaaaaaaccacccgggcgggctgggataggaacaaaggcgggcacgggcccgggctttaaataaaaaaaaaaagaggttgcccaggcatgccggcgggccttgtattaggggacgaacttgggggcgggggaccacacgcatgcgttttcagggttattcaggacaggcaggaagggtcacaagcggggccttatggggagcagggggggaaacaaaaacccaacagg

SEQ ID NO: 149325 - DNA, 427 bp, Zea mays
  Clone ID: MRT4577_6770C.1
ggggggggccaacgatttattaaaccattaaaccccaaaaaaaacgggtcctttttaccggcacttgggaaaaaaaacaaaaaaaacacccccccccccggggggaattggggacaaaaccccaaggggaaacaaaaaaatgccccccaaaaaaaaaaaacggggaaaaacccctttttttttaaatccccccctttggttccctttgggccccaaaaaacaaggcgggggaggcaccttaaccccaagttttccccccatgcttacccaaccaaaggcggccacaccttggaagccaaaaaatcgtccctgaagggctcggggggaagcgccttttcggatgccgggggaacccgggtggggggggcggcggaggccccaggccccccgcgcccctggaggaaaacaaagaaggcccccccccccc

SEQ ID NO: 149326 - DNA, 209 bp, Zea mays
  Clone ID: MRT4577_67710C.1
gtctgatattgacattcttagcctcccgtgactgctcaaaatagatgtggcgcgaagccactttcattggggcaaagcattacaccttacccagtgaaccctgaaaccgcactcattagcacctcttatgtgcagactggcacacacacggtagtcgcggcgcgactcatgggaggcacccaccttctgcaaagcctattatagcttga

SEQ ID NO: 149327 - DNA, 765 bp, Zea mays
  Clone ID: MRT4577_67711C.1
atgatgaccgcgtcaaaaaaggtacgccacatcgttcgatttcatatccctttttctcttcccctttctctgtcttgctacagggaccgggaaaggggatactccgaaagggatccttctccgcgaaggaagtgggccccgagccctcctactgatcagaggttcgaaggctgcccctcggaagggttcgacagccgcctcagagcactcgggctccgcgcctactactggtcagaggttcgaaggctggcccctcggaagggttcgacagccgcctcaggccactcgggctccgcgcccactactgatcaggggttcgtaggctggcccccgaagggttcgacagccgcctcagagcatgcagagcgagggatgactctaggtacgtccgatacatggccgaggctcgggctacgttcccgaggtaccctaggacatttccgagaccaacaggagcgattctgtaacggaatcccaccagagggaggcctcgagccctcggaccctgtcaaacgagaccgggtccggcaaatcacctgcagaaaggcgacgcaggggcgtatgaaaaaagccgagtcacaccttgaccgtcctctcgctctgtgcggaggctcaggggctgctctcgcaaacccggctccggccaaaccgttgacagcgtcaacataccagcccgagaactcggaacctggctatgcacccgggctacgaccagtttgcatgagggaacaaccagaccggccgaggcatcacgaaaggcattaa

SEQ ID NO: 149328 - DNA, 359 bp, Zea mays
  unsure (1)..(359): unsure at all n locations
  Clone ID: MRT4577_67712C.1
cagcactatacccccaccagctaccaacaccaacggggcctcaaaaatgttatgggcccaacaaaccacccccaccactcaccccaccgtccaaccgcaccgacccaatcccctacccccccaccaccaccataatccacgactcctccaccaaaaccaaccaagatcccctcccacaatgccatggcccccaccaacaaaccaaacagtccaccaaccaaaaaaacctagacccacgaccactacaacctccagaccctctccccgaggaatcacaacactatgaccacctgacaccnacatgctgaccactaccgccagcagtgnncgtggacccaccatcaaccctacaatttccc

SEQ ID NO: 149329 - DNA, 364 bp, Zea mays
  Clone ID: MRT4577_67713C.1
attctatacaccccacattcatttacattgctcatgacggatattaaataggataacggtgcctattcatcgtgcccaactctttcaactgctcaaacaaacctgcgcacctaacttagcacagatacacttctgtgtcttttttccagggccatacgttctcacacggcaccttgtggaggaacataatgcgccttacagtgactgccacctgaggctctatacttgattcatgccagccggctgtccccgcatgttgcgctctactttctggacaaatggaccaacgtacgacccaccctctgctaacggacatgtctccatttagcctgatgttgcacccgacacctaacgcctcaacaca

SEQ ID NO: 149330 - DNA, 924 bp, Zea mays
  Clone ID: MRT4577_67714C.1
atggcgtgtttgggcctcggcggccgcagaaaacaaacgctacaagataatccgatcctgcaggctcggatctcgatagttgaagggagcagcagcaccctcggcgtcgactacaccttcggcgagggtctcctccaagaatctggctcgagcaggcggctcggctggtcaccccgaggcctcggccagctgtcccccgaagacatcagcccggcccccgccccagcgaggatgatgaacatccttgaagctgagggcgggaccaagatcgcagcccggcttgcttctccccacccaggggctggtggtaccaactcccacggagttgcgttcctccaacaacaaaggcggaaggattgcaggtgtcccccattcgggggcacagaaggtggaaagacacgatgcataagggagcgcgaagacatggtcgcctttcaagggggtcaccctccttttaaaggcgactctccctacttgcgtccccagccgtcgtgggctgagtcttctccaacacgctccaaggtcctccccctacggcgcgggggctgggtcccacgcgtcatgcaagctggcctagagcagaagaagccaaaccgccgcgcgcggtgcatgcaaccgcccagcggttacgagcattcctccgctttcgcccagaccagcgggcgaaagagcgggcagccatgcaggcggcatgcaaccgtgccaagtgggcgcgcccgtccgacttccaacgcacccagcatgggggcccacgcccacgcgtcatgcaaccggcgcgtcggtcgctatgtgcaagcaactgcaccgccactcgcaccactgccacgcctcctcgactgcggaactagtaccgcgactcgaggcaaccctgcgtacgacccagcagtgccagccaggcgcgacggtcaatacggccaaaaatag

SEQ ID NO: 149331 - DNA, 567 bp, Zea mays
  Clone ID: MRT4577_67715C.1
atgcaggcggcatgcaaccgcaccaagggggcgcaccctttcgacttcgacgcgtccagcatggaggcccaggcccacacgtcatgtaaccggcgtgccggttactacgtgcaagaaactgcaccgccactcgcgccagtaccgcgccttctcgactgcggaaccggtgccacgactcaagggactgggaaaggggatactccgaaagggatccttctccgcgaaggaagcgggccccaagcccccctactgatcagaggttcgaaggctggcccctcggaagggttcaacagccgcctcagagcactcgggctccatgcccactactggtcagaggttcgaaggctggcccctcggaagggttcaacaaccgcctcaggccactcgggctccgcgcccactactgaccaggggttcgtaggctggcccccgaagggttctgacagccgcttcagagcacgcagagcgagggatgaccctgggtacgttcgatacataaccaaggctcgggctatgctcccgaggtaccctaggacatttctgagacccacgggaacgattttgtaa

SEQ ID NO: 149332 - DNA, 570 bp, Zea mays
  Clone ID: MRT4577_67716C.1
atgacgatggctcagatcttgacagctgaagggagcagcggcaccctcggcgtcaactacgccttcggcgaggtccgacctagcctcggacggcgacgcggtcggaggatctccactctgaaggacgacatcagcaccacacccgggccatcgctgccagggcctcctccaggaatccggctcgagcagacggctcaggccggccccgacagccgcaatgaacaagacaccggcactcaaggtgccattacaaacggaaccccggttccacctccgcagggaccgggaaagggggataccccgaaagggatccttctccgcgaaggaaacgggccccgagcccccctactgatcagaggttcgaaggctggcccctcggaggggttcaacagccgcctcagagcgctcgggttccgcgcccactactggtcagaggttcgagggccggccccttggaagggttcaacggccgcctcaggccactcgggctccgcgcccactactgatcaggggttcgtaggctggcccacgaagggttcacagccgcctcagacacagagcgagggatga

SEQ ID NO: 149333 - DNA, 535 bp, Zea mays
  Clone ID: MRT4577_67717C.1
gcatcaaaggatatttgaggctccctctccagtgaatcaaaatattgcgccaagtttacttgtacacaactgatattcgctctgctggttatctgcagccaacttgaccaaaaaatcagcactaggagtgtgaactgtccaagctacagtgtggacatgtgtgcctcaacacataatcaccagtaatctccacaagaacaggctccgtctttgaaatggtggaaccgcttcgcgtctctgacaacaatctctctatctacaatcttcaagatatacttgatggcatcatggcaatcaccacaaaccctgaggttcttgatgatcacgagcctcgttccagggctggtgttcagcaaaccaaaggcaatggccagcctctcgctatggtagctgagaagctgctctatggtagctgagaagctgctctttcacgtcttcatccagatcatggtacacaaactctgttcttggaacatagcccagcttcctcatctcagaattgagttttgcgaccattttcaggatctcccgatgc

SEQ ID NO: 149334 - DNA, 259 bp, Zea mays
  Clone ID: MRT4577_67718C.1
cagctgtgtagtgctggacagtgacaaccctttctctccagttctccactccaatgataatagttcacttacacctaaacccaaaggaaaaaccagctctaggtccaattgttctgctctaactgatacctcaaccttggggccagcatctcccactgcctccaaatattagtaactatgactgacgtccccagaagtttctgggtctaccacactcgccaaccccccactcctacttcctgaagggccctcccaaggc

SEQ ID NO: 149335 - DNA, 318 bp, Zea mays
  Clone ID: MRT4577_67719C.1
atgcaggcggcatgcaaccgcaccaagggggcgcaccctttcgacttcgacgcgtccagcatggaggcccaggcccacacgtcatgtaaccgggaccgggaaaggggatacctcgaaagggatccttctccgcgaaggaagcgggccccgagcccccctactgatcagaggttcaaaggctggcccctcggaagggttcaacagccgcctcagagcactcgggctccgcgcccactactgatcagagattggaaggtcggcccctcaaaagggttcaacggccgcctcaggccactcgggctccgcgccaactactga

SEQ ID NO: 149336 - DNA, 242 bp, Zea mays
  Clone ID: MRT4577_6771C.1
tgggccctccgggggtttccctttttaagagtagcccccggtcattttaactagtgtagcagcagggtagggtggtagcagcggagatgctttcgcagttgttcggtggcagtagctggctagccatctcaggtcaattgatgctaggtttagctaactgtctgttatcagcggattcttagttctctagagctgatatatgtgtaatggtttaaacaatctaatcagtgactggatccagc

SEQ ID NO: 149337 - DNA, 618 bp, Zea mays
  Clone ID: MRT4577_67720C.1
atgaggcggaaagacggtgggtatcccccatccgggggcttggaaggtggaaagacacgatgcataagggagcgcgaagacatggtcgccttccaagggggtcaccctccttttaaaggcgactatccctacttgcgtccccaaccgtcacgggctgagtcttctccaacacgctccaaggccctcccctgcggcgcgagggctgggtcccacatgtcatgcaagccggctcagagcagaagaagccaaaccgccgtgcgcggcggcgcctctggcaggagaagcaggcgacgcttcgccttcgccgtaataaccgcgccaaaaaagggaccgggaaagggggataccccgaaaaggatccttccctgtgaaggaaccaggctccgagccaccctactgatcagaggttcgaaggctggccccctggaagggttcgacagccgcctcagatcgcgtgggccctacacccactactggtcagaggttcgaaggtcggcccctcggaagggttccacggccgcctcaggctactcgggctccgcgcccattactgatcaggggttcgaaggctggcccccgaagggttcacagccgcctcagacgccgagcgagggatga

SEQ ID NO: 149338 - DNA, 1275 bp, Zea mays
  Clone ID: MRT4577_67721C.1
gggtacctcgaggccggccgggaatagggggagggctgcggttggggaagagagagatagaagagaatcagggtaatgcagatgggatcgatggaattcgtagcgccggcgttggaggagcttttgccggaactttccctcgaggagcagccacggttgcagaaccaatcccgcgagcgtgaccgcatccggaagcgacgtaacaagcactctcctcctccccgtccgtcgttgatctcggtacagtacgtgatggatatgggatcgatgggaatggatttcgtggcgccggcgttggaggagctgctgccggatctttcccgcgaggagcagctacggttgcaaaacaaatcccgcgggcgtgaccgcatctcgaagccacgtaacaagcacgctcctcgtccccgtccgtcgccgttctcggaatgggacggcaacatcttcaaaattccccaggtcctccacgctctcgcccactacaatgccaggcaccctggtggcgagttcgatgttgtgaagcccctgaagcagagccgcgtgggattccggggccaggcatggttccatgtcaatttctgggctcgcccccgcagcagcagcagcagcaataacaagacaatcaagcgcttctttgctgaggtgcactacaagccaaccccgatcagcagcccctcatcgtcttcgtcatcacttgcaataactgcagttcctatagttgaaatatgcatcattatcgaagaacctctatcccaatataggcgtagctgtgccttttgtcccagctaccgggacattttacaccctaagggctgccgtaagttcgtctgtggaaacgacaaggaccggtttgaacagcgactggacccttgctgctgcactggtatggggattgggaagatgccattcactgcccgcccagacatgtctgcttttctcaacatcagtcctaagtaggaagaagaagacaagaagagagtccgggggttcaatgtcaaggctgaccacggggtccttcatgcctcctctcgtatctttaacttcaagaccatgcatgtccatcatgtcatgtgacacatatgtatggagtggagtatataactagcttagcagtgagattgaatgaagaataaatatactttactaggtgttgttttcagaaggaacaattgtgggtcgaatttccacagttaatggtgataagccacatattaatgtactacgcattttgatcaaaaaaaaaaaaaaaaaaagaaaaaaaaaaaaaaaaaagcggcc

SEQ ID NO: 149339 - DNA, 567 bp, Zea mays
  Clone ID: MRT4577_67722C.1
atgcaggcggcatgcaaccgcaccaagggggcgcaccctttcgacttcgacgtgtccagcatggaggcccaggcccacacgtcatctaaccggcacgccggttactacgtgcgagaaactgcaccgccactcgcgccagtaccgcgcctcctcgactgcggaaccagtgccgcgactcaaggcgaccctgcgcatgacccgacagtgccaaccgagcacatcggtcacgggtcagtcagccgcgggagaaggcgcgacggtcgatacggccagaaatgggccggcagtaatggcggtggcaggcgggcggaagcagcagtcaagtcgtcagcaagctcacgccccctcctgggacagcgagagaaccctctcccacggcgtgaagacgatgcgcccgtgttccgttcctcgaacggctcgcgcacgcacaacggctgccccgcgaaccactcgtcccgtcgcattaactctgtggtaggacaggcggcacctttgggaccgggaaaggggatactccgaaagggatccttctccgtgaaggaagcgggccccgagcccccctactga

SEQ ID NO: 149340 - DNA, 456 bp, Zea mays
  Clone ID: MRT4577_67723C.1
atggccaaaggtggaccggcagtaatagcggtggcaggcgggcgggagcagcggtcacatcgtcagccaagctcacgtcccatccgggagcagcaagagaaccccctctcacggcgtgaagacgacgcgcccgtgatccgtccctcgaacggctcgcgcacgcgcaacggccaccccgccaactcctcgccccgtcgcattaactccacgataggacaggcggcgctcccgggaccgggaaagggggataccccgaaaaggatccttccccgtgaaggaaccaggctccgagcctccttactgatcagaggttcgaaggctggccccccgaagggttcaacagccgcctcagatcgcgtgggccctacacccactactggtcagaggttcgaaggccggccccccgaagggttccacggccgcctcaggctactcgggctccgcgaccattactga

SEQ ID NO: 149341 - DNA, 456 bp, Zea mays
  Clone ID: MRT4577_67724C.1
atgcagacggcgtgcaaccgcacccagggggcgcaccctttcgacttcgacgcgtccagcatggaggcccaggcccacacgtcatgtaaccggcgcgccggttactacgtgcaagaaactgcaccgccactcgcgccagtaccgcgccttctcgactgcggaaccagtgccacgactcgaggcgaccctgcgcatgacccgacagtgccaaccgagcacatcggtcatggggatcgggaaaggggatactccgaaagggatccttctccgcgaacgaagcgggacccgaacccccctactgatcagaggttcgaaggctggcccctcggaagggttcaacagccgcctcagagcactagggctccgcgcccactactggtcagaggttcgaaggccggcccctcagaagggttcaacggccgcctcaggccactcgggctccgcgcccactactga

SEQ ID NO: 149342 - DNA, 421 bp, Zea mays
  Clone ID: MRT4577_67725C.1
cggcctcttgggcagtctcgcgtacggacgccttcttccggtgactcgcctcacgcctgggccagcccctgctggcgggggcgcattcttttccatatccatgcctactcgcgcgtgctggcgatttacaaatttttgcttcgtggcgccactccttgatccatggccactggccctcaaccgctcggcgcgtgactactctgtcataccccgcgtgattcgcttgcagcacagtctcgtctgggcactttgcgtgatcgccaagaggcctgtacacatgctccttctcaacagctgaccgagctgcatggtaaatgagacgcgccctgtggctcagcactaatcgcatccttggcgatggttacccgcagtgtgacacgtacctttgcctcctctctacggcccgatcgtttccctattt

SEQ ID NO: 149343 - DNA, 369 bp, Zea mays
  Clone ID: MRT4577_67726C.1
accatacgcgcctaactccgcgtcctccccggctcgctcgaagcgggcaaggcggcggcagcagtgccggcatgggcgcaatgtcggcttcgatttcgtcggtgaattggctagtcgaggatgacatccttctcaagaacgccgtcgagaattattgaacactgatggtagcagcagccagcactctcatattaattatgtcttgaagcaatgtcctgcactatgtagcaacgaatcagcagcctaatctaattgaaatggctgctctctctaattcacatactctaccatgttatcatcaaatatagattatttgcggtgtgcctatattttattctaagcattattcctcaaaatatactatgaaca

SEQ ID NO: 149344 - DNA, 1021 bp, Zea mays
  unsure (1)..(1021): unsure at all n locations
  Clone ID: MRT4577_67727C.1
ttggtgttgaattgacgtggtatgtgaaattatgagtattattactcttttctagtgtaagattggtctagaattaactagtaattgattatattgttatatatgtatattatttttttgttgtggctcgcgagctaaacgagccagctcgagctcgcaaacgagccgagctgattctctagctcggtttcttaacgaaccgagccatcttgttacattaatgagccagctcgccgagccggctcaatatctagccctatcaggcacaccaggttaggatcaggattcttggtaggatttttttttgcttaacagtaagatttgtaatctactacaactataaagcacgaaaatcgatgcgcaaagactcgaacttgcgccctccagaagggtaggtttgttctctaccactgcaacacacatctatttgttaatctgaaaataaaaaataaaaaatataatcatgtttgaataaatgtctcattatatcaaggtttatctatatgatatatagaaaccatagcaatttacgagcaactacctagtatgttgtaaagattgaatcctatgatatttattttgattaatttaattgttttttttaaataaatggacctattgttattattttcattcacctaatattttgtcacaaccaagccatttaaaatcattacttcagttattatgtaggattgtagtatcattggttgtggactcctttgtgggacaccagcaccgttgtcaacctaagcaacagcccagctcaagctgtggctatgcgacgtcagcagcatgcaaaacagaatggtggtaacgggagggaaattaggaaggattgnttaggtaagtttgttgattaggaggtgcatctaaattataatggagcaccttagtttggattgtaagcatcgaagacacttcctgtgtcggggtgtcggatgntgggttttctcttcaacggtggcgtcagagttttccactgctgccgncatcaaccatgactccatcagttcctcgc

SEQ ID NO: 149345 - DNA, 405 bp, Zea mays
  unsure (1)..(405): unsure at all n locations
  Clone ID: MRT4577_67728C.1
tcgtggtcgcgtgggcggncgcgtgggcaaaaaaaaaaaaaaaaaaaaaaaaaaaaaaaaaaaaaaaaaaaaaaaaaaaaaaaaaaaaaaaaaaaaaaaaaaaaaaaaaaaaataaaaaaaaaaaaaaaaaaaaaaaaaaaaaaggggtgggctgttttaggggttccaattttacttccccgtcctttcaaggtgttggtttttttttttttttccctaatttcatttacttggccttggtttaacaccgtggttattgggaaacccttgtctttccccactttaatcgctttgcaccttttccccttttcccaagttgggttattagcgaaacggccctctccgttgcgcctttccaacagtttgggcgctttgtttgggatttgggaccccccttttagggg

SEQ ID NO: 149346 - DNA, 405 bp, Zea mays
  Clone ID: MRT4577_67729C.1
cgcactaatcttatccgagacagaggctcaaataaataaactcctgagactggcctaaaagagttaattggcgctctgcgagacagggttttttggaaagctggaactgcagttcaacgattccttccgagtgtaagaagctagacagaccggggcatttaccgggggggttacctaatagctatggcaaggaaagaagcaagcgtcacaaacgtattaaaaaagtcaatgttcgaattcacaggttagttcaagctcagacagaacaaagagctaagacagctcgtgctttcaagcctgccgggtaccttcttatattatagcagtaccagaggttcctacagattgatttgaatagaacactacactatagattcttgacaaccatttccattagatggacaa

SEQ ID NO: 149347 - DNA, 406 bp, Zea mays
  Clone ID: MRT4577_6772C.1
tgaggattaaatgaactgtataaggccgtaatttgttcctggtttagtttcagggtagaaatggacattgctgtaatcagctacacattacatgcgaccggacctgaattattatataagaaacctgaagtgtagtcgatatacatgttttcgtcggtgaaacccacttactttttgtaggccattgaggtgcaataatttgatacccatgtatgttaatctgctaacccacatggaatgcaatttcacaagttaaatttgtcgcttgtcatattttgtaggcttcaatgttaaacattgtcacaggttctcatatatgggtggaagataaagatttgtccagggttgatggtgaggtatttcgaattgatggccaaaacgcccatgttcgcacaaccaaggggaa

SEQ ID NO: 149348 - DNA, 688 bp, Zea mays
  Clone ID: MRT4577_67730C.1
gtgttgggacctgtctgccgcctaactaaagcaacctcaccaccacaccagcgaggcgggggaaggcgcggcgcggcgcggcgcggcgggcttcgctcgtcgaggctgtaagtctagggtggcgacctgcactctctacaacccgcatctctccgtccccggcgacgactgcgtgagcagccgcagcactactaagagcggacagcggactatggaggtggaggccatccgagttcccttcgaagcttctcgaggatagggcttagcaagaaagagctccagaccttctgcaagagggcgccaagatgctggtgcgtgctgcaagtgctagaggaaatcggatcctcgggtcgggcgatgagatggaagggatgctgcagccacacgggcgttgagtcatgacgtgactgctcgcctggtgttagctttgtcaggaactcgctctattttgctgccgtctgttatgtcgtatggtctggtacttgtgtgatgtaaaactctaaactcgtcggttggcatgttgcctggtaggggaccccggctgttctgagtcatccgaagcggattggctcgtcagcgcttctgtttgcgggttcttcctgttattttgccgtgggagtggtggaactatccgaaacactttggatttccgtaaggccataataaaaaagggggccccccctccctt

SEQ ID NO: 149349 - DNA, 289 bp, Zea mays
  unsure (1)..(289): unsure at all n locations
  Clone ID: MRT4577_67731C.1
cnngcctcagactgttctgcttttattttacaggctgacgcgatttacaaaaatacaacgagtgtgaaaacaggtgttaaacatcacaaggcttaaaacgacgtgttttttcagcgacaacagggggcttgactgtgcacaatcgggggggaaaagtcccccgcgatcaataaagagggcccggggcttttttttttttgtgtggaaaggggcaactgttcaaaaataatttggtccaaaccctcctccgtgtgggcttagggggcgaccaccctactttcattttttt

SEQ ID NO: 149350 - DNA, 2495 bp, Zea mays
  Clone ID: MRT4577_67732C.1
ctgaactgcctatacaaacttatcactaaggtgctcactaatagaatggaaccttttgcccagaaacttataaatgaacatcagactgcttttttaaaaggtcggagcatcatgagtggaattgtgacactccatgaggttatgcatgaaactaagaggaaaaatgaaacagggatctttttaaagctagattttgagaaagcttatgataaagtcaattggaactttatgtttcactgtttagagaaaagaggtttctgtgaaaaatggatgaattggatggagaaagttgtcaatgatggcactgtcagagttaagatcaatgacaaagttggtaattatattaaaagtcataagggagtgagacagggtgaccctctatctcctattctctttaactttgttgctgacagtttggctagaatccttattaaggcacaagagaataatgctattactggtttatgcagtcacattatccctaatggtctcataattttacaatatgctgatgacactatcatttgtattggagatgactttgaaaaagctagaaatctgaaattgctcctatatatgtatgagctgatgtctggtttgaaaataaactttctcaagagtgagatttttgtaataatttgtgatgaggaatcaacaacaaattttgctgatcttttcaaatgccagattggtactttgcctatgaaatacttaggtgtccctgtgagccccaatagacttcgcattgcagactggattgggcttgaagaaaaatttgataagagacttgaaacatggaaaggaaattgcctatccatggctgggagaattacccttattgatgcttgcttgactaattcacctatttatcatatgtccatgtatcttcttccaaaaactactattaaaaagctagatgccaaaagaagaagatttctttggcaaggtggtggagaaaaaaaaagtatcacttggtaaattggaacaaagtttgtcacacaaagaaaaatggaggtttgggcattaaaaatcttgaagctttaaacataagccttctttgtaaatggtggtggaagattgaaaatgaatcgagtctttggcaaaagataattgtcaagaaatactttcatggaaaagacttatacaatataaaagtgagaaactctgactcccctgtatggaaagacttgatgaaaatcagagctttctacctgaaaggcagacaaatcacaactaagtgtggagataagtccagattctggctagacagctgggtaaatgagaggcctttatgtacaattgatcctgaattatatgagatttgtgatgacaagtttattctagttaaagatgcaagaataaaaaattggcaattgtccttcagaagatggctaaataatgaaaatgagattcgatggatatcaatttgcggtgattgtgagaacttcgagtttcaagattctcctgacactgttcagtggaaatggggagggaagaaaacctttaccgttaaatcaatgtataacagtttatcaaacaacatctctgatcttggcaaaaagcacatttggaaaagcaaggtccctccgaaaattaaaatttttatgtggttcctagagaataacaggttgttgactaaggataatttgattaggaggaagtggtctggggacccttcatgctgtttctgccctcatgctgaaaacattgagcatctctttttcacttgccctattgctagagtgatctggggaactgtggcgaaatgtctggatactcatcatattccaaacaacgtggagtcttgctataggtggcttcgaaaacacctcaactgtgacaatgctgttcatgttattctgatttcagcaatttgttgggctatctggaaagccagaaataaaatgtgttttgatcatgtgcttgtaaattctcctaatgagatcatatgccatgcgggtgctcttgtgtcttcttgggcagggcttagcaagaaagagctccaggaccttctgcaagagggcgccaagatgctggtgcgtgctgcaagtgctagaggaaatcggatcctcgggtcgggcgatgagatggaagggatgctgcagccacacgggcgttgagtcatgacgtgactgctcgcctggtgttagctttgtcaggaactcgctctattttgctgccgtctgttatgtcgtatggtctggtacttgtgtgatgtaaaactctaaactcgtcggttggcatgttgcctggtaggggacccggctgttctgagtcatccgaagcggattggctcgtcagcgcttctgtttgcgggttcttcctgttattttgcgttggtagtgtggaaactatctgaaccactttgtatttctgttatgacaataatagaaatggggtcctcctctcgtcggtaccagcactctgggatccttgtcgatgtgtgattattctcttgtgtttgattcgctcccgtctctttttattcggagtct

SEQ ID NO: 149351 - DNA, 434 bp, Zea mays
  Clone ID: MRT4577_67733C.1
ggccgcttttttttttttttttttattttttttttttttttttttttttttttttttttttttttatataatattttttgttttttttggaaaaaaaaaaaacctgtaaatttatttgagttgaggaacccctattattggttgtatcaaaaacgccgcccaggccatcgctttacatggggtgacccaacaattctattggttggctcccttccattcatctggggggcttcaaattccttgagtggggccggccatttttttttatatggggtccccgcagcaaaaccctcccccccttaaacccccccacaacccccgccctggggggacccccccccttggcttccttggaggatcgggcggcccacatggcaatcatgttgaagcaaccctttttgcaacaaaaatgaacatccctcccacctgaaaaa

SEQ ID NO: 149352 - DNA, 228 bp, Zea mays
  Clone ID: MRT4577_67734C.1
cccacgcgtccgcccacgcgtccgctgtcgcgtgggtgcagatctggatggaattactgtgtgtccctgatgataaatatttatatacaacgagggaagttttggacaatttatatgaagatgaatttagattataaaatcttgtaattaaaaagaatataaagtaatgggcagcgcgcagctgtcgtctgagagctactactacgcgttctgcttcgacggtctttt

SEQ ID NO: 149353 - DNA, 333 bp, Zea mays
  Clone ID: MRT4577_67735C.1
gcctctgagcgggcgccctctgtttttttttatgagggggcatggtaacctttaccgtgggggtctgttttacataagtggagtgtctacccttttttggattggctcatcattcgactggctataccacggttgttagggcgatgaccatgaacgacagggactgactgatggggtgagacctcaactattccatgcaagattgggcgctgacgaagcttatgtagctgctagaatggtgtaaggtgacactccacttatattgtggggacgtgacaccggaggtggtgatccatcggttccagcagaagtactaggagtggtatatgcttg

SEQ ID NO: 149354 - DNA, 1417 bp, Zea mays
  unsure (1)..(1417): unsure at all n locations
  Clone ID: MRT4577_67736C.1
gccgggggaggtatggctgagtggcttaaggcattggtttaaaaaaaaaaaaaaaaaattattgccacatctccacgtctccaccaaacaaggcaacaagggagaagtagatctgcatctgcgagagaaggcagcgggggtggtgatgatggagagccagccgctgcaggccccgacggccacggctccggcccccggatctgcggagccagccggagctccgccggccgtcacccccggcaaggagttcacgcgcacctgcaagggcctcgtcgtcgtgctcatcggaggatacgtgctgctccagctcctcccttcgtcactcaactacctcgccatcatcccctccaagacaatcccctatgtatggaccgtctttaccgctggttacatcgagcaagtcctcccaggggccattggcagttctcttggtcttctcttttgtggaaaggacattgaaccagcatggggccgcaaggaattcttgaagttcattattttgatcaactccatctgtggcattcttgcattttgctttgctattggactctactacgtcactggaaaggagagcttccttgtcacaccactttctggtttccacggttgccttgctggctttcttgtggccctgaagcaactcttaccaaaccttgagcttcctatgtgctttttctggaaaataaaggcaaagtggatgccattctttgttgtatgtttctcaagtatcatggccttcatcgtgcctgattccattaacttcctgccaactttggtgtccgggatgtacgttagctggctttacctgagatacttccaaaggaacccactgactggacttaagggtgatcccagtgatgacttttccttccccagtttattcccagctgccatgagggagcgtggcgagagggttcttgaggaaaggttggcggctgacaatgctggtgacacagaggcctcgcctcgtggccatggcaccgcggaagactgagaactttcttgtgaccatcagctcctcttataggagccatggctttgctccctccagcgtttatagctctgcacttttgtcttctggagatggagctattcagttcacagcgaacgaataatacgatgttcttagtttctcttttttttccccgcttctttgtctgcgaggatttattggttaaattgtgtactagtcaattgttatggtacagcgaaaaagagagaagaggatgatggcattcgcagcgaggtgttgagattccgttgtagccatgcatttgcagccgattgtttggtactggtcaaagttctgtagtagtcataatactctgctcaaaatatagaaagaagaatggcttcgtcaaanaaaaaaaaaaaaaaaaaaaaaaaaaaaaaaaaaaaaaaaaaagggggcggccgc

SEQ ID NO: 149355 - DNA, 1802 bp, Zea mays
  Clone ID: MRT4577_67737C.1
ctcgagggcctggcccgggaaaaaaaaaaaaaaaaaaaaaacgtctccattgggcctcgaggccggccgggtgagtgttgggctggaacggacgcttctgctcactcgctttccggtgctaagcctgagcttgcatcggcagagctgactgtgactggtgaagtgaaggaaaggggaggagaaggggagggaagctttgggcgggagaggaagcctagcagcaacagtaggcagtagcagggttgaccggaggggcagtggattctggagagtaacccaacaaccccctcctcccctccccttctgtcttattgccacctctccacgtctccaccaaacaaggcaacaagggagaagtagatctgcatctgcgagaggaggcagcgggggtggtgatgatggagagccagccgctgcaggccccgacggccacggctccggcccccggatctgcggagccagccggagctccgccggccgtcacccccggcaaggagttcacgcgcacctgcaagggcctcgtcgtcgtgctcatcggaggatacgtgctgctccagctcctcccttcgtcactcaactacctcgccatcatcccctccaagacaatcccctatgtatggaccgtctttaccgctggttacatcgagcaagtcctcccaggggccattggcagttctcttggtcttctcttttgtggaaaggacattgaaccagcatggggccgcaaggaattcttgaagttcattattttgatcaactccatctgtggcattcttgcattttgctttgctattggactctactacgtcactggaaaggagagcttccttgtcacaccactttctggtttccacggttgccttgctggctttcttgtggccctgaagcaactcttaccaaaccttgagcttcctatgtgctttttctggaaaataaaggcaaagtggatgccattctttgttgtatgtttctcaagtatcatggccttcatcgtgcctgattccattaacttcctgccaactttggtgtccgggatgtacgttagctggctttacctgagatacttccaaaggaacccactgactggacttaagggtgatcccagtgatgacttctccttccccagtttattcccagctgccatgagaccagttacggaccctgtggccaacctgtttgataggctgttgtgtgcaaggtccaggactttggaagtcgccctcccgatatcagatcctaccaaggcttcaagaagaagggagcgcggcgagagggttcttgaggaaaggttggctgccgacaatgctggtgacacagaggcctcgcctcgtggccatggcaccgcggaagactgagaactttcttgtgaccatcagctcctcttttaggagccatggctttgctccctccagcgtttatagctctgcacttttgtcttctggagatggagttattcagttcacagcgaacgaataatacgatgttcttagtttcttttttttttcccgcttctttgtctgcgaggatttattggttaaattgtgtactagtcaattgttatggtacagcgaaaaagagagaagaggatgatggcattcgcagcgaggtgttgagattccgttgtagccatgcatttgcagccgattgtttggtactggtcaaagttctgtagtagtcataatactctgctcaaaatatagaaagaagaatggcttcgtcaatatcagatgttgagatatatatatttttcttttagtgacgtgatttgagccgacaaaaaaaaaaaaaaaaaagcggccaat

SEQ ID NO: 149356 - DNA, 394 bp, Zea mays
  Clone ID: MRT4577_67738C.1
ggaaaacatttttaaagattttccctcatttacggggggaagcctaaagaccaagttggggggggggggggccaaagaaagcttctgttttttttccccgaatttgctttaccgtaaaacagcaggaagattttcaggctcaggggccctttttaggggcccccaattttggcccttcatcaagggcagatcccccgggaaatccccatatttgtcccccggttttggaaaaaaatttcccccctggttctggaacaaatgccagggggtctggggggaataatgccccttgggcctctcaagccctttgggggtccccaagaaagggggccccaaactgttgtccccaaaccaacattggttaaccaaattcttcaacccaggggtttatttt

SEQ ID NO: 149357 - DNA, 1645 bp, Zea mays
  Clone ID: MRT4577_67739C.1
gcacgagcctccctcttctttccggtgccgagcgtgcatcggcagagctgactgtgactggtgaccggagtagagaaggaagcctagcactagcagaaatagtaggcagtagcagggttgaccggaggggcagtggtgacccaacaacctccctcatcccctccccttctttcttattgccaccactccacgtctccaccaaacaaggcaacaagggagaagtagatctgcatctgcgagaggaggcagcgggggtggtgatgatggagagccagccgctgcaggccccgacggccacggctccggcccccggatctgcggagccagccggagctccgccggccgtcacccccggcaaggagttcacgcgcacctgcaagggcctcgtcgtcgtgctcatcggaggatacgtgctgctccagctcctcccttcgtcactcaactacctcgccatcatcccctccaagacaatcccctatgtatggaccgtctttaccgctggttacatcgagcaagtcctcccaggggccattggcagttctcttggtcttctcttttgtggaaaggacattgaaccagcatggggccgcaaggaattcttgaagttcattattttgatcaactccatctgtggcattcttgcattttgctttgctattggactctactacgtcactggaaaggagagcttccttgtcacaccactttctggtttccacggttgccttgctggctttcttgtggccctgaagcaactcttaccaaaccttgagcttcctatgtgctttttctggaaaataaaggcaaagtggatgccattctttgttgtatgtttctcaagtatcatggccttcatcgtgcctgattccattaacttcctgccaactttggtgtccgggatgtacgttagctggctttacctgagatacttccaaaggaacccactgactggacttaagggtgatcccagtgatgacttctccttccccagtttattcccagctgccatgagaccagttacagaccctgtggccaacctgtttgataggatgttgtgtgcaaggtccagacctttggaagtagctctcccaatttcagatcctaccaaggcttcaagaagaagggagcgtggtgagagggttcttgaggaaagattggcggccgacaatgctggtgacacagaggcctcgcctcgtggccatggccatggcaccgcggaagactaagaactttctcgcgacccatcagcgcctcttataggagccatggccgcccatggctttgctccctccagcgtttatagctctgcacttttgtcttctggagatggaactattcagttcacagcgaaccaataatatgatgttcttagtttctcttttattttatttttcgcttctttgtccgcgaagatttattggttaaattgtgtactagtagtcaattgttataatacagtgaaaaggagaggagagggtggtggcatttgcagccgattatttgttactggtcaaaattctgtactagtcatatactcttactcatatatagaaacaagaatggctttgtcagaataaaaaaaaaaaaaaataatatttttccttttaaagaaaaaaaaaaaaaaaaaaaaagcggccaaaaaaaa

SEQ ID NO: 149358 - DNA, 395 bp, Zea mays
  Clone ID: MRT4577_6773C.1
attcggctcgagttagggcctaggcgtttcggatccggccgggggagctggctagctagctagttaggggcggctacacacacacacacgcgcggagatgggcgccggatccgcggcgcacctgagagaggtgtatagtacgtccccccttcctatcctctacctgtttgatagtgcgatccttaacttatactgtgatgtatatgtattgcgagggggaaaaatgattggatggacaccgaacgaggctaccatggagggtgaaggatatgagttgaacgagaggctgatctagaaaaaaattcttccaggtacgaggacgacgagcggccatctgcgtccaaagagagagagagaggaggacgaaccgaatcctgcgatgactacgatgatga

SEQ ID NO: 149359 - DNA, 315 bp, Zea mays
  Clone ID: MRT4577_67740C.1
ggaagtaacagagcacgttgtagctagcagtacacattccattcattacgcgctggcaaaacatgcatatggggaaaagaaagtacagtactacacataccaactaggcactactatttactagggggggcgggatatatatatcactcactccataacatagggcaacttaaacgggggggtctttattctcaaacaccagccgaacaagaacaacaattcccaaacacaagccttttttttttggggggactagctttaatagagcatgcctgcgttttagataaccacaaggaccagcaaacatgggctgac

SEQ ID NO: 149360 - DNA, 377 bp, Zea mays
  Clone ID: MRT4577_67741C.1
atccaattcgagcccatctctctatttcatgtccttcatcctccgcagacttttctttaccacatctcccacaatgagctagaccgcccagaataaggttcagcaactgattgatgacaacggtgtcgtcgtcttcagcaagagctactgcccgtactgcaacaacacgaagcggctcctcgacggctacggtgccaagtatgccacgtacgaactgaaccaggagagcgacggcgacgacctccagcaggcgttgctcaagatcacgggccagcgcaccgttcccaacgtcttcatcaacaagcagcatattggtggcaactcggactttgaggcggttattaagaacggcaaggacggcaagaagattgaggagc

SEQ ID NO: 149361 - DNA, 382 bp, Zea mays
  Clone ID: MRT4577_67742C.1
gggggccaaaaataaaaccgtttttttttttttttgaaaaaaatttttggggggggggggaaaaaacaaagcgggttccggattacaggaacaccccttttttgaagtaaccccacccccaccacctttttttccttaattttaaacttttacttaccaaaaggaagcagtttccaagggccgggaagggacttatttttgggaaccattaaattacacacccttgcggtaaaaaattaaacaggtgtttgttttttttccccggaactatttaatttggtcccccgcccgccggttctatggttagcccaaaaagggggggggtttttttttgcgggtgggcttcttggggtccttggggcgcttttttttttttgggggg

SEQ ID NO: 149362 - DNA, 781 bp, Zea mays
  unsure (1)..(781): unsure at all n locations
  Clone ID: MRT4577_67743C.1
tgggtacctcgaggccggccgggtggtttgtcatctgctctggtgtctgacagggatcgtgtgttcactagtgcattgtggaaaactttgttctctatggctggggtttctttgcacatgagttccgcgtatcaccctcagtcggatggtcagactgagcgggttaatcaatgtttggaaacgtttttgagatgctttgtccatgcttgtccccacaagtggagtgagtggattcacttggccgagttttggtataataccagttggcattcagctttgacttattctccttttgaggtgctgtatggttattctcctcggcattttggtgttgatgttctatcagcttgtccagtgccctcgctgtcggattggattcaagagaaggccatcatgactgacttaatacagcagcatttgaagcgtgcccaacatcggatgaaacagcaagctgacaaaaatcgtgtggaacgccagttttcggttggtgatcttgtctttctgaagttacagccttatgtccaaacttcagtggctcgacgatcttgtcagaaattggcatttcgctattttggtccctaccgggtcttggccaagattgggtcagtggcttataagttggagcttcctgctacttcggctattcatcctatttttcatgtatctcaattaaaaagagttgtcggtccaacggttgctgtcgnccagttgcctgatcagttggaagggtgtcagattcctgttcatgtgctgaaacagcgtgtgggtactgatgggcaag

SEQ ID NO: 149363 - DNA, 259 bp, Zea mays
  unsure (1)..(259): unsure at all n locations
  Clone ID: MRT4577_67744C.1
atttgctgaacgtattttgagtttcgtttttcagtttcttgaggaagaacatattcaagtccatcgtggtctgaactatagacccacattctgtgcaaattcagtgctgtttatctaatctctgatcttttccaccaagggcactgaacagatctttgaagcaattgttgcagtcatgatattatctgcaatttggatagataatgcacactgcggtatcagtttatanacttcttacatgcctgaaggattacatacc

SEQ ID NO: 149364 - DNA, 397 bp, Zea mays
  unsure (1)..(397): unsure at all n locations
  Clone ID: MRT4577_67745C.1
gccgggcccaattagaacaatactaatttgttgtttccgggcggagggtggcccttccttgattatgacccgtgcccccctttagggtccttttcaggggcggtgggtttaactttccccaggaaacaactgggggggggggggggggcggcaggttttctttttccccccctttttttgggacctgggggtggggggcacccttttttttccgggggccccgagggggttgccccagttttttaacgggcccccccccgtggccagccccttgtttatgtaaccccggttggggggcatggggagcccccccctcttgttctccttgagctggggctcnttcttttccttttctttcttgcctcccccccccggcttgaaaaggggccccccccgg

SEQ ID NO: 149365 - DNA, 304 bp, Zea mays
  unsure (1)..(304): unsure at all n locations
  Clone ID: MRT4577_67746C.1
gacgacgagacngggcacaagcacgggacaggacaaaactttttttttttgnnnngngcngncanganngnngcngngaaaccctccgcagagggaaaaggacaccccccccctccatggatccactgaaagcgggcggtggtggcgtcacttgcgaggcctatagactattaaggcgcttaatgtttgcgagagaactttggcctgttgggtggcacaggttgtgcactggcngttggcgtttggttgctgctgctggggtgggaccagcgggggtgcctccgttggtgggtgggggtgggtg

SEQ ID NO: 149366 - DNA, 279 bp, Zea mays
  Clone ID: MRT4577_67747C.1
gtcactggtgcaaacattttctttggaaaactgggcaccacaaaaaatttttggggtttttttttttatttgaaccccaactaacccttggtcggtttggggtaaccttttgggaacaaagggggttttaatgctttaacccctttaaagttttcgccaaataggaaaaaaaaggggtgccataaagcctccaattttcaaacaaagttttggaccccttccgagggattaaaccaatccccgttttagcacaaacctcctaaaaattgatcccccaaa

SEQ ID NO: 149367 - DNA, 430 bp, Zea mays
  Clone ID: MRT4577_67748C.1
ggaaaaaaacctttcccaaggacaaacacgggtataaaaaaacggggggaaaaaaaaaaaggtttaaaaaaaatttttaggggaaaaaaccggccttttcgctggtgcctgaatgcccggggcccccgacgagcccagaacaaacataaagggtgtatttaggagtctaaaggggggtatttgtttttaaacaggggggggccctccttggggttggaccaagggtacttaagggggggaaccctcggaaacttcctgaagttgacaaagggcccccaaaacaaaatccttgggaaaaaaagggagggaaaaaaaaactggagggacctttccacaaattcgcgcttggaccacctaagcctaatccaattaaagaacaccgggggggccaccaggaagtaaaaaaaggggaacaccgggagggggggga

SEQ ID NO: 149368 - DNA, 213 bp, Zea mays
  Clone ID: MRT4577_67749C.1
cccacgcgtccgattaggtgtggataactacctagaaccagacccacggggggggggactcgtgggtttggatacatccacacgagcccgttggtccctgtaggccattccattctgcacatactatgacacacttttcagaacactaaaccgttgacttcacttgagttagagacacaaaaaggccttcctggttaatggcactgccaaaga

SEQ ID NO: 149369 - DNA, 295 bp, Zea mays
  Clone ID: MRT4577_6774C.1
ctcctccttattttaaaaagagggggtccctttttcaaagtctttatcacaaaaacattaccatggggccctgtattccaaaaaccatatttaaaaaaggaaccaatctcccggcaaccaccgggtttgccccttgcataatcatgcaccttgcattggcctaaattacggccgccgcattatttcccctaacatttgaccgggatacatggcccatcaaaaaccaaaaccaatttcaatcccgtaaaatagaaaatttttagttggccgcctttctctaacaagccccactaat

SEQ ID NO: 149370 - DNA, 189 bp, Zea mays
  Clone ID: MRT4577_67750C.1
tccaccctgaacgtgaagggcgaaagggctcgcacggcagggcccaagaaagcgcggcgggcgctgcggatacaagcagaccgtgccgcgaacttgtcagagcacgaggcccggatgcctctgcttggaacgctgtatgcttcgaactggcgcgagtgacggccaatctagcctcacgccgctgaagag

SEQ ID NO: 149371 - DNA, 1116 bp, Zea mays
  Clone ID: MRT4577_67751C.1
ttgggtacctcgaggccggatcgaggccggccgcgggggaggagaggaaaggagacgggaaacaaaaacacagcgcaggcagagagagacgtaaagccgccgcttcgtgcgcgtcgacgtcacctcgccgccggggggccagggctgtctcaccgcggtgtcccgtagggctcccttccctcgccggactgggcgggcgccggacggatcgggaggcgacgacctgaggggactggctgggatgaccgggaagaagcgcaaggcggaggcggcgcgcctggaggagacggaccaggcgctctacggggccttccggggcgccgcaaactcgctctcgcagctctacactctcgccatgggtgcgcagaaagcctcctttaacgccggcgaacgccacgccatggaaaaactttatgaatggatcctgaggcagcacgaaaatggtttgaggctaacagttgctgatgtagcttcccgtatccagcttgagattcagtatggaggtgacaatgcatcagcctctccaaggccacaataccctagccaaagcactgcacctacagtgcacatccccaacacaagcaaccagcaaccatcgccaagcttatttgctccaggaaaccctggtctgacacaatccaagaattccatggtcttttcaaacgcattatccagccccatccggcggagcctgcagccttaccacctagaacaggacggagacacagggtactttgtgaacggcgcaagccgcgacatgaaccccacggcttcgaacgattcatccatggacatgcactcggacagcccagttcatgactcctactgagcagctcccttcacggaaccggaagaacagcatttccagtcgaagaagtgccaggcctagtaggaatattcaatttaacaccttccgtagcctcttacactaagcgtgtgatgccttgtggcgttgttgctactacttaccacctgttgctttgccagaatactgaaatttgcatgtactatactgtaccatttgatttatctgtgcatattactagtgttggtacgtgacgagtgcaggaaacaaaccattggaaagaatttacaacgtgaacagtttgtgaggcc

SEQ ID NO: 149372 - DNA, 186 bp, Zea mays
  Clone ID: MRT4577_67752C.1
acgccgtgacccacgcgtccggtgtttccagaagtctaattgtcatgtcatttgtcactaagagcatactatgagaataaagctgagtaggtttgtatacacttataccgtgttactatgttagtgaaatagtgaagtaacatcatttgggaaccttgctatgacttatgagcttattctccttct

SEQ ID NO: 149373 - DNA, 245 bp, Zea mays
  Clone ID: MRT4577_67753C.1
cggacgcgtggggatcacactcgcagagagaaggaaaaatatccccaaaccctaagtcccgatctggagggcgaaccctcgcggctgctgcgacatgaccggcaagggagccccagggggccggatcgtgatggagctgtacaccaacgaggagcccaagaccgaggagaactttcggcgctgtgcactgacgagaagggcgtgggcaaattccagaaggcgattcactacaagggctacacctt

SEQ ID NO: 149374 - DNA, 288 bp, Zea mays
  Clone ID: MRT4577_67754C.1
gtcgggcataaaaggcttcgcggcccagggctcacttggcgctgagaacgcgggtccacgcgtgtgatcgtccgtgcgtctagcctttgcccacgcagctttcagtcatggcctccggtaacgcgcgcatcggaaagccagcccctgacttcaaggccacagcggtggttcatcggcgccttcaaagaggtgaagctgtcggactacaaagggaagtacgtggtcctctttttctaccctctggacttcacttttgtgtgccccaccgagatcatcgcgttcagcaac

SEQ ID NO: 149375 - DNA, 360 bp, Zea mays
  unsure (1)..(360): unsure at all n locations
  Clone ID: MRT4577_67755C.1
ggggggggggnnnagaaaannnnnnnnaanagcacagcaagnngcattaaccaaggcggcnnnccgacannnncaacncacnacagnngcncnannagacgacancacnncancaacnaaagaagggaaaaggcganagnnnaannacaagacgagggaangggaaacaaaaaaaaangaagacnacnnncncgancanncnngnnancaagaaggcgaagggcggcacagcacaggacaacagcaagcngnngaaaacccgccangaacgaaaaggccanacaagaaacncancganccagaaaancnnngcagcagaacaacggngngcngcangggngaaggaccagcaagcncgaa

SEQ ID NO: 149376 - DNA, 261 bp, Zea mays
  Clone ID: MRT4577_67756C.1
ctgccaacattatataatttaacaaattttgaactaagcgggaaaataaaagtcatgatactatggaatgtaacaaacaagttcttataagataaccgggtgcagcagtgaacagacgaattgtgcgatattgagcttgaatgacattccggttaaagtaccatgtattttaagttcctggggagcgaacattttttatgttttctccagggttgaaaatgcaattgcgtgcatagaatgaatgccttggggtgcagccac

SEQ ID NO: 149377 - DNA, 332 bp, Zea mays
  Clone ID: MRT4577_67757C.1
aggggaccggcatcgacaagcctcatctgcactacattttgtttgacacatcgaggtgaagtttcttgcactctggactttgaagtcgcgaacgaaacactgtgaagcataccgtgctgcgctatgacatggttcttgaccgctgcgcagctacaccaaatgcacccacctacacctagtcttggtgaattaccaggagggtgacccccttaatatctctgggaactttaataatggagtgccggtcagcaaggccctgtagaagaaaatacgcacacaaaagttaaatattcgaagccatctaattgccccacaaatgcggtgtgagaacc
